United States Patent Application Publication US 2008/0113351 A1 - sequence listing, part 6

SEQ ID NO: 125357 - DNA, 19 bp, Homo sapiens
  siRNA target sequence for NBEA (NM_015678.2,2630-2648).
cacatacaacacactttat

SEQ ID NO: 125358 - DNA, 19 bp, Homo sapiens
  siRNA target sequence for NBEA (NM_015678.2,2632-2650).
catacaacacactttatga

SEQ ID NO: 125359 - DNA, 19 bp, Homo sapiens
  siRNA target sequence for NBEA (NM_015678.2,2651-2669).
gatcttgacagaacaagta

SEQ ID NO: 125360 - DNA, 19 bp, Homo sapiens
  siRNA target sequence for NBEA (NM_015678.2,2654-2672).
cttgacagaacaagtatgt

SEQ ID NO: 125361 - DNA, 19 bp, Homo sapiens
  siRNA target sequence for NBEA (NM_015678.2,2671-2689).
gtactcaggtcgtacacaa

SEQ ID NO: 125362 - DNA, 19 bp, Homo sapiens
  siRNA target sequence for NBEA (NM_015678.2,2745-2763).
gtggtggcaactttgttaa

SEQ ID NO: 125363 - DNA, 19 bp, Homo sapiens
  siRNA target sequence for NBEA (NM_015678.2,2747-2765).
ggtggcaactttgttaaaa

SEQ ID NO: 125364 - DNA, 19 bp, Homo sapiens
  siRNA target sequence for NBEA (NM_015678.2,2789-2807).
gatggaagttcgtcgttta

SEQ ID NO: 125365 - DNA, 19 bp, Homo sapiens
  siRNA target sequence for NBEA (NM_015678.2,2796-2814).
gttcgtcgtttatttttat

SEQ ID NO: 125366 - DNA, 19 bp, Homo sapiens
  siRNA target sequence for NBEA (NM_015678.2,2905-2923).
gctatatcaatcctaaaaa

SEQ ID NO: 125367 - DNA, 19 bp, Homo sapiens
  siRNA target sequence for NBEA (NM_015678.2,2957-2975).
caatatcttccggattctt

SEQ ID NO: 125368 - DNA, 19 bp, Homo sapiens
  siRNA target sequence for NBEA (NM_015678.2,3019-3037).
gggtggataccctctcaat

SEQ ID NO: 125369 - DNA, 19 bp, Homo sapiens
  siRNA target sequence for NBEA (NM_015678.2,3020-3038).
ggtggataccctctcaata

SEQ ID NO: 125370 - DNA, 19 bp, Homo sapiens
  siRNA target sequence for NBEA (NM_015678.2,3176-3194).
gacaacaggagcaaaaggt

SEQ ID NO: 125371 - DNA, 19 bp, Homo sapiens
  siRNA target sequence for NBEA (NM_015678.2,3212-3230).
gatagaagatctttcacaa

SEQ ID NO: 125372 - DNA, 19 bp, Homo sapiens
  siRNA target sequence for NBEA (NM_015678.2,3260-3278).
ccctgtcagcacagatact

SEQ ID NO: 125373 - DNA, 19 bp, Homo sapiens
  siRNA target sequence for NBEA (NM_015678.2,3279-3297).
cgagacttactcatgtcaa

SEQ ID NO: 125374 - DNA, 19 bp, Homo sapiens
  siRNA target sequence for NBEA (NM_015678.2,3307-3325).
cagatgatattcttggaaa

SEQ ID NO: 125375 - DNA, 19 bp, Homo sapiens
  siRNA target sequence for NBEA (NM_015678.2,3309-3327).
gatgatattcttggaaatt

SEQ ID NO: 125376 - DNA, 19 bp, Homo sapiens
  siRNA target sequence for NBEA (NM_015678.2,3337-3355).
caggaagtggtgtacatgt

SEQ ID NO: 125377 - DNA, 19 bp, Homo sapiens
  siRNA target sequence for NBEA (NM_015678.2,3346-3364).
gtgtacatgtggaagtaca

SEQ ID NO: 125378 - DNA, 19 bp, Homo sapiens
  siRNA target sequence for NBEA (NM_015678.2,3416-3434).
gctcgatgatatggattta

SEQ ID NO: 125379 - DNA, 19 bp, Homo sapiens
  siRNA target sequence for NBEA (NM_015678.2,3419-3437).
cgatgatatggatttatca

SEQ ID NO: 125380 - DNA, 19 bp, Homo sapiens
  siRNA target sequence for NBEA (NM_015678.2,3468-3486).
gcccttgtggaggttgaat

SEQ ID NO: 125381 - DNA, 19 bp, Homo sapiens
  siRNA target sequence for NBEA (NM_015678.2,3480-3498).
gttgaatctctgttggata

SEQ ID NO: 125382 - DNA, 19 bp, Homo sapiens
  siRNA target sequence for NBEA (NM_015678.2,3615-3633).
gaagaccttcccaatagta

SEQ ID NO: 125383 - DNA, 19 bp, Homo sapiens
  siRNA target sequence for NBEA (NM_015678.2,3618-3636).
gaccttcccaatagtagta

SEQ ID NO: 125384 - DNA, 19 bp, Homo sapiens
  siRNA target sequence for NBEA (NM_015678.2,3620-3638).
ccttcccaatagtagtaca

SEQ ID NO: 125385 - DNA, 19 bp, Homo sapiens
  siRNA target sequence for NBEA (NM_015678.2,3621-3639).
cttcccaatagtagtacat

SEQ ID NO: 125386 - DNA, 19 bp, Homo sapiens
  siRNA target sequence for NBEA (NM_015678.2,3624-3642).
cccaatagtagtacatcat

SEQ ID NO: 125387 - DNA, 19 bp, Homo sapiens
  siRNA target sequence for NBEA (NM_015678.2,3625-3643).
ccaatagtagtacatcatt

SEQ ID NO: 125388 - DNA, 19 bp, Homo sapiens
  siRNA target sequence for NBEA (NM_015678.2,3631-3649).
gtagtacatcatttctctt

SEQ ID NO: 125389 - DNA, 19 bp, Homo sapiens
  siRNA target sequence for NBEA (NM_015678.2,3722-3740).
ggacacacaagtacatctt

SEQ ID NO: 125390 - DNA, 19 bp, Homo sapiens
  siRNA target sequence for NBEA (NM_015678.2,3776-3794).
gaccggtagcgtagactta

SEQ ID NO: 125391 - DNA, 19 bp, Homo sapiens
  siRNA target sequence for NBEA (NM_015678.2,3779-3797).
cggtagcgtagacttaact

SEQ ID NO: 125392 - DNA, 19 bp, Homo sapiens
  siRNA target sequence for NBEA (NM_015678.2,3780-3798).
ggtagcgtagacttaactt

SEQ ID NO: 125393 - DNA, 19 bp, Homo sapiens
  siRNA target sequence for NBEA (NM_015678.2,3785-3803).
cgtagacttaacttgtaca

SEQ ID NO: 125394 - DNA, 19 bp, Homo sapiens
  siRNA target sequence for NBEA (NM_015678.2,3796-3814).
cttgtacatccagtataat

SEQ ID NO: 125395 - DNA, 19 bp, Homo sapiens
  siRNA target sequence for NBEA (NM_015678.2,3799-3817).
gtacatccagtataataga

SEQ ID NO: 125396 - DNA, 19 bp, Homo sapiens
  siRNA target sequence for NBEA (NM_015678.2,3802-3820).
catccagtataatagaaga

SEQ ID NO: 125397 - DNA, 19 bp, Homo sapiens
  siRNA target sequence for NBEA (NM_015678.2,3825-3843).
gaattcaaaatccatacaa

SEQ ID NO: 125398 - DNA, 19 bp, Homo sapiens
  siRNA target sequence for NBEA (NM_015678.2,3849-3867).
gatggaatgagcagtattt

SEQ ID NO: 125399 - DNA, 19 bp, Homo sapiens
  siRNA target sequence for NBEA (NM_015678.2,3876-3894).
gacttagcgtcatcaacta

SEQ ID NO: 125400 - DNA, 19 bp, Homo sapiens
  siRNA target sequence for NBEA (NM_015678.2,3900-3918).
ctggagtatgctgaaatga

SEQ ID NO: 125401 - DNA, 19 bp, Homo sapiens
  siRNA target sequence for NBEA (NM_015678.2,3902-3920).
ggagtatgctgaaatgact

SEQ ID NO: 125402 - DNA, 19 bp, Homo sapiens
  siRNA target sequence for NBEA (NM_015678.2,3932-3950).
ggaaactgagtcttctagt

SEQ ID NO: 125403 - DNA, 19 bp, Homo sapiens
  siRNA target sequence for NBEA (NM_015678.2,3933-3951).
gaaactgagtcttctagta

SEQ ID NO: 125404 - DNA, 19 bp, Homo sapiens
  siRNA target sequence for NBEA (NM_015678.2,3972-3990).
gatgcaggaagtataattt

SEQ ID NO: 125405 - DNA, 19 bp, Homo sapiens
  siRNA target sequence for NBEA (NM_015678.2,4004-4022).
gtctgacgatggcaaagaa

SEQ ID NO: 125406 - DNA, 19 bp, Homo sapiens
  siRNA target sequence for NBEA (NM_015678.2,4071-4089).
gtgcagggtcggtctatca

SEQ ID NO: 125407 - DNA, 19 bp, Homo sapiens
  siRNA target sequence for NBEA (NM_015678.2,4081-4099).
ggtctatcacccaacaaga

SEQ ID NO: 125408 - DNA, 19 bp, Homo sapiens
  siRNA target sequence for NBEA (NM_015678.2,4100-4118).
ccgagatctccgagttgat

SEQ ID NO: 125409 - DNA, 19 bp, Homo sapiens
  siRNA target sequence for NBEA (NM_015678.2,4101-4119).
cgagatctccgagttgatt

SEQ ID NO: 125410 - DNA, 19 bp, Homo sapiens
  siRNA target sequence for NBEA (NM_015678.2,4102-4120).
gagatctccgagttgattt

SEQ ID NO: 125411 - DNA, 19 bp, Homo sapiens
  siRNA target sequence for NBEA (NM_015678.2,4107-4125).
ctccgagttgatttaggat

SEQ ID NO: 125412 - DNA, 19 bp, Homo sapiens
  siRNA target sequence for NBEA (NM_015678.2,4109-4127).
ccgagttgatttaggattt

SEQ ID NO: 125413 - DNA, 19 bp, Homo sapiens
  siRNA target sequence for NBEA (NM_015678.2,4170-4188).
ccaggtccacggactacaa

SEQ ID NO: 125414 - DNA, 19 bp, Homo sapiens
  siRNA target sequence for NBEA (NM_015678.2,4171-4189).
caggtccacggactacaat

SEQ ID NO: 125415 - DNA, 19 bp, Homo sapiens
  siRNA target sequence for NBEA (NM_015678.2,4173-4191).
ggtccacggactacaatgt

SEQ ID NO: 125416 - DNA, 19 bp, Homo sapiens
  siRNA target sequence for NBEA (NM_015678.2,4174-4192).
gtccacggactacaatgtt

SEQ ID NO: 125417 - DNA, 19 bp, Homo sapiens
  siRNA target sequence for NBEA (NM_015678.2,4179-4197).
cggactacaatgtttcgta

SEQ ID NO: 125418 - DNA, 19 bp, Homo sapiens
  siRNA target sequence for NBEA (NM_015678.2,4180-4198).
ggactacaatgtttcgtat

SEQ ID NO: 125419 - DNA, 19 bp, Homo sapiens
  siRNA target sequence for NBEA (NM_015678.2,4227-4245).
cagcggcttctcactgatt

SEQ ID NO: 125420 - DNA, 19 bp, Homo sapiens
  siRNA target sequence for NBEA (NM_015678.2,4260-4278).
gaaactgatgtacatgttt

SEQ ID NO: 125421 - DNA, 19 bp, Homo sapiens
  siRNA target sequence for NBEA (NM_015678.2,4275-4293).
gtttggaggagccattcta

SEQ ID NO: 125422 - DNA, 19 bp, Homo sapiens
  siRNA target sequence for NBEA (NM_015678.2,4302-4320).
gtaatggattttgtcaata

SEQ ID NO: 125423 - DNA, 19 bp, Homo sapiens
  siRNA target sequence for NBEA (NM_015678.2,4396-4414).
gtggaggaattttaccttt

SEQ ID NO: 125424 - DNA, 19 bp, Homo sapiens
  siRNA target sequence for NBEA (NM_015678.2,4488-4506).
gctgagacagcagtaactt

SEQ ID NO: 125425 - DNA, 19 bp, Homo sapiens
  siRNA target sequence for NBEA (NM_015678.2,4489-4507).
ctgagacagcagtaacttt

SEQ ID NO: 125426 - DNA, 19 bp, Homo sapiens
  siRNA target sequence for NBEA (NM_015678.2,4514-4532).
ccggctgatggctatggtt

SEQ ID NO: 125427 - DNA, 19 bp, Homo sapiens
  siRNA target sequence for NBEA (NM_015678.2,4520-4538).
gatggctatggttgatgta

SEQ ID NO: 125428 - DNA, 19 bp, Homo sapiens
  siRNA target sequence for NBEA (NM_015678.2,4525-4543).
ctatggttgatgtacttgt

SEQ ID NO: 125429 - DNA, 19 bp, Homo sapiens
  siRNA target sequence for NBEA (NM_015678.2,4542-4560).
gtgtttgcaagctctctaa

SEQ ID NO: 125430 - DNA, 19 bp, Homo sapiens
  siRNA target sequence for NBEA (NM_015678.2,4544-4562).
gtttgcaagctctctaaat

SEQ ID NO: 125431 - DNA, 19 bp, Homo sapiens
  siRNA target sequence for NBEA (NM_015678.2,4589-4607).
catgtcttctggaggttta

SEQ ID NO: 125432 - DNA, 19 bp, Homo sapiens
  siRNA target sequence for NBEA (NM_015678.2,4610-4628).
gcgacagtgcctaagatta

SEQ ID NO: 125433 - DNA, 19 bp, Homo sapiens
  siRNA target sequence for NBEA (NM_015678.2,4614-4632).
cagtgcctaagattagttt

SEQ ID NO: 125434 - DNA, 19 bp, Homo sapiens
  siRNA target sequence for NBEA (NM_015678.2,4616-4634).
gtgcctaagattagtttgt

SEQ ID NO: 125435 - DNA, 19 bp, Homo sapiens
  siRNA target sequence for NBEA (NM_015678.2,4646-4664).
gagaaactgtttagaatgt

SEQ ID NO: 125436 - DNA, 19 bp, Homo sapiens
  siRNA target sequence for NBEA (NM_015678.2,4802-4820).
ggatccggatagacttctt

SEQ ID NO: 125437 - DNA, 19 bp, Homo sapiens
  siRNA target sequence for NBEA (NM_015678.2,4813-4831).
gacttcttcaggatgttga

SEQ ID NO: 125438 - DNA, 19 bp, Homo sapiens
  siRNA target sequence for NBEA (NM_015678.2,4815-4833).
cttcttcaggatgttgata

SEQ ID NO: 125439 - DNA, 19 bp, Homo sapiens
  siRNA target sequence for NBEA (NM_015678.2,4861-4879).
gggatgtggatgatagcaa

SEQ ID NO: 125440 - DNA, 19 bp, Homo sapiens
  siRNA target sequence for NBEA (NM_015678.2,4936-4954).
ccaagtatcgtgacatatt

SEQ ID NO: 125441 - DNA, 19 bp, Homo sapiens
  siRNA target sequence for NBEA (NM_015678.2,4937-4955).
caagtatcgtgacatatta

SEQ ID NO: 125442 - DNA, 19 bp, Homo sapiens
  siRNA target sequence for NBEA (NM_015678.2,4940-4958).
gtatcgtgacatattagaa

SEQ ID NO: 125443 - DNA, 19 bp, Homo sapiens
  siRNA target sequence for NBEA (NM_015678.2,4959-4977).
ccccagagagagactacaa

SEQ ID NO: 125444 - DNA, 19 bp, Homo sapiens
  siRNA target sequence for NBEA (NM_015678.2,4989-5007).
caaccaggtagaaacatca

SEQ ID NO: 125445 - DNA, 19 bp, Homo sapiens
  siRNA target sequence for NBEA (NM_015678.2,5053-5071).
ctatccctcatccaagttt

SEQ ID NO: 125446 - DNA, 19 bp, Homo sapiens
  siRNA target sequence for NBEA (NM_015678.2,5079-5097).
ggattccttgccaagttaa

SEQ ID NO: 125447 - DNA, 19 bp, Homo sapiens
  siRNA target sequence for NBEA (NM_015678.2,5080-5098).
gattccttgccaagttaat

SEQ ID NO: 125448 - DNA, 19 bp, Homo sapiens
  siRNA target sequence for NBEA (NM_015678.2,5145-5163).
gcatttccagacaccataa

SEQ ID NO: 125449 - DNA, 19 bp, Homo sapiens
  siRNA target sequence for NBEA (NM_015678.2,5179-5197).
caactcctggtgaagatat

SEQ ID NO: 125450 - DNA, 19 bp, Homo sapiens
  siRNA target sequence for NBEA (NM_015678.2,5209-5227).
gttcaattccccatacaga

SEQ ID NO: 125451 - DNA, 19 bp, Homo sapiens
  siRNA target sequence for NBEA (NM_015678.2,5219-5237).
ccatacagattcaggaatt

SEQ ID NO: 125452 - DNA, 19 bp, Homo sapiens
  siRNA target sequence for NBEA (NM_015678.2,5301-5319).
gccatgagtgaactcttat

SEQ ID NO: 125453 - DNA, 19 bp, Homo sapiens
  siRNA target sequence for NBEA (NM_015678.2,5323-5341).
ctttgtcatccgaagtgaa

SEQ ID NO: 125454 - DNA, 19 bp, Homo sapiens
  siRNA target sequence for NBEA (NM_015678.2,5384-5402).
gaagcctgcaacatccata

SEQ ID NO: 125455 - DNA, 19 bp, Homo sapiens
  siRNA target sequence for NBEA (NM_015678.2,5387-5405).
gcctgcaacatccatatct

SEQ ID NO: 125456 - DNA, 19 bp, Homo sapiens
  siRNA target sequence for NBEA (NM_015678.2,5388-5406).
cctgcaacatccatatcta

SEQ ID NO: 125457 - DNA, 19 bp, Homo sapiens
  siRNA target sequence for NBEA (NM_015678.2,5404-5422).
ctagcattagtcaaaccaa

SEQ ID NO: 125458 - DNA, 19 bp, Homo sapiens
  siRNA target sequence for NBEA (NM_015678.2,5662-5680).
caggcagtacctctaatat

SEQ ID NO: 125459 - DNA, 19 bp, Homo sapiens
  siRNA target sequence for NBEA (NM_015678.2,5694-5712).
ggagctacaccaaaaagta

SEQ ID NO: 125460 - DNA, 19 bp, Homo sapiens
  siRNA target sequence for NBEA (NM_015678.2,5695-5713).
gagctacaccaaaaagtat

SEQ ID NO: 125461 - DNA, 19 bp, Homo sapiens
  siRNA target sequence for NBEA (NM_015678.2,5697-5715).
gctacaccaaaaagtatga

SEQ ID NO: 125462 - DNA, 19 bp, Homo sapiens
  siRNA target sequence for NBEA (NM_015678.2,5701-5719).
caccaaaaagtatgattaa

SEQ ID NO: 125463 - DNA, 19 bp, Homo sapiens
  siRNA target sequence for NBEA (NM_015678.2,5758-5776).
cctcctcttctagttttgt

SEQ ID NO: 125464 - DNA, 19 bp, Homo sapiens
  siRNA target sequence for NBEA (NM_015678.2,5777-5795).
gaatggtgctactagcaaa

SEQ ID NO: 125465 - DNA, 19 bp, Homo sapiens
  siRNA target sequence for NBEA (NM_015678.2,5782-5800).
gtgctactagcaaaaacct

SEQ ID NO: 125466 - DNA, 19 bp, Homo sapiens
  siRNA target sequence for NBEA (NM_015678.2,5933-5951).
cctatctcgtacacttctt

SEQ ID NO: 125467 - DNA, 19 bp, Homo sapiens
  siRNA target sequence for NBEA (NM_015678.2,5962-5980).
gacaagagctattgataga

SEQ ID NO: 125468 - DNA, 19 bp, Homo sapiens
  siRNA target sequence for NBEA (NM_015678.2,5975-5993).
gatagaaggccttgtttgt

SEQ ID NO: 125469 - DNA, 19 bp, Homo sapiens
  siRNA target sequence for NBEA (NM_015678.2,5982-6000).
ggccttgtttgtatgaagt

SEQ ID NO: 125470 - DNA, 19 bp, Homo sapiens
  siRNA target sequence for NBEA (NM_015678.2,6010-6028).
ctgtggttgagcttgttat

SEQ ID NO: 125471 - DNA, 19 bp, Homo sapiens
  siRNA target sequence for NBEA (NM_015678.2,6082-6100).
catttattgagctcatcaa

SEQ ID NO: 125472 - DNA, 19 bp, Homo sapiens
  siRNA target sequence for NBEA (NM_015678.2,6109-6127).
gattactgtgccatgctat

SEQ ID NO: 125473 - DNA, 19 bp, Homo sapiens
  siRNA target sequence for NBEA (NM_015678.2,6184-6202).
gagccgaggatgtacataa

SEQ ID NO: 125474 - DNA, 19 bp, Homo sapiens
  siRNA target sequence for NBEA (NM_015678.2,6188-6206).
cgaggatgtacataaacat

SEQ ID NO: 125475 - DNA, 19 bp, Homo sapiens
  siRNA target sequence for NBEA (NM_015678.2,6289-6307).
ctaaacatcgagatcatgt

SEQ ID NO: 125476 - DNA, 19 bp, Homo sapiens
  siRNA target sequence for NBEA (NM_015678.2,6433-6451).
gtcgaaggagacgatttgt

SEQ ID NO: 125477 - DNA, 19 bp, Homo sapiens
  siRNA target sequence for NBEA (NM_015678.2,6444-6462).
cgatttgttcgcaatgcat

SEQ ID NO: 125478 - DNA, 19 bp, Homo sapiens
  siRNA target sequence for NBEA (NM_015678.2,6445-6463).
gatttgttcgcaatgcatt

SEQ ID NO: 125479 - DNA, 19 bp, Homo sapiens
  siRNA target sequence for NBEA (NM_015678.2,6514-6532).
cggaagaagatgtagtaaa

SEQ ID NO: 125480 - DNA, 19 bp, Homo sapiens
  siRNA target sequence for NBEA (NM_015678.2,6544-6562).
cattcagaagtcaagcaat

SEQ ID NO: 125481 - DNA, 19 bp, Homo sapiens
  siRNA target sequence for NBEA (NM_015678.2,6577-6595).
cagagacagaacttatgct

SEQ ID NO: 125482 - DNA, 19 bp, Homo sapiens
  siRNA target sequence for NBEA (NM_015678.2,6776-6794).
gaagatcgacacgaaagtt

SEQ ID NO: 125483 - DNA, 19 bp, Homo sapiens
  siRNA target sequence for NBEA (NM_015678.2,6779-6797).
gatcgacacgaaagttctt

SEQ ID NO: 125484 - DNA, 19 bp, Homo sapiens
  siRNA target sequence for NBEA (NM_015678.2,6788-6806).
gaaagttcttgcatacact

SEQ ID NO: 125485 - DNA, 19 bp, Homo sapiens
  siRNA target sequence for NBEA (NM_015678.2,6811-6829).
gacttcacggaaaatggat

SEQ ID NO: 125486 - DNA, 19 bp, Homo sapiens
  siRNA target sequence for NBEA (NM_015678.2,6835-6853).
gcgagatacgagctgtatt

SEQ ID NO: 125487 - DNA, 19 bp, Homo sapiens
  siRNA target sequence for NBEA (NM_015678.2,6836-6854).
cgagatacgagctgtattt

SEQ ID NO: 125488 - DNA, 19 bp, Homo sapiens
  siRNA target sequence for NBEA (NM_015678.2,6837-6855).
gagatacgagctgtatttt

SEQ ID NO: 125489 - DNA, 19 bp, Homo sapiens
  siRNA target sequence for NBEA (NM_015678.2,6856-6874).
caagacgttaccttctaca

SEQ ID NO: 125490 - DNA, 19 bp, Homo sapiens
  siRNA target sequence for NBEA (NM_015678.2,6859-6877).
gacgttaccttctacaaaa

SEQ ID NO: 125491 - DNA, 19 bp, Homo sapiens
  siRNA target sequence for NBEA (NM_015678.2,6905-6923).
ccgaacctcagttatgttt

SEQ ID NO: 125492 - DNA, 19 bp, Homo sapiens
  siRNA target sequence for NBEA (NM_015678.2,6930-6948).
cctgatcaagcaacagtaa

SEQ ID NO: 125493 - DNA, 19 bp, Homo sapiens
  siRNA target sequence for NBEA (NM_015678.2,6943-6961).
cagtaaaaaaagttgtcta

SEQ ID NO: 125494 - DNA, 19 bp, Homo sapiens
  siRNA target sequence for NBEA (NM_015678.2,7027-7045).
ccactcctcgacagcttta

SEQ ID NO: 125495 - DNA, 19 bp, Homo sapiens
  siRNA target sequence for NBEA (NM_015678.2,7028-7046).
cactcctcgacagctttat

SEQ ID NO: 125496 - DNA, 19 bp, Homo sapiens
  siRNA target sequence for NBEA (NM_015678.2,7030-7048).
ctcctcgacagctttataa

SEQ ID NO: 125497 - DNA, 19 bp, Homo sapiens
  siRNA target sequence for NBEA (NM_015678.2,7032-7050).
cctcgacagctttataaat

SEQ ID NO: 125498 - DNA, 19 bp, Homo sapiens
  siRNA target sequence for NBEA (NM_015678.2,7035-7053).
cgacagctttataaatctt

SEQ ID NO: 125499 - DNA, 19 bp, Homo sapiens
  siRNA target sequence for NBEA (NM_015678.2,7040-7058).
gctttataaatcttccaat

SEQ ID NO: 125500 - DNA, 19 bp, Homo sapiens
  siRNA target sequence for NBEA (NM_015678.2,7083-7101).
gaaatttcaaacttcgaat

SEQ ID NO: 125501 - DNA, 19 bp, Homo sapiens
  siRNA target sequence for NBEA (NM_015678.2,7109-7127).
gttccttaatactattgca

SEQ ID NO: 125502 - DNA, 19 bp, Homo sapiens
  siRNA target sequence for NBEA (NM_015678.2,7132-7150).
ggacatataatgatctgaa

SEQ ID NO: 125503 - DNA, 19 bp, Homo sapiens
  siRNA target sequence for NBEA (NM_015678.2,7161-7179).
gtgtttccgtgggtgttaa

SEQ ID NO: 125504 - DNA, 19 bp, Homo sapiens
  siRNA target sequence for NBEA (NM_015678.2,7169-7187).
gtgggtgttaaccaactat

SEQ ID NO: 125505 - DNA, 19 bp, Homo sapiens
  siRNA target sequence for NBEA (NM_015678.2,7171-7189).
gggtgttaaccaactatga

SEQ ID NO: 125506 - DNA, 19 bp, Homo sapiens
  siRNA target sequence for NBEA (NM_015678.2,7172-7190).
ggtgttaaccaactatgaa

SEQ ID NO: 125507 - DNA, 19 bp, Homo sapiens
  siRNA target sequence for NBEA (NM_015678.2,7175-7193).
gttaaccaactatgaatca

SEQ ID NO: 125508 - DNA, 19 bp, Homo sapiens
  siRNA target sequence for NBEA (NM_015678.2,7325-7343).
ccattataatacccattat

SEQ ID NO: 125509 - DNA, 19 bp, Homo sapiens
  siRNA target sequence for NBEA (NM_015678.2,7366-7384).
cctggcttgttcgaattga

SEQ ID NO: 125510 - DNA, 19 bp, Homo sapiens
  siRNA target sequence for NBEA (NM_015678.2,7367-7385).
ctggcttgttcgaattgaa

SEQ ID NO: 125511 - DNA, 19 bp, Homo sapiens
  siRNA target sequence for NBEA (NM_015678.2,7377-7395).
cgaattgaacctttcacaa

SEQ ID NO: 125512 - DNA, 19 bp, Homo sapiens
  siRNA target sequence for NBEA (NM_015678.2,7458-7476).
gcaaggtcttggagaacta

SEQ ID NO: 125513 - DNA, 19 bp, Homo sapiens
  siRNA target sequence for NBEA (NM_015678.2,7481-7499).
gagagatacttctgatgta

SEQ ID NO: 125514 - DNA, 19 bp, Homo sapiens
  siRNA target sequence for NBEA (NM_015678.2,7506-7524).
ctaattccagagttctact

SEQ ID NO: 125515 - DNA, 19 bp, Homo sapiens
  siRNA target sequence for NBEA (NM_015678.2,7535-7553).
gatgtttgtcaacagtaat

SEQ ID NO: 125516 - DNA, 19 bp, Homo sapiens
  siRNA target sequence for NBEA (NM_015678.2,7538-7556).
gtttgtcaacagtaatgga

SEQ ID NO: 125517 - DNA, 19 bp, Homo sapiens
  siRNA target sequence for NBEA (NM_015678.2,7547-7565).
cagtaatggatataatctt

SEQ ID NO: 125518 - DNA, 19 bp, Homo sapiens
  siRNA target sequence for NBEA (NM_015678.2,7649-7667).
caggatggccctagaaagt

SEQ ID NO: 125519 - DNA, 19 bp, Homo sapiens
  siRNA target sequence for NBEA (NM_015678.2,7651-7669).
ggatggccctagaaagtga

SEQ ID NO: 125520 - DNA, 19 bp, Homo sapiens
  siRNA target sequence for NBEA (NM_015678.2,7652-7670).
gatggccctagaaagtgaa

SEQ ID NO: 125521 - DNA, 19 bp, Homo sapiens
  siRNA target sequence for NBEA (NM_015678.2,7692-7710).
cagtggatcgaccttatat

SEQ ID NO: 125522 - DNA, 19 bp, Homo sapiens
  siRNA target sequence for NBEA (NM_015678.2,7783-7801).
ctgtgaacctggatagtat

SEQ ID NO: 125523 - DNA, 19 bp, Homo sapiens
  siRNA target sequence for NBEA (NM_015678.2,7859-7877).
gccatctcagttgcttatt

SEQ ID NO: 125524 - DNA, 19 bp, Homo sapiens
  siRNA target sequence for NBEA (NM_015678.2,7924-7942).
cacagagtccgctcatgtt

SEQ ID NO: 125525 - DNA, 19 bp, Homo sapiens
  siRNA target sequence for NBEA (NM_015678.2,7926-7944).
cagagtccgctcatgttta

SEQ ID NO: 125526 - DNA, 19 bp, Homo sapiens
  siRNA target sequence for NBEA (NM_015678.2,7928-7946).
gagtccgctcatgtttaaa

SEQ ID NO: 125527 - DNA, 19 bp, Homo sapiens
  siRNA target sequence for NBEA (NM_015678.2,7930-7948).
gtccgctcatgtttaaaga

SEQ ID NO: 125528 - DNA, 19 bp, Homo sapiens
  siRNA target sequence for NBEA (NM_015678.2,7933-7951).
cgctcatgtttaaagatca

SEQ ID NO: 125529 - DNA, 19 bp, Homo sapiens
  siRNA target sequence for NBEA (NM_015678.2,7952-7970).
gatgcaacaggatgtgata

SEQ ID NO: 125530 - DNA, 19 bp, Homo sapiens
  siRNA target sequence for NBEA (NM_015678.2,8069-8087).
ccgactctttgcagtgaat

SEQ ID NO: 125531 - DNA, 19 bp, Homo sapiens
  siRNA target sequence for NBEA (NM_015678.2,8070-8088).
cgactctttgcagtgaata

SEQ ID NO: 125532 - DNA, 19 bp, Homo sapiens
  siRNA target sequence for NBEA (NM_015678.2,8216-8234).
cctcgttgaccagagtata

SEQ ID NO: 125533 - DNA, 19 bp, Homo sapiens
  siRNA target sequence for NBEA (NM_015678.2,8219-8237).
cgttgaccagagtatacaa

SEQ ID NO: 125534 - DNA, 19 bp, Homo sapiens
  siRNA target sequence for NBEA (NM_015678.2,8220-8238).
gttgaccagagtatacaaa

SEQ ID NO: 125535 - DNA, 19 bp, Homo sapiens
  siRNA target sequence for NBEA (NM_015678.2,8235-8253).
caaatcaatgcacattgtt

SEQ ID NO: 125536 - DNA, 19 bp, Homo sapiens
  siRNA target sequence for NBEA (NM_015678.2,8268-8286).
gataatcgctatattctta

SEQ ID NO: 125537 - DNA, 19 bp, Homo sapiens
  siRNA target sequence for NBEA (NM_015678.2,8385-8403).
gccaggtccgagtcataca

SEQ ID NO: 125538 - DNA, 19 bp, Homo sapiens
  siRNA target sequence for NBEA (NM_015678.2,8386-8404).
ccaggtccgagtcatacat

SEQ ID NO: 125539 - DNA, 19 bp, Homo sapiens
  siRNA target sequence for NBEA (NM_015678.2,8387-8405).
caggtccgagtcatacatt

SEQ ID NO: 125540 - DNA, 19 bp, Homo sapiens
  siRNA target sequence for NBEA (NM_015678.2,8675-8693).
cttattcccacgcttgata

SEQ ID NO: 125541 - DNA, 19 bp, Homo sapiens
  siRNA target sequence for NBEA (NM_015678.2,8701-8719).
ccagcgaaggccactgtat

SEQ ID NO: 125542 - DNA, 19 bp, Homo sapiens
  siRNA target sequence for NBEA (NM_015678.2,8706-8724).
gaaggccactgtatcatat

SEQ ID NO: 125543 - DNA, 19 bp, Homo sapiens
  siRNA target sequence for NBEA (NM_015678.2,8711-8729).
ccactgtatcatatactat

SEQ ID NO: 125544 - DNA, 19 bp, Homo sapiens
  siRNA target sequence for NBEA (NM_015678.2,8730-8748).
gaacgagggcgattcagta

SEQ ID NO: 125545 - DNA, 19 bp, Homo sapiens
  siRNA target sequence for NBEA (NM_015678.2,8733-8751).
cgagggcgattcagtaatt

SEQ ID NO: 125546 - DNA, 19 bp, Homo sapiens
  siRNA target sequence for NBEA (NM_015678.2,8736-8754).
gggcgattcagtaatttca

SEQ ID NO: 125547 - DNA, 19 bp, Homo sapiens
  siRNA target sequence for NBEA (NM_015678.2,8774-8792).
ggctcaaatggagatcaat

SEQ ID NO: 125548 - DNA, 19 bp, Homo sapiens
  siRNA target sequence for NBEA (NM_015678.2,8776-8794).
ctcaaatggagatcaatga

SEQ ID NO: 125549 - DNA, 19 bp, Homo sapiens
  siRNA target sequence for NBEA (NM_015678.2,8778-8796).
caaatggagatcaatgatt

SEQ ID NO: 125550 - DNA, 19 bp, Homo sapiens
  siRNA target sequence for NBEA (NM_015678.2,8848-8866).
gggacaatggggtagtaga

SEQ ID NO: 125551 - DNA, 19 bp, Homo sapiens
  siRNA target sequence for NBEA (NM_015678.2,8975-8993).
ggcttctggtagcattgta

SEQ ID NO: 125552 - DNA, 19 bp, Homo sapiens
  siRNA target sequence for NBEA (NM_015678.2,8986-9004).
gcattgtagcttttaatat

SEQ ID NO: 125553 - DNA, 19 bp, Homo sapiens
  siRNA target sequence for PTPRR (NM_002849.2,442-460).
cgctgtgcctgctccttaa

SEQ ID NO: 125554 - DNA, 19 bp, Homo sapiens
  siRNA target sequence for PTPRR (NM_002849.2,465-483).
cacgctgcagggtgctttt

SEQ ID NO: 125555 - DNA, 19 bp, Homo sapiens
  siRNA target sequence for PTPRR (NM_002849.2,476-494).
gtgcttttcaggaaacaat

SEQ ID NO: 125556 - DNA, 19 bp, Homo sapiens
  siRNA target sequence for PTPRR (NM_002849.2,495-513).
gatcattttttggcaatta

SEQ ID NO: 125557 - DNA, 19 bp, Homo sapiens
  siRNA target sequence for PTPRR (NM_002849.2,529-547).
ggaagccggtattcattta

SEQ ID NO: 125558 - DNA, 19 bp, Homo sapiens
  siRNA target sequence for PTPRR (NM_002849.2,530-548).
gaagccggtattcatttat

SEQ ID NO: 125559 - DNA, 19 bp, Homo sapiens
  siRNA target sequence for PTPRR (NM_002849.2,535-553).
cggtattcatttataagca

SEQ ID NO: 125560 - DNA, 19 bp, Homo sapiens
  siRNA target sequence for PTPRR (NM_002849.2,536-554).
ggtattcatttataagcat

SEQ ID NO: 125561 - DNA, 19 bp, Homo sapiens
  siRNA target sequence for PTPRR (NM_002849.2,537-555).
gtattcatttataagcatt

SEQ ID NO: 125562 - DNA, 19 bp, Homo sapiens
  siRNA target sequence for PTPRR (NM_002849.2,579-597).
gatatagccccacaaaaaa

SEQ ID NO: 125563 - DNA, 19 bp, Homo sapiens
  siRNA target sequence for PTPRR (NM_002849.2,585-603).
gccccacaaaaaatctaca

SEQ ID NO: 125564 - DNA, 19 bp, Homo sapiens
  siRNA target sequence for PTPRR (NM_002849.2,620-638).
ctcttccgaagctcaagta

SEQ ID NO: 125565 - DNA, 19 bp, Homo sapiens
  siRNA target sequence for PTPRR (NM_002849.2,625-643).
ccgaagctcaagtaagcaa

SEQ ID NO: 125566 - DNA, 19 bp, Homo sapiens
  siRNA target sequence for PTPRR (NM_002849.2,626-644).
cgaagctcaagtaagcaaa

SEQ ID NO: 125567 - DNA, 19 bp, Homo sapiens
  siRNA target sequence for PTPRR (NM_002849.2,645-663).
cgccaccagattgtcaatt

SEQ ID NO: 125568 - DNA, 19 bp, Homo sapiens
  siRNA target sequence for PTPRR (NM_002849.2,647-665).
ccaccagattgtcaattca

SEQ ID NO: 125569 - DNA, 19 bp, Homo sapiens
  siRNA target sequence for PTPRR (NM_002849.2,745-763).
caatcccagcagcaaatgt

SEQ ID NO: 125570 - DNA, 19 bp, Homo sapiens
  siRNA target sequence for PTPRR (NM_002849.2,775-793).
cactgcaaatggatgtaaa

SEQ ID NO: 125571 - DNA, 19 bp, Homo sapiens
  siRNA target sequence for PTPRR (NM_002849.2,859-877).
cccagcaagtgcacatcaa

SEQ ID NO: 125572 - DNA, 19 bp, Homo sapiens
  siRNA target sequence for PTPRR (NM_002849.2,860-878).
ccagcaagtgcacatcaat

SEQ ID NO: 125573 - DNA, 19 bp, Homo sapiens
  siRNA target sequence for PTPRR (NM_002849.2,879-897).
cgcctcattggaaagaaga

SEQ ID NO: 125574 - DNA, 19 bp, Homo sapiens
  siRNA target sequence for PTPRR (NM_002849.2,965-983).
ggaagttcttcgttcactt

SEQ ID NO: 125575 - DNA, 19 bp, Homo sapiens
  siRNA target sequence for PTPRR (NM_002849.2,993-1011).
gttttgcatcaaagtttat

SEQ ID NO: 125576 - DNA, 19 bp, Homo sapiens
  siRNA target sequence for PTPRR (NM_002849.2,1012-1030).
cccagtttggaattacaga

SEQ ID NO: 125577 - DNA, 19 bp, Homo sapiens
  siRNA target sequence for PTPRR (NM_002849.2,1013-1031).
ccagtttggaattacagaa

SEQ ID NO: 125578 - DNA, 19 bp, Homo sapiens
  siRNA target sequence for PTPRR (NM_002849.2,1034-1052).
ctctcctgagaaaaatgtt

SEQ ID NO: 125579 - DNA, 19 bp, Homo sapiens
  siRNA target sequence for PTPRR (NM_002849.2,1062-1080).
cagcatgaagcggacaaaa

SEQ ID NO: 125580 - DNA, 19 bp, Homo sapiens
  siRNA target sequence for PTPRR (NM_002849.2,1065-1083).
catgaagcggacaaaatct

SEQ ID NO: 125581 - DNA, 19 bp, Homo sapiens
  siRNA target sequence for PTPRR (NM_002849.2,1151-1169).
gatgattctttacagatta

SEQ ID NO: 125582 - DNA, 19 bp, Homo sapiens
  siRNA target sequence for PTPRR (NM_002849.2,1224-1242).
cacctatcgcccatcacat

SEQ ID NO: 125583 - DNA, 19 bp, Homo sapiens
  siRNA target sequence for PTPRR (NM_002849.2,1226-1244).
cctatcgcccatcacatta

SEQ ID NO: 125584 - DNA, 19 bp, Homo sapiens
  siRNA target sequence for PTPRR (NM_002849.2,1303-1321).
caaaggtactgaatgttgt

SEQ ID NO: 125585 - DNA, 19 bp, Homo sapiens
  siRNA target sequence for PTPRR (NM_002849.2,1400-1418).
gaagcccataggacttcaa

SEQ ID NO: 125586 - DNA, 19 bp, Homo sapiens
  siRNA target sequence for PTPRR (NM_002849.2,1426-1444).
gagggtccaacgtatctct

SEQ ID NO: 125587 - DNA, 19 bp, Homo sapiens
  siRNA target sequence for PTPRR (NM_002849.2,1428-1446).
gggtccaacgtatctctta

SEQ ID NO: 125588 - DNA, 19 bp, Homo sapiens
  siRNA target sequence for PTPRR (NM_002849.2,1432-1450).
ccaacgtatctcttacatt

SEQ ID NO: 125589 - DNA, 19 bp, Homo sapiens
  siRNA target sequence for PTPRR (NM_002849.2,1443-1461).
cttacattggacatgagta

SEQ ID NO: 125590 - DNA, 19 bp, Homo sapiens
  siRNA target sequence for PTPRR (NM_002849.2,1568-1586).
ggacgtcgtggcaagttca

SEQ ID NO: 125591 - DNA, 19 bp, Homo sapiens
  siRNA target sequence for PTPRR (NM_002849.2,1571-1589).
cgtcgtggcaagttcacat

SEQ ID NO: 125592 - DNA, 19 bp, Homo sapiens
  siRNA target sequence for PTPRR (NM_002849.2,1585-1603).
cacatttactccaaagtga

SEQ ID NO: 125593 - DNA, 19 bp, Homo sapiens
  siRNA target sequence for PTPRR (NM_002849.2,1653-1671).
ccgcgtcatggaactaaaa

SEQ ID NO: 125594 - DNA, 19 bp, Homo sapiens
  siRNA target sequence for PTPRR (NM_002849.2,1654-1672).
cgcgtcatggaactaaaaa

SEQ ID NO: 125595 - DNA, 19 bp, Homo sapiens
  siRNA target sequence for PTPRR (NM_002849.2,1676-1694).
ctataagaccattttacca

SEQ ID NO: 125596 - DNA, 19 bp, Homo sapiens
  siRNA target sequence for PTPRR (NM_002849.2,1741-1759).
cattgagcacctacattaa

SEQ ID NO: 125597 - DNA, 19 bp, Homo sapiens
  siRNA target sequence for PTPRR (NM_002849.2,1745-1763).
gagcacctacattaatgct

SEQ ID NO: 125598 - DNA, 19 bp, Homo sapiens
  siRNA target sequence for PTPRR (NM_002849.2,1872-1890).
cctgtgattgttatgatca

SEQ ID NO: 125599 - DNA, 19 bp, Homo sapiens
  siRNA target sequence for PTPRR (NM_002849.2,1923-1941).
ctatactggccggaaaaga

SEQ ID NO: 125600 - DNA, 19 bp, Homo sapiens
  siRNA target sequence for PTPRR (NM_002849.2,1965-1983).
gttctggttatcagtgtaa

SEQ ID NO: 125601 - DNA, 19 bp, Homo sapiens
  siRNA target sequence for PTPRR (NM_002849.2,2002-2020).
ccattcgaaaccttgtctt

SEQ ID NO: 125602 - DNA, 19 bp, Homo sapiens
  siRNA target sequence for PTPRR (NM_002849.2,2003-2021).
cattcgaaaccttgtctta

SEQ ID NO: 125603 - DNA, 19 bp, Homo sapiens
  siRNA target sequence for PTPRR (NM_002849.2,2040-2058).
caacatgtgaagcattact

SEQ ID NO: 125604 - DNA, 19 bp, Homo sapiens
  siRNA target sequence for PTPRR (NM_002849.2,2259-2277).
gatgcactaagcattgtct

SEQ ID NO: 125605 - DNA, 19 bp, Homo sapiens
  siRNA target sequence for PTPRR (NM_002849.2,2276-2294).
ctgccagcttcgtatggat

SEQ ID NO: 125606 - DNA, 19 bp, Homo sapiens
  siRNA target sequence for PTPRR (NM_002849.2,2354-2372).
gtatgagagcagactttca

SEQ ID NO: 125607 - DNA, 19 bp, Homo sapiens
  siRNA target sequence for DSCR1L1 (NM_005822.1,241-259).
gtggatgtcgaggtcttta

SEQ ID NO: 125608 - DNA, 19 bp, Homo sapiens
  siRNA target sequence for DSCR1L1 (NM_005822.1,244-262).
gatgtcgaggtctttacca

SEQ ID NO: 125609 - DNA, 19 bp, Homo sapiens
  siRNA target sequence for DSCR1L1 (NM_005822.1,260-278).
ccaatcaggaggttaagga

SEQ ID NO: 125610 - DNA, 19 bp, Homo sapiens
  siRNA target sequence for DSCR1L1 (NM_005822.1,288-306).
gggactgtttcggacttat

SEQ ID NO: 125611 - DNA, 19 bp, Homo sapiens
  siRNA target sequence for DSCR1L1 (NM_005822.1,290-308).
gactgtttcggacttatga

SEQ ID NO: 125612 - DNA, 19 bp, Homo sapiens
  siRNA target sequence for DSCR1L1 (NM_005822.1,314-332).
gtgtgacgttccagctatt

SEQ ID NO: 125613 - DNA, 19 bp, Homo sapiens
  siRNA target sequence for DSCR1L1 (NM_005822.1,316-334).
gtgacgttccagctattta

SEQ ID NO: 125614 - DNA, 19 bp, Homo sapiens
  siRNA target sequence for DSCR1L1 (NM_005822.1,325-343).
cagctatttaagagtttca

SEQ ID NO: 125615 - DNA, 19 bp, Homo sapiens
  siRNA target sequence for DSCR1L1 (NM_005822.1,327-345).
gctatttaagagtttcaga

SEQ ID NO: 125616 - DNA, 19 bp, Homo sapiens
  siRNA target sequence for DSCR1L1 (NM_005822.1,344-362).
gacgtgtccgtataaactt

SEQ ID NO: 125617 - DNA, 19 bp, Homo sapiens
  siRNA target sequence for DSCR1L1 (NM_005822.1,346-364).
cgtgtccgtataaacttca

SEQ ID NO: 125618 - DNA, 19 bp, Homo sapiens
  siRNA target sequence for DSCR1L1 (NM_005822.1,360-378).
cttcagcaatcctaaatct

SEQ ID NO: 125619 - DNA, 19 bp, Homo sapiens
  siRNA target sequence for DSCR1L1 (NM_005822.1,389-407).
ctaggatagagcttcatga

SEQ ID NO: 125620 - DNA, 19 bp, Homo sapiens
  siRNA target sequence for DSCR1L1 (NM_005822.1,569-587).
ccacgccagtcctcaacta

SEQ ID NO: 125621 - DNA, 19 bp, Homo sapiens
  siRNA target sequence for DSCR1L1 (NM_005822.1,570-588).
cacgccagtcctcaactat

SEQ ID NO: 125622 - DNA, 19 bp, Homo sapiens
  siRNA target sequence for DSCR1L1 (NM_005822.1,572-590).
cgccagtcctcaactatga

SEQ ID NO: 125623 - DNA, 19 bp, Homo sapiens
  siRNA target sequence for DSCR1L1 (NM_005822.1,678-696).
cgtgtgcgacagtgacata

SEQ ID NO: 125624 - DNA, 19 bp, Homo sapiens
  siRNA target sequence for DSCR1L1 (NM_005822.1,722-740).
ccccaaagccaaaaatcat

SEQ ID NO: 125625 - DNA, 19 bp, Homo sapiens
  siRNA target sequence for MYOZ2 (NM_016599.2,254-272).
catcatgttggaagaatta

SEQ ID NO: 125626 - DNA, 19 bp, Homo sapiens
  siRNA target sequence for MYOZ2 (NM_016599.2,287-305).
ccgtggtgccaggctattt

SEQ ID NO: 125627 - DNA, 19 bp, Homo sapiens
  siRNA target sequence for MYOZ2 (NM_016599.2,291-309).
ggtgccaggctatttaaga

SEQ ID NO: 125628 - DNA, 19 bp, Homo sapiens
  siRNA target sequence for MYOZ2 (NM_016599.2,292-310).
gtgccaggctatttaagat

SEQ ID NO: 125629 - DNA, 19 bp, Homo sapiens
  siRNA target sequence for MYOZ2 (NM_016599.2,308-326).
gatgcgtcaaagaagatct

SEQ ID NO: 125630 - DNA, 19 bp, Homo sapiens
  siRNA target sequence for MYOZ2 (NM_016599.2,357-375).
caatctagagcacaaataa

SEQ ID NO: 125631 - DNA, 19 bp, Homo sapiens
  siRNA target sequence for MYOZ2 (NM_016599.2,400-418).
ggaaagtggatggaagtaa

SEQ ID NO: 125632 - DNA, 19 bp, Homo sapiens
  siRNA target sequence for MYOZ2 (NM_016599.2,514-532).
ctggaccactgaaggaaat

SEQ ID NO: 125633 - DNA, 19 bp, Homo sapiens
  siRNA target sequence for MYOZ2 (NM_016599.2,556-574).
cagctgtccctaagtacta

SEQ ID NO: 125634 - DNA, 19 bp, Homo sapiens
  siRNA target sequence for MYOZ2 (NM_016599.2,559-577).
ctgtccctaagtactatca

SEQ ID NO: 125635 - DNA, 19 bp, Homo sapiens
  siRNA target sequence for MYOZ2 (NM_016599.2,563-581).
ccctaagtactatcaatct

SEQ ID NO: 125636 - DNA, 19 bp, Homo sapiens
  siRNA target sequence for MYOZ2 (NM_016599.2,601-619).
gcaatgatccggagctttt

SEQ ID NO: 125637 - DNA, 19 bp, Homo sapiens
  siRNA target sequence for MYOZ2 (NM_016599.2,602-620).
caatgatccggagctttta

SEQ ID NO: 125638 - DNA, 19 bp, Homo sapiens
  siRNA target sequence for MYOZ2 (NM_016599.2,623-641).
ggctttatatcctaaactt

SEQ ID NO: 125639 - DNA, 19 bp, Homo sapiens
  siRNA target sequence for MYOZ2 (NM_016599.2,624-642).
gctttatatcctaaacttt

SEQ ID NO: 125640 - DNA, 19 bp, Homo sapiens
  siRNA target sequence for MYOZ2 (NM_016599.2,669-687).
cctgattacaggagcttta

SEQ ID NO: 125641 - DNA, 19 bp, Homo sapiens
  siRNA target sequence for MYOZ2 (NM_016599.2,761-779).
gctactattgctaacagat

SEQ ID NO: 125642 - DNA, 19 bp, Homo sapiens
  siRNA target sequence for MYOZ2 (NM_016599.2,811-829).
ctggcagacggtcctttaa

SEQ ID NO: 125643 - DNA, 19 bp, Homo sapiens
  siRNA target sequence for MYOZ2 (NM_016599.2,813-831).
ggcagacggtcctttaata

SEQ ID NO: 125644 - DNA, 19 bp, Homo sapiens
  siRNA target sequence for MYOZ2 (NM_016599.2,833-851).
gactcctaagggatggata

SEQ ID NO: 125645 - DNA, 19 bp, Homo sapiens
  siRNA target sequence for MYOZ2 (NM_016599.2,838-856).
ctaagggatggatatctga

SEQ ID NO: 125646 - DNA, 19 bp, Homo sapiens
  siRNA target sequence for MYOZ2 (NM_016599.2,842-860).
gggatggatatctgagaat

SEQ ID NO: 125647 - DNA, 19 bp, Homo sapiens
  siRNA target sequence for MYOZ2 (NM_016599.2,843-861).
ggatggatatctgagaata

SEQ ID NO: 125648 - DNA, 19 bp, Homo sapiens
  siRNA target sequence for MYOZ2 (NM_016599.2,844-862).
gatggatatctgagaatat

SEQ ID NO: 125649 - DNA, 19 bp, Homo sapiens
  siRNA target sequence for MYOZ2 (NM_016599.2,855-873).
gagaatattcctatagtga

SEQ ID NO: 125650 - DNA, 19 bp, Homo sapiens
  siRNA target sequence for MYOZ2 (NM_016599.2,857-875).
gaatattcctatagtgata

SEQ ID NO: 125651 - DNA, 19 bp, Homo sapiens
  siRNA target sequence for AKAP11 (NM_016248.2,178-196).
ggcgactttcagaaacaat

SEQ ID NO: 125652 - DNA, 19 bp, Homo sapiens
  siRNA target sequence for AKAP11 (NM_016248.2,180-198).
cgactttcagaaacaatca

SEQ ID NO: 125653 - DNA, 19 bp, Homo sapiens
  siRNA target sequence for AKAP11 (NM_016248.2,212-230).
gcatctgtcagaaaaagct

SEQ ID NO: 125654 - DNA, 19 bp, Homo sapiens
  siRNA target sequence for AKAP11 (NM_016248.2,244-262).
gttccagtctgtaaagtct

SEQ ID NO: 125655 - DNA, 19 bp, Homo sapiens
  siRNA target sequence for AKAP11 (NM_016248.2,280-298).
ggaactatgcagtgtaaca

SEQ ID NO: 125656 - DNA, 19 bp, Homo sapiens
  siRNA target sequence for AKAP11 (NM_016248.2,372-390).
cagatgctgctcatataca

SEQ ID NO: 125657 - DNA, 19 bp, Homo sapiens
  siRNA target sequence for AKAP11 (NM_016248.2,391-409).
ggatttagctgcagtttct

SEQ ID NO: 125658 - DNA, 19 bp, Homo sapiens
  siRNA target sequence for AKAP11 (NM_016248.2,413-431).
gaacttccagatattctga

SEQ ID NO: 125659 - DNA, 19 bp, Homo sapiens
  siRNA target sequence for AKAP11 (NM_016248.2,442-460).
cttctgcagtctaaatgaa

SEQ ID NO: 125660 - DNA, 19 bp, Homo sapiens
  siRNA target sequence for AKAP11 (NM_016248.2,566-584).
cctacatcaccaagactta

SEQ ID NO: 125661 - DNA, 19 bp, Homo sapiens
  siRNA target sequence for AKAP11 (NM_016248.2,570-588).
catcaccaagacttaggat

SEQ ID NO: 125662 - DNA, 19 bp, Homo sapiens
  siRNA target sequence for AKAP11 (NM_016248.2,586-604).
gattgattttatctttagt

SEQ ID NO: 125663 - DNA, 19 bp, Homo sapiens
  siRNA target sequence for AKAP11 (NM_016248.2,633-651).
ggtacaccttggacacatt

SEQ ID NO: 125664 - DNA, 19 bp, Homo sapiens
  siRNA target sequence for AKAP11 (NM_016248.2,706-724).
ccagtctgtgtcatccata

SEQ ID NO: 125665 - DNA, 19 bp, Homo sapiens
  siRNA target sequence for AKAP11 (NM_016248.2,864-882).
cccatgatttaaagattct

SEQ ID NO: 125666 - DNA, 19 bp, Homo sapiens
  siRNA target sequence for AKAP11 (NM_016248.2,866-884).
catgatttaaagattctca

SEQ ID NO: 125667 - DNA, 19 bp, Homo sapiens
  siRNA target sequence for AKAP11 (NM_016248.2,940-958).
cctgggacataaagaacta

SEQ ID NO: 125668 - DNA, 19 bp, Homo sapiens
  siRNA target sequence for AKAP11 (NM_016248.2,1018-1036).
ctataggtcatctaatgct

SEQ ID NO: 125669 - DNA, 19 bp, Homo sapiens
  siRNA target sequence for AKAP11 (NM_016248.2,1082-1100).
cctgcctactcatctgaat

SEQ ID NO: 125670 - DNA, 19 bp, Homo sapiens
  siRNA target sequence for AKAP11 (NM_016248.2,1086-1104).
cctactcatctgaatcaga

SEQ ID NO: 125671 - DNA, 19 bp, Homo sapiens
  siRNA target sequence for AKAP11 (NM_016248.2,1262-1280).
gatgaactagaacaaactt

SEQ ID NO: 125672 - DNA, 19 bp, Homo sapiens
  siRNA target sequence for AKAP11 (NM_016248.2,1307-1325).
cccgtcatagggaagtcat

SEQ ID NO: 125673 - DNA, 19 bp, Homo sapiens
  siRNA target sequence for AKAP11 (NM_016248.2,1346-1364).
catggaaagtcatgtatga

SEQ ID NO: 125674 - DNA, 19 bp, Homo sapiens
  siRNA target sequence for AKAP11 (NM_016248.2,1394-1412).
gctctcccagctaatgtta

SEQ ID NO: 125675 - DNA, 19 bp, Homo sapiens
  siRNA target sequence for AKAP11 (NM_016248.2,1417-1435).
gccaactcctcgtaaacca

SEQ ID NO: 125676 - DNA, 19 bp, Homo sapiens
  siRNA target sequence for AKAP11 (NM_016248.2,1433-1451).
ccagaatctccatatggta

SEQ ID NO: 125677 - DNA, 19 bp, Homo sapiens
  siRNA target sequence for AKAP11 (NM_016248.2,1434-1452).
cagaatctccatatggtaa

SEQ ID NO: 125678 - DNA, 19 bp, Homo sapiens
  siRNA target sequence for AKAP11 (NM_016248.2,1489-1507).
ggcatcaagggaagatagt

SEQ ID NO: 125679 - DNA, 19 bp, Homo sapiens
  siRNA target sequence for AKAP11 (NM_016248.2,1557-1575).
gtactccagctgaatgttt

SEQ ID NO: 125680 - DNA, 19 bp, Homo sapiens
  siRNA target sequence for AKAP11 (NM_016248.2,1593-1611).
gtggagataggattcatga

SEQ ID NO: 125681 - DNA, 19 bp, Homo sapiens
  siRNA target sequence for AKAP11 (NM_016248.2,1595-1613).
ggagataggattcatgaaa

SEQ ID NO: 125682 - DNA, 19 bp, Homo sapiens
  siRNA target sequence for AKAP11 (NM_016248.2,1685-1703).
cttcgtacccaccatacta

SEQ ID NO: 125683 - DNA, 19 bp, Homo sapiens
  siRNA target sequence for AKAP11 (NM_016248.2,1688-1706).
cgtacccaccatactaata

SEQ ID NO: 125684 - DNA, 19 bp, Homo sapiens
  siRNA target sequence for AKAP11 (NM_016248.2,1697-1715).
catactaataccctatcaa

SEQ ID NO: 125685 - DNA, 19 bp, Homo sapiens
  siRNA target sequence for AKAP11 (NM_016248.2,1810-1828).
gattaaagatagcattcaa

SEQ ID NO: 125686 - DNA, 19 bp, Homo sapiens
  siRNA target sequence for AKAP11 (NM_016248.2,1862-1880).
ggcagtgcatttaaagact

SEQ ID NO: 125687 - DNA, 19 bp, Homo sapiens
  siRNA target sequence for AKAP11 (NM_016248.2,1864-1882).
cagtgcatttaaagactta

SEQ ID NO: 125688 - DNA, 19 bp, Homo sapiens
  siRNA target sequence for AKAP11 (NM_016248.2,1866-1884).
gtgcatttaaagacttaca

SEQ ID NO: 125689 - DNA, 19 bp, Homo sapiens
  siRNA target sequence for AKAP11 (NM_016248.2,1868-1886).
gcatttaaagacttacaga

SEQ ID NO: 125690 - DNA, 19 bp, Homo sapiens
  siRNA target sequence for AKAP11 (NM_016248.2,1899-1917).
catgtaccaatgctttgta

SEQ ID NO: 125691 - DNA, 19 bp, Homo sapiens
  siRNA target sequence for AKAP11 (NM_016248.2,1915-1933).
gtaccacttagccatcaaa

SEQ ID NO: 125692 - DNA, 19 bp, Homo sapiens
  siRNA target sequence for AKAP11 (NM_016248.2,1921-1939).
cttagccatcaaattgaca

SEQ ID NO: 125693 - DNA, 19 bp, Homo sapiens
  siRNA target sequence for AKAP11 (NM_016248.2,1978-1996).
gcagcgtgcattttcacta

SEQ ID NO: 125694 - DNA, 19 bp, Homo sapiens
  siRNA target sequence for AKAP11 (NM_016248.2,1979-1997).
cagcgtgcattttcactaa

SEQ ID NO: 125695 - DNA, 19 bp, Homo sapiens
  siRNA target sequence for AKAP11 (NM_016248.2,1981-1999).
gcgtgcattttcactaaaa

SEQ ID NO: 125696 - DNA, 19 bp, Homo sapiens
  siRNA target sequence for AKAP11 (NM_016248.2,1983-2001).
gtgcattttcactaaaaga

SEQ ID NO: 125697 - DNA, 19 bp, Homo sapiens
  siRNA target sequence for AKAP11 (NM_016248.2,2032-2050).
ggtgagtgaagctttatca

SEQ ID NO: 125698 - DNA, 19 bp, Homo sapiens
  siRNA target sequence for AKAP11 (NM_016248.2,2033-2051).
gtgagtgaagctttatcaa

SEQ ID NO: 125699 - DNA, 19 bp, Homo sapiens
  siRNA target sequence for AKAP11 (NM_016248.2,2035-2053).
gagtgaagctttatcaaat

SEQ ID NO: 125700 - DNA, 19 bp, Homo sapiens
  siRNA target sequence for AKAP11 (NM_016248.2,2152-2170).
catggaggtgtgtcagttt

SEQ ID NO: 125701 - DNA, 19 bp, Homo sapiens
  siRNA target sequence for AKAP11 (NM_016248.2,2155-2173).
ggaggtgtgtcagttttca

SEQ ID NO: 125702 - DNA, 19 bp, Homo sapiens
  siRNA target sequence for AKAP11 (NM_016248.2,2198-2216).
cagtgtgggtcgtttgact

SEQ ID NO: 125703 - DNA, 19 bp, Homo sapiens
  siRNA target sequence for AKAP11 (NM_016248.2,2202-2220).
gtgggtcgtttgactttga

SEQ ID NO: 125704 - DNA, 19 bp, Homo sapiens
  siRNA target sequence for AKAP11 (NM_016248.2,2205-2223).
ggtcgtttgactttgaaga

SEQ ID NO: 125705 - DNA, 19 bp, Homo sapiens
  siRNA target sequence for AKAP11 (NM_016248.2,2222-2240).
gacaaagtagtgaagttgt

SEQ ID NO: 125706 - DNA, 19 bp, Homo sapiens
  siRNA target sequence for AKAP11 (NM_016248.2,2228-2246).
gtagtgaagttgtatgcaa

SEQ ID NO: 125707 - DNA, 19 bp, Homo sapiens
  siRNA target sequence for AKAP11 (NM_016248.2,2262-2280).
ctgtaatacaggaagcatt

SEQ ID NO: 125708 - DNA, 19 bp, Homo sapiens
  siRNA target sequence for AKAP11 (NM_016248.2,2277-2295).
cattcattgagctatcaca

SEQ ID NO: 125709 - DNA, 19 bp, Homo sapiens
  siRNA target sequence for AKAP11 (NM_016248.2,2281-2299).
cattgagctatcacaagtt

SEQ ID NO: 125710 - DNA, 19 bp, Homo sapiens
  siRNA target sequence for AKAP11 (NM_016248.2,2297-2315).
gttgatgtgacctttacaa

SEQ ID NO: 125711 - DNA, 19 bp, Homo sapiens
  siRNA target sequence for AKAP11 (NM_016248.2,2300-2318).
gatgtgacctttacaacaa

SEQ ID NO: 125712 - DNA, 19 bp, Homo sapiens
  siRNA target sequence for AKAP11 (NM_016248.2,2316-2334).
caaaggcagcagttagtgt

SEQ ID NO: 125713 - DNA, 19 bp, Homo sapiens
  siRNA target sequence for AKAP11 (NM_016248.2,2333-2351).
gtctctacggataatatca

SEQ ID NO: 125714 - DNA, 19 bp, Homo sapiens
  siRNA target sequence for AKAP11 (NM_016248.2,2353-2371).
gtatgtgagtgcagaaagt

SEQ ID NO: 125715 - DNA, 19 bp, Homo sapiens
  siRNA target sequence for AKAP11 (NM_016248.2,2588-2606).
ctgtcatctgatgatagta

SEQ ID NO: 125716 - DNA, 19 bp, Homo sapiens
  siRNA target sequence for AKAP11 (NM_016248.2,2595-2613).
ctgatgatagtaattcaaa

SEQ ID NO: 125717 - DNA, 19 bp, Homo sapiens
  siRNA target sequence for AKAP11 (NM_016248.2,2633-2651).
catattgccacaaaaaaca

SEQ ID NO: 125718 - DNA, 19 bp, Homo sapiens
  siRNA target sequence for AKAP11 (NM_016248.2,2685-2703).
gtttaccttcagaacacaa

SEQ ID NO: 125719 - DNA, 19 bp, Homo sapiens
  siRNA target sequence for AKAP11 (NM_016248.2,2699-2717).
cacaatccaggtaatcaga

SEQ ID NO: 125720 - DNA, 19 bp, Homo sapiens
  siRNA target sequence for AKAP11 (NM_016248.2,2706-2724).
caggtaatcagaatgattt

SEQ ID NO: 125721 - DNA, 19 bp, Homo sapiens
  siRNA target sequence for AKAP11 (NM_016248.2,2730-2748).
caactaatgacgatattga

SEQ ID NO: 125722 - DNA, 19 bp, Homo sapiens
  siRNA target sequence for AKAP11 (NM_016248.2,2733-2751).
ctaatgacgatattgaaat

SEQ ID NO: 125723 - DNA, 19 bp, Homo sapiens
  siRNA target sequence for AKAP11 (NM_016248.2,2755-2773).
gagttcctcaaaattacca

SEQ ID NO: 125724 - DNA, 19 bp, Homo sapiens
  siRNA target sequence for AKAP11 (NM_016248.2,2805-2823).
cagcagtggtgcatacgat

SEQ ID NO: 125725 - DNA, 19 bp, Homo sapiens
  siRNA target sequence for AKAP11 (NM_016248.2,2812-2830).
ggtgcatacgatagtaaat

SEQ ID NO: 125726 - DNA, 19 bp, Homo sapiens
  siRNA target sequence for AKAP11 (NM_016248.2,2815-2833).
gcatacgatagtaaatgaa

SEQ ID NO: 125727 - DNA, 19 bp, Homo sapiens
  siRNA target sequence for AKAP11 (NM_016248.2,2816-2834).
catacgatagtaaatgaaa

SEQ ID NO: 125728 - DNA, 19 bp, Homo sapiens
  siRNA target sequence for AKAP11 (NM_016248.2,2820-2838).
cgatagtaaatgaaacttt

SEQ ID NO: 125729 - DNA, 19 bp, Homo sapiens
  siRNA target sequence for AKAP11 (NM_016248.2,2848-2866).
gacatcattggaagttaca

SEQ ID NO: 125730 - DNA, 19 bp, Homo sapiens
  siRNA target sequence for AKAP11 (NM_016248.2,2872-2890).
ggttgatgaacgtacagat

SEQ ID NO: 125731 - DNA, 19 bp, Homo sapiens
  siRNA target sequence for AKAP11 (NM_016248.2,2873-2891).
gttgatgaacgtacagatt

SEQ ID NO: 125732 - DNA, 19 bp, Homo sapiens
  siRNA target sequence for AKAP11 (NM_016248.2,2876-2894).
gatgaacgtacagattatt

SEQ ID NO: 125733 - DNA, 19 bp, Homo sapiens
  siRNA target sequence for AKAP11 (NM_016248.2,2879-2897).
gaacgtacagattatttaa

SEQ ID NO: 125734 - DNA, 19 bp, Homo sapiens
  siRNA target sequence for AKAP11 (NM_016248.2,2959-2977).
cagtgaagctagtagcaat

SEQ ID NO: 125735 - DNA, 19 bp, Homo sapiens
  siRNA target sequence for AKAP11 (NM_016248.2,2961-2979).
gtgaagctagtagcaataa

SEQ ID NO: 125736 - DNA, 19 bp, Homo sapiens
  siRNA target sequence for AKAP11 (NM_016248.2,2970-2988).
gtagcaataaggacatgtt

SEQ ID NO: 125737 - DNA, 19 bp, Homo sapiens
  siRNA target sequence for AKAP11 (NM_016248.2,2986-3004).
gtttgctgaccggttatct

SEQ ID NO: 125738 - DNA, 19 bp, Homo sapiens
  siRNA target sequence for AKAP11 (NM_016248.2,2990-3008).
gctgaccggttatctaaat

SEQ ID NO: 125739 - DNA, 19 bp, Homo sapiens
  siRNA target sequence for AKAP11 (NM_016248.2,2993-3011).
gaccggttatctaaatcta

SEQ ID NO: 125740 - DNA, 19 bp, Homo sapiens
  siRNA target sequence for AKAP11 (NM_016248.2,3025-3043).
catagataagagcaaatca

SEQ ID NO: 125741 - DNA, 19 bp, Homo sapiens
  siRNA target sequence for AKAP11 (NM_016248.2,3042-3060).
cagtgatcccaaatataga

SEQ ID NO: 125742 - DNA, 19 bp, Homo sapiens
  siRNA target sequence for AKAP11 (NM_016248.2,3044-3062).
gtgatcccaaatatagata

SEQ ID NO: 125743 - DNA, 19 bp, Homo sapiens
  siRNA target sequence for AKAP11 (NM_016248.2,3143-3161).
gactctcagaatcagttaa

SEQ ID NO: 125744 - DNA, 19 bp, Homo sapiens
  siRNA target sequence for AKAP11 (NM_016248.2,3177-3195).
cagctgcaaaggattgtgt

SEQ ID NO: 125745 - DNA, 19 bp, Homo sapiens
  siRNA target sequence for AKAP11 (NM_016248.2,3198-3216).
cagaatgtaaagtttctat

SEQ ID NO: 125746 - DNA, 19 bp, Homo sapiens
  siRNA target sequence for AKAP11 (NM_016248.2,3316-3334).
gcataacttgaatagtaca

SEQ ID NO: 125747 - DNA, 19 bp, Homo sapiens
  siRNA target sequence for AKAP11 (NM_016248.2,3322-3340).
cttgaatagtacatcactt

SEQ ID NO: 125748 - DNA, 19 bp, Homo sapiens
  siRNA target sequence for AKAP11 (NM_016248.2,3419-3437).
ggtttgcatgtggaagata

SEQ ID NO: 125749 - DNA, 19 bp, Homo sapiens
  siRNA target sequence for AKAP11 (NM_016248.2,3510-3528).
gttctgaatgggatatcaa

SEQ ID NO: 125750 - DNA, 19 bp, Homo sapiens
  siRNA target sequence for AKAP11 (NM_016248.2,3615-3633).
gtagtttgtctgagaatga

SEQ ID NO: 125751 - DNA, 19 bp, Homo sapiens
  siRNA target sequence for AKAP11 (NM_016248.2,3656-3674).
gagttcatgttgaaactca

SEQ ID NO: 125752 - DNA, 19 bp, Homo sapiens
  siRNA target sequence for AKAP11 (NM_016248.2,3667-3685).
gaaactcatgcgatctctt

SEQ ID NO: 125753 - DNA, 19 bp, Homo sapiens
  siRNA target sequence for AKAP11 (NM_016248.2,3673-3691).
catgcgatctctttctgaa

SEQ ID NO: 125754 - DNA, 19 bp, Homo sapiens
  siRNA target sequence for AKAP11 (NM_016248.2,3676-3694).
gcgatctctttctgaagaa

SEQ ID NO: 125755 - DNA, 19 bp, Homo sapiens
  siRNA target sequence for AKAP11 (NM_016248.2,3766-3784).
gtttgcagaagcattagct

SEQ ID NO: 125756 - DNA, 19 bp, Homo sapiens
  siRNA target sequence for AKAP11 (NM_016248.2,3816-3834).
cagcttcccatttagataa

SEQ ID NO: 125757 - DNA, 19 bp, Homo sapiens
  siRNA target sequence for AKAP11 (NM_016248.2,3822-3840).
cccatttagataacaaaat

SEQ ID NO: 125758 - DNA, 19 bp, Homo sapiens
  siRNA target sequence for AKAP11 (NM_016248.2,3856-3874).
ggttaaaaacccttgctta

SEQ ID NO: 125759 - DNA, 19 bp, Homo sapiens
  siRNA target sequence for AKAP11 (NM_016248.2,3857-3875).
gttaaaaacccttgcttaa

SEQ ID NO: 125760 - DNA, 19 bp, Homo sapiens
  siRNA target sequence for AKAP11 (NM_016248.2,3871-3889).
cttaaatgtgcaaagtcaa

SEQ ID NO: 125761 - DNA, 19 bp, Homo sapiens
  siRNA target sequence for AKAP11 (NM_016248.2,3891-3909).
gaagtgtgtcgcctacttt

SEQ ID NO: 125762 - DNA, 19 bp, Homo sapiens
  siRNA target sequence for AKAP11 (NM_016248.2,3894-3912).
gtgtgtcgcctactttttt

SEQ ID NO: 125763 - DNA, 19 bp, Homo sapiens
  siRNA target sequence for AKAP11 (NM_016248.2,3896-3914).
gtgtcgcctacttttttaa

SEQ ID NO: 125764 - DNA, 19 bp, Homo sapiens
  siRNA target sequence for AKAP11 (NM_016248.2,3917-3935).
ccctcagacgaaaatttga

SEQ ID NO: 125765 - DNA, 19 bp, Homo sapiens
  siRNA target sequence for AKAP11 (NM_016248.2,3919-3937).
ctcagacgaaaatttgaaa

SEQ ID NO: 125766 - DNA, 19 bp, Homo sapiens
  siRNA target sequence for AKAP11 (NM_016248.2,3998-4016).
gcaaaagtccgaaattgta

SEQ ID NO: 125767 - DNA, 19 bp, Homo sapiens
  siRNA target sequence for AKAP11 (NM_016248.2,3999-4017).
caaaagtccgaaattgtat

SEQ ID NO: 125768 - DNA, 19 bp, Homo sapiens
  siRNA target sequence for AKAP11 (NM_016248.2,4004-4022).
gtccgaaattgtatgcttt

SEQ ID NO: 125769 - DNA, 19 bp, Homo sapiens
  siRNA target sequence for AKAP11 (NM_016248.2,4033-4051).
gaagaacagttgttatgct

SEQ ID NO: 125770 - DNA, 19 bp, Homo sapiens
  siRNA target sequence for AKAP11 (NM_016248.2,4050-4068).
ctgatggtgacgaagatta

SEQ ID NO: 125771 - DNA, 19 bp, Homo sapiens
  siRNA target sequence for AKAP11 (NM_016248.2,4113-4131).
gagaagtggatccgtttat

SEQ ID NO: 125772 - DNA, 19 bp, Homo sapiens
  siRNA target sequence for AKAP11 (NM_016248.2,4118-4136).
gtggatccgtttattcttt

SEQ ID NO: 125773 - DNA, 19 bp, Homo sapiens
  siRNA target sequence for AKAP11 (NM_016248.2,4120-4138).
ggatccgtttattctttca

SEQ ID NO: 125774 - DNA, 19 bp, Homo sapiens
  siRNA target sequence for AKAP11 (NM_016248.2,4121-4139).
gatccgtttattctttcat

SEQ ID NO: 125775 - DNA, 19 bp, Homo sapiens
  siRNA target sequence for AKAP11 (NM_016248.2,4142-4160).
ccaccaagttcttgtatgt

SEQ ID NO: 125776 - DNA, 19 bp, Homo sapiens
  siRNA target sequence for AKAP11 (NM_016248.2,4155-4173).
gtatgtcaggtctgatgta

SEQ ID NO: 125777 - DNA, 19 bp, Homo sapiens
  siRNA target sequence for AKAP11 (NM_016248.2,4161-4179).
caggtctgatgtataagta

SEQ ID NO: 125778 - DNA, 19 bp, Homo sapiens
  siRNA target sequence for AKAP11 (NM_016248.2,4177-4195).
gtatcccagctgtgaaagt

SEQ ID NO: 125779 - DNA, 19 bp, Homo sapiens
  siRNA target sequence for AKAP11 (NM_016248.2,4190-4208).
gaaagtgtgacagatgaat

SEQ ID NO: 125780 - DNA, 19 bp, Homo sapiens
  siRNA target sequence for AKAP11 (NM_016248.2,4211-4229).
gcaggtcaccttattcaga

SEQ ID NO: 125781 - DNA, 19 bp, Homo sapiens
  siRNA target sequence for AKAP11 (NM_016248.2,4212-4230).
caggtcaccttattcagat

SEQ ID NO: 125782 - DNA, 19 bp, Homo sapiens
  siRNA target sequence for AKAP11 (NM_016248.2,4258-4276).
gttgataatggatcagtat

SEQ ID NO: 125783 - DNA, 19 bp, Homo sapiens
  siRNA target sequence for AKAP11 (NM_016248.2,4285-4303).
gcttgcctaccgatctgtt

SEQ ID NO: 125784 - DNA, 19 bp, Homo sapiens
  siRNA target sequence for AKAP11 (NM_016248.2,4289-4307).
gcctaccgatctgttaaat

SEQ ID NO: 125785 - DNA, 19 bp, Homo sapiens
  siRNA target sequence for AKAP11 (NM_016248.2,4291-4309).
ctaccgatctgttaaatca

SEQ ID NO: 125786 - DNA, 19 bp, Homo sapiens
  siRNA target sequence for AKAP11 (NM_016248.2,4299-4317).
ctgttaaatcaggattaca

SEQ ID NO: 125787 - DNA, 19 bp, Homo sapiens
  siRNA target sequence for AKAP11 (NM_016248.2,4501-4519).
gaccctggatccatataga

SEQ ID NO: 125788 - DNA, 19 bp, Homo sapiens
  siRNA target sequence for AKAP11 (NM_016248.2,4503-4521).
ccctggatccatatagaaa

SEQ ID NO: 125789 - DNA, 19 bp, Homo sapiens
  siRNA target sequence for AKAP11 (NM_016248.2,4523-4541).
gaggtctcccaactgtata

SEQ ID NO: 125790 - DNA, 19 bp, Homo sapiens
  siRNA target sequence for AKAP11 (NM_016248.2,4525-4543).
ggtctcccaactgtatagt

SEQ ID NO: 125791 - DNA, 19 bp, Homo sapiens
  siRNA target sequence for AKAP11 (NM_016248.2,4526-4544).
gtctcccaactgtatagtt

SEQ ID NO: 125792 - DNA, 19 bp, Homo sapiens
  siRNA target sequence for AKAP11 (NM_016248.2,4532-4550).
caactgtatagtttttcaa

SEQ ID NO: 125793 - DNA, 19 bp, Homo sapiens
  siRNA target sequence for AKAP11 (NM_016248.2,4556-4574).
ctggttcacagcataacaa

SEQ ID NO: 125794 - DNA, 19 bp, Homo sapiens
  siRNA target sequence for AKAP11 (NM_016248.2,4602-4620).
ctctagttggcctaccaaa

SEQ ID NO: 125795 - DNA, 19 bp, Homo sapiens
  siRNA target sequence for AKAP11 (NM_016248.2,4629-4647).
cagattcttgcttgtttga

SEQ ID NO: 125796 - DNA, 19 bp, Homo sapiens
  siRNA target sequence for AKAP11 (NM_016248.2,4677-4695).
gtcacgttacaccagaatt

SEQ ID NO: 125797 - DNA, 19 bp, Homo sapiens
  siRNA target sequence for AKAP11 (NM_016248.2,4739-4757).
cacagcactggcagtttaa

SEQ ID NO: 125798 - DNA, 19 bp, Homo sapiens
  siRNA target sequence for AKAP11 (NM_016248.2,4746-4764).
ctggcagtttaaatggata

SEQ ID NO: 125799 - DNA, 19 bp, Homo sapiens
  siRNA target sequence for AKAP11 (NM_016248.2,4834-4852).
gctaactctaggatctaca

SEQ ID NO: 125800 - DNA, 19 bp, Homo sapiens
  siRNA target sequence for AKAP11 (NM_016248.2,4925-4943).
ggtcaagcttgcagatact

SEQ ID NO: 125801 - DNA, 19 bp, Homo sapiens
  siRNA target sequence for AKAP11 (NM_016248.2,4935-4953).
gcagatactgtgaccttaa

SEQ ID NO: 125802 - DNA, 19 bp, Homo sapiens
  siRNA target sequence for AKAP11 (NM_016248.2,4960-4978).
ccacaattgcactggaaat

SEQ ID NO: 125803 - DNA, 19 bp, Homo sapiens
  siRNA target sequence for AKAP11 (NM_016248.2,4961-4979).
cacaattgcactggaaatt

SEQ ID NO: 125804 - DNA, 19 bp, Homo sapiens
  siRNA target sequence for AKAP11 (NM_016248.2,4963-4981).
caattgcactggaaattca

SEQ ID NO: 125805 - DNA, 19 bp, Homo sapiens
  siRNA target sequence for AKAP11 (NM_016248.2,5003-5021).
ggttctctcgccagtagta

SEQ ID NO: 125806 - DNA, 19 bp, Homo sapiens
  siRNA target sequence for AKAP11 (NM_016248.2,5004-5022).
gttctctcgccagtagtaa

SEQ ID NO: 125807 - DNA, 19 bp, Homo sapiens
  siRNA target sequence for AKAP11 (NM_016248.2,5023-5041).
gccagcttctaatccaaaa

SEQ ID NO: 125808 - DNA, 19 bp, Homo sapiens
  siRNA target sequence for AKAP11 (NM_016248.2,5024-5042).
ccagcttctaatccaaaat

SEQ ID NO: 125809 - DNA, 19 bp, Homo sapiens
  siRNA target sequence for AKAP11 (NM_016248.2,5025-5043).
cagcttctaatccaaaatt

SEQ ID NO: 125810 - DNA, 19 bp, Homo sapiens
  siRNA target sequence for AKAP11 (NM_016248.2,5027-5045).
gcttctaatccaaaattta

SEQ ID NO: 125811 - DNA, 19 bp, Homo sapiens
  siRNA target sequence for AKAP11 (NM_016248.2,5088-5106).
ctcagattcatgttaatct

SEQ ID NO: 125812 - DNA, 19 bp, Homo sapiens
  siRNA target sequence for AKAP11 (NM_016248.2,5092-5110).
gattcatgttaatcttgat

SEQ ID NO: 125813 - DNA, 19 bp, Homo sapiens
  siRNA target sequence for AKAP11 (NM_016248.2,5122-5140).
gcttgctgagaagatagtt

SEQ ID NO: 125814 - DNA, 19 bp, Homo sapiens
  siRNA target sequence for AKAP11 (NM_016248.2,5254-5272).
gacagcagctgtcacaaat

SEQ ID NO: 125815 - DNA, 19 bp, Homo sapiens
  siRNA target sequence for AKAP11 (NM_016248.2,5283-5301).
ctgttagcagttcaaaaga

SEQ ID NO: 125816 - DNA, 19 bp, Homo sapiens
  siRNA target sequence for AKAP11 (NM_016248.2,5341-5359).
gcagatgaacctcagtatt

SEQ ID NO: 125817 - DNA, 19 bp, Homo sapiens
  siRNA target sequence for AKAP11 (NM_016248.2,5373-5391).
ctggtagctggtccaattt

SEQ ID NO: 125818 - DNA, 19 bp, Homo sapiens
  siRNA target sequence for AKAP11 (NM_016248.2,5375-5393).
ggtagctggtccaatttaa

SEQ ID NO: 125819 - DNA, 19 bp, Homo sapiens
  siRNA target sequence for AKAP11 (NM_016248.2,5425-5443).
cagttttcatcatctaagt

SEQ ID NO: 125820 - DNA, 19 bp, Homo sapiens
  siRNA target sequence for AKAP11 (NM_016248.2,5438-5456).
ctaagtgaaagtaatggta

SEQ ID NO: 125821 - DNA, 19 bp, Homo sapiens
  siRNA target sequence for AKAP11 (NM_016248.2,5469-5487).
ggagcagtcttggtttaga

SEQ ID NO: 125822 - DNA, 19 bp, Homo sapiens
  siRNA target sequence for AKAP11 (NM_016248.2,5470-5488).
gagcagtcttggtttagaa

SEQ ID NO: 125823 - DNA, 19 bp, Homo sapiens
  siRNA target sequence for AKAP11 (NM_016248.2,5492-5510).
gatttgtatgaggacaatt

SEQ ID NO: 125824 - DNA, 19 bp, Homo sapiens
  siRNA target sequence for AKAP11 (NM_016248.2,5560-5578).
gcatgaggacgaagtagaa

SEQ ID NO: 125825 - DNA, 19 bp, Homo sapiens
  siRNA target sequence for AKAP11 (NM_016248.2,5599-5617).
gacactgctaattacgaat

SEQ ID NO: 125826 - DNA, 19 bp, Homo sapiens
  siRNA target sequence for AKAP11 (NM_016248.2,5601-5619).
cactgctaattacgaatat

SEQ ID NO: 125827 - DNA, 19 bp, Homo sapiens
  siRNA target sequence for AKAP11 (NM_016248.2,5606-5624).
ctaattacgaatattgaca

SEQ ID NO: 125828 - DNA, 19 bp, Homo sapiens
  siRNA target sequence for AKAP11 (NM_016248.2,5642-5660).
gacccccagctaaggatta

SEQ ID NO: 125829 - DNA, 19 bp, Homo sapiens
  siRNA target sequence for AKAP11 (NM_016248.2,5644-5662).
cccccagctaaggattatt

SEQ ID NO: 125830 - DNA, 19 bp, Homo sapiens
  siRNA target sequence for AKAP11 (NM_016248.2,5646-5664).
cccagctaaggattattct

SEQ ID NO: 125831 - DNA, 19 bp, Homo sapiens
  siRNA target sequence for AKAP11 (NM_016248.2,5647-5665).
ccagctaaggattattctt

SEQ ID NO: 125832 - DNA, 19 bp, Homo sapiens
  siRNA target sequence for AKAP11 (NM_016248.2,5718-5736).
ctgcaaataaggagtttat

SEQ ID NO: 125833 - DNA, 19 bp, Homo sapiens
  siRNA target sequence for AKAP11 (NM_016248.2,5728-5746).
ggagtttatgctactttca

SEQ ID NO: 125834 - DNA, 19 bp, Homo sapiens
  siRNA target sequence for AKAP11 (NM_016248.2,5729-5747).
gagtttatgctactttcaa

SEQ ID NO: 125835 - DNA, 19 bp, Homo sapiens
  siRNA target sequence for AKAP11 (NM_016248.2,5789-5807).
caggctgtgcttcaatact

SEQ ID NO: 125836 - DNA, 19 bp, Homo sapiens
  siRNA target sequence for AKAP11 (NM_016248.2,5841-5859).
gatgcaagtcgctgtttga

SEQ ID NO: 125837 - DNA, 19 bp, Homo sapiens
  siRNA target sequence for AKAP11 (NM_144490.1,4504-4522).
ctgtggaccatcagttgaa

SEQ ID NO: 125838 - DNA, 19 bp, Homo sapiens
  siRNA target sequence for AKAP11 (NM_144490.1,4506-4524).
gtggaccatcagttgaact

SEQ ID NO: 125839 - DNA, 19 bp, Homo sapiens
  siRNA target sequence for AKAP11 (NM_144490.1,4508-4526).
ggaccatcagttgaactta

SEQ ID NO: 125840 - DNA, 19 bp, Homo sapiens
  siRNA target sequence for AKAP11 (NM_144490.1,4553-4571).
gggagggaaggcaactctt

SEQ ID NO: 125841 - DNA, 19 bp, Homo sapiens
  siRNA target sequence for LILRB1 (NM_006669.2,1433-1451).
gacccatggcgtctaagat

SEQ ID NO: 125842 - DNA, 19 bp, Homo sapiens
  siRNA target sequence for LILRB1 (NM_006669.2,1435-1453).
cccatggcgtctaagatca

SEQ ID NO: 125843 - DNA, 19 bp, Homo sapiens
  siRNA target sequence for LILRB1 (NM_006669.2,1436-1454).
ccatggcgtctaagatcaa

SEQ ID NO: 125844 - DNA, 19 bp, Homo sapiens
  siRNA target sequence for LILRB1 (NM_006669.2,1445-1463).
ctaagatcaacgtaccaat

SEQ ID NO: 125845 - DNA, 19 bp, Homo sapiens
  siRNA target sequence for LILRB1 (NM_006669.2,1449-1467).
gatcaacgtaccaatctca

SEQ ID NO: 125846 - DNA, 19 bp, Homo sapiens
  siRNA target sequence for LILRB1 (NM_006669.2,1452-1470).
caacgtaccaatctcaaaa

SEQ ID NO: 125847 - DNA, 19 bp, Homo sapiens
  siRNA target sequence for PPP1R16B (NM_015568.2,324-342).
gcaccgcaagcgaaagcat

SEQ ID NO: 125848 - DNA, 19 bp, Homo sapiens
  siRNA target sequence for PPP1R16B (NM_015568.2,442-460).
cgctacttcctgaagaata

SEQ ID NO: 125849 - DNA, 19 bp, Homo sapiens
  siRNA target sequence for PPP1R16B (NM_015568.2,519-537).
cgacaactttgaggaaatt

SEQ ID NO: 125850 - DNA, 19 bp, Homo sapiens
  siRNA target sequence for PPP1R16B (NM_015568.2,554-572).
cccatggtgccaatgtgaa

SEQ ID NO: 125851 - DNA, 19 bp, Homo sapiens
  siRNA target sequence for PPP1R16B (NM_015568.2,1246-1264).
gacaggaccaacctgtata

SEQ ID NO: 125852 - DNA, 19 bp, Homo sapiens
  siRNA target sequence for PPP1R16B (NM_015568.2,1404-1422).
cgtgctactctccgaattt

SEQ ID NO: 125853 - DNA, 19 bp, Homo sapiens
  siRNA target sequence for PPP1R16B (NM_015568.2,1407-1425).
gctactctccgaatttcct

SEQ ID NO: 125854 - DNA, 19 bp, Homo sapiens
  siRNA target sequence for PPP1R16B (NM_015568.2,1408-1426).
ctactctccgaatttccta

SEQ ID NO: 125855 - DNA, 19 bp, Homo sapiens
  siRNA target sequence for PPP1R16B (NM_015568.2,1749-1767).
gatcggaggcagaacttca

SEQ ID NO: 125856 - DNA, 19 bp, Homo sapiens
  siRNA target sequence for PPP1R16B (NM_015568.2,1779-1797).
caatgggacctcggtatat

SEQ ID NO: 125857 - DNA, 19 bp, Homo sapiens
  siRNA target sequence for PPP1R16B (NM_015568.2,1783-1801).
gggacctcggtatattaca

SEQ ID NO: 125858 - DNA, 19 bp, Homo sapiens
  siRNA target sequence for PPP1R16B (NM_015568.2,1812-1830).
cggagatcccccactctta

SEQ ID NO: 125859 - DNA, 19 bp, Homo sapiens
  siRNA target sequence for PPP1R16B (NM_015568.2,1813-1831).
ggagatcccccactcttaa

SEQ ID NO: 125860 - DNA, 19 bp, Homo sapiens
  siRNA target sequence for PPP1R16B (NM_015568.2,1816-1834).
gatcccccactcttaaagt

SEQ ID NO: 125861 - DNA, 19 bp, Homo sapiens
  siRNA target sequence for PPP1R16B (NM_015568.2,1819-1837).
cccccactcttaaagttca

SEQ ID NO: 125862 - DNA, 19 bp, Homo sapiens
  siRNA target sequence for PPP1R16B (NM_015568.2,1820-1838).
ccccactcttaaagttcaa

SEQ ID NO: 125863 - DNA, 19 bp, Homo sapiens
  siRNA target sequence for NAKAP95 (NM_014371.1,120-138).
ccacctgtgattatggata

SEQ ID NO: 125864 - DNA, 19 bp, Homo sapiens
  siRNA target sequence for NAKAP95 (NM_014371.1,148-166).
gaactctgggacaaataga

SEQ ID NO: 125865 - DNA, 19 bp, Homo sapiens
  siRNA target sequence for NAKAP95 (NM_014371.1,216-234).
ccaactatgggtatggtat

SEQ ID NO: 125866 - DNA, 19 bp, Homo sapiens
  siRNA target sequence for NAKAP95 (NM_014371.1,304-322).
cagtgccgattccgtttta

SEQ ID NO: 125867 - DNA, 19 bp, Homo sapiens
  siRNA target sequence for NAKAP95 (NM_014371.1,513-531).
cctatgagggccaatacga

SEQ ID NO: 125868 - DNA, 19 bp, Homo sapiens
  siRNA target sequence for NAKAP95 (NM_014371.1,514-532).
ctatgagggccaatacgat

SEQ ID NO: 125869 - DNA, 19 bp, Homo sapiens
  siRNA target sequence for NAKAP95 (NM_014371.1,854-872).
gacttccgaaccaagaaga

SEQ ID NO: 125870 - DNA, 19 bp, Homo sapiens
  siRNA target sequence for NAKAP95 (NM_014371.1,943-961).
cagcgactcagacaatgat

SEQ ID NO: 125871 - DNA, 19 bp, Homo sapiens
  siRNA target sequence for NAKAP95 (NM_014371.1,945-963).
gcgactcagacaatgatga

SEQ ID NO: 125872 - DNA, 19 bp, Homo sapiens
  siRNA target sequence for NAKAP95 (NM_014371.1,1100-1118).
ctaaccacccaggatgaaa

SEQ ID NO: 125873 - DNA, 19 bp, Homo sapiens
  siRNA target sequence for NAKAP95 (NM_014371.1,1343-1361).
caggagtacgtcactaaca

SEQ ID NO: 125874 - DNA, 19 bp, Homo sapiens
  siRNA target sequence for NAKAP95 (NM_014371.1,1346-1364).
gagtacgtcactaacaaga

SEQ ID NO: 125875 - DNA, 19 bp, Homo sapiens
  siRNA target sequence for NAKAP95 (NM_014371.1,1438-1456).
ggatctgacccaggaaatt

SEQ ID NO: 125876 - DNA, 19 bp, Homo sapiens
  siRNA target sequence for NAKAP95 (NM_014371.1,1572-1590).
ggaaccgcaggctcatgat

SEQ ID NO: 125877 - DNA, 19 bp, Homo sapiens
  siRNA target sequence for NAKAP95 (NM_014371.1,1625-1643).
cgcagtattctcaacaaca

SEQ ID NO: 125878 - DNA, 19 bp, Homo sapiens
  siRNA target sequence for ARIH1 (NM_005744.2,411-429).
gacgagccggacgatgata

SEQ ID NO: 125879 - DNA, 19 bp, Homo sapiens
  siRNA target sequence for ARIH1 (NM_005744.2,626-644).
cacggccgagcagattcta

SEQ ID NO: 125880 - DNA, 19 bp, Homo sapiens
  siRNA target sequence for ARIH1 (NM_005744.2,628-646).
cggccgagcagattctaca

SEQ ID NO: 125881 - DNA, 19 bp, Homo sapiens
  siRNA target sequence for ARIH1 (NM_005744.2,629-647).
ggccgagcagattctacaa

SEQ ID NO: 125882 - DNA, 19 bp, Homo sapiens
  siRNA target sequence for ARIH1 (NM_005744.2,631-649).
ccgagcagattctacaaca

SEQ ID NO: 125883 - DNA, 19 bp, Homo sapiens
  siRNA target sequence for ARIH1 (NM_005744.2,645-663).
caacacatggtggaatgta

SEQ ID NO: 125884 - DNA, 19 bp, Homo sapiens
  siRNA target sequence for ARIH1 (NM_005744.2,693-711).
ccagcaactatcacaagaa

SEQ ID NO: 125885 - DNA, 19 bp, Homo sapiens
  siRNA target sequence for ARIH1 (NM_005744.2,694-712).
cagcaactatcacaagaat

SEQ ID NO: 125886 - DNA, 19 bp, Homo sapiens
  siRNA target sequence for ARIH1 (NM_005744.2,697-715).
caactatcacaagaatact

SEQ ID NO: 125887 - DNA, 19 bp, Homo sapiens
  siRNA target sequence for ARIH1 (NM_005744.2,722-740).
ccacttcaattgggataaa

SEQ ID NO: 125888 - DNA, 19 bp, Homo sapiens
  siRNA target sequence for ARIH1 (NM_005744.2,794-812).
gtgtcatgtaattaatcca

SEQ ID NO: 125889 - DNA, 19 bp, Homo sapiens
  siRNA target sequence for ARIH1 (NM_005744.2,823-841).
ctcgaacacgccagatgaa

SEQ ID NO: 125890 - DNA, 19 bp, Homo sapiens
  siRNA target sequence for ARIH1 (NM_005744.2,825-843).
cgaacacgccagatgaata

SEQ ID NO: 125891 - DNA, 19 bp, Homo sapiens
  siRNA target sequence for ARIH1 (NM_005744.2,871-889).
gtcagatctgctacttgaa

SEQ ID NO: 125892 - DNA, 19 bp, Homo sapiens
  siRNA target sequence for ARIH1 (NM_005744.2,873-891).
cagatctgctacttgaact

SEQ ID NO: 125893 - DNA, 19 bp, Homo sapiens
  siRNA target sequence for ARIH1 (NM_005744.2,893-911).
ccctaactcgtatttcact

SEQ ID NO: 125894 - DNA, 19 bp, Homo sapiens
  siRNA target sequence for ARIH1 (NM_005744.2,918-936).
gaatgtggacataagtttt

SEQ ID NO: 125895 - DNA, 19 bp, Homo sapiens
  siRNA target sequence for ARIH1 (NM_005744.2,944-962).
gtgctggagtgaatattta

SEQ ID NO: 125896 - DNA, 19 bp, Homo sapiens
  siRNA target sequence for ARIH1 (NM_005744.2,1009-1027).
ctgctcatggttgtgatat

SEQ ID NO: 125897 - DNA, 19 bp, Homo sapiens
  siRNA target sequence for ARIH1 (NM_005744.2,1011-1029).
gctcatggttgtgatatct

SEQ ID NO: 125898 - DNA, 19 bp, Homo sapiens
  siRNA target sequence for ARIH1 (NM_005744.2,1052-1070).
gcgcctgatcacagattca

SEQ ID NO: 125899 - DNA, 19 bp, Homo sapiens
  siRNA target sequence for ARIH1 (NM_005744.2,1053-1071).
cgcctgatcacagattcaa

SEQ ID NO: 125900 - DNA, 19 bp, Homo sapiens
  siRNA target sequence for ARIH1 (NM_005744.2,1116-1134).
gagtgcaatcgactgttaa

SEQ ID NO: 125901 - DNA, 19 bp, Homo sapiens
  siRNA target sequence for ARIH1 (NM_005744.2,1152-1170).
gattgccaccatgttgtta

SEQ ID NO: 125902 - DNA, 19 bp, Homo sapiens
  siRNA target sequence for ARIH1 (NM_005744.2,1156-1174).
gccaccatgttgttaaagt

SEQ ID NO: 125903 - DNA, 19 bp, Homo sapiens
  siRNA target sequence for ARIH1 (NM_005744.2,1215-1233).
cgccaattttgctttaact

SEQ ID NO: 125904 - DNA, 19 bp, Homo sapiens
  siRNA target sequence for ARIH1 (NM_005744.2,1217-1235).
ccaattttgctttaactgt

SEQ ID NO: 125905 - DNA, 19 bp, Homo sapiens
  siRNA target sequence for ARIH1 (NM_005744.2,1247-1265).
gcatgatcctgttaaatgt

SEQ ID NO: 125906 - DNA, 19 bp, Homo sapiens
  siRNA target sequence for ARIH1 (NM_005744.2,1270-1288).
ggttaaagaaatggattaa

SEQ ID NO: 125907 - DNA, 19 bp, Homo sapiens
  siRNA target sequence for ARIH1 (NM_005744.2,1302-1320).
gacagtgaaacctccaatt

SEQ ID NO: 125908 - DNA, 19 bp, Homo sapiens
  siRNA target sequence for ARIH1 (NM_005744.2,1306-1324).
gtgaaacctccaattggat

SEQ ID NO: 125909 - DNA, 19 bp, Homo sapiens
  siRNA target sequence for ARIH1 (NM_005744.2,1326-1344).
gcagccaacacaaaggaat

SEQ ID NO: 125910 - DNA, 19 bp, Homo sapiens
  siRNA target sequence for ARIH1 (NM_005744.2,1348-1366).
ccaaatgccatgtcacaat

SEQ ID NO: 125911 - DNA, 19 bp, Homo sapiens
  siRNA target sequence for ARIH1 (NM_005744.2,1349-1367).
caaatgccatgtcacaatt

SEQ ID NO: 125912 - DNA, 19 bp, Homo sapiens
  siRNA target sequence for ARIH1 (NM_005744.2,1397-1415).
ctgtcgtaaccagaattgt

SEQ ID NO: 125913 - DNA, 19 bp, Homo sapiens
  siRNA target sequence for ARIH1 (NM_005744.2,1461-1479).
ggatctgcctggtacaact

SEQ ID NO: 125914 - DNA, 19 bp, Homo sapiens
  siRNA target sequence for ARIH1 (NM_005744.2,1601-1619).
ctttgagcacaaactatat

SEQ ID NO: 125915 - DNA, 19 bp, Homo sapiens
  siRNA target sequence for ARIH1 (NM_005744.2,1717-1735).
gtcgtgccacactcatgta

SEQ ID NO: 125916 - DNA, 19 bp, Homo sapiens
  siRNA target sequence for ARIH1 (NM_005744.2,1719-1737).
cgtgccacactcatgtaca

SEQ ID NO: 125917 - DNA, 19 bp, Homo sapiens
  siRNA target sequence for ARIH1 (NM_005744.2,1722-1740).
gccacactcatgtacactt

SEQ ID NO: 125918 - DNA, 19 bp, Homo sapiens
  siRNA target sequence for ARIH1 (NM_005744.2,1726-1744).
cactcatgtacacttatgt

SEQ ID NO: 125919 - DNA, 19 bp, Homo sapiens
  siRNA target sequence for ARIH1 (NM_005744.2,1738-1756).
cttatgtcttcgctttcta

SEQ ID NO: 125920 - DNA, 19 bp, Homo sapiens
  siRNA target sequence for ARIH1 (NM_005744.2,1796-1814).
ccaagcagatctagagaat

SEQ ID NO: 125921 - DNA, 19 bp, Homo sapiens
  siRNA target sequence for ARIH1 (NM_005744.2,1834-1852).
gctaccttgaacgagatat

SEQ ID NO: 125922 - DNA, 19 bp, Homo sapiens
  siRNA target sequence for ARIH1 (NM_005744.2,1835-1853).
ctaccttgaacgagatatt

SEQ ID NO: 125923 - DNA, 19 bp, Homo sapiens
  siRNA target sequence for ARIH1 (NM_005744.2,1845-1863).
cgagatatttcccaagatt

SEQ ID NO: 125924 - DNA, 19 bp, Homo sapiens
  siRNA target sequence for ARIH1 (NM_005744.2,1860-1878).
gattctctgcaggatataa

SEQ ID NO: 125925 - DNA, 19 bp, Homo sapiens
  siRNA target sequence for ARIH1 (NM_005744.2,1887-1905).
gtacaagacaagtacagat

SEQ ID NO: 125926 - DNA, 19 bp, Homo sapiens
  siRNA target sequence for ARIH1 (NM_005744.2,1915-1933).
gtcgacgaagggttttgtt

SEQ ID NO: 125927 - DNA, 19 bp, Homo sapiens
  siRNA target sequence for ARIH1 (NM_005744.2,1918-1936).
gacgaagggttttgttaca

SEQ ID NO: 125928 - DNA, 19 bp, Homo sapiens
  siRNA target sequence for BIRC7 (NM_022161.2,440-458).
gcgtctggcctccttctat

SEQ ID NO: 125929 - DNA, 19 bp, Homo sapiens
  siRNA target sequence for BIRC7 (NM_022161.2,629-647).
gttcctgctccggtcaaaa

SEQ ID NO: 125930 - DNA, 19 bp, Homo sapiens
  siRNA target sequence for BIRC7 (NM_022161.2,632-650).
cctgctccggtcaaaagga

SEQ ID NO: 125931 - DNA, 19 bp, Homo sapiens
  siRNA target sequence for BIRC7 (NM_022161.2,633-651).
ctgctccggtcaaaaggaa

SEQ ID NO: 125932 - DNA, 19 bp, Homo sapiens
  siRNA target sequence for CASP2 (NM_001224.3,89-107).
catcatcaggaaactctaa

SEQ ID NO: 125933 - DNA, 19 bp, Homo sapiens
  siRNA target sequence for CASP2 (NM_001224.3,92-110).
catcaggaaactctaaaaa

SEQ ID NO: 125934 - DNA, 19 bp, Homo sapiens
  siRNA target sequence for CASP2 (NM_001224.3,139-157).
gttgttgagcgaattgtta

SEQ ID NO: 125935 - DNA, 19 bp, Homo sapiens
  siRNA target sequence for CASP2 (NM_001224.3,176-194).
gacatcatcaccttggaaa

SEQ ID NO: 125936 - DNA, 19 bp, Homo sapiens
  siRNA target sequence for CASP2 (NM_001224.3,212-230).
gccaaagtgggcagtttca

SEQ ID NO: 125937 - DNA, 19 bp, Homo sapiens
  siRNA target sequence for CASP2 (NM_001224.3,321-339).
gccacctggaggatatgtt

SEQ ID NO: 125938 - DNA, 19 bp, Homo sapiens
  siRNA target sequence for CASP2 (NM_001224.3,426-444).
cctgtcccctttacaagaa

SEQ ID NO: 125939 - DNA, 19 bp, Homo sapiens
  siRNA target sequence for CASP2 (NM_001224.3,446-464).
ctccgcctgtcgacagata

SEQ ID NO: 125940 - DNA, 19 bp, Homo sapiens
  siRNA target sequence for CASP2 (NM_001224.3,448-466).
ccgcctgtcgacagatact

SEQ ID NO: 125941 - DNA, 19 bp, Homo sapiens
  siRNA target sequence for CASP2 (NM_001224.3,450-468).
gcctgtcgacagatactgt

SEQ ID NO: 125942 - DNA, 19 bp, Homo sapiens
  siRNA target sequence for CASP2 (NM_001224.3,469-487).
ggaacactccctagacaat

SEQ ID NO: 125943 - DNA, 19 bp, Homo sapiens
  siRNA target sequence for CASP2 (NM_001224.3,470-488).
gaacactccctagacaata

SEQ ID NO: 125944 - DNA, 19 bp, Homo sapiens
  siRNA target sequence for CASP2 (NM_001224.3,475-493).
ctccctagacaataaagat

SEQ ID NO: 125945 - DNA, 19 bp, Homo sapiens
  siRNA target sequence for CASP2 (NM_001224.3,696-714).
gctatgacgtccatgttct

SEQ ID NO: 125946 - DNA, 19 bp, Homo sapiens
  siRNA target sequence for CASP2 (NM_001224.3,697-715).
ctatgacgtccatgttcta

SEQ ID NO: 125947 - DNA, 19 bp, Homo sapiens
  siRNA target sequence for CASP2 (NM_001224.3,900-918).
gcccaagcctacagaacaa

SEQ ID NO: 125948 - DNA, 19 bp, Homo sapiens
  siRNA target sequence for CASP2 (NM_001224.3,943-961).
ctgccgtggaggtgctatt

SEQ ID NO: 125949 - DNA, 19 bp, Homo sapiens
  siRNA target sequence for CASP2 (NM_001224.3,946-964).
ccgtggaggtgctattgga

SEQ ID NO: 125950 - DNA, 19 bp, Homo sapiens
  siRNA target sequence for CASP2 (NM_001224.3,947-965).
cgtggaggtgctattggat

SEQ ID NO: 125951 - DNA, 19 bp, Homo sapiens
  siRNA target sequence for CASP2 (NM_032982.2,208-226).
gacaggggacgcaggatat

SEQ ID NO: 125952 - DNA, 19 bp, Homo sapiens
  siRNA target sequence for CASP2 (NM_032982.2,1127-1145).
gtggggttgaccaacaaga

SEQ ID NO: 125953 - DNA, 19 bp, Homo sapiens
  siRNA target sequence for CASP2 (NM_032982.2,1182-1200).
gagtgatgccggtaaagaa

SEQ ID NO: 125954 - DNA, 19 bp, Homo sapiens
  siRNA target sequence for CASP2 (NM_032982.2,1224-1242).
cacgcgctcagacatgata

SEQ ID NO: 125955 - DNA, 19 bp, Homo sapiens
  siRNA target sequence for CASP2 (NM_032982.2,1331-1349).
ctgagcgggcttgtgatat

SEQ ID NO: 125956 - DNA, 19 bp, Homo sapiens
  siRNA target sequence for CASP2 (NM_032982.2,1358-1376).
ccgacatgctggttaaggt

SEQ ID NO: 125957 - DNA, 19 bp, Homo sapiens
  siRNA target sequence for CASP2 (NM_032982.2,1389-1407).
caaggatcgggaaggttat

SEQ ID NO: 125958 - DNA, 19 bp, Homo sapiens
  siRNA target sequence for CASP2 (NM_032982.2,1392-1410).
ggatcgggaaggttatgct

SEQ ID NO: 125959 - DNA, 19 bp, Homo sapiens
  siRNA target sequence for CASP2 (NM_032982.2,1433-1451).
gcaaggagatgtctgaata

SEQ ID NO: 125960 - DNA, 19 bp, Homo sapiens
  siRNA target sequence for DNMT3L (NM_013369.2,584-602).
ggcagagatcttattgcat

SEQ ID NO: 125961 - DNA, 19 bp, Homo sapiens
  siRNA target sequence for DNMT3L (NM_013369.2,588-606).
gagatcttattgcatatga

SEQ ID NO: 125962 - DNA, 19 bp, Homo sapiens
  siRNA target sequence for DNMT3L (NM_013369.2,613-631).
ggctaaccagcgaaatata

SEQ ID NO: 125963 - DNA, 19 bp, Homo sapiens
  siRNA target sequence for DNMT3L (NM_013369.2,615-633).
ctaaccagcgaaatataga

SEQ ID NO: 125964 - DNA, 19 bp, Homo sapiens
  siRNA target sequence for DNMT3L (NM_013369.2,705-723).
ccccatgtaaggacaagtt

SEQ ID NO: 125965 - DNA, 19 bp, Homo sapiens
  siRNA target sequence for DNMT3L (NM_013369.2,746-764).
gacgatgacgggtaccaat

SEQ ID NO: 125966 - DNA, 19 bp, Homo sapiens
  siRNA target sequence for DNMT3L (NM_013369.2,1007-1025).
ccccttgagatgttcgaaa

SEQ ID NO: 125967 - DNA, 19 bp, Homo sapiens
  siRNA target sequence for DNMT3L (NM_013369.2,1057-1075).
ggtgctgtccctttttgaa

SEQ ID NO: 125968 - DNA, 19 bp, Homo sapiens
  siRNA target sequence for DNMT3L (NM_013369.2,1122-1140).
ctgacccgggacaactgaa

SEQ ID NO: 125969 - DNA, 19 bp, Homo sapiens
  siRNA target sequence for DNMT3L (NM_013369.2,1188-1206).
ggggacccttcgatcttgt

SEQ ID NO: 125970 - DNA, 19 bp, Homo sapiens
  siRNA target sequence for DNMT3L (NM_013369.2,1191-1209).
gacccttcgatcttgtgta

SEQ ID NO: 125971 - DNA, 19 bp, Homo sapiens
  siRNA target sequence for HDAC10 (NM_032019.3,539-557).
ggtgcacagcccagagtat

SEQ ID NO: 125972 - DNA, 19 bp, Homo sapiens
  siRNA target sequence for HDAC10 (NM_032019.3,543-561).
cacagcccagagtatgtat

SEQ ID NO: 125973 - DNA, 19 bp, Homo sapiens
  siRNA target sequence for HDAC10 (NM_032019.3,618-636).
cagttcgacgccatctact

SEQ ID NO: 125974 - DNA, 19 bp, Homo sapiens
  siRNA target sequence for HDAC10 (NM_032019.3,635-653).
cttccacccgagtaccttt

SEQ ID NO: 125975 - DNA, 19 bp, Homo sapiens
  siRNA target sequence for HDAC10 (NM_032019.3,639-657).
cacccgagtacctttcact

SEQ ID NO: 125976 - DNA, 19 bp, Homo sapiens
  siRNA target sequence for HDAC10 (NM_032019.3,880-898).
gccaggggatccagtatct

SEQ ID NO: 125977 - DNA, 19 bp, Homo sapiens
  siRNA target sequence for HDAC10 (NM_032019.3,1096-1114).
cactggcctttgagtttga

SEQ ID NO: 125978 - DNA, 19 bp, Homo sapiens
  siRNA target sequence for HDAC10 (NM_032019.3,1131-1149).
gtctcggcaggatttgact

SEQ ID NO: 125979 - DNA, 19 bp, Homo sapiens
  siRNA target sequence for HDAC10 (NM_032019.3,1501-1519).
ctgggggtccagtgtgtaa

SEQ ID NO: 125980 - DNA, 19 bp, Homo sapiens
  siRNA target sequence for HDAC10 (NM_032019.3,1599-1617).
ctgacaacgccggatatca

SEQ ID NO: 125981 - DNA, 19 bp, Homo sapiens
  siRNA target sequence for HDAC10 (NM_032019.3,1601-1619).
gacaacgccggatatcaca

SEQ ID NO: 125982 - DNA, 19 bp, Homo sapiens
  siRNA target sequence for HDAC10 (NM_032019.3,1603-1621).
caacgccggatatcacatt

SEQ ID NO: 125983 - DNA, 19 bp, Homo sapiens
  siRNA target sequence for HDAC10 (NM_032019.3,1607-1625).
gccggatatcacattggtt

SEQ ID NO: 125984 - DNA, 19 bp, Homo sapiens
  siRNA target sequence for HDAC10 (NM_032019.3,1739-1757).
gctcctgtacctcttagat

SEQ ID NO: 125985 - DNA, 19 bp, Homo sapiens
  siRNA target sequence for HDAC10 (NM_032019.3,1772-1790).
gcaggtgaacagtggtata

SEQ ID NO: 125986 - DNA, 19 bp, Homo sapiens
  siRNA target sequence for HDAC10 (NM_032019.3,1775-1793).
ggtgaacagtggtatagca

SEQ ID NO: 125987 - DNA, 19 bp, Homo sapiens
  siRNA target sequence for PREX1 (NM_020820.2,292-310).
gcctcacggaggagaatgt

SEQ ID NO: 125988 - DNA, 19 bp, Homo sapiens
  siRNA target sequence for PREX1 (NM_020820.2,368-386).
cgccttggagtattgttta

SEQ ID NO: 125989 - DNA, 19 bp, Homo sapiens
  siRNA target sequence for PREX1 (NM_020820.2,370-388).
ccttggagtattgtttaca

SEQ ID NO: 125990 - DNA, 19 bp, Homo sapiens
  siRNA target sequence for PREX1 (NM_020820.2,397-415).
cgcagtctcagcatgaact

SEQ ID NO: 125991 - DNA, 19 bp, Homo sapiens
  siRNA target sequence for PREX1 (NM_020820.2,453-471).
gtgtacgaggagtattgca

SEQ ID NO: 125992 - DNA, 19 bp, Homo sapiens
  siRNA target sequence for PREX1 (NM_020820.2,718-736).
ccgtttgctccaacatcaa

SEQ ID NO: 125993 - DNA, 19 bp, Homo sapiens
  siRNA target sequence for PREX1 (NM_020820.2,719-737).
cgtttgctccaacatcaat

SEQ ID NO: 125994 - DNA, 19 bp, Homo sapiens
  siRNA target sequence for PREX1 (NM_020820.2,840-858).
ctcctgcaagggactttgt

SEQ ID NO: 125995 - DNA, 19 bp, Homo sapiens
  siRNA target sequence for PREX1 (NM_020820.2,849-867).
gggactttgttaaagatct

SEQ ID NO: 125996 - DNA, 19 bp, Homo sapiens
  siRNA target sequence for PREX1 (NM_020820.2,942-960).
gtcaccgggagcaagaagt

SEQ ID NO: 125997 - DNA, 19 bp, Homo sapiens
  siRNA target sequence for PREX1 (NM_020820.2,1012-1030).
gaatcaacactgaagtcat

SEQ ID NO: 125998 - DNA, 19 bp, Homo sapiens
  siRNA target sequence for PREX1 (NM_020820.2,1053-1071).
gggacagcggattaccata

SEQ ID NO: 125999 - DNA, 19 bp, Homo sapiens
  siRNA target sequence for PREX1 (NM_020820.2,1106-1124).
ccacaacacggccaagaat

SEQ ID NO: 126000 - DNA, 19 bp, Homo sapiens
  siRNA target sequence for PREX1 (NM_020820.2,1231-1249).
gtgatgcctacgtcatgat

SEQ ID NO: 126001 - DNA, 19 bp, Homo sapiens
  siRNA target sequence for PREX1 (NM_020820.2,1370-1388).
ctggctcctagaaattggt

SEQ ID NO: 126002 - DNA, 19 bp, Homo sapiens
  siRNA target sequence for PREX1 (NM_020820.2,1402-1420).
cggaagaaggagtcaactt

SEQ ID NO: 126003 - DNA, 19 bp, Homo sapiens
  siRNA target sequence for PREX1 (NM_020820.2,1466-1484).
caagcaccagttcaagaat

SEQ ID NO: 126004 - DNA, 19 bp, Homo sapiens
  siRNA target sequence for PREX1 (NM_020820.2,1793-1811).
ccagtacttccgctttcat

SEQ ID NO: 126005 - DNA, 19 bp, Homo sapiens
  siRNA target sequence for PREX1 (NM_020820.2,2580-2598).
cacggcgtggtgtatgagt

SEQ ID NO: 126006 - DNA, 19 bp, Homo sapiens
  siRNA target sequence for PREX1 (NM_020820.2,2582-2600).
cggcgtggtgtatgagtat

SEQ ID NO: 126007 - DNA, 19 bp, Homo sapiens
  siRNA target sequence for PREX1 (NM_020820.2,2584-2602).
gcgtggtgtatgagtatgt

SEQ ID NO: 126008 - DNA, 19 bp, Homo sapiens
  siRNA target sequence for PREX1 (NM_020820.2,2586-2604).
gtggtgtatgagtatgtga

SEQ ID NO: 126009 - DNA, 19 bp, Homo sapiens
  siRNA target sequence for PREX1 (NM_020820.2,2919-2937).
gacttctgccccaccaatt

SEQ ID NO: 126010 - DNA, 19 bp, Homo sapiens
  siRNA target sequence for PREX1 (NM_020820.2,3211-3229).
gcctcagcttcctactcaa

SEQ ID NO: 126011 - DNA, 19 bp, Homo sapiens
  siRNA target sequence for PREX1 (NM_020820.2,3704-3722).
ccaggtggactccatcaat

SEQ ID NO: 126012 - DNA, 19 bp, Homo sapiens
  siRNA target sequence for PREX1 (NM_020820.2,3766-3784).
ccaagcatttccctatgaa

SEQ ID NO: 126013 - DNA, 19 bp, Homo sapiens
  siRNA target sequence for PREX1 (NM_020820.2,3834-3852).
cggagcctgatccagatta

SEQ ID NO: 126014 - DNA, 19 bp, Homo sapiens
  siRNA target sequence for PREX1 (NM_020820.2,3838-3856).
gcctgatccagattagcat

SEQ ID NO: 126015 - DNA, 19 bp, Homo sapiens
  siRNA target sequence for PREX1 (NM_020820.2,3987-4005).
cgcagagacgcgatcttct

SEQ ID NO: 126016 - DNA, 19 bp, Homo sapiens
  siRNA target sequence for PREX1 (NM_020820.2,4063-4081).
gctaccgctacaacaacaa

SEQ ID NO: 126017 - DNA, 19 bp, Homo sapiens
  siRNA target sequence for PREX1 (NM_020820.2,4064-4082).
ctaccgctacaacaacaat

SEQ ID NO: 126018 - DNA, 19 bp, Homo sapiens
  siRNA target sequence for PREX1 (NM_020820.2,4265-4283).
gcagctggacgagaactat

SEQ ID NO: 126019 - DNA, 19 bp, Homo sapiens
  siRNA target sequence for PREX1 (NM_020820.2,4330-4348).
cgctgaaggtcatcttcta

SEQ ID NO: 126020 - DNA, 19 bp, Homo sapiens
  siRNA target sequence for PREX1 (NM_020820.2,4530-4548).
cagtattaccgcaaactca

SEQ ID NO: 126021 - DNA, 19 bp, Homo sapiens
  siRNA target sequence for PREX1 (NM_020820.2,4592-4610).
caccacggcggtaaagata

SEQ ID NO: 126022 - DNA, 19 bp, Homo sapiens
  siRNA target sequence for PREX1 (NM_020820.2,4594-4612).
ccacggcggtaaagataga

SEQ ID NO: 126023 - DNA, 19 bp, Homo sapiens
  siRNA target sequence for PREX1 (NM_020820.2,4894-4912).
gcccaagggtggagattct

SEQ ID NO: 126024 - DNA, 19 bp, Homo sapiens
  siRNA target sequence for SERPINB12 (NM_080474.1,19-37).
gcaaacaccaaattttgct

SEQ ID NO: 126025 - DNA, 19 bp, Homo sapiens
  siRNA target sequence for SERPINB12 (NM_080474.1,20-38).
caaacaccaaattttgctt

SEQ ID NO: 126026 - DNA, 19 bp, Homo sapiens
  siRNA target sequence for SERPINB12 (NM_080474.1,26-44).
ccaaattttgctttgatct

SEQ ID NO: 126027 - DNA, 19 bp, Homo sapiens
  siRNA target sequence for SERPINB12 (NM_080474.1,59-77).
gcaaagatgatcgtcataa

SEQ ID NO: 126028 - DNA, 19 bp, Homo sapiens
  siRNA target sequence for SERPINB12 (NM_080474.1,60-78).
caaagatgatcgtcataaa

SEQ ID NO: 126029 - DNA, 19 bp, Homo sapiens
  siRNA target sequence for SERPINB12 (NM_080474.1,64-82).
gatgatcgtcataaaaaca

SEQ ID NO: 126030 - DNA, 19 bp, Homo sapiens
  siRNA target sequence for SERPINB12 (NM_080474.1,143-161).
gtgacagtgcacatcagat

SEQ ID NO: 126031 - DNA, 19 bp, Homo sapiens
  siRNA target sequence for SERPINB12 (NM_080474.1,147-165).
cagtgcacatcagattgat

SEQ ID NO: 126032 - DNA, 19 bp, Homo sapiens
  siRNA target sequence for SERPINB12 (NM_080474.1,169-187).
gtactacacttcaacgaat

SEQ ID NO: 126033 - DNA, 19 bp, Homo sapiens
  siRNA target sequence for SERPINB12 (NM_080474.1,172-190).
ctacacttcaacgaatttt

SEQ ID NO: 126034 - DNA, 19 bp, Homo sapiens
  siRNA target sequence for SERPINB12 (NM_080474.1,183-201).
cgaattttcccagaatgaa

SEQ ID NO: 126035 - DNA, 19 bp, Homo sapiens
  siRNA target sequence for SERPINB12 (NM_080474.1,245-263).
ctgggtccttaaacaatga

SEQ ID NO: 126036 - DNA, 19 bp, Homo sapiens
  siRNA target sequence for SERPINB12 (NM_080474.1,247-265).
gggtccttaaacaatgaga

SEQ ID NO: 126037 - DNA, 19 bp, Homo sapiens
  siRNA target sequence for SERPINB12 (NM_080474.1,291-309).
gcagcttctctccaaatta

SEQ ID NO: 126038 - DNA, 19 bp, Homo sapiens
  siRNA target sequence for SERPINB12 (NM_080474.1,295-313).
cttctctccaaattagaca

SEQ ID NO: 126039 - DNA, 19 bp, Homo sapiens
  siRNA target sequence for SERPINB12 (NM_080474.1,315-333).
gatcaagactgattacaca

SEQ ID NO: 126040 - DNA, 19 bp, Homo sapiens
  siRNA target sequence for SERPINB12 (NM_080474.1,373-391).
ccaatctgtcaggaatact

SEQ ID NO: 126041 - DNA, 19 bp, Homo sapiens
  siRNA target sequence for SERPINB12 (NM_080474.1,374-392).
caatctgtcaggaatactt

SEQ ID NO: 126042 - DNA, 19 bp, Homo sapiens
  siRNA target sequence for SERPINB12 (NM_080474.1,417-435).
cacgacgattgaaagtgtt

SEQ ID NO: 126043 - DNA, 19 bp, Homo sapiens
  siRNA target sequence for SERPINB12 (NM_080474.1,491-509).
gtcaatcccaaggtaaaat

SEQ ID NO: 126044 - DNA, 19 bp, Homo sapiens
  siRNA target sequence for SERPINB12 (NM_080474.1,503-521).
gtaaaatcaaggaactctt

SEQ ID NO: 126045 - DNA, 19 bp, Homo sapiens
  siRNA target sequence for SERPINB12 (NM_080474.1,522-540).
cagcaaggacgctattaat

SEQ ID NO: 126046 - DNA, 19 bp, Homo sapiens
  siRNA target sequence for SERPINB12 (NM_080474.1,525-543).
caaggacgctattaatgct

SEQ ID NO: 126047 - DNA, 19 bp, Homo sapiens
  siRNA target sequence for SERPINB12 (NM_080474.1,622-640).
gatgcacctttctgtctaa

SEQ ID NO: 126048 - DNA, 19 bp, Homo sapiens
  siRNA target sequence for SERPINB12 (NM_080474.1,633-651).
ctgtctaaatgcgaatgaa

SEQ ID NO: 126049 - DNA, 19 bp, Homo sapiens
  siRNA target sequence for SERPINB12 (NM_080474.1,635-653).
gtctaaatgcgaatgaaaa

SEQ ID NO: 126050 - DNA, 19 bp, Homo sapiens
  siRNA target sequence for SERPINB12 (NM_080474.1,771-789).
gctgccatctcactctaaa

SEQ ID NO: 126051 - DNA, 19 bp, Homo sapiens
  siRNA target sequence for SERPINB12 (NM_080474.1,851-869).
ggagcagctcagaaaacat

SEQ ID NO: 126052 - DNA, 19 bp, Homo sapiens
  siRNA target sequence for SERPINB12 (NM_080474.1,951-969).
gggcattacggatatcttt

SEQ ID NO: 126053 - DNA, 19 bp, Homo sapiens
  siRNA target sequence for SERPINB12 (NM_080474.1,954-972).
cattacggatatctttgat

SEQ ID NO: 126054 - DNA, 19 bp, Homo sapiens
  siRNA target sequence for SERPINB12 (NM_080474.1,973-991).
gaaacgagggctgatctta

SEQ ID NO: 126055 - DNA, 19 bp, Homo sapiens
  siRNA target sequence for SERPINB12 (NM_080474.1,1001-1019).
ctccaagtcccaatttgta

SEQ ID NO: 126056 - DNA, 19 bp, Homo sapiens
  siRNA target sequence for SERPINB12 (NM_080474.1,1003-1021).
ccaagtcccaatttgtact

SEQ ID NO: 126057 - DNA, 19 bp, Homo sapiens
  siRNA target sequence for SERPINB12 (NM_080474.1,1004-1022).
caagtcccaatttgtactt

SEQ ID NO: 126058 - DNA, 19 bp, Homo sapiens
  siRNA target sequence for SERPINB12 (NM_080474.1,1009-1027).
cccaatttgtacttgtcaa

SEQ ID NO: 126059 - DNA, 19 bp, Homo sapiens
  siRNA target sequence for SERPINB12 (NM_080474.1,1010-1028).
ccaatttgtacttgtcaaa

SEQ ID NO: 126060 - DNA, 19 bp, Homo sapiens
  siRNA target sequence for SERPINB12 (NM_080474.1,1117-1135).
cgatcttgggtggagttta

SEQ ID NO: 126061 - DNA, 19 bp, Homo sapiens
  siRNA target sequence for SERPINB12 (NM_080474.1,1118-1136).
gatcttgggtggagtttaa

SEQ ID NO: 126062 - DNA, 19 bp, Homo sapiens
  siRNA target sequence for UBE2L3 (NM_198157.1,374-392).
caaaaccgaccaagaaact

SEQ ID NO: 126063 - DNA, 19 bp, Homo sapiens
  siRNA target sequence for UBE2L3 (NM_198157.1,419-437).
cagatccagccttgaagtt

SEQ ID NO: 126064 - DNA, 19 bp, Homo sapiens
  siRNA target sequence for UBE2L3 (NM_198157.1,421-439).
gatccagccttgaagttct

SEQ ID NO: 126065 - DNA, 19 bp, Homo sapiens
  siRNA target sequence for APBB1 (NM_001164.2,121-139).
gagccagtcggccattaat

SEQ ID NO: 126066 - DNA, 19 bp, Homo sapiens
  siRNA target sequence for APBB1 (NM_001164.2,356-374).
gaccagaatcgcaatgtga

SEQ ID NO: 126067 - DNA, 19 bp, Homo sapiens
  siRNA target sequence for APBB1 (NM_001164.2,672-690).
ggccccaagcccttacaga

SEQ ID NO: 126068 - DNA, 19 bp, Homo sapiens
  siRNA target sequence for APBB1 (NM_001164.2,810-828).
cagaggacacagattcctt

SEQ ID NO: 126069 - DNA, 19 bp, Homo sapiens
  siRNA target sequence for APBB1 (NM_001164.2,997-1015).
gctcacctggacaggtttt

SEQ ID NO: 126070 - DNA, 19 bp, Homo sapiens
  siRNA target sequence for APBB1 (NM_001164.2,1000-1018).
cacctggacaggttttgct

SEQ ID NO: 126071 - DNA, 19 bp, Homo sapiens
  siRNA target sequence for APBB1 (NM_001164.2,1221-1239).
ccctaggctgggtagagat

SEQ ID NO: 126072 - DNA, 19 bp, Homo sapiens
  siRNA target sequence for APBB1 (NM_001164.2,1269-1287).
gcagtgtggcagtcaacaa

SEQ ID NO: 126073 - DNA, 19 bp, Homo sapiens
  siRNA target sequence for APBB1 (NM_001164.2,1270-1288).
cagtgtggcagtcaacaat

SEQ ID NO: 126074 - DNA, 19 bp, Homo sapiens
  siRNA target sequence for APBB1 (NM_001164.2,1274-1292).
gtggcagtcaacaattgca

SEQ ID NO: 126075 - DNA, 19 bp, Homo sapiens
  siRNA target sequence for APBB1 (NM_001164.2,1381-1399).
ggatgagacactaaagcta

SEQ ID NO: 126076 - DNA, 19 bp, Homo sapiens
  siRNA target sequence for APBB1 (NM_001164.2,1427-1445).
cacgcccaacccatcatca

SEQ ID NO: 126077 - DNA, 19 bp, Homo sapiens
  siRNA target sequence for APBB1 (NM_001164.2,1497-1515).
cctacgtagctcgtgataa

SEQ ID NO: 126078 - DNA, 19 bp, Homo sapiens
  siRNA target sequence for APBB1 (NM_001164.2,1627-1645).
ccgctgcttggtaaatgga

SEQ ID NO: 126079 - DNA, 19 bp, Homo sapiens
  siRNA target sequence for APBB1 (NM_001164.2,1648-1666).
ctccctggaccactctaaa

SEQ ID NO: 126080 - DNA, 19 bp, Homo sapiens
  siRNA target sequence for APBB1 (NM_001164.2,1650-1668).
ccctggaccactctaaact

SEQ ID NO: 126081 - DNA, 19 bp, Homo sapiens
  siRNA target sequence for APBB1 (NM_001164.2,1651-1669).
cctggaccactctaaactt

SEQ ID NO: 126082 - DNA, 19 bp, Homo sapiens
  siRNA target sequence for APBB1 (NM_001164.2,1735-1753).
ctattacctggggaatgta

SEQ ID NO: 126083 - DNA, 19 bp, Homo sapiens
  siRNA target sequence for APBB1 (NM_001164.2,1949-1967).
gatgtccacacgtttgcat

SEQ ID NO: 126084 - DNA, 19 bp, Homo sapiens
  siRNA target sequence for BAIAP1 (NM_004742.1,575-593).
cctgcgacattttctcaat

SEQ ID NO: 126085 - DNA, 19 bp, Homo sapiens
  siRNA target sequence for BAIAP1 (NM_004742.1,635-653).
gaccataagggataacctt

SEQ ID NO: 126086 - DNA, 19 bp, Homo sapiens
  siRNA target sequence for BAIAP1 (NM_004742.1,637-655).
ccataagggataaccttta

SEQ ID NO: 126087 - DNA, 19 bp, Homo sapiens
  siRNA target sequence for BAIAP1 (NM_004742.1,702-720).
gtgcctggcgtggactata

SEQ ID NO: 126088 - DNA, 19 bp, Homo sapiens
  siRNA target sequence for BAIAP1 (NM_004742.1,705-723).
cctggcgtggactataact

SEQ ID NO: 126089 - DNA, 19 bp, Homo sapiens
  siRNA target sequence for BAIAP1 (NM_004742.1,706-724).
ctggcgtggactataactt

SEQ ID NO: 126090 - DNA, 19 bp, Homo sapiens
  siRNA target sequence for BAIAP1 (NM_004742.1,709-727).
gcgtggactataactttct

SEQ ID NO: 126091 - DNA, 19 bp, Homo sapiens
  siRNA target sequence for BAIAP1 (NM_004742.1,773-791).
ggaagtcggcacctatgaa

SEQ ID NO: 126092 - DNA, 19 bp, Homo sapiens
  siRNA target sequence for BAIAP1 (NM_004742.1,902-920).
gcgaaccaagtcctacaat

SEQ ID NO: 126093 - DNA, 19 bp, Homo sapiens
  siRNA target sequence for BAIAP1 (NM_004742.1,966-984).
gatgacgttcctgaaatga

SEQ ID NO: 126094 - DNA, 19 bp, Homo sapiens
  siRNA target sequence for BAIAP1 (NM_004742.1,969-987).
gacgttcctgaaatgaaca

SEQ ID NO: 126095 - DNA, 19 bp, Homo sapiens
  siRNA target sequence for BAIAP1 (NM_004742.1,1000-1018).
ccgattctggtgaacaaga

SEQ ID NO: 126096 - DNA, 19 bp, Homo sapiens
  siRNA target sequence for BAIAP1 (NM_004742.1,1022-1040).
gcacactctccaagaaaca

SEQ ID NO: 126097 - DNA, 19 bp, Homo sapiens
  siRNA target sequence for BAIAP1 (NM_004742.1,1031-1049).
ccaagaaacagcattacca

SEQ ID NO: 126098 - DNA, 19 bp, Homo sapiens
  siRNA target sequence for BAIAP1 (NM_004742.1,1041-1059).
gcattaccacctgtgaata

SEQ ID NO: 126099 - DNA, 19 bp, Homo sapiens
  siRNA target sequence for BAIAP1 (NM_004742.1,1097-1115).
gaagttccctcaataccta

SEQ ID NO: 126100 - DNA, 19 bp, Homo sapiens
  siRNA target sequence for BAIAP1 (NM_004742.1,1140-1158).
ggtcctctacctgaaaact

SEQ ID NO: 126101 - DNA, 19 bp, Homo sapiens
  siRNA target sequence for BAIAP1 (NM_004742.1,1160-1178).
ggagatggcctatactgaa

SEQ ID NO: 126102 - DNA, 19 bp, Homo sapiens
  siRNA target sequence for BAIAP1 (NM_004742.1,1161-1179).
gagatggcctatactgaaa

SEQ ID NO: 126103 - DNA, 19 bp, Homo sapiens
  siRNA target sequence for BAIAP1 (NM_004742.1,1163-1181).
gatggcctatactgaaaat

SEQ ID NO: 126104 - DNA, 19 bp, Homo sapiens
  siRNA target sequence for BAIAP1 (NM_004742.1,1343-1361).
gattgaagaccctgtctat

SEQ ID NO: 126105 - DNA, 19 bp, Homo sapiens
  siRNA target sequence for BAIAP1 (NM_004742.1,1347-1365).
gaagaccctgtctatggta

SEQ ID NO: 126106 - DNA, 19 bp, Homo sapiens
  siRNA target sequence for BAIAP1 (NM_004742.1,1354-1372).
ctgtctatggtatctacta

SEQ ID NO: 126107 - DNA, 19 bp, Homo sapiens
  siRNA target sequence for BAIAP1 (NM_004742.1,1358-1376).
ctatggtatctactatgta

SEQ ID NO: 126108 - DNA, 19 bp, Homo sapiens
  siRNA target sequence for BAIAP1 (NM_004742.1,1604-1622).
gggcaaacccttttttaca

SEQ ID NO: 126109 - DNA, 19 bp, Homo sapiens
  siRNA target sequence for BAIAP1 (NM_004742.1,1624-1642).
gaaacccttctgagttgaa

SEQ ID NO: 126110 - DNA, 19 bp, Homo sapiens
  siRNA target sequence for BAIAP1 (NM_004742.1,1722-1740).
gagtttctccagatcaaga

SEQ ID NO: 126111 - DNA, 19 bp, Homo sapiens
  siRNA target sequence for BAIAP1 (NM_004742.1,1929-1947).
gatgaccccaatacaagtt

SEQ ID NO: 126112 - DNA, 19 bp, Homo sapiens
  siRNA target sequence for BAIAP1 (NM_004742.1,1935-1953).
cccaatacaagtttagtga

SEQ ID NO: 126113 - DNA, 19 bp, Homo sapiens
  siRNA target sequence for BAIAP1 (NM_004742.1,1955-1973).
ctcggtagccattttggat

SEQ ID NO: 126114 - DNA, 19 bp, Homo sapiens
  siRNA target sequence for BAIAP1 (NM_004742.1,2016-2034).
ccagctagccacagtagta

SEQ ID NO: 126115 - DNA, 19 bp, Homo sapiens
  siRNA target sequence for BAIAP1 (NM_004742.1,2019-2037).
gctagccacagtagtaaaa

SEQ ID NO: 126116 - DNA, 19 bp, Homo sapiens
  siRNA target sequence for BAIAP1 (NM_004742.1,2082-2100).
gcggacgtggcttcaaata

SEQ ID NO: 126117 - DNA, 19 bp, Homo sapiens
  siRNA target sequence for BAIAP1 (NM_004742.1,2084-2102).
ggacgtggcttcaaatagt

SEQ ID NO: 126118 - DNA, 19 bp, Homo sapiens
  siRNA target sequence for BAIAP1 (NM_004742.1,2085-2103).
gacgtggcttcaaatagtt

SEQ ID NO: 126119 - DNA, 19 bp, Homo sapiens
  siRNA target sequence for BAIAP1 (NM_004742.1,2104-2122).
ctcatggttatcctaatga

SEQ ID NO: 126120 - DNA, 19 bp, Homo sapiens
  siRNA target sequence for BAIAP1 (NM_004742.1,2149-2167).
ccactcagccagaactcat

SEQ ID NO: 126121 - DNA, 19 bp, Homo sapiens
  siRNA target sequence for BAIAP1 (NM_004742.1,2160-2178).
gaactcataactgttcata

SEQ ID NO: 126122 - DNA, 19 bp, Homo sapiens
  siRNA target sequence for BAIAP1 (NM_004742.1,2270-2288).
gtgccgaggcctgaaagaa

SEQ ID NO: 126123 - DNA, 19 bp, Homo sapiens
  siRNA target sequence for BAIAP1 (NM_004742.1,2282-2300).
gaaagaaggggatctcata

SEQ ID NO: 126124 - DNA, 19 bp, Homo sapiens
  siRNA target sequence for BAIAP1 (NM_004742.1,2292-2310).
gatctcatagtggaagtta

SEQ ID NO: 126125 - DNA, 19 bp, Homo sapiens
  siRNA target sequence for BAIAP1 (NM_004742.1,2591-2609).
ctctggccagaaaaaacca

SEQ ID NO: 126126 - DNA, 19 bp, Homo sapiens
  siRNA target sequence for BAIAP1 (NM_004742.1,2720-2738).
cacgaattttggagaatgt

SEQ ID NO: 126127 - DNA, 19 bp, Homo sapiens
  siRNA target sequence for BAIAP1 (NM_004742.1,2737-2755).
gtccgattccagattacca

SEQ ID NO: 126128 - DNA, 19 bp, Homo sapiens
  siRNA target sequence for BAIAP1 (NM_004742.1,2823-2841).
ccaggggaacctatttata

SEQ ID NO: 126129 - DNA, 19 bp, Homo sapiens
  siRNA target sequence for BAIAP1 (NM_004742.1,2888-2906).
gaggtctggagatgaatta

SEQ ID NO: 126130 - DNA, 19 bp, Homo sapiens
  siRNA target sequence for BAIAP1 (NM_004742.1,2890-2908).
ggtctggagatgaattaat

SEQ ID NO: 126131 - DNA, 19 bp, Homo sapiens
  siRNA target sequence for BAIAP1 (NM_004742.1,2919-2937).
gggacgccagtaattggaa

SEQ ID NO: 126132 - DNA, 19 bp, Homo sapiens
  siRNA target sequence for BAIAP1 (NM_004742.1,2920-2938).
ggacgccagtaattggaaa

SEQ ID NO: 126133 - DNA, 19 bp, Homo sapiens
  siRNA target sequence for BAIAP1 (NM_004742.1,2982-3000).
caaggccacgtcaatctca

SEQ ID NO: 126134 - DNA, 19 bp, Homo sapiens
  siRNA target sequence for BAIAP1 (NM_004742.1,3005-3023).
gcggcgtaaagtggttttt

SEQ ID NO: 126135 - DNA, 19 bp, Homo sapiens
  siRNA target sequence for BAIAP1 (NM_004742.1,3350-3368).
caaaataggtcggattatt

SEQ ID NO: 126136 - DNA, 19 bp, Homo sapiens
  siRNA target sequence for BAIAP1 (NM_004742.1,3449-3467).
caaatcccattcagacatt

SEQ ID NO: 126137 - DNA, 19 bp, Homo sapiens
  siRNA target sequence for BAIAP1 (NM_004742.1,3639-3657).
caggaatctcaatttgagt

SEQ ID NO: 126138 - DNA, 19 bp, Homo sapiens
  siRNA target sequence for BAIAP1 (NM_004742.1,3680-3698).
ggagcaagatttttacact

SEQ ID NO: 126139 - DNA, 19 bp, Homo sapiens
  siRNA target sequence for BAIAP1 (NM_004742.1,3875-3893).
gcattctcgagctatagaa

SEQ ID NO: 126140 - DNA, 19 bp, Homo sapiens
  siRNA target sequence for BAIAP1 (NM_004742.1,3880-3898).
ctcgagctatagaactgat

SEQ ID NO: 126141 - DNA, 19 bp, Homo sapiens
  siRNA target sequence for BAIAP1 (NM_004742.1,3882-3900).
cgagctatagaactgatta

SEQ ID NO: 126142 - DNA, 19 bp, Homo sapiens
  siRNA target sequence for BAIAP1 (NM_004742.1,3885-3903).
gctatagaactgattaaga

SEQ ID NO: 126143 - DNA, 19 bp, Homo sapiens
  siRNA target sequence for BAIAP1 (NM_004742.1,3911-3929).
ccgcagagttcgtctgttt

SEQ ID NO: 126144 - DNA, 19 bp, Homo sapiens
  siRNA target sequence for BAIAP1 (NM_004742.1,3913-3931).
gcagagttcgtctgtttct

SEQ ID NO: 126145 - DNA, 19 bp, Homo sapiens
  siRNA target sequence for BAIAP1 (NM_004742.1,3944-3962).
cggctcagtaccagaatat

SEQ ID NO: 126146 - DNA, 19 bp, Homo sapiens
  siRNA target sequence for BAIAP1 (NM_004742.1,3947-3965).
ctcagtaccagaatatggt

SEQ ID NO: 126147 - DNA, 19 bp, Homo sapiens
  siRNA target sequence for BAIAP1 (NM_004742.1,3957-3975).
gaatatggtgggtcaaact

SEQ ID NO: 126148 - DNA, 19 bp, Homo sapiens
  siRNA target sequence for CTBP1 (NM_001328.1,92-110).
gtccgacctccgatcatga

SEQ ID NO: 126149 - DNA, 19 bp, Homo sapiens
  siRNA target sequence for CTBP1 (NM_001328.1,337-355).
ccggattggcagtggtttt

SEQ ID NO: 126150 - DNA, 19 bp, Homo sapiens
  siRNA target sequence for CTBP1 (NM_001328.1,339-357).
ggattggcagtggttttga

SEQ ID NO: 126151 - DNA, 19 bp, Homo sapiens
  siRNA target sequence for DLG4 (NM_001365.1,1003-1021).
cctctcagagagtcagaaa

SEQ ID NO: 126152 - DNA, 19 bp, Homo sapiens
  siRNA target sequence for DLG4 (NM_001365.1,1087-1105).
caattctcccccagtgatt

SEQ ID NO: 126153 - DNA, 19 bp, Homo sapiens
  siRNA target sequence for DLG4 (NM_001365.1,1120-1138).
cctagaagccccaggatat

SEQ ID NO: 126154 - DNA, 19 bp, Homo sapiens
  siRNA target sequence for DLG4 (NM_001365.1,1158-1176).
ccgagggggagatggaata

SEQ ID NO: 126155 - DNA, 19 bp, Homo sapiens
  siRNA target sequence for DLG4 (NM_001365.1,1172-1190).
gaatacgaggaaatcacat

SEQ ID NO: 126156 - DNA, 19 bp, Homo sapiens
  siRNA target sequence for DLG4 (NM_001365.1,1177-1195).
cgaggaaatcacattggaa

SEQ ID NO: 126157 - DNA, 19 bp, Homo sapiens
  siRNA target sequence for DLG4 (NM_001365.1,1252-1270).
cggtgacgacccatccatt

SEQ ID NO: 126158 - DNA, 19 bp, Homo sapiens
  siRNA target sequence for DLG4 (NM_001365.1,1253-1271).
ggtgacgacccatccattt

SEQ ID NO: 126159 - DNA, 19 bp, Homo sapiens
  siRNA target sequence for DLG4 (NM_001365.1,1254-1272).
gtgacgacccatccatttt

SEQ ID NO: 126160 - DNA, 19 bp, Homo sapiens
  siRNA target sequence for DLG4 (NM_001365.1,1259-1277).
gacccatccattttcatca

SEQ ID NO: 126161 - DNA, 19 bp, Homo sapiens
  siRNA target sequence for DLG4 (NM_001365.1,1413-1431).
ccatcgttcgcctctatgt

SEQ ID NO: 126162 - DNA, 19 bp, Homo sapiens
  siRNA target sequence for DLG4 (NM_001365.1,1477-1495).
catcaaggggcctaaaggt

SEQ ID NO: 126163 - DNA, 19 bp, Homo sapiens
  siRNA target sequence for DLG4 (NM_001365.1,1651-1669).
ggacgtcatgcatgaagat

SEQ ID NO: 126164 - DNA, 19 bp, Homo sapiens
  siRNA target sequence for DLG4 (NM_001365.1,1684-1702).
gaagaacacgtatgatgtt

SEQ ID NO: 126165 - DNA, 19 bp, Homo sapiens
  siRNA target sequence for DLG4 (NM_001365.1,1754-1772).
gctcccccagacatcacaa

SEQ ID NO: 126166 - DNA, 19 bp, Homo sapiens
  siRNA target sequence for DLG4 (NM_001365.1,1763-1781).
gacatcacaacctcttatt

SEQ ID NO: 126167 - DNA, 19 bp, Homo sapiens
  siRNA target sequence for DLG4 (NM_001365.1,1891-1909).
gctcggggaggaagacatt

SEQ ID NO: 126168 - DNA, 19 bp, Homo sapiens
  siRNA target sequence for DLG4 (NM_001365.1,1914-1932).
gagaaccgaggcgaattgt

SEQ ID NO: 126169 - DNA, 19 bp, Homo sapiens
  siRNA target sequence for DLG4 (NM_001365.1,1916-1934).
gaaccgaggcgaattgtga

SEQ ID NO: 126170 - DNA, 19 bp, Homo sapiens
  siRNA target sequence for DLG4 (NM_001365.1,2146-2164).
cacgatcatcgctcagtat

SEQ ID NO: 126171 - DNA, 19 bp, Homo sapiens
  siRNA target sequence for DLG4 (NM_001365.1,2148-2166).
cgatcatcgctcagtataa

SEQ ID NO: 126172 - DNA, 19 bp, Homo sapiens
  siRNA target sequence for DLG4 (NM_001365.1,2149-2167).
gatcatcgctcagtataaa

SEQ ID NO: 126173 - DNA, 19 bp, Homo sapiens
  siRNA target sequence for DLG4 (NM_001365.1,2152-2170).
catcgctcagtataaacca

SEQ ID NO: 126174 - DNA, 19 bp, Homo sapiens
  siRNA target sequence for DLG4 (NM_001365.1,2210-2228).
cgggaacagctcatgaaca

SEQ ID NO: 126175 - DNA, 19 bp, Homo sapiens
  siRNA target sequence for DLG4 (NM_001365.1,2267-2285).
cccaaaaggggtttctaca

SEQ ID NO: 126176 - DNA, 19 bp, Homo sapiens
  siRNA target sequence for DLG4 (NM_001365.1,2477-2495).
cgagagtggtcaaggttaa

SEQ ID NO: 126177 - DNA, 19 bp, Homo sapiens
  siRNA target sequence for DLG4 (NM_001365.1,2646-2664).
ccgagttccccgacaagtt

SEQ ID NO: 126178 - DNA, 19 bp, Homo sapiens
  siRNA target sequence for DLG4 (NM_001365.1,2647-2665).
cgagttccccgacaagttt

SEQ ID NO: 126179 - DNA, 19 bp, Homo sapiens
  siRNA target sequence for DLG4 (NM_001365.1,2694-2712).
ccaagcgggagtatgagat

SEQ ID NO: 126180 - DNA, 19 bp, Homo sapiens
  siRNA target sequence for DLG4 (NM_001365.1,2698-2716).
gcgggagtatgagatagat

SEQ ID NO: 126181 - DNA, 19 bp, Homo sapiens
  siRNA target sequence for DLG4 (NM_001365.1,2735-2753).
gtgtcgtcccgggagaaaa

SEQ ID NO: 126182 - DNA, 19 bp, Homo sapiens
  siRNA target sequence for DLG4 (NM_001365.1,2739-2757).
cgtcccgggagaaaatgga

SEQ ID NO: 126183 - DNA, 19 bp, Homo sapiens
  siRNA target sequence for DLG4 (NM_001365.1,2953-2971).
ggagaatgtgctagagatt

SEQ ID NO: 126184 - DNA, 19 bp, Homo sapiens
  siRNA target sequence for HSPB7 (NM_014424.3,524-542).
gcggagagaagtttccatt

SEQ ID NO: 126185 - DNA, 19 bp, Homo sapiens
  siRNA target sequence for HSPB7 (NM_014424.3,619-637).
gaaggccctgagcatgttt

SEQ ID NO: 126186 - DNA, 19 bp, Homo sapiens
  siRNA target sequence for HSPB7 (NM_014424.3,725-743).
ctaggagacgcctatgagt

SEQ ID NO: 126187 - DNA, 19 bp, Homo sapiens
  siRNA target sequence for HSPB7 (NM_014424.3,948-966).
ggcgtcacccgcatacaga

SEQ ID NO: 126188 - DNA, 19 bp, Homo sapiens
  siRNA target sequence for HSPB7 (NM_014424.3,949-967).
gcgtcacccgcatacagaa

SEQ ID NO: 126189 - DNA, 19 bp, Homo sapiens
  siRNA target sequence for HSPB7 (NM_014424.3,981-999).
ccttccggacggagatcaa

SEQ ID NO: 126190 - DNA, 19 bp, Homo sapiens
  siRNA target sequence for HSPB7 (NM_014424.3,982-1000).
cttccggacggagatcaaa

SEQ ID NO: 126191 - DNA, 19 bp, Homo sapiens
  siRNA target sequence for HSPB7 (NM_014424.3,986-1004).
cggacggagatcaaaatct

SEQ ID NO: 126192 - DNA, 19 bp, Homo sapiens
  siRNA target sequence for ITGB1BP1 (NM_004763.2,211-229).
ccaaagtagcgaaatcagt

SEQ ID NO: 126193 - DNA, 19 bp, Homo sapiens
  siRNA target sequence for ITGB1BP1 (NM_004763.2,216-234).
gtagcgaaatcagtactaa

SEQ ID NO: 126194 - DNA, 19 bp, Homo sapiens
  siRNA target sequence for ITGB1BP1 (NM_004763.2,345-363).
cctgtgcagaatttcgaat

SEQ ID NO: 126195 - DNA, 19 bp, Homo sapiens
  siRNA target sequence for ITGB1BP1 (NM_004763.2,346-364).
ctgtgcagaatttcgaata

SEQ ID NO: 126196 - DNA, 19 bp, Homo sapiens
  siRNA target sequence for ITGB1BP1 (NM_004763.2,348-366).
gtgcagaatttcgaataaa

SEQ ID NO: 126197 - DNA, 19 bp, Homo sapiens
  siRNA target sequence for ITGB1BP1 (NM_004763.2,411-429).
gccttgaagggccattaga

SEQ ID NO: 126198 - DNA, 19 bp, Homo sapiens
  siRNA target sequence for ITGB1BP1 (NM_004763.2,482-500).
cctccggaggaagaattta

SEQ ID NO: 126199 - DNA, 19 bp, Homo sapiens
  siRNA target sequence for ITGB1BP1 (NM_004763.2,513-531).
ccaagtatggcataaaagt

SEQ ID NO: 126200 - DNA, 19 bp, Homo sapiens
  siRNA target sequence for ITGB1BP1 (NM_004763.2,514-532).
caagtatggcataaaagta

SEQ ID NO: 126201 - DNA, 19 bp, Homo sapiens
  siRNA target sequence for ITGB1BP1 (NM_004763.2,517-535).
gtatggcataaaagtatca

SEQ ID NO: 126202 - DNA, 19 bp, Homo sapiens
  siRNA target sequence for ITGB1BP1 (NM_004763.2,537-555).
catcagatcaatatgatgt

SEQ ID NO: 126203 - DNA, 19 bp, Homo sapiens
  siRNA target sequence for ITGB1BP1 (NM_004763.2,562-580).
caggcatgctctctactta

SEQ ID NO: 126204 - DNA, 19 bp, Homo sapiens
  siRNA target sequence for ITGB1BP1 (NM_004763.2,565-583).
gcatgctctctacttaata

SEQ ID NO: 126205 - DNA, 19 bp, Homo sapiens
  siRNA target sequence for ITGB1BP1 (NM_004763.2,586-604).
ccggatggtgtgttacgat

SEQ ID NO: 126206 - DNA, 19 bp, Homo sapiens
  siRNA target sequence for ITGB3BP (NM_014288.3,52-70).
gaagttggatggtctgtta

SEQ ID NO: 126207 - DNA, 19 bp, Homo sapiens
  siRNA target sequence for ITGB3BP (NM_014288.3,58-76).
ggatggtctgttagaagaa

SEQ ID NO: 126208 - DNA, 19 bp, Homo sapiens
  siRNA target sequence for ITGB3BP (NM_014288.3,86-104).
gatccttcaaaaatcacaa

SEQ ID NO: 126209 - DNA, 19 bp, Homo sapiens
  siRNA target sequence for ITGB3BP (NM_014288.3,135-153).
caactggaacttgtcaaat

SEQ ID NO: 126210 - DNA, 19 bp, Homo sapiens
  siRNA target sequence for ITGB3BP (NM_014288.3,144-162).
cttgtcaaatgagtctatt

SEQ ID NO: 126211 - DNA, 19 bp, Homo sapiens
  siRNA target sequence for ITGB3BP (NM_014288.3,174-192).
caagttctgaagagcaaaa

SEQ ID NO: 126212 - DNA, 19 bp, Homo sapiens
  siRNA target sequence for ITGB3BP (NM_014288.3,194-212).
cacagaaatggactatcaa

SEQ ID NO: 126213 - DNA, 19 bp, Homo sapiens
  siRNA target sequence for ITGB3BP (NM_014288.3,275-293).
gacaatgatgaattcatga

SEQ ID NO: 126214 - DNA, 19 bp, Homo sapiens
  siRNA target sequence for ITGB3BP (NM_014288.3,284-302).
gaattcatgatgttgctat

SEQ ID NO: 126215 - DNA, 19 bp, Homo sapiens
  siRNA target sequence for ITGB3BP (NM_014288.3,374-392).
ggcagtagagagcttgaaa

SEQ ID NO: 126216 - DNA, 19 bp, Homo sapiens
  siRNA target sequence for ITGB3BP (NM_014288.3,375-393).
gcagtagagagcttgaaaa

SEQ ID NO: 126217 - DNA, 19 bp, Homo sapiens
  siRNA target sequence for ITGB3BP (NM_014288.3,408-426).
cctgtgcatcacatttctt

SEQ ID NO: 126218 - DNA, 19 bp, Homo sapiens
  siRNA target sequence for ITGB3BP (NM_014288.3,530-548).
gacagctatgaattcctta

SEQ ID NO: 126219 - DNA, 19 bp, Homo sapiens
  siRNA target sequence for MLLT4 (NM_005936.1,92-110).
gccagccgaccgaggattt

SEQ ID NO: 126220 - DNA, 19 bp, Homo sapiens
  siRNA target sequence for MLLT4 (NM_005936.1,157-175).
ggaaactttgcaacaaaat

SEQ ID NO: 126221 - DNA, 19 bp, Homo sapiens
  siRNA target sequence for MLLT4 (NM_005936.1,201-219).
cactcaagatgtaatcgaa

SEQ ID NO: 126222 - DNA, 19 bp, Homo sapiens
  siRNA target sequence for MLLT4 (NM_005936.1,217-235).
gaaacgctcgcggagaaat

SEQ ID NO: 126223 - DNA, 19 bp, Homo sapiens
  siRNA target sequence for MLLT4 (NM_005936.1,222-240).
gctcgcggagaaatttcga

SEQ ID NO: 126224 - DNA, 19 bp, Homo sapiens
  siRNA target sequence for MLLT4 (NM_005936.1,292-310).
gtcagcggagaaagaagat

SEQ ID NO: 126225 - DNA, 19 bp, Homo sapiens
  siRNA target sequence for MLLT4 (NM_005936.1,297-315).
cggagaaagaagattggat

SEQ ID NO: 126226 - DNA, 19 bp, Homo sapiens
  siRNA target sequence for MLLT4 (NM_005936.1,329-347).
ctctagttgtacaactgaa

SEQ ID NO: 126227 - DNA, 19 bp, Homo sapiens
  siRNA target sequence for MLLT4 (NM_005936.1,331-349).
ctagttgtacaactgaatt

SEQ ID NO: 126228 - DNA, 19 bp, Homo sapiens
  siRNA target sequence for MLLT4 (NM_005936.1,334-352).
gttgtacaactgaattgga

SEQ ID NO: 126229 - DNA, 19 bp, Homo sapiens
  siRNA target sequence for MLLT4 (NM_005936.1,422-440).
gtaatggacctgaaaagca

SEQ ID NO: 126230 - DNA, 19 bp, Homo sapiens
  siRNA target sequence for MLLT4 (NM_005936.1,451-469).
ggggttatccagaacttca

SEQ ID NO: 126231 - DNA, 19 bp, Homo sapiens
  siRNA target sequence for MLLT4 (NM_005936.1,452-470).
gggttatccagaacttcaa

SEQ ID NO: 126232 - DNA, 19 bp, Homo sapiens
  siRNA target sequence for MLLT4 (NM_005936.1,595-613).
gctgaggtttacaaagaca

SEQ ID NO: 126233 - DNA, 19 bp, Homo sapiens
  siRNA target sequence for MLLT4 (NM_005936.1,624-642).
cagctttactcgaaccatt

SEQ ID NO: 126234 - DNA, 19 bp, Homo sapiens
  siRNA target sequence for MLLT4 (NM_005936.1,627-645).
ctttactcgaaccatttct

SEQ ID NO: 126235 - DNA, 19 bp, Homo sapiens
  siRNA target sequence for MLLT4 (NM_005936.1,644-662).
ctaatcctgaggtggttat

SEQ ID NO: 126236 - DNA, 19 bp, Homo sapiens
  siRNA target sequence for MLLT4 (NM_005936.1,667-685).
cgacggaggcagcaaaaat

SEQ ID NO: 126237 - DNA, 19 bp, Homo sapiens
  siRNA target sequence for MLLT4 (NM_005936.1,1143-1161).
gaagctgccctatttagta

SEQ ID NO: 126238 - DNA, 19 bp, Homo sapiens
  siRNA target sequence for MLLT4 (NM_005936.1,1209-1227).
ccgccttcagttaagtgtt

SEQ ID NO: 126239 - DNA, 19 bp, Homo sapiens
  siRNA target sequence for MLLT4 (NM_005936.1,1231-1249).
gaagttgggacagaaaagt

SEQ ID NO: 126240 - DNA, 19 bp, Homo sapiens
  siRNA target sequence for MLLT4 (NM_005936.1,1257-1275).
caactctatccagttgttt

SEQ ID NO: 126241 - DNA, 19 bp, Homo sapiens
  siRNA target sequence for MLLT4 (NM_005936.1,1346-1364).
gtatggacgcagaaaccta

SEQ ID NO: 126242 - DNA, 19 bp, Homo sapiens
  siRNA target sequence for MLLT4 (NM_005936.1,1426-1444).
ggggcgtcccatgtattta

SEQ ID NO: 126243 - DNA, 19 bp, Homo sapiens
  siRNA target sequence for MLLT4 (NM_005936.1,1427-1445).
gggcgtcccatgtatttaa

SEQ ID NO: 126244 - DNA, 19 bp, Homo sapiens
  siRNA target sequence for MLLT4 (NM_005936.1,1429-1447).
gcgtcccatgtatttaagt

SEQ ID NO: 126245 - DNA, 19 bp, Homo sapiens
  siRNA target sequence for MLLT4 (NM_005936.1,1430-1448).
cgtcccatgtatttaagtt

SEQ ID NO: 126246 - DNA, 19 bp, Homo sapiens
  siRNA target sequence for MLLT4 (NM_005936.1,1492-1510).
gatggaggcctgatggtta

SEQ ID NO: 126247 - DNA, 19 bp, Homo sapiens
  siRNA target sequence for MLLT4 (NM_005936.1,1506-1524).
ggttaagggcccaagacat

SEQ ID NO: 126248 - DNA, 19 bp, Homo sapiens
  siRNA target sequence for MLLT4 (NM_005936.1,1512-1530).
gggcccaagacataaacct

SEQ ID NO: 126249 - DNA, 19 bp, Homo sapiens
  siRNA target sequence for MLLT4 (NM_005936.1,1560-1578).
gggaggagatattcatagt

SEQ ID NO: 126250 - DNA, 19 bp, Homo sapiens
  siRNA target sequence for MLLT4 (NM_005936.1,1673-1691).
cgatgatcagagtagaaca

SEQ ID NO: 126251 - DNA, 19 bp, Homo sapiens
  siRNA target sequence for MLLT4 (NM_005936.1,1699-1717).
gattatcgcaggcaagaaa

SEQ ID NO: 126252 - DNA, 19 bp, Homo sapiens
  siRNA target sequence for MLLT4 (NM_005936.1,1749-1767).
gatactacctgcaagcatt

SEQ ID NO: 126253 - DNA, 19 bp, Homo sapiens
  siRNA target sequence for MLLT4 (NM_005936.1,1756-1774).
cctgcaagcattgaattca

SEQ ID NO: 126254 - DNA, 19 bp, Homo sapiens
  siRNA target sequence for MLLT4 (NM_005936.1,1776-1794).
ggaaagttctgaagattca

SEQ ID NO: 126255 - DNA, 19 bp, Homo sapiens
  siRNA target sequence for MLLT4 (NM_005936.1,1826-1844).
gctctacagtccactttaa

SEQ ID NO: 126256 - DNA, 19 bp, Homo sapiens
  siRNA target sequence for MLLT4 (NM_005936.1,1845-1863).
gttgtcccctacatatgta

SEQ ID NO: 126257 - DNA, 19 bp, Homo sapiens
  siRNA target sequence for MLLT4 (NM_005936.1,1850-1868).
cccctacatatgtattata

SEQ ID NO: 126258 - DNA, 19 bp, Homo sapiens
  siRNA target sequence for MLLT4 (NM_005936.1,1873-1891).
gcatgccggtatgtattgt

SEQ ID NO: 126259 - DNA, 19 bp, Homo sapiens
  siRNA target sequence for MLLT4 (NM_005936.1,1919-1937).
ctacagagcgcacacataa

SEQ ID NO: 126260 - DNA, 19 bp, Homo sapiens
  siRNA target sequence for MLLT4 (NM_005936.1,2019-2037).
cttctggatggcaaatgca

SEQ ID NO: 126261 - DNA, 19 bp, Homo sapiens
  siRNA target sequence for MLLT4 (NM_005936.1,2025-2043).
gatggcaaatgcatctgaa

SEQ ID NO: 126262 - DNA, 19 bp, Homo sapiens
  siRNA target sequence for MLLT4 (NM_005936.1,2208-2226).
cagtctgcaacgaccaaaa

SEQ ID NO: 126263 - DNA, 19 bp, Homo sapiens
  siRNA target sequence for MLLT4 (NM_005936.1,2210-2228).
gtctgcaacgaccaaaaat

SEQ ID NO: 126264 - DNA, 19 bp, Homo sapiens
  siRNA target sequence for MLLT4 (NM_005936.1,2214-2232).
gcaacgaccaaaaatagat

SEQ ID NO: 126265 - DNA, 19 bp, Homo sapiens
  siRNA target sequence for MLLT4 (NM_005936.1,2334-2352).
caatatgtggctgttcaat

SEQ ID NO: 126266 - DNA, 19 bp, Homo sapiens
  siRNA target sequence for MLLT4 (NM_005936.1,2377-2395).
gggctgtgctcccattact

SEQ ID NO: 126267 - DNA, 19 bp, Homo sapiens
  siRNA target sequence for MLLT4 (NM_005936.1,2493-2511).
gcaggcaacgactttgctt

SEQ ID NO: 126268 - DNA, 19 bp, Homo sapiens
  siRNA target sequence for MLLT4 (NM_005936.1,2494-2512).
caggcaacgactttgctta

SEQ ID NO: 126269 - DNA, 19 bp, Homo sapiens
  siRNA target sequence for MLLT4 (NM_005936.1,2504-2522).
ctttgcttaccatggataa

SEQ ID NO: 126270 - DNA, 19 bp, Homo sapiens
  siRNA target sequence for MLLT4 (NM_005936.1,2508-2526).
gcttaccatggataagtat

SEQ ID NO: 126271 - DNA, 19 bp, Homo sapiens
  siRNA target sequence for MLLT4 (NM_005936.1,2523-2541).
gtatgcacctgatgacatt

SEQ ID NO: 126272 - DNA, 19 bp, Homo sapiens
  siRNA target sequence for MLLT4 (NM_005936.1,2591-2609).
ccttattacagaactatca

SEQ ID NO: 126273 - DNA, 19 bp, Homo sapiens
  siRNA target sequence for MLLT4 (NM_005936.1,2634-2652).
cccaacggatcttatagaa

SEQ ID NO: 126274 - DNA, 19 bp, Homo sapiens
  siRNA target sequence for MLLT4 (NM_005936.1,2635-2653).
ccaacggatcttatagaaa

SEQ ID NO: 126275 - DNA, 19 bp, Homo sapiens
  siRNA target sequence for MLLT4 (NM_005936.1,2636-2654).
caacggatcttatagaaaa

SEQ ID NO: 126276 - DNA, 19 bp, Homo sapiens
  siRNA target sequence for MLLT4 (NM_005936.1,2639-2657).
cggatcttatagaaaatgt

SEQ ID NO: 126277 - DNA, 19 bp, Homo sapiens
  siRNA target sequence for MLLT4 (NM_005936.1,2659-2677).
gtgactgtggctgaaaaca

SEQ ID NO: 126278 - DNA, 19 bp, Homo sapiens
  siRNA target sequence for MLLT4 (NM_005936.1,2661-2679).
gactgtggctgaaaacact

SEQ ID NO: 126279 - DNA, 19 bp, Homo sapiens
  siRNA target sequence for MLLT4 (NM_005936.1,2827-2845).
ctgtgccagagaggatttt

SEQ ID NO: 126280 - DNA, 19 bp, Homo sapiens
  siRNA target sequence for MLLT4 (NM_005936.1,2879-2897).
cttggacaatatattttga

SEQ ID NO: 126281 - DNA, 19 bp, Homo sapiens
  siRNA target sequence for MLLT4 (NM_005936.1,2900-2918).
gtgcagattatgaaagtca

SEQ ID NO: 126282 - DNA, 19 bp, Homo sapiens
  siRNA target sequence for MLLT4 (NM_005936.1,3032-3050).
gtgctggtcaagataaact

SEQ ID NO: 126283 - DNA, 19 bp, Homo sapiens
  siRNA target sequence for MLLT4 (NM_005936.1,3335-3353).
gctttgagctctataataa

SEQ ID NO: 126284 - DNA, 19 bp, Homo sapiens
  siRNA target sequence for MLLT4 (NM_005936.1,3387-3405).
gctgccttgggcagaatat

SEQ ID NO: 126285 - DNA, 19 bp, Homo sapiens
  siRNA target sequence for MLLT4 (NM_005936.1,3390-3408).
gccttgggcagaatatagt

SEQ ID NO: 126286 - DNA, 19 bp, Homo sapiens
  siRNA target sequence for MLLT4 (NM_005936.1,3392-3410).
cttgggcagaatatagtga

SEQ ID NO: 126287 - DNA, 19 bp, Homo sapiens
  siRNA target sequence for MLLT4 (NM_005936.1,3467-3485).
ccagccccaacgtagcaaa

SEQ ID NO: 126288 - DNA, 19 bp, Homo sapiens
  siRNA target sequence for MLLT4 (NM_005936.1,3468-3486).
cagccccaacgtagcaaat

SEQ ID NO: 126289 - DNA, 19 bp, Homo sapiens
  siRNA target sequence for MLLT4 (NM_005936.1,3470-3488).
gccccaacgtagcaaatca

SEQ ID NO: 126290 - DNA, 19 bp, Homo sapiens
  siRNA target sequence for MLLT4 (NM_005936.1,3526-3544).
ggaacaacagcgaagataa

SEQ ID NO: 126291 - DNA, 19 bp, Homo sapiens
  siRNA target sequence for MLLT4 (NM_005936.1,3688-3706).
cagaaccagtggccaaatt

SEQ ID NO: 126292 - DNA, 19 bp, Homo sapiens
  siRNA target sequence for MLLT4 (NM_005936.1,3840-3858).
ggaccgaaagtctgatagt

SEQ ID NO: 126293 - DNA, 19 bp, Homo sapiens
  siRNA target sequence for MLLT4 (NM_005936.1,3843-3861).
ccgaaagtctgatagtgat

SEQ ID NO: 126294 - DNA, 19 bp, Homo sapiens
  siRNA target sequence for MLLT4 (NM_005936.1,3844-3862).
cgaaagtctgatagtgata

SEQ ID NO: 126295 - DNA, 19 bp, Homo sapiens
  siRNA target sequence for MLLT4 (NM_005936.1,3859-3877).
gatatgtggataaatcaga

SEQ ID NO: 126296 - DNA, 19 bp, Homo sapiens
  siRNA target sequence for MLLT4 (NM_005936.1,4074-4092).
ctatgccggtgatttcgat

SEQ ID NO: 126297 - DNA, 19 bp, Homo sapiens
  siRNA target sequence for MLLT4 (NM_005936.1,4195-4213).
catcagcgttggtatgaga

SEQ ID NO: 126298 - DNA, 19 bp, Homo sapiens
  siRNA target sequence for MLLT4 (NM_005936.1,4427-4445).
gcagagacttgcagtacat

SEQ ID NO: 126299 - DNA, 19 bp, Homo sapiens
  siRNA target sequence for MLLT4 (NM_005936.1,4792-4810).
ccatctgtggtccctattt

SEQ ID NO: 126300 - DNA, 19 bp, Homo sapiens
  siRNA target sequence for MLLT4 (NM_005936.1,4798-4816).
gtggtccctattttagctt

SEQ ID NO: 126301 - DNA, 19 bp, Homo sapiens
  siRNA target sequence for PRKCABP (NM_012407.1,234-252).
gcagacttggattatgaca

SEQ ID NO: 126302 - DNA, 19 bp, Homo sapiens
  siRNA target sequence for PRKCABP (NM_012407.1,358-376).
gtccctgcctctatatcgt

SEQ ID NO: 126303 - DNA, 19 bp, Homo sapiens
  siRNA target sequence for PRKCABP (NM_012407.1,368-386).
ctatatcgtccaggtattt

SEQ ID NO: 126304 - DNA, 19 bp, Homo sapiens
  siRNA target sequence for PRKCABP (NM_012407.1,565-583).
ccctggacattgtgttgaa

SEQ ID NO: 126305 - DNA, 19 bp, Homo sapiens
  siRNA target sequence for PRKCABP (NM_012407.1,699-717).
cggaccgctgagctataca

SEQ ID NO: 126306 - DNA, 19 bp, Homo sapiens
  siRNA target sequence for PRKCABP (NM_012407.1,700-718).
ggaccgctgagctatacaa

SEQ ID NO: 126307 - DNA, 19 bp, Homo sapiens
  siRNA target sequence for PRKCABP (NM_012407.1,701-719).
gaccgctgagctatacaaa

SEQ ID NO: 126308 - DNA, 19 bp, Homo sapiens
  siRNA target sequence for PRKCABP (NM_012407.1,743-761).
cctcctacgggccttttat

SEQ ID NO: 126309 - DNA, 19 bp, Homo sapiens
  siRNA target sequence for PRKCABP (NM_012407.1,832-850).
ctgcgagcgaggcttttgt

SEQ ID NO: 126310 - DNA, 19 bp, Homo sapiens
  siRNA target sequence for PRKCABP (NM_012407.1,838-856).
gcgaggcttttgtgaagtt

SEQ ID NO: 126311 - DNA, 19 bp, Homo sapiens
  siRNA target sequence for PRKCABP (NM_012407.1,887-905).
cggcattcggcttctgaaa

SEQ ID NO: 126312 - DNA, 19 bp, Homo sapiens
  siRNA target sequence for PRKCABP (NM_012407.1,916-934).
cgatgctgacggatctgaa

SEQ ID NO: 126313 - DNA, 19 bp, Homo sapiens
  siRNA target sequence for PRKCABP (NM_012407.1,966-984).
cgcctcaccatcaagaagt

SEQ ID NO: 126314 - DNA, 19 bp, Homo sapiens
  siRNA target sequence for PRKCABP (NM_012407.1,983-1001).
gtacctggacgtgaagttt

SEQ ID NO: 126315 - DNA, 19 bp, Homo sapiens
  siRNA target sequence for PRKCABP (NM_012407.1,1090-1108).
gcaccggcaactatgagta

SEQ ID NO: 126316 - DNA, 19 bp, Homo sapiens
  siRNA target sequence for SNX17 (NM_014748.2,275-293).
ccgcctacgtggcctataa

SEQ ID NO: 126317 - DNA, 19 bp, Homo sapiens
  siRNA target sequence for SNX17 (NM_014748.2,277-295).
gcctacgtggcctataaca

SEQ ID NO: 126318 - DNA, 19 bp, Homo sapiens
  siRNA target sequence for SNX17 (NM_014748.2,499-517).
gggagcagcgagactttca

SEQ ID NO: 126319 - DNA, 19 bp, Homo sapiens
  siRNA target sequence for SNX17 (NM_014748.2,506-524).
gcgagactttcaacagttt

SEQ ID NO: 126320 - DNA, 19 bp, Homo sapiens
  siRNA target sequence for SNX17 (NM_014748.2,593-611).
gcaacgggcagaaagttct

SEQ ID NO: 126321 - DNA, 19 bp, Homo sapiens
  siRNA target sequence for SNX17 (NM_014748.2,612-630).
ggtcaacgtgctaacttca

SEQ ID NO: 126322 - DNA, 19 bp, Homo sapiens
  siRNA target sequence for SNX17 (NM_014748.2,615-633).
caacgtgctaacttcagat

SEQ ID NO: 126323 - DNA, 19 bp, Homo sapiens
  siRNA target sequence for SNX17 (NM_014748.2,690-708).
gattggatactttagtcta

SEQ ID NO: 126324 - DNA, 19 bp, Homo sapiens
  siRNA target sequence for SNX17 (NM_014748.2,794-812).
gccttcggagtcaagagta

SEQ ID NO: 126325 - DNA, 19 bp, Homo sapiens
  siRNA target sequence for SNX17 (NM_014748.2,795-813).
ccttcggagtcaagagtat

SEQ ID NO: 126326 - DNA, 19 bp, Homo sapiens
  siRNA target sequence for SNX17 (NM_014748.2,796-814).
cttcggagtcaagagtata

SEQ ID NO: 126327 - DNA, 19 bp, Homo sapiens
  siRNA target sequence for SNX17 (NM_014748.2,799-817).
cggagtcaagagtataaga

SEQ ID NO: 126328 - DNA, 19 bp, Homo sapiens
  siRNA target sequence for SNX17 (NM_014748.2,882-900).
cctgaacctgctttatgct

SEQ ID NO: 126329 - DNA, 19 bp, Homo sapiens
  siRNA target sequence for SNX17 (NM_014748.2,898-916).
gctcagacggtatcagata

SEQ ID NO: 126330 - DNA, 19 bp, Homo sapiens
  siRNA target sequence for SNX17 (NM_014748.2,899-917).
ctcagacggtatcagatat

SEQ ID NO: 126331 - DNA, 19 bp, Homo sapiens
  siRNA target sequence for SNX17 (NM_014748.2,949-967).
cagcaccggcaactcaaat

SEQ ID NO: 126332 - DNA, 19 bp, Homo sapiens
  siRNA target sequence for SNX17 (NM_014748.2,951-969).
gcaccggcaactcaaatct

SEQ ID NO: 126333 - DNA, 19 bp, Homo sapiens
  siRNA target sequence for SNX17 (NM_014748.2,1300-1318).
cagtgggtcaccatcacta

SEQ ID NO: 126334 - DNA, 19 bp, Homo sapiens
  siRNA target sequence for SNX17 (NM_014748.2,1316-1334).
ctagcccccaggctatcat

SEQ ID NO: 126335 - DNA, 19 bp, Homo sapiens
  siRNA target sequence for SNX17 (NM_014748.2,1321-1339).
ccccaggctatcatgatga

SEQ ID NO: 126336 - DNA, 19 bp, Homo sapiens
  siRNA target sequence for SNX17 (NM_014748.2,1501-1519).
gagtctatggtcaaactct

SEQ ID NO: 126337 - DNA, 19 bp, Homo sapiens
  siRNA target sequence for SNX17 (NM_014748.2,1583-1601).
gtgatgtccacggcaattt

SEQ ID NO: 126338 - DNA, 19 bp, Homo sapiens
  siRNA target sequence for TOPBP1 (NM_007027.2,372-390).
gagccgaacatccagttta

SEQ ID NO: 126339 - DNA, 19 bp, Homo sapiens
  siRNA target sequence for TOPBP1 (NM_007027.2,374-392).
gccgaacatccagtttata

SEQ ID NO: 126340 - DNA, 19 bp, Homo sapiens
  siRNA target sequence for TOPBP1 (NM_007027.2,375-393).
ccgaacatccagtttataa

SEQ ID NO: 126341 - DNA, 19 bp, Homo sapiens
  siRNA target sequence for TOPBP1 (NM_007027.2,383-401).
ccagtttataatatggtta

SEQ ID NO: 126342 - DNA, 19 bp, Homo sapiens
  siRNA target sequence for TOPBP1 (NM_007027.2,478-496).
gggcggacgagtatacaga

SEQ ID NO: 126343 - DNA, 19 bp, Homo sapiens
  siRNA target sequence for TOPBP1 (NM_007027.2,486-504).
gagtatacagagaccttaa

SEQ ID NO: 126344 - DNA, 19 bp, Homo sapiens
  siRNA target sequence for TOPBP1 (NM_007027.2,493-511).
cagagaccttaatgtatca

SEQ ID NO: 126345 - DNA, 19 bp, Homo sapiens
  siRNA target sequence for TOPBP1 (NM_007027.2,520-538).
ccttattgcaggagaagtt

SEQ ID NO: 126346 - DNA, 19 bp, Homo sapiens
  siRNA target sequence for TOPBP1 (NM_007027.2,533-551).
gaagttggtagcaaaaaat

SEQ ID NO: 126347 - DNA, 19 bp, Homo sapiens
  siRNA target sequence for TOPBP1 (NM_007027.2,563-581).
gcaaacctgaagaaaccta

SEQ ID NO: 126348 - DNA, 19 bp, Homo sapiens
  siRNA target sequence for TOPBP1 (NM_007027.2,564-582).
caaacctgaagaaacctat

SEQ ID NO: 126349 - DNA, 19 bp, Homo sapiens
  siRNA target sequence for TOPBP1 (NM_007027.2,586-604).
gcttccctcttggataaaa

SEQ ID NO: 126350 - DNA, 19 bp, Homo sapiens
  siRNA target sequence for TOPBP1 (NM_007027.2,587-605).
cttccctcttggataaaaa

SEQ ID NO: 126351 - DNA, 19 bp, Homo sapiens
  siRNA target sequence for TOPBP1 (NM_007027.2,700-718).
ctgtgtgactggcttatgt

SEQ ID NO: 126352 - DNA, 19 bp, Homo sapiens
  siRNA target sequence for TOPBP1 (NM_007027.2,721-739).
cttagacaggaaagaagtt

SEQ ID NO: 126353 - DNA, 19 bp, Homo sapiens
  siRNA target sequence for TOPBP1 (NM_007027.2,737-755).
gttcagcaactcacagtta

SEQ ID NO: 126354 - DNA, 19 bp, Homo sapiens
  siRNA target sequence for TOPBP1 (NM_007027.2,742-760).
gcaactcacagttaagcat

SEQ ID NO: 126355 - DNA, 19 bp, Homo sapiens
  siRNA target sequence for TOPBP1 (NM_007027.2,767-785).
caatacatgggacaattga

SEQ ID NO: 126356 - DNA, 19 bp, Homo sapiens
  siRNA target sequence for TOPBP1 (NM_007027.2,775-793).
gggacaattgaaaatgaat

SEQ ID NO: 126357 - DNA, 19 bp, Homo sapiens
  siRNA target sequence for TOPBP1 (NM_007027.2,869-887).
gtgaccacacagtggtttt

SEQ ID NO: 126358 - DNA, 19 bp, Homo sapiens
  siRNA target sequence for TOPBP1 (NM_007027.2,880-898).
gtggttttttgacagtatt

SEQ ID NO: 126359 - DNA, 19 bp, Homo sapiens
  siRNA target sequence for TOPBP1 (NM_007027.2,882-900).
ggttttttgacagtattga

SEQ ID NO: 126360 - DNA, 19 bp, Homo sapiens
  siRNA target sequence for TOPBP1 (NM_007027.2,912-930).
gtcaggatgaatccatata

SEQ ID NO: 126361 - DNA, 19 bp, Homo sapiens
  siRNA target sequence for TOPBP1 (NM_007027.2,914-932).
caggatgaatccatataca

SEQ ID NO: 126362 - DNA, 19 bp, Homo sapiens
  siRNA target sequence for TOPBP1 (NM_007027.2,917-935).
gatgaatccatatacaaga

SEQ ID NO: 126363 - DNA, 19 bp, Homo sapiens
  siRNA target sequence for TOPBP1 (NM_007027.2,945-963).
gaccagaagcaaagactat

SEQ ID NO: 126364 - DNA, 19 bp, Homo sapiens
  siRNA target sequence for TOPBP1 (NM_007027.2,958-976).
gactatgcccaattcttca

SEQ ID NO: 126365 - DNA, 19 bp, Homo sapiens
  siRNA target sequence for TOPBP1 (NM_007027.2,987-1005).
gccagatcaacacaattga

SEQ ID NO: 126366 - DNA, 19 bp, Homo sapiens
  siRNA target sequence for TOPBP1 (NM_007027.2,1049-1067).
gcaagttgcgtaagtgaat

SEQ ID NO: 126367 - DNA, 19 bp, Homo sapiens
  siRNA target sequence for TOPBP1 (NM_007027.2,1053-1071).
gttgcgtaagtgaatcaat

SEQ ID NO: 126368 - DNA, 19 bp, Homo sapiens
  siRNA target sequence for TOPBP1 (NM_007027.2,1057-1075).
cgtaagtgaatcaatatgt

SEQ ID NO: 126369 - DNA, 19 bp, Homo sapiens
  siRNA target sequence for TOPBP1 (NM_007027.2,1142-1160).
caagcacctgaagatttat

SEQ ID NO: 126370 - DNA, 19 bp, Homo sapiens
  siRNA target sequence for TOPBP1 (NM_007027.2,1216-1234).
gagaagacttattaacagt

SEQ ID NO: 126371 - DNA, 19 bp, Homo sapiens
  siRNA target sequence for TOPBP1 (NM_007027.2,1233-1251).
gtggaggtggagttcgttt

SEQ ID NO: 126372 - DNA, 19 bp, Homo sapiens
  siRNA target sequence for TOPBP1 (NM_007027.2,1372-1390).
gtgtttcagtaaaggttat

SEQ ID NO: 126373 - DNA, 19 bp, Homo sapiens
  siRNA target sequence for TOPBP1 (NM_007027.2,1407-1425).
catatatccatgctaatta

SEQ ID NO: 126374 - DNA, 19 bp, Homo sapiens
  siRNA target sequence for TOPBP1 (NM_007027.2,1547-1565).
gaagatctgctctctcaat

SEQ ID NO: 126375 - DNA, 19 bp, Homo sapiens
  siRNA target sequence for TOPBP1 (NM_007027.2,1575-1593).
gtagctccacagtagttga

SEQ ID NO: 126376 - DNA, 19 bp, Homo sapiens
  siRNA target sequence for TOPBP1 (NM_007027.2,1637-1655).
gctgagcccttgaatgatt

SEQ ID NO: 126377 - DNA, 19 bp, Homo sapiens
  siRNA target sequence for TOPBP1 (NM_007027.2,1640-1658).
gagcccttgaatgattcta

SEQ ID NO: 126378 - DNA, 19 bp, Homo sapiens
  siRNA target sequence for TOPBP1 (NM_007027.2,1689-1707).
cttctgtcagtcattgtgt

SEQ ID NO: 126379 - DNA, 19 bp, Homo sapiens
  siRNA target sequence for TOPBP1 (NM_007027.2,1706-1724).
gtccctgatgtttctacaa

SEQ ID NO: 126380 - DNA, 19 bp, Homo sapiens
  siRNA target sequence for TOPBP1 (NM_007027.2,1708-1726).
ccctgatgtttctacaatt

SEQ ID NO: 126381 - DNA, 19 bp, Homo sapiens
  siRNA target sequence for TOPBP1 (NM_007027.2,1736-1754).
ggcttatttagccaaaaga

SEQ ID NO: 126382 - DNA, 19 bp, Homo sapiens
  siRNA target sequence for TOPBP1 (NM_007027.2,1738-1756).
cttatttagccaaaagagt

SEQ ID NO: 126383 - DNA, 19 bp, Homo sapiens
  siRNA target sequence for TOPBP1 (NM_007027.2,1791-1809).
ctaacatcgcaaacatcat

SEQ ID NO: 126384 - DNA, 19 bp, Homo sapiens
  siRNA target sequence for TOPBP1 (NM_007027.2,1798-1816).
cgcaaacatcataaaagaa

SEQ ID NO: 126385 - DNA, 19 bp, Homo sapiens
  siRNA target sequence for TOPBP1 (NM_007027.2,1846-1864).
cagaactgttgcggattat

SEQ ID NO: 126386 - DNA, 19 bp, Homo sapiens
  siRNA target sequence for TOPBP1 (NM_007027.2,1900-1918).
cactgtgggagaagttgtt

SEQ ID NO: 126387 - DNA, 19 bp, Homo sapiens
  siRNA target sequence for TOPBP1 (NM_007027.2,1931-1949).
ctggttacttgcatagact

SEQ ID NO: 126388 - DNA, 19 bp, Homo sapiens
  siRNA target sequence for TOPBP1 (NM_007027.2,2019-2037).
ctttagaggattgtgttat

SEQ ID NO: 126389 - DNA, 19 bp, Homo sapiens
  siRNA target sequence for TOPBP1 (NM_007027.2,2092-2110).
cctccttggagcaagtgtt

SEQ ID NO: 126390 - DNA, 19 bp, Homo sapiens
  siRNA target sequence for TOPBP1 (NM_007027.2,2095-2113).
ccttggagcaagtgttcaa

SEQ ID NO: 126391 - DNA, 19 bp, Homo sapiens
  siRNA target sequence for TOPBP1 (NM_007027.2,2103-2121).
caagtgttcaagaatactt

SEQ ID NO: 126392 - DNA, 19 bp, Homo sapiens
  siRNA target sequence for TOPBP1 (NM_007027.2,2106-2124).
gtgttcaagaatactttgt

SEQ ID NO: 126393 - DNA, 19 bp, Homo sapiens
  siRNA target sequence for TOPBP1 (NM_007027.2,2123-2141).
gttcgcaaatccaatgcaa

SEQ ID NO: 126394 - DNA, 19 bp, Homo sapiens
  siRNA target sequence for TOPBP1 (NM_007027.2,2157-2175).
ccagtactcatcttatact

SEQ ID NO: 126395 - DNA, 19 bp, Homo sapiens
  siRNA target sequence for TOPBP1 (NM_007027.2,2184-2202).
gtggtggctctaaatatga

SEQ ID NO: 126396 - DNA, 19 bp, Homo sapiens
  siRNA target sequence for TOPBP1 (NM_007027.2,2225-2243).
cctgccgttactatagctt

SEQ ID NO: 126397 - DNA, 19 bp, Homo sapiens
  siRNA target sequence for TOPBP1 (NM_007027.2,2294-2312).
ctgattgaaaattcaacta

SEQ ID NO: 126398 - DNA, 19 bp, Homo sapiens
  siRNA target sequence for TOPBP1 (NM_007027.2,2349-2367).
gaatcaatctaaattcaga

SEQ ID NO: 126399 - DNA, 19 bp, Homo sapiens
  siRNA target sequence for TOPBP1 (NM_007027.2,2391-2409).
gcctgcaaactcacagaaa

SEQ ID NO: 126400 - DNA, 19 bp, Homo sapiens
  siRNA target sequence for TOPBP1 (NM_007027.2,2392-2410).
cctgcaaactcacagaaaa

SEQ ID NO: 126401 - DNA, 19 bp, Homo sapiens
  siRNA target sequence for TOPBP1 (NM_007027.2,2412-2430).
ccgtcgttacacctttaga

SEQ ID NO: 126402 - DNA, 19 bp, Homo sapiens
  siRNA target sequence for TOPBP1 (NM_007027.2,2413-2431).
cgtcgttacacctttagat

SEQ ID NO: 126403 - DNA, 19 bp, Homo sapiens
  siRNA target sequence for TOPBP1 (NM_007027.2,2414-2432).
gtcgttacacctttagata

SEQ ID NO: 126404 - DNA, 19 bp, Homo sapiens
  siRNA target sequence for TOPBP1 (NM_007027.2,2429-2447).
gatatgaaccgctttcaga

SEQ ID NO: 126405 - DNA, 19 bp, Homo sapiens
  siRNA target sequence for TOPBP1 (NM_007027.2,2434-2452).
gaaccgctttcagagtaaa

SEQ ID NO: 126406 - DNA, 19 bp, Homo sapiens
  siRNA target sequence for TOPBP1 (NM_007027.2,2437-2455).
ccgctttcagagtaaagct

SEQ ID NO: 126407 - DNA, 19 bp, Homo sapiens
  siRNA target sequence for TOPBP1 (NM_007027.2,2438-2456).
cgctttcagagtaaagctt

SEQ ID NO: 126408 - DNA, 19 bp, Homo sapiens
  siRNA target sequence for TOPBP1 (NM_007027.2,2543-2561).
ctggatacaccatcaaaat

SEQ ID NO: 126409 - DNA, 19 bp, Homo sapiens
  siRNA target sequence for TOPBP1 (NM_007027.2,2667-2685).
cgccactctcagaagttat

SEQ ID NO: 126410 - DNA, 19 bp, Homo sapiens
  siRNA target sequence for TOPBP1 (NM_007027.2,2674-2692).
ctcagaagttattgtcaaa

SEQ ID NO: 126411 - DNA, 19 bp, Homo sapiens
  siRNA target sequence for TOPBP1 (NM_007027.2,2676-2694).
cagaagttattgtcaaaaa

SEQ ID NO: 126412 - DNA, 19 bp, Homo sapiens
  siRNA target sequence for TOPBP1 (NM_007027.2,2710-2728).
ggcaaatagctctcgaaat

SEQ ID NO: 126413 - DNA, 19 bp, Homo sapiens
  siRNA target sequence for TOPBP1 (NM_007027.2,2745-2763).
ccagccctcaactgaaaga

SEQ ID NO: 126414 - DNA, 19 bp, Homo sapiens
  siRNA target sequence for TOPBP1 (NM_007027.2,2788-2806).
cccaaagccacttcacaaa

SEQ ID NO: 126415 - DNA, 19 bp, Homo sapiens
  siRNA target sequence for TOPBP1 (NM_007027.2,2790-2808).
caaagccacttcacaaagt

SEQ ID NO: 126416 - DNA, 19 bp, Homo sapiens
  siRNA target sequence for TOPBP1 (NM_007027.2,2803-2821).
caaagtagtggtatgtgtt

SEQ ID NO: 126417 - DNA, 19 bp, Homo sapiens
  siRNA target sequence for TOPBP1 (NM_007027.2,2807-2825).
gtagtggtatgtgttagta

SEQ ID NO: 126418 - DNA, 19 bp, Homo sapiens
  siRNA target sequence for TOPBP1 (NM_007027.2,2810-2828).
gtggtatgtgttagtaaaa

SEQ ID NO: 126419 - DNA, 19 bp, Homo sapiens
  siRNA target sequence for TOPBP1 (NM_007027.2,2868-2886).
cctctctaggagcagatta

SEQ ID NO: 126420 - DNA, 19 bp, Homo sapiens
  siRNA target sequence for TOPBP1 (NM_007027.2,2907-2925).
cagtgactcatttcatcta

SEQ ID NO: 126421 - DNA, 19 bp, Homo sapiens
  siRNA target sequence for TOPBP1 (NM_007027.2,2951-2969).
cgggagtataaatctgtaa

SEQ ID NO: 126422 - DNA, 19 bp, Homo sapiens
  siRNA target sequence for TOPBP1 (NM_007027.2,3015-3033).
gtgcccaagagtgtaaaca

SEQ ID NO: 126423 - DNA, 19 bp, Homo sapiens
  siRNA target sequence for TOPBP1 (NM_007027.2,3019-3037).
ccaagagtgtaaacatctt

SEQ ID NO: 126424 - DNA, 19 bp, Homo sapiens
  siRNA target sequence for TOPBP1 (NM_007027.2,3141-3159).
cttcaacaaaggatgatga

SEQ ID NO: 126425 - DNA, 19 bp, Homo sapiens
  siRNA target sequence for TOPBP1 (NM_007027.2,3158-3176).
gagccagatcctttgattt

SEQ ID NO: 126426 - DNA, 19 bp, Homo sapiens
  siRNA target sequence for TOPBP1 (NM_007027.2,3160-3178).
gccagatcctttgatttta

SEQ ID NO: 126427 - DNA, 19 bp, Homo sapiens
  siRNA target sequence for TOPBP1 (NM_007027.2,3194-3212).
gacaatatggccaccaata

SEQ ID NO: 126428 - DNA, 19 bp, Homo sapiens
  siRNA target sequence for TOPBP1 (NM_007027.2,3324-3342).
ctgcaacatcaatagtgaa

SEQ ID NO: 126429 - DNA, 19 bp, Homo sapiens
  siRNA target sequence for TOPBP1 (NM_007027.2,3358-3376).
gacttccctttcaagaagt

SEQ ID NO: 126430 - DNA, 19 bp, Homo sapiens
  siRNA target sequence for TOPBP1 (NM_007027.2,3552-3570).
ggcttgccagcaatttgca

SEQ ID NO: 126431 - DNA, 19 bp, Homo sapiens
  siRNA target sequence for TOPBP1 (NM_007027.2,3575-3593).
cctagttgtcccacacaat

SEQ ID NO: 126432 - DNA, 19 bp, Homo sapiens
  siRNA target sequence for TOPBP1 (NM_007027.2,3576-3594).
ctagttgtcccacacaata

SEQ ID NO: 126433 - DNA, 19 bp, Homo sapiens
  siRNA target sequence for TOPBP1 (NM_007027.2,3597-3615).
ctgagcttcaggttgacat

SEQ ID NO: 126434 - DNA, 19 bp, Homo sapiens
  siRNA target sequence for TOPBP1 (NM_007027.2,3601-3619).
gcttcaggttgacattcaa

SEQ ID NO: 126435 - DNA, 19 bp, Homo sapiens
  siRNA target sequence for TOPBP1 (NM_007027.2,3602-3620).
cttcaggttgacattcaaa

SEQ ID NO: 126436 - DNA, 19 bp, Homo sapiens
  siRNA target sequence for TOPBP1 (NM_007027.2,3625-3643).
ggaggattctccttttcaa

SEQ ID NO: 126437 - DNA, 19 bp, Homo sapiens
  siRNA target sequence for TOPBP1 (NM_007027.2,3825-3843).
ctccgcaccctagagaaaa

SEQ ID NO: 126438 - DNA, 19 bp, Homo sapiens
  siRNA target sequence for TOPBP1 (NM_007027.2,3827-3845).
ccgcaccctagagaaaaga

SEQ ID NO: 126439 - DNA, 19 bp, Homo sapiens
  siRNA target sequence for TOPBP1 (NM_007027.2,3828-3846).
cgcaccctagagaaaagat

SEQ ID NO: 126440 - DNA, 19 bp, Homo sapiens
  siRNA target sequence for TOPBP1 (NM_007027.2,3829-3847).
gcaccctagagaaaagatt

SEQ ID NO: 126441 - DNA, 19 bp, Homo sapiens
  siRNA target sequence for TOPBP1 (NM_007027.2,3886-3904).
gtacatatttcagttatca

SEQ ID NO: 126442 - DNA, 19 bp, Homo sapiens
  siRNA target sequence for TOPBP1 (NM_007027.2,3914-3932).
cctcaagaacgtattgact

SEQ ID NO: 126443 - DNA, 19 bp, Homo sapiens
  siRNA target sequence for TOPBP1 (NM_007027.2,3915-3933).
ctcaagaacgtattgacta

SEQ ID NO: 126444 - DNA, 19 bp, Homo sapiens
  siRNA target sequence for TOPBP1 (NM_007027.2,3917-3935).
caagaacgtattgactatt

SEQ ID NO: 126445 - DNA, 19 bp, Homo sapiens
  siRNA target sequence for TOPBP1 (NM_007027.2,3956-3974).
ggtggattggtgatagaaa

SEQ ID NO: 126446 - DNA, 19 bp, Homo sapiens
  siRNA target sequence for TOPBP1 (NM_007027.2,3993-4011).
cctgtacacacattgttgt

SEQ ID NO: 126447 - DNA, 19 bp, Homo sapiens
  siRNA target sequence for TOPBP1 (NM_007027.2,4022-4040).
cttcgaaacgagaagtatt

SEQ ID NO: 126448 - DNA, 19 bp, Homo sapiens
  siRNA target sequence for TOPBP1 (NM_007027.2,4114-4132).
cgtgcaggaagaagactat

SEQ ID NO: 126449 - DNA, 19 bp, Homo sapiens
  siRNA target sequence for TOPBP1 (NM_007027.2,4138-4156).
gggaagtagttccatactt

SEQ ID NO: 126450 - DNA, 19 bp, Homo sapiens
  siRNA target sequence for TOPBP1 (NM_007027.2,4140-4158).
gaagtagttccatacttga

SEQ ID NO: 126451 - DNA, 19 bp, Homo sapiens
  siRNA target sequence for TOPBP1 (NM_007027.2,4196-4214).
gcacttgcagcaatgagat

SEQ ID NO: 126452 - DNA, 19 bp, Homo sapiens
  siRNA target sequence for TOPBP1 (NM_007027.2,4269-4287).
gtgggtggaaggttatttt

SEQ ID NO: 126453 - DNA, 19 bp, Homo sapiens
  siRNA target sequence for TOPBP1 (NM_007027.2,4272-4290).
ggtggaaggttattttaca

SEQ ID NO: 126454 - DNA, 19 bp, Homo sapiens
  siRNA target sequence for TOPBP1 (NM_007027.2,4314-4332).
gcttcaaacgccttcttca

SEQ ID NO: 126455 - DNA, 19 bp, Homo sapiens
  siRNA target sequence for TOPBP1 (NM_007027.2,4422-4440).
cagatgactcaggagttaa

SEQ ID NO: 126456 - DNA, 19 bp, Homo sapiens
  siRNA target sequence for TOPBP1 (NM_007027.2,4424-4442).
gatgactcaggagttaata

SEQ ID NO: 126457 - DNA, 19 bp, Homo sapiens
  siRNA target sequence for TOPBP1 (NM_007027.2,4520-4538).
cctcatgtagaaaattact

SEQ ID NO: 126458 - DNA, 19 bp, Homo sapiens
  siRNA target sequence for TOPBP1 (NM_007027.2,4576-4594).
ggaacttgggactggatta

SEQ ID NO: 126459 - DNA, 19 bp, Homo sapiens
  siRNA target sequence for TOPBP1 (NM_007027.2,4577-4595).
gaacttgggactggattat

SEQ ID NO: 126460 - DNA, 19 bp, Homo sapiens
  siRNA target sequence for TOPBP1 (NM_007027.2,4583-4601).
gggactggattatcacaaa

SEQ ID NO: 126461 - DNA, 19 bp, Homo sapiens
  siRNA target sequence for TRIM3 (NM_006458.2,1050-1068).
cgacctggagaccatttgt

SEQ ID NO: 126462 - DNA, 19 bp, Homo sapiens
  siRNA target sequence for TRIM3 (NM_006458.2,1112-1130).
gccagggtcaggaacacat

SEQ ID NO: 126463 - DNA, 19 bp, Homo sapiens
  siRNA target sequence for TRIM3 (NM_006458.2,1247-1265).
cggagcggccacatgagaa

SEQ ID NO: 126464 - DNA, 19 bp, Homo sapiens
  siRNA target sequence for TRIM3 (NM_006458.2,1248-1266).
ggagcggccacatgagaat

SEQ ID NO: 126465 - DNA, 19 bp, Homo sapiens
  siRNA target sequence for TRIM3 (NM_006458.2,1304-1322).
ggcgatcggtgctcaatct

SEQ ID NO: 126466 - DNA, 19 bp, Homo sapiens
  siRNA target sequence for TRIM3 (NM_006458.2,1538-1556).
gcacatatgagctagtgta

SEQ ID NO: 126467 - DNA, 19 bp, Homo sapiens
  siRNA target sequence for TRIM3 (NM_006458.2,2050-2068).
cgttgggtcagcatcttct

SEQ ID NO: 126468 - DNA, 19 bp, Homo sapiens
  siRNA target sequence for TRIM3 (NM_006458.2,2137-2155).
gaccggaatggacatatca

SEQ ID NO: 126469 - DNA, 19 bp, Homo sapiens
  siRNA target sequence for TRIM3 (NM_006458.2,2139-2157).
ccggaatggacatatcatt

SEQ ID NO: 126470 - DNA, 19 bp, Homo sapiens
  siRNA target sequence for TRIM3 (NM_006458.2,2158-2176).
gtggtcgacaacaagtctt

SEQ ID NO: 126471 - DNA, 19 bp, Homo sapiens
  siRNA target sequence for TRIM3 (NM_006458.2,2283-2301).
caagaatgaaattgtagta

SEQ ID NO: 126472 - DNA, 19 bp, Homo sapiens
  siRNA target sequence for TRIM3 (NM_006458.2,2296-2314).
gtagtaacggacttccata

SEQ ID NO: 126473 - DNA, 19 bp, Homo sapiens
  siRNA target sequence for TRIM3 (NM_006458.2,2344-2362).
ggagagttcctcttcaagt

SEQ ID NO: 126474 - DNA, 19 bp, Homo sapiens
  siRNA target sequence for TRIM3 (NM_006458.2,2345-2363).
gagagttcctcttcaagtt

SEQ ID NO: 126475 - DNA, 19 bp, Homo sapiens
  siRNA target sequence for TRIM3 (NM_006458.2,2581-2599).
gctggcaaccactgcttta

SEQ ID NO: 126476 - DNA, 19 bp, Homo sapiens
  siRNA target sequence for TRIM3 (NM_006458.2,2582-2600).
ctggcaaccactgctttaa

SEQ ID NO: 126477 - DNA, 19 bp, Homo sapiens
  siRNA target sequence for ELMO1 (NM_014800.8,273-291).
cgtcaaggtggccatagaa

SEQ ID NO: 126478 - DNA, 19 bp, Homo sapiens
  siRNA target sequence for ELMO1 (NM_014800.8,274-292).
gtcaaggtggccatagaat

SEQ ID NO: 126479 - DNA, 19 bp, Homo sapiens
  siRNA target sequence for ELMO1 (NM_014800.8,377-395).
ctcttgccaaccatgaata

SEQ ID NO: 126480 - DNA, 19 bp, Homo sapiens
  siRNA target sequence for ELMO1 (NM_014800.8,403-421).
ctccagcatgccgatagtt

SEQ ID NO: 126481 - DNA, 19 bp, Homo sapiens
  siRNA target sequence for ELMO1 (NM_014800.8,405-423).
ccagcatgccgatagttca

SEQ ID NO: 126482 - DNA, 19 bp, Homo sapiens
  siRNA target sequence for ELMO1 (NM_014800.8,406-424).
cagcatgccgatagttcaa

SEQ ID NO: 126483 - DNA, 19 bp, Homo sapiens
  siRNA target sequence for ELMO1 (NM_014800.8,409-427).
catgccgatagttcaaact

SEQ ID NO: 126484 - DNA, 19 bp, Homo sapiens
  siRNA target sequence for ELMO1 (NM_014800.8,412-430).
gccgatagttcaaacttct

SEQ ID NO: 126485 - DNA, 19 bp, Homo sapiens
  siRNA target sequence for ELMO1 (NM_014800.8,413-431).
ccgatagttcaaacttcta

SEQ ID NO: 126486 - DNA, 19 bp, Homo sapiens
  siRNA target sequence for ELMO1 (NM_014800.8,414-432).
cgatagttcaaacttctat

SEQ ID NO: 126487 - DNA, 19 bp, Homo sapiens
  siRNA target sequence for ELMO1 (NM_014800.8,415-433).
gatagttcaaacttctata

SEQ ID NO: 126488 - DNA, 19 bp, Homo sapiens
  siRNA target sequence for ELMO1 (NM_014800.8,447-465).
ccgcaatgagataaaaaat

SEQ ID NO: 126489 - DNA, 19 bp, Homo sapiens
  siRNA target sequence for ELMO1 (NM_014800.8,466-484).
ggcactatccttcgattaa

SEQ ID NO: 126490 - DNA, 19 bp, Homo sapiens
  siRNA target sequence for ELMO1 (NM_014800.8,528-546).
ccagtcctcgagtatggat

SEQ ID NO: 126491 - DNA, 19 bp, Homo sapiens
  siRNA target sequence for ELMO1 (NM_014800.8,662-680).
ctgagcgataccagaaatt

SEQ ID NO: 126492 - DNA, 19 bp, Homo sapiens
  siRNA target sequence for ELMO1 (NM_014800.8,782-800).
cggtggcgttcattaagaa

SEQ ID NO: 126493 - DNA, 19 bp, Homo sapiens
  siRNA target sequence for ELMO1 (NM_014800.8,784-802).
gtggcgttcattaagaaga

SEQ ID NO: 126494 - DNA, 19 bp, Homo sapiens
  siRNA target sequence for ELMO1 (NM_014800.8,868-886).
gagtcgatggtgctcaata

SEQ ID NO: 126495 - DNA, 19 bp, Homo sapiens
  siRNA target sequence for ELMO1 (NM_014800.8,949-967).
caagggtcagatcaagaaa

SEQ ID NO: 126496 - DNA, 19 bp, Homo sapiens
  siRNA target sequence for ELMO1 (NM_014800.8,969-987).
ccaaacctatactattgca

SEQ ID NO: 126497 - DNA, 19 bp, Homo sapiens
  siRNA target sequence for ELMO1 (NM_014800.8,1028-1046).
ggcaggagatggcgaatat

SEQ ID NO: 126498 - DNA, 19 bp, Homo sapiens
  siRNA target sequence for ELMO1 (NM_014800.8,1029-1047).
gcaggagatggcgaatatt

SEQ ID NO: 126499 - DNA, 19 bp, Homo sapiens
  siRNA target sequence for ELMO1 (NM_014800.8,1059-1077).
gcaactgcgttccatcatt

SEQ ID NO: 126500 - DNA, 19 bp, Homo sapiens
  siRNA target sequence for ELMO1 (NM_014800.8,1060-1078).
caactgcgttccatcattt

SEQ ID NO: 126501 - DNA, 19 bp, Homo sapiens
  siRNA target sequence for ELMO1 (NM_014800.8,1122-1140).
ggcgcaccagctgtatgtt

SEQ ID NO: 126502 - DNA, 19 bp, Homo sapiens
  siRNA target sequence for ELMO1 (NM_014800.8,1124-1142).
cgcaccagctgtatgttct

SEQ ID NO: 126503 - DNA, 19 bp, Homo sapiens
  siRNA target sequence for ELMO1 (NM_014800.8,1125-1143).
gcaccagctgtatgttcta

SEQ ID NO: 126504 - DNA, 19 bp, Homo sapiens
  siRNA target sequence for ELMO1 (NM_014800.8,1128-1146).
ccagctgtatgttctacaa

SEQ ID NO: 126505 - DNA, 19 bp, Homo sapiens
  siRNA target sequence for ELMO1 (NM_014800.8,1141-1159).
ctacaagtgctcaccttta

SEQ ID NO: 126506 - DNA, 19 bp, Homo sapiens
  siRNA target sequence for ELMO1 (NM_014800.8,1301-1319).
ccatgtacacgcgagatta

SEQ ID NO: 126507 - DNA, 19 bp, Homo sapiens
  siRNA target sequence for ELMO1 (NM_014800.8,1302-1320).
catgtacacgcgagattat

SEQ ID NO: 126508 - DNA, 19 bp, Homo sapiens
  siRNA target sequence for ELMO1 (NM_014800.8,1331-1349).
ggttcattaatcatgtcaa

SEQ ID NO: 126509 - DNA, 19 bp, Homo sapiens
  siRNA target sequence for ELMO1 (NM_014800.8,1486-1504).
ccctttggccgcagtagta

SEQ ID NO: 126510 - DNA, 19 bp, Homo sapiens
  siRNA target sequence for ELMO1 (NM_014800.8,1487-1505).
cctttggccgcagtagtat

SEQ ID NO: 126511 - DNA, 19 bp, Homo sapiens
  siRNA target sequence for ELMO1 (NM_014800.8,1488-1506).
ctttggccgcagtagtata

SEQ ID NO: 126512 - DNA, 19 bp, Homo sapiens
  siRNA target sequence for ELMO1 (NM_014800.8,1507-1525).
gagctgaccaagatgctat

SEQ ID NO: 126513 - DNA, 19 bp, Homo sapiens
  siRNA target sequence for ELMO1 (NM_014800.8,1521-1539).
gctatgtgagatcttgaaa

SEQ ID NO: 126514 - DNA, 19 bp, Homo sapiens
  siRNA target sequence for ELMO1 (NM_014800.8,1590-1608).
cacccacgacagatccttt

SEQ ID NO: 126515 - DNA, 19 bp, Homo sapiens
  siRNA target sequence for ELMO1 (NM_014800.8,1847-1865).
cgattttggaactaaagga

SEQ ID NO: 126516 - DNA, 19 bp, Homo sapiens
  siRNA target sequence for ELMO1 (NM_014800.8,1931-1949).
cctgctttaggaaactcaa

SEQ ID NO: 126517 - DNA, 19 bp, Homo sapiens
  siRNA target sequence for ELMO1 (NM_014800.8,1932-1950).
ctgctttaggaaactcaat

SEQ ID NO: 126518 - DNA, 19 bp, Homo sapiens
  siRNA target sequence for ELMO1 (NM_014800.8,1956-1974).
gcggaggcaagacaagttt

SEQ ID NO: 126519 - DNA, 19 bp, Homo sapiens
  siRNA target sequence for ELMO1 (NM_014800.8,1957-1975).
cggaggcaagacaagtttt

SEQ ID NO: 126520 - DNA, 19 bp, Homo sapiens
  siRNA target sequence for ELMO1 (NM_014800.8,1962-1980).
gcaagacaagttttggtat

SEQ ID NO: 126521 - DNA, 19 bp, Homo sapiens
  siRNA target sequence for ELMO1 (NM_014800.8,2007-2025).
cctgcattacggagactta

SEQ ID NO: 126522 - DNA, 19 bp, Homo sapiens
  siRNA target sequence for ELMO1 (NM_014800.8,2010-2028).
gcattacggagacttagaa

SEQ ID NO: 126523 - DNA, 19 bp, Homo sapiens
  siRNA target sequence for ELMO1 (NM_014800.8,2076-2094).
gccggtggcagatatcaaa

SEQ ID NO: 126524 - DNA, 19 bp, Homo sapiens
  siRNA target sequence for ELMO1 (NM_014800.8,2112-2130).
ggactgccctcatatgaaa

SEQ ID NO: 126525 - DNA, 19 bp, Homo sapiens
  siRNA target sequence for ELMO1 (NM_014800.8,2117-2135).
gccctcatatgaaagagaa

SEQ ID NO: 126526 - DNA, 19 bp, Homo sapiens
  siRNA target sequence for ELMO1 (NM_014800.8,2133-2151).
gaaaggtgcccttaaacaa

SEQ ID NO: 126527 - DNA, 19 bp, Homo sapiens
  siRNA target sequence for ELMO1 (NM_014800.8,2172-2190).
cgctttctccatcttgtat

SEQ ID NO: 126528 - DNA, 19 bp, Homo sapiens
  siRNA target sequence for ELMO1 (NM_014800.8,2180-2198).
ccatcttgtatgactcaaa

SEQ ID NO: 126529 - DNA, 19 bp, Homo sapiens
  siRNA target sequence for ELMO1 (NM_014800.8,2219-2237).
ctcctgacaagcatgagta

SEQ ID NO: 126530 - DNA, 19 bp, Homo sapiens
  siRNA target sequence for ELMO1 (NM_014800.8,2224-2242).
gacaagcatgagtactgta

SEQ ID NO: 126531 - DNA, 19 bp, Homo sapiens
  siRNA target sequence for ELMO1 (NM_014800.8,2244-2262).
ctggacggatggactgaat

SEQ ID NO: 126532 - DNA, 19 bp, Homo sapiens
  siRNA target sequence for LRRFIP2 (NM_006309.1,345-363).
cagtcaccatcgtccttat

SEQ ID NO: 126533 - DNA, 19 bp, Homo sapiens
  siRNA target sequence for LRRFIP2 (NM_006309.1,347-365).
gtcaccatcgtccttatct

SEQ ID NO: 126534 - DNA, 19 bp, Homo sapiens
  siRNA target sequence for LRRFIP2 (NM_006309.1,376-394).
gatgcattgtccattcgaa

SEQ ID NO: 126535 - DNA, 19 bp, Homo sapiens
  siRNA target sequence for LRRFIP2 (NM_006309.1,400-418).
ggcagtcacaggtatgata

SEQ ID NO: 126536 - DNA, 19 bp, Homo sapiens
  siRNA target sequence for LRRFIP2 (NM_006309.1,401-419).
gcagtcacaggtatgatat

SEQ ID NO: 126537 - DNA, 19 bp, Homo sapiens
  siRNA target sequence for LRRFIP2 (NM_006309.1,415-433).
gatatgttcaaggatagat

SEQ ID NO: 126538 - DNA, 19 bp, Homo sapiens
  siRNA target sequence for LRRFIP2 (NM_006309.1,420-438).
gttcaaggatagatcatca

SEQ ID NO: 126539 - DNA, 19 bp, Homo sapiens
  siRNA target sequence for LRRFIP2 (NM_006309.1,426-444).
ggatagatcatcaagactt

SEQ ID NO: 126540 - DNA, 19 bp, Homo sapiens
  siRNA target sequence for LRRFIP2 (NM_006309.1,446-464).
catcattaaatcattctta

SEQ ID NO: 126541 - DNA, 19 bp, Homo sapiens
  siRNA target sequence for LRRFIP2 (NM_006309.1,483-501).
gaagaagaggtcttctgat

SEQ ID NO: 126542 - DNA, 19 bp, Homo sapiens
  siRNA target sequence for LRRFIP2 (NM_006309.1,535-553).
gaccagagaaactatagca

SEQ ID NO: 126543 - DNA, 19 bp, Homo sapiens
  siRNA target sequence for LRRFIP2 (NM_006309.1,546-564).
ctatagcagtcttagacat

SEQ ID NO: 126544 - DNA, 19 bp, Homo sapiens
  siRNA target sequence for LRRFIP2 (NM_006309.1,551-569).
gcagtcttagacatagcaa

SEQ ID NO: 126545 - DNA, 19 bp, Homo sapiens
  siRNA target sequence for LRRFIP2 (NM_006309.1,552-570).
cagtcttagacatagcaaa

SEQ ID NO: 126546 - DNA, 19 bp, Homo sapiens
  siRNA target sequence for LRRFIP2 (NM_006309.1,614-632).
gtgaccctctggcaacata

SEQ ID NO: 126547 - DNA, 19 bp, Homo sapiens
  siRNA target sequence for LRRFIP2 (NM_006309.1,616-634).
gaccctctggcaacatata

SEQ ID NO: 126548 - DNA, 19 bp, Homo sapiens
  siRNA target sequence for LRRFIP2 (NM_006309.1,619-637).
cctctggcaacatataaga

SEQ ID NO: 126549 - DNA, 19 bp, Homo sapiens
  siRNA target sequence for LRRFIP2 (NM_006309.1,645-663).
ggcctctcctactgcaaat

SEQ ID NO: 126550 - DNA, 19 bp, Homo sapiens
  siRNA target sequence for LRRFIP2 (NM_006309.1,680-698).
gtgccagtctggcatcatt

SEQ ID NO: 126551 - DNA, 19 bp, Homo sapiens
  siRNA target sequence for LRRFIP2 (NM_006309.1,682-700).
gccagtctggcatcattgt

SEQ ID NO: 126552 - DNA, 19 bp, Homo sapiens
  siRNA target sequence for LRRFIP2 (NM_006309.1,686-704).
gtctggcatcattgtacaa

SEQ ID NO: 126553 - DNA, 19 bp, Homo sapiens
  siRNA target sequence for LRRFIP2 (NM_006309.1,740-758).
catctgaatgcagttatta

SEQ ID NO: 126554 - DNA, 19 bp, Homo sapiens
  siRNA target sequence for LRRFIP2 (NM_006309.1,804-822).
cgatgacactgcaagcatt

SEQ ID NO: 126555 - DNA, 19 bp, Homo sapiens
  siRNA target sequence for LRRFIP2 (NM_006309.1,864-882).
ggtatctgccgctgattat

SEQ ID NO: 126556 - DNA, 19 bp, Homo sapiens
  siRNA target sequence for LRRFIP2 (NM_006309.1,865-883).
gtatctgccgctgattatt

SEQ ID NO: 126557 - DNA, 19 bp, Homo sapiens
  siRNA target sequence for LRRFIP2 (NM_006309.1,894-912).
caatcgtaggggaagtgtt

SEQ ID NO: 126558 - DNA, 19 bp, Homo sapiens
  siRNA target sequence for LRRFIP2 (NM_006309.1,919-937).
gaggtggatgatatcagta

SEQ ID NO: 126559 - DNA, 19 bp, Homo sapiens
  siRNA target sequence for LRRFIP2 (NM_006309.1,1032-1050).
ccctctaagtggaaactca

SEQ ID NO: 126560 - DNA, 19 bp, Homo sapiens
  siRNA target sequence for LRRFIP2 (NM_006309.1,1033-1051).
cctctaagtggaaactcat

SEQ ID NO: 126561 - DNA, 19 bp, Homo sapiens
  siRNA target sequence for LRRFIP2 (NM_006309.1,1066-1084).
ggggacaccagcagcttaa

SEQ ID NO: 126562 - DNA, 19 bp, Homo sapiens
  siRNA target sequence for LRRFIP2 (NM_006309.1,1067-1085).
gggacaccagcagcttaat

SEQ ID NO: 126563 - DNA, 19 bp, Homo sapiens
  siRNA target sequence for LRRFIP2 (NM_006309.1,1068-1086).
ggacaccagcagcttaata

SEQ ID NO: 126564 - DNA, 19 bp, Homo sapiens
  siRNA target sequence for LRRFIP2 (NM_006309.1,1106-1124).
gtgaattgcgggatatcta

SEQ ID NO: 126565 - DNA, 19 bp, Homo sapiens
  siRNA target sequence for LRRFIP2 (NM_006309.1,1282-1300).
gacacactcaaggatgtta

SEQ ID NO: 126566 - DNA, 19 bp, Homo sapiens
  siRNA target sequence for LRRFIP2 (NM_006309.1,1284-1302).
cacactcaaggatgttatt

SEQ ID NO: 126567 - DNA, 19 bp, Homo sapiens
  siRNA target sequence for LRRFIP2 (NM_006309.1,1286-1304).
cactcaaggatgttattga

SEQ ID NO: 126568 - DNA, 19 bp, Homo sapiens
  siRNA target sequence for LRRFIP2 (NM_006309.1,1398-1416).
gcataagatggaagaactt

SEQ ID NO: 126569 - DNA, 19 bp, Homo sapiens
  siRNA target sequence for LRRFIP2 (NM_006309.1,1430-1448).
ggcaaagagatgagcttat

SEQ ID NO: 126570 - DNA, 19 bp, Homo sapiens
  siRNA target sequence for LRRFIP2 (NM_006309.1,1463-1481).
gcatgcagcagaaaataga

SEQ ID NO: 126571 - DNA, 19 bp, Homo sapiens
  siRNA target sequence for LRRFIP2 (NM_006309.1,1583-1601).
ggaatgagcgagatatgct

SEQ ID NO: 126572 - DNA, 19 bp, Homo sapiens
  siRNA target sequence for LRRFIP2 (NM_006309.1,1763-1781).
caggagaagggccattaga

SEQ ID NO: 126573 - DNA, 19 bp, Homo sapiens
  siRNA target sequence for LRRFIP2 (NM_006309.1,1766-1784).
gagaagggccattagatgt

SEQ ID NO: 126574 - DNA, 19 bp, Homo sapiens
  siRNA target sequence for LRRFIP2 (NM_006309.1,1816-1834).
gaactactgtcacagatta

SEQ ID NO: 126575 - DNA, 19 bp, Homo sapiens
  siRNA target sequence for LRRFIP2 (NM_006309.1,1819-1837).
ctactgtcacagattagaa

SEQ ID NO: 126576 - DNA, 19 bp, Homo sapiens
  siRNA target sequence for LRRFIP2 (NM_006309.1,1927-1945).
gacttgcagttcatcgaaa

SEQ ID NO: 126577 - DNA, 19 bp, Homo sapiens
  siRNA target sequence for LRRFIP2 (NM_006309.1,1950-1968).
gagagatgccaatagacaa

SEQ ID NO: 126578 - DNA, 19 bp, Homo sapiens
  siRNA target sequence for LRRFIP2 (NM_006309.1,1954-1972).
gatgccaatagacaaatta

SEQ ID NO: 126579 - DNA, 19 bp, Homo sapiens
  siRNA target sequence for LRRFIP2 (NM_006309.1,1964-1982).
gacaaattagcgaatacaa

SEQ ID NO: 126580 - DNA, 19 bp, Homo sapiens
  siRNA target sequence for LRRFIP2 (NM_006309.1,1966-1984).
caaattagcgaatacaaat

SEQ ID NO: 126581 - DNA, 19 bp, Homo sapiens
  siRNA target sequence for LRRFIP2 (NM_006309.1,2015-2033).
ctaccttggagcaaagtat

SEQ ID NO: 126582 - DNA, 19 bp, Homo sapiens
  siRNA target sequence for LRRFIP2 (NM_006309.1,2047-2065).
ggacaggttctgagatata

SEQ ID NO: 126583 - DNA, 19 bp, Homo sapiens
  siRNA target sequence for LRRFIP2 (NM_006309.1,2121-2139).
gaagctacaacgagagtta

SEQ ID NO: 126584 - DNA, 19 bp, Homo sapiens
  siRNA target sequence for LRRFIP2 (NM_006309.1,2125-2143).
ctacaacgagagttacgaa

SEQ ID NO: 126585 - DNA, 19 bp, Homo sapiens
  siRNA target sequence for LRRFIP2 (NM_017724.1,437-455).
gtgaattgcgggaatcttt

SEQ ID NO: 126586 - DNA, 19 bp, Homo sapiens
  siRNA target sequence for KRT14 (NM_000526.3,523-541).
gcggcctgctgagatcaaa

SEQ ID NO: 126587 - DNA, 19 bp, Homo sapiens
  siRNA target sequence for KRT14 (NM_000526.3,525-543).
ggcctgctgagatcaaaga

SEQ ID NO: 126588 - DNA, 19 bp, Homo sapiens
  siRNA target sequence for YWHAB (NM_003404.3,396-414).
ctccaacgaagagagaaat

SEQ ID NO: 126589 - DNA, 19 bp, Homo sapiens
  siRNA target sequence for YWHAB (NM_003404.3,561-579).
ggacatctgcaatgatgtt

SEQ ID NO: 126590 - DNA, 19 bp, Homo sapiens
  siRNA target sequence for YWHAB (NM_003404.3,613-631).
gctacacaaccagaaagta

SEQ ID NO: 126591 - DNA, 19 bp, Homo sapiens
  siRNA target sequence for YWHAB (NM_003404.3,625-643).
gaaagtaaggtgttctact

SEQ ID NO: 126592 - DNA, 19 bp, Homo sapiens
  siRNA target sequence for YWHAB (NM_003404.3,686-704).
catctggagacaacaaaca

SEQ ID NO: 126593 - DNA, 19 bp, Homo sapiens
  siRNA target sequence for YWHAB (NM_003404.3,738-756).
ggaagcatttgaaattagt

SEQ ID NO: 126594 - DNA, 19 bp, Homo sapiens
  siRNA target sequence for YWHAB (NM_003404.3,742-760).
gcatttgaaattagtaaga

SEQ ID NO: 126595 - DNA, 19 bp, Homo sapiens
  siRNA target sequence for YWHAB (NM_003404.3,771-789).
gcctacacacccaattcgt

SEQ ID NO: 126596 - DNA, 19 bp, Homo sapiens
  siRNA target sequence for YWHAB (NM_003404.3,788-806).
gtcttggtctggcactaaa

SEQ ID NO: 126597 - DNA, 19 bp, Homo sapiens
  siRNA target sequence for YWHAB (NM_003404.3,790-808).
cttggtctggcactaaatt

SEQ ID NO: 126598 - DNA, 19 bp, Homo sapiens
  siRNA target sequence for YWHAB (NM_003404.3,902-920).
cgctgaatgaagagtctta

SEQ ID NO: 126599 - DNA, 19 bp, Homo sapiens
  siRNA target sequence for YWHAB (NM_003404.3,903-921).
gctgaatgaagagtcttat

SEQ ID NO: 126600 - DNA, 19 bp, Homo sapiens
  siRNA target sequence for YWHAB (NM_003404.3,904-922).
ctgaatgaagagtcttata

SEQ ID NO: 126601 - DNA, 19 bp, Homo sapiens
  siRNA target sequence for YWHAG (NM_012479.2,439-457).
gtgcgtaccgggagaagat

SEQ ID NO: 126602 - DNA, 19 bp, Homo sapiens
  siRNA target sequence for YWHAG (NM_012479.2,504-522).
gataactacctgatcaaga

SEQ ID NO: 126603 - DNA, 19 bp, Homo sapiens
  siRNA target sequence for YWHAG (NM_012479.2,600-618).
gtggccaccggagagaaaa

SEQ ID NO: 126604 - DNA, 19 bp, Homo sapiens
  siRNA target sequence for YWHAG (NM_012479.2,706-724).
gattaggcctggctcttaa

SEQ ID NO: 126605 - DNA, 19 bp, Homo sapiens
  siRNA target sequence for YWHAH (NM_003405.2,776-794).
ctgcctcttagccaaacaa

SEQ ID NO: 126606 - DNA, 19 bp, Homo sapiens
  siRNA target sequence for YWHAH (NM_003405.2,813-831).
gctgagctggacacactaa

SEQ ID NO: 126607 - DNA, 19 bp, Homo sapiens
  siRNA target sequence for YWHAH (NM_003405.2,814-832).
ctgagctggacacactaaa

SEQ ID NO: 126608 - DNA, 19 bp, Homo sapiens
  siRNA target sequence for YWHAH (NM_003405.2,826-844).
cactaaacgaggattccta

SEQ ID NO: 126609 - DNA, 19 bp, Homo sapiens
  siRNA target sequence for YWHAH (NM_003405.2,828-846).
ctaaacgaggattcctata

SEQ ID NO: 126610 - DNA, 19 bp, Homo sapiens
  siRNA target sequence for YWHAQ (NM_006826.2,518-536).
gtgtggtgatgatcgaaaa

SEQ ID NO: 126611 - DNA, 19 bp, Homo sapiens
  siRNA target sequence for FCGR1A (NM_000566.2,209-227).
cgacccccagctacagaat

SEQ ID NO: 126612 - DNA, 19 bp, Homo sapiens
  siRNA target sequence for FCGR1A (NM_000566.2,296-314).
ccatacagctggaaatcca

SEQ ID NO: 126613 - DNA, 19 bp, Homo sapiens
  siRNA target sequence for FCGR1A (NM_000566.2,383-401).
gtcatgcgtggaaggataa

SEQ ID NO: 126614 - DNA, 19 bp, Homo sapiens
  siRNA target sequence for FCGR1A (NM_000566.2,396-414).
ggataagctggtgtacaat

SEQ ID NO: 126615 - DNA, 19 bp, Homo sapiens
  siRNA target sequence for FCGR1A (NM_000566.2,408-426).
gtacaatgtgctttactat

SEQ ID NO: 126616 - DNA, 19 bp, Homo sapiens
  siRNA target sequence for FCGR1A (NM_000566.2,526-544).
ggaaagcatcgctacacat

SEQ ID NO: 126617 - DNA, 19 bp, Homo sapiens
  siRNA target sequence for FCGR1A (NM_000566.2,542-560).
catcagcaggaatatctgt

SEQ ID NO: 126618 - DNA, 19 bp, Homo sapiens
  siRNA target sequence for FCGR1A (NM_000566.2,674-692).
ctggtttgcagctttactt

SEQ ID NO: 126619 - DNA, 19 bp, Homo sapiens
  siRNA target sequence for FCGR1A (NM_000566.2,718-736).
ctgcgaggcaggaacacat

SEQ ID NO: 126620 - DNA, 19 bp, Homo sapiens
  siRNA target sequence for FCGR1A (NM_000566.2,728-746).
ggaacacatcctctgaata

SEQ ID NO: 126621 - DNA, 19 bp, Homo sapiens
  siRNA target sequence for FCGR1A (NM_000566.2,767-785).
gagaagactctgggttata

SEQ ID NO: 126622 - DNA, 19 bp, Homo sapiens
  siRNA target sequence for FCGR1A (NM_000566.2,932-950).
ctgttctctgggtgacaat

SEQ ID NO: 126623 - DNA, 19 bp, Homo sapiens
  siRNA target sequence for FCGR1A (NM_000566.2,937-955).
ctctgggtgacaatacgta

SEQ ID NO: 126624 - DNA, 19 bp, Homo sapiens
  siRNA target sequence for FCGR1A (NM_000566.2,947-965).
caatacgtaaagaactgaa

SEQ ID NO: 126625 - DNA, 19 bp, Homo sapiens
  siRNA target sequence for FCGR1A (NM_000566.2,978-996).
gtgggatttagaaatctct

SEQ ID NO: 126626 - DNA, 19 bp, Homo sapiens
  siRNA target sequence for FCGR1A (NM_000566.2,1006-1024).
ggtcatgagaagaaggtaa

SEQ ID NO: 126627 - DNA, 19 bp, Homo sapiens
  siRNA target sequence for FCGR2B (NM_004001.2,145-163).
cccagccttggggtcatat

SEQ ID NO: 126628 - DNA, 19 bp, Homo sapiens
  siRNA target sequence for FCGR2B (NM_004001.2,585-603).
cgttcggatcccaacttct

SEQ ID NO: 126629 - DNA, 19 bp, Homo sapiens
  siRNA target sequence for FCGR2B (NM_004001.2,912-930).
ggggctgagaacacaatca

SEQ ID NO: 126630 - DNA, 19 bp, Homo sapiens
  siRNA target sequence for FCGR3A (NM_000569.4,500-518).
caggcctcgagctacttca

SEQ ID NO: 126631 - DNA, 19 bp, Homo sapiens
  siRNA target sequence for FCGR3A (NM_000569.4,502-520).
ggcctcgagctacttcatt

SEQ ID NO: 126632 - DNA, 19 bp, Homo sapiens
  siRNA target sequence for FCGR3A (NM_000569.4,504-522).
cctcgagctacttcattga

SEQ ID NO: 126633 - DNA, 19 bp, Homo sapiens
  siRNA target sequence for FCGR3A (NM_000569.4,630-648).
cccctcggtgggtgttcaa

SEQ ID NO: 126634 - DNA, 19 bp, Homo sapiens
  siRNA target sequence for FCGR3A (NM_000569.4,726-744).
gcaaaggcaggaagtattt

SEQ ID NO: 126635 - DNA, 19 bp, Homo sapiens
  siRNA target sequence for FCGR3A (NM_000569.4,878-896).
gtgtcaaccatctcatcat

SEQ ID NO: 126636 - DNA, 19 bp, Homo sapiens
  siRNA target sequence for FCGR3A (NM_000569.4,906-924).
ctgggtaccaagtctcttt

SEQ ID NO: 126637 - DNA, 19 bp, Homo sapiens
  siRNA target sequence for FCGR3A (NM_000569.4,934-952).
gatggtactcctttttgca

SEQ ID NO: 126638 - DNA, 19 bp, Homo sapiens
  siRNA target sequence for FCGR3A (NM_000569.4,951-969).
cagtggacacaggactata

SEQ ID NO: 126639 - DNA, 19 bp, Homo sapiens
  siRNA target sequence for FCGR3A (NM_000569.4,958-976).
cacaggactatatttctct

SEQ ID NO: 126640 - DNA, 19 bp, Homo sapiens
  siRNA target sequence for FCGR3A (NM_000569.4,977-995).
gtgaagacaaacattcgaa

SEQ ID NO: 126641 - DNA, 19 bp, Homo sapiens
  siRNA target sequence for FCGR3A (NM_000569.4,1009-1027).
ctggaaggaccataaattt

SEQ ID NO: 126642 - DNA, 19 bp, Homo sapiens
  siRNA target sequence for FCGRT (NM_004107.3,631-649).
cgaggccctggctatcagt

SEQ ID NO: 126643 - DNA, 19 bp, Homo sapiens
  siRNA target sequence for FCGRT (NM_004107.3,938-956).
cacgcctcgtcgtcactaa

SEQ ID NO: 126644 - DNA, 19 bp, Homo sapiens
  siRNA target sequence for FCGRT (NM_004107.3,940-958).
cgcctcgtcgtcactaaca

SEQ ID NO: 126645 - DNA, 19 bp, Homo sapiens
  siRNA target sequence for FCGRT (NM_004107.3,942-960).
cctcgtcgtcactaacagt

SEQ ID NO: 126646 - DNA, 19 bp, Homo sapiens
  siRNA target sequence for FCGRT (NM_004107.3,946-964).
gtcgtcactaacagtcaaa

SEQ ID NO: 126647 - DNA, 19 bp, Homo sapiens
  siRNA target sequence for FCGRT (NM_004107.3,949-967).
gtcactaacagtcaaaagt

SEQ ID NO: 126648 - DNA, 19 bp, Homo sapiens
  siRNA target sequence for FCER1A (NM_002001.2,111-129).
catggaatcccctactcta

SEQ ID NO: 126649 - DNA, 19 bp, Homo sapiens
  siRNA target sequence for FCER1A (NM_002001.2,168-186).
gttagcagtccctcagaaa

SEQ ID NO: 126650 - DNA, 19 bp, Homo sapiens
  siRNA target sequence for FCER1A (NM_002001.2,232-250).
gagaatgtgactcttacat

SEQ ID NO: 126651 - DNA, 19 bp, Homo sapiens
  siRNA target sequence for FCER1A (NM_002001.2,377-395).
gtcagcaccaacaagttaa

SEQ ID NO: 126652 - DNA, 19 bp, Homo sapiens
  siRNA target sequence for FCER1A (NM_002001.2,382-400).
caccaacaagttaatgaga

SEQ ID NO: 126653 - DNA, 19 bp, Homo sapiens
  siRNA target sequence for FCER1A (NM_002001.2,407-425).
ctgtgtacctggaagtctt

SEQ ID NO: 126654 - DNA, 19 bp, Homo sapiens
  siRNA target sequence for FCER1A (NM_002001.2,517-535).
gtgtacaaggtgatctatt

SEQ ID NO: 126655 - DNA, 19 bp, Homo sapiens
  siRNA target sequence for FCER1A (NM_002001.2,519-537).
gtacaaggtgatctattat

SEQ ID NO: 126656 - DNA, 19 bp, Homo sapiens
  siRNA target sequence for FCER1A (NM_002001.2,525-543).
ggtgatctattataaggat

SEQ ID NO: 126657 - DNA, 19 bp, Homo sapiens
  siRNA target sequence for FCER1A (NM_002001.2,573-591).
ccacaacatctccattaca

SEQ ID NO: 126658 - DNA, 19 bp, Homo sapiens
  siRNA target sequence for FCER1A (NM_002001.2,574-592).
cacaacatctccattacaa

SEQ ID NO: 126659 - DNA, 19 bp, Homo sapiens
  siRNA target sequence for FCER1A (NM_002001.2,576-594).
caacatctccattacaaat

SEQ ID NO: 126660 - DNA, 19 bp, Homo sapiens
  siRNA target sequence for FCER1A (NM_002001.2,663-681).
gcccctcaacattactgta

SEQ ID NO: 126661 - DNA, 19 bp, Homo sapiens
  siRNA target sequence for FCER1A (NM_002001.2,666-684).
cctcaacattactgtaata

SEQ ID NO: 126662 - DNA, 19 bp, Homo sapiens
  siRNA target sequence for FCER1A (NM_002001.2,667-685).
ctcaacattactgtaataa

SEQ ID NO: 126663 - DNA, 19 bp, Homo sapiens
  siRNA target sequence for FCER1A (NM_002001.2,688-706).
gctccgcgtgagaagtact

SEQ ID NO: 126664 - DNA, 19 bp, Homo sapiens
  siRNA target sequence for FCER1A (NM_002001.2,697-715).
gagaagtactggctacaat

SEQ ID NO: 126665 - DNA, 19 bp, Homo sapiens
  siRNA target sequence for FCER1A (NM_002001.2,754-772).
gacacaggattatttatct

SEQ ID NO: 126666 - DNA, 19 bp, Homo sapiens
  siRNA target sequence for FCER1A (NM_002001.2,756-774).
cacaggattatttatctca

SEQ ID NO: 126667 - DNA, 19 bp, Homo sapiens
  siRNA target sequence for FCER1A (NM_002001.2,789-807).
cacatttctcttgaagatt

SEQ ID NO: 126668 - DNA, 19 bp, Homo sapiens
  siRNA target sequence for FCER1G (NM_004106.1,86-104).
gagcctcagctctgctata

SEQ ID NO: 126669 - DNA, 19 bp, Homo sapiens
  siRNA target sequence for FCER1G (NM_004106.1,118-136).
cctgtttctgtatggaatt

SEQ ID NO: 126670 - DNA, 19 bp, Homo sapiens
  siRNA target sequence for FCER1G (NM_004106.1,173-191).
gtgcgaaaggcagctataa

SEQ ID NO: 126671 - DNA, 19 bp, Homo sapiens
  siRNA target sequence for FCER1G (NM_004106.1,176-194).
cgaaaggcagctataacca

SEQ ID NO: 126672 - DNA, 19 bp, Homo sapiens
  siRNA target sequence for FCER1G (NM_004106.1,234-252).
ccaggaaccaggagactta

SEQ ID NO: 126673 - DNA, 19 bp, Homo sapiens
  siRNA target sequence for FCER2 (NM_002002.3,320-338).
gacaccacacagagtctaa

SEQ ID NO: 126674 - DNA, 19 bp, Homo sapiens
  siRNA target sequence for FCER2 (NM_002002.3,324-342).
ccacacagagtctaaaaca

SEQ ID NO: 126675 - DNA, 19 bp, Homo sapiens
  siRNA target sequence for FCER2 (NM_002002.3,362-380).
cggaacgtctctcaagttt

SEQ ID NO: 126676 - DNA, 19 bp, Homo sapiens
  siRNA target sequence for FCER2 (NM_002002.3,568-586).
gaggaacgaagcttcagat

SEQ ID NO: 126677 - DNA, 19 bp, Homo sapiens
  siRNA target sequence for FCER2 (NM_002002.3,657-675).
gcaacacgtgccctgaaaa

SEQ ID NO: 126678 - DNA, 19 bp, Homo sapiens
  siRNA target sequence for FCER2 (NM_002002.3,668-686).
cctgaaaagtggatcaatt

SEQ ID NO: 126679 - DNA, 19 bp, Homo sapiens
  siRNA target sequence for FCER2 (NM_002002.3,669-687).
ctgaaaagtggatcaattt

SEQ ID NO: 126680 - DNA, 19 bp, Homo sapiens
  siRNA target sequence for LGALS3 (NM_002306.1,397-415).
gtgcctcgcatgctgataa

SEQ ID NO: 126681 - DNA, 19 bp, Homo sapiens
  siRNA target sequence for LGALS3 (NM_002306.1,399-417).
gcctcgcatgctgataaca

SEQ ID NO: 126682 - DNA, 19 bp, Homo sapiens
  siRNA target sequence for LGALS3 (NM_002306.1,400-418).
cctcgcatgctgataacaa

SEQ ID NO: 126683 - DNA, 19 bp, Homo sapiens
  siRNA target sequence for LGALS3 (NM_002306.1,401-419).
ctcgcatgctgataacaat

SEQ ID NO: 126684 - DNA, 19 bp, Homo sapiens
  siRNA target sequence for LGALS3 (NM_002306.1,404-422).
gcatgctgataacaattct

SEQ ID NO: 126685 - DNA, 19 bp, Homo sapiens
  siRNA target sequence for LGALS3 (NM_002306.1,492-510).
ctttaacccacgcttcaat

SEQ ID NO: 126686 - DNA, 19 bp, Homo sapiens
  siRNA target sequence for LGALS3 (NM_002306.1,500-518).
cacgcttcaatgagaacaa

SEQ ID NO: 126687 - DNA, 19 bp, Homo sapiens
  siRNA target sequence for LGALS3 (NM_002306.1,502-520).
cgcttcaatgagaacaaca

SEQ ID NO: 126688 - DNA, 19 bp, Homo sapiens
  siRNA target sequence for LGALS3 (NM_002306.1,513-531).
gaacaacaggagagtcatt

SEQ ID NO: 126689 - DNA, 19 bp, Homo sapiens
  siRNA target sequence for LGALS3 (NM_002306.1,516-534).
caacaggagagtcattgtt

SEQ ID NO: 126690 - DNA, 19 bp, Homo sapiens
  siRNA target sequence for LGALS3 (NM_002306.1,521-539).
ggagagtcattgtttgcaa

SEQ ID NO: 126691 - DNA, 19 bp, Homo sapiens
  siRNA target sequence for LGALS3 (NM_002306.1,522-540).
gagagtcattgtttgcaat

SEQ ID NO: 126692 - DNA, 19 bp, Homo sapiens
  siRNA target sequence for LGALS3 (NM_002306.1,665-683).
ctcacttgttgcagtacaa

SEQ ID NO: 126693 - DNA, 19 bp, Homo sapiens
  siRNA target sequence for LGALS3 (NM_002306.1,669-687).
cttgttgcagtacaatcat

SEQ ID NO: 126694 - DNA, 19 bp, Homo sapiens
  siRNA target sequence for LGALS3 (NM_002306.1,678-696).
gtacaatcatcgggttaaa

SEQ ID NO: 126695 - DNA, 19 bp, Homo sapiens
  siRNA target sequence for LGALS3 (NM_002306.1,685-703).
catcgggttaaaaaactca

SEQ ID NO: 126696 - DNA, 19 bp, Homo sapiens
  siRNA target sequence for LGALS3 (NM_002306.1,689-707).
gggttaaaaaactcaatga

SEQ ID NO: 126697 - DNA, 19 bp, Homo sapiens
  siRNA target sequence for LGALS3 (NM_002306.1,751-769).
gcttcatataccatgatat

SEQ ID NO: 126698 - DNA, 19 bp, Homo sapiens
  siRNA target sequence for MS4A2 (NM_000139.2,155-173).
ccagtgtgcctgcatttga

SEQ ID NO: 126699 - DNA, 19 bp, Homo sapiens
  siRNA target sequence for MS4A2 (NM_000139.2,199-217).
gtatcttcaggcagactat

SEQ ID NO: 126700 - DNA, 19 bp, Homo sapiens
  siRNA target sequence for MS4A2 (NM_000139.2,337-355).
gtctgctctgtacttgata

SEQ ID NO: 126701 - DNA, 19 bp, Homo sapiens
  siRNA target sequence for MS4A2 (NM_000139.2,339-357).
ctgctctgtacttgatatt

SEQ ID NO: 126702 - DNA, 19 bp, Homo sapiens
  siRNA target sequence for MS4A2 (NM_000139.2,363-381).
cattgagggagacattttt

SEQ ID NO: 126703 - DNA, 19 bp, Homo sapiens
  siRNA target sequence for MS4A2 (NM_000139.2,404-422).
cattctggggagccatatt

SEQ ID NO: 126704 - DNA, 19 bp, Homo sapiens
  siRNA target sequence for MS4A2 (NM_000139.2,436-454).
ggaatgttgtcaattatat

SEQ ID NO: 126705 - DNA, 19 bp, Homo sapiens
  siRNA target sequence for MS4A2 (NM_000139.2,520-538).
gctgggggaacgggaatta

SEQ ID NO: 126706 - DNA, 19 bp, Homo sapiens
  siRNA target sequence for MS4A2 (NM_000139.2,524-542).
ggggaacgggaattaccat

SEQ ID NO: 126707 - DNA, 19 bp, Homo sapiens
  siRNA target sequence for MS4A2 (NM_000139.2,688-706).
gctgtgtcactcacaatct

SEQ ID NO: 126708 - DNA, 19 bp, Homo sapiens
  siRNA target sequence for MS4A2 (NM_000139.2,816-834).
gtctcctcccattgattta

SEQ ID NO: 126709 - DNA, 19 bp, Homo sapiens
  siRNA target sequence for FCAR (NM_002000.2,317-335).
cttggatggatctgtgaaa

SEQ ID NO: 126710 - DNA, 19 bp, Homo sapiens
  siRNA target sequence for FCAR (NM_002000.2,368-386).
gacccagctgatgatcata

SEQ ID NO: 126711 - DNA, 19 bp, Homo sapiens
  siRNA target sequence for FCAR (NM_002000.2,370-388).
cccagctgatgatcataaa

SEQ ID NO: 126712 - DNA, 19 bp, Homo sapiens
  siRNA target sequence for FCAR (NM_002000.2,371-389).
ccagctgatgatcataaaa

SEQ ID NO: 126713 - DNA, 19 bp, Homo sapiens
  siRNA target sequence for FCAR (NM_002000.2,392-410).
ctccacgtaccgagagata

SEQ ID NO: 126714 - DNA, 19 bp, Homo sapiens
  siRNA target sequence for FCAR (NM_002000.2,485-503).
gcgctatcagtgccaatat

SEQ ID NO: 126715 - DNA, 19 bp, Homo sapiens
  siRNA target sequence for FCAR (NM_002000.2,486-504).
cgctatcagtgccaatata

SEQ ID NO: 126716 - DNA, 19 bp, Homo sapiens
  siRNA target sequence for FCAR (NM_002000.2,505-523).
ggatagggcactacagatt

SEQ ID NO: 126717 - DNA, 19 bp, Homo sapiens
  siRNA target sequence for FCAR (NM_002000.2,548-566).
ggtagtgacaggcttgtat

SEQ ID NO: 126718 - DNA, 19 bp, Homo sapiens
  siRNA target sequence for FCAR (NM_002000.2,640-658).
cagcacacatcccatttga

SEQ ID NO: 126719 - DNA, 19 bp, Homo sapiens
  siRNA target sequence for FCAR (NM_002000.2,647-665).
catcccatttgatagattt

SEQ ID NO: 126720 - DNA, 19 bp, Homo sapiens
  siRNA target sequence for CD44 (NM_000610.2,231-249).
gcctggcgcagatcgattt

SEQ ID NO: 126721 - DNA, 19 bp, Homo sapiens
  siRNA target sequence for CD44 (NM_000610.2,233-251).
ctggcgcagatcgatttga

SEQ ID NO: 126722 - DNA, 19 bp, Homo sapiens
  siRNA target sequence for CD44 (NM_000610.2,235-253).
ggcgcagatcgatttgaat

SEQ ID NO: 126723 - DNA, 19 bp, Homo sapiens
  siRNA target sequence for CD44 (NM_000610.2,237-255).
cgcagatcgatttgaatat

SEQ ID NO: 126724 - DNA, 19 bp, Homo sapiens
  siRNA target sequence for CD44 (NM_000610.2,238-256).
gcagatcgatttgaatata

SEQ ID NO: 126725 - DNA, 19 bp, Homo sapiens
  siRNA target sequence for CD44 (NM_000610.2,264-282).
gctttgcaggtgtattcca

SEQ ID NO: 126726 - DNA, 19 bp, Homo sapiens
  siRNA target sequence for CD44 (NM_000610.2,280-298).
ccacgtggagaaaaatggt

SEQ ID NO: 126727 - DNA, 19 bp, Homo sapiens
  siRNA target sequence for CD44 (NM_000610.2,332-350).
ctctgcaaggctttcaata

SEQ ID NO: 126728 - DNA, 19 bp, Homo sapiens
  siRNA target sequence for CD44 (NM_000610.2,406-424).
ctgcaggtatgggttcata

SEQ ID NO: 126729 - DNA, 19 bp, Homo sapiens
  siRNA target sequence for CD44 (NM_000610.2,510-528).
cctcccagtatgacacata

SEQ ID NO: 126730 - DNA, 19 bp, Homo sapiens
  siRNA target sequence for CD44 (NM_000610.2,515-533).
cagtatgacacatattgct

SEQ ID NO: 126731 - DNA, 19 bp, Homo sapiens
  siRNA target sequence for CD44 (NM_000610.2,545-563).
gctccacctgaagaagatt

SEQ ID NO: 126732 - DNA, 19 bp, Homo sapiens
  siRNA target sequence for CD44 (NM_000610.2,551-569).
cctgaagaagattgtacat

SEQ ID NO: 126733 - DNA, 19 bp, Homo sapiens
  siRNA target sequence for CD44 (NM_000610.2,580-598).
cctgcccaatgcctttgat

SEQ ID NO: 126734 - DNA, 19 bp, Homo sapiens
  siRNA target sequence for CD44 (NM_000610.2,596-614).
gatggaccaattaccataa

SEQ ID NO: 126735 - DNA, 19 bp, Homo sapiens
  siRNA target sequence for CD44 (NM_000610.2,599-617).
ggaccaattaccataacta

SEQ ID NO: 126736 - DNA, 19 bp, Homo sapiens
  siRNA target sequence for CD44 (NM_000610.2,600-618).
gaccaattaccataactat

SEQ ID NO: 126737 - DNA, 19 bp, Homo sapiens
  siRNA target sequence for CD44 (NM_000610.2,644-662).
gtccagaaaggagaataca

SEQ ID NO: 126738 - DNA, 19 bp, Homo sapiens
  siRNA target sequence for CD44 (NM_000610.2,663-681).
gaacgaatcctgaagacat

SEQ ID NO: 126739 - DNA, 19 bp, Homo sapiens
  siRNA target sequence for CD44 (NM_000610.2,690-708).
gcaaccctactgatgatga

SEQ ID NO: 126740 - DNA, 19 bp, Homo sapiens
  siRNA target sequence for CD44 (NM_000610.2,816-834).
ccgacagcacagacagaat

SEQ ID NO: 126741 - DNA, 19 bp, Homo sapiens
  siRNA target sequence for CD44 (NM_000610.2,910-928).
gttttcatggttgtttcta

SEQ ID NO: 126742 - DNA, 19 bp, Homo sapiens
  siRNA target sequence for CD44 (NM_000610.2,970-988).
ggctggtacgtcttcaaat

SEQ ID NO: 126743 - DNA, 19 bp, Homo sapiens
  siRNA target sequence for CD44 (NM_000610.2,975-993).
gtacgtcttcaaataccat

SEQ ID NO: 126744 - DNA, 19 bp, Homo sapiens
  siRNA target sequence for CD44 (NM_000610.2,1159-1177).
gaacccaagccattcaaat

SEQ ID NO: 126745 - DNA, 19 bp, Homo sapiens
  siRNA target sequence for CD44 (NM_000610.2,1203-1221).
caaggatgactgatgtaga

SEQ ID NO: 126746 - DNA, 19 bp, Homo sapiens
  siRNA target sequence for CD44 (NM_000610.2,1210-1228).
gactgatgtagacagaaat

SEQ ID NO: 126747 - DNA, 19 bp, Homo sapiens
  siRNA target sequence for CD44 (NM_000610.2,1333-1351).
ccaggcaactcctagtagt

SEQ ID NO: 126748 - DNA, 19 bp, Homo sapiens
  siRNA target sequence for CD44 (NM_000610.2,1334-1352).
caggcaactcctagtagta

SEQ ID NO: 126749 - DNA, 19 bp, Homo sapiens
  siRNA target sequence for CD44 (NM_000610.2,1336-1354).
ggcaactcctagtagtaca

SEQ ID NO: 126750 - DNA, 19 bp, Homo sapiens
  siRNA target sequence for CD44 (NM_000610.2,1337-1355).
gcaactcctagtagtacaa

SEQ ID NO: 126751 - DNA, 19 bp, Homo sapiens
  siRNA target sequence for CD44 (NM_000610.2,1470-1488).
ctcataccagccatccaat

SEQ ID NO: 126752 - DNA, 19 bp, Homo sapiens
  siRNA target sequence for CD44 (NM_000610.2,1558-1576).
catgggacgaggtcatcaa

SEQ ID NO: 126753 - DNA, 19 bp, Homo sapiens
  siRNA target sequence for CD44 (NM_000610.2,1622-1640).
cagcctactgcaaatccaa

SEQ ID NO: 126754 - DNA, 19 bp, Homo sapiens
  siRNA target sequence for CD44 (NM_000610.2,1668-1686).
ggacaggacctctttcaat

SEQ ID NO: 126755 - DNA, 19 bp, Homo sapiens
  siRNA target sequence for CD44 (NM_000610.2,1687-1705).
gacaacgcagcagagtaat

SEQ ID NO: 126756 - DNA, 19 bp, Homo sapiens
  siRNA target sequence for CD44 (NM_000610.2,1772-1790).
ctgacatcaagcaatagga

SEQ ID NO: 126757 - DNA, 19 bp, Homo sapiens
  siRNA target sequence for CD44 (NM_000610.2,1827-1845).
ctgaaggctcaactacttt

SEQ ID NO: 126758 - DNA, 19 bp, Homo sapiens
  siRNA target sequence for CD44 (NM_000610.2,1850-1868).
gaaggttatacctctcatt

SEQ ID NO: 126759 - DNA, 19 bp, Homo sapiens
  siRNA target sequence for CD44 (NM_000610.2,1953-1971).
gagattccaactctaatgt

SEQ ID NO: 126760 - DNA, 19 bp, Homo sapiens
  siRNA target sequence for CD44 (NM_000610.2,1986-2004).
caggagaccaagacacatt

SEQ ID NO: 126761 - DNA, 19 bp, Homo sapiens
  siRNA target sequence for CD44 (NM_000610.2,2029-2047).
cactcatggatctgaatca

SEQ ID NO: 126762 - DNA, 19 bp, Homo sapiens
  siRNA target sequence for CD44 (NM_000610.2,2031-2049).
ctcatggatctgaatcaga

SEQ ID NO: 126763 - DNA, 19 bp, Homo sapiens
  siRNA target sequence for CD44 (NM_000610.2,2086-2104).
cacaacctctggtcctata

SEQ ID NO: 126764 - DNA, 19 bp, Homo sapiens
  siRNA target sequence for CD44 (NM_000610.2,2120-2138).
ccagaatggctgatcatct

SEQ ID NO: 126765 - DNA, 19 bp, Homo sapiens
  siRNA target sequence for CD44 (NM_000610.2,2164-2182).
gattcttgcagtttgcatt

SEQ ID NO: 126766 - DNA, 19 bp, Homo sapiens
  siRNA target sequence for CD44 (NM_000610.2,2320-2338).
caaggagtcgtcagaaact

SEQ ID NO: 126767 - DNA, 19 bp, Homo sapiens
  siRNA target sequence for CD44 (NM_000610.2,2333-2351).
gaaactccagaccagttta

SEQ ID NO: 126768 - DNA, 19 bp, Homo sapiens
  siRNA target sequence for FN1 (NM_002026.1,391-409).
ccggtggctgtcagtcaaa

SEQ ID NO: 126769 - DNA, 19 bp, Homo sapiens
  siRNA target sequence for FN1 (NM_002026.1,410-428).
gcaagcccggttgttatga

SEQ ID NO: 126770 - DNA, 19 bp, Homo sapiens
  siRNA target sequence for FN1 (NM_002026.1,414-432).
gcccggttgttatgacaat

SEQ ID NO: 126771 - DNA, 19 bp, Homo sapiens
  siRNA target sequence for FN1 (NM_002026.1,475-493).
ctaggcaatgcgttggttt

SEQ ID NO: 126772 - DNA, 19 bp, Homo sapiens
  siRNA target sequence for FN1 (NM_002026.1,478-496).
ggcaatgcgttggtttgta

SEQ ID NO: 126773 - DNA, 19 bp, Homo sapiens
  siRNA target sequence for FN1 (NM_002026.1,480-498).
caatgcgttggtttgtact

SEQ ID NO: 126774 - DNA, 19 bp, Homo sapiens
  siRNA target sequence for FN1 (NM_002026.1,485-503).
cgttggtttgtacttgtta

SEQ ID NO: 126775 - DNA, 19 bp, Homo sapiens
  siRNA target sequence for FN1 (NM_002026.1,505-523).
ggaggaagccgaggtttta

SEQ ID NO: 126776 - DNA, 19 bp, Homo sapiens
  siRNA target sequence for FN1 (NM_002026.1,585-603).
ccgagtgggtgacacttat

SEQ ID NO: 126777 - DNA, 19 bp, Homo sapiens
  siRNA target sequence for FN1 (NM_002026.1,597-615).
cacttatgagcgtcctaaa

SEQ ID NO: 126778 - DNA, 19 bp, Homo sapiens
  siRNA target sequence for FN1 (NM_002026.1,599-617).
cttatgagcgtcctaaaga

SEQ ID NO: 126779 - DNA, 19 bp, Homo sapiens
  siRNA target sequence for FN1 (NM_002026.1,610-628).
cctaaagactccatgatct

SEQ ID NO: 126780 - DNA, 19 bp, Homo sapiens
  siRNA target sequence for FN1 (NM_002026.1,746-764).
ctggtggttacatgttaga

SEQ ID NO: 126781 - DNA, 19 bp, Homo sapiens
  siRNA target sequence for FN1 (NM_002026.1,748-766).
ggtggttacatgttagagt

SEQ ID NO: 126782 - DNA, 19 bp, Homo sapiens
  siRNA target sequence for FN1 (NM_002026.1,891-909).
gatgatggtagattgtact

SEQ ID NO: 126783 - DNA, 19 bp, Homo sapiens
  siRNA target sequence for FN1 (NM_002026.1,931-949).
cgcatcacttgcacttcta

SEQ ID NO: 126784 - DNA, 19 bp, Homo sapiens
  siRNA target sequence for FN1 (NM_002026.1,933-951).
catcacttgcacttctaga

SEQ ID NO: 126785 - DNA, 19 bp, Homo sapiens
  siRNA target sequence for FN1 (NM_002026.1,969-987).
ggacacaaggacatcctat

SEQ ID NO: 126786 - DNA, 19 bp, Homo sapiens
  siRNA target sequence for FN1 (NM_002026.1,978-996).
gacatcctatagaattgga

SEQ ID NO: 126787 - DNA, 19 bp, Homo sapiens
  siRNA target sequence for FN1 (NM_002026.1,1005-1023).
gagcaagaaggataatcga

SEQ ID NO: 126788 - DNA, 19 bp, Homo sapiens
  siRNA target sequence for FN1 (NM_002026.1,1316-1334).
cttacggtggcaactcaaa

SEQ ID NO: 126789 - DNA, 19 bp, Homo sapiens
  siRNA target sequence for FN1 (NM_002026.1,1320-1338).
cggtggcaactcaaatgga

SEQ ID NO: 126790 - DNA, 19 bp, Homo sapiens
  siRNA target sequence for FN1 (NM_002026.1,1339-1357).
gagccatgtgtcttaccat

SEQ ID NO: 126791 - DNA, 19 bp, Homo sapiens
  siRNA target sequence for FN1 (NM_002026.1,1350-1368).
cttaccattcacctacaat

SEQ ID NO: 126792 - DNA, 19 bp, Homo sapiens
  siRNA target sequence for FN1 (NM_002026.1,1422-1440).
gtgcagcacaacttcgaat

SEQ ID NO: 126793 - DNA, 19 bp, Homo sapiens
  siRNA target sequence for FN1 (NM_002026.1,1424-1442).
gcagcacaacttcgaatta

SEQ ID NO: 126794 - DNA, 19 bp, Homo sapiens
  siRNA target sequence for FN1 (NM_002026.1,1425-1443).
cagcacaacttcgaattat

SEQ ID NO: 126795 - DNA, 19 bp, Homo sapiens
  siRNA target sequence for FN1 (NM_002026.1,1427-1445).
gcacaacttcgaattatga

SEQ ID NO: 126796 - DNA, 19 bp, Homo sapiens
  siRNA target sequence for FN1 (NM_002026.1,1447-1465).
caggaccagaaatactctt

SEQ ID NO: 126797 - DNA, 19 bp, Homo sapiens
  siRNA target sequence for FN1 (NM_002026.1,1469-1487).
gcacagaccacactgtttt

SEQ ID NO: 126798 - DNA, 19 bp, Homo sapiens
  siRNA target sequence for FN1 (NM_002026.1,1496-1514).
ctcgaggaggaaattccaa

SEQ ID NO: 126799 - DNA, 19 bp, Homo sapiens
  siRNA target sequence for FN1 (NM_002026.1,1528-1546).
cacttccccttcctataca

SEQ ID NO: 126800 - DNA, 19 bp, Homo sapiens
  siRNA target sequence for FN1 (NM_002026.1,1604-1622).
gtgggaccacacagaacta

SEQ ID NO: 126801 - DNA, 19 bp, Homo sapiens
  siRNA target sequence for FN1 (NM_002026.1,1718-1736).
gggataagcagcatgacat

SEQ ID NO: 126802 - DNA, 19 bp, Homo sapiens
  siRNA target sequence for FN1 (NM_002026.1,1811-1829).
gagatcagtgcattgttga

SEQ ID NO: 126803 - DNA, 19 bp, Homo sapiens
  siRNA target sequence for FN1 (NM_002026.1,1879-1897).
gggcacatgctgaactgta

SEQ ID NO: 126804 - DNA, 19 bp, Homo sapiens
  siRNA target sequence for FN1 (NM_002026.1,1968-1986).
gacgttttatcaaattgga

SEQ ID NO: 126805 - DNA, 19 bp, Homo sapiens
  siRNA target sequence for FN1 (NM_002026.1,2059-2077).
cattgccaacctttacaga

SEQ ID NO: 126806 - DNA, 19 bp, Homo sapiens
  siRNA target sequence for FN1 (NM_002026.1,2093-2111).
gtggtcctgtcgaagtatt

SEQ ID NO: 126807 - DNA, 19 bp, Homo sapiens
  siRNA target sequence for FN1 (NM_002026.1,2095-2113).
ggtcctgtcgaagtattta

SEQ ID NO: 126808 - DNA, 19 bp, Homo sapiens
  siRNA target sequence for FN1 (NM_002026.1,2096-2114).
gtcctgtcgaagtatttat

SEQ ID NO: 126809 - DNA, 19 bp, Homo sapiens
  siRNA target sequence for FN1 (NM_002026.1,2174-2192).
ctcacatttccaagtacat

SEQ ID NO: 126810 - DNA, 19 bp, Homo sapiens
  siRNA target sequence for FN1 (NM_002026.1,2202-2220).
gagacctaaaaattctgta

SEQ ID NO: 126811 - DNA, 19 bp, Homo sapiens
  siRNA target sequence for FN1 (NM_002026.1,2338-2356).
gaagtgactcgctttgact

SEQ ID NO: 126812 - DNA, 19 bp, Homo sapiens
  siRNA target sequence for FN1 (NM_002026.1,2510-2528).
cgggattccgggtggaata

SEQ ID NO: 126813 - DNA, 19 bp, Homo sapiens
  siRNA target sequence for FN1 (NM_002026.1,2511-2529).
gggattccgggtggaatat

SEQ ID NO: 126814 - DNA, 19 bp, Homo sapiens
  siRNA target sequence for FN1 (NM_002026.1,2513-2531).
gattccgggtggaatatga

SEQ ID NO: 126815 - DNA, 19 bp, Homo sapiens
  siRNA target sequence for FN1 (NM_002026.1,2605-2623).
ctgcttcctggccgaaaat

SEQ ID NO: 126816 - DNA, 19 bp, Homo sapiens
  siRNA target sequence for FN1 (NM_002026.1,2608-2626).
cttcctggccgaaaataca

SEQ ID NO: 126817 - DNA, 19 bp, Homo sapiens
  siRNA target sequence for FN1 (NM_002026.1,2614-2632).
ggccgaaaatacattgtaa

SEQ ID NO: 126818 - DNA, 19 bp, Homo sapiens
  siRNA target sequence for FN1 (NM_002026.1,2670-2688).
gatcctgtctacttcacaa

SEQ ID NO: 126819 - DNA, 19 bp, Homo sapiens
  siRNA target sequence for FN1 (NM_002026.1,2717-2735).
cgactgtggaccaagttga

SEQ ID NO: 126820 - DNA, 19 bp, Homo sapiens
  siRNA target sequence for FN1 (NM_002026.1,2799-2817).
ctattcgccatcagtagaa

SEQ ID NO: 126821 - DNA, 19 bp, Homo sapiens
  siRNA target sequence for FN1 (NM_002026.1,2878-2896).
caacctggtgttcagtata

SEQ ID NO: 126822 - DNA, 19 bp, Homo sapiens
  siRNA target sequence for FN1 (NM_002026.1,2881-2899).
cctggtgttcagtataaca

SEQ ID NO: 126823 - DNA, 19 bp, Homo sapiens
  siRNA target sequence for FN1 (NM_002026.1,2882-2900).
ctggtgttcagtataacat

SEQ ID NO: 126824 - DNA, 19 bp, Homo sapiens
  siRNA target sequence for FN1 (NM_002026.1,2933-2951).
gtacacctgttgtcattca

SEQ ID NO: 126825 - DNA, 19 bp, Homo sapiens
  siRNA target sequence for FN1 (NM_002026.1,2936-2954).
cacctgttgtcattcaaca

SEQ ID NO: 126826 - DNA, 19 bp, Homo sapiens
  siRNA target sequence for FN1 (NM_002026.1,2941-2959).
gttgtcattcaacaagaaa

SEQ ID NO: 126827 - DNA, 19 bp, Homo sapiens
  siRNA target sequence for FN1 (NM_002026.1,3074-3092).
gctaccgtgtggatgtgat

SEQ ID NO: 126828 - DNA, 19 bp, Homo sapiens
  siRNA target sequence for FN1 (NM_002026.1,3172-3190).
cctggggtcacctattact

SEQ ID NO: 126829 - DNA, 19 bp, Homo sapiens
  siRNA target sequence for FN1 (NM_002026.1,3177-3195).
ggtcacctattacttcaaa

SEQ ID NO: 126830 - DNA, 19 bp, Homo sapiens
  siRNA target sequence for FN1 (NM_002026.1,3269-3287).
ctaacctccagtttgtcaa

SEQ ID NO: 126831 - DNA, 19 bp, Homo sapiens
  siRNA target sequence for FN1 (NM_002026.1,3587-3605).
ggacgcctgctccaagaat

SEQ ID NO: 126832 - DNA, 19 bp, Homo sapiens
  siRNA target sequence for FN1 (NM_002026.1,3592-3610).
cctgctccaagaattggtt

SEQ ID NO: 126833 - DNA, 19 bp, Homo sapiens
  siRNA target sequence for FN1 (NM_002026.1,3599-3617).
caagaattggttttaagct

SEQ ID NO: 126834 - DNA, 19 bp, Homo sapiens
  siRNA target sequence for FN1 (NM_002026.1,3698-3716).
ctccaggagtagaatacgt

SEQ ID NO: 126835 - DNA, 19 bp, Homo sapiens
  siRNA target sequence for FN1 (NM_002026.1,3758-3776).
cgccaattgtaaacaaagt

SEQ ID NO: 126836 - DNA, 19 bp, Homo sapiens
  siRNA target sequence for FN1 (NM_002026.1,3861-3879).
caccaccccagacattact

SEQ ID NO: 126837 - DNA, 19 bp, Homo sapiens
  siRNA target sequence for FN1 (NM_002026.1,3868-3886).
ccagacattactggttata

SEQ ID NO: 126838 - DNA, 19 bp, Homo sapiens
  siRNA target sequence for FN1 (NM_002026.1,3959-3977).
cctgcacttttgataacct

SEQ ID NO: 126839 - DNA, 19 bp, Homo sapiens
  siRNA target sequence for FN1 (NM_002026.1,4135-4153).
cccccatccattgatttaa

SEQ ID NO: 126840 - DNA, 19 bp, Homo sapiens
  siRNA target sequence for FN1 (NM_002026.1,4327-4345).
cagaaaacaggtcttgatt

SEQ ID NO: 126841 - DNA, 19 bp, Homo sapiens
  siRNA target sequence for FN1 (NM_002026.1,4347-4365).
cccaactggcattgacttt

SEQ ID NO: 126842 - DNA, 19 bp, Homo sapiens
  siRNA target sequence for FN1 (NM_002026.1,4486-4504).
ccccactctcggaattcca

SEQ ID NO: 126843 - DNA, 19 bp, Homo sapiens
  siRNA target sequence for FN1 (NM_002026.1,4487-4505).
cccactctcggaattccat

SEQ ID NO: 126844 - DNA, 19 bp, Homo sapiens
  siRNA target sequence for FN1 (NM_002026.1,4545-4563).
cagcatcgttgctcttaat

SEQ ID NO: 126845 - DNA, 19 bp, Homo sapiens
  siRNA target sequence for FN1 (NM_002026.1,4572-4590).
ggaaagtcccttattgatt

SEQ ID NO: 126846 - DNA, 19 bp, Homo sapiens
  siRNA target sequence for FN1 (NM_002026.1,4587-4605).
gattggccaacaatcaaca

SEQ ID NO: 126847 - DNA, 19 bp, Homo sapiens
  siRNA target sequence for FN1 (NM_002026.1,4591-4609).
ggccaacaatcaacagttt

SEQ ID NO: 126848 - DNA, 19 bp, Homo sapiens
  siRNA target sequence for FN1 (NM_002026.1,4593-4611).
ccaacaatcaacagtttct

SEQ ID NO: 126849 - DNA, 19 bp, Homo sapiens
  siRNA target sequence for FN1 (NM_002026.1,4646-4664).
cccccaccagcctactgat

SEQ ID NO: 126850 - DNA, 19 bp, Homo sapiens
  siRNA target sequence for FN1 (NM_002026.1,4684-4702).
gtcacagtgagatattaca

SEQ ID NO: 126851 - DNA, 19 bp, Homo sapiens
  siRNA target sequence for FN1 (NM_002026.1,4779-4797).
catcagcggccttaaacct

SEQ ID NO: 126852 - DNA, 19 bp, Homo sapiens
  siRNA target sequence for FN1 (NM_002026.1,4796-4814).
ctggagttgattataccat

SEQ ID NO: 126853 - DNA, 19 bp, Homo sapiens
  siRNA target sequence for FN1 (NM_002026.1,4856-4874).
gcagcaagccaatttccat

SEQ ID NO: 126854 - DNA, 19 bp, Homo sapiens
  siRNA target sequence for FN1 (NM_002026.1,4860-4878).
caagccaatttccattaat

SEQ ID NO: 126855 - DNA, 19 bp, Homo sapiens
  siRNA target sequence for FN1 (NM_002026.1,4924-4942).
gttcaggacaacagcatta

SEQ ID NO: 126856 - DNA, 19 bp, Homo sapiens
  siRNA target sequence for FN1 (NM_002026.1,4968-4986).
ccctgttactggttacaga

SEQ ID NO: 126857 - DNA, 19 bp, Homo sapiens
  siRNA target sequence for FN1 (NM_002026.1,5088-5106).
gtatgtggttagtgtctat

SEQ ID NO: 126858 - DNA, 19 bp, Homo sapiens
  siRNA target sequence for FN1 (NM_002026.1,5101-5119).
gtctatgctcagaatccaa

SEQ ID NO: 126859 - DNA, 19 bp, Homo sapiens
  siRNA target sequence for FN1 (NM_002026.1,5160-5178).
cattgatcgccctaaagga

SEQ ID NO: 126860 - DNA, 19 bp, Homo sapiens
  siRNA target sequence for FN1 (NM_002026.1,5197-5215).
gatgtcgattccatcaaaa

SEQ ID NO: 126861 - DNA, 19 bp, Homo sapiens
  siRNA target sequence for FN1 (NM_002026.1,5202-5220).
cgattccatcaaaattgct

SEQ ID NO: 126862 - DNA, 19 bp, Homo sapiens
  siRNA target sequence for FN1 (NM_002026.1,5374-5392).
gttgccttgcacgatgata

SEQ ID NO: 126863 - DNA, 19 bp, Homo sapiens
  siRNA target sequence for FN1 (NM_002026.1,5378-5396).
ccttgcacgatgatatgga

SEQ ID NO: 126864 - DNA, 19 bp, Homo sapiens
  siRNA target sequence for FN1 (NM_002026.1,5440-5458).
ccaactgacctgaagttca

SEQ ID NO: 126865 - DNA, 19 bp, Homo sapiens
  siRNA target sequence for FN1 (NM_002026.1,5490-5508).
gtggacaccacccaatgtt

SEQ ID NO: 126866 - DNA, 19 bp, Homo sapiens
  siRNA target sequence for FN1 (NM_002026.1,5492-5510).
ggacaccacccaatgttca

SEQ ID NO: 126867 - DNA, 19 bp, Homo sapiens
  siRNA target sequence for FN1 (NM_002026.1,5552-5570).
ccggaccaatgaaagaaat

SEQ ID NO: 126868 - DNA, 19 bp, Homo sapiens
  siRNA target sequence for FN1 (NM_002026.1,5554-5572).
ggaccaatgaaagaaatca

SEQ ID NO: 126869 - DNA, 19 bp, Homo sapiens
  siRNA target sequence for FN1 (NM_002026.1,5589-5607).
ctcatccgtggttgtatca

SEQ ID NO: 126870 - DNA, 19 bp, Homo sapiens
  siRNA target sequence for FN1 (NM_002026.1,5639-5657).
gtgtctatgctcttaagga

SEQ ID NO: 126871 - DNA, 19 bp, Homo sapiens
  siRNA target sequence for FN1 (NM_002026.1,5647-5665).
gctcttaaggacactttga

SEQ ID NO: 126872 - DNA, 19 bp, Homo sapiens
  siRNA target sequence for FN1 (NM_002026.1,5871-5889).
caccatcacaggtttacaa

SEQ ID NO: 126873 - DNA, 19 bp, Homo sapiens
  siRNA target sequence for FN1 (NM_002026.1,5914-5932).
ctgtacaccttgaatgaca

SEQ ID NO: 126874 - DNA, 19 bp, Homo sapiens
  siRNA target sequence for FN1 (NM_002026.1,5961-5979).
cgcctccactgccattgat

SEQ ID NO: 126875 - DNA, 19 bp, Homo sapiens
  siRNA target sequence for FN1 (NM_002026.1,6040-6058).
ccgccacgtgccaggatta

SEQ ID NO: 126876 - DNA, 19 bp, Homo sapiens
  siRNA target sequence for FN1 (NM_002026.1,6053-6071).
ggattaccggctacatcat

SEQ ID NO: 126877 - DNA, 19 bp, Homo sapiens
  siRNA target sequence for FN1 (NM_002026.1,6130-6148).
gtcacagaggctactatta

SEQ ID NO: 126878 - DNA, 19 bp, Homo sapiens
  siRNA target sequence for FN1 (NM_002026.1,6156-6174).
ggaaccgggaaccgaatat

SEQ ID NO: 126879 - DNA, 19 bp, Homo sapiens
  siRNA target sequence for FN1 (NM_002026.1,6157-6175).
gaaccgggaaccgaatata

SEQ ID NO: 126880 - DNA, 19 bp, Homo sapiens
  siRNA target sequence for FN1 (NM_002026.1,6160-6178).
ccgggaaccgaatatacaa

SEQ ID NO: 126881 - DNA, 19 bp, Homo sapiens
  siRNA target sequence for FN1 (NM_002026.1,6161-6179).
cgggaaccgaatatacaat

SEQ ID NO: 126882 - DNA, 19 bp, Homo sapiens
  siRNA target sequence for FN1 (NM_002026.1,6162-6180).
gggaaccgaatatacaatt

SEQ ID NO: 126883 - DNA, 19 bp, Homo sapiens
  siRNA target sequence for FN1 (NM_002026.1,6164-6182).
gaaccgaatatacaattta

SEQ ID NO: 126884 - DNA, 19 bp, Homo sapiens
  siRNA target sequence for FN1 (NM_002026.1,6348-6366).
gtatgacactggaaatggt

SEQ ID NO: 126885 - DNA, 19 bp, Homo sapiens
  siRNA target sequence for FN1 (NM_002026.1,6401-6419).
gtgttgggcaacaaatgat

SEQ ID NO: 126886 - DNA, 19 bp, Homo sapiens
  siRNA target sequence for FN1 (NM_002026.1,6403-6421).
gttgggcaacaaatgatct

SEQ ID NO: 126887 - DNA, 19 bp, Homo sapiens
  siRNA target sequence for FN1 (NM_002026.1,6407-6425).
ggcaacaaatgatctttga

SEQ ID NO: 126888 - DNA, 19 bp, Homo sapiens
  siRNA target sequence for FN1 (NM_002026.1,6556-6574).
gacacttctgagtacatca

SEQ ID NO: 126889 - DNA, 19 bp, Homo sapiens
  siRNA target sequence for FN1 (NM_002026.1,6705-6723).
ccagcagaggcataaggtt

SEQ ID NO: 126890 - DNA, 19 bp, Homo sapiens
  siRNA target sequence for FN1 (NM_002026.1,6721-6739).
gttcgggaagaggttgtta

SEQ ID NO: 126891 - DNA, 19 bp, Homo sapiens
  siRNA target sequence for FN1 (NM_002026.1,6827-6845).
gagatgagtgggaacgaat

SEQ ID NO: 126892 - DNA, 19 bp, Homo sapiens
  siRNA target sequence for FN1 (NM_002026.1,6846-6864).
gtctgaatcaggctttaaa

SEQ ID NO: 126893 - DNA, 19 bp, Homo sapiens
  siRNA target sequence for FN1 (NM_002026.1,6850-6868).
gaatcaggctttaaactgt

SEQ ID NO: 126894 - DNA, 19 bp, Homo sapiens
  siRNA target sequence for FN1 (NM_002026.1,6903-6921).
cagatgtgattcatctaga

SEQ ID NO: 126895 - DNA, 19 bp, Homo sapiens
  siRNA target sequence for FN1 (NM_002026.1,6931-6949).
gacaatggtgtgaactaca

SEQ ID NO: 126896 - DNA, 19 bp, Homo sapiens
  siRNA target sequence for FN1 (NM_002026.1,6979-6997).
gaaaatggccagatgatga

SEQ ID NO: 126897 - DNA, 19 bp, Homo sapiens
  siRNA target sequence for GP6 (NM_016363.3,343-361).
cgttgccacgggagttttt

SEQ ID NO: 126898 - DNA, 19 bp, Homo sapiens
  siRNA target sequence for GP6 (NM_016363.3,476-494).
gaccctgcgccctacaaga

SEQ ID NO: 126899 - DNA, 19 bp, Homo sapiens
  siRNA target sequence for GP6 (NM_016363.3,478-496).
ccctgcgccctacaagaat

SEQ ID NO: 126900 - DNA, 19 bp, Homo sapiens
  siRNA target sequence for GP6 (NM_016363.3,655-673).
cagccggttaccaacagaa

SEQ ID NO: 126901 - DNA, 19 bp, Homo sapiens
  siRNA target sequence for GP6 (NM_016363.3,711-729).
ctgaactgaccgtctcatt

SEQ ID NO: 126902 - DNA, 19 bp, Homo sapiens
  siRNA target sequence for GP6 (NM_016363.3,713-731).
gaactgaccgtctcattca

SEQ ID NO: 126903 - DNA, 19 bp, Homo sapiens
  siRNA target sequence for GP6 (NM_016363.3,716-734).
ctgaccgtctcattcacaa

SEQ ID NO: 126904 - DNA, 19 bp, Homo sapiens
  siRNA target sequence for GP6 (NM_016363.3,752-770).
gagacttctaggagtatca

SEQ ID NO: 126905 - DNA, 19 bp, Homo sapiens
  siRNA target sequence for GP6 (NM_016363.3,851-869).
ctcggggctgtgatcctaa

SEQ ID NO: 126906 - DNA, 19 bp, Homo sapiens
  siRNA target sequence for GP6 (NM_016363.3,853-871).
cggggctgtgatcctaata

SEQ ID NO: 126907 - DNA, 19 bp, Homo sapiens
  siRNA target sequence for GP6 (NM_016363.3,854-872).
ggggctgtgatcctaataa

SEQ ID NO: 126908 - DNA, 19 bp, Homo sapiens
  siRNA target sequence for GP6 (NM_016363.3,855-873).
gggctgtgatcctaataat

SEQ ID NO: 126909 - DNA, 19 bp, Homo sapiens
  siRNA target sequence for ITGA10 (NM_003637.3,280-298).
ccggaggggggacgtttat

SEQ ID NO: 126910 - DNA, 19 bp, Homo sapiens
  siRNA target sequence for ITGA10 (NM_003637.3,375-393).
ctcatcctgctgtgaatat

SEQ ID NO: 126911 - DNA, 19 bp, Homo sapiens
  siRNA target sequence for ITGA10 (NM_003637.3,397-415).
cctggggatgtctctgtta

SEQ ID NO: 126912 - DNA, 19 bp, Homo sapiens
  siRNA target sequence for ITGA10 (NM_003637.3,401-419).
gggatgtctctgttagaga

SEQ ID NO: 126913 - DNA, 19 bp, Homo sapiens
  siRNA target sequence for ITGA10 (NM_003637.3,705-723).
gggagagccctgtacatga

SEQ ID NO: 126914 - DNA, 19 bp, Homo sapiens
  siRNA target sequence for ITGA10 (NM_003637.3,810-828).
ctgcccaagcaataatggt

SEQ ID NO: 126915 - DNA, 19 bp, Homo sapiens
  siRNA target sequence for ITGA10 (NM_003637.3,1030-1048).
cctgagagaaattagaact

SEQ ID NO: 126916 - DNA, 19 bp, Homo sapiens
  siRNA target sequence for ITGA10 (NM_003637.3,1096-1114).
ggctgctctgactgacatt

SEQ ID NO: 126917 - DNA, 19 bp, Homo sapiens
  siRNA target sequence for ITGA10 (NM_003637.3,1098-1116).
ctgctctgactgacattgt

SEQ ID NO: 126918 - DNA, 19 bp, Homo sapiens
  siRNA target sequence for ITGA10 (NM_003637.3,1122-1140).
cactaggagatcggatttt

SEQ ID NO: 126919 - DNA, 19 bp, Homo sapiens
  siRNA target sequence for ITGA10 (NM_003637.3,1152-1170).
ggtcccatgcagaaaacga

SEQ ID NO: 126920 - DNA, 19 bp, Homo sapiens
  siRNA target sequence for ITGA10 (NM_003637.3,1153-1171).
gtcccatgcagaaaacgaa

SEQ ID NO: 126921 - DNA, 19 bp, Homo sapiens
  siRNA target sequence for ITGA10 (NM_003637.3,1425-1443).
gggctcctcgatttagaca

SEQ ID NO: 126922 - DNA, 19 bp, Homo sapiens
  siRNA target sequence for ITGA10 (NM_003637.3,1426-1444).
ggctcctcgatttagacat

SEQ ID NO: 126923 - DNA, 19 bp, Homo sapiens
  siRNA target sequence for ITGA10 (NM_003637.3,1508-1526).
cagggggagcagattggtt

SEQ ID NO: 126924 - DNA, 19 bp, Homo sapiens
  siRNA target sequence for ITGA10 (NM_003637.3,1546-1564).
ctgcccattggatacagat

SEQ ID NO: 126925 - DNA, 19 bp, Homo sapiens
  siRNA target sequence for ITGA10 (NM_003637.3,1572-1590).
gaacaactgatgtcttact

SEQ ID NO: 126926 - DNA, 19 bp, Homo sapiens
  siRNA target sequence for ITGA10 (NM_003637.3,1675-1693).
gaccctccaaggaacactt

SEQ ID NO: 126927 - DNA, 19 bp, Homo sapiens
  siRNA target sequence for ITGA10 (NM_003637.3,1737-1755).
gagctcttcctgatctgaa

SEQ ID NO: 126928 - DNA, 19 bp, Homo sapiens
  siRNA target sequence for ITGA10 (NM_003637.3,1753-1771).
gaaccaagatggttttgct

SEQ ID NO: 126929 - DNA, 19 bp, Homo sapiens
  siRNA target sequence for ITGA10 (NM_003637.3,2145-2163).
gtcgctgggatcaccaatt

SEQ ID NO: 126930 - DNA, 19 bp, Homo sapiens
  siRNA target sequence for ITGA10 (NM_003637.3,2147-2165).
cgctgggatcaccaattct

SEQ ID NO: 126931 - DNA, 19 bp, Homo sapiens
  siRNA target sequence for ITGA10 (NM_003637.3,2151-2169).
gggatcaccaattctacat

SEQ ID NO: 126932 - DNA, 19 bp, Homo sapiens
  siRNA target sequence for ITGA10 (NM_003637.3,2153-2171).
gatcaccaattctacatga

SEQ ID NO: 126933 - DNA, 19 bp, Homo sapiens
  siRNA target sequence for ITGA10 (NM_003637.3,2206-2224).
ggcacgtgcagcatttgat

SEQ ID NO: 126934 - DNA, 19 bp, Homo sapiens
  siRNA target sequence for ITGA10 (NM_003637.3,2280-2298).
cttgtgagcagctacactt

SEQ ID NO: 126935 - DNA, 19 bp, Homo sapiens
  siRNA target sequence for ITGA10 (NM_003637.3,2303-2321).
gtgctggatacatcagatt

SEQ ID NO: 126936 - DNA, 19 bp, Homo sapiens
  siRNA target sequence for ITGA10 (NM_003637.3,2354-2372).
gccttggacaatactacaa

SEQ ID NO: 126937 - DNA, 19 bp, Homo sapiens
  siRNA target sequence for ITGA10 (NM_003637.3,2395-2413).
gggctcacccacctctata

SEQ ID NO: 126938 - DNA, 19 bp, Homo sapiens
  siRNA target sequence for ITGA10 (NM_003637.3,2403-2421).
ccacctctatacaaaagct

SEQ ID NO: 126939 - DNA, 19 bp, Homo sapiens
  siRNA target sequence for ITGA10 (NM_003637.3,2445-2463).
gccctgacaatgaatgtgt

SEQ ID NO: 126940 - DNA, 19 bp, Homo sapiens
  siRNA target sequence for ITGA10 (NM_003637.3,2466-2484).
cagacctggtgcttcaagt

SEQ ID NO: 126941 - DNA, 19 bp, Homo sapiens
  siRNA target sequence for ITGA10 (NM_003637.3,2470-2488).
cctggtgcttcaagtgaat

SEQ ID NO: 126942 - DNA, 19 bp, Homo sapiens
  siRNA target sequence for ITGA10 (NM_003637.3,2471-2489).
ctggtgcttcaagtgaata

SEQ ID NO: 126943 - DNA, 19 bp, Homo sapiens
  siRNA target sequence for ITGA10 (NM_003637.3,2540-2558).
cggaaagtgctggtatcta

SEQ ID NO: 126944 - DNA, 19 bp, Homo sapiens
  siRNA target sequence for ITGA10 (NM_003637.3,2579-2597).
gaaaatgcttacaatacga

SEQ ID NO: 126945 - DNA, 19 bp, Homo sapiens
  siRNA target sequence for ITGA10 (NM_003637.3,2600-2618).
ctgagtctcatcttctcta

SEQ ID NO: 126946 - DNA, 19 bp, Homo sapiens
  siRNA target sequence for ITGA10 (NM_003637.3,2652-2670).
gagagagcccaataaaggt

SEQ ID NO: 126947 - DNA, 19 bp, Homo sapiens
  siRNA target sequence for ITGA10 (NM_003637.3,2753-2771).
ctgctagagtttgagttta

SEQ ID NO: 126948 - DNA, 19 bp, Homo sapiens
  siRNA target sequence for ITGA10 (NM_003637.3,2840-2858).
gggacccttcaagataaca

SEQ ID NO: 126949 - DNA, 19 bp, Homo sapiens
  siRNA target sequence for ITGA10 (NM_003637.3,2869-2887).
ctcagcctacatccaatat

SEQ ID NO: 126950 - DNA, 19 bp, Homo sapiens
  siRNA target sequence for ITGA10 (NM_003637.3,2871-2889).
cagcctacatccaatatga

SEQ ID NO: 126951 - DNA, 19 bp, Homo sapiens
  siRNA target sequence for ITGA10 (NM_003637.3,3059-3077).
gcccatgggggcaattact

SEQ ID NO: 126952 - DNA, 19 bp, Homo sapiens
  siRNA target sequence for ITGA10 (NM_003637.3,3060-3078).
cccatgggggcaattactt

SEQ ID NO: 126953 - DNA, 19 bp, Homo sapiens
  siRNA target sequence for ITGA10 (NM_003637.3,3065-3083).
gggggcaattacttcctat

SEQ ID NO: 126954 - DNA, 19 bp, Homo sapiens
  siRNA target sequence for ITGA10 (NM_003637.3,3167-3185).
gagcttcaacacacaaaca

SEQ ID NO: 126955 - DNA, 19 bp, Homo sapiens
  siRNA target sequence for ITGA10 (NM_003637.3,3274-3292).
gaggctggttcacaatgaa

SEQ ID NO: 126956 - DNA, 19 bp, Homo sapiens
  siRNA target sequence for ITGA11 (NM_012211.2,358-376).
gtgtccgagcggaaagaca

SEQ ID NO: 126957 - DNA, 19 bp, Homo sapiens
  siRNA target sequence for ITGA11 (NM_012211.2,362-380).
ccgagcggaaagacaacat

SEQ ID NO: 126958 - DNA, 19 bp, Homo sapiens
  siRNA target sequence for ITGA11 (NM_012211.2,726-744).
ctacaggtctgtaaaagat

SEQ ID NO: 126959 - DNA, 19 bp, Homo sapiens
  siRNA target sequence for ITGA11 (NM_012211.2,795-813).
gacggcatttggcattgaa

SEQ ID NO: 126960 - DNA, 19 bp, Homo sapiens
  siRNA target sequence for ITGA11 (NM_012211.2,797-815).
cggcatttggcattgaatt

SEQ ID NO: 126961 - DNA, 19 bp, Homo sapiens
  siRNA target sequence for ITGA11 (NM_012211.2,938-956).
gagacaacgtaacaagata

SEQ ID NO: 126962 - DNA, 19 bp, Homo sapiens
  siRNA target sequence for ITGA11 (NM_012211.2,981-999).
caaccgcagggggatcaat

SEQ ID NO: 126963 - DNA, 19 bp, Homo sapiens
  siRNA target sequence for ITGA11 (NM_012211.2,1043-1061).
ctgatgacaagcacttctt

SEQ ID NO: 126964 - DNA, 19 bp, Homo sapiens
  siRNA target sequence for ITGA11 (NM_012211.2,1102-1120).
gccctgggggacagaatct

SEQ ID NO: 126965 - DNA, 19 bp, Homo sapiens
  siRNA target sequence for ITGA11 (NM_012211.2,1105-1123).
ctgggggacagaatcttca

SEQ ID NO: 126966 - DNA, 19 bp, Homo sapiens
  siRNA target sequence for ITGA11 (NM_012211.2,1292-1310).
gcgagtcctacctgaaaga

SEQ ID NO: 126967 - DNA, 19 bp, Homo sapiens
  siRNA target sequence for ITGA11 (NM_012211.2,1294-1312).
gagtcctacctgaaagagt

SEQ ID NO: 126968 - DNA, 19 bp, Homo sapiens
  siRNA target sequence for ITGA11 (NM_012211.2,1573-1591).
ggcgcacccatgtacttca

SEQ ID NO: 126969 - DNA, 19 bp, Homo sapiens
  siRNA target sequence for ITGA11 (NM_012211.2,1574-1592).
gcgcacccatgtacttcaa

SEQ ID NO: 126970 - DNA, 19 bp, Homo sapiens
  siRNA target sequence for ITGA11 (NM_012211.2,1610-1628).
gcaaggtgtacgtctatga

SEQ ID NO: 126971 - DNA, 19 bp, Homo sapiens
  siRNA target sequence for ITGA11 (NM_012211.2,1658-1676).
gaacgctaaaggattcaca

SEQ ID NO: 126972 - DNA, 19 bp, Homo sapiens
  siRNA target sequence for ITGA11 (NM_012211.2,1728-1746).
caaccaggattcctacaat

SEQ ID NO: 126973 - DNA, 19 bp, Homo sapiens
  siRNA target sequence for ITGA11 (NM_012211.2,1864-1882).
gctaccggcctccagtatt

SEQ ID NO: 126974 - DNA, 19 bp, Homo sapiens
  siRNA target sequence for ITGA11 (NM_012211.2,1865-1883).
ctaccggcctccagtattt

SEQ ID NO: 126975 - DNA, 19 bp, Homo sapiens
  siRNA target sequence for ITGA11 (NM_012211.2,1892-1910).
gcatccacgggcaattgga

SEQ ID NO: 126976 - DNA, 19 bp, Homo sapiens
  siRNA target sequence for ITGA11 (NM_012211.2,1901-1919).
ggcaattggacctcaatga

SEQ ID NO: 126977 - DNA, 19 bp, Homo sapiens
  siRNA target sequence for ITGA11 (NM_012211.2,2017-2035).
ccatccaagatcaacatct

SEQ ID NO: 126978 - DNA, 19 bp, Homo sapiens
  siRNA target sequence for ITGA11 (NM_012211.2,2132-2150).
caactgttggcatcagata

SEQ ID NO: 126979 - DNA, 19 bp, Homo sapiens
  siRNA target sequence for ITGA11 (NM_012211.2,2163-2181).
ggatgagaggcggtataca

SEQ ID NO: 126980 - DNA, 19 bp, Homo sapiens
  siRNA target sequence for ITGA11 (NM_012211.2,2254-2272).
ctctgtgagcggatcaact

SEQ ID NO: 126981 - DNA, 19 bp, Homo sapiens
  siRNA target sequence for ITGA11 (NM_012211.2,2625-2643).
ctacagcacggtcctaaat

SEQ ID NO: 126982 - DNA, 19 bp, Homo sapiens
  siRNA target sequence for ITGA11 (NM_012211.2,2787-2805).
ggtggctttccgtcttgat

SEQ ID NO: 126983 - DNA, 19 bp, Homo sapiens
  siRNA target sequence for ITGA11 (NM_012211.2,2788-2806).
gtggctttccgtcttgatt

SEQ ID NO: 126984 - DNA, 19 bp, Homo sapiens
  siRNA target sequence for ITGA11 (NM_012211.2,2792-2810).
ctttccgtcttgattttga

SEQ ID NO: 126985 - DNA, 19 bp, Homo sapiens
  siRNA target sequence for ITGA11 (NM_012211.2,2915-2933).
gcttccacctcaaatacga

SEQ ID NO: 126986 - DNA, 19 bp, Homo sapiens
  siRNA target sequence for ITGA11 (NM_012211.2,3163-3181).
gcgaacacgtcctgtaaca

SEQ ID NO: 126987 - DNA, 19 bp, Homo sapiens
  siRNA target sequence for ITGA11 (NM_012211.2,3265-3283).
gatgtcgtctccatcaact

SEQ ID NO: 126988 - DNA, 19 bp, Homo sapiens
  siRNA target sequence for ITGA11 (NM_012211.2,3298-3316).
gtccccaaccaggaaatca

SEQ ID NO: 126989 - DNA, 19 bp, Homo sapiens
  siRNA target sequence for ITGA11 (NM_012211.2,3342-3360).
gttgaggtccctaaaagca

SEQ ID NO: 126990 - DNA, 19 bp, Homo sapiens
  siRNA target sequence for ITGA11 (NM_012211.2,3350-3368).
ccctaaaagcactcaagta

SEQ ID NO: 126991 - DNA, 19 bp, Homo sapiens
  siRNA target sequence for ITGA11 (NM_012211.2,3449-3467).
gccgccagatcgtgtttga

SEQ ID NO: 126992 - DNA, 19 bp, Homo sapiens
  siRNA target sequence for ITGA11 (NM_012211.2,3492-3510).
ggtccccatctggatcatt

SEQ ID NO: 126993 - DNA, 19 bp, Homo sapiens
  siRNA target sequence for ITGA11 (NM_012211.2,3570-3588).
gctcggcttctttagaagt

SEQ ID NO: 126994 - DNA, 19 bp, Homo sapiens
  siRNA target sequence for ITGA2 (NM_002203.2,95-113).
cgctcagtcaaggcatttt

SEQ ID NO: 126995 - DNA, 19 bp, Homo sapiens
  siRNA target sequence for ITGA2 (NM_002203.2,193-211).
gcagtgcagcagtttataa

SEQ ID NO: 126996 - DNA, 19 bp, Homo sapiens
  siRNA target sequence for ITGA2 (NM_002203.2,199-217).
cagcagtttataaatccaa

SEQ ID NO: 126997 - DNA, 19 bp, Homo sapiens
  siRNA target sequence for ITGA2 (NM_002203.2,267-285).
ccgaatgggagatgtgtat

SEQ ID NO: 126998 - DNA, 19 bp, Homo sapiens
  siRNA target sequence for ITGA2 (NM_002203.2,268-286).
cgaatgggagatgtgtata

SEQ ID NO: 126999 - DNA, 19 bp, Homo sapiens
  siRNA target sequence for ITGA2 (NM_002203.2,305-323).
ccactgccacatgtgaaaa

SEQ ID NO: 127000 - DNA, 19 bp, Homo sapiens
  siRNA target sequence for ITGA2 (NM_002203.2,341-359).
caacaagcattccaaatgt

SEQ ID NO: 127001 - DNA, 19 bp, Homo sapiens
  siRNA target sequence for ITGA2 (NM_002203.2,453-471).
gcaatgtgggaatcagtat

SEQ ID NO: 127002 - DNA, 19 bp, Homo sapiens
  siRNA target sequence for ITGA2 (NM_002203.2,551-569).
cttccctcatagatgttgt

SEQ ID NO: 127003 - DNA, 19 bp, Homo sapiens
  siRNA target sequence for ITGA2 (NM_002203.2,576-594).
gtgtgatgaatcaaatagt

SEQ ID NO: 127004 - DNA, 19 bp, Homo sapiens
  siRNA target sequence for ITGA2 (NM_002203.2,601-619).
ccttgggatgcagtaaaga

SEQ ID NO: 127005 - DNA, 19 bp, Homo sapiens
  siRNA target sequence for ITGA2 (NM_002203.2,666-684).
gacacaggtggggttaatt

SEQ ID NO: 127006 - DNA, 19 bp, Homo sapiens
  siRNA target sequence for ITGA2 (NM_002203.2,668-686).
cacaggtggggttaattca

SEQ ID NO: 127007 - DNA, 19 bp, Homo sapiens
  siRNA target sequence for ITGA2 (NM_002203.2,672-690).
ggtggggttaattcagtat

SEQ ID NO: 127008 - DNA, 19 bp, Homo sapiens
  siRNA target sequence for ITGA2 (NM_002203.2,685-703).
cagtatgccaataatccaa

SEQ ID NO: 127009 - DNA, 19 bp, Homo sapiens
  siRNA target sequence for ITGA2 (NM_002203.2,706-724).
gttgtgtttaacttgaaca

SEQ ID NO: 127010 - DNA, 19 bp, Homo sapiens
  siRNA target sequence for ITGA2 (NM_002203.2,795-813).
cacattcggagcaattcaa

SEQ ID NO: 127011 - DNA, 19 bp, Homo sapiens
  siRNA target sequence for ITGA2 (NM_002203.2,801-819).
cggagcaattcaatatgca

SEQ ID NO: 127012 - DNA, 19 bp, Homo sapiens
  siRNA target sequence for ITGA2 (NM_002203.2,802-820).
ggagcaattcaatatgcaa

SEQ ID NO: 127013 - DNA, 19 bp, Homo sapiens
  siRNA target sequence for ITGA2 (NM_002203.2,852-870).
gcgacgaagtgctacgaaa

SEQ ID NO: 127014 - DNA, 19 bp, Homo sapiens
  siRNA target sequence for ITGA2 (NM_002203.2,856-874).
cgaagtgctacgaaagtaa

SEQ ID NO: 127015 - DNA, 19 bp, Homo sapiens
  siRNA target sequence for ITGA2 (NM_002203.2,857-875).
gaagtgctacgaaagtaat

SEQ ID NO: 127016 - DNA, 19 bp, Homo sapiens
  siRNA target sequence for ITGA2 (NM_002203.2,866-884).
cgaaagtaatggtagttgt

SEQ ID NO: 127017 - DNA, 19 bp, Homo sapiens
  siRNA target sequence for ITGA2 (NM_002203.2,867-885).
gaaagtaatggtagttgta

SEQ ID NO: 127018 - DNA, 19 bp, Homo sapiens
  siRNA target sequence for ITGA2 (NM_002203.2,899-917).
cacatgatggttcaatgtt

SEQ ID NO: 127019 - DNA, 19 bp, Homo sapiens
  siRNA target sequence for ITGA2 (NM_002203.2,901-919).
catgatggttcaatgttga

SEQ ID NO: 127020 - DNA, 19 bp, Homo sapiens
  siRNA target sequence for ITGA2 (NM_002203.2,923-941).
ctgtgattgatcaatgcaa

SEQ ID NO: 127021 - DNA, 19 bp, Homo sapiens
  siRNA target sequence for ITGA2 (NM_002203.2,938-956).
gcaaccatgacaatatact

SEQ ID NO: 127022 - DNA, 19 bp, Homo sapiens
  siRNA target sequence for ITGA2 (NM_002203.2,971-989).
cagttcttgggtacttaaa

SEQ ID NO: 127023 - DNA, 19 bp, Homo sapiens
  siRNA target sequence for ITGA2 (NM_002203.2,973-991).
gttcttgggtacttaaaca

SEQ ID NO: 127024 - DNA, 19 bp, Homo sapiens
  siRNA target sequence for ITGA2 (NM_002203.2,990-1008).
cagaaacgcccttgatact

SEQ ID NO: 127025 - DNA, 19 bp, Homo sapiens
  siRNA target sequence for ITGA2 (NM_002203.2,997-1015).
gcccttgatactaaaaatt

SEQ ID NO: 127026 - DNA, 19 bp, Homo sapiens
  siRNA target sequence for ITGA2 (NM_002203.2,999-1017).
ccttgatactaaaaattta

SEQ ID NO: 127027 - DNA, 19 bp, Homo sapiens
  siRNA target sequence for ITGA2 (NM_002203.2,1038-1056).
cgctagtattccaacagaa

SEQ ID NO: 127028 - DNA, 19 bp, Homo sapiens
  siRNA target sequence for ITGA2 (NM_002203.2,1105-1123).
gggacattaggagaacaaa

SEQ ID NO: 127029 - DNA, 19 bp, Homo sapiens
  siRNA target sequence for ITGA2 (NM_002203.2,1128-1146).
cagcattgaaggtactgtt

SEQ ID NO: 127030 - DNA, 19 bp, Homo sapiens
  siRNA target sequence for ITGA2 (NM_002203.2,1195-1213).
gcagattactcttctcaaa

SEQ ID NO: 127031 - DNA, 19 bp, Homo sapiens
  siRNA target sequence for ITGA2 (NM_002203.2,1205-1223).
cttctcaaaatgatattct

SEQ ID NO: 127032 - DNA, 19 bp, Homo sapiens
  siRNA target sequence for ITGA2 (NM_002203.2,1405-1423).
ggtgctcctcgggcaaatt

SEQ ID NO: 127033 - DNA, 19 bp, Homo sapiens
  siRNA target sequence for ITGA2 (NM_002203.2,1406-1424).
gtgctcctcgggcaaatta

SEQ ID NO: 127034 - DNA, 19 bp, Homo sapiens
  siRNA target sequence for ITGA2 (NM_002203.2,1408-1426).
gctcctcgggcaaattata

SEQ ID NO: 127035 - DNA, 19 bp, Homo sapiens
  siRNA target sequence for ITGA2 (NM_002203.2,1427-1445).
ccggccagatagtgctata

SEQ ID NO: 127036 - DNA, 19 bp, Homo sapiens
  siRNA target sequence for ITGA2 (NM_002203.2,1431-1449).
ccagatagtgctatatagt

SEQ ID NO: 127037 - DNA, 19 bp, Homo sapiens
  siRNA target sequence for ITGA2 (NM_002203.2,1463-1481).
gcaatatcacggttattca

SEQ ID NO: 127038 - DNA, 19 bp, Homo sapiens
  siRNA target sequence for ITGA2 (NM_002203.2,1542-1560).
ggataaagacaccattaca

SEQ ID NO: 127039 - DNA, 19 bp, Homo sapiens
  siRNA target sequence for ITGA2 (NM_002203.2,1573-1591).
gtaggtgcaccaatgtaca

SEQ ID NO: 127040 - DNA, 19 bp, Homo sapiens
  siRNA target sequence for ITGA2 (NM_002203.2,1619-1637).
gagtctacctgtttactat

SEQ ID NO: 127041 - DNA, 19 bp, Homo sapiens
  siRNA target sequence for ITGA2 (NM_002203.2,1621-1639).
gtctacctgtttactatca

SEQ ID NO: 127042 - DNA, 19 bp, Homo sapiens
  siRNA target sequence for ITGA2 (NM_002203.2,1623-1641).
ctacctgtttactatcaaa

SEQ ID NO: 127043 - DNA, 19 bp, Homo sapiens
  siRNA target sequence for ITGA2 (NM_002203.2,1653-1671).
gggtcagcaccaatttctt

SEQ ID NO: 127044 - DNA, 19 bp, Homo sapiens
  siRNA target sequence for ITGA2 (NM_002203.2,1720-1738).
gctctttcagacatcaaca

SEQ ID NO: 127045 - DNA, 19 bp, Homo sapiens
  siRNA target sequence for ITGA2 (NM_002203.2,1734-1752).
caacatggatggctttaat

SEQ ID NO: 127046 - DNA, 19 bp, Homo sapiens
  siRNA target sequence for ITGA2 (NM_002203.2,1737-1755).
catggatggctttaatgat

SEQ ID NO: 127047 - DNA, 19 bp, Homo sapiens
  siRNA target sequence for ITGA2 (NM_002203.2,1762-1780).
gttggttcaccactagaaa

SEQ ID NO: 127048 - DNA, 19 bp, Homo sapiens
  siRNA target sequence for ITGA2 (NM_002203.2,1766-1784).
gttcaccactagaaaatca

SEQ ID NO: 127049 - DNA, 19 bp, Homo sapiens
  siRNA target sequence for ITGA2 (NM_002203.2,1792-1810).
ggagctgtatacatttaca

SEQ ID NO: 127050 - DNA, 19 bp, Homo sapiens
  siRNA target sequence for ITGA2 (NM_002203.2,1793-1811).
gagctgtatacatttacaa

SEQ ID NO: 127051 - DNA, 19 bp, Homo sapiens
  siRNA target sequence for ITGA2 (NM_002203.2,1822-1840).
ggcactatccgcacaaagt

SEQ ID NO: 127052 - DNA, 19 bp, Homo sapiens
  siRNA target sequence for ITGA2 (NM_002203.2,1823-1841).
gcactatccgcacaaagta

SEQ ID NO: 127053 - DNA, 19 bp, Homo sapiens
  siRNA target sequence for ITGA2 (NM_002203.2,1824-1842).
cactatccgcacaaagtat

SEQ ID NO: 127054 - DNA, 19 bp, Homo sapiens
  siRNA target sequence for ITGA2 (NM_002203.2,1877-1895).
ggagccatctccagtactt

SEQ ID NO: 127055 - DNA, 19 bp, Homo sapiens
  siRNA target sequence for ITGA2 (NM_002203.2,1878-1896).
gagccatctccagtacttt

SEQ ID NO: 127056 - DNA, 19 bp, Homo sapiens
  siRNA target sequence for ITGA2 (NM_002203.2,1975-1993).
gttcaactctggtcacaaa

SEQ ID NO: 127057 - DNA, 19 bp, Homo sapiens
  siRNA target sequence for ITGA2 (NM_002203.2,1978-1996).
caactctggtcacaaagta

SEQ ID NO: 127058 - DNA, 19 bp, Homo sapiens
  siRNA target sequence for ITGA2 (NM_002203.2,1994-2012).
gtattgctgatgtagctat

SEQ ID NO: 127059 - DNA, 19 bp, Homo sapiens
  siRNA target sequence for ITGA2 (NM_002203.2,2090-2108).
caaagttcagacctactaa

SEQ ID NO: 127060 - DNA, 19 bp, Homo sapiens
  siRNA target sequence for ITGA2 (NM_002203.2,2094-2112).
gttcagacctactaagcaa

SEQ ID NO: 127061 - DNA, 19 bp, Homo sapiens
  siRNA target sequence for ITGA2 (NM_002203.2,2099-2117).
gacctactaagcaaaacaa

SEQ ID NO: 127062 - DNA, 19 bp, Homo sapiens
  siRNA target sequence for ITGA2 (NM_002203.2,2102-2120).
ctactaagcaaaacaatca

SEQ ID NO: 127063 - DNA, 19 bp, Homo sapiens
  siRNA target sequence for ITGA2 (NM_002203.2,2105-2123).
ctaagcaaaacaatcaagt

SEQ ID NO: 127064 - DNA, 19 bp, Homo sapiens
  siRNA target sequence for ITGA2 (NM_002203.2,2122-2140).
gtggccattgtatataaca

SEQ ID NO: 127065 - DNA, 19 bp, Homo sapiens
  siRNA target sequence for ITGA2 (NM_002203.2,2158-2176).
ggattttcatccagagtaa

SEQ ID NO: 127066 - DNA, 19 bp, Homo sapiens
  siRNA target sequence for ITGA2 (NM_002203.2,2249-2267).
gttgccccgagcacatcat

SEQ ID NO: 127067 - DNA, 19 bp, Homo sapiens
  siRNA target sequence for ITGA2 (NM_002203.2,2252-2270).
gccccgagcacatcattta

SEQ ID NO: 127068 - DNA, 19 bp, Homo sapiens
  siRNA target sequence for ITGA2 (NM_002203.2,2254-2272).
cccgagcacatcatttata

SEQ ID NO: 127069 - DNA, 19 bp, Homo sapiens
  siRNA target sequence for ITGA2 (NM_002203.2,2255-2273).
ccgagcacatcatttatat

SEQ ID NO: 127070 - DNA, 19 bp, Homo sapiens
  siRNA target sequence for ITGA2 (NM_002203.2,2256-2274).
cgagcacatcatttatata

SEQ ID NO: 127071 - DNA, 19 bp, Homo sapiens
  siRNA target sequence for ITGA2 (NM_002203.2,2432-2450).
ctgatctagtcctagatgt

SEQ ID NO: 127072 - DNA, 19 bp, Homo sapiens
  siRNA target sequence for ITGA2 (NM_002203.2,2442-2460).
cctagatgtccgacaaata

SEQ ID NO: 127073 - DNA, 19 bp, Homo sapiens
  siRNA target sequence for ITGA2 (NM_002203.2,2492-2510).
gcaaccaaaacaaaaggtt

SEQ ID NO: 127074 - DNA, 19 bp, Homo sapiens
  siRNA target sequence for ITGA2 (NM_002203.2,2549-2567).
catacaacactggaattgt

SEQ ID NO: 127075 - DNA, 19 bp, Homo sapiens
  siRNA target sequence for ITGA2 (NM_002203.2,2674-2692).
gtaggctaccctgctttaa

SEQ ID NO: 127076 - DNA, 19 bp, Homo sapiens
  siRNA target sequence for ITGA2 (NM_002203.2,2677-2695).
ggctaccctgctttaaaga

SEQ ID NO: 127077 - DNA, 19 bp, Homo sapiens
  siRNA target sequence for ITGA2 (NM_002203.2,2698-2716).
gaacaacaggtgactttta

SEQ ID NO: 127078 - DNA, 19 bp, Homo sapiens
  siRNA target sequence for ITGA2 (NM_002203.2,2701-2719).
caacaggtgacttttacta

SEQ ID NO: 127079 - DNA, 19 bp, Homo sapiens
  siRNA target sequence for ITGA2 (NM_002203.2,2707-2725).
gtgacttttactattaact

SEQ ID NO: 127080 - DNA, 19 bp, Homo sapiens
  siRNA target sequence for ITGA2 (NM_002203.2,2724-2742).
ctttgacttcaatcttcaa

SEQ ID NO: 127081 - DNA, 19 bp, Homo sapiens
  siRNA target sequence for ITGA2 (NM_002203.2,2757-2775).
ggcgtctctcagtttccaa

SEQ ID NO: 127082 - DNA, 19 bp, Homo sapiens
  siRNA target sequence for ITGA2 (NM_002203.2,2766-2784).
cagtttccaagccttaagt

SEQ ID NO: 127083 - DNA, 19 bp, Homo sapiens
  siRNA target sequence for ITGA2 (NM_002203.2,2768-2786).
gtttccaagccttaagtga

SEQ ID NO: 127084 - DNA, 19 bp, Homo sapiens
  siRNA target sequence for ITGA2 (NM_002203.2,2864-2882).
caagatctaccaacataaa

SEQ ID NO: 127085 - DNA, 19 bp, Homo sapiens
  siRNA target sequence for ITGA2 (NM_002203.2,2870-2888).
ctaccaacataaattttta

SEQ ID NO: 127086 - DNA, 19 bp, Homo sapiens
  siRNA target sequence for ITGA2 (NM_002203.2,2895-2913).
ctcttcggatgggaatgtt

SEQ ID NO: 127087 - DNA, 19 bp, Homo sapiens
  siRNA target sequence for ITGA2 (NM_002203.2,2922-2940).
cgtgcacagttttgaagat

SEQ ID NO: 127088 - DNA, 19 bp, Homo sapiens
  siRNA target sequence for ITGA2 (NM_002203.2,2961-2979).
ctccctgaaggtaacaaca

SEQ ID NO: 127089 - DNA, 19 bp, Homo sapiens
  siRNA target sequence for ITGA2 (NM_002203.2,2970-2988).
ggtaacaacaggaagtgtt

SEQ ID NO: 127090 - DNA, 19 bp, Homo sapiens
  siRNA target sequence for ITGA2 (NM_002203.2,2992-3010).
gtaagcatggcaactgtaa

SEQ ID NO: 127091 - DNA, 19 bp, Homo sapiens
  siRNA target sequence for ITGA2 (NM_002203.2,3018-3036).
catccctcagtataccaaa

SEQ ID NO: 127092 - DNA, 19 bp, Homo sapiens
  siRNA target sequence for ITGA2 (NM_002203.2,3021-3039).
ccctcagtataccaaagaa

SEQ ID NO: 127093 - DNA, 19 bp, Homo sapiens
  siRNA target sequence for ITGA2 (NM_002203.2,3022-3040).
cctcagtataccaaagaaa

SEQ ID NO: 127094 - DNA, 19 bp, Homo sapiens
  siRNA target sequence for ITGA2 (NM_002203.2,3095-3113).
gttgtaatgcagatatcaa

SEQ ID NO: 127095 - DNA, 19 bp, Homo sapiens
  siRNA target sequence for ITGA2 (NM_002203.2,3106-3124).
gatatcaatccactgaaaa

SEQ ID NO: 127096 - DNA, 19 bp, Homo sapiens
  siRNA target sequence for ITGA2 (NM_002203.2,3111-3129).
caatccactgaaaatagga

SEQ ID NO: 127097 - DNA, 19 bp, Homo sapiens
  siRNA target sequence for ITGA2 (NM_002203.2,3194-3212).
gaactgcttcctgtagtaa

SEQ ID NO: 127098 - DNA, 19 bp, Homo sapiens
  siRNA target sequence for ITGA2 (NM_002203.2,3224-3242).
ggttgaaagacgttcacat

SEQ ID NO: 127099 - DNA, 19 bp, Homo sapiens
  siRNA target sequence for ITGA2 (NM_002203.2,3238-3256).
cacatgaaaggagaatact

SEQ ID NO: 127100 - DNA, 19 bp, Homo sapiens
  siRNA target sequence for ITGA2 (NM_002203.2,3265-3283).
gtgactaccagaatttgga

SEQ ID NO: 127101 - DNA, 19 bp, Homo sapiens
  siRNA target sequence for ITGA2 (NM_002203.2,3285-3303).
cgggactttcgcatcatca

SEQ ID NO: 127102 - DNA, 19 bp, Homo sapiens
  siRNA target sequence for NID2 (NM_007361.2,419-437).
cgaatcccctgcacttcta

SEQ ID NO: 127103 - DNA, 19 bp, Homo sapiens
  siRNA target sequence for NID2 (NM_007361.2,509-527).
cgcagtatgtggactatga

SEQ ID NO: 127104 - DNA, 19 bp, Homo sapiens
  siRNA target sequence for NID2 (NM_007361.2,761-779).
cgggagagctgaacacttt

SEQ ID NO: 127105 - DNA, 19 bp, Homo sapiens
  siRNA target sequence for NID2 (NM_007361.2,793-811).
gcatctgatgggtctgata

SEQ ID NO: 127106 - DNA, 19 bp, Homo sapiens
  siRNA target sequence for NID2 (NM_007361.2,797-815).
ctgatgggtctgatagcta

SEQ ID NO: 127107 - DNA, 19 bp, Homo sapiens
  siRNA target sequence for NID2 (NM_007361.2,812-830).
gctacgccctctttcttta

SEQ ID NO: 127108 - DNA, 19 bp, Homo sapiens
  siRNA target sequence for NID2 (NM_007361.2,816-834).
cgccctctttctttatcct

SEQ ID NO: 127109 - DNA, 19 bp, Homo sapiens
  siRNA target sequence for NID2 (NM_007361.2,983-1001).
ctgtgaaaaatctctatca

SEQ ID NO: 127110 - DNA, 19 bp, Homo sapiens
  siRNA target sequence for NID2 (NM_007361.2,1052-1070).
cttccccgttggacaatgt

SEQ ID NO: 127111 - DNA, 19 bp, Homo sapiens
  siRNA target sequence for NID2 (NM_007361.2,1149-1167).
cctggaaagtgactataat

SEQ ID NO: 127112 - DNA, 19 bp, Homo sapiens
  siRNA target sequence for NID2 (NM_007361.2,1168-1186).
gaggacaatttggattact

SEQ ID NO: 127113 - DNA, 19 bp, Homo sapiens
  siRNA target sequence for NID2 (NM_007361.2,1247-1265).
gccacagcagcattgatgt

SEQ ID NO: 127114 - DNA, 19 bp, Homo sapiens
  siRNA target sequence for NID2 (NM_007361.2,1273-1291).
caatccaaagtggatacaa

SEQ ID NO: 127115 - DNA, 19 bp, Homo sapiens
  siRNA target sequence for NID2 (NM_007361.2,1658-1676).
ccgaggtcttcacgtataa

SEQ ID NO: 127116 - DNA, 19 bp, Homo sapiens
  siRNA target sequence for NID2 (NM_007361.2,1659-1677).
cgaggtcttcacgtataat

SEQ ID NO: 127117 - DNA, 19 bp, Homo sapiens
  siRNA target sequence for NID2 (NM_007361.2,1662-1680).
ggtcttcacgtataatgct

SEQ ID NO: 127118 - DNA, 19 bp, Homo sapiens
  siRNA target sequence for NID2 (NM_007361.2,1764-1782).
ccactgccaatccaagttt

SEQ ID NO: 127119 - DNA, 19 bp, Homo sapiens
  siRNA target sequence for NID2 (NM_007361.2,1765-1783).
cactgccaatccaagtttt

SEQ ID NO: 127120 - DNA, 19 bp, Homo sapiens
  siRNA target sequence for NID2 (NM_007361.2,1771-1789).
caatccaagttttatggaa

SEQ ID NO: 127121 - DNA, 19 bp, Homo sapiens
  siRNA target sequence for NID2 (NM_007361.2,1815-1833).
ggcacctcaccgagtgaat

SEQ ID NO: 127122 - DNA, 19 bp, Homo sapiens
  siRNA target sequence for NID2 (NM_007361.2,1902-1920).
gtatatcgtgggcaatgat

SEQ ID NO: 127123 - DNA, 19 bp, Homo sapiens
  siRNA target sequence for NID2 (NM_007361.2,1977-1995).
ccccctcacaccaattgga

SEQ ID NO: 127124 - DNA, 19 bp, Homo sapiens
  siRNA target sequence for NID2 (NM_007361.2,2073-2091).
ccatgacatggaagttaca

SEQ ID NO: 127125 - DNA, 19 bp, Homo sapiens
  siRNA target sequence for NID2 (NM_007361.2,2077-2095).
gacatggaagttacattct

SEQ ID NO: 127126 - DNA, 19 bp, Homo sapiens
  siRNA target sequence for NID2 (NM_007361.2,2102-2120).
gagaggagacggttcgtat

SEQ ID NO: 127127 - DNA, 19 bp, Homo sapiens
  siRNA target sequence for NID2 (NM_007361.2,2106-2124).
ggagacggttcgtatcact

SEQ ID NO: 127128 - DNA, 19 bp, Homo sapiens
  siRNA target sequence for NID2 (NM_007361.2,2112-2130).
ggttcgtatcactcaaact

SEQ ID NO: 127129 - DNA, 19 bp, Homo sapiens
  siRNA target sequence for NID2 (NM_007361.2,2162-2180).
gcattaagaccaacattca

SEQ ID NO: 127130 - DNA, 19 bp, Homo sapiens
  siRNA target sequence for NID2 (NM_007361.2,2259-2277).
cactgtgacctctacaagt

SEQ ID NO: 127131 - DNA, 19 bp, Homo sapiens
  siRNA target sequence for NID2 (NM_007361.2,2282-2300).
gagactactctctgacttt

SEQ ID NO: 127132 - DNA, 19 bp, Homo sapiens
  siRNA target sequence for NID2 (NM_007361.2,2302-2320).
ggtgcaatcaaccaaacat

SEQ ID NO: 127133 - DNA, 19 bp, Homo sapiens
  siRNA target sequence for NID2 (NM_007361.2,2415-2433).
ccgggtctttgccttgtat

SEQ ID NO: 127134 - DNA, 19 bp, Homo sapiens
  siRNA target sequence for NID2 (NM_007361.2,2416-2434).
cgggtctttgccttgtata

SEQ ID NO: 127135 - DNA, 19 bp, Homo sapiens
  siRNA target sequence for NID2 (NM_007361.2,2417-2435).
gggtctttgccttgtataa

SEQ ID NO: 127136 - DNA, 19 bp, Homo sapiens
  siRNA target sequence for NID2 (NM_007361.2,2418-2436).
ggtctttgccttgtataat

SEQ ID NO: 127137 - DNA, 19 bp, Homo sapiens
  siRNA target sequence for NID2 (NM_007361.2,2430-2448).
gtataatgacgaagaaaga

SEQ ID NO: 127138 - DNA, 19 bp, Homo sapiens
  siRNA target sequence for NID2 (NM_007361.2,2503-2521).
cccactccggggaatcctt

SEQ ID NO: 127139 - DNA, 19 bp, Homo sapiens
  siRNA target sequence for NID2 (NM_007361.2,2511-2529).
ggggaatccttgctatgat

SEQ ID NO: 127140 - DNA, 19 bp, Homo sapiens
  siRNA target sequence for NID2 (NM_007361.2,2569-2587).
gggacaggtgtagattaca

SEQ ID NO: 127141 - DNA, 19 bp, Homo sapiens
  siRNA target sequence for NID2 (NM_007361.2,2623-2641).
cggaactgtgtggatgaaa

SEQ ID NO: 127142 - DNA, 19 bp, Homo sapiens
  siRNA target sequence for NID2 (NM_007361.2,2624-2642).
ggaactgtgtggatgaaaa

SEQ ID NO: 127143 - DNA, 19 bp, Homo sapiens
  siRNA target sequence for NID2 (NM_007361.2,2671-2689).
ggccccaactctgtatgta

SEQ ID NO: 127144 - DNA, 19 bp, Homo sapiens
  siRNA target sequence for NID2 (NM_007361.2,2672-2690).
gccccaactctgtatgtat

SEQ ID NO: 127145 - DNA, 19 bp, Homo sapiens
  siRNA target sequence for NID2 (NM_007361.2,2675-2693).
ccaactctgtatgtatcaa

SEQ ID NO: 127146 - DNA, 19 bp, Homo sapiens
  siRNA target sequence for NID2 (NM_007361.2,2720-2738).
gccggagtggttatgagtt

SEQ ID NO: 127147 - DNA, 19 bp, Homo sapiens
  siRNA target sequence for NID2 (NM_007361.2,2721-2739).
ccggagtggttatgagttt

SEQ ID NO: 127148 - DNA, 19 bp, Homo sapiens
  siRNA target sequence for NID2 (NM_007361.2,2749-2767).
cggcatacttgcatcttga

SEQ ID NO: 127149 - DNA, 19 bp, Homo sapiens
  siRNA target sequence for NID2 (NM_007361.2,2983-3001).
cgttgtcaacccggatatt

SEQ ID NO: 127150 - DNA, 19 bp, Homo sapiens
  siRNA target sequence for NID2 (NM_007361.2,2984-3002).
gttgtcaacccggatatta

SEQ ID NO: 127151 - DNA, 19 bp, Homo sapiens
  siRNA target sequence for NID2 (NM_007361.2,3471-3489).
caccacccctgcgtgtata

SEQ ID NO: 127152 - DNA, 19 bp, Homo sapiens
  siRNA target sequence for NID2 (NM_007361.2,3555-3573).
caccttcctgctctatact

SEQ ID NO: 127153 - DNA, 19 bp, Homo sapiens
  siRNA target sequence for NID2 (NM_007361.2,3579-3597).
ccagcagattggctactta

SEQ ID NO: 127154 - DNA, 19 bp, Homo sapiens
  siRNA target sequence for NID2 (NM_007361.2,3659-3677).
ccataatcgtgggaattga

SEQ ID NO: 127155 - DNA, 19 bp, Homo sapiens
  siRNA target sequence for NID2 (NM_007361.2,3660-3678).
cataatcgtgggaattgat

SEQ ID NO: 127156 - DNA, 19 bp, Homo sapiens
  siRNA target sequence for NID2 (NM_007361.2,3715-3733).
gttgctggacggacaatca

SEQ ID NO: 127157 - DNA, 19 bp, Homo sapiens
  siRNA target sequence for NID2 (NM_007361.2,3774-3792).
cgtgaattcaggtctgata

SEQ ID NO: 127158 - DNA, 19 bp, Homo sapiens
  siRNA target sequence for NID2 (NM_007361.2,3814-3832).
gaccacatccgcagaacaa

SEQ ID NO: 127159 - DNA, 19 bp, Homo sapiens
  siRNA target sequence for NID2 (NM_007361.2,3817-3835).
cacatccgcagaacaatgt

SEQ ID NO: 127160 - DNA, 19 bp, Homo sapiens
  siRNA target sequence for NID2 (NM_007361.2,3842-3860).
cggacagtgtcctggataa

SEQ ID NO: 127161 - DNA, 19 bp, Homo sapiens
  siRNA target sequence for NID2 (NM_007361.2,3848-3866).
gtgtcctggataagataga

SEQ ID NO: 127162 - DNA, 19 bp, Homo sapiens
  siRNA target sequence for NID2 (NM_007361.2,3946-3964).
ccaatccgaggcaacttgt

SEQ ID NO: 127163 - DNA, 19 bp, Homo sapiens
  siRNA target sequence for NID2 (NM_007361.2,3947-3965).
caatccgaggcaacttgta

SEQ ID NO: 127164 - DNA, 19 bp, Homo sapiens
  siRNA target sequence for NID2 (NM_007361.2,4031-4049).
gaattctgatcaatacaga

SEQ ID NO: 127165 - DNA, 19 bp, Homo sapiens
  siRNA target sequence for NID2 (NM_007361.2,4059-4077).
gcccaatggcttaaccttt

SEQ ID NO: 127166 - DNA, 19 bp, Homo sapiens
  siRNA target sequence for NID2 (NM_007361.2,4151-4169).
ctggacggcgtgtcattca

SEQ ID NO: 127167 - DNA, 19 bp, Homo sapiens
  siRNA target sequence for NID2 (NM_007361.2,4153-4171).
ggacggcgtgtcattcaaa

SEQ ID NO: 127168 - DNA, 19 bp, Homo sapiens
  siRNA target sequence for NID2 (NM_007361.2,4154-4172).
gacggcgtgtcattcaaaa

SEQ ID NO: 127169 - DNA, 19 bp, Homo sapiens
  siRNA target sequence for NID2 (NM_007361.2,4156-4174).
cggcgtgtcattcaaaaca

SEQ ID NO: 127170 - DNA, 19 bp, Homo sapiens
  siRNA target sequence for NID2 (NM_007361.2,4157-4175).
ggcgtgtcattcaaaacaa

SEQ ID NO: 127171 - DNA, 19 bp, Homo sapiens
  siRNA target sequence for NID2 (NM_007361.2,4187-4205).
ccttcagcatcgtaagcta

SEQ ID NO: 127172 - DNA, 19 bp, Homo sapiens
  siRNA target sequence for NID2 (NM_007361.2,4188-4206).
cttcagcatcgtaagctat

SEQ ID NO: 127173 - DNA, 19 bp, Homo sapiens
  siRNA target sequence for NID2 (NM_007361.2,4202-4220).
gctatgcagatcacttcta

SEQ ID NO: 127174 - DNA, 19 bp, Homo sapiens
  siRNA target sequence for NID2 (NM_007361.2,4236-4254).
gagggatggtgttgtatca

SEQ ID NO: 127175 - DNA, 19 bp, Homo sapiens
  siRNA target sequence for NID2 (NM_007361.2,4238-4256).
gggatggtgttgtatcagt

SEQ ID NO: 127176 - DNA, 19 bp, Homo sapiens
  siRNA target sequence for NID2 (NM_007361.2,4239-4257).
ggatggtgttgtatcagta

SEQ ID NO: 127177 - DNA, 19 bp, Homo sapiens
  siRNA target sequence for PCOLCE (NM_002593.2,163-181).
ggccagacccccaactaca

SEQ ID NO: 127178 - DNA, 19 bp, Homo sapiens
  siRNA target sequence for PCOLCE (NM_002593.2,408-426).
gcggctcggacgcttttgt

SEQ ID NO: 127179 - DNA, 19 bp, Homo sapiens
  siRNA target sequence for PCOLCE (NM_002593.2,686-704).
cgctgaccttcgagaagtt

SEQ ID NO: 127180 - DNA, 19 bp, Homo sapiens
  siRNA target sequence for PCOLCE (NM_002593.2,687-705).
gctgaccttcgagaagttt

SEQ ID NO: 127181 - DNA, 19 bp, Homo sapiens
  siRNA target sequence for PCOLCE (NM_002593.2,778-796).
cggaggctggggaagttct

SEQ ID NO: 127182 - DNA, 19 bp, Homo sapiens
  siRNA target sequence for PCOLCE (NM_002593.2,956-974).
gaactgagcctaaagtcaa

SEQ ID NO: 127183 - DNA, 19 bp, Homo sapiens
  siRNA target sequence for PCOLCE (NM_002593.2,1153-1171).
gccgtgactgtcagtctta

SEQ ID NO: 127184 - DNA, 19 bp, Homo sapiens
  siRNA target sequence for PCOLCE (NM_002593.2,1154-1172).
ccgtgactgtcagtcttat

SEQ ID NO: 127185 - DNA, 19 bp, Homo sapiens
  siRNA target sequence for PCOLCE (NM_002593.2,1155-1173).
cgtgactgtcagtcttatt

SEQ ID NO: 127186 - DNA, 19 bp, Homo sapiens
  siRNA target sequence for PCOLCE (NM_002593.2,1164-1182).
cagtcttattggtgcttat

SEQ ID NO: 127187 - DNA, 19 bp, Homo sapiens
  siRNA target sequence for PCOLCE (NM_002593.2,1168-1186).
cttattggtgcttataaaa

SEQ ID NO: 127188 - DNA, 19 bp, Homo sapiens
  siRNA target sequence for PCOLCE (NM_002593.2,1223-1241).
cctccctgaagttttacgt

SEQ ID NO: 127189 - DNA, 19 bp, Homo sapiens
  siRNA target sequence for PCOLCE (NM_002593.2,1369-1387).
cagatcctcaccaacctaa

SEQ ID NO: 127190 - DNA, 19 bp, Homo sapiens
  siRNA target sequence for SERPINH1 (NM_001235.2,320-338).
ggcactgcggagaagttga

SEQ ID NO: 127191 - DNA, 19 bp, Homo sapiens
  siRNA target sequence for SERPINH1 (NM_001235.2,696-714).
gcgagcactccaagatcaa

SEQ ID NO: 127192 - DNA, 19 bp, Homo sapiens
  siRNA target sequence for SERPINH1 (NM_001235.2,698-716).
gagcactccaagatcaact

SEQ ID NO: 127193 - DNA, 19 bp, Homo sapiens
  siRNA target sequence for SERPINH1 (NM_001235.2,830-848).
gtcaacgccatgttcttca

SEQ ID NO: 127194 - DNA, 19 bp, Homo sapiens
  siRNA target sequence for SERPINH1 (NM_001235.2,921-939).
ccgtgggtgtcatgatgat

SEQ ID NO: 127195 - DNA, 19 bp, Homo sapiens
  siRNA target sequence for SERPINH1 (NM_001235.2,945-963).
ggacaggcctctacaacta

SEQ ID NO: 127196 - DNA, 19 bp, Homo sapiens
  siRNA target sequence for SERPINH1 (NM_001235.2,948-966).
caggcctctacaactacta

SEQ ID NO: 127197 - DNA, 19 bp, Homo sapiens
  siRNA target sequence for SERPINH1 (NM_001235.2,1058-1076).
cctctcgagcgccttgaaa

SEQ ID NO: 127198 - DNA, 19 bp, Homo sapiens
  siRNA target sequence for SERPINH1 (NM_001235.2,1205-1223).
ctgactgaggccattgaca

SEQ ID NO: 127199 - DNA, 19 bp, Homo sapiens
  siRNA target sequence for SERPINH1 (NM_001235.2,1286-1304).
cacgccaccgcctttgagt

SEQ ID NO: 127200 - DNA, 19 bp, Homo sapiens
  siRNA target sequence for SERPINH1 (NM_001235.2,1359-1377).
gcagccccaagctgttcta

SEQ ID NO: 127201 - DNA, 19 bp, Homo sapiens
  siRNA target sequence for SERPINH1 (NM_001235.2,1419-1437).
gcggctccctgctattcat

SEQ ID NO: 127202 - DNA, 19 bp, Homo sapiens
  siRNA target sequence for SERPINH1 (NM_001235.2,1420-1438).
cggctccctgctattcatt

SEQ ID NO: 127203 - DNA, 19 bp, Homo sapiens
  siRNA target sequence for SPARC (NM_003118.1,367-385).
cccattggcgagtttgaga

SEQ ID NO: 127204 - DNA, 19 bp, Homo sapiens
  siRNA target sequence for SPARC (NM_003118.1,368-386).
ccattggcgagtttgagaa

SEQ ID NO: 127205 - DNA, 19 bp, Homo sapiens
  siRNA target sequence for SPARC (NM_003118.1,489-507).
ctacatcgggccttgcaaa

SEQ ID NO: 127206 - DNA, 19 bp, Homo sapiens
  siRNA target sequence for A2M (NM_000014.3,120-138).
ctggaaaaccgcagtatat

SEQ ID NO: 127207 - DNA, 19 bp, Homo sapiens
  siRNA target sequence for A2M (NM_000014.3,307-325).
cttcgctgtcccaaagtct

SEQ ID NO: 127208 - DNA, 19 bp, Homo sapiens
  siRNA target sequence for A2M (NM_000014.3,327-345).
catccaatgaggaggtaat

SEQ ID NO: 127209 - DNA, 19 bp, Homo sapiens
  siRNA target sequence for A2M (NM_000014.3,330-348).
ccaatgaggaggtaatgtt

SEQ ID NO: 127210 - DNA, 19 bp, Homo sapiens
  siRNA target sequence for A2M (NM_000014.3,371-389).
ccaacccaagaatttaaga

SEQ ID NO: 127211 - DNA, 19 bp, Homo sapiens
  siRNA target sequence for A2M (NM_000014.3,372-390).
caacccaagaatttaagaa

SEQ ID NO: 127212 - DNA, 19 bp, Homo sapiens
  siRNA target sequence for A2M (NM_000014.3,461-479).
ccagggcagacagtgaaat

SEQ ID NO: 127213 - DNA, 19 bp, Homo sapiens
  siRNA target sequence for A2M (NM_000014.3,466-484).
gcagacagtgaaatttcgt

SEQ ID NO: 127214 - DNA, 19 bp, Homo sapiens
  siRNA target sequence for A2M (NM_000014.3,521-539).
gagttgattccactagtat

SEQ ID NO: 127215 - DNA, 19 bp, Homo sapiens
  siRNA target sequence for A2M (NM_000014.3,526-544).
gattccactagtatacatt

SEQ ID NO: 127216 - DNA, 19 bp, Homo sapiens
  siRNA target sequence for A2M (NM_000014.3,727-745).
gtttgaagtacaagtaaca

SEQ ID NO: 127217 - DNA, 19 bp, Homo sapiens
  siRNA target sequence for A2M (NM_000014.3,740-758).
gtaacagtgccaaagataa

SEQ ID NO: 127218 - DNA, 19 bp, Homo sapiens
  siRNA target sequence for A2M (NM_000014.3,793-811).
gtgtggcctatacacatat

SEQ ID NO: 127219 - DNA, 19 bp, Homo sapiens
  siRNA target sequence for A2M (NM_000014.3,844-862).
catttgcagaaagtatagt

SEQ ID NO: 127220 - DNA, 19 bp, Homo sapiens
  siRNA target sequence for A2M (NM_000014.3,871-889).
cgactgccacggtgaagat

SEQ ID NO: 127221 - DNA, 19 bp, Homo sapiens
  siRNA target sequence for A2M (NM_000014.3,874-892).
ctgccacggtgaagattca

SEQ ID NO: 127222 - DNA, 19 bp, Homo sapiens
  siRNA target sequence for A2M (NM_000014.3,876-894).
gccacggtgaagattcaca

SEQ ID NO: 127223 - DNA, 19 bp, Homo sapiens
  siRNA target sequence for A2M (NM_000014.3,1031-1049).
ggaacagtggtggaattga

SEQ ID NO: 127224 - DNA, 19 bp, Homo sapiens
  siRNA target sequence for A2M (NM_000014.3,1053-1071).
gaaggcagtccagtgaaat

SEQ ID NO: 127225 - DNA, 19 bp, Homo sapiens
  siRNA target sequence for A2M (NM_000014.3,1072-1090).
cacaagaaccataaccaaa

SEQ ID NO: 127226 - DNA, 19 bp, Homo sapiens
  siRNA target sequence for A2M (NM_000014.3,1143-1161).
ggcaggtgcgcctagtaga

SEQ ID NO: 127227 - DNA, 19 bp, Homo sapiens
  siRNA target sequence for A2M (NM_000014.3,1144-1162).
gcaggtgcgcctagtagat

SEQ ID NO: 127228 - DNA, 19 bp, Homo sapiens
  siRNA target sequence for A2M (NM_000014.3,1165-1183).
gaaaggcgtccctatacca

SEQ ID NO: 127229 - DNA, 19 bp, Homo sapiens
  siRNA target sequence for A2M (NM_000014.3,1169-1187).
ggcgtccctataccaaata

SEQ ID NO: 127230 - DNA, 19 bp, Homo sapiens
  siRNA target sequence for A2M (NM_000014.3,1170-1188).
gcgtccctataccaaataa

SEQ ID NO: 127231 - DNA, 19 bp, Homo sapiens
  siRNA target sequence for A2M (NM_000014.3,1175-1193).
cctataccaaataaagtca

SEQ ID NO: 127232 - DNA, 19 bp, Homo sapiens
  siRNA target sequence for A2M (NM_000014.3,1256-1274).
gtacagttctctatcaaca

SEQ ID NO: 127233 - DNA, 19 bp, Homo sapiens
  siRNA target sequence for A2M (NM_000014.3,1283-1301).
gttatgggtacctctctta

SEQ ID NO: 127234 - DNA, 19 bp, Homo sapiens
  siRNA target sequence for A2M (NM_000014.3,1298-1316).
cttactgttagggtcaatt

SEQ ID NO: 127235 - DNA, 19 bp, Homo sapiens
  siRNA target sequence for A2M (NM_000014.3,1302-1320).
ctgttagggtcaattacaa

SEQ ID NO: 127236 - DNA, 19 bp, Homo sapiens
  siRNA target sequence for A2M (NM_000014.3,1374-1392).
cacatcacactgcttatct

SEQ ID NO: 127237 - DNA, 19 bp, Homo sapiens
  siRNA target sequence for A2M (NM_000014.3,1467-1485).
cagtccaggcacattatat

SEQ ID NO: 127238 - DNA, 19 bp, Homo sapiens
  siRNA target sequence for A2M (NM_000014.3,1607-1625).
ggccatttttccatctcaa

SEQ ID NO: 127239 - DNA, 19 bp, Homo sapiens
  siRNA target sequence for A2M (NM_000014.3,1654-1672).
cgctcggttgctcatctat

SEQ ID NO: 127240 - DNA, 19 bp, Homo sapiens
  siRNA target sequence for A2M (NM_000014.3,1884-1902).
cggcgtcctcggtttacaa

SEQ ID NO: 127241 - DNA, 19 bp, Homo sapiens
  siRNA target sequence for A2M (NM_000014.3,1968-1986).
gcatcaatcgtcataatgt

SEQ ID NO: 127242 - DNA, 19 bp, Homo sapiens
  siRNA target sequence for A2M (NM_000014.3,1972-1990).
caatcgtcataatgtctat

SEQ ID NO: 127243 - DNA, 19 bp, Homo sapiens
  siRNA target sequence for A2M (NM_000014.3,1976-1994).
cgtcataatgtctatatta

SEQ ID NO: 127244 - DNA, 19 bp, Homo sapiens
  siRNA target sequence for A2M (NM_000014.3,2013-2031).
cagtatcaagtacaaatga

SEQ ID NO: 127245 - DNA, 19 bp, Homo sapiens
  siRNA target sequence for A2M (NM_000014.3,2073-2091).
cattcaccaactcaaagat

SEQ ID NO: 127246 - DNA, 19 bp, Homo sapiens
  siRNA target sequence for A2M (NM_000014.3,2079-2097).
ccaactcaaagattcgtaa

SEQ ID NO: 127247 - DNA, 19 bp, Homo sapiens
  siRNA target sequence for A2M (NM_000014.3,2080-2098).
caactcaaagattcgtaaa

SEQ ID NO: 127248 - DNA, 19 bp, Homo sapiens
  siRNA target sequence for A2M (NM_000014.3,2147-2165).
ggtctacgtgtaggttttt

SEQ ID NO: 127249 - DNA, 19 bp, Homo sapiens
  siRNA target sequence for A2M (NM_000014.3,2148-2166).
gtctacgtgtaggttttta

SEQ ID NO: 127250 - DNA, 19 bp, Homo sapiens
  siRNA target sequence for A2M (NM_000014.3,2153-2171).
cgtgtaggtttttatgagt

SEQ ID NO: 127251 - DNA, 19 bp, Homo sapiens
  siRNA target sequence for A2M (NM_000014.3,2196-2214).
cacgcctggtgcatgttga

SEQ ID NO: 127252 - DNA, 19 bp, Homo sapiens
  siRNA target sequence for A2M (NM_000014.3,2226-2244).
cggagaccgtacgaaagta

SEQ ID NO: 127253 - DNA, 19 bp, Homo sapiens
  siRNA target sequence for A2M (NM_000014.3,2228-2246).
gagaccgtacgaaagtact

SEQ ID NO: 127254 - DNA, 19 bp, Homo sapiens
  siRNA target sequence for A2M (NM_000014.3,2617-2635).
ggcagtaaccccaaagtca

SEQ ID NO: 127255 - DNA, 19 bp, Homo sapiens
  siRNA target sequence for A2M (NM_000014.3,2619-2637).
cagtaaccccaaagtcatt

SEQ ID NO: 127256 - DNA, 19 bp, Homo sapiens
  siRNA target sequence for A2M (NM_000014.3,2626-2644).
cccaaagtcattaggaaat

SEQ ID NO: 127257 - DNA, 19 bp, Homo sapiens
  siRNA target sequence for A2M (NM_000014.3,2628-2646).
caaagtcattaggaaatgt

SEQ ID NO: 127258 - DNA, 19 bp, Homo sapiens
  siRNA target sequence for A2M (NM_000014.3,2695-2713).
gactgaggtgccttcagtt

SEQ ID NO: 127259 - DNA, 19 bp, Homo sapiens
  siRNA target sequence for A2M (NM_000014.3,2816-2834).
ggtgaggtttctgaagaat

SEQ ID NO: 127260 - DNA, 19 bp, Homo sapiens
  siRNA target sequence for A2M (NM_000014.3,2850-2868).
caccaaatgtggtagaaga

SEQ ID NO: 127261 - DNA, 19 bp, Homo sapiens
  siRNA target sequence for A2M (NM_000014.3,2852-2870).
ccaaatgtggtagaagaat

SEQ ID NO: 127262 - DNA, 19 bp, Homo sapiens
  siRNA target sequence for A2M (NM_000014.3,2909-2927).
ggctctgccatgcaaaaca

SEQ ID NO: 127263 - DNA, 19 bp, Homo sapiens
  siRNA target sequence for A2M (NM_000014.3,2995-3013).
ctatgtactggattatcta

SEQ ID NO: 127264 - DNA, 19 bp, Homo sapiens
  siRNA target sequence for A2M (NM_000014.3,3002-3020).
ctggattatctaaatgaaa

SEQ ID NO: 127265 - DNA, 19 bp, Homo sapiens
  siRNA target sequence for A2M (NM_000014.3,3004-3022).
ggattatctaaatgaaaca

SEQ ID NO: 127266 - DNA, 19 bp, Homo sapiens
  siRNA target sequence for A2M (NM_000014.3,3088-3106).
gttgaactacaaacactat

SEQ ID NO: 127267 - DNA, 19 bp, Homo sapiens
  siRNA target sequence for A2M (NM_000014.3,3460-3478).
ccatggcagccatgtatat

SEQ ID NO: 127268 - DNA, 19 bp, Homo sapiens
  siRNA target sequence for A2M (NM_000014.3,3461-3479).
catggcagccatgtatata

SEQ ID NO: 127269 - DNA, 19 bp, Homo sapiens
  siRNA target sequence for A2M (NM_000014.3,3466-3484).
cagccatgtatataccaaa

SEQ ID NO: 127270 - DNA, 19 bp, Homo sapiens
  siRNA target sequence for A2M (NM_000014.3,4057-4075).
gttcccctttgctttagga

SEQ ID NO: 127271 - DNA, 19 bp, Homo sapiens
  siRNA target sequence for A2M (NM_000014.3,4087-4105).
gcctcaaacttgtgatgaa

SEQ ID NO: 127272 - DNA, 19 bp, Homo sapiens
  siRNA target sequence for A2M (NM_000014.3,4275-4293).
gcagcaaccatgtcttgat

SEQ ID NO: 127273 - DNA, 19 bp, Homo sapiens
  siRNA target sequence for A2M (NM_000014.3,4297-4315).
ccttgataaggtgtcaaat

SEQ ID NO: 127274 - DNA, 19 bp, Homo sapiens
  siRNA target sequence for A2M (NM_000014.3,4301-4319).
gataaggtgtcaaatcaga

SEQ ID NO: 127275 - DNA, 19 bp, Homo sapiens
  siRNA target sequence for A2M (NM_000014.3,4345-4363).
gcaagatgtcccagtaaga

SEQ ID NO: 127276 - DNA, 19 bp, Homo sapiens
  siRNA target sequence for A2M (NM_000014.3,4373-4391).
ccagccatagtgaaagtct

SEQ ID NO: 127277 - DNA, 19 bp, Homo sapiens
  siRNA target sequence for A2M (NM_000014.3,4374-4392).
cagccatagtgaaagtcta

SEQ ID NO: 127278 - DNA, 19 bp, Homo sapiens
  siRNA target sequence for A2M (NM_000014.3,4399-4417).
ctacgagacggatgagttt

SEQ ID NO: 127279 - DNA, 19 bp, Homo sapiens
  siRNA target sequence for A2M (NM_000014.3,4403-4421).
gagacggatgagtttgcaa

SEQ ID NO: 127280 - DNA, 19 bp, Homo sapiens
  siRNA target sequence for CGI-100 (NM_016040.2,289-307).
gatcgagtaccaagtttta

SEQ ID NO: 127281 - DNA, 19 bp, Homo sapiens
  siRNA target sequence for CGI-100 (NM_016040.2,292-310).
cgagtaccaagttttagat

SEQ ID NO: 127282 - DNA, 19 bp, Homo sapiens
  siRNA target sequence for CGI-100 (NM_016040.2,479-497).
gaattaatcctggataata

SEQ ID NO: 127283 - DNA, 19 bp, Homo sapiens
  siRNA target sequence for CGI-100 (NM_016040.2,601-619).
caagtccagactaagcaaa

SEQ ID NO: 127284 - DNA, 19 bp, Homo sapiens
  siRNA target sequence for CGI-100 (NM_016040.2,604-622).
gtccagactaagcaaaagt

SEQ ID NO: 127285 - DNA, 19 bp, Homo sapiens
  siRNA target sequence for CGI-100 (NM_016040.2,616-634).
caaaagtgggcacatacaa

SEQ ID NO: 127286 - DNA, 19 bp, Homo sapiens
  siRNA target sequence for CGI-100 (NM_016040.2,657-675).
ctcgtgatcgaaacataca

SEQ ID NO: 127287 - DNA, 19 bp, Homo sapiens
  siRNA target sequence for CGI-100 (NM_016040.2,703-721).
ctggtctatggttaattta

SEQ ID NO: 127288 - DNA, 19 bp, Homo sapiens
  siRNA target sequence for CGI-100 (NM_016040.2,736-754).
ggtgtcagccattcaagtt

SEQ ID NO: 127289 - DNA, 19 bp, Homo sapiens
  siRNA target sequence for CGI-100 (NM_016040.2,741-759).
cagccattcaagtttatat

SEQ ID NO: 127290 - DNA, 19 bp, Homo sapiens
  siRNA target sequence for CGI-109 (NM_181836.3,681-699).
gaagtctgtcatcgattat

SEQ ID NO: 127291 - DNA, 19 bp, Homo sapiens
  siRNA target sequence for CGI-109 (NM_181836.3,700-718).
cagactcatttccgtttaa

SEQ ID NO: 127292 - DNA, 19 bp, Homo sapiens
  siRNA target sequence for CGI-109 (NM_181836.3,702-720).
gactcatttccgtttaaga

SEQ ID NO: 127293 - DNA, 19 bp, Homo sapiens
  siRNA target sequence for CGI-109 (NM_181836.3,704-722).
ctcatttccgtttaagaga

SEQ ID NO: 127294 - DNA, 19 bp, Homo sapiens
  siRNA target sequence for CGI-109 (NM_181836.3,737-755).
gccgagcagaggatctaaa

SEQ ID NO: 127295 - DNA, 19 bp, Homo sapiens
  siRNA target sequence for CGI-109 (NM_181836.3,742-760).
gcagaggatctaaatacaa

SEQ ID NO: 127296 - DNA, 19 bp, Homo sapiens
  siRNA target sequence for CGI-109 (NM_181836.3,809-827).
gcatagggcaggtatttct

SEQ ID NO: 127297 - DNA, 19 bp, Homo sapiens
  siRNA target sequence for CGI-109 (NM_181836.3,810-828).
catagggcaggtatttctt

SEQ ID NO: 127298 - DNA, 19 bp, Homo sapiens
  siRNA target sequence for HSGP25L2G (NM_017510.3,104-122).
gcggaagcgcgctctactt

SEQ ID NO: 127299 - DNA, 19 bp, Homo sapiens
  siRNA target sequence for HSGP25L2G (NM_017510.3,105-123).
cggaagcgcgctctacttt

SEQ ID NO: 127300 - DNA, 19 bp, Homo sapiens
  siRNA target sequence for HSGP25L2G (NM_017510.3,110-128).
gcgcgctctactttcacat

SEQ ID NO: 127301 - DNA, 19 bp, Homo sapiens
  siRNA target sequence for HSGP25L2G (NM_017510.3,196-214).
cggacgcagctgtatgaca

SEQ ID NO: 127302 - DNA, 19 bp, Homo sapiens
  siRNA target sequence for HSGP25L2G (NM_017510.3,197-215).
ggacgcagctgtatgacaa

SEQ ID NO: 127303 - DNA, 19 bp, Homo sapiens
  siRNA target sequence for IL1RL1LG (NM_006858.2,280-298).
gcctcgagaccgaatacca

SEQ ID NO: 127304 - DNA, 19 bp, Homo sapiens
  siRNA target sequence for MGC23911 (NM_144676.1,99-117).
gaagacagaacctctaagt

SEQ ID NO: 127305 - DNA, 19 bp, Homo sapiens
  siRNA target sequence for MGC23911 (NM_144676.1,141-159).
ccgtggagctgatcgatat

SEQ ID NO: 127306 - DNA, 19 bp, Homo sapiens
  siRNA target sequence for MGC23911 (NM_144676.1,145-163).
ggagctgatcgatatgact

SEQ ID NO: 127307 - DNA, 19 bp, Homo sapiens
  siRNA target sequence for MGC23911 (NM_144676.1,146-164).
gagctgatcgatatgactt

SEQ ID NO: 127308 - DNA, 19 bp, Homo sapiens
  siRNA target sequence for MGC23911 (NM_144676.1,182-200).
caggaggcacggaatgctt

SEQ ID NO: 127309 - DNA, 19 bp, Homo sapiens
  siRNA target sequence for MGC23911 (NM_144676.1,214-232).
caccagactggatacttct

SEQ ID NO: 127310 - DNA, 19 bp, Homo sapiens
  siRNA target sequence for MGC23911 (NM_144676.1,216-234).
ccagactggatacttctat

SEQ ID NO: 127311 - DNA, 19 bp, Homo sapiens
  siRNA target sequence for MGC23911 (NM_144676.1,217-235).
cagactggatacttctatt

SEQ ID NO: 127312 - DNA, 19 bp, Homo sapiens
  siRNA target sequence for MGC23911 (NM_144676.1,223-241).
ggatacttctatttcagtt

SEQ ID NO: 127313 - DNA, 19 bp, Homo sapiens
  siRNA target sequence for MGC23911 (NM_144676.1,303-321).
cccacagggatttctcata

SEQ ID NO: 127314 - DNA, 19 bp, Homo sapiens
  siRNA target sequence for MGC23911 (NM_144676.1,305-323).
cacagggatttctcataga

SEQ ID NO: 127315 - DNA, 19 bp, Homo sapiens
  siRNA target sequence for MGC23911 (NM_144676.1,389-407).
gtctaagtaatcagcataa

SEQ ID NO: 127316 - DNA, 19 bp, Homo sapiens
  siRNA target sequence for MGC23911 (NM_144676.1,395-413).
gtaatcagcataatcactt

SEQ ID NO: 127317 - DNA, 19 bp, Homo sapiens
  siRNA target sequence for MGC23911 (NM_144676.1,423-441).
gcaagtgtacctcaacttt

SEQ ID NO: 127318 - DNA, 19 bp, Homo sapiens
  siRNA target sequence for MGC23911 (NM_144676.1,537-555).
ggtgcagaacaatatcttt

SEQ ID NO: 127319 - DNA, 19 bp, Homo sapiens
  siRNA target sequence for MGC23911 (NM_144676.1,561-579).
gtggcgatactacaacttt

SEQ ID NO: 127320 - DNA, 19 bp, Homo sapiens
  siRNA target sequence for MGC23911 (NM_144676.1,601-619).
gactttttccttatccaat

SEQ ID NO: 127321 - DNA, 19 bp, Homo sapiens
  siRNA target sequence for MGC23911 (NM_144676.1,609-627).
ccttatccaatcaaactat

SEQ ID NO: 127322 - DNA, 19 bp, Homo sapiens
  siRNA target sequence for MGC23911 (NM_144676.1,610-628).
cttatccaatcaaactata

SEQ ID NO: 127323 - DNA, 19 bp, Homo sapiens
  siRNA target sequence for MGC23911 (NM_144676.1,657-675).
gagccttgttattattctt

SEQ ID NO: 127324 - DNA, 19 bp, Homo sapiens
  siRNA target sequence for MGC23911 (NM_144676.1,679-697).
gggatcctgcaactgtatt

SEQ ID NO: 127325 - DNA, 19 bp, Homo sapiens
  siRNA target sequence for MGC23911 (NM_144676.1,680-698).
ggatcctgcaactgtattt

SEQ ID NO: 127326 - DNA, 19 bp, Homo sapiens
  siRNA target sequence for MGC23911 (NM_144676.1,699-717).
cttgaagcgtctcttcaat

SEQ ID NO: 127327 - DNA, 19 bp, Homo sapiens
  siRNA target sequence for MGC23911 (NM_144676.1,702-720).
gaagcgtctcttcaatgtt

SEQ ID NO: 127328 - DNA, 19 bp, Homo sapiens
  siRNA target sequence for MGC23911 (NM_144676.1,714-732).
caatgttccaacaactaca

SEQ ID NO: 127329 - DNA, 19 bp, Homo sapiens
  siRNA target sequence for P24B (NM_007364.1,277-295).
gaggccactacgatgttga

SEQ ID NO: 127330 - DNA, 19 bp, Homo sapiens
  siRNA target sequence for P24B (NM_007364.1,325-343).
ccatctacagagaaacgaa

SEQ ID NO: 127331 - DNA, 19 bp, Homo sapiens
  siRNA target sequence for P24B (NM_007364.1,364-382).
cgtaccgggctgaagtcaa

SEQ ID NO: 127332 - DNA, 19 bp, Homo sapiens
  siRNA target sequence for P24B (NM_007364.1,378-396).
gtcaagggcgtttatcagt

SEQ ID NO: 127333 - DNA, 19 bp, Homo sapiens
  siRNA target sequence for P24B (NM_007364.1,380-398).
caagggcgtttatcagttt

SEQ ID NO: 127334 - DNA, 19 bp, Homo sapiens
  siRNA target sequence for P24B (NM_007364.1,385-403).
gcgtttatcagttttgctt

SEQ ID NO: 127335 - DNA, 19 bp, Homo sapiens
  siRNA target sequence for P24B (NM_007364.1,427-445).
ctcacaagaccgtctactt

SEQ ID NO: 127336 - DNA, 19 bp, Homo sapiens
  siRNA target sequence for P24B (NM_007364.1,549-567).
ctgaaaacggtgattgact

SEQ ID NO: 127337 - DNA, 19 bp, Homo sapiens
  siRNA target sequence for P24B (NM_007364.1,685-703).
gtcaggtgctactgttgaa

SEQ ID NO: 127338 - DNA, 19 bp, Homo sapiens
  siRNA target sequence for P24B (NM_007364.1,690-708).
gtgctactgttgaaaagct

SEQ ID NO: 127339 - DNA, 19 bp, Homo sapiens
  siRNA target sequence for RNP24 (NM_006815.2,70-88).
ccacggtctcgggctattt

SEQ ID NO: 127340 - DNA, 19 bp, Homo sapiens
  siRNA target sequence for RNP24 (NM_006815.2,73-91).
cggtctcgggctatttcgt

SEQ ID NO: 127341 - DNA, 19 bp, Homo sapiens
  siRNA target sequence for RNP24 (NM_006815.2,74-92).
ggtctcgggctatttcgtt

SEQ ID NO: 127342 - DNA, 19 bp, Homo sapiens
  siRNA target sequence for RNP24 (NM_006815.2,75-93).
gtctcgggctatttcgtta

SEQ ID NO: 127343 - DNA, 19 bp, Homo sapiens
  siRNA target sequence for RNP24 (NM_006815.2,79-97).
cgggctatttcgttagcat

SEQ ID NO: 127344 - DNA, 19 bp, Homo sapiens
  siRNA target sequence for RNP24 (NM_006815.2,189-207).
gacatcgacgtggagatta

SEQ ID NO: 127345 - DNA, 19 bp, Homo sapiens
  siRNA target sequence for RNP24 (NM_006815.2,278-296).
catggatggaacatacaaa

SEQ ID NO: 127346 - DNA, 19 bp, Homo sapiens
  siRNA target sequence for RNP24 (NM_006815.2,476-494).
ggaagtccgggagagaata

SEQ ID NO: 127347 - DNA, 19 bp, Homo sapiens
  siRNA target sequence for RNP24 (NM_006815.2,480-498).
gtccgggagagaatacaca

SEQ ID NO: 127348 - DNA, 19 bp, Homo sapiens
  siRNA target sequence for RNP24 (NM_006815.2,501-519).
gccatcaacgacaacacaa

SEQ ID NO: 127349 - DNA, 19 bp, Homo sapiens
  siRNA target sequence for RNP24 (NM_006815.2,502-520).
ccatcaacgacaacacaaa

SEQ ID NO: 127350 - DNA, 19 bp, Homo sapiens
  siRNA target sequence for TMP21 (NM_006827.4,109-127).
ccttccatctgcccattaa

SEQ ID NO: 127351 - DNA, 19 bp, Homo sapiens
  siRNA target sequence for TMP21 (NM_006827.4,139-157).
gcctccgtgaggagattca

SEQ ID NO: 127352 - DNA, 19 bp, Homo sapiens
  siRNA target sequence for TMP21 (NM_006827.4,396-414).
ggagtggaggcgaaaaatt

SEQ ID NO: 127353 - DNA, 19 bp, Homo sapiens
  siRNA target sequence for TMP21 (NM_006827.4,397-415).
gagtggaggcgaaaaatta

SEQ ID NO: 127354 - DNA, 19 bp, Homo sapiens
  siRNA target sequence for TMP21 (NM_006827.4,401-419).
ggaggcgaaaaattacgaa

SEQ ID NO: 127355 - DNA, 19 bp, Homo sapiens
  siRNA target sequence for TMP21 (NM_006827.4,406-424).
cgaaaaattacgaagagat

SEQ ID NO: 127356 - DNA, 19 bp, Homo sapiens
  siRNA target sequence for TMP21 (NM_006827.4,432-450).
gttgagaagctcaaaccat

SEQ ID NO: 127357 - DNA, 19 bp, Homo sapiens
  siRNA target sequence for TMP21 (NM_006827.4,469-487).
gcctagaagacctttcaga

SEQ ID NO: 127358 - DNA, 19 bp, Homo sapiens
  siRNA target sequence for TMP21 (NM_006827.4,540-558).
gataccaacgagtcaacaa

SEQ ID NO: 127359 - DNA, 19 bp, Homo sapiens
  siRNA target sequence for TMP21 (NM_006827.4,556-574).
caaacactcgggtcctata

SEQ ID NO: 127360 - DNA, 19 bp, Homo sapiens
  siRNA target sequence for TMP21 (NM_006827.4,647-665).
caaggccaagaaattgatt

SEQ ID NO: 127361 - DNA, 19 bp, Homo sapiens
  siRNA target sequence for HPS4 (NM_022081.4,691-709).
cagcctcgtggtggaatta

SEQ ID NO: 127362 - DNA, 19 bp, Homo sapiens
  siRNA target sequence for HPS4 (NM_022081.4,693-711).
gcctcgtggtggaattatt

SEQ ID NO: 127363 - DNA, 19 bp, Homo sapiens
  siRNA target sequence for HPS4 (NM_022081.4,694-712).
cctcgtggtggaattattt

SEQ ID NO: 127364 - DNA, 19 bp, Homo sapiens
  siRNA target sequence for HPS4 (NM_022081.4,695-713).
ctcgtggtggaattatttt

SEQ ID NO: 127365 - DNA, 19 bp, Homo sapiens
  siRNA target sequence for HPS4 (NM_022081.4,843-861).
cgctgtgtttctgacattt

SEQ ID NO: 127366 - DNA, 19 bp, Homo sapiens
  siRNA target sequence for HPS4 (NM_022081.4,1024-1042).
ctgtttccctagcttatga

SEQ ID NO: 127367 - DNA, 19 bp, Homo sapiens
  siRNA target sequence for HPS4 (NM_022081.4,1032-1050).
ctagcttatgagaactgtt

SEQ ID NO: 127368 - DNA, 19 bp, Homo sapiens
  siRNA target sequence for HPS4 (NM_022081.4,1081-1099).
ccttcatcgagcaaattct

SEQ ID NO: 127369 - DNA, 19 bp, Homo sapiens
  siRNA target sequence for HPS4 (NM_022081.4,1108-1126).
ccagtgatctgcataagat

SEQ ID NO: 127370 - DNA, 19 bp, Homo sapiens
  siRNA target sequence for HPS4 (NM_022081.4,1109-1127).
cagtgatctgcataagatt

SEQ ID NO: 127371 - DNA, 19 bp, Homo sapiens
  siRNA target sequence for HPS4 (NM_022081.4,1113-1131).
gatctgcataagattttca

SEQ ID NO: 127372 - DNA, 19 bp, Homo sapiens
  siRNA target sequence for HPS4 (NM_022081.4,1141-1159).
ggaacttggaccaaactaa

SEQ ID NO: 127373 - DNA, 19 bp, Homo sapiens
  siRNA target sequence for HPS4 (NM_022081.4,1142-1160).
gaacttggaccaaactaaa

SEQ ID NO: 127374 - DNA, 19 bp, Homo sapiens
  siRNA target sequence for HPS4 (NM_022081.4,1208-1226).
ccagcgctcgcctcacatt

SEQ ID NO: 127375 - DNA, 19 bp, Homo sapiens
  siRNA target sequence for HPS4 (NM_022081.4,1235-1253).
ctgcatcctctataaagga

SEQ ID NO: 127376 - DNA, 19 bp, Homo sapiens
  siRNA target sequence for HPS4 (NM_022081.4,1639-1657).
gcttgtctggccatgatct

SEQ ID NO: 127377 - DNA, 19 bp, Homo sapiens
  siRNA target sequence for HPS4 (NM_022081.4,2051-2069).
gacccgcaggcccttgtta

SEQ ID NO: 127378 - DNA, 19 bp, Homo sapiens
  siRNA target sequence for HPS4 (NM_022081.4,2053-2071).
cccgcaggcccttgttatt

SEQ ID NO: 127379 - DNA, 19 bp, Homo sapiens
  siRNA target sequence for HPS4 (NM_022081.4,2066-2084).
gttattgcctcgcttagat

SEQ ID NO: 127380 - DNA, 19 bp, Homo sapiens
  siRNA target sequence for HPS4 (NM_022081.4,2139-2157).
gttgatggggtctgtgaaa

SEQ ID NO: 127381 - DNA, 19 bp, Homo sapiens
  siRNA target sequence for HPS4 (NM_022081.4,2475-2493).
cattacgaccgcattcaga

SEQ ID NO: 127382 - DNA, 19 bp, Homo sapiens
  siRNA target sequence for HPS4 (NM_022081.4,2553-2571).
gccgtcagcctgatgcata

SEQ ID NO: 127383 - DNA, 19 bp, Homo sapiens
  siRNA target sequence for HPS4 (NM_022081.4,2561-2579).
cctgatgcatagcgaattt

SEQ ID NO: 127384 - DNA, 19 bp, Homo sapiens
  siRNA target sequence for HPS4 (NM_022081.4,2650-2668).
ccatccaggagacatattt

SEQ ID NO: 127385 - DNA, 19 bp, Homo sapiens
  siRNA target sequence for HPS4 (NM_152841.1,221-239).
ctcttgccaggtggaatta

SEQ ID NO: 127386 - DNA, 19 bp, Homo sapiens
  siRNA target sequence for HPS4 (NM_152843.1,1312-1330).
ccaccagaaccctaatgga

SEQ ID NO: 127387 - DNA, 19 bp, Homo sapiens
  siRNA target sequence for HPS4 (NM_152843.1,2074-2092).
gcttgtgtggtacttagaa

SEQ ID NO: 127388 - DNA, 19 bp, Homo sapiens
  siRNA target sequence for HPS4 (NM_152843.1,2093-2111).
cctcagttctattacgtta

SEQ ID NO: 127389 - DNA, 19 bp, Homo sapiens
  siRNA target sequence for HPS4 (NM_152843.1,2107-2125).
cgttatagtcagacatttt

SEQ ID NO: 127390 - DNA, 19 bp, Homo sapiens
  siRNA target sequence for INHBB (NM_002193.1,996-1014).
cggtgaagcggcacatctt

SEQ ID NO: 127391 - DNA, 19 bp, Homo sapiens
  siRNA target sequence for INHBB (NM_002193.1,998-1016).
gtgaagcggcacatcttga

SEQ ID NO: 127392 - DNA, 19 bp, Homo sapiens
  siRNA target sequence for INHBB (NM_002193.1,1178-1196).
gagcgcgtttccgaaatca

SEQ ID NO: 127393 - DNA, 19 bp, Homo sapiens
  siRNA target sequence for INHBB (NM_002193.1,1181-1199).
cgcgtttccgaaatcatca

SEQ ID NO: 127394 - DNA, 19 bp, Homo sapiens
  siRNA target sequence for INHBB (NM_002193.1,1230-1248).
cccgggtccgcctatactt

SEQ ID NO: 127395 - DNA, 19 bp, Homo sapiens
  siRNA target sequence for INHBB (NM_002193.1,1232-1250).
cgggtccgcctatacttct

SEQ ID NO: 127396 - DNA, 19 bp, Homo sapiens
  siRNA target sequence for INHBB (NM_002193.1,1233-1251).
gggtccgcctatacttctt

SEQ ID NO: 127397 - DNA, 19 bp, Homo sapiens
  siRNA target sequence for INHBB (NM_002193.1,1235-1253).
gtccgcctatacttcttca

SEQ ID NO: 127398 - DNA, 19 bp, Homo sapiens
  siRNA target sequence for INHBB (NM_002193.1,1350-1368).
ggaaggtgcgggtcaaagt

SEQ ID NO: 127399 - DNA, 19 bp, Homo sapiens
  siRNA target sequence for INHBB (NM_002193.1,1434-1452).
gcagcggctggcatacctt

SEQ ID NO: 127400 - DNA, 19 bp, Homo sapiens
  siRNA target sequence for INHBB (NM_002193.1,1677-1695).
gcaggcaacagttcttcat

SEQ ID NO: 127401 - DNA, 19 bp, Homo sapiens
  siRNA target sequence for INHBB (NM_002193.1,1678-1696).
caggcaacagttcttcatt

SEQ ID NO: 127402 - DNA, 19 bp, Homo sapiens
  siRNA target sequence for INHBB (NM_002193.1,1947-1965).
gggacgtgcccaacatgat

SEQ ID NO: 127403 - DNA, 19 bp, Homo sapiens
  siRNA target sequence for INHBB (NM_002193.1,1948-1966).
ggacgtgcccaacatgatt

SEQ ID NO: 127404 - DNA, 19 bp, Homo sapiens
  siRNA target sequence for S100B (NM_006272.1,108-126).
cgacgttttccaccaatat

SEQ ID NO: 127405 - DNA, 19 bp, Homo sapiens
  siRNA target sequence for S100B (NM_006272.1,109-127).
gacgttttccaccaatatt

SEQ ID NO: 127406 - DNA, 19 bp, Homo sapiens
  siRNA target sequence for S100B (NM_006272.1,111-129).
cgttttccaccaatattct

SEQ ID NO: 127407 - DNA, 19 bp, Homo sapiens
  siRNA target sequence for S100B (NM_006272.1,298-316).
gcctttgttgccatggtta

SEQ ID NO: 127408 - DNA, 19 bp, Homo sapiens
  siRNA target sequence for S100B (NM_006272.1,320-338).
ctgcctgccacgagttctt

SEQ ID NO: 127409 - DNA, 19 bp, Homo sapiens
  siRNA target sequence for S100B (NM_006272.1,327-345).
ccacgagttctttgaacat

SEQ ID NO: 127410 - DNA, 19 bp, Homo sapiens
  siRNA target sequence for IPO7 (NM_006391.1,333-351).
ggggatatatccccttata

SEQ ID NO: 127411 - DNA, 19 bp, Homo sapiens
  siRNA target sequence for IPO7 (NM_006391.1,336-354).
gatatatccccttatacta

SEQ ID NO: 127412 - DNA, 19 bp, Homo sapiens
  siRNA target sequence for IPO7 (NM_006391.1,360-378).
gaagaagatcgccattgta

SEQ ID NO: 127413 - DNA, 19 bp, Homo sapiens
  siRNA target sequence for IPO7 (NM_006391.1,393-411).
gtagaagccattatccatt

SEQ ID NO: 127414 - DNA, 19 bp, Homo sapiens
  siRNA target sequence for IPO7 (NM_006391.1,434-452).
gcttactacatgcattcat

SEQ ID NO: 127415 - DNA, 19 bp, Homo sapiens
  siRNA target sequence for IPO7 (NM_006391.1,439-457).
ctacatgcattcatcacat

SEQ ID NO: 127416 - DNA, 19 bp, Homo sapiens
  siRNA target sequence for IPO7 (NM_006391.1,445-463).
gcattcatcacatcatcaa

SEQ ID NO: 127417 - DNA, 19 bp, Homo sapiens
  siRNA target sequence for IPO7 (NM_006391.1,446-464).
cattcatcacatcatcaaa

SEQ ID NO: 127418 - DNA, 19 bp, Homo sapiens
  siRNA target sequence for IPO7 (NM_006391.1,453-471).
cacatcatcaaacatgatt

SEQ ID NO: 127419 - DNA, 19 bp, Homo sapiens
  siRNA target sequence for IPO7 (NM_006391.1,487-505).
ctgccattgtggacaaaat

SEQ ID NO: 127420 - DNA, 19 bp, Homo sapiens
  siRNA target sequence for IPO7 (NM_006391.1,532-550).
gtgcttgttggctaggaat

SEQ ID NO: 127421 - DNA, 19 bp, Homo sapiens
  siRNA target sequence for IPO7 (NM_006391.1,535-553).
cttgttggctaggaattct

SEQ ID NO: 127422 - DNA, 19 bp, Homo sapiens
  siRNA target sequence for IPO7 (NM_006391.1,538-556).
gttggctaggaattcttct

SEQ ID NO: 127423 - DNA, 19 bp, Homo sapiens
  siRNA target sequence for IPO7 (NM_006391.1,602-620).
ggagcggagtccattggta

SEQ ID NO: 127424 - DNA, 19 bp, Homo sapiens
  siRNA target sequence for IPO7 (NM_006391.1,645-663).
gttctaaaggatcgtttta

SEQ ID NO: 127425 - DNA, 19 bp, Homo sapiens
  siRNA target sequence for IPO7 (NM_006391.1,722-740).
gatcttctatgctcttgtt

SEQ ID NO: 127426 - DNA, 19 bp, Homo sapiens
  siRNA target sequence for IPO7 (NM_006391.1,748-766).
cactaccactggaactgat

SEQ ID NO: 127427 - DNA, 19 bp, Homo sapiens
  siRNA target sequence for IPO7 (NM_006391.1,776-794).
gaacctgacagaatggata

SEQ ID NO: 127428 - DNA, 19 bp, Homo sapiens
  siRNA target sequence for IPO7 (NM_006391.1,779-797).
cctgacagaatggatagaa

SEQ ID NO: 127429 - DNA, 19 bp, Homo sapiens
  siRNA target sequence for IPO7 (NM_006391.1,858-876).
gatcgacctgagttaccat

SEQ ID NO: 127430 - DNA, 19 bp, Homo sapiens
  siRNA target sequence for IPO7 (NM_006391.1,887-905).
caagaagtgggccttacat

SEQ ID NO: 127431 - DNA, 19 bp, Homo sapiens
  siRNA target sequence for IPO7 (NM_006391.1,893-911).
gtgggccttacatatttta

SEQ ID NO: 127432 - DNA, 19 bp, Homo sapiens
  siRNA target sequence for IPO7 (NM_006391.1,933-951).
ggaagccctggcaatgttt

SEQ ID NO: 127433 - DNA, 19 bp, Homo sapiens
  siRNA target sequence for IPO7 (NM_006391.1,953-971).
caaggagtataatgaattt

SEQ ID NO: 127434 - DNA, 19 bp, Homo sapiens
  siRNA target sequence for IPO7 (NM_006391.1,956-974).
ggagtataatgaatttgct

SEQ ID NO: 127435 - DNA, 19 bp, Homo sapiens
  siRNA target sequence for IPO7 (NM_006391.1,999-1017).
gttggtgtccagcaagttt

SEQ ID NO: 127436 - DNA, 19 bp, Homo sapiens
  siRNA target sequence for IPO7 (NM_006391.1,1002-1020).
ggtgtccagcaagttttat

SEQ ID NO: 127437 - DNA, 19 bp, Homo sapiens
  siRNA target sequence for IPO7 (NM_006391.1,1005-1023).
gtccagcaagttttattga

SEQ ID NO: 127438 - DNA, 19 bp, Homo sapiens
  siRNA target sequence for IPO7 (NM_006391.1,1127-1145).
gaatctgaagccccatata

SEQ ID NO: 127439 - DNA, 19 bp, Homo sapiens
  siRNA target sequence for IPO7 (NM_006391.1,1138-1156).
cccatatacaaggcattat

SEQ ID NO: 127440 - DNA, 19 bp, Homo sapiens
  siRNA target sequence for IPO7 (NM_006391.1,1151-1169).
cattatccaagatgttatt

SEQ ID NO: 127441 - DNA, 19 bp, Homo sapiens
  siRNA target sequence for IPO7 (NM_006391.1,1174-1192).
cattgatgtgctatacaga

SEQ ID NO: 127442 - DNA, 19 bp, Homo sapiens
  siRNA target sequence for IPO7 (NM_006391.1,1211-1229).
gcaagaagacccttacgaa

SEQ ID NO: 127443 - DNA, 19 bp, Homo sapiens
  siRNA target sequence for IPO7 (NM_006391.1,1212-1230).
caagaagacccttacgaat

SEQ ID NO: 127444 - DNA, 19 bp, Homo sapiens
  siRNA target sequence for IPO7 (NM_006391.1,1227-1245).
gaatatatacgcatgaagt

SEQ ID NO: 127445 - DNA, 19 bp, Homo sapiens
  siRNA target sequence for IPO7 (NM_006391.1,1284-1302).
gcccagacacttttgttta

SEQ ID NO: 127446 - DNA, 19 bp, Homo sapiens
  siRNA target sequence for IPO7 (NM_006391.1,1286-1304).
ccagacacttttgtttaca

SEQ ID NO: 127447 - DNA, 19 bp, Homo sapiens
  siRNA target sequence for IPO7 (NM_006391.1,1472-1490).
catgttgcagaatcatgta

SEQ ID NO: 127448 - DNA, 19 bp, Homo sapiens
  siRNA target sequence for IPO7 (NM_006391.1,1534-1552).
cttgctgggtacttcacta

SEQ ID NO: 127449 - DNA, 19 bp, Homo sapiens
  siRNA target sequence for IPO7 (NM_006391.1,1596-1614).
gccttagagctaacaagaa

SEQ ID NO: 127450 - DNA, 19 bp, Homo sapiens
  siRNA target sequence for IPO7 (NM_006391.1,1618-1636).
gtctgattgatgatagaga

SEQ ID NO: 127451 - DNA, 19 bp, Homo sapiens
  siRNA target sequence for IPO7 (NM_006391.1,1659-1677).
gccattgcccttcaagtat

SEQ ID NO: 127452 - DNA, 19 bp, Homo sapiens
  siRNA target sequence for IPO7 (NM_006391.1,1717-1735).
cattcatcagacctgtaat

SEQ ID NO: 127453 - DNA, 19 bp, Homo sapiens
  siRNA target sequence for IPO7 (NM_006391.1,1736-1754).
gcaggctcttcttcacatt

SEQ ID NO: 127454 - DNA, 19 bp, Homo sapiens
  siRNA target sequence for IPO7 (NM_006391.1,1737-1755).
caggctcttcttcacatta

SEQ ID NO: 127455 - DNA, 19 bp, Homo sapiens
  siRNA target sequence for IPO7 (NM_006391.1,1739-1757).
ggctcttcttcacattata

SEQ ID NO: 127456 - DNA, 19 bp, Homo sapiens
  siRNA target sequence for IPO7 (NM_006391.1,1740-1758).
gctcttcttcacattataa

SEQ ID NO: 127457 - DNA, 19 bp, Homo sapiens
  siRNA target sequence for IPO7 (NM_006391.1,1773-1791).
gatgaccttaccaatgtaa

SEQ ID NO: 127458 - DNA, 19 bp, Homo sapiens
  siRNA target sequence for IPO7 (NM_006391.1,1783-1801).
ccaatgtaattcagaaaat

SEQ ID NO: 127459 - DNA, 19 bp, Homo sapiens
  siRNA target sequence for IPO7 (NM_006391.1,1809-1827).
gaatatagtgaagaagtta

SEQ ID NO: 127460 - DNA, 19 bp, Homo sapiens
  siRNA target sequence for IPO7 (NM_006391.1,1839-1857).
gtagaaatgacacaacatt

SEQ ID NO: 127461 - DNA, 19 bp, Homo sapiens
  siRNA target sequence for IPO7 (NM_006391.1,1859-1877).
ggcaatgacatttaaccaa

SEQ ID NO: 127462 - DNA, 19 bp, Homo sapiens
  siRNA target sequence for IPO7 (NM_006391.1,1927-1945).
ctgctatgggaattctgaa

SEQ ID NO: 127463 - DNA, 19 bp, Homo sapiens
  siRNA target sequence for IPO7 (NM_006391.1,1929-1947).
gctatgggaattctgaata

SEQ ID NO: 127464 - DNA, 19 bp, Homo sapiens
  siRNA target sequence for IPO7 (NM_006391.1,1943-1961).
gaatacaattgatacactt

SEQ ID NO: 127465 - DNA, 19 bp, Homo sapiens
  siRNA target sequence for IPO7 (NM_006391.1,1957-1975).
cacttcttagtgtagttga

SEQ ID NO: 127466 - DNA, 19 bp, Homo sapiens
  siRNA target sequence for IPO7 (NM_006391.1,2024-2042).
cattggtactgttttacaa

SEQ ID NO: 127467 - DNA, 19 bp, Homo sapiens
  siRNA target sequence for IPO7 (NM_006391.1,2043-2061).
cagcatgtcttagaattct

SEQ ID NO: 127468 - DNA, 19 bp, Homo sapiens
  siRNA target sequence for IPO7 (NM_006391.1,2084-2102).
gcacagtttgacatgtcaa

SEQ ID NO: 127469 - DNA, 19 bp, Homo sapiens
  siRNA target sequence for IPO7 (NM_006391.1,2087-2105).
cagtttgacatgtcaacaa

SEQ ID NO: 127470 - DNA, 19 bp, Homo sapiens
  siRNA target sequence for IPO7 (NM_006391.1,2124-2142).
cagctactaccccttgtat

SEQ ID NO: 127471 - DNA, 19 bp, Homo sapiens
  siRNA target sequence for IPO7 (NM_006391.1,2126-2144).
gctactaccccttgtattt

SEQ ID NO: 127472 - DNA, 19 bp, Homo sapiens
  siRNA target sequence for IPO7 (NM_006391.1,2270-2288).
gtgcaaaaaggttcttaca

SEQ ID NO: 127473 - DNA, 19 bp, Homo sapiens
  siRNA target sequence for IPO7 (NM_006391.1,2410-2428).
gactgacaagagaggttaa

SEQ ID NO: 127474 - DNA, 19 bp, Homo sapiens
  siRNA target sequence for IPO7 (NM_006391.1,2431-2449).
caagtgaacttcgaactat

SEQ ID NO: 127475 - DNA, 19 bp, Homo sapiens
  siRNA target sequence for IPO7 (NM_006391.1,2463-2481).
gcaattgcagctttgtatt

SEQ ID NO: 127476 - DNA, 19 bp, Homo sapiens
  siRNA target sequence for IPO7 (NM_006391.1,2464-2482).
caattgcagctttgtatta

SEQ ID NO: 127477 - DNA, 19 bp, Homo sapiens
  siRNA target sequence for IPO7 (NM_006391.1,2521-2539).
gcttccctaataatgttga

SEQ ID NO: 127478 - DNA, 19 bp, Homo sapiens
  siRNA target sequence for IPO7 (NM_006391.1,2538-2556).
gaaccagttacaaatcatt

SEQ ID NO: 127479 - DNA, 19 bp, Homo sapiens
  siRNA target sequence for IPO7 (NM_006391.1,2563-2581).
cacagtggcttaatgatgt

SEQ ID NO: 127480 - DNA, 19 bp, Homo sapiens
  siRNA target sequence for IPO7 (NM_006391.1,2596-2614).
ggcttcatgacagaaagat

SEQ ID NO: 127481 - DNA, 19 bp, Homo sapiens
  siRNA target sequence for IPO7 (NM_006391.1,2598-2616).
cttcatgacagaaagatgt

SEQ ID NO: 127482 - DNA, 19 bp, Homo sapiens
  siRNA target sequence for IPO7 (NM_006391.1,2632-2650).
gtgctcttattgatatgga

SEQ ID NO: 127483 - DNA, 19 bp, Homo sapiens
  siRNA target sequence for IPO7 (NM_006391.1,2685-2703).
cagattttgccggctttta

SEQ ID NO: 127484 - DNA, 19 bp, Homo sapiens
  siRNA target sequence for IPO7 (NM_006391.1,2693-2711).
gccggcttttatcctttta

SEQ ID NO: 127485 - DNA, 19 bp, Homo sapiens
  siRNA target sequence for IPO7 (NM_006391.1,2717-2735).
cggattgaaaagagcatat

SEQ ID NO: 127486 - DNA, 19 bp, Homo sapiens
  siRNA target sequence for IPO7 (NM_006391.1,2928-2946).
gctctggaaggctattcca

SEQ ID NO: 127487 - DNA, 19 bp, Homo sapiens
  siRNA target sequence for IPO7 (NM_006391.1,2944-2962).
ccacaatcattgatgatga

SEQ ID NO: 127488 - DNA, 19 bp, Homo sapiens
  siRNA target sequence for IPO7 (NM_006391.1,2945-2963).
cacaatcattgatgatgaa

SEQ ID NO: 127489 - DNA, 19 bp, Homo sapiens
  siRNA target sequence for IPO7 (NM_006391.1,2970-2988).
cctgttgatgagtatcaga

SEQ ID NO: 127490 - DNA, 19 bp, Homo sapiens
  siRNA target sequence for IPO7 (NM_006391.1,2971-2989).
ctgttgatgagtatcagat

SEQ ID NO: 127491 - DNA, 19 bp, Homo sapiens
  siRNA target sequence for IPO7 (NM_006391.1,2998-3016).
ctatctttcaaactattca

SEQ ID NO: 127492 - DNA, 19 bp, Homo sapiens
  siRNA target sequence for IPO7 (NM_006391.1,3006-3024).
caaactattcaaaatcgta

SEQ ID NO: 127493 - DNA, 19 bp, Homo sapiens
  siRNA target sequence for IPO7 (NM_006391.1,3043-3061).
cactgactcacggtcttaa

SEQ ID NO: 127494 - DNA, 19 bp, Homo sapiens
  siRNA target sequence for IPO7 (NM_006391.1,3047-3065).
gactcacggtcttaatgaa

SEQ ID NO: 127495 - DNA, 19 bp, Homo sapiens
  siRNA target sequence for IPO7 (NM_006391.1,3049-3067).
ctcacggtcttaatgaaga

SEQ ID NO: 127496 - DNA, 19 bp, Homo sapiens
  siRNA target sequence for IPO7 (NM_006391.1,3053-3071).
cggtcttaatgaagaacaa

SEQ ID NO: 127497 - DNA, 19 bp, Homo sapiens
  siRNA target sequence for IPO7 (NM_006391.1,3078-3096).
cagttacaggacatagcaa

SEQ ID NO: 127498 - DNA, 19 bp, Homo sapiens
  siRNA target sequence for IPO7 (NM_006391.1,3115-3133).
gagcagcccatgaatccaa

SEQ ID NO: 127499 - DNA, 19 bp, Homo sapiens
  siRNA target sequence for IPO7 (NM_006391.1,3179-3197).
gccaagttctttcaatttt

SEQ ID NO: 127500 - DNA, 19 bp, Homo sapiens
  siRNA target sequence for IPO8 (NM_006390.1,246-264).
ctcaaccagtcctacaaga

SEQ ID NO: 127501 - DNA, 19 bp, Homo sapiens
  siRNA target sequence for IPO8 (NM_006390.1,248-266).
caaccagtcctacaagatt

SEQ ID NO: 127502 - DNA, 19 bp, Homo sapiens
  siRNA target sequence for IPO8 (NM_006390.1,280-298).
ccagtttacttcggattat

SEQ ID NO: 127503 - DNA, 19 bp, Homo sapiens
  siRNA target sequence for IPO8 (NM_006390.1,281-299).
cagtttacttcggattata

SEQ ID NO: 127504 - DNA, 19 bp, Homo sapiens
  siRNA target sequence for IPO8 (NM_006390.1,283-301).
gtttacttcggattatagt

SEQ ID NO: 127505 - DNA, 19 bp, Homo sapiens
  siRNA target sequence for IPO8 (NM_006390.1,474-492).
cggtctccagatttagtga

SEQ ID NO: 127506 - DNA, 19 bp, Homo sapiens
  siRNA target sequence for IPO8 (NM_006390.1,489-507).
gtgagagtccaattaacaa

SEQ ID NO: 127507 - DNA, 19 bp, Homo sapiens
  siRNA target sequence for IPO8 (NM_006390.1,511-529).
gtctccgtgccatcataaa

SEQ ID NO: 127508 - DNA, 19 bp, Homo sapiens
  siRNA target sequence for IPO8 (NM_006390.1,515-533).
ccgtgccatcataaaacat

SEQ ID NO: 127509 - DNA, 19 bp, Homo sapiens
  siRNA target sequence for IPO8 (NM_006390.1,519-537).
gccatcataaaacatgatt

SEQ ID NO: 127510 - DNA, 19 bp, Homo sapiens
  siRNA target sequence for IPO8 (NM_006390.1,553-571).
caggagtggtcgacaagat

SEQ ID NO: 127511 - DNA, 19 bp, Homo sapiens
  siRNA target sequence for IPO8 (NM_006390.1,556-574).
gagtggtcgacaagataga

SEQ ID NO: 127512 - DNA, 19 bp, Homo sapiens
  siRNA target sequence for IPO8 (NM_006390.1,561-579).
gtcgacaagatagactatt

SEQ ID NO: 127513 - DNA, 19 bp, Homo sapiens
  siRNA target sequence for IPO8 (NM_006390.1,564-582).
gacaagatagactattact

SEQ ID NO: 127514 - DNA, 19 bp, Homo sapiens
  siRNA target sequence for IPO8 (NM_006390.1,604-622).
gctggcttggcagtttatt

SEQ ID NO: 127515 - DNA, 19 bp, Homo sapiens
  siRNA target sequence for IPO8 (NM_006390.1,616-634).
gtttattatgcctgtatca

SEQ ID NO: 127516 - DNA, 19 bp, Homo sapiens
  siRNA target sequence for IPO8 (NM_006390.1,671-689).
gagagaacctcttataata

SEQ ID NO: 127517 - DNA, 19 bp, Homo sapiens
  siRNA target sequence for IPO8 (NM_006390.1,675-693).
gaacctcttataatagcaa

SEQ ID NO: 127518 - DNA, 19 bp, Homo sapiens
  siRNA target sequence for IPO8 (NM_006390.1,751-769).
cctattattctgtattact

SEQ ID NO: 127519 - DNA, 19 bp, Homo sapiens
  siRNA target sequence for IPO8 (NM_006390.1,798-816).
gcacttgttcagtatgcat

SEQ ID NO: 127520 - DNA, 19 bp, Homo sapiens
  siRNA target sequence for IPO8 (NM_006390.1,860-878).
ggagatcttccgaactatt

SEQ ID NO: 127521 - DNA, 19 bp, Homo sapiens
  siRNA target sequence for IPO8 (NM_006390.1,861-879).
gagatcttccgaactatta

SEQ ID NO: 127522 - DNA, 19 bp, Homo sapiens
  siRNA target sequence for IPO8 (NM_006390.1,911-929).
cattgatgaggatgataga

SEQ ID NO: 127523 - DNA, 19 bp, Homo sapiens
  siRNA target sequence for IPO8 (NM_006390.1,936-954).
ctggtatggtggaagtgta

SEQ ID NO: 127524 - DNA, 19 bp, Homo sapiens
  siRNA target sequence for IPO8 (NM_006390.1,939-957).
gtatggtggaagtgtaaga

SEQ ID NO: 127525 - DNA, 19 bp, Homo sapiens
  siRNA target sequence for IPO8 (NM_006390.1,959-977).
gtgggcactgcatattgta

SEQ ID NO: 127526 - DNA, 19 bp, Homo sapiens
  siRNA target sequence for IPO8 (NM_006390.1,979-997).
ctcggctctttgaacgata

SEQ ID NO: 127527 - DNA, 19 bp, Homo sapiens
  siRNA target sequence for IPO8 (NM_006390.1,983-1001).
gctctttgaacgatatgga

SEQ ID NO: 127528 - DNA, 19 bp, Homo sapiens
  siRNA target sequence for IPO8 (NM_006390.1,1143-1161).
caagcattcaactatctca

SEQ ID NO: 127529 - DNA, 19 bp, Homo sapiens
  siRNA target sequence for IPO8 (NM_006390.1,1193-1211).
gcagatgaagccacacata

SEQ ID NO: 127530 - DNA, 19 bp, Homo sapiens
  siRNA target sequence for IPO8 (NM_006390.1,1278-1296).
caagaagatccatatgagt

SEQ ID NO: 127531 - DNA, 19 bp, Homo sapiens
  siRNA target sequence for IPO8 (NM_006390.1,1281-1299).
gaagatccatatgagtata

SEQ ID NO: 127532 - DNA, 19 bp, Homo sapiens
  siRNA target sequence for IPO8 (NM_006390.1,1284-1302).
gatccatatgagtatataa

SEQ ID NO: 127533 - DNA, 19 bp, Homo sapiens
  siRNA target sequence for IPO8 (NM_006390.1,1288-1306).
catatgagtatataaggat

SEQ ID NO: 127534 - DNA, 19 bp, Homo sapiens
  siRNA target sequence for IPO8 (NM_006390.1,1295-1313).
gtatataaggatgaaattt

SEQ ID NO: 127535 - DNA, 19 bp, Homo sapiens
  siRNA target sequence for IPO8 (NM_006390.1,1350-1368).
gcccagactctcttatata

SEQ ID NO: 127536 - DNA, 19 bp, Homo sapiens
  siRNA target sequence for IPO8 (NM_006390.1,1352-1370).
ccagactctcttatatact

SEQ ID NO: 127537 - DNA, 19 bp, Homo sapiens
  siRNA target sequence for IPO8 (NM_006390.1,1482-1500).
ggttccctagctgagattt

SEQ ID NO: 127538 - DNA, 19 bp, Homo sapiens
  siRNA target sequence for IPO8 (NM_006390.1,1486-1504).
ccctagctgagattttact

SEQ ID NO: 127539 - DNA, 19 bp, Homo sapiens
  siRNA target sequence for IPO8 (NM_006390.1,1571-1589).
gtctaacctgggatatctt

SEQ ID NO: 127540 - DNA, 19 bp, Homo sapiens
  siRNA target sequence for IPO8 (NM_006390.1,1607-1625).
ggtacttcatgcatttagt

SEQ ID NO: 127541 - DNA, 19 bp, Homo sapiens
  siRNA target sequence for IPO8 (NM_006390.1,1638-1656).
cataatgagctcaatctaa

SEQ ID NO: 127542 - DNA, 19 bp, Homo sapiens
  siRNA target sequence for IPO8 (NM_006390.1,1653-1671).
ctaagaaatgccgttgaat

SEQ ID NO: 127543 - DNA, 19 bp, Homo sapiens
  siRNA target sequence for IPO8 (NM_006390.1,1665-1683).
gttgaattagcgaagaaga

SEQ ID NO: 127544 - DNA, 19 bp, Homo sapiens
  siRNA target sequence for IPO8 (NM_006390.1,1676-1694).
gaagaagagcctgattgaa

SEQ ID NO: 127545 - DNA, 19 bp, Homo sapiens
  siRNA target sequence for IPO8 (NM_006390.1,1757-1775).
gatacaagctaaggaatat

SEQ ID NO: 127546 - DNA, 19 bp, Homo sapiens
  siRNA target sequence for IPO8 (NM_006390.1,1782-1800).
ccacatgtgaggcctatta

SEQ ID NO: 127547 - DNA, 19 bp, Homo sapiens
  siRNA target sequence for IPO8 (NM_006390.1,1795-1813).
ctattatgcaggaactgtt

SEQ ID NO: 127548 - DNA, 19 bp, Homo sapiens
  siRNA target sequence for IPO8 (NM_006390.1,1805-1823).
ggaactgttgcacattgtt

SEQ ID NO: 127549 - DNA, 19 bp, Homo sapiens
  siRNA target sequence for IPO8 (NM_006390.1,1806-1824).
gaactgttgcacattgtta

SEQ ID NO: 127550 - DNA, 19 bp, Homo sapiens
  siRNA target sequence for IPO8 (NM_006390.1,1839-1857).
gatgatgttactaatgtca

SEQ ID NO: 127551 - DNA, 19 bp, Homo sapiens
  siRNA target sequence for IPO8 (NM_006390.1,1849-1867).
ctaatgtcatccagaagat

SEQ ID NO: 127552 - DNA, 19 bp, Homo sapiens
  siRNA target sequence for IPO8 (NM_006390.1,1931-1949).
gatatttggcaaagttctt

SEQ ID NO: 127553 - DNA, 19 bp, Homo sapiens
  siRNA target sequence for IPO8 (NM_006390.1,1992-2010).
gctatgggaattttacata

SEQ ID NO: 127554 - DNA, 19 bp, Homo sapiens
  siRNA target sequence for IPO8 (NM_006390.1,1997-2015).
gggaattttacataccatt

SEQ ID NO: 127555 - DNA, 19 bp, Homo sapiens
  siRNA target sequence for IPO8 (NM_006390.1,2007-2025).
cataccattgatactatct

SEQ ID NO: 127556 - DNA, 19 bp, Homo sapiens
  siRNA target sequence for IPO8 (NM_006390.1,2020-2038).
ctatcttaacagttgtaga

SEQ ID NO: 127557 - DNA, 19 bp, Homo sapiens
  siRNA target sequence for IPO8 (NM_006390.1,2029-2047).
cagttgtagaagatcataa

SEQ ID NO: 127558 - DNA, 19 bp, Homo sapiens
  siRNA target sequence for IPO8 (NM_006390.1,2075-2093).
ctgtctacggatcattgat

SEQ ID NO: 127559 - DNA, 19 bp, Homo sapiens
  siRNA target sequence for IPO8 (NM_006390.1,2077-2095).
gtctacggatcattgatct

SEQ ID NO: 127560 - DNA, 19 bp, Homo sapiens
  siRNA target sequence for IPO8 (NM_006390.1,2083-2101).
ggatcattgatcttgttct

SEQ ID NO: 127561 - DNA, 19 bp, Homo sapiens
  siRNA target sequence for IPO8 (NM_006390.1,2136-2154).
ctttccctggcatacagtt

SEQ ID NO: 127562 - DNA, 19 bp, Homo sapiens
  siRNA target sequence for IPO8 (NM_006390.1,2142-2160).
ctggcatacagtttaacct

SEQ ID NO: 127563 - DNA, 19 bp, Homo sapiens
  siRNA target sequence for IPO8 (NM_006390.1,2152-2170).
gtttaacctgccacagtat

SEQ ID NO: 127564 - DNA, 19 bp, Homo sapiens
  siRNA target sequence for IPO8 (NM_006390.1,2183-2201).
gtggcagcttctaggtata

SEQ ID NO: 127565 - DNA, 19 bp, Homo sapiens
  siRNA target sequence for IPO8 (NM_006390.1,2185-2203).
ggcagcttctaggtatact

SEQ ID NO: 127566 - DNA, 19 bp, Homo sapiens
  siRNA target sequence for IPO8 (NM_006390.1,2186-2204).
gcagcttctaggtatacta

SEQ ID NO: 127567 - DNA, 19 bp, Homo sapiens
  siRNA target sequence for IPO8 (NM_006390.1,2187-2205).
cagcttctaggtatactat

SEQ ID NO: 127568 - DNA, 19 bp, Homo sapiens
  siRNA target sequence for IPO8 (NM_006390.1,2189-2207).
gcttctaggtatactatat

SEQ ID NO: 127569 - DNA, 19 bp, Homo sapiens
  siRNA target sequence for IPO8 (NM_006390.1,2197-2215).
gtatactatatgaagtgtt

SEQ ID NO: 127570 - DNA, 19 bp, Homo sapiens
  siRNA target sequence for IPO8 (NM_006390.1,2275-2293).
caatagatacagatacctt

SEQ ID NO: 127571 - DNA, 19 bp, Homo sapiens
  siRNA target sequence for IPO8 (NM_006390.1,2280-2298).
gatacagataccttactat

SEQ ID NO: 127572 - DNA, 19 bp, Homo sapiens
  siRNA target sequence for IPO8 (NM_006390.1,2290-2308).
ccttactatcaaatgcaaa

SEQ ID NO: 127573 - DNA, 19 bp, Homo sapiens
  siRNA target sequence for IPO8 (NM_006390.1,2333-2351).
gtgtaggaaggtactatgt

SEQ ID NO: 127574 - DNA, 19 bp, Homo sapiens
  siRNA target sequence for IPO8 (NM_006390.1,2417-2435).
caaaggaaggggaattgat

SEQ ID NO: 127575 - DNA, 19 bp, Homo sapiens
  siRNA target sequence for IPO8 (NM_006390.1,2446-2464).
cactcttcgttcaacttgt

SEQ ID NO: 127576 - DNA, 19 bp, Homo sapiens
  siRNA target sequence for IPO8 (NM_006390.1,2494-2512).
ctagtgagcttcgtactat

SEQ ID NO: 127577 - DNA, 19 bp, Homo sapiens
  siRNA target sequence for IPO8 (NM_006390.1,2550-2568).
cctgatttgctgctacata

SEQ ID NO: 127578 - DNA, 19 bp, Homo sapiens
  siRNA target sequence for IPO8 (NM_006390.1,2602-2620).
gacctatcactgtacagtt

SEQ ID NO: 127579 - DNA, 19 bp, Homo sapiens
  siRNA target sequence for IPO8 (NM_006390.1,2604-2622).
cctatcactgtacagttta

SEQ ID NO: 127580 - DNA, 19 bp, Homo sapiens
  siRNA target sequence for IPO8 (NM_006390.1,2605-2623).
ctatcactgtacagtttat

SEQ ID NO: 127581 - DNA, 19 bp, Homo sapiens
  siRNA target sequence for IPO8 (NM_006390.1,2633-2651).
gatgaatgatacagattgt

SEQ ID NO: 127582 - DNA, 19 bp, Homo sapiens
  siRNA target sequence for IPO8 (NM_006390.1,2661-2679).
catcatgaccggaagatgt

SEQ ID NO: 127583 - DNA, 19 bp, Homo sapiens
  siRNA target sequence for IPO8 (NM_006390.1,2664-2682).
catgaccggaagatgtgta

SEQ ID NO: 127584 - DNA, 19 bp, Homo sapiens
  siRNA target sequence for IPO8 (NM_006390.1,2800-2818).
ctactagacaactggtaaa

SEQ ID NO: 127585 - DNA, 19 bp, Homo sapiens
  siRNA target sequence for IPO8 (NM_006390.1,2819-2837).
ccgggaagatcgttcaaaa

SEQ ID NO: 127586 - DNA, 19 bp, Homo sapiens
  siRNA target sequence for IPO8 (NM_006390.1,2839-2857).
cagagaaagctgatatgga

SEQ ID NO: 127587 - DNA, 19 bp, Homo sapiens
  siRNA target sequence for IPO8 (NM_006390.1,2991-3009).
gcgcttgaggggttcagta

SEQ ID NO: 127588 - DNA, 19 bp, Homo sapiens
  siRNA target sequence for IPO8 (NM_006390.1,3010-3028).
ctccacttgaccttgacaa

SEQ ID NO: 127589 - DNA, 19 bp, Homo sapiens
  siRNA target sequence for IPO8 (NM_006390.1,3012-3030).
ccacttgaccttgacaata

SEQ ID NO: 127590 - DNA, 19 bp, Homo sapiens
  siRNA target sequence for IPO8 (NM_006390.1,3055-3073).
cacaagctctgataactgt

SEQ ID NO: 127591 - DNA, 19 bp, Homo sapiens
  siRNA target sequence for IPO8 (NM_006390.1,3237-3255).
ggagtcctctccgcattta

SEQ ID NO: 127592 - DNA, 19 bp, Homo sapiens
  siRNA target sequence for IPO8 (NM_006390.1,3240-3258).
gtcctctccgcatttaatt

SEQ ID NO: 127593 - DNA, 19 bp, Homo sapiens
  siRNA target sequence for KPNB3 (NM_002271.3,301-319).
ccaggccagtcaaagatca

SEQ ID NO: 127594 - DNA, 19 bp, Homo sapiens
  siRNA target sequence for KPNB3 (NM_002271.3,304-322).
ggccagtcaaagatcacat

SEQ ID NO: 127595 - DNA, 19 bp, Homo sapiens
  siRNA target sequence for KPNB3 (NM_002271.3,327-345).
cttacaagccatcagaaat

SEQ ID NO: 127596 - DNA, 19 bp, Homo sapiens
  siRNA target sequence for KPNB3 (NM_002271.3,356-374).
ctgaagaggctagacaaat

SEQ ID NO: 127597 - DNA, 19 bp, Homo sapiens
  siRNA target sequence for KPNB3 (NM_002271.3,462-480).
gagtgagctactcatgatt

SEQ ID NO: 127598 - DNA, 19 bp, Homo sapiens
  siRNA target sequence for KPNB3 (NM_002271.3,684-702).
ccagcaacaacactattta

SEQ ID NO: 127599 - DNA, 19 bp, Homo sapiens
  siRNA target sequence for KPNB3 (NM_002271.3,708-726).
catcaaacgaatgttagtt

SEQ ID NO: 127600 - DNA, 19 bp, Homo sapiens
  siRNA target sequence for KPNB3 (NM_002271.3,716-734).
gaatgttagttcagtgtat

SEQ ID NO: 127601 - DNA, 19 bp, Homo sapiens
  siRNA target sequence for KPNB3 (NM_002271.3,751-769).
ccgtcgatcaggacgttat

SEQ ID NO: 127602 - DNA, 19 bp, Homo sapiens
  siRNA target sequence for KPNB3 (NM_002271.3,753-771).
gtcgatcaggacgttatct

SEQ ID NO: 127603 - DNA, 19 bp, Homo sapiens
  siRNA target sequence for KPNB3 (NM_002271.3,840-858).
cttgctaccgggattccta

SEQ ID NO: 127604 - DNA, 19 bp, Homo sapiens
  siRNA target sequence for KPNB3 (NM_002271.3,856-874).
ctacaggcggtaaatgact

SEQ ID NO: 127605 - DNA, 19 bp, Homo sapiens
  siRNA target sequence for KPNB3 (NM_002271.3,962-980).
caactctacagctaagtct

SEQ ID NO: 127606 - DNA, 19 bp, Homo sapiens
  siRNA target sequence for KPNB3 (NM_002271.3,998-1016).
ctagcctcaacaatatgca

SEQ ID NO: 127607 - DNA, 19 bp, Homo sapiens
  siRNA target sequence for KPNB3 (NM_002271.3,1060-1078).
gcagctgctatgttaagaa

SEQ ID NO: 127608 - DNA, 19 bp, Homo sapiens
  siRNA target sequence for KPNB3 (NM_002271.3,1076-1094).
gaaaacataccaatattgt

SEQ ID NO: 127609 - DNA, 19 bp, Homo sapiens
  siRNA target sequence for KPNB3 (NM_002271.3,1252-1270).
ctcgttctgccgatgatca

SEQ ID NO: 127610 - DNA, 19 bp, Homo sapiens
  siRNA target sequence for KPNB3 (NM_002271.3,1365-1383).
gcaaatggaaggaattcta

SEQ ID NO: 127611 - DNA, 19 bp, Homo sapiens
  siRNA target sequence for KPNB3 (NM_002271.3,1366-1384).
caaatggaaggaattctaa

SEQ ID NO: 127612 - DNA, 19 bp, Homo sapiens
  siRNA target sequence for KPNB3 (NM_002271.3,1392-1410).
cgtaaattttgttttactt

SEQ ID NO: 127613 - DNA, 19 bp, Homo sapiens
  siRNA target sequence for KPNB3 (NM_002271.3,1424-1442).
ctcatccaagagtaaggta

SEQ ID NO: 127614 - DNA, 19 bp, Homo sapiens
  siRNA target sequence for KPNB3 (NM_002271.3,1542-1560).
ggaagaccaaggcaatcaa

SEQ ID NO: 127615 - DNA, 19 bp, Homo sapiens
  siRNA target sequence for KPNB3 (NM_002271.3,1576-1594).
gcagctgctgccctcatta

SEQ ID NO: 127616 - DNA, 19 bp, Homo sapiens
  siRNA target sequence for KPNB3 (NM_002271.3,1579-1597).
gctgctgccctcattaact

SEQ ID NO: 127617 - DNA, 19 bp, Homo sapiens
  siRNA target sequence for KPNB3 (NM_002271.3,1586-1604).
ccctcattaactttactga

SEQ ID NO: 127618 - DNA, 19 bp, Homo sapiens
  siRNA target sequence for KPNB3 (NM_002271.3,1608-1626).
ctgtcccaagtcactactt

SEQ ID NO: 127619 - DNA, 19 bp, Homo sapiens
  siRNA target sequence for KPNB3 (NM_002271.3,1619-1637).
cactacttattccatactt

SEQ ID NO: 127620 - DNA, 19 bp, Homo sapiens
  siRNA target sequence for KPNB3 (NM_002271.3,1624-1642).
cttattccatacttggata

SEQ ID NO: 127621 - DNA, 19 bp, Homo sapiens
  siRNA target sequence for KPNB3 (NM_002271.3,1631-1649).
catacttggataatttggt

SEQ ID NO: 127622 - DNA, 19 bp, Homo sapiens
  siRNA target sequence for KPNB3 (NM_002271.3,1698-1716).
gaaaggcaccaagttagtt

SEQ ID NO: 127623 - DNA, 19 bp, Homo sapiens
  siRNA target sequence for KPNB3 (NM_002271.3,1703-1721).
gcaccaagttagttttgga

SEQ ID NO: 127624 - DNA, 19 bp, Homo sapiens
  siRNA target sequence for KPNB3 (NM_002271.3,1774-1792).
gtcccctactatgatttat

SEQ ID NO: 127625 - DNA, 19 bp, Homo sapiens
  siRNA target sequence for KPNB3 (NM_002271.3,1806-1824).
gaagcacatcgttgagaat

SEQ ID NO: 127626 - DNA, 19 bp, Homo sapiens
  siRNA target sequence for KPNB3 (NM_002271.3,1821-1839).
gaatgcggttcaaaaagaa

SEQ ID NO: 127627 - DNA, 19 bp, Homo sapiens
  siRNA target sequence for KPNB3 (NM_002271.3,1911-1929).
catgcaggatgcatcagat

SEQ ID NO: 127628 - DNA, 19 bp, Homo sapiens
  siRNA target sequence for KPNB3 (NM_002271.3,1950-1968).
gacccagacagacttcaat

SEQ ID NO: 127629 - DNA, 19 bp, Homo sapiens
  siRNA target sequence for KPNB3 (NM_002271.3,1954-1972).
cagacagacttcaatgata

SEQ ID NO: 127630 - DNA, 19 bp, Homo sapiens
  siRNA target sequence for KPNB3 (NM_002271.3,2065-2083).
gtggttatggggcctttaa

SEQ ID NO: 127631 - DNA, 19 bp, Homo sapiens
  siRNA target sequence for KPNB3 (NM_002271.3,2103-2121).
gcccgaagtagccctttta

SEQ ID NO: 127632 - DNA, 19 bp, Homo sapiens
  siRNA target sequence for KPNB3 (NM_002271.3,2106-2124).
cgaagtagcccttttagat

SEQ ID NO: 127633 - DNA, 19 bp, Homo sapiens
  siRNA target sequence for KPNB3 (NM_002271.3,2126-2144).
cccaagacatggagaatat

SEQ ID NO: 127634 - DNA, 19 bp, Homo sapiens
  siRNA target sequence for KPNB3 (NM_002271.3,2155-2173).
gatggttgggaatttgtga

SEQ ID NO: 127635 - DNA, 19 bp, Homo sapiens
  siRNA target sequence for KPNB3 (NM_002271.3,2614-2632).
caagaattacgacaagtta

SEQ ID NO: 127636 - DNA, 19 bp, Homo sapiens
  siRNA target sequence for KPNB3 (NM_002271.3,2617-2635).
gaattacgacaagttaaaa

SEQ ID NO: 127637 - DNA, 19 bp, Homo sapiens
  siRNA target sequence for KPNB3 (NM_002271.3,2661-2679).
ggtcgaagagtcactacaa

SEQ ID NO: 127638 - DNA, 19 bp, Homo sapiens
  siRNA target sequence for KPNB3 (NM_002271.3,2664-2682).
cgaagagtcactacaagat

SEQ ID NO: 127639 - DNA, 19 bp, Homo sapiens
  siRNA target sequence for KPNB3 (NM_002271.3,2874-2892).
ctgtagtccagcctcattt

SEQ ID NO: 127640 - DNA, 19 bp, Homo sapiens
  siRNA target sequence for KPNB3 (NM_002271.3,2898-2916).
cgcagaatatttcttaaga

SEQ ID NO: 127641 - DNA, 19 bp, Homo sapiens
  siRNA target sequence for KPNB3 (NM_002271.3,2990-3008).
cacagtacggtggagataa

SEQ ID NO: 127642 - DNA, 19 bp, Homo sapiens
  siRNA target sequence for KPNB3 (NM_002271.3,2992-3010).
cagtacggtggagataatt

SEQ ID NO: 127643 - DNA, 19 bp, Homo sapiens
  siRNA target sequence for KPNB3 (NM_002271.3,2994-3012).
gtacggtggagataattat

SEQ ID NO: 127644 - DNA, 19 bp, Homo sapiens
  siRNA target sequence for KPNB3 (NM_002271.3,3004-3022).
gataattatcgcccttttt

SEQ ID NO: 127645 - DNA, 19 bp, Homo sapiens
  siRNA target sequence for KPNB3 (NM_002271.3,3037-3055).
cccctgctggtaagagtta

SEQ ID NO: 127646 - DNA, 19 bp, Homo sapiens
  siRNA target sequence for KPNB3 (NM_002271.3,3038-3056).
ccctgctggtaagagttat

SEQ ID NO: 127647 - DNA, 19 bp, Homo sapiens
  siRNA target sequence for KPNB3 (NM_002271.3,3039-3057).
cctgctggtaagagttatt

SEQ ID NO: 127648 - DNA, 19 bp, Homo sapiens
  siRNA target sequence for KPNB3 (NM_002271.3,3058-3076).
cagtctgcggattctaaga

SEQ ID NO: 127649 - DNA, 19 bp, Homo sapiens
  siRNA target sequence for KPNB3 (NM_002271.3,3118-3136).
gtagggaaaatcatgaagt

SEQ ID NO: 127650 - DNA, 19 bp, Homo sapiens
  siRNA target sequence for KPNB3 (NM_002271.3,3141-3159).
gcctgactgtgtaaacgtt

SEQ ID NO: 127651 - DNA, 19 bp, Homo sapiens
  siRNA target sequence for KPNB3 (NM_002271.3,3183-3201).
gtcttggcttccactacat

SEQ ID NO: 127652 - DNA, 19 bp, Homo sapiens
  siRNA target sequence for KPNB3 (NM_002271.3,3217-3235).
gctgttcagactttcaatt

SEQ ID NO: 127653 - DNA, 19 bp, Homo sapiens
  siRNA target sequence for KPNB3 (NM_002271.3,3223-3241).
cagactttcaattatctgt

SEQ ID NO: 127654 - DNA, 19 bp, Homo sapiens
  siRNA target sequence for KPNB3 (NM_002271.3,3257-3275).
gtaatcatccaattgttct

SEQ ID NO: 127655 - DNA, 19 bp, Homo sapiens
  siRNA target sequence for KPNB3 (NM_002271.3,3274-3292).
cttggcccaaacaatacca

SEQ ID NO: 127656 - DNA, 19 bp, Homo sapiens
  siRNA target sequence for KPNB3 (NM_002271.3,3328-3346).
gaaatgcacgaggcaatta

SEQ ID NO: 127657 - DNA, 19 bp, Homo sapiens
  siRNA target sequence for RANBP2 (NM_006267.3,2826-2844).
cccagtctatggcatgaat

SEQ ID NO: 127658 - DNA, 19 bp, Homo sapiens
  siRNA target sequence for RANBP2 (NM_006267.3,2909-2927).
gctcatctgcttgtatgtt

SEQ ID NO: 127659 - DNA, 19 bp, Homo sapiens
  siRNA target sequence for RANBP2 (NM_006267.3,2948-2966).
ctcctgcattgcgttttga

SEQ ID NO: 127660 - DNA, 19 bp, Homo sapiens
  siRNA target sequence for RANBP2 (NM_006267.3,2969-2987).
ctcctgcaacgggaattct

SEQ ID NO: 127661 - DNA, 19 bp, Homo sapiens
  siRNA target sequence for RANBP2 (NM_006267.3,2990-3008).
cgcccaggggtgatgatta

SEQ ID NO: 127662 - DNA, 19 bp, Homo sapiens
  siRNA target sequence for RANBP2 (NM_006267.3,2996-3014).
ggggtgatgattactttaa

SEQ ID NO: 127663 - DNA, 19 bp, Homo sapiens
  siRNA target sequence for RANBP2 (NM_006267.3,2997-3015).
gggtgatgattactttaat

SEQ ID NO: 127664 - DNA, 19 bp, Homo sapiens
  siRNA target sequence for RANBP2 (NM_006267.3,3052-3070).
ccagaaccaggatatttca

SEQ ID NO: 127665 - DNA, 19 bp, Homo sapiens
  siRNA target sequence for RANBP2 (NM_006267.3,3055-3073).
gaaccaggatatttcacaa

SEQ ID NO: 127666 - DNA, 19 bp, Homo sapiens
  siRNA target sequence for RANBP2 (NM_006267.3,3085-3103).
gcagctcatgcttcaagat

SEQ ID NO: 127667 - DNA, 19 bp, Homo sapiens
  siRNA target sequence for RANBP2 (NM_006267.3,3152-3170).
ccatgccgggtgaaggatt

SEQ ID NO: 127668 - DNA, 19 bp, Homo sapiens
  siRNA target sequence for RANBP2 (NM_006267.3,3153-3171).
catgccgggtgaaggatta

SEQ ID NO: 127669 - DNA, 19 bp, Homo sapiens
  siRNA target sequence for RANBP2 (NM_006267.3,3354-3372).
gcaaggagatggctatagt

SEQ ID NO: 127670 - DNA, 19 bp, Homo sapiens
  siRNA target sequence for RANBP2 (NM_006267.3,3472-3490).
gggtcgagtcagcaaaaga

SEQ ID NO: 127671 - DNA, 19 bp, Homo sapiens
  siRNA target sequence for RANBP2 (NM_006267.3,3473-3491).
ggtcgagtcagcaaaagaa

SEQ ID NO: 127672 - DNA, 19 bp, Homo sapiens
  siRNA target sequence for RANBP2 (NM_006267.3,3502-3520).
cggcgaagtgatgatatgt

SEQ ID NO: 127673 - DNA, 19 bp, Homo sapiens
  siRNA target sequence for RANBP2 (NM_006267.3,3503-3521).
ggcgaagtgatgatatgtt

SEQ ID NO: 127674 - DNA, 19 bp, Homo sapiens
  siRNA target sequence for RANBP2 (NM_006267.3,3504-3522).
gcgaagtgatgatatgttt

SEQ ID NO: 127675 - DNA, 19 bp, Homo sapiens
  siRNA target sequence for RANBP2 (NM_006267.3,3532-3550).
ggtccagggaaatcagtat

SEQ ID NO: 127676 - DNA, 19 bp, Homo sapiens
  siRNA target sequence for RANBP2 (NM_006267.3,3553-3571).
ggaacacccactttagaga

SEQ ID NO: 127677 - DNA, 19 bp, Homo sapiens
  siRNA target sequence for RANBP2 (NM_006267.3,3652-3670).
gtacctcttcctgataaga

SEQ ID NO: 127678 - DNA, 19 bp, Homo sapiens
  siRNA target sequence for RANBP2 (NM_006267.3,3734-3752).
gtttcgatgtagaatccaa

SEQ ID NO: 127679 - DNA, 19 bp, Homo sapiens
  siRNA target sequence for RANBP2 (NM_006267.3,3766-3784).
cgtgggattggcaatgtaa

SEQ ID NO: 127680 - DNA, 19 bp, Homo sapiens
  siRNA target sequence for RANBP2 (NM_006267.3,3808-3826).
ggtaaaattcgccttctaa

SEQ ID NO: 127681 - DNA, 19 bp, Homo sapiens
  siRNA target sequence for RANBP2 (NM_006267.3,3830-3848).
gacgagagcaagtattgaa

SEQ ID NO: 127682 - DNA, 19 bp, Homo sapiens
  siRNA target sequence for RANBP2 (NM_006267.3,3867-3885).
catcagtccagatatgaaa

SEQ ID NO: 127683 - DNA, 19 bp, Homo sapiens
  siRNA target sequence for RANBP2 (NM_006267.3,3882-3900).
gaaattgacaccaaatgct

SEQ ID NO: 127684 - DNA, 19 bp, Homo sapiens
  siRNA target sequence for RANBP2 (NM_006267.3,3958-3976).
ccagaacaacttgctatta

SEQ ID NO: 127685 - DNA, 19 bp, Homo sapiens
  siRNA target sequence for RANBP2 (NM_006267.3,3961-3979).
gaacaacttgctattaggt

SEQ ID NO: 127686 - DNA, 19 bp, Homo sapiens
  siRNA target sequence for RANBP2 (NM_006267.3,3967-3985).
cttgctattaggttcaaaa

SEQ ID NO: 127687 - DNA, 19 bp, Homo sapiens
  siRNA target sequence for RANBP2 (NM_006267.3,4102-4120).
cccacaagtcatgataaca

SEQ ID NO: 127688 - DNA, 19 bp, Homo sapiens
  siRNA target sequence for RANBP2 (NM_006267.3,4103-4121).
ccacaagtcatgataacaa

SEQ ID NO: 127689 - DNA, 19 bp, Homo sapiens
  siRNA target sequence for RANBP2 (NM_006267.3,4184-4202).
ggtcttggtggcattgtaa

SEQ ID NO: 127690 - DNA, 19 bp, Homo sapiens
  siRNA target sequence for RANBP2 (NM_006267.3,4278-4296).
gctcgttggcccaccatta

SEQ ID NO: 127691 - DNA, 19 bp, Homo sapiens
  siRNA target sequence for RANBP2 (NM_006267.3,4281-4299).
cgttggcccaccattagct

SEQ ID NO: 127692 - DNA, 19 bp, Homo sapiens
  siRNA target sequence for RANBP2 (NM_006267.3,4287-4305).
cccaccattagctgaaact

SEQ ID NO: 127693 - DNA, 19 bp, Homo sapiens
  siRNA target sequence for RANBP2 (NM_006267.3,4289-4307).
caccattagctgaaactgt

SEQ ID NO: 127694 - DNA, 19 bp, Homo sapiens
  siRNA target sequence for RANBP2 (NM_006267.3,4332-4350).
gaatgttcaagatcgattt

SEQ ID NO: 127695 - DNA, 19 bp, Homo sapiens
  siRNA target sequence for RANBP2 (NM_006267.3,4376-4394).
gtcactgggattgtagtat

SEQ ID NO: 127696 - DNA, 19 bp, Homo sapiens
  siRNA target sequence for RANBP2 (NM_006267.3,4380-4398).
ctgggattgtagtatttgt

SEQ ID NO: 127697 - DNA, 19 bp, Homo sapiens
  siRNA target sequence for RANBP2 (NM_006267.3,4431-4449).
cattgcgtgtcagaataca

SEQ ID NO: 127698 - DNA, 19 bp, Homo sapiens
  siRNA target sequence for RANBP2 (NM_006267.3,4435-4453).
gcgtgtcagaatacaaaat

SEQ ID NO: 127699 - DNA, 19 bp, Homo sapiens
  siRNA target sequence for RANBP2 (NM_006267.3,4480-4498).
gttcatcaagcttcattta

SEQ ID NO: 127700 - DNA, 19 bp, Homo sapiens
  siRNA target sequence for RANBP2 (NM_006267.3,4505-4523).
gccagggagatcttcctaa

SEQ ID NO: 127701 - DNA, 19 bp, Homo sapiens
  siRNA target sequence for RANBP2 (NM_006267.3,4506-4524).
ccagggagatcttcctaaa

SEQ ID NO: 127702 - DNA, 19 bp, Homo sapiens
  siRNA target sequence for RANBP2 (NM_006267.3,4509-4527).
gggagatcttcctaaacct

SEQ ID NO: 127703 - DNA, 19 bp, Homo sapiens
  siRNA target sequence for RANBP2 (NM_006267.3,4510-4528).
ggagatcttcctaaaccta

SEQ ID NO: 127704 - DNA, 19 bp, Homo sapiens
  siRNA target sequence for RANBP2 (NM_006267.3,4513-4531).
gatcttcctaaacctatta

SEQ ID NO: 127705 - DNA, 19 bp, Homo sapiens
  siRNA target sequence for RANBP2 (NM_006267.3,4516-4534).
cttcctaaacctattaaca

SEQ ID NO: 127706 - DNA, 19 bp, Homo sapiens
  siRNA target sequence for RANBP2 (NM_006267.3,4707-4725).
gacaagtaaaactctaaaa

SEQ ID NO: 127707 - DNA, 19 bp, Homo sapiens
  siRNA target sequence for RANBP2 (NM_006267.3,4778-4796).
catgcttagtgcgaaatga

SEQ ID NO: 127708 - DNA, 19 bp, Homo sapiens
  siRNA target sequence for RANBP2 (NM_006267.3,4789-4807).
cgaaatgaagcaaatgcta

SEQ ID NO: 127709 - DNA, 19 bp, Homo sapiens
  siRNA target sequence for RANBP2 (NM_006267.3,4795-4813).
gaagcaaatgctacaagat

SEQ ID NO: 127710 - DNA, 19 bp, Homo sapiens
  siRNA target sequence for RANBP2 (NM_006267.3,4825-4843).
cagaatccggataaaccaa

SEQ ID NO: 127711 - DNA, 19 bp, Homo sapiens
  siRNA target sequence for RANBP2 (NM_006267.3,5363-5381).
cttgtcagtgtccaagtaa

SEQ ID NO: 127712 - DNA, 19 bp, Homo sapiens
  siRNA target sequence for RANBP2 (NM_006267.3,5389-5407).
caaacaactgcaatttcaa

SEQ ID NO: 127713 - DNA, 19 bp, Homo sapiens
  siRNA target sequence for RANBP2 (NM_006267.3,5532-5550).
ggcttgtgatgcctctaaa

SEQ ID NO: 127714 - DNA, 19 bp, Homo sapiens
  siRNA target sequence for RANBP2 (NM_006267.3,5542-5560).
gcctctaaaccaactcata

SEQ ID NO: 127715 - DNA, 19 bp, Homo sapiens
  siRNA target sequence for RANBP2 (NM_006267.3,5544-5562).
ctctaaaccaactcataaa

SEQ ID NO: 127716 - DNA, 19 bp, Homo sapiens
  siRNA target sequence for RANBP2 (NM_006267.3,5637-5655).
gggaacaggatttaaaagt

SEQ ID NO: 127717 - DNA, 19 bp, Homo sapiens
  siRNA target sequence for RANBP2 (NM_006267.3,5675-5693).
ctaagtttggcaatacaga

SEQ ID NO: 127718 - DNA, 19 bp, Homo sapiens
  siRNA target sequence for RANBP2 (NM_006267.3,5712-5730).
gcatgtggatcaagaaaat

SEQ ID NO: 127719 - DNA, 19 bp, Homo sapiens
  siRNA target sequence for RANBP2 (NM_006267.3,5713-5731).
catgtggatcaagaaaatt

SEQ ID NO: 127720 - DNA, 19 bp, Homo sapiens
  siRNA target sequence for RANBP2 (NM_006267.3,5745-5763).
gtttcagggttcttctaat

SEQ ID NO: 127721 - DNA, 19 bp, Homo sapiens
  siRNA target sequence for RANBP2 (NM_006267.3,8106-8124).
caagaatagaccagattat

SEQ ID NO: 127722 - DNA, 19 bp, Homo sapiens
  siRNA target sequence for RANBP2 (NM_006267.3,8114-8132).
gaccagattatgttagtga

SEQ ID NO: 127723 - DNA, 19 bp, Homo sapiens
  siRNA target sequence for RANBP2 (NM_006267.3,8167-8185).
gtcaagaaacttaatggaa

SEQ ID NO: 127724 - DNA, 19 bp, Homo sapiens
  siRNA target sequence for RANBP2 (NM_006267.3,8213-8231).
gtagacccttggaagaaaa

SEQ ID NO: 127725 - DNA, 19 bp, Homo sapiens
  siRNA target sequence for RANBP2 (NM_006267.3,8339-8357).
gagtctgtagtgatactga

SEQ ID NO: 127726 - DNA, 19 bp, Homo sapiens
  siRNA target sequence for RANBP2 (NM_006267.3,8479-8497).
gtgatggtaccttctttct

SEQ ID NO: 127727 - DNA, 19 bp, Homo sapiens
  siRNA target sequence for RANBP2 (NM_006267.3,8515-8533).
gattctattaccaaatcca

SEQ ID NO: 127728 - DNA, 19 bp, Homo sapiens
  siRNA target sequence for RANBP2 (NM_006267.3,8575-8593).
gtagatttgtcaactagaa

SEQ ID NO: 127729 - DNA, 19 bp, Homo sapiens
  siRNA target sequence for RANBP2 (NM_006267.3,8623-8641).
ggggaaagcaagatagttt

SEQ ID NO: 127730 - DNA, 19 bp, Homo sapiens
  siRNA target sequence for RANBP2 (NM_006267.3,8787-8805).
ccagtcagccggtaaagtt

SEQ ID NO: 127731 - DNA, 19 bp, Homo sapiens
  siRNA target sequence for RANBP2 (NM_006267.3,8836-8854).
gtagttcataatgaagata

SEQ ID NO: 127732 - DNA, 19 bp, Homo sapiens
  siRNA target sequence for RANBP2 (NM_006267.3,8857-8875).
cattttgaaccaatagtgt

SEQ ID NO: 127733 - DNA, 19 bp, Homo sapiens
  siRNA target sequence for RANBP2 (NM_006267.3,8878-8896).
ctaccagaggtagaagtaa

SEQ ID NO: 127734 - DNA, 19 bp, Homo sapiens
  siRNA target sequence for RANBP2 (NM_006267.3,8982-9000).
gcgcggtgttggagatata

SEQ ID NO: 127735 - DNA, 19 bp, Homo sapiens
  siRNA target sequence for RANBP2 (NM_006267.3,8983-9001).
cgcggtgttggagatataa

SEQ ID NO: 127736 - DNA, 19 bp, Homo sapiens
  siRNA target sequence for RANBP2 (NM_006267.3,8984-9002).
gcggtgttggagatataaa

SEQ ID NO: 127737 - DNA, 19 bp, Homo sapiens
  siRNA target sequence for RANBP2 (NM_006267.3,9069-9087).
gtgtgcaaaccacgttatt

SEQ ID NO: 127738 - DNA, 19 bp, Homo sapiens
  siRNA target sequence for RANBP2 (NM_006267.3,9073-9091).
gcaaaccacgttattacta

SEQ ID NO: 127739 - DNA, 19 bp, Homo sapiens
  siRNA target sequence for RANBP2 (NM_006267.3,9074-9092).
caaaccacgttattactaa

SEQ ID NO: 127740 - DNA, 19 bp, Homo sapiens
  siRNA target sequence for RANBP2 (NM_006267.3,9078-9096).
ccacgttattactaaaaca

SEQ ID NO: 127741 - DNA, 19 bp, Homo sapiens
  siRNA target sequence for RANBP2 (NM_006267.3,9136-9154).
gtttggactgcctcagatt

SEQ ID NO: 127742 - DNA, 19 bp, Homo sapiens
  siRNA target sequence for RANBP2 (NM_006267.3,9141-9159).
gactgcctcagattatgct

SEQ ID NO: 127743 - DNA, 19 bp, Homo sapiens
  siRNA target sequence for RANBP2 (NM_006267.3,9181-9199).
cagcttgcagtgagattta

SEQ ID NO: 127744 - DNA, 19 bp, Homo sapiens
  siRNA target sequence for RANBP2 (NM_006267.3,9267-9285).
ccagaaaggacatgtatca

SEQ ID NO: 127745 - DNA, 19 bp, Homo sapiens
  siRNA target sequence for RANBP2 (NM_006267.3,9352-9370).
cctctagggcggataacta

SEQ ID NO: 127746 - DNA, 19 bp, Homo sapiens
  siRNA target sequence for RANBP2 (NM_006267.3,9353-9371).
ctctagggcggataactat

SEQ ID NO: 127747 - DNA, 19 bp, Homo sapiens
  siRNA target sequence for RANBP2 (NM_006267.3,9358-9376).
gggcggataactatggaat

SEQ ID NO: 127748 - DNA, 19 bp, Homo sapiens
  siRNA target sequence for RANBP2 (NM_006267.3,9359-9377).
ggcggataactatggaatt

SEQ ID NO: 127749 - DNA, 19 bp, Homo sapiens
  siRNA target sequence for RANBP2 (NM_006267.3,9528-9546).
cggacagtccatttatgga

SEQ ID NO: 127750 - DNA, 19 bp, Homo sapiens
  siRNA target sequence for RANBP2 (NM_006267.3,9587-9605).
gtcctggtttactatccat

SEQ ID NO: 127751 - DNA, 19 bp, Homo sapiens
  siRNA target sequence for RANBP2 (NM_006267.3,9635-9653).
ctcaatttgttataacact

SEQ ID NO: 127752 - DNA, 19 bp, Homo sapiens
  siRNA target sequence for RANBP2 (NM_006267.3,9672-9690).
ggactttaagcatgtagta

SEQ ID NO: 127753 - DNA, 19 bp, Homo sapiens
  siRNA target sequence for RANBP2 (NM_006267.3,9673-9691).
gactttaagcatgtagtat

SEQ ID NO: 127754 - DNA, 19 bp, Homo sapiens
  siRNA target sequence for RANBP2 (NM_006267.3,9685-9703).
gtagtatttgggtttgtta

SEQ ID NO: 127755 - DNA, 19 bp, Homo sapiens
  siRNA target sequence for RANBP2 (NM_006267.3,9700-9718).
gttaaggatggcatggata

SEQ ID NO: 127756 - DNA, 19 bp, Homo sapiens
  siRNA target sequence for RANBP2 (NM_006267.3,9755-9773).
ggtctgtttgtcgaagaat

SEQ ID NO: 127757 - DNA, 19 bp, Homo sapiens
  siRNA target sequence for RANBP2 (NM_006267.3,9756-9774).
gtctgtttgtcgaagaata

SEQ ID NO: 127758 - DNA, 19 bp, Homo sapiens
  siRNA target sequence for RANBP2 (NM_006267.3,9760-9778).
gtttgtcgaagaataacta

SEQ ID NO: 127759 - DNA, 19 bp, Homo sapiens
  siRNA target sequence for RANBP3 (NM_003624.1,27-45).
gacctggcgaacgaagaaa

SEQ ID NO: 127760 - DNA, 19 bp, Homo sapiens
  siRNA target sequence for RANBP3 (NM_003624.1,324-342).
cctgaaggcggagaagatt

SEQ ID NO: 127761 - DNA, 19 bp, Homo sapiens
  siRNA target sequence for RANBP3 (NM_003624.1,372-390).
cctgtcaagcgagaaagaa

SEQ ID NO: 127762 - DNA, 19 bp, Homo sapiens
  siRNA target sequence for RANBP3 (NM_003624.1,688-706).
ctgccgatgaggagaaaga

SEQ ID NO: 127763 - DNA, 19 bp, Homo sapiens
  siRNA target sequence for RANBP3 (NM_003624.1,881-899).
gccaaccgcaacgaactat

SEQ ID NO: 127764 - DNA, 19 bp, Homo sapiens
  siRNA target sequence for RANBP3 (NM_003624.1,882-900).
ccaaccgcaacgaactatt

SEQ ID NO: 127765 - DNA, 19 bp, Homo sapiens
  siRNA target sequence for RANBP3 (NM_003624.1,886-904).
ccgcaacgaactatttcct

SEQ ID NO: 127766 - DNA, 19 bp, Homo sapiens
  siRNA target sequence for RANBP3 (NM_003624.1,908-926).
gtatatcagttccagttta

SEQ ID NO: 127767 - DNA, 19 bp, Homo sapiens
  siRNA target sequence for RANBP3 (NM_003624.1,948-966).
gacgcctccagcaacaaat

SEQ ID NO: 127768 - DNA, 19 bp, Homo sapiens
  siRNA target sequence for RANBP3 (NM_003624.1,952-970).
cctccagcaacaaatttgt

SEQ ID NO: 127769 - DNA, 19 bp, Homo sapiens
  siRNA target sequence for RANBP3 (NM_003624.1,953-971).
ctccagcaacaaatttgta

SEQ ID NO: 127770 - DNA, 19 bp, Homo sapiens
  siRNA target sequence for RANBP3 (NM_003624.1,1085-1103).
ggaggccacccctgagaaa

SEQ ID NO: 127771 - DNA, 19 bp, Homo sapiens
  siRNA target sequence for RANBP3 (NM_003624.1,1140-1158).
gcaacagcgcggaagtgtt

SEQ ID NO: 127772 - DNA, 19 bp, Homo sapiens
  siRNA target sequence for RANBP3 (NM_003624.1,1149-1167).
cggaagtgtttgttggaaa

SEQ ID NO: 127773 - DNA, 19 bp, Homo sapiens
  siRNA target sequence for RANBP3 (NM_003624.1,1191-1209).
gaggcggagagcaatgtgt

SEQ ID NO: 127774 - DNA, 19 bp, Homo sapiens
  siRNA target sequence for RANBP3 (NM_003624.1,1193-1211).
ggcggagagcaatgtgtta

SEQ ID NO: 127775 - DNA, 19 bp, Homo sapiens
  siRNA target sequence for RANBP3 (NM_003624.1,1195-1213).
cggagagcaatgtgttaca

SEQ ID NO: 127776 - DNA, 19 bp, Homo sapiens
  siRNA target sequence for RANBP3 (NM_003624.1,1197-1215).
gagagcaatgtgttacaga

SEQ ID NO: 127777 - DNA, 19 bp, Homo sapiens
  siRNA target sequence for RANBP3 (NM_003624.1,1276-1294).
ggctgctcagactcaatga

SEQ ID NO: 127778 - DNA, 19 bp, Homo sapiens
  siRNA target sequence for RANBP3 (NM_003624.1,1490-1508).
ggacacaggtcagttgtat

SEQ ID NO: 127779 - DNA, 19 bp, Homo sapiens
  siRNA target sequence for SNPH (NM_014723.2,1101-1119).
gccagcaacacctatgaga

SEQ ID NO: 127780 - DNA, 19 bp, Homo sapiens
  siRNA target sequence for PLDN (NM_012388.2,294-312).
ggagccgacgcctggttta

SEQ ID NO: 127781 - DNA, 19 bp, Homo sapiens
  siRNA target sequence for PLDN (NM_012388.2,295-313).
gagccgacgcctggtttaa

SEQ ID NO: 127782 - DNA, 19 bp, Homo sapiens
  siRNA target sequence for PLDN (NM_012388.2,297-315).
gccgacgcctggtttaagt

SEQ ID NO: 127783 - DNA, 19 bp, Homo sapiens
  siRNA target sequence for PLDN (NM_012388.2,299-317).
cgacgcctggtttaagtga

SEQ ID NO: 127784 - DNA, 19 bp, Homo sapiens
  siRNA target sequence for PLDN (NM_012388.2,323-341).
ctccagatgaagggttaat

SEQ ID NO: 127785 - DNA, 19 bp, Homo sapiens
  siRNA target sequence for PLDN (NM_012388.2,348-366).
cttgactatagaagacaaa

SEQ ID NO: 127786 - DNA, 19 bp, Homo sapiens
  siRNA target sequence for PLDN (NM_012388.2,449-467).
cacagaaccaagttgtatt

SEQ ID NO: 127787 - DNA, 19 bp, Homo sapiens
  siRNA target sequence for PLDN (NM_012388.2,451-469).
cagaaccaagttgtattgt

SEQ ID NO: 127788 - DNA, 19 bp, Homo sapiens
  siRNA target sequence for PLDN (NM_012388.2,457-475).
caagttgtattgttagaca

SEQ ID NO: 127789 - DNA, 19 bp, Homo sapiens
  siRNA target sequence for PLDN (NM_012388.2,509-527).
gtcattctatgttggatat

SEQ ID NO: 127790 - DNA, 19 bp, Homo sapiens
  siRNA target sequence for PLDN (NM_012388.2,542-560).
ctgaggctaaacactatca

SEQ ID NO: 127791 - DNA, 19 bp, Homo sapiens
  siRNA target sequence for PLDN (NM_012388.2,559-577).
catgccaagttggtgaata

SEQ ID NO: 127792 - DNA, 19 bp, Homo sapiens
  siRNA target sequence for PLDN (NM_012388.2,591-609).
gctgatgcttcatgaaaaa

SEQ ID NO: 127793 - DNA, 19 bp, Homo sapiens
  siRNA target sequence for PLDN (NM_012388.2,598-616).
cttcatgaaaaaacatcaa

SEQ ID NO: 127794 - DNA, 19 bp, Homo sapiens
  siRNA target sequence for STXBP2 (NM_006949.1,47-65).
cggtggtgggggaaaaaat

SEQ ID NO: 127795 - DNA, 19 bp, Homo sapiens
  siRNA target sequence for STXBP2 (NM_006949.1,272-290).
cggttcaggccctgatcaa

SEQ ID NO: 127796 - DNA, 19 bp, Homo sapiens
  siRNA target sequence for STXBP2 (NM_006949.1,298-316).
caggggaccccgactttca

SEQ ID NO: 127797 - DNA, 19 bp, Homo sapiens
  siRNA target sequence for STXBP2 (NM_006949.1,306-324).
cccgactttcacctacaaa

SEQ ID NO: 127798 - DNA, 19 bp, Homo sapiens
  siRNA target sequence for STXBP2 (NM_006949.1,703-721).
cgctcccagctgctgataa

SEQ ID NO: 127799 - DNA, 19 bp, Homo sapiens
  siRNA target sequence for STXBP2 (NM_006949.1,771-789).
ccaggccatggcgtatgat

SEQ ID NO: 127800 - DNA, 19 bp, Homo sapiens
  siRNA target sequence for STXBP2 (NM_006949.1,892-910).
gagcttcgccacatgcata

SEQ ID NO: 127801 - DNA, 19 bp, Homo sapiens
  siRNA target sequence for STXBP2 (NM_006949.1,977-995).
cggacaaggcgaacatcaa

SEQ ID NO: 127802 - DNA, 19 bp, Homo sapiens
  siRNA target sequence for STXBP2 (NM_006949.1,978-996).
ggacaaggcgaacatcaaa

SEQ ID NO: 127803 - DNA, 19 bp, Homo sapiens
  siRNA target sequence for STXBP2 (NM_006949.1,1035-1053).
gaaggagctgaataagtat

SEQ ID NO: 127804 - DNA, 19 bp, Homo sapiens
  siRNA target sequence for STXBP2 (NM_006949.1,1038-1056).
ggagctgaataagtattct

SEQ ID NO: 127805 - DNA, 19 bp, Homo sapiens
  siRNA target sequence for STXBP2 (NM_006949.1,1062-1080).
cctgcatctagcagatgat

SEQ ID NO: 127806 - DNA, 19 bp, Homo sapiens
  siRNA target sequence for STXBP2 (NM_006949.1,1063-1081).
ctgcatctagcagatgatt

SEQ ID NO: 127807 - DNA, 19 bp, Homo sapiens
  siRNA target sequence for STXBP2 (NM_006949.1,1069-1087).
ctagcagatgattgtatga

SEQ ID NO: 127808 - DNA, 19 bp, Homo sapiens
  siRNA target sequence for STXBP2 (NM_006949.1,1299-1317).
gatccagcatgccaatgta

SEQ ID NO: 127809 - DNA, 19 bp, Homo sapiens
  siRNA target sequence for STXBP2 (NM_006949.1,1445-1463).
gctggaccccggtcatcaa

SEQ ID NO: 127810 - DNA, 19 bp, Homo sapiens
  siRNA target sequence for STXBP2 (NM_006949.1,1453-1471).
ccggtcatcaaggatgtaa

SEQ ID NO: 127811 - DNA, 19 bp, Homo sapiens
  siRNA target sequence for STXBP2 (NM_006949.1,1622-1640).
ggctcatcgtgtatgtcat

SEQ ID NO: 127812 - DNA, 19 bp, Homo sapiens
  siRNA target sequence for SNAPAP (NM_012437.3,180-198).
ctccgggaacaaattgaca

SEQ ID NO: 127813 - DNA, 19 bp, Homo sapiens
  siRNA target sequence for SNAPAP (NM_012437.3,248-266).
ggatcttgacccctatgtt

SEQ ID NO: 127814 - DNA, 19 bp, Homo sapiens
  siRNA target sequence for SNAPAP (NM_012437.3,249-267).
gatcttgacccctatgtta

SEQ ID NO: 127815 - DNA, 19 bp, Homo sapiens
  siRNA target sequence for SNAPAP (NM_012437.3,252-270).
cttgacccctatgttaaga

SEQ ID NO: 127816 - DNA, 19 bp, Homo sapiens
  siRNA target sequence for SNAPAP (NM_012437.3,288-306).
cgacgcgttgtcttggtta

SEQ ID NO: 127817 - DNA, 19 bp, Homo sapiens
  siRNA target sequence for SNAPAP (NM_012437.3,289-307).
gacgcgttgtcttggttaa

SEQ ID NO: 127818 - DNA, 19 bp, Homo sapiens
  siRNA target sequence for SNAPAP (NM_012437.3,334-352).
gactgagacggctaaacca

SEQ ID NO: 127819 - DNA, 19 bp, Homo sapiens
  siRNA target sequence for NARF (NM_012336.2,121-139).
cactgcacgcgcaaggaat

SEQ ID NO: 127820 - DNA, 19 bp, Homo sapiens
  siRNA target sequence for NARF (NM_012336.2,126-144).
cacgcgcaaggaatgtagt

SEQ ID NO: 127821 - DNA, 19 bp, Homo sapiens
  siRNA target sequence for NARF (NM_012336.2,128-146).
cgcgcaaggaatgtagtaa

SEQ ID NO: 127822 - DNA, 19 bp, Homo sapiens
  siRNA target sequence for NARF (NM_012336.2,130-148).
cgcaaggaatgtagtaaga

SEQ ID NO: 127823 - DNA, 19 bp, Homo sapiens
  siRNA target sequence for NARF (NM_012336.2,234-252).
gttggctgatgccaagata

SEQ ID NO: 127824 - DNA, 19 bp, Homo sapiens
  siRNA target sequence for NARF (NM_012336.2,306-324).
ccaactttcccagcaaaat

SEQ ID NO: 127825 - DNA, 19 bp, Homo sapiens
  siRNA target sequence for NARF (NM_012336.2,340-358).
cgcgttctgaaccttaaca

SEQ ID NO: 127826 - DNA, 19 bp, Homo sapiens
  siRNA target sequence for NARF (NM_012336.2,341-359).
gcgttctgaaccttaacaa

SEQ ID NO: 127827 - DNA, 19 bp, Homo sapiens
  siRNA target sequence for NARF (NM_012336.2,406-424).
cctcaatctttgccttatt

SEQ ID NO: 127828 - DNA, 19 bp, Homo sapiens
  siRNA target sequence for NARF (NM_012336.2,490-508).
cttggggtgcactatgtat

SEQ ID NO: 127829 - DNA, 19 bp, Homo sapiens
  siRNA target sequence for NARF (NM_012336.2,494-512).
gggtgcactatgtatttga

SEQ ID NO: 127830 - DNA, 19 bp, Homo sapiens
  siRNA target sequence for NARF (NM_012336.2,495-513).
ggtgcactatgtatttgat

SEQ ID NO: 127831 - DNA, 19 bp, Homo sapiens
  siRNA target sequence for NARF (NM_012336.2,516-534).
gacgatagctgcggatttt

SEQ ID NO: 127832 - DNA, 19 bp, Homo sapiens
  siRNA target sequence for NARF (NM_012336.2,519-537).
gatagctgcggattttagt

SEQ ID NO: 127833 - DNA, 19 bp, Homo sapiens
  siRNA target sequence for NARF (NM_012336.2,714-732).
ctctttggtgaaggattat

SEQ ID NO: 127834 - DNA, 19 bp, Homo sapiens
  siRNA target sequence for NARF (NM_012336.2,785-803).
ccccttgttatgacaagaa

SEQ ID NO: 127835 - DNA, 19 bp, Homo sapiens
  siRNA target sequence for NARF (NM_012336.2,855-873).
cgctgactgcgtgttaaca

SEQ ID NO: 127836 - DNA, 19 bp, Homo sapiens
  siRNA target sequence for NARF (NM_012336.2,856-874).
gctgactgcgtgttaacat

SEQ ID NO: 127837 - DNA, 19 bp, Homo sapiens
  siRNA target sequence for NARF (NM_012336.2,963-981).
caaagtgacgcgtcatgat

SEQ ID NO: 127838 - DNA, 19 bp, Homo sapiens
  siRNA target sequence for NARF (NM_012336.2,1000-1018).
cacctggcacacatcttca

SEQ ID NO: 127839 - DNA, 19 bp, Homo sapiens
  siRNA target sequence for NARF (NM_012336.2,1064-1082).
cttaccgagccctgagaaa

SEQ ID NO: 127840 - DNA, 19 bp, Homo sapiens
  siRNA target sequence for NARF (NM_031968.1,863-881).
gcgtgttaacatcagaaat

SEQ ID NO: 127841 - DNA, 19 bp, Homo sapiens
  siRNA target sequence for TMPO (NM_003276.1,225-243).
cccctcggtcctgacaaaa

SEQ ID NO: 127842 - DNA, 19 bp, Homo sapiens
  siRNA target sequence for TMPO (NM_003276.1,227-245).
cctcggtcctgacaaaaga

SEQ ID NO: 127843 - DNA, 19 bp, Homo sapiens
  siRNA target sequence for TMPO (NM_003276.1,230-248).
cggtcctgacaaaagacaa

SEQ ID NO: 127844 - DNA, 19 bp, Homo sapiens
  siRNA target sequence for TMPO (NM_003276.1,611-629).
gaacaaccaggaagctata

SEQ ID NO: 127845 - DNA, 19 bp, Homo sapiens
  siRNA target sequence for TMPO (NM_003276.1,624-642).
gctatatgagaaaaagctt

SEQ ID NO: 127846 - DNA, 19 bp, Homo sapiens
  siRNA target sequence for TMPO (NM_003276.1,680-698).
ctactcctctgccaacaat

SEQ ID NO: 127847 - DNA, 19 bp, Homo sapiens
  siRNA target sequence for TMPO (NM_003276.1,722-740).
ggcagaatggaagtaatga

SEQ ID NO: 127848 - DNA, 19 bp, Homo sapiens
  siRNA target sequence for TMPO (NM_003276.1,734-752).
gtaatgattctgacagata

SEQ ID NO: 127849 - DNA, 19 bp, Homo sapiens
  siRNA target sequence for TMPO (NM_003276.1,795-813).
gaagtccactagggatatt

SEQ ID NO: 127850 - DNA, 19 bp, Homo sapiens
  siRNA target sequence for TMPO (NM_003276.1,798-816).
gtccactagggatattgtt

SEQ ID NO: 127851 - DNA, 19 bp, Homo sapiens
  siRNA target sequence for TMPO (NM_003276.1,803-821).
ctagggatattgttccttt

SEQ ID NO: 127852 - DNA, 19 bp, Homo sapiens
  siRNA target sequence for TMPO (NM_003276.1,925-943).
gctaagaaagtacatactt

SEQ ID NO: 127853 - DNA, 19 bp, Homo sapiens
  siRNA target sequence for TMPO (NM_003276.1,968-986).
ctcttgttgccacaaactt

SEQ ID NO: 127854 - DNA, 19 bp, Homo sapiens
  siRNA target sequence for TMPO (NM_003276.1,1052-1070).
gccatgataggtgtttaga

SEQ ID NO: 127855 - DNA, 19 bp, Homo sapiens
  siRNA target sequence for TMPO (NM_003276.1,1054-1072).
catgataggtgtttagaga

SEQ ID NO: 127856 - DNA, 19 bp, Homo sapiens
  siRNA target sequence for TMPO (NM_003276.1,1062-1080).
gtgtttagagaaaagttct

SEQ ID NO: 127857 - DNA, 19 bp, Homo sapiens
  siRNA target sequence for TMPO (NM_003276.1,1129-1147).
gcttctccttcactgatta

SEQ ID NO: 127858 - DNA, 19 bp, Homo sapiens
  siRNA target sequence for TMPO (NM_003276.1,1154-1172).
ccaccactggttactataa

SEQ ID NO: 127859 - DNA, 19 bp, Homo sapiens
  siRNA target sequence for TMPO (NM_003276.1,1155-1173).
caccactggttactataaa

SEQ ID NO: 127860 - DNA, 19 bp, Homo sapiens
  siRNA target sequence for TMPO (NM_003276.1,1167-1185).
ctataaagacatagtagaa

SEQ ID NO: 127861 - DNA, 19 bp, Homo sapiens
  siRNA target sequence for TMPO (NM_003276.1,1233-1251).
gaggtcccatatttcagat

SEQ ID NO: 127862 - DNA, 19 bp, Homo sapiens
  siRNA target sequence for TMPO (NM_003276.1,1236-1254).
gtcccatatttcagatcaa

SEQ ID NO: 127863 - DNA, 19 bp, Homo sapiens
  siRNA target sequence for TMPO (NM_003276.1,1290-1308).
gtctgagagctcacaacta

SEQ ID NO: 127864 - DNA, 19 bp, Homo sapiens
  siRNA target sequence for TMPO (NM_003276.1,1294-1312).
gagagctcacaactaattt

SEQ ID NO: 127865 - DNA, 19 bp, Homo sapiens
  siRNA target sequence for TMPO (NM_003276.1,1325-1343).
cccaggcaatcagagatta

SEQ ID NO: 127866 - DNA, 19 bp, Homo sapiens
  siRNA target sequence for TMPO (NM_003276.1,1326-1344).
ccaggcaatcagagattat

SEQ ID NO: 127867 - DNA, 19 bp, Homo sapiens
  siRNA target sequence for TMPO (NM_003276.1,1337-1355).
gagattatgtcaattctct

SEQ ID NO: 127868 - DNA, 19 bp, Homo sapiens
  siRNA target sequence for TMPO (NM_003276.1,1404-1422).
gcccccactggatgtagaa

SEQ ID NO: 127869 - DNA, 19 bp, Homo sapiens
  siRNA target sequence for TMPO (NM_003276.1,1406-1424).
ccccactggatgtagaaaa

SEQ ID NO: 127870 - DNA, 19 bp, Homo sapiens
  siRNA target sequence for TMPO (NM_003276.1,1436-1454).
gaattgatcagtctaagtt

SEQ ID NO: 127871 - DNA, 19 bp, Homo sapiens
  siRNA target sequence for TMPO (NM_003276.1,1561-1579).
ggatccgaactgatgtctt

SEQ ID NO: 127872 - DNA, 19 bp, Homo sapiens
  siRNA target sequence for TMPO (NM_003276.1,1566-1584).
cgaactgatgtcttctttt

SEQ ID NO: 127873 - DNA, 19 bp, Homo sapiens
  siRNA target sequence for TMPO (NM_003276.1,1611-1629).
cactaccttaggtctagaa

SEQ ID NO: 127874 - DNA, 19 bp, Homo sapiens
  siRNA target sequence for TMPO (NM_003276.1,1624-1642).
ctagaagtggctaagcaat

SEQ ID NO: 127875 - DNA, 19 bp, Homo sapiens
  siRNA target sequence for TMPO (NM_003276.1,1639-1657).
caatcacagcatgataaaa

SEQ ID NO: 127876 - DNA, 19 bp, Homo sapiens
  siRNA target sequence for TMPO (NM_003276.1,1681-1699).
cccttccatgaatctattt

SEQ ID NO: 127877 - DNA, 19 bp, Homo sapiens
  siRNA target sequence for TMPO (NM_003276.1,1819-1837).
gaaatcctagggtttattt

SEQ ID NO: 127878 - DNA, 19 bp, Homo sapiens
  siRNA target sequence for TMPO (NM_003276.1,1977-1995).
ggctatgcaggcagacatt

SEQ ID NO: 127879 - DNA, 19 bp, Homo sapiens
  siRNA target sequence for TMPO (NM_003276.1,2047-2065).
cttgggattctgagcaaaa

SEQ ID NO: 127880 - DNA, 19 bp, Homo sapiens
  siRNA target sequence for TMPO (NM_003276.1,2167-2185).
ctgaaggattgcaaaatta

SEQ ID NO: 127881 - DNA, 19 bp, Homo sapiens
  siRNA target sequence for NLGN2 (NM_020795.2,526-544).
ggacggtccgctcacaaaa

SEQ ID NO: 127882 - DNA, 19 bp, Homo sapiens
  siRNA target sequence for NLGN2 (NM_020795.2,527-545).
gacggtccgctcacaaaaa

SEQ ID NO: 127883 - DNA, 19 bp, Homo sapiens
  siRNA target sequence for NLGN2 (NM_020795.2,529-547).
cggtccgctcacaaaaaaa

SEQ ID NO: 127884 - DNA, 19 bp, Homo sapiens
  siRNA target sequence for NLGN2 (NM_020795.2,641-659).
gaggggaccggaaacatgt

SEQ ID NO: 127885 - DNA, 19 bp, Homo sapiens
  siRNA target sequence for NLGN2 (NM_020795.2,722-740).
ggggtgctcggttttctca

SEQ ID NO: 127886 - DNA, 19 bp, Homo sapiens
  siRNA target sequence for NLGN2 (NM_020795.2,800-818).
cgctggctcagtgaaaaca

SEQ ID NO: 127887 - DNA, 19 bp, Homo sapiens
  siRNA target sequence for NLGN2 (NM_020795.2,841-859).
cgagcgtatcaccatcttt

SEQ ID NO: 127888 - DNA, 19 bp, Homo sapiens
  siRNA target sequence for NLGN2 (NM_020795.2,845-863).
cgtatcaccatctttggtt

SEQ ID NO: 127889 - DNA, 19 bp, Homo sapiens
  siRNA target sequence for NLGN2 (NM_020795.2,1278-1296).
ctgccagcgcctttgactt

SEQ ID NO: 127890 - DNA, 19 bp, Homo sapiens
  siRNA target sequence for NLGN2 (NM_020795.2,1722-1740).
cggtgccgcaggataccaa

SEQ ID NO: 127891 - DNA, 19 bp, Homo sapiens
  siRNA target sequence for NLGN2 (NM_020795.2,1778-1796).
gtgtggagcaaattcaaca

SEQ ID NO: 127892 - DNA, 19 bp, Homo sapiens
  siRNA target sequence for NLGN2 (NM_020795.2,1833-1851).
cacgcgtgcgtgacaacta

SEQ ID NO: 127893 - DNA, 19 bp, Homo sapiens
  siRNA target sequence for TNFRSF10A (NM_003844.2,76-94).
caccagctagagtacatct

SEQ ID NO: 127894 - DNA, 19 bp, Homo sapiens
  siRNA target sequence for TNFRSF10A (NM_003844.2,327-345).
gtccacaagaccttcaagt

SEQ ID NO: 127895 - DNA, 19 bp, Homo sapiens
  siRNA target sequence for TNFRSF10A (NM_003844.2,391-409).
caaccatcaaacttcatga

SEQ ID NO: 127896 - DNA, 19 bp, Homo sapiens
  siRNA target sequence for TNFRSF10A (NM_003844.2,642-660).
ggaactttccggaatgaca

SEQ ID NO: 127897 - DNA, 19 bp, Homo sapiens
  siRNA target sequence for TNFRSF10A (NM_003844.2,711-729).
gtcaaggtcaaggattgta

SEQ ID NO: 127898 - DNA, 19 bp, Homo sapiens
  siRNA target sequence for TNFRSF10A (NM_003844.2,777-795).
cataatatatgggtgattt

SEQ ID NO: 127899 - DNA, 19 bp, Homo sapiens
  siRNA target sequence for TNFRSF10A (NM_003844.2,834-852).
gtgctgattgtctgttgtt

SEQ ID NO: 127900 - DNA, 19 bp, Homo sapiens
  siRNA target sequence for TNFRSF10A (NM_003844.2,886-904).
gcatggacagggtgtgttt

SEQ ID NO: 127901 - DNA, 19 bp, Homo sapiens
  siRNA target sequence for TNFRSF10A (NM_003844.2,948-966).
gctcacaacgagattctga

SEQ ID NO: 127902 - DNA, 19 bp, Homo sapiens
  siRNA target sequence for TNFRSF10A (NM_003844.2,1017-1035).
caggagccggcagatttga

SEQ ID NO: 127903 - DNA, 19 bp, Homo sapiens
  siRNA target sequence for TNFRSF10A (NM_003844.2,1019-1037).
ggagccggcagatttgaca

SEQ ID NO: 127904 - DNA, 19 bp, Homo sapiens
  siRNA target sequence for TNFRSF10A (NM_003844.2,1289-1307).
gtatgcaatgctgatgaaa

SEQ ID NO: 127905 - DNA, 19 bp, Homo sapiens
  siRNA target sequence for TNFRSF10A (NM_003844.2,1304-1322).
gaaatgggtcaacaaaact

SEQ ID NO: 127906 - DNA, 19 bp, Homo sapiens
  siRNA target sequence for TNFRSF10A (NM_003844.2,1424-1442).
gttcatctacttagaagat

SEQ ID NO: 127907 - DNA, 19 bp, Homo sapiens
  siRNA target sequence for TNFRSF10B (NM_003842.3,510-528).
cccctcagagggattgtgt

SEQ ID NO: 127908 - DNA, 19 bp, Homo sapiens
  siRNA target sequence for TNFRSF10B (NM_003842.3,527-545).
gtccacctggacaccatat

SEQ ID NO: 127909 - DNA, 19 bp, Homo sapiens
  siRNA target sequence for TNFRSF10B (NM_003842.3,546-564).
ctcagaagacggtagagat

SEQ ID NO: 127910 - DNA, 19 bp, Homo sapiens
  siRNA target sequence for TNFRSF10B (NM_003842.3,628-646).
cgctgcaccaggtgtgatt

SEQ ID NO: 127911 - DNA, 19 bp, Homo sapiens
  siRNA target sequence for TNFRSF10B (NM_003842.3,780-798).
caaggtcggtgattgtaca

SEQ ID NO: 127912 - DNA, 19 bp, Homo sapiens
  siRNA target sequence for TNFRSF10B (NM_003842.3,941-959).
cagttgcagccgtagtctt

SEQ ID NO: 127913 - DNA, 19 bp, Homo sapiens
  siRNA target sequence for TNFRSF10B (NM_003842.3,947-965).
cagccgtagtcttgattgt

SEQ ID NO: 127914 - DNA, 19 bp, Homo sapiens
  siRNA target sequence for TNFRSF10B (NM_003842.3,1174-1192).
ccaacaggtgtcaacatgt

SEQ ID NO: 127915 - DNA, 19 bp, Homo sapiens
  siRNA target sequence for TNFRSF10B (NM_003842.3,1175-1193).
caacaggtgtcaacatgtt

SEQ ID NO: 127916 - DNA, 19 bp, Homo sapiens
  siRNA target sequence for TNFRSF10B (NM_003842.3,1301-1319).
gacagtgcttcgatgactt

SEQ ID NO: 127917 - DNA, 19 bp, Homo sapiens
  siRNA target sequence for DCTN6 (NM_006571.2,91-109).
gcggagaagactcaaaaga

SEQ ID NO: 127918 - DNA, 19 bp, Homo sapiens
  siRNA target sequence for DCTN6 (NM_006571.2,187-205).
gtgatccaccctaaagcaa

SEQ ID NO: 127919 - DNA, 19 bp, Homo sapiens
  siRNA target sequence for DCTN6 (NM_006571.2,239-257).
gcgaagggaacctaataga

SEQ ID NO: 127920 - DNA, 19 bp, Homo sapiens
  siRNA target sequence for DCTN6 (NM_006571.2,240-258).
cgaagggaacctaatagaa

SEQ ID NO: 127921 - DNA, 19 bp, Homo sapiens
  siRNA target sequence for DCTN6 (NM_006571.2,259-277).
gaacaggcccttatcataa

SEQ ID NO: 127922 - DNA, 19 bp, Homo sapiens
  siRNA target sequence for DCTN6 (NM_006571.2,280-298).
gcttacccagataatatca

SEQ ID NO: 127923 - DNA, 19 bp, Homo sapiens
  siRNA target sequence for DCTN6 (NM_006571.2,319-337).
gaaccaaaacctatgatca

SEQ ID NO: 127924 - DNA, 19 bp, Homo sapiens
  siRNA target sequence for DCTN6 (NM_006571.2,341-359).
gcaccaataatgtgtttga

SEQ ID NO: 127925 - DNA, 19 bp, Homo sapiens
  siRNA target sequence for DCTN6 (NM_006571.2,342-360).
caccaataatgtgtttgaa

SEQ ID NO: 127926 - DNA, 19 bp, Homo sapiens
  siRNA target sequence for DCTN6 (NM_006571.2,390-408).
gggagataataatgtcatt

SEQ ID NO: 127927 - DNA, 19 bp, Homo sapiens
  siRNA target sequence for DCTN6 (NM_006571.2,392-410).
gagataataatgtcattga

SEQ ID NO: 127928 - DNA, 19 bp, Homo sapiens
  siRNA target sequence for DCTN6 (NM_006571.2,419-437).
catatgtaggcagaaatgt

SEQ ID NO: 127929 - DNA, 19 bp, Homo sapiens
  siRNA target sequence for DCTN6 (NM_006571.2,444-462).
gacaagtggctgcatcatt

SEQ ID NO: 127930 - DNA, 19 bp, Homo sapiens
  siRNA target sequence for DCTN6 (NM_006571.2,463-481).
ggggcttgttgcaacctaa

SEQ ID NO: 127931 - DNA, 19 bp, Homo sapiens
  siRNA target sequence for DCTN6 (NM_006571.2,464-482).
gggcttgttgcaacctaaa

SEQ ID NO: 127932 - DNA, 19 bp, Homo sapiens
  siRNA target sequence for DCTN6 (NM_006571.2,465-483).
ggcttgttgcaacctaaat

SEQ ID NO: 127933 - DNA, 19 bp, Homo sapiens
  siRNA target sequence for DCTN6 (NM_006571.2,466-484).
gcttgttgcaacctaaata

SEQ ID NO: 127934 - DNA, 19 bp, Homo sapiens
  siRNA target sequence for DCTN6 (NM_006571.2,470-488).
gttgcaacctaaatacatt

SEQ ID NO: 127935 - DNA, 19 bp, Homo sapiens
  siRNA target sequence for DCTN6 (NM_006571.2,473-491).
gcaacctaaatacatttga

SEQ ID NO: 127936 - DNA, 19 bp, Homo sapiens
  siRNA target sequence for DCTN6 (NM_006571.2,500-518).
ctgagaatacggtgatcta

SEQ ID NO: 127937 - DNA, 19 bp, Homo sapiens
  siRNA target sequence for DCTN6 (NM_006571.2,569-587).
cactacagctggatttctt

SEQ ID NO: 127938 - DNA, 19 bp, Homo sapiens
  siRNA target sequence for DCTN6 (NM_006571.2,576-594).
gctggatttcttgatgaaa

SEQ ID NO: 127939 - DNA, 19 bp, Homo sapiens
  siRNA target sequence for GGA2 (NM_015044.2,377-395).
cagcgaggtggccaaattt

SEQ ID NO: 127940 - DNA, 19 bp, Homo sapiens
  siRNA target sequence for GGA2 (NM_015044.2,380-398).
cgaggtggccaaatttcgt

SEQ ID NO: 127941 - DNA, 19 bp, Homo sapiens
  siRNA target sequence for GGA2 (NM_015044.2,381-399).
gaggtggccaaatttcgtt

SEQ ID NO: 127942 - DNA, 19 bp, Homo sapiens
  siRNA target sequence for GGA2 (NM_015044.2,397-415).
gtttcctgaacgaactgat

SEQ ID NO: 127943 - DNA, 19 bp, Homo sapiens
  siRNA target sequence for GGA2 (NM_015044.2,401-419).
cctgaacgaactgatcaaa

SEQ ID NO: 127944 - DNA, 19 bp, Homo sapiens
  siRNA target sequence for GGA2 (NM_015044.2,448-466).
gggccacaggaaaagttaa

SEQ ID NO: 127945 - DNA, 19 bp, Homo sapiens
  siRNA target sequence for GGA2 (NM_015044.2,622-640).
ccaagagctccatctttga

SEQ ID NO: 127946 - DNA, 19 bp, Homo sapiens
  siRNA target sequence for GGA2 (NM_015044.2,623-641).
caagagctccatctttgat

SEQ ID NO: 127947 - DNA, 19 bp, Homo sapiens
  siRNA target sequence for GGA2 (NM_015044.2,708-726).
gctgcaaaccggttaatca

SEQ ID NO: 127948 - DNA, 19 bp, Homo sapiens
  siRNA target sequence for GGA2 (NM_015044.2,709-727).
ctgcaaaccggttaatcaa

SEQ ID NO: 127949 - DNA, 19 bp, Homo sapiens
  siRNA target sequence for GGA2 (NM_015044.2,711-729).
gcaaaccggttaatcaaga

SEQ ID NO: 127950 - DNA, 19 bp, Homo sapiens
  siRNA target sequence for GGA2 (NM_015044.2,718-736).
ggttaatcaagaatttggt

SEQ ID NO: 127951 - DNA, 19 bp, Homo sapiens
  siRNA target sequence for GGA2 (NM_015044.2,876-894).
ctgcaggtcgtgtatgaga

SEQ ID NO: 127952 - DNA, 19 bp, Homo sapiens
  siRNA target sequence for GGA2 (NM_015044.2,1297-1315).
caggcggtggtgttcagaa

SEQ ID NO: 127953 - DNA, 19 bp, Homo sapiens
  siRNA target sequence for GGA2 (NM_015044.2,1366-1384).
cgtgccctctgaattatgt

SEQ ID NO: 127954 - DNA, 19 bp, Homo sapiens
  siRNA target sequence for GGA2 (NM_015044.2,1367-1385).
gtgccctctgaattatgtt

SEQ ID NO: 127955 - DNA, 19 bp, Homo sapiens
  siRNA target sequence for GGA2 (NM_015044.2,1410-1428).
gtgccaccaggtactaagt

SEQ ID NO: 127956 - DNA, 19 bp, Homo sapiens
  siRNA target sequence for GGA2 (NM_015044.2,1509-1527).
gtccctttggagtctgtta

SEQ ID NO: 127957 - DNA, 19 bp, Homo sapiens
  siRNA target sequence for GGA2 (NM_015044.2,1541-1559).
gccgcctctcattgtgtat

SEQ ID NO: 127958 - DNA, 19 bp, Homo sapiens
  siRNA target sequence for GGA2 (NM_015044.2,1543-1561).
cgcctctcattgtgtatga

SEQ ID NO: 127959 - DNA, 19 bp, Homo sapiens
  siRNA target sequence for GGA2 (NM_015044.2,1560-1578).
gaccggaatggattcagaa

SEQ ID NO: 127960 - DNA, 19 bp, Homo sapiens
  siRNA target sequence for GGA2 (NM_015044.2,1666-1684).
ctgtctgggatatcatgtt

SEQ ID NO: 127961 - DNA, 19 bp, Homo sapiens
  siRNA target sequence for GGA2 (NM_015044.2,1739-1757).
caagcttcctgcattcagt

SEQ ID NO: 127962 - DNA, 19 bp, Homo sapiens
  siRNA target sequence for GGA2 (NM_015044.2,1763-1781).
gatgcctccagctgtgata

SEQ ID NO: 127963 - DNA, 19 bp, Homo sapiens
  siRNA target sequence for GGA2 (NM_015044.2,1796-1814).
gcttgacaatccacacaaa

SEQ ID NO: 127964 - DNA, 19 bp, Homo sapiens
  siRNA target sequence for GGA2 (NM_015044.2,1831-1849).
ggtacaagctgacattcaa

SEQ ID NO: 127965 - DNA, 19 bp, Homo sapiens
  siRNA target sequence for GGA2 (NM_015044.2,1870-1888).
gcgaagtaggagaagtgaa

SEQ ID NO: 127966 - DNA, 19 bp, Homo sapiens
  siRNA target sequence for GGA2 (NM_015044.2,1871-1889).
cgaagtaggagaagtgaaa

SEQ ID NO: 127967 - DNA, 19 bp, Homo sapiens
  siRNA target sequence for GGA3 (NM_014001.2,36-54).
ggagtcctggctcaataaa

SEQ ID NO: 127968 - DNA, 19 bp, Homo sapiens
  siRNA target sequence for GGA3 (NM_014001.2,76-94).
caggaggactgggaataca

SEQ ID NO: 127969 - DNA, 19 bp, Homo sapiens
  siRNA target sequence for GGA3 (NM_014001.2,81-99).
ggactgggaatacataatt

SEQ ID NO: 127970 - DNA, 19 bp, Homo sapiens
  siRNA target sequence for GGA3 (NM_014001.2,556-574).
cacacgttagaggaagtta

SEQ ID NO: 127971 - DNA, 19 bp, Homo sapiens
  siRNA target sequence for GGA3 (NM_014001.2,560-578).
cgttagaggaagttaacaa

SEQ ID NO: 127972 - DNA, 19 bp, Homo sapiens
  siRNA target sequence for GGA3 (NM_014001.2,596-614).
gtgagatgctgcttcatta

SEQ ID NO: 127973 - DNA, 19 bp, Homo sapiens
  siRNA target sequence for GGA3 (NM_014001.2,598-616).
gagatgctgcttcattaca

SEQ ID NO: 127974 - DNA, 19 bp, Homo sapiens
  siRNA target sequence for GGA3 (NM_014001.2,678-696).
gaacaagaggcggacttta

SEQ ID NO: 127975 - DNA, 19 bp, Homo sapiens
  siRNA target sequence for GGA3 (NM_014001.2,770-788).
cccgggtcatcaactctta

SEQ ID NO: 127976 - DNA, 19 bp, Homo sapiens
  siRNA target sequence for GGA3 (NM_014001.2,772-790).
cgggtcatcaactcttaca

SEQ ID NO: 127977 - DNA, 19 bp, Homo sapiens
  siRNA target sequence for GGA3 (NM_014001.2,783-801).
ctcttacaaaacaattatt

SEQ ID NO: 127978 - DNA, 19 bp, Homo sapiens
  siRNA target sequence for GGA3 (NM_014001.2,820-838).
ggcgaggtggctaccttaa

SEQ ID NO: 127979 - DNA, 19 bp, Homo sapiens
  siRNA target sequence for GGA3 (NM_014001.2,861-879).
cagtcagtgcagtaaccaa

SEQ ID NO: 127980 - DNA, 19 bp, Homo sapiens
  siRNA target sequence for GGA3 (NM_014001.2,907-925).
gacacgaccaacagtttgt

SEQ ID NO: 127981 - DNA, 19 bp, Homo sapiens
  siRNA target sequence for GGA3 (NM_014001.2,1110-1128).
cgacccagcccctaatgtt

SEQ ID NO: 127982 - DNA, 19 bp, Homo sapiens
  siRNA target sequence for GGA3 (NM_014001.2,1345-1363).
gcgggctcctccttgtttt

SEQ ID NO: 127983 - DNA, 19 bp, Homo sapiens
  siRNA target sequence for GGA3 (NM_014001.2,1379-1397).
cagccttggccccaaaagt

SEQ ID NO: 127984 - DNA, 19 bp, Homo sapiens
  siRNA target sequence for GGA3 (NM_014001.2,1463-1481).
ccctcgatcagcttctaga

SEQ ID NO: 127985 - DNA, 19 bp, Homo sapiens
  siRNA target sequence for GGA3 (NM_014001.2,1702-1720).
cctgtgacagcctacgata

SEQ ID NO: 127986 - DNA, 19 bp, Homo sapiens
  siRNA target sequence for GGA3 (NM_014001.2,1703-1721).
ctgtgacagcctacgataa

SEQ ID NO: 127987 - DNA, 19 bp, Homo sapiens
  siRNA target sequence for GGA3 (NM_014001.2,1705-1723).
gtgacagcctacgataaaa

SEQ ID NO: 127988 - DNA, 19 bp, Homo sapiens
  siRNA target sequence for GGA3 (NM_014001.2,1846-1864).
gctgcagtgcccaagtcaa

SEQ ID NO: 127989 - DNA, 19 bp, Homo sapiens
  siRNA target sequence for GGA3 (NM_014001.2,2062-2080).
gaacagtgggggaacctat

SEQ ID NO: 127990 - DNA, 19 bp, Homo sapiens
  siRNA target sequence for GGA3 (NM_138619.1,262-280).
gggaagttccgctttttga

SEQ ID NO: 127991 - DNA, 19 bp, Homo sapiens
  siRNA target sequence for GGA3 (NM_138619.1,263-281).
ggaagttccgctttttgaa

SEQ ID NO: 127992 - DNA, 19 bp, Homo sapiens
  siRNA target sequence for GGA3 (NM_138619.1,270-288).
ccgctttttgaatgagtta

SEQ ID NO: 127993 - DNA, 19 bp, Homo sapiens
  siRNA target sequence for APC (NM_000038.2,46-64).
cagcttcatatgatcagtt

SEQ ID NO: 127994 - DNA, 19 bp, Homo sapiens
  siRNA target sequence for APC (NM_000038.2,49-67).
cttcatatgatcagttgtt

SEQ ID NO: 127995 - DNA, 19 bp, Homo sapiens
  siRNA target sequence for APC (NM_000038.2,108-126).
cgacaagagctagaagata

SEQ ID NO: 127996 - DNA, 19 bp, Homo sapiens
  siRNA target sequence for APC (NM_000038.2,114-132).
gagctagaagataattcca

SEQ ID NO: 127997 - DNA, 19 bp, Homo sapiens
  siRNA target sequence for APC (NM_000038.2,130-148).
ccaatcatcttacaaaact

SEQ ID NO: 127998 - DNA, 19 bp, Homo sapiens
  siRNA target sequence for APC (NM_000038.2,291-309).
gtaaaactgcggtcaaaaa

SEQ ID NO: 127999 - DNA, 19 bp, Homo sapiens
  siRNA target sequence for APC (NM_000038.2,332-350).
ccgggaaggatctgtatca

SEQ ID NO: 128000 - DNA, 19 bp, Homo sapiens
  siRNA target sequence for APC (NM_000038.2,333-351).
cgggaaggatctgtatcaa

SEQ ID NO: 128001 - DNA, 19 bp, Homo sapiens
  siRNA target sequence for APC (NM_000038.2,506-524).
ctggtattacgctcaactt

SEQ ID NO: 128002 - DNA, 19 bp, Homo sapiens
  siRNA target sequence for APC (NM_000038.2,508-526).
ggtattacgctcaacttca

SEQ ID NO: 128003 - DNA, 19 bp, Homo sapiens
  siRNA target sequence for APC (NM_000038.2,533-551).
cactaaaagaatagatagt

SEQ ID NO: 128004 - DNA, 19 bp, Homo sapiens
  siRNA target sequence for APC (NM_000038.2,535-553).
ctaaaagaatagatagtct

SEQ ID NO: 128005 - DNA, 19 bp, Homo sapiens
  siRNA target sequence for APC (NM_000038.2,592-610).
ccagaaggcaattggaata

SEQ ID NO: 128006 - DNA, 19 bp, Homo sapiens
  siRNA target sequence for APC (NM_000038.2,595-613).
gaaggcaattggaatatga

SEQ ID NO: 128007 - DNA, 19 bp, Homo sapiens
  siRNA target sequence for APC (NM_000038.2,628-646).
gagttgcgatggaagaaca

SEQ ID NO: 128008 - DNA, 19 bp, Homo sapiens
  siRNA target sequence for APC (NM_000038.2,683-701).
gcgaagaatagccagaatt

SEQ ID NO: 128009 - DNA, 19 bp, Homo sapiens
  siRNA target sequence for APC (NM_000038.2,685-703).
gaagaatagccagaattca

SEQ ID NO: 128010 - DNA, 19 bp, Homo sapiens
  siRNA target sequence for APC (NM_000038.2,694-712).
ccagaattcagcaaatcga

SEQ ID NO: 128011 - DNA, 19 bp, Homo sapiens
  siRNA target sequence for APC (NM_000038.2,716-734).
ggacatacttcgtatacga

SEQ ID NO: 128012 - DNA, 19 bp, Homo sapiens
  siRNA target sequence for APC (NM_000038.2,727-745).
gtatacgacagcttttaca

SEQ ID NO: 128013 - DNA, 19 bp, Homo sapiens
  siRNA target sequence for APC (NM_000038.2,981-999).
gtgtattcattgttgtcaa

SEQ ID NO: 128014 - DNA, 19 bp, Homo sapiens
  siRNA target sequence for APC (NM_000038.2,995-1013).
gtcaatgcttggtactcat

SEQ ID NO: 128015 - DNA, 19 bp, Homo sapiens
  siRNA target sequence for APC (NM_000038.2,1009-1027).
ctcatgataaggatgatat

SEQ ID NO: 128016 - DNA, 19 bp, Homo sapiens
  siRNA target sequence for APC (NM_000038.2,1011-1029).
catgataaggatgatatgt

SEQ ID NO: 128017 - DNA, 19 bp, Homo sapiens
  siRNA target sequence for APC (NM_000038.2,1030-1048).
cgcgaactttgctagctat

SEQ ID NO: 128018 - DNA, 19 bp, Homo sapiens
  siRNA target sequence for APC (NM_000038.2,1189-1207).
gtgcagcactccacaacat

SEQ ID NO: 128019 - DNA, 19 bp, Homo sapiens
  siRNA target sequence for APC (NM_000038.2,1191-1209).
gcagcactccacaacatca

SEQ ID NO: 128020 - DNA, 19 bp, Homo sapiens
  siRNA target sequence for APC (NM_000038.2,1192-1210).
cagcactccacaacatcat

SEQ ID NO: 128021 - DNA, 19 bp, Homo sapiens
  siRNA target sequence for APC (NM_000038.2,1197-1215).
ctccacaacatcattcact

SEQ ID NO: 128022 - DNA, 19 bp, Homo sapiens
  siRNA target sequence for APC (NM_000038.2,1331-1349).
ggaccaggacaaaaatcca

SEQ ID NO: 128023 - DNA, 19 bp, Homo sapiens
  siRNA target sequence for APC (NM_000038.2,1332-1350).
gaccaggacaaaaatccaa

SEQ ID NO: 128024 - DNA, 19 bp, Homo sapiens
  siRNA target sequence for APC (NM_000038.2,1352-1370).
gccagctcctgttgaacat

SEQ ID NO: 128025 - DNA, 19 bp, Homo sapiens
  siRNA target sequence for APC (NM_000038.2,1354-1372).
cagctcctgttgaacatca

SEQ ID NO: 128026 - DNA, 19 bp, Homo sapiens
  siRNA target sequence for APC (NM_000038.2,1381-1399).
ctgctgtgtgtgttctaat

SEQ ID NO: 128027 - DNA, 19 bp, Homo sapiens
  siRNA target sequence for APC (NM_000038.2,1383-1401).
gctgtgtgtgttctaatga

SEQ ID NO: 128028 - DNA, 19 bp, Homo sapiens
  siRNA target sequence for APC (NM_000038.2,1421-1439).
gcatagacatgcaatgaat

SEQ ID NO: 128029 - DNA, 19 bp, Homo sapiens
  siRNA target sequence for APC (NM_000038.2,1426-1444).
gacatgcaatgaatgaact

SEQ ID NO: 128030 - DNA, 19 bp, Homo sapiens
  siRNA target sequence for APC (NM_000038.2,1504-1522).
ctaatgaccactacagtat

SEQ ID NO: 128031 - DNA, 19 bp, Homo sapiens
  siRNA target sequence for APC (NM_000038.2,1511-1529).
ccactacagtattacacta

SEQ ID NO: 128032 - DNA, 19 bp, Homo sapiens
  siRNA target sequence for APC (NM_000038.2,1514-1532).
ctacagtattacactaaga

SEQ ID NO: 128033 - DNA, 19 bp, Homo sapiens
  siRNA target sequence for APC (NM_000038.2,1549-1567).
ctttgacaaacttgacttt

SEQ ID NO: 128034 - DNA, 19 bp, Homo sapiens
  siRNA target sequence for APC (NM_000038.2,1587-1605).
gctacgctatgctctatga

SEQ ID NO: 128035 - DNA, 19 bp, Homo sapiens
  siRNA target sequence for APC (NM_000038.2,1620-1638).
gcacttgtggcccaactaa

SEQ ID NO: 128036 - DNA, 19 bp, Homo sapiens
  siRNA target sequence for APC (NM_000038.2,1621-1639).
cacttgtggcccaactaaa

SEQ ID NO: 128037 - DNA, 19 bp, Homo sapiens
  siRNA target sequence for APC (NM_000038.2,1629-1647).
gcccaactaaaatctgaaa

SEQ ID NO: 128038 - DNA, 19 bp, Homo sapiens
  siRNA target sequence for APC (NM_000038.2,1693-1711).
cttggcgagcagatgtaaa

SEQ ID NO: 128039 - DNA, 19 bp, Homo sapiens
  siRNA target sequence for APC (NM_000038.2,1697-1715).
gcgagcagatgtaaatagt

SEQ ID NO: 128040 - DNA, 19 bp, Homo sapiens
  siRNA target sequence for APC (NM_000038.2,1698-1716).
cgagcagatgtaaatagta

SEQ ID NO: 128041 - DNA, 19 bp, Homo sapiens
  siRNA target sequence for APC (NM_000038.2,1790-1808).
cctcaaaagcgtattgagt

SEQ ID NO: 128042 - DNA, 19 bp, Homo sapiens
  siRNA target sequence for APC (NM_000038.2,1828-1846).
cacattgcactgagaataa

SEQ ID NO: 128043 - DNA, 19 bp, Homo sapiens
  siRNA target sequence for APC (NM_000038.2,1870-1888).
gtgcacttgcatttttggt

SEQ ID NO: 128044 - DNA, 19 bp, Homo sapiens
  siRNA target sequence for APC (NM_000038.2,1900-1918).
cttaccggagccagacaaa

SEQ ID NO: 128045 - DNA, 19 bp, Homo sapiens
  siRNA target sequence for APC (NM_000038.2,1905-1923).
cggagccagacaaacactt

SEQ ID NO: 128046 - DNA, 19 bp, Homo sapiens
  siRNA target sequence for APC (NM_000038.2,1906-1924).
ggagccagacaaacacttt

SEQ ID NO: 128047 - DNA, 19 bp, Homo sapiens
  siRNA target sequence for APC (NM_000038.2,1915-1933).
caaacactttagccattat

SEQ ID NO: 128048 - DNA, 19 bp, Homo sapiens
  siRNA target sequence for APC (NM_000038.2,1962-1980).
gtgtccagcttgatagcta

SEQ ID NO: 128049 - DNA, 19 bp, Homo sapiens
  siRNA target sequence for APC (NM_000038.2,1967-1985).
cagcttgatagctacaaat

SEQ ID NO: 128050 - DNA, 19 bp, Homo sapiens
  siRNA target sequence for APC (NM_000038.2,1969-1987).
gcttgatagctacaaatga

SEQ ID NO: 128051 - DNA, 19 bp, Homo sapiens
  siRNA target sequence for APC (NM_000038.2,2015-2033).
caactgtctacaaacttta

SEQ ID NO: 128052 - DNA, 19 bp, Homo sapiens
  siRNA target sequence for APC (NM_000038.2,2018-2036).
ctgtctacaaactttatta

SEQ ID NO: 128053 - DNA, 19 bp, Homo sapiens
  siRNA target sequence for APC (NM_000038.2,2020-2038).
gtctacaaactttattaca

SEQ ID NO: 128054 - DNA, 19 bp, Homo sapiens
  siRNA target sequence for APC (NM_000038.2,2029-2047).
ctttattacaacacttaaa

SEQ ID NO: 128055 - DNA, 19 bp, Homo sapiens
  siRNA target sequence for APC (NM_000038.2,2050-2068).
ctcatagtttgacaatagt

SEQ ID NO: 128056 - DNA, 19 bp, Homo sapiens
  siRNA target sequence for APC (NM_000038.2,2052-2070).
catagtttgacaatagtca

SEQ ID NO: 128057 - DNA, 19 bp, Homo sapiens
  siRNA target sequence for APC (NM_000038.2,2146-2164).
cagttagcatgctcaagaa

SEQ ID NO: 128058 - DNA, 19 bp, Homo sapiens
  siRNA target sequence for APC (NM_000038.2,2209-2227).
cagctttaaggaatctcat

SEQ ID NO: 128059 - DNA, 19 bp, Homo sapiens
  siRNA target sequence for APC (NM_000038.2,2246-2264).
gtacaaggatgccaatatt

SEQ ID NO: 128060 - DNA, 19 bp, Homo sapiens
  siRNA target sequence for APC (NM_000038.2,2315-2333).
cctagaagcagaattagat

SEQ ID NO: 128061 - DNA, 19 bp, Homo sapiens
  siRNA target sequence for APC (NM_000038.2,2427-2445).
ggtgattatgtttttgaca

SEQ ID NO: 128062 - DNA, 19 bp, Homo sapiens
  siRNA target sequence for APC (NM_000038.2,2444-2462).
caccaatcgacatgatgat

SEQ ID NO: 128063 - DNA, 19 bp, Homo sapiens
  siRNA target sequence for APC (NM_000038.2,2446-2464).
ccaatcgacatgatgataa

SEQ ID NO: 128064 - DNA, 19 bp, Homo sapiens
  siRNA target sequence for APC (NM_000038.2,2447-2465).
caatcgacatgatgataat

SEQ ID NO: 128065 - DNA, 19 bp, Homo sapiens
  siRNA target sequence for APC (NM_000038.2,2451-2469).
cgacatgatgataataggt

SEQ ID NO: 128066 - DNA, 19 bp, Homo sapiens
  siRNA target sequence for APC (NM_000038.2,2495-2513).
gactgtcctttcaccatat

SEQ ID NO: 128067 - DNA, 19 bp, Homo sapiens
  siRNA target sequence for APC (NM_000038.2,2812-2830).
gctctgctgcccatacaca

SEQ ID NO: 128068 - DNA, 19 bp, Homo sapiens
  siRNA target sequence for APC (NM_000038.2,2818-2836).
ctgcccatacacattcaaa

SEQ ID NO: 128069 - DNA, 19 bp, Homo sapiens
  siRNA target sequence for APC (NM_000038.2,2849-2867).
cactaagtcggaaaattca

SEQ ID NO: 128070 - DNA, 19 bp, Homo sapiens
  siRNA target sequence for APC (NM_000038.2,2866-2884).
caaataggacatgttctat

SEQ ID NO: 128071 - DNA, 19 bp, Homo sapiens
  siRNA target sequence for APC (NM_000038.2,2881-2899).
ctatgccttatgccaaatt

SEQ ID NO: 128072 - DNA, 19 bp, Homo sapiens
  siRNA target sequence for APC (NM_000038.2,2906-2924).
caagagatcttcaaatgat

SEQ ID NO: 128073 - DNA, 19 bp, Homo sapiens
  siRNA target sequence for APC (NM_000038.2,2909-2927).
gagatcttcaaatgatagt

SEQ ID NO: 128074 - DNA, 19 bp, Homo sapiens
  siRNA target sequence for APC (NM_000038.2,2959-2977).
gtaaaagaggtcaaatgaa

SEQ ID NO: 128075 - DNA, 19 bp, Homo sapiens
  siRNA target sequence for APC (NM_000038.2,2979-2997).
ccctcgattgaatcctatt

SEQ ID NO: 128076 - DNA, 19 bp, Homo sapiens
  siRNA target sequence for APC (NM_000038.2,2981-2999).
ctcgattgaatcctattct

SEQ ID NO: 128077 - DNA, 19 bp, Homo sapiens
  siRNA target sequence for APC (NM_000038.2,2983-3001).
cgattgaatcctattctga

SEQ ID NO: 128078 - DNA, 19 bp, Homo sapiens
  siRNA target sequence for APC (NM_000038.2,2984-3002).
gattgaatcctattctgaa

SEQ ID NO: 128079 - DNA, 19 bp, Homo sapiens
  siRNA target sequence for APC (NM_000038.2,3043-3061).
ccgacctagcccataaaat

SEQ ID NO: 128080 - DNA, 19 bp, Homo sapiens
  siRNA target sequence for APC (NM_000038.2,3044-3062).
cgacctagcccataaaata

SEQ ID NO: 128081 - DNA, 19 bp, Homo sapiens
  siRNA target sequence for APC (NM_000038.2,3047-3065).
cctagcccataaaatacat

SEQ ID NO: 128082 - DNA, 19 bp, Homo sapiens
  siRNA target sequence for APC (NM_000038.2,3069-3087).
gcaaatcatatggatgata

SEQ ID NO: 128083 - DNA, 19 bp, Homo sapiens
  siRNA target sequence for APC (NM_000038.2,3096-3114).
gaactagatacaccaataa

SEQ ID NO: 128084 - DNA, 19 bp, Homo sapiens
  siRNA target sequence for APC (NM_000038.2,3099-3117).
ctagatacaccaataaatt

SEQ ID NO: 128085 - DNA, 19 bp, Homo sapiens
  siRNA target sequence for APC (NM_000038.2,3108-3126).
ccaataaattatagtctta

SEQ ID NO: 128086 - DNA, 19 bp, Homo sapiens
  siRNA target sequence for APC (NM_000038.2,3184-3202).
gggcaagacccaaacacat

SEQ ID NO: 128087 - DNA, 19 bp, Homo sapiens
  siRNA target sequence for APC (NM_000038.2,3190-3208).
gacccaaacacataataga

SEQ ID NO: 128088 - DNA, 19 bp, Homo sapiens
  siRNA target sequence for APC (NM_000038.2,3193-3211).
ccaaacacataatagaaga

SEQ ID NO: 128089 - DNA, 19 bp, Homo sapiens
  siRNA target sequence for APC (NM_000038.2,3244-3262).
ggaatcaaagtacaactta

SEQ ID NO: 128090 - DNA, 19 bp, Homo sapiens
  siRNA target sequence for APC (NM_000038.2,3253-3271).
gtacaacttatcctgttta

SEQ ID NO: 128091 - DNA, 19 bp, Homo sapiens
  siRNA target sequence for APC (NM_000038.2,3302-3320).
gttccaaccacattttgga

SEQ ID NO: 128092 - DNA, 19 bp, Homo sapiens
  siRNA target sequence for APC (NM_000038.2,3357-3375).
gccaatggttcagaaacaa

SEQ ID NO: 128093 - DNA, 19 bp, Homo sapiens
  siRNA target sequence for APC (NM_000038.2,3373-3391).
caaatcgagtgggttctaa

SEQ ID NO: 128094 - DNA, 19 bp, Homo sapiens
  siRNA target sequence for APC (NM_000038.2,3385-3403).
gttctaatcatggaattaa

SEQ ID NO: 128095 - DNA, 19 bp, Homo sapiens
  siRNA target sequence for APC (NM_000038.2,3396-3414).
ggaattaatcaaaatgtaa

SEQ ID NO: 128096 - DNA, 19 bp, Homo sapiens
  siRNA target sequence for APC (NM_000038.2,3416-3434).
ccagtctttgtgtcaagaa

SEQ ID NO: 128097 - DNA, 19 bp, Homo sapiens
  siRNA target sequence for APC (NM_000038.2,3425-3443).
gtgtcaagaagatgactat

SEQ ID NO: 128098 - DNA, 19 bp, Homo sapiens
  siRNA target sequence for APC (NM_000038.2,3450-3468).
gataagcctaccaattata

SEQ ID NO: 128099 - DNA, 19 bp, Homo sapiens
  siRNA target sequence for APC (NM_000038.2,3460-3478).
ccaattatagtgaacgtta

SEQ ID NO: 128100 - DNA, 19 bp, Homo sapiens
  siRNA target sequence for APC (NM_000038.2,3513-3531).
ccaacaaattatagcataa

SEQ ID NO: 128101 - DNA, 19 bp, Homo sapiens
  siRNA target sequence for APC (NM_000038.2,3514-3532).
caacaaattatagcataaa

SEQ ID NO: 128102 - DNA, 19 bp, Homo sapiens
  siRNA target sequence for APC (NM_000038.2,3526-3544).
gcataaaatataatgaaga

SEQ ID NO: 128103 - DNA, 19 bp, Homo sapiens
  siRNA target sequence for APC (NM_000038.2,3555-3573).
gtggatcagcctattgatt

SEQ ID NO: 128104 - DNA, 19 bp, Homo sapiens
  siRNA target sequence for APC (NM_000038.2,3652-3670).
gcagtaaaaccgaacatat

SEQ ID NO: 128105 - DNA, 19 bp, Homo sapiens
  siRNA target sequence for APC (NM_000038.2,3671-3689).
gtcttcaagcagtgagaat

SEQ ID NO: 128106 - DNA, 19 bp, Homo sapiens
  siRNA target sequence for APC (NM_000038.2,3691-3709).
cgtccacaccttcatctaa

SEQ ID NO: 128107 - DNA, 19 bp, Homo sapiens
  siRNA target sequence for APC (NM_000038.2,3692-3710).
gtccacaccttcatctaat

SEQ ID NO: 128108 - DNA, 19 bp, Homo sapiens
  siRNA target sequence for APC (NM_000038.2,3784-3802).
gcaaagtttcttctattaa

SEQ ID NO: 128109 - DNA, 19 bp, Homo sapiens
  siRNA target sequence for APC (NM_000038.2,3818-3836).
gacttattgtgtagaagat

SEQ ID NO: 128110 - DNA, 19 bp, Homo sapiens
  siRNA target sequence for APC (NM_000038.2,3840-3858).
ccaatatgtttttcaagat

SEQ ID NO: 128111 - DNA, 19 bp, Homo sapiens
  siRNA target sequence for APC (NM_000038.2,3878-3896).
gtcatcagctgaagatgaa

SEQ ID NO: 128112 - DNA, 19 bp, Homo sapiens
  siRNA target sequence for APC (NM_000038.2,3880-3898).
catcagctgaagatgaaat

SEQ ID NO: 128113 - DNA, 19 bp, Homo sapiens
  siRNA target sequence for APC (NM_000038.2,4023-4041).
caccctagaaccaaatcca

SEQ ID NO: 128114 - DNA, 19 bp, Homo sapiens
  siRNA target sequence for APC (NM_000038.2,4043-4061).
cagactgcagggttctagt

SEQ ID NO: 128115 - DNA, 19 bp, Homo sapiens
  siRNA target sequence for APC (NM_000038.2,4045-4063).
gactgcagggttctagttt

SEQ ID NO: 128116 - DNA, 19 bp, Homo sapiens
  siRNA target sequence for APC (NM_000038.2,4047-4065).
ctgcagggttctagtttat

SEQ ID NO: 128117 - DNA, 19 bp, Homo sapiens
  siRNA target sequence for APC (NM_000038.2,4049-4067).
gcagggttctagtttatct

SEQ ID NO: 128118 - DNA, 19 bp, Homo sapiens
  siRNA target sequence for APC (NM_000038.2,4050-4068).
cagggttctagtttatctt

SEQ ID NO: 128119 - DNA, 19 bp, Homo sapiens
  siRNA target sequence for APC (NM_000038.2,4079-4097).
caggcacaaagctgttgaa

SEQ ID NO: 128120 - DNA, 19 bp, Homo sapiens
  siRNA target sequence for APC (NM_000038.2,4150-4168).
gtccacctgaacactatgt

SEQ ID NO: 128121 - DNA, 19 bp, Homo sapiens
  siRNA target sequence for APC (NM_000038.2,4153-4171).
cacctgaacactatgttca

SEQ ID NO: 128122 - DNA, 19 bp, Homo sapiens
  siRNA target sequence for APC (NM_000038.2,4172-4190).
ggagaccccactcatgttt

SEQ ID NO: 128123 - DNA, 19 bp, Homo sapiens
  siRNA target sequence for APC (NM_000038.2,4173-4191).
gagaccccactcatgttta

SEQ ID NO: 128124 - DNA, 19 bp, Homo sapiens
  siRNA target sequence for APC (NM_000038.2,4182-4200).
ctcatgtttagcagatgta

SEQ ID NO: 128125 - DNA, 19 bp, Homo sapiens
  siRNA target sequence for APC (NM_000038.2,4366-4384).
ctcaaacagctcaaaccaa

SEQ ID NO: 128126 - DNA, 19 bp, Homo sapiens
  siRNA target sequence for APC (NM_000038.2,4381-4399).
ccaagcgagaagtacctaa

SEQ ID NO: 128127 - DNA, 19 bp, Homo sapiens
  siRNA target sequence for APC (NM_000038.2,4382-4400).
caagcgagaagtacctaaa

SEQ ID NO: 128128 - DNA, 19 bp, Homo sapiens
  siRNA target sequence for APC (NM_000038.2,4385-4403).
gcgagaagtacctaaaaat

SEQ ID NO: 128129 - DNA, 19 bp, Homo sapiens
  siRNA target sequence for APC (NM_000038.2,4438-4456).
ctaagcaagctgcagtaaa

SEQ ID NO: 128130 - DNA, 19 bp, Homo sapiens
  siRNA target sequence for APC (NM_000038.2,4482-4500).
cttccagatgctgatactt

SEQ ID NO: 128131 - DNA, 19 bp, Homo sapiens
  siRNA target sequence for APC (NM_000038.2,4485-4503).
ccagatgctgatactttat

SEQ ID NO: 128132 - DNA, 19 bp, Homo sapiens
  siRNA target sequence for APC (NM_000038.2,4567-4585).
gcctcgatgagccatttat

SEQ ID NO: 128133 - DNA, 19 bp, Homo sapiens
  siRNA target sequence for APC (NM_000038.2,4568-4586).
cctcgatgagccatttata

SEQ ID NO: 128134 - DNA, 19 bp, Homo sapiens
  siRNA target sequence for APC (NM_000038.2,4656-4674).
gagcagcctaaagaatcaa

SEQ ID NO: 128135 - DNA, 19 bp, Homo sapiens
  siRNA target sequence for APC (NM_000038.2,4658-4676).
gcagcctaaagaatcaaat

SEQ ID NO: 128136 - DNA, 19 bp, Homo sapiens
  siRNA target sequence for APC (NM_000038.2,4724-4742).
cctattagatgattcagat

SEQ ID NO: 128137 - DNA, 19 bp, Homo sapiens
  siRNA target sequence for APC (NM_000038.2,4761-4779).
ctagaagaatgtattattt

SEQ ID NO: 128138 - DNA, 19 bp, Homo sapiens
  siRNA target sequence for APC (NM_000038.2,4796-4814).
gtcatcacgtaaagcaaaa

SEQ ID NO: 128139 - DNA, 19 bp, Homo sapiens
  siRNA target sequence for APC (NM_000038.2,4871-4889).
gctgcctgtgtacaaactt

SEQ ID NO: 128140 - DNA, 19 bp, Homo sapiens
  siRNA target sequence for APC (NM_000038.2,4874-4892).
gcctgtgtacaaacttcta

SEQ ID NO: 128141 - DNA, 19 bp, Homo sapiens
  siRNA target sequence for APC (NM_000038.2,4883-4901).
caaacttctaccatcacaa

SEQ ID NO: 128142 - DNA, 19 bp, Homo sapiens
  siRNA target sequence for APC (NM_000038.2,4906-4924).
ggttgcaaccccaaaagca

SEQ ID NO: 128143 - DNA, 19 bp, Homo sapiens
  siRNA target sequence for APC (NM_000038.2,4907-4925).
gttgcaaccccaaaagcat

SEQ ID NO: 128144 - DNA, 19 bp, Homo sapiens
  siRNA target sequence for APC (NM_000038.2,4911-4929).
caaccccaaaagcatgtta

SEQ ID NO: 128145 - DNA, 19 bp, Homo sapiens
  siRNA target sequence for APC (NM_000038.2,4914-4932).
ccccaaaagcatgttagtt

SEQ ID NO: 128146 - DNA, 19 bp, Homo sapiens
  siRNA target sequence for APC (NM_000038.2,4947-4965).
gatatgccacgggtgtatt

SEQ ID NO: 128147 - DNA, 19 bp, Homo sapiens
  siRNA target sequence for APC (NM_000038.2,4968-4986).
gttgaagggacacctataa

SEQ ID NO: 128148 - DNA, 19 bp, Homo sapiens
  siRNA target sequence for APC (NM_000038.2,4971-4989).
gaagggacacctataaact

SEQ ID NO: 128149 - DNA, 19 bp, Homo sapiens
  siRNA target sequence for APC (NM_000038.2,4974-4992).
gggacacctataaactttt

SEQ ID NO: 128150 - DNA, 19 bp, Homo sapiens
  siRNA target sequence for APC (NM_000038.2,5005-5023).
ctctaagtgatctaacaat

SEQ ID NO: 128151 - DNA, 19 bp, Homo sapiens
  siRNA target sequence for APC (NM_000038.2,5025-5043).
gaatcccctccaaatgagt

SEQ ID NO: 128152 - DNA, 19 bp, Homo sapiens
  siRNA target sequence for APC (NM_000038.2,5109-5127).
cctacagaaggcagaagta

SEQ ID NO: 128153 - DNA, 19 bp, Homo sapiens
  siRNA target sequence for APC (NM_000038.2,5208-5226).
cttgcagaatgcattaatt

SEQ ID NO: 128154 - DNA, 19 bp, Homo sapiens
  siRNA target sequence for APC (NM_000038.2,5311-5329).
ctgcacccaacaaaaatca

SEQ ID NO: 128155 - DNA, 19 bp, Homo sapiens
  siRNA target sequence for APC (NM_000038.2,5313-5331).
gcacccaacaaaaatcagt

SEQ ID NO: 128156 - DNA, 19 bp, Homo sapiens
  siRNA target sequence for APC (NM_000038.2,5376-5394).
ccacaaaatactgaatata

SEQ ID NO: 128157 - DNA, 19 bp, Homo sapiens
  siRNA target sequence for APC (NM_000038.2,5395-5413).
ggacacgtgtaagaaaaaa

SEQ ID NO: 128158 - DNA, 19 bp, Homo sapiens
  siRNA target sequence for APC (NM_000038.2,5415-5433).
gcagactcaaaaaataatt

SEQ ID NO: 128159 - DNA, 19 bp, Homo sapiens
  siRNA target sequence for APC (NM_000038.2,5517-5535).
ctcccaaataatgaagata

SEQ ID NO: 128160 - DNA, 19 bp, Homo sapiens
  siRNA target sequence for APC (NM_000038.2,5519-5537).
cccaaataatgaagataga

SEQ ID NO: 128161 - DNA, 19 bp, Homo sapiens
  siRNA target sequence for APC (NM_000038.2,5610-5628).
cgaaatgattctttgagtt

SEQ ID NO: 128162 - DNA, 19 bp, Homo sapiens
  siRNA target sequence for APC (NM_000038.2,5626-5644).
gttctctagattttgatga

SEQ ID NO: 128163 - DNA, 19 bp, Homo sapiens
  siRNA target sequence for APC (NM_000038.2,5663-5681).
cagggaaaaggctgaatta

SEQ ID NO: 128164 - DNA, 19 bp, Homo sapiens
  siRNA target sequence for APC (NM_000038.2,5744-5762).
caaccaacaatcagctaat

SEQ ID NO: 128165 - DNA, 19 bp, Homo sapiens
  siRNA target sequence for APC (NM_000038.2,5869-5887).
gggcagcaactgatgaaaa

SEQ ID NO: 128166 - DNA, 19 bp, Homo sapiens
  siRNA target sequence for APC (NM_000038.2,6022-6040).
cacagggagaaccaagtaa

SEQ ID NO: 128167 - DNA, 19 bp, Homo sapiens
  siRNA target sequence for APC (NM_000038.2,6054-6072).
ggctatgctcctaaatcat

SEQ ID NO: 128168 - DNA, 19 bp, Homo sapiens
  siRNA target sequence for APC (NM_000038.2,6055-6073).
gctatgctcctaaatcatt

SEQ ID NO: 128169 - DNA, 19 bp, Homo sapiens
  siRNA target sequence for APC (NM_000038.2,6172-6190).
ccgcaatgccaaaaaagaa

SEQ ID NO: 128170 - DNA, 19 bp, Homo sapiens
  siRNA target sequence for APC (NM_000038.2,6202-6220).
gactcaagggtgataatga

SEQ ID NO: 128171 - DNA, 19 bp, Homo sapiens
  siRNA target sequence for APC (NM_000038.2,6261-6279).
gatctgacacttgatttga

SEQ ID NO: 128172 - DNA, 19 bp, Homo sapiens
  siRNA target sequence for APC (NM_000038.2,6357-6375).
ggtgcaaattccatagtaa

SEQ ID NO: 128173 - DNA, 19 bp, Homo sapiens
  siRNA target sequence for APC (NM_000038.2,6360-6378).
gcaaattccatagtaagta

SEQ ID NO: 128174 - DNA, 19 bp, Homo sapiens
  siRNA target sequence for APC (NM_000038.2,6440-6458).
catcctttccctgaaatca

SEQ ID NO: 128175 - DNA, 19 bp, Homo sapiens
  siRNA target sequence for APC (NM_000038.2,6464-6482).
ctctctgggatcaccattt

SEQ ID NO: 128176 - DNA, 19 bp, Homo sapiens
  siRNA target sequence for APC (NM_000038.2,6466-6484).
ctctgggatcaccatttca

SEQ ID NO: 128177 - DNA, 19 bp, Homo sapiens
  siRNA target sequence for APC (NM_000038.2,6471-6489).
ggatcaccatttcatctta

SEQ ID NO: 128178 - DNA, 19 bp, Homo sapiens
  siRNA target sequence for APC (NM_000038.2,6530-6548).
cccacgaattctaaaacca

SEQ ID NO: 128179 - DNA, 19 bp, Homo sapiens
  siRNA target sequence for APC (NM_000038.2,6618-6636).
gtttataaaagtttgatta

SEQ ID NO: 128180 - DNA, 19 bp, Homo sapiens
  siRNA target sequence for APC (NM_000038.2,6637-6655).
ctggaaaagttcgatctaa

SEQ ID NO: 128181 - DNA, 19 bp, Homo sapiens
  siRNA target sequence for APC (NM_000038.2,6660-6678).
gaaatttcaggccaaatga

SEQ ID NO: 128182 - DNA, 19 bp, Homo sapiens
  siRNA target sequence for APC (NM_000038.2,6712-6730).
ctcgaggcaggacaatgat

SEQ ID NO: 128183 - DNA, 19 bp, Homo sapiens
  siRNA target sequence for APC (NM_000038.2,6718-6736).
gcaggacaatgattcatat

SEQ ID NO: 128184 - DNA, 19 bp, Homo sapiens
  siRNA target sequence for APC (NM_000038.2,6719-6737).
caggacaatgattcatatt

SEQ ID NO: 128185 - DNA, 19 bp, Homo sapiens
  siRNA target sequence for APC (NM_000038.2,6738-6756).
ccaggagttcgaaatagct

SEQ ID NO: 128186 - DNA, 19 bp, Homo sapiens
  siRNA target sequence for APC (NM_000038.2,6747-6765).
cgaaatagctcctcaagta

SEQ ID NO: 128187 - DNA, 19 bp, Homo sapiens
  siRNA target sequence for APC (NM_000038.2,6763-6781).
gtacaagtcctgtttctaa

SEQ ID NO: 128188 - DNA, 19 bp, Homo sapiens
  siRNA target sequence for APC (NM_000038.2,6809-6827).
ctccaaaagccctagtgaa

SEQ ID NO: 128189 - DNA, 19 bp, Homo sapiens
  siRNA target sequence for APC (NM_000038.2,6899-6917).
gcagacatcccaaataggt

SEQ ID NO: 128190 - DNA, 19 bp, Homo sapiens
  siRNA target sequence for APC (NM_000038.2,6970-6988).
gacctgcccagcaaccatt

SEQ ID NO: 128191 - DNA, 19 bp, Homo sapiens
  siRNA target sequence for APC (NM_000038.2,6972-6990).
cctgcccagcaaccattaa

SEQ ID NO: 128192 - DNA, 19 bp, Homo sapiens
  siRNA target sequence for APC (NM_000038.2,6975-6993).
gcccagcaaccattaagta

SEQ ID NO: 128193 - DNA, 19 bp, Homo sapiens
  siRNA target sequence for APC (NM_000038.2,6977-6995).
ccagcaaccattaagtaga

SEQ ID NO: 128194 - DNA, 19 bp, Homo sapiens
  siRNA target sequence for APC (NM_000038.2,6985-7003).
cattaagtagacctataca

SEQ ID NO: 128195 - DNA, 19 bp, Homo sapiens
  siRNA target sequence for APC (NM_000038.2,7004-7022).
gtctcctggccgaaactca

SEQ ID NO: 128196 - DNA, 19 bp, Homo sapiens
  siRNA target sequence for APC (NM_000038.2,7008-7026).
cctggccgaaactcaattt

SEQ ID NO: 128197 - DNA, 19 bp, Homo sapiens
  siRNA target sequence for APC (NM_000038.2,7027-7045).
cccctggtagaaatggaat

SEQ ID NO: 128198 - DNA, 19 bp, Homo sapiens
  siRNA target sequence for APC (NM_000038.2,7028-7046).
ccctggtagaaatggaata

SEQ ID NO: 128199 - DNA, 19 bp, Homo sapiens
  siRNA target sequence for APC (NM_000038.2,7029-7047).
cctggtagaaatggaataa

SEQ ID NO: 128200 - DNA, 19 bp, Homo sapiens
  siRNA target sequence for APC (NM_000038.2,7042-7060).
gaataagtcctcctaacaa

SEQ ID NO: 128201 - DNA, 19 bp, Homo sapiens
  siRNA target sequence for APC (NM_000038.2,7051-7069).
ctcctaacaaattatctca

SEQ ID NO: 128202 - DNA, 19 bp, Homo sapiens
  siRNA target sequence for APC (NM_000038.2,7079-7097).
gacatcatcccctagtact

SEQ ID NO: 128203 - DNA, 19 bp, Homo sapiens
  siRNA target sequence for APC (NM_000038.2,7088-7106).
ccctagtactgcttcaact

SEQ ID NO: 128204 - DNA, 19 bp, Homo sapiens
  siRNA target sequence for APC (NM_000038.2,7089-7107).
cctagtactgcttcaacta

SEQ ID NO: 128205 - DNA, 19 bp, Homo sapiens
  siRNA target sequence for APC (NM_000038.2,7164-7182).
cagaaccttaccaaacaaa

SEQ ID NO: 128206 - DNA, 19 bp, Homo sapiens
  siRNA target sequence for APC (NM_000038.2,7166-7184).
gaaccttaccaaacaaaca

SEQ ID NO: 128207 - DNA, 19 bp, Homo sapiens
  siRNA target sequence for APC (NM_000038.2,7193-7211).
caagaatgccagtagtatt

SEQ ID NO: 128208 - DNA, 19 bp, Homo sapiens
  siRNA target sequence for APC (NM_000038.2,7196-7214).
gaatgccagtagtattcca

SEQ ID NO: 128209 - DNA, 19 bp, Homo sapiens
  siRNA target sequence for APC (NM_000038.2,7225-7243).
ctgcctccaaaggactaaa

SEQ ID NO: 128210 - DNA, 19 bp, Homo sapiens
  siRNA target sequence for APC (NM_000038.2,7228-7246).
cctccaaaggactaaatca

SEQ ID NO: 128211 - DNA, 19 bp, Homo sapiens
  siRNA target sequence for APC (NM_000038.2,7295-7313).
gtcttcaactaaatcaagt

SEQ ID NO: 128212 - DNA, 19 bp, Homo sapiens
  siRNA target sequence for APC (NM_000038.2,7320-7338).
gaatctgatagatcagaaa

SEQ ID NO: 128213 - DNA, 19 bp, Homo sapiens
  siRNA target sequence for APC (NM_000038.2,7353-7371).
cgccagtcaactttcatca

SEQ ID NO: 128214 - DNA, 19 bp, Homo sapiens
  siRNA target sequence for APC (NM_000038.2,7354-7372).
gccagtcaactttcatcaa

SEQ ID NO: 128215 - DNA, 19 bp, Homo sapiens
  siRNA target sequence for APC (NM_000038.2,7377-7395).
gctccaagcccaaccttaa

SEQ ID NO: 128216 - DNA, 19 bp, Homo sapiens
  siRNA target sequence for APC (NM_000038.2,7406-7424).
ggaggaatctgcttcattt

SEQ ID NO: 128217 - DNA, 19 bp, Homo sapiens
  siRNA target sequence for APC (NM_000038.2,7540-7558).
ctggtggatggcgaaaact

SEQ ID NO: 128218 - DNA, 19 bp, Homo sapiens
  siRNA target sequence for APC (NM_000038.2,7552-7570).
gaaaactcccacctaatct

SEQ ID NO: 128219 - DNA, 19 bp, Homo sapiens
  siRNA target sequence for APC (NM_000038.2,7573-7591).
gtcccactatagagtataa

SEQ ID NO: 128220 - DNA, 19 bp, Homo sapiens
  siRNA target sequence for APC (NM_000038.2,7576-7594).
ccactatagagtataatga

SEQ ID NO: 128221 - DNA, 19 bp, Homo sapiens
  siRNA target sequence for APC (NM_000038.2,7617-7635).
gatattgcacggtctcatt

SEQ ID NO: 128222 - DNA, 19 bp, Homo sapiens
  siRNA target sequence for APC (NM_000038.2,7623-7641).
gcacggtctcattctgaaa

SEQ ID NO: 128223 - DNA, 19 bp, Homo sapiens
  siRNA target sequence for APC (NM_000038.2,7642-7660).
gtccttctagacttccaat

SEQ ID NO: 128224 - DNA, 19 bp, Homo sapiens
  siRNA target sequence for APC (NM_000038.2,7645-7663).
cttctagacttccaatcaa

SEQ ID NO: 128225 - DNA, 19 bp, Homo sapiens
  siRNA target sequence for APC (NM_000038.2,7931-7949).
ctcaggtgctacaaatggt

SEQ ID NO: 128226 - DNA, 19 bp, Homo sapiens
  siRNA target sequence for APC (NM_000038.2,8079-8097).
ccggtgattgacagtgttt

SEQ ID NO: 128227 - DNA, 19 bp, Homo sapiens
  siRNA target sequence for APC (NM_000038.2,8177-8195).
gcgtaccgtgggtttggaa

SEQ ID NO: 128228 - DNA, 19 bp, Homo sapiens
  siRNA target sequence for APC (NM_000038.2,8178-8196).
cgtaccgtgggtttggaaa

SEQ ID NO: 128229 - DNA, 19 bp, Homo sapiens
  siRNA target sequence for APC (NM_000038.2,8222-8240).
ggatgcccctgaccaaaaa

SEQ ID NO: 128230 - DNA, 19 bp, Homo sapiens
  siRNA target sequence for APC (NM_000038.2,8276-8294).
ccctgtatcagagactaat

SEQ ID NO: 128231 - DNA, 19 bp, Homo sapiens
  siRNA target sequence for APC (NM_000038.2,8286-8304).
gagactaatgaaagttcta

SEQ ID NO: 128232 - DNA, 19 bp, Homo sapiens
  siRNA target sequence for APC (NM_000038.2,8288-8306).
gactaatgaaagttctata

SEQ ID NO: 128233 - DNA, 19 bp, Homo sapiens
  siRNA target sequence for APC (NM_000038.2,8309-8327).
ggaacgtaccccattcagt

SEQ ID NO: 128234 - DNA, 19 bp, Homo sapiens
  siRNA target sequence for APC (NM_000038.2,8310-8328).
gaacgtaccccattcagtt

SEQ ID NO: 128235 - DNA, 19 bp, Homo sapiens
  siRNA target sequence for APC (NM_000038.2,8313-8331).
cgtaccccattcagttcta

SEQ ID NO: 128236 - DNA, 19 bp, Homo sapiens
  siRNA target sequence for APC (NM_000038.2,8373-8391).
gccagagtgactcctttta

SEQ ID NO: 128237 - DNA, 19 bp, Homo sapiens
  siRNA target sequence for APC (NM_000038.2,8454-8472).
ccaactccagtgaataaca

SEQ ID NO: 128238 - DNA, 19 bp, Homo sapiens
  siRNA target sequence for APC (NM_000038.2,8480-8498).
gaagcgagattccaaaact

SEQ ID NO: 128239 - DNA, 19 bp, Homo sapiens
  siRNA target sequence for APC (NM_000038.2,8537-8555).
ccattctgggtcttacctt

SEQ ID NO: 128240 - DNA, 19 bp, Homo sapiens
  siRNA target sequence for APCL (NM_005883.1,2129-2147).
gtttcctgctgaatgagat

SEQ ID NO: 128241 - DNA, 19 bp, Homo sapiens
  siRNA target sequence for APCL (NM_005883.1,2164-2182).
gagaagctctggtactact

SEQ ID NO: 128242 - DNA, 19 bp, Homo sapiens
  siRNA target sequence for APCL (NM_005883.1,3263-3281).
cctggagggccgacatcaa

SEQ ID NO: 128243 - DNA, 19 bp, Homo sapiens
  siRNA target sequence for APCL (NM_005883.1,3517-3535).
ggcatcctccgcaatgtgt

SEQ ID NO: 128244 - DNA, 19 bp, Homo sapiens
  siRNA target sequence for APCL (NM_005883.1,4008-4026).
cggcctggcccaagactat

SEQ ID NO: 128245 - DNA, 19 bp, Homo sapiens
  siRNA target sequence for APCL (NM_005883.1,4310-4328).
cctcgtccgacgatagctt

SEQ ID NO: 128246 - DNA, 19 bp, Homo sapiens
  siRNA target sequence for APCL (NM_005883.1,4523-4541).
gcccacgcgaacatatgct

SEQ ID NO: 128247 - DNA, 19 bp, Homo sapiens
  siRNA target sequence for APCL (NM_005883.1,4692-4710).
caagctgtcgcctacctat

SEQ ID NO: 128248 - DNA, 19 bp, Homo sapiens
  siRNA target sequence for APCL (NM_005883.1,5147-5165).
ccagctcgtcggagaacta

SEQ ID NO: 128249 - DNA, 19 bp, Homo sapiens
  siRNA target sequence for APCL (NM_005883.1,5822-5840).
ccgtgcccgtctacatgtt

SEQ ID NO: 128250 - DNA, 19 bp, Homo sapiens
  siRNA target sequence for APCL (NM_005883.1,5896-5914).
ggcacgccggtcaacttct

SEQ ID NO: 128251 - DNA, 19 bp, Homo sapiens
  siRNA target sequence for APCL (NM_005883.1,6307-6325).
gccatccctcgcgctttta

SEQ ID NO: 128252 - DNA, 19 bp, Homo sapiens
  siRNA target sequence for APCL (NM_005883.1,7079-7097).
ggggacgaacagtgatcta

SEQ ID NO: 128253 - DNA, 19 bp, Homo sapiens
  siRNA target sequence for APCL (NM_005883.1,7690-7708).
cgacagctaaccttcatca

SEQ ID NO: 128254 - DNA, 19 bp, Homo sapiens
  siRNA target sequence for APCL (NM_005883.1,7691-7709).
gacagctaaccttcatcaa

SEQ ID NO: 128255 - DNA, 19 bp, Homo sapiens
  siRNA target sequence for APCL (NM_005883.1,8518-8536).
cgagtaccccccttcaact

SEQ ID NO: 128256 - DNA, 19 bp, Homo sapiens
  siRNA target sequence for APCL (NM_005883.1,8519-8537).
gagtaccccccttcaacta

SEQ ID NO: 128257 - DNA, 19 bp, Homo sapiens
  siRNA target sequence for PKP1 (NM_000299.1,278-296).
ccttggcgtacgaatgctt

SEQ ID NO: 128258 - DNA, 19 bp, Homo sapiens
  siRNA target sequence for PKP1 (NM_000299.1,323-341).
ctttgccgtcggaccaaaa

SEQ ID NO: 128259 - DNA, 19 bp, Homo sapiens
  siRNA target sequence for PKP1 (NM_000299.1,328-346).
ccgtcggaccaaaagatga

SEQ ID NO: 128260 - DNA, 19 bp, Homo sapiens
  siRNA target sequence for PKP1 (NM_000299.1,329-347).
cgtcggaccaaaagatgaa

SEQ ID NO: 128261 - DNA, 19 bp, Homo sapiens
  siRNA target sequence for PKP1 (NM_000299.1,403-421).
cggcagaagtccaagtctt

SEQ ID NO: 128262 - DNA, 19 bp, Homo sapiens
  siRNA target sequence for PKP1 (NM_000299.1,447-465).
caatcgaggttccatgtat

SEQ ID NO: 128263 - DNA, 19 bp, Homo sapiens
  siRNA target sequence for PKP1 (NM_000299.1,466-484).
gatggcttggctgacaatt

SEQ ID NO: 128264 - DNA, 19 bp, Homo sapiens
  siRNA target sequence for PKP1 (NM_000299.1,793-811).
cagaaccgctacagctttt

SEQ ID NO: 128265 - DNA, 19 bp, Homo sapiens
  siRNA target sequence for PKP1 (NM_000299.1,824-842).
gtggtcagaaggccataaa

SEQ ID NO: 128266 - DNA, 19 bp, Homo sapiens
  siRNA target sequence for PKP1 (NM_000299.1,826-844).
ggtcagaaggccataaaga

SEQ ID NO: 128267 - DNA, 19 bp, Homo sapiens
  siRNA target sequence for PKP1 (NM_000299.1,1040-1058).
ccattggggcctattacat

SEQ ID NO: 128268 - DNA, 19 bp, Homo sapiens
  siRNA target sequence for PKP1 (NM_000299.1,1377-1395).
ggccgaccgcgtcatcatt

SEQ ID NO: 128269 - DNA, 19 bp, Homo sapiens
  siRNA target sequence for PKP1 (NM_000299.1,1511-1529).
gccagaccatgcgtaacta

SEQ ID NO: 128270 - DNA, 19 bp, Homo sapiens
  siRNA target sequence for PKP1 (NM_000299.1,1742-1760).
gcgacaagatgatgaacaa

SEQ ID NO: 128271 - DNA, 19 bp, Homo sapiens
  siRNA target sequence for PKP1 (NM_000299.1,2212-2230).
ctggccaagcagtacttct

SEQ ID NO: 128272 - DNA, 19 bp, Homo sapiens
  siRNA target sequence for FRZB (NM_001463.2,354-372).
ctgccctggaacatgacta

SEQ ID NO: 128273 - DNA, 19 bp, Homo sapiens
  siRNA target sequence for FRZB (NM_001463.2,574-592).
gtgagcccatactcatcaa

SEQ ID NO: 128274 - DNA, 19 bp, Homo sapiens
  siRNA target sequence for FRZB (NM_001463.2,576-594).
gagcccatactcatcaagt

SEQ ID NO: 128275 - DNA, 19 bp, Homo sapiens
  siRNA target sequence for FRZB (NM_001463.2,740-758).
cagtgaacgctgtaaatgt

SEQ ID NO: 128276 - DNA, 19 bp, Homo sapiens
  siRNA target sequence for FRZB (NM_001463.2,772-790).
ctacacagaagacctattt

SEQ ID NO: 128277 - DNA, 19 bp, Homo sapiens
  siRNA target sequence for FRZB (NM_001463.2,782-800).
gacctatttccggaacaat

SEQ ID NO: 128278 - DNA, 19 bp, Homo sapiens
  siRNA target sequence for FRZB (NM_001463.2,784-802).
cctatttccggaacaatta

SEQ ID NO: 128279 - DNA, 19 bp, Homo sapiens
  siRNA target sequence for FRZB (NM_001463.2,812-830).
cattcgggctaaagttaaa

SEQ ID NO: 128280 - DNA, 19 bp, Homo sapiens
  siRNA target sequence for FRZB (NM_001463.2,816-834).
cgggctaaagttaaagaga

SEQ ID NO: 128281 - DNA, 19 bp, Homo sapiens
  siRNA target sequence for FRZB (NM_001463.2,950-968).
ctgccctccacttaatgtt

SEQ ID NO: 128282 - DNA, 19 bp, Homo sapiens
  siRNA target sequence for FRZB (NM_001463.2,952-970).
gccctccacttaatgttaa

SEQ ID NO: 128283 - DNA, 19 bp, Homo sapiens
  siRNA target sequence for FRZB (NM_001463.2,953-971).
ccctccacttaatgttaat

SEQ ID NO: 128284 - DNA, 19 bp, Homo sapiens
  siRNA target sequence for FRZB (NM_001463.2,1005-1023).
gaacgttccagattactct

SEQ ID NO: 128285 - DNA, 19 bp, Homo sapiens
  siRNA target sequence for FRZB (NM_001463.2,1022-1040).
cttggtggaaggctctata

SEQ ID NO: 128286 - DNA, 19 bp, Homo sapiens
  siRNA target sequence for FRZB (NM_001463.2,1025-1043).
ggtggaaggctctatagct

SEQ ID NO: 128287 - DNA, 19 bp, Homo sapiens
  siRNA target sequence for FRZB (NM_001463.2,1055-1073).
ggatcgactcggtaaaaaa

SEQ ID NO: 128288 - DNA, 19 bp, Homo sapiens
  siRNA target sequence for FRZB (NM_001463.2,1059-1077).
cgactcggtaaaaaagtta

SEQ ID NO: 128289 - DNA, 19 bp, Homo sapiens
  siRNA target sequence for FRZB (NM_001463.2,1060-1078).
gactcggtaaaaaagttaa

SEQ ID NO: 128290 - DNA, 19 bp, Homo sapiens
  siRNA target sequence for FRZB (NM_001463.2,1074-1092).
gttaagcgctgggatatga

SEQ ID NO: 128291 - DNA, 19 bp, Homo sapiens
  siRNA target sequence for FRZB (NM_001463.2,1099-1117).
gtcatcttggactcagtaa

SEQ ID NO: 128292 - DNA, 19 bp, Homo sapiens
  siRNA target sequence for FRZB (NM_001463.2,1101-1119).
catcttggactcagtaaaa

SEQ ID NO: 128293 - DNA, 19 bp, Homo sapiens
  siRNA target sequence for FRZB (NM_001463.2,1107-1125).
ggactcagtaaaagtgatt

SEQ ID NO: 128294 - DNA, 19 bp, Homo sapiens
  siRNA target sequence for FRZB (NM_001463.2,1120-1138).
gtgattctagcaatagtga

SEQ ID NO: 128295 - DNA, 19 bp, Homo sapiens
  siRNA target sequence for FRZB (NM_001463.2,1122-1140).
gattctagcaatagtgatt

SEQ ID NO: 128296 - DNA, 19 bp, Homo sapiens
  siRNA target sequence for GFR (NM_012294.1,147-165).
ccttcgatgtgccttattt

SEQ ID NO: 128297 - DNA, 19 bp, Homo sapiens
  siRNA target sequence for GFR (NM_012294.1,151-169).
cgatgtgccttatttcaaa

SEQ ID NO: 128298 - DNA, 19 bp, Homo sapiens
  siRNA target sequence for GFR (NM_012294.1,277-295).
cgggaccccggagaagatt

SEQ ID NO: 128299 - DNA, 19 bp, Homo sapiens
  siRNA target sequence for GFR (NM_012294.1,278-296).
gggaccccggagaagattt

SEQ ID NO: 128300 - DNA, 19 bp, Homo sapiens
  siRNA target sequence for GFR (NM_012294.1,426-444).
ggcactattctgctaagaa

SEQ ID NO: 128301 - DNA, 19 bp, Homo sapiens
  siRNA target sequence for GFR (NM_012294.1,473-491).
gttccgcgtaggaaacgta

SEQ ID NO: 128302 - DNA, 19 bp, Homo sapiens
  siRNA target sequence for GFR (NM_012294.1,477-495).
cgcgtaggaaacgtaaagt

SEQ ID NO: 128303 - DNA, 19 bp, Homo sapiens
  siRNA target sequence for GFR (NM_012294.1,479-497).
cgtaggaaacgtaaagtct

SEQ ID NO: 128304 - DNA, 19 bp, Homo sapiens
  siRNA target sequence for GFR (NM_012294.1,489-507).
gtaaagtcttgcatcttgt

SEQ ID NO: 128305 - DNA, 19 bp, Homo sapiens
  siRNA target sequence for GFR (NM_012294.1,608-626).
gaatatccaatacttgaaa

SEQ ID NO: 128306 - DNA, 19 bp, Homo sapiens
  siRNA target sequence for GFR (NM_012294.1,664-682).
ccgtcgtcacactgtagat

SEQ ID NO: 128307 - DNA, 19 bp, Homo sapiens
  siRNA target sequence for GFR (NM_012294.1,666-684).
gtcgtcacactgtagatga

SEQ ID NO: 128308 - DNA, 19 bp, Homo sapiens
  siRNA target sequence for GFR (NM_012294.1,668-686).
cgtcacactgtagatgaat

SEQ ID NO: 128309 - DNA, 19 bp, Homo sapiens
  siRNA target sequence for GFR (NM_012294.1,669-687).
gtcacactgtagatgaata

SEQ ID NO: 128310 - DNA, 19 bp, Homo sapiens
  siRNA target sequence for GFR (NM_012294.1,673-691).
cactgtagatgaatattca

SEQ ID NO: 128311 - DNA, 19 bp, Homo sapiens
  siRNA target sequence for GFR (NM_012294.1,710-728).
gcccttttccaccaattca

SEQ ID NO: 128312 - DNA, 19 bp, Homo sapiens
  siRNA target sequence for GFR (NM_012294.1,766-784).
gactgaaacggaggaaatt

SEQ ID NO: 128313 - DNA, 19 bp, Homo sapiens
  siRNA target sequence for GFR (NM_012294.1,768-786).
ctgaaacggaggaaatttt

SEQ ID NO: 128314 - DNA, 19 bp, Homo sapiens
  siRNA target sequence for GFR (NM_012294.1,840-858).
ccagtatagcccaagagat

SEQ ID NO: 128315 - DNA, 19 bp, Homo sapiens
  siRNA target sequence for GFR (NM_012294.1,1433-1451).
gggaagtttaagaaacttt

SEQ ID NO: 128316 - DNA, 19 bp, Homo sapiens
  siRNA target sequence for GFR (NM_012294.1,1709-1727).
gagttaaagtcctatgtta

SEQ ID NO: 128317 - DNA, 19 bp, Homo sapiens
  siRNA target sequence for GFR (NM_012294.1,1711-1729).
gttaaagtcctatgttaat

SEQ ID NO: 128318 - DNA, 19 bp, Homo sapiens
  siRNA target sequence for GFR (NM_012294.1,1730-1748).
cacctgtatgtcattgaca

SEQ ID NO: 128319 - DNA, 19 bp, Homo sapiens
  siRNA target sequence for CSE1L (NM_001316.2,137-155).
ggaactcagcgatgcaaat

SEQ ID NO: 128320 - DNA, 19 bp, Homo sapiens
  siRNA target sequence for CSE1L (NM_001316.2,156-174).
ctgcaaacactaacagaat

SEQ ID NO: 128321 - DNA, 19 bp, Homo sapiens
  siRNA target sequence for CSE1L (NM_001316.2,209-227).
ccgacgtccagctgagaaa

SEQ ID NO: 128322 - DNA, 19 bp, Homo sapiens
  siRNA target sequence for CSE1L (NM_001316.2,210-228).
cgacgtccagctgagaaat

SEQ ID NO: 128323 - DNA, 19 bp, Homo sapiens
  siRNA target sequence for CSE1L (NM_001316.2,211-229).
gacgtccagctgagaaatt

SEQ ID NO: 128324 - DNA, 19 bp, Homo sapiens
  siRNA target sequence for CSE1L (NM_001316.2,238-256).
ctgttgaaggaaatcagaa

SEQ ID NO: 128325 - DNA, 19 bp, Homo sapiens
  siRNA target sequence for CSE1L (NM_001316.2,284-302).
ggagaagtcccaggataat

SEQ ID NO: 128326 - DNA, 19 bp, Homo sapiens
  siRNA target sequence for CSE1L (NM_001316.2,293-311).
ccaggataatgttatcaaa

SEQ ID NO: 128327 - DNA, 19 bp, Homo sapiens
  siRNA target sequence for CSE1L (NM_001316.2,322-340).
cagtaacattcaaaaacta

SEQ ID NO: 128328 - DNA, 19 bp, Homo sapiens
  siRNA target sequence for CSE1L (NM_001316.2,394-412).
ccgatcgagtggccattaa

SEQ ID NO: 128329 - DNA, 19 bp, Homo sapiens
  siRNA target sequence for CSE1L (NM_001316.2,395-413).
cgatcgagtggccattaaa

SEQ ID NO: 128330 - DNA, 19 bp, Homo sapiens
  siRNA target sequence for CSE1L (NM_001316.2,404-422).
ggccattaaagccaacata

SEQ ID NO: 128331 - DNA, 19 bp, Homo sapiens
  siRNA target sequence for CSE1L (NM_001316.2,415-433).
ccaacatagtgcacttgat

SEQ ID NO: 128332 - DNA, 19 bp, Homo sapiens
  siRNA target sequence for CSE1L (NM_001316.2,461-479).
gcagttaagtgatgcaatt

SEQ ID NO: 128333 - DNA, 19 bp, Homo sapiens
  siRNA target sequence for CSE1L (NM_001316.2,462-480).
cagttaagtgatgcaatta

SEQ ID NO: 128334 - DNA, 19 bp, Homo sapiens
  siRNA target sequence for CSE1L (NM_001316.2,581-599).
cctccgtacagcacattca

SEQ ID NO: 128335 - DNA, 19 bp, Homo sapiens
  siRNA target sequence for CSE1L (NM_001316.2,582-600).
ctccgtacagcacattcat

SEQ ID NO: 128336 - DNA, 19 bp, Homo sapiens
  siRNA target sequence for CSE1L (NM_001316.2,584-602).
ccgtacagcacattcatta

SEQ ID NO: 128337 - DNA, 19 bp, Homo sapiens
  siRNA target sequence for CSE1L (NM_001316.2,585-603).
cgtacagcacattcattat

SEQ ID NO: 128338 - DNA, 19 bp, Homo sapiens
  siRNA target sequence for CSE1L (NM_001316.2,586-604).
gtacagcacattcattatt

SEQ ID NO: 128339 - DNA, 19 bp, Homo sapiens
  siRNA target sequence for CSE1L (NM_001316.2,610-628).
gataccgtcatgaatttaa

SEQ ID NO: 128340 - DNA, 19 bp, Homo sapiens
  siRNA target sequence for CSE1L (NM_001316.2,614-632).
ccgtcatgaatttaagtca

SEQ ID NO: 128341 - DNA, 19 bp, Homo sapiens
  siRNA target sequence for CSE1L (NM_001316.2,615-633).
cgtcatgaatttaagtcaa

SEQ ID NO: 128342 - DNA, 19 bp, Homo sapiens
  siRNA target sequence for CSE1L (NM_001316.2,616-634).
gtcatgaatttaagtcaaa

SEQ ID NO: 128343 - DNA, 19 bp, Homo sapiens
  siRNA target sequence for CSE1L (NM_001316.2,635-653).
cgagttatggactgaaatt

SEQ ID NO: 128344 - DNA, 19 bp, Homo sapiens
  siRNA target sequence for CSE1L (NM_001316.2,646-664).
ctgaaattaagcttgttct

SEQ ID NO: 128345 - DNA, 19 bp, Homo sapiens
  siRNA target sequence for CSE1L (NM_001316.2,716-734).
ctgcagtacccatgcaaat

SEQ ID NO: 128346 - DNA, 19 bp, Homo sapiens
  siRNA target sequence for CSE1L (NM_001316.2,718-736).
gcagtacccatgcaaatga

SEQ ID NO: 128347 - DNA, 19 bp, Homo sapiens
  siRNA target sequence for CSE1L (NM_001316.2,774-792).
ctgatctcaaaattgttct

SEQ ID NO: 128348 - DNA, 19 bp, Homo sapiens
  siRNA target sequence for CSE1L (NM_001316.2,776-794).
gatctcaaaattgttctat

SEQ ID NO: 128349 - DNA, 19 bp, Homo sapiens
  siRNA target sequence for CSE1L (NM_001316.2,840-858).
gaaacttggatgaataatt

SEQ ID NO: 128350 - DNA, 19 bp, Homo sapiens
  siRNA target sequence for CSE1L (NM_001316.2,874-892).
cattggataataagctttt

SEQ ID NO: 128351 - DNA, 19 bp, Homo sapiens
  siRNA target sequence for CSE1L (NM_001316.2,879-897).
gataataagcttttacaaa

SEQ ID NO: 128352 - DNA, 19 bp, Homo sapiens
  siRNA target sequence for CSE1L (NM_001316.2,930-948).
ctcttaaaatcccagattt

SEQ ID NO: 128353 - DNA, 19 bp, Homo sapiens
  siRNA target sequence for CSE1L (NM_001316.2,932-950).
cttaaaatcccagatttgt

SEQ ID NO: 128354 - DNA, 19 bp, Homo sapiens
  siRNA target sequence for CSE1L (NM_001316.2,960-978).
gcactctatgcacaaaagt

SEQ ID NO: 128355 - DNA, 19 bp, Homo sapiens
  siRNA target sequence for CSE1L (NM_001316.2,995-1013).
gcgatacctgcctcgtttt

SEQ ID NO: 128356 - DNA, 19 bp, Homo sapiens
  siRNA target sequence for CSE1L (NM_001316.2,1022-1040).
catctggaatttactagtt

SEQ ID NO: 128357 - DNA, 19 bp, Homo sapiens
  siRNA target sequence for CSE1L (NM_001316.2,1025-1043).
ctggaatttactagttaca

SEQ ID NO: 128358 - DNA, 19 bp, Homo sapiens
  siRNA target sequence for CSE1L (NM_001316.2,1042-1060).
caacgggtcaagaggttaa

SEQ ID NO: 128359 - DNA, 19 bp, Homo sapiens
  siRNA target sequence for CSE1L (NM_001316.2,1045-1063).
cgggtcaagaggttaaata

SEQ ID NO: 128360 - DNA, 19 bp, Homo sapiens
  siRNA target sequence for CSE1L (NM_001316.2,1046-1064).
gggtcaagaggttaaatat

SEQ ID NO: 128361 - DNA, 19 bp, Homo sapiens
  siRNA target sequence for CSE1L (NM_001316.2,1070-1088).
gttggtaagtaatgcaatt

SEQ ID NO: 128362 - DNA, 19 bp, Homo sapiens
  siRNA target sequence for CSE1L (NM_001316.2,1073-1091).
ggtaagtaatgcaattcaa

SEQ ID NO: 128363 - DNA, 19 bp, Homo sapiens
  siRNA target sequence for CSE1L (NM_001316.2,1078-1096).
gtaatgcaattcaatttct

SEQ ID NO: 128364 - DNA, 19 bp, Homo sapiens
  siRNA target sequence for CSE1L (NM_001316.2,1108-1126).
gtgagagacctcattataa

SEQ ID NO: 128365 - DNA, 19 bp, Homo sapiens
  siRNA target sequence for CSE1L (NM_001316.2,1110-1128).
gagagacctcattataaga

SEQ ID NO: 128366 - DNA, 19 bp, Homo sapiens
  siRNA target sequence for CSE1L (NM_001316.2,1112-1130).
gagacctcattataagaat

SEQ ID NO: 128367 - DNA, 19 bp, Homo sapiens
  siRNA target sequence for CSE1L (NM_001316.2,1114-1132).
gacctcattataagaatct

SEQ ID NO: 128368 - DNA, 19 bp, Homo sapiens
  siRNA target sequence for CSE1L (NM_001316.2,1143-1161).
cagaacacgctgacaagta

SEQ ID NO: 128369 - DNA, 19 bp, Homo sapiens
  siRNA target sequence for CSE1L (NM_001316.2,1179-1197).
gtgcctaacatggaattta

SEQ ID NO: 128370 - DNA, 19 bp, Homo sapiens
  siRNA target sequence for CSE1L (NM_001316.2,1257-1275).
gaaggatctgatattgata

SEQ ID NO: 128371 - DNA, 19 bp, Homo sapiens
  siRNA target sequence for CSE1L (NM_001316.2,1260-1278).
ggatctgatattgatacta

SEQ ID NO: 128372 - DNA, 19 bp, Homo sapiens
  siRNA target sequence for CSE1L (NM_001316.2,1296-1314).
gatctggtacgaggattat

SEQ ID NO: 128373 - DNA, 19 bp, Homo sapiens
  siRNA target sequence for CSE1L (NM_001316.2,1299-1317).
ctggtacgaggattatgca

SEQ ID NO: 128374 - DNA, 19 bp, Homo sapiens
  siRNA target sequence for CSE1L (NM_001316.2,1305-1323).
cgaggattatgcaagtttt

SEQ ID NO: 128375 - DNA, 19 bp, Homo sapiens
  siRNA target sequence for CSE1L (NM_001316.2,1309-1327).
gattatgcaagttttttga

SEQ ID NO: 128376 - DNA, 19 bp, Homo sapiens
  siRNA target sequence for CSE1L (NM_001316.2,1371-1389).
ctgcaggaatacgcaaaaa

SEQ ID NO: 128377 - DNA, 19 bp, Homo sapiens
  siRNA target sequence for CSE1L (NM_001316.2,1377-1395).
gaatacgcaaaaaatccat

SEQ ID NO: 128378 - DNA, 19 bp, Homo sapiens
  siRNA target sequence for CSE1L (NM_001316.2,1486-1504).
caaatgaacttgtaaacct

SEQ ID NO: 128379 - DNA, 19 bp, Homo sapiens
  siRNA target sequence for CSE1L (NM_001316.2,1578-1596).
gctgacggtatcaaatata

SEQ ID NO: 128380 - DNA, 19 bp, Homo sapiens
  siRNA target sequence for CSE1L (NM_001316.2,1579-1597).
ctgacggtatcaaatatat

SEQ ID NO: 128381 - DNA, 19 bp, Homo sapiens
  siRNA target sequence for CSE1L (NM_001316.2,1581-1599).
gacggtatcaaatatatta

SEQ ID NO: 128382 - DNA, 19 bp, Homo sapiens
  siRNA target sequence for CSE1L (NM_001316.2,1643-1661).
gattcctctcttgattaat

SEQ ID NO: 128383 - DNA, 19 bp, Homo sapiens
  siRNA target sequence for CSE1L (NM_001316.2,1648-1666).
ctctcttgattaatcatct

SEQ ID NO: 128384 - DNA, 19 bp, Homo sapiens
  siRNA target sequence for CSE1L (NM_001316.2,1707-1725).
gctcttgaacggctcttta

SEQ ID NO: 128385 - DNA, 19 bp, Homo sapiens
  siRNA target sequence for CSE1L (NM_001316.2,1726-1744).
ctatgcgagggcctaacaa

SEQ ID NO: 128386 - DNA, 19 bp, Homo sapiens
  siRNA target sequence for CSE1L (NM_001316.2,1774-1792).
caccgtttgttgagattct

SEQ ID NO: 128387 - DNA, 19 bp, Homo sapiens
  siRNA target sequence for CSE1L (NM_001316.2,1787-1805).
gattctgctaacaaacctt

SEQ ID NO: 128388 - DNA, 19 bp, Homo sapiens
  siRNA target sequence for CSE1L (NM_001316.2,1791-1809).
ctgctaacaaaccttttca

SEQ ID NO: 128389 - DNA, 19 bp, Homo sapiens
  siRNA target sequence for CSE1L (NM_001316.2,1934-1952).
gaagctattagctgttagt

SEQ ID NO: 128390 - DNA, 19 bp, Homo sapiens
  siRNA target sequence for CSE1L (NM_001316.2,1960-1978).
caagcaaacctcactttaa

SEQ ID NO: 128391 - DNA, 19 bp, Homo sapiens
  siRNA target sequence for CSE1L (NM_001316.2,1971-1989).
cactttaatcactacatgt

SEQ ID NO: 128392 - DNA, 19 bp, Homo sapiens
  siRNA target sequence for CSE1L (NM_001316.2,1982-2000).
ctacatgtttgaagcaata

SEQ ID NO: 128393 - DNA, 19 bp, Homo sapiens
  siRNA target sequence for CSE1L (NM_001316.2,1992-2010).
gaagcaatatgtttatcca

SEQ ID NO: 128394 - DNA, 19 bp, Homo sapiens
  siRNA target sequence for CSE1L (NM_001316.2,2116-2134).
catacgtctttcaagtgat

SEQ ID NO: 128395 - DNA, 19 bp, Homo sapiens
  siRNA target sequence for CSE1L (NM_001316.2,2137-2155).
ctttgcttctggaaacaca

SEQ ID NO: 128396 - DNA, 19 bp, Homo sapiens
  siRNA target sequence for CSE1L (NM_001316.2,2271-2289).
gaacgcggttcaaacacaa

SEQ ID NO: 128397 - DNA, 19 bp, Homo sapiens
  siRNA target sequence for CSE1L (NM_001316.2,2276-2294).
cggttcaaacacaatagca

SEQ ID NO: 128398 - DNA, 19 bp, Homo sapiens
  siRNA target sequence for CSE1L (NM_001316.2,2296-2314).
gtgctgcagctgacaaaat

SEQ ID NO: 128399 - DNA, 19 bp, Homo sapiens
  siRNA target sequence for CSE1L (NM_001316.2,2345-2363).
gattgcatccaaagcaaat

SEQ ID NO: 128400 - DNA, 19 bp, Homo sapiens
  siRNA target sequence for CSE1L (NM_001316.2,2359-2377).
caaatgaccaccaaggttt

SEQ ID NO: 128401 - DNA, 19 bp, Homo sapiens
  siRNA target sequence for CSE1L (NM_001316.2,2366-2384).
ccaccaaggtttttatctt

SEQ ID NO: 128402 - DNA, 19 bp, Homo sapiens
  siRNA target sequence for CSE1L (NM_001316.2,2405-2423).
catgcctcctgaatcagtt

SEQ ID NO: 128403 - DNA, 19 bp, Homo sapiens
  siRNA target sequence for CSE1L (NM_001316.2,2413-2431).
ctgaatcagttgaccaata

SEQ ID NO: 128404 - DNA, 19 bp, Homo sapiens
  siRNA target sequence for CSE1L (NM_001316.2,2415-2433).
gaatcagttgaccaatata

SEQ ID NO: 128405 - DNA, 19 bp, Homo sapiens
  siRNA target sequence for CSE1L (NM_001316.2,2419-2437).
cagttgaccaatataggaa

SEQ ID NO: 128406 - DNA, 19 bp, Homo sapiens
  siRNA target sequence for CSE1L (NM_001316.2,2540-2558).
ggcactagcactacaagaa

SEQ ID NO: 128407 - DNA, 19 bp, Homo sapiens
  siRNA target sequence for CSE1L (NM_001316.2,2565-2583).
gatggtatacaaccaaaaa

SEQ ID NO: 128408 - DNA, 19 bp, Homo sapiens
  siRNA target sequence for CSE1L (NM_001316.2,2569-2587).
gtatacaaccaaaaatgtt

SEQ ID NO: 128409 - DNA, 19 bp, Homo sapiens
  siRNA target sequence for CSE1L (NM_001316.2,2659-2677).
gtgcggttggcataaccaa

SEQ ID NO: 128410 - DNA, 19 bp, Homo sapiens
  siRNA target sequence for CSE1L (NM_001316.2,2663-2681).
ggttggcataaccaaatta

SEQ ID NO: 128411 - DNA, 19 bp, Homo sapiens
  siRNA target sequence for CSE1L (NM_001316.2,2675-2693).
caaattactaacagaatgt

SEQ ID NO: 128412 - DNA, 19 bp, Homo sapiens
  siRNA target sequence for CSE1L (NM_001316.2,2686-2704).
cagaatgtcccccaatgat

SEQ ID NO: 128413 - DNA, 19 bp, Homo sapiens
  siRNA target sequence for CSE1L (NM_001316.2,2720-2738).
caaactgtggactccatta

SEQ ID NO: 128414 - DNA, 19 bp, Homo sapiens
  siRNA target sequence for CSE1L (NM_001316.2,2733-2751).
ccattattacagtctttga

SEQ ID NO: 128415 - DNA, 19 bp, Homo sapiens
  siRNA target sequence for CSE1L (NM_001316.2,2734-2752).
cattattacagtctttgat

SEQ ID NO: 128416 - DNA, 19 bp, Homo sapiens
  siRNA target sequence for CSE1L (NM_001316.2,2883-2901).
gtaggtcaaatggtgaata

SEQ ID NO: 128417 - DNA, 19 bp, Homo sapiens
  siRNA target sequence for CSE1L (NM_001316.2,2920-2938).
cacagtcacttcacaagtt

SEQ ID NO: 128418 - DNA, 19 bp, Homo sapiens
  siRNA target sequence for CSE1L (NM_001316.2,2953-2971).
caggaagggttccatcaat

SEQ ID NO: 128419 - DNA, 19 bp, Homo sapiens
  siRNA target sequence for RBX1 (NM_014248.2,71-89).
gcaagaagcgctttgaagt

SEQ ID NO: 128420 - DNA, 19 bp, Homo sapiens
  siRNA target sequence for RBX1 (NM_014248.2,75-93).
gaagcgctttgaagtgaaa

SEQ ID NO: 128421 - DNA, 19 bp, Homo sapiens
  siRNA target sequence for RBX1 (NM_014248.2,152-170).
gcaggaaccacattatgga

SEQ ID NO: 128422 - DNA, 19 bp, Homo sapiens
  siRNA target sequence for RBX1 (NM_014248.2,153-171).
caggaaccacattatggat

SEQ ID NO: 128423 - DNA, 19 bp, Homo sapiens
  siRNA target sequence for RBX1 (NM_014248.2,195-213).
ccaggcgtccgctacttca

SEQ ID NO: 128424 - DNA, 19 bp, Homo sapiens
  siRNA target sequence for RBX1 (NM_014248.2,198-216).
ggcgtccgctacttcagaa

SEQ ID NO: 128425 - DNA, 19 bp, Homo sapiens
  siRNA target sequence for RBX1 (NM_014248.2,316-334).
gagtgggaattccaaaagt

SEQ ID NO: 128426 - DNA, 19 bp, Homo sapiens
  siRNA target sequence for AB026190 (NM_014458.3,197-215).
gcgcaggtgtaccaacatt

SEQ ID NO: 128427 - DNA, 19 bp, Homo sapiens
  siRNA target sequence for AB026190 (NM_014458.3,300-318).
gcccgcatgccctatatct

SEQ ID NO: 128428 - DNA, 19 bp, Homo sapiens
  siRNA target sequence for AB026190 (NM_014458.3,302-320).
ccgcatgccctatatctca

SEQ ID NO: 128429 - DNA, 19 bp, Homo sapiens
  siRNA target sequence for AB026190 (NM_014458.3,334-352).
gacaaaccttggaagtgat

SEQ ID NO: 128430 - DNA, 19 bp, Homo sapiens
  siRNA target sequence for AB026190 (NM_014458.3,368-386).
gcaccgggagctatgtgat

SEQ ID NO: 128431 - DNA, 19 bp, Homo sapiens
  siRNA target sequence for AB026190 (NM_014458.3,420-438).
gcccatcgagtcattttgt

SEQ ID NO: 128432 - DNA, 19 bp, Homo sapiens
  siRNA target sequence for AB026190 (NM_014458.3,422-440).
ccatcgagtcattttgtca

SEQ ID NO: 128433 - DNA, 19 bp, Homo sapiens
  siRNA target sequence for AB026190 (NM_014458.3,455-473).
cttccgagctatgtttaca

SEQ ID NO: 128434 - DNA, 19 bp, Homo sapiens
  siRNA target sequence for AB026190 (NM_014458.3,463-481).
ctatgtttacaggagaatt

SEQ ID NO: 128435 - DNA, 19 bp, Homo sapiens
  siRNA target sequence for AB026190 (NM_014458.3,490-508).
gccgtcagacagaagtagt

SEQ ID NO: 128436 - DNA, 19 bp, Homo sapiens
  siRNA target sequence for AB026190 (NM_014458.3,524-542).
cgagagggctatggaatta

SEQ ID NO: 128437 - DNA, 19 bp, Homo sapiens
  siRNA target sequence for AB026190 (NM_014458.3,530-548).
ggctatggaattactgatt

SEQ ID NO: 128438 - DNA, 19 bp, Homo sapiens
  siRNA target sequence for AB026190 (NM_014458.3,555-573).
gcgtatacctcccagataa

SEQ ID NO: 128439 - DNA, 19 bp, Homo sapiens
  siRNA target sequence for AB026190 (NM_014458.3,557-575).
gtatacctcccagataaca

SEQ ID NO: 128440 - DNA, 19 bp, Homo sapiens
  siRNA target sequence for AB026190 (NM_014458.3,563-581).
ctcccagataacagtagaa

SEQ ID NO: 128441 - DNA, 19 bp, Homo sapiens
  siRNA target sequence for AB026190 (NM_014458.3,667-685).
gacaattagatccttctaa

SEQ ID NO: 128442 - DNA, 19 bp, Homo sapiens
  siRNA target sequence for AB026190 (NM_014458.3,669-687).
caattagatccttctaact

SEQ ID NO: 128443 - DNA, 19 bp, Homo sapiens
  siRNA target sequence for AB026190 (NM_014458.3,692-710).
gggcattcgggcttttgct

SEQ ID NO: 128444 - DNA, 19 bp, Homo sapiens
  siRNA target sequence for AB026190 (NM_014458.3,724-742).
gtcgtgagttgctaaggat

SEQ ID NO: 128445 - DNA, 19 bp, Homo sapiens
  siRNA target sequence for AB026190 (NM_014458.3,747-765).
gacaagttcacccaacata

SEQ ID NO: 128446 - DNA, 19 bp, Homo sapiens
  siRNA target sequence for AB026190 (NM_014458.3,752-770).
gttcacccaacataacttt

SEQ ID NO: 128447 - DNA, 19 bp, Homo sapiens
  siRNA target sequence for AB026190 (NM_014458.3,800-818).
gttgcttccagccaatcaa

SEQ ID NO: 128448 - DNA, 19 bp, Homo sapiens
  siRNA target sequence for AB026190 (NM_014458.3,811-829).
ccaatcaactcattgatat

SEQ ID NO: 128449 - DNA, 19 bp, Homo sapiens
  siRNA target sequence for AB026190 (NM_014458.3,816-834).
caactcattgatataatat

SEQ ID NO: 128450 - DNA, 19 bp, Homo sapiens
  siRNA target sequence for AB026190 (NM_014458.3,819-837).
ctcattgatataatatcca

SEQ ID NO: 128451 - DNA, 19 bp, Homo sapiens
  siRNA target sequence for AB026190 (NM_014458.3,835-853).
ccagtgatgagctaaacgt

SEQ ID NO: 128452 - DNA, 19 bp, Homo sapiens
  siRNA target sequence for AB026190 (NM_014458.3,836-854).
cagtgatgagctaaacgtt

SEQ ID NO: 128453 - DNA, 19 bp, Homo sapiens
  siRNA target sequence for AB026190 (NM_014458.3,851-869).
cgttcgcagtgaagaacaa

SEQ ID NO: 128454 - DNA, 19 bp, Homo sapiens
  siRNA target sequence for AB026190 (NM_014458.3,882-900).
gtgatggcctgggtcaaat

SEQ ID NO: 128455 - DNA, 19 bp, Homo sapiens
  siRNA target sequence for AB026190 (NM_014458.3,911-929).
ggaaagacgtcctcaatta

SEQ ID NO: 128456 - DNA, 19 bp, Homo sapiens
  siRNA target sequence for AB026190 (NM_014458.3,948-966).
gttcgtttgcctttgctta

SEQ ID NO: 128457 - DNA, 19 bp, Homo sapiens
  siRNA target sequence for AB026190 (NM_014458.3,1038-1056).
gtagatgaggctaaaaact

SEQ ID NO: 128458 - DNA, 19 bp, Homo sapiens
  siRNA target sequence for AB026190 (NM_014458.3,1048-1066).
ctaaaaactacctcctatt

SEQ ID NO: 128459 - DNA, 19 bp, Homo sapiens
  siRNA target sequence for AB026190 (NM_014458.3,1069-1087).
cgcaagaacgaccactaat

SEQ ID NO: 128460 - DNA, 19 bp, Homo sapiens
  siRNA target sequence for AB026190 (NM_014458.3,1102-1120).
cgagaccacggaaacctat

SEQ ID NO: 128461 - DNA, 19 bp, Homo sapiens
  siRNA target sequence for AB026190 (NM_014458.3,1123-1141).
gatgtggggaagtactctt

SEQ ID NO: 128462 - DNA, 19 bp, Homo sapiens
  siRNA target sequence for AB026190 (NM_014458.3,1213-1231).
ggagaatggtggcttcaat

SEQ ID NO: 128463 - DNA, 19 bp, Homo sapiens
  siRNA target sequence for AB026190 (NM_014458.3,1221-1239).
gtggcttcaatgagcaaaa

SEQ ID NO: 128464 - DNA, 19 bp, Homo sapiens
  siRNA target sequence for AB026190 (NM_014458.3,1256-1274).
ggtcagtgttcttgatgat

SEQ ID NO: 128465 - DNA, 19 bp, Homo sapiens
  siRNA target sequence for AB026190 (NM_014458.3,1295-1313).
ccatgatggatcctcttat

SEQ ID NO: 128466 - DNA, 19 bp, Homo sapiens
  siRNA target sequence for AB026190 (NM_014458.3,1302-1320).
ggatcctcttatctcaata

SEQ ID NO: 128467 - DNA, 19 bp, Homo sapiens
  siRNA target sequence for AB026190 (NM_014458.3,1307-1325).
ctcttatctcaatagtgtt

SEQ ID NO: 128468 - DNA, 19 bp, Homo sapiens
  siRNA target sequence for AB026190 (NM_014458.3,1330-1348).
ggtatgaccccaaaacaaa

SEQ ID NO: 128469 - DNA, 19 bp, Homo sapiens
  siRNA target sequence for AB026190 (NM_014458.3,1379-1397).
cacctgcaggacaagtgtt

SEQ ID NO: 128470 - DNA, 19 bp, Homo sapiens
  siRNA target sequence for AB026190 (NM_014458.3,1453-1471).
cttgcctcaacattgttga

SEQ ID NO: 128471 - DNA, 19 bp, Homo sapiens
  siRNA target sequence for AB026190 (NM_014458.3,1503-1521).
cgggtagcttctatgagta

SEQ ID NO: 128472 - DNA, 19 bp, Homo sapiens
  siRNA target sequence for AB026190 (NM_014458.3,1548-1566).
gtgttaggagggttcttat

SEQ ID NO: 128473 - DNA, 19 bp, Homo sapiens
  siRNA target sequence for AB026190 (NM_014458.3,1550-1568).
gttaggagggttcttatat

SEQ ID NO: 128474 - DNA, 19 bp, Homo sapiens
  siRNA target sequence for AB026190 (NM_014458.3,1689-1707).
gtatatcaggacatgatct

SEQ ID NO: 128475 - DNA, 19 bp, Homo sapiens
  siRNA target sequence for AB026190 (NM_014458.3,1847-1865).
catggcagtaggaggtttt

SEQ ID NO: 128476 - DNA, 19 bp, Homo sapiens
  siRNA target sequence for AB026190 (NM_014458.3,1850-1868).
ggcagtaggaggttttgat

SEQ ID NO: 128477 - DNA, 19 bp, Homo sapiens
  siRNA target sequence for AB026190 (NM_014458.3,1866-1884).
gatggcacaacatacttga

SEQ ID NO: 128478 - DNA, 19 bp, Homo sapiens
  siRNA target sequence for AB026190 (NM_014458.3,1925-1943).
gttatatggcgggatgaat

SEQ ID NO: 128479 - DNA, 19 bp, Homo sapiens
  siRNA target sequence for AB026190 (NM_014458.3,1957-1975).
ggggtggcgtaggagttat

SEQ ID NO: 128480 - DNA, 19 bp, Homo sapiens
  siRNA target sequence for AB026190 (NM_014458.3,1958-1976).
gggtggcgtaggagttatt

SEQ ID NO: 128481 - DNA, 19 bp, Homo sapiens
  siRNA target sequence for AB026190 (NM_014458.3,1959-1977).
ggtggcgtaggagttatta

SEQ ID NO: 128482 - DNA, 19 bp, Homo sapiens
  siRNA target sequence for AB026190 (NM_014458.3,1960-1978).
gtggcgtaggagttattaa

SEQ ID NO: 128483 - DNA, 19 bp, Homo sapiens
  siRNA target sequence for AB026190 (NM_014458.3,1962-1980).
ggcgtaggagttattaaaa

SEQ ID NO: 128484 - DNA, 19 bp, Homo sapiens
  siRNA target sequence for AB026190 (NM_014458.3,1963-1981).
gcgtaggagttattaaaat

SEQ ID NO: 128485 - DNA, 19 bp, Homo sapiens
  siRNA target sequence for AB026190 (NM_014458.3,1986-2004).
cattgtgaatcccatattt

SEQ ID NO: 128486 - DNA, 19 bp, Homo sapiens
  siRNA target sequence for ABTB1 (NM_032548.2,852-870).
cgagctccgaggtgatctt

SEQ ID NO: 128487 - DNA, 19 bp, Homo sapiens
  siRNA target sequence for ABTB1 (NM_032548.2,853-871).
gagctccgaggtgatcttt

SEQ ID NO: 128488 - DNA, 19 bp, Homo sapiens
  siRNA target sequence for ABTB1 (NM_032548.2,971-989).
gtggccgcagtgactactt

SEQ ID NO: 128489 - DNA, 19 bp, Homo sapiens
  siRNA target sequence for ABTB1 (NM_032548.2,1091-1109).
ctcacgtgctctactacat

SEQ ID NO: 128490 - DNA, 19 bp, Homo sapiens
  siRNA target sequence for ABTB1 (NM_032548.2,1093-1111).
cacgtgctctactacatgt

SEQ ID NO: 128491 - DNA, 19 bp, Homo sapiens
  siRNA target sequence for ABTB1 (NM_032548.2,1136-1154).
ccgaggcagcctatgatgt

SEQ ID NO: 128492 - DNA, 19 bp, Homo sapiens
  siRNA target sequence for ABTB1 (NM_172027.1,336-354).
gggctctacgcgattacaa

SEQ ID NO: 128493 - DNA, 19 bp, Homo sapiens
  siRNA target sequence for ABTB1 (NM_172027.1,372-390).
gcaggaggcgggattacta

SEQ ID NO: 128494 - DNA, 19 bp, Homo sapiens
  siRNA target sequence for ABTB1 (NM_172027.1,373-391).
caggaggcgggattactat

SEQ ID NO: 128495 - DNA, 19 bp, Homo sapiens
  siRNA target sequence for ABTB1 (NM_172027.1,375-393).
ggaggcgggattactatga

SEQ ID NO: 128496 - DNA, 19 bp, Homo sapiens
  siRNA target sequence for ABTB1 (NM_172027.1,430-448).
cagtgacgtggtctttgta

SEQ ID NO: 128497 - DNA, 19 bp, Homo sapiens
  siRNA target sequence for ABTB1 (NM_172027.1,432-450).
gtgacgtggtctttgtagt

SEQ ID NO: 128498 - DNA, 19 bp, Homo sapiens
  siRNA target sequence for ABTB1 (NM_172028.1,161-179).
cgagacgtggaggtactat

SEQ ID NO: 128499 - DNA, 19 bp, Homo sapiens
  siRNA target sequence for ABTB2 (NM_145804.1,789-807).
ccgccacagcccatcactt

SEQ ID NO: 128500 - DNA, 19 bp, Homo sapiens
  siRNA target sequence for ABTB2 (NM_145804.1,822-840).
ctccacacgctctactact

SEQ ID NO: 128501 - DNA, 19 bp, Homo sapiens
  siRNA target sequence for ABTB2 (NM_145804.1,824-842).
ccacacgctctactacttt

SEQ ID NO: 128502 - DNA, 19 bp, Homo sapiens
  siRNA target sequence for ABTB2 (NM_145804.1,892-910).
cgagaatgaccttgaacaa

SEQ ID NO: 128503 - DNA, 19 bp, Homo sapiens
  siRNA target sequence for ABTB2 (NM_145804.1,893-911).
gagaatgaccttgaacaat

SEQ ID NO: 128504 - DNA, 19 bp, Homo sapiens
  siRNA target sequence for ABTB2 (NM_145804.1,1071-1089).
cccgaacactgtttcagtt

SEQ ID NO: 128505 - DNA, 19 bp, Homo sapiens
  siRNA target sequence for ABTB2 (NM_145804.1,1203-1221).
ggtccggatggggttaaca

SEQ ID NO: 128506 - DNA, 19 bp, Homo sapiens
  siRNA target sequence for ABTB2 (NM_145804.1,1237-1255).
gtatgacgccactgatgta

SEQ ID NO: 128507 - DNA, 19 bp, Homo sapiens
  siRNA target sequence for ABTB2 (NM_145804.1,1516-1534).
ctgcggcagggaactatga

SEQ ID NO: 128508 - DNA, 19 bp, Homo sapiens
  siRNA target sequence for ABTB2 (NM_145804.1,1611-1629).
ctccacgaggacatgaact

SEQ ID NO: 128509 - DNA, 19 bp, Homo sapiens
  siRNA target sequence for ABTB2 (NM_145804.1,1824-1842).
caggaggccatgtactaca

SEQ ID NO: 128510 - DNA, 19 bp, Homo sapiens
  siRNA target sequence for ABTB2 (NM_145804.1,2172-2190).
ctagatccacactttttga

SEQ ID NO: 128511 - DNA, 19 bp, Homo sapiens
  siRNA target sequence for ABTB2 (NM_145804.1,2175-2193).
gatccacactttttgaaca

SEQ ID NO: 128512 - DNA, 19 bp, Homo sapiens
  siRNA target sequence for ABTB2 (NM_145804.1,2259-2277).
ctggtgacagcttctaaca

SEQ ID NO: 128513 - DNA, 19 bp, Homo sapiens
  siRNA target sequence for ABTB2 (NM_145804.1,2337-2355).
gagatcagcgacatgaagt

SEQ ID NO: 128514 - DNA, 19 bp, Homo sapiens
  siRNA target sequence for ABTB2 (NM_145804.1,2527-2545).
ccgtgaacacctacaaata

SEQ ID NO: 128515 - DNA, 19 bp, Homo sapiens
  siRNA target sequence for ABTB2 (NM_145804.1,2528-2546).
cgtgaacacctacaaatat

SEQ ID NO: 128516 - DNA, 19 bp, Homo sapiens
  siRNA target sequence for AKAP10 (NM_007202.2,263-281).
gtccattaaagcttcaata

SEQ ID NO: 128517 - DNA, 19 bp, Homo sapiens
  siRNA target sequence for AKAP10 (NM_007202.2,273-291).
gcttcaatatccgtacatt

SEQ ID NO: 128518 - DNA, 19 bp, Homo sapiens
  siRNA target sequence for AKAP10 (NM_007202.2,288-306).
cattccccacaaaaaagca

SEQ ID NO: 128519 - DNA, 19 bp, Homo sapiens
  siRNA target sequence for AKAP10 (NM_007202.2,337-355).
gaccaagtcatgttgcaat

SEQ ID NO: 128520 - DNA, 19 bp, Homo sapiens
  siRNA target sequence for AKAP10 (NM_007202.2,369-387).
gccaacatggactcctttt

SEQ ID NO: 128521 - DNA, 19 bp, Homo sapiens
  siRNA target sequence for AKAP10 (NM_007202.2,394-412).
gcaggacagccacacttaa

SEQ ID NO: 128522 - DNA, 19 bp, Homo sapiens
  siRNA target sequence for AKAP10 (NM_007202.2,397-415).
ggacagccacacttaagaa

SEQ ID NO: 128523 - DNA, 19 bp, Homo sapiens
  siRNA target sequence for AKAP10 (NM_007202.2,428-446).
catggaggccgctcatttt

SEQ ID NO: 128524 - DNA, 19 bp, Homo sapiens
  siRNA target sequence for AKAP10 (NM_007202.2,431-449).
ggaggccgctcattttggt

SEQ ID NO: 128525 - DNA, 19 bp, Homo sapiens
  siRNA target sequence for AKAP10 (NM_007202.2,535-553).
ctattgtcctcccttactt

SEQ ID NO: 128526 - DNA, 19 bp, Homo sapiens
  siRNA target sequence for AKAP10 (NM_007202.2,601-619).
ggttagaggctgaaagttt

SEQ ID NO: 128527 - DNA, 19 bp, Homo sapiens
  siRNA target sequence for AKAP10 (NM_007202.2,609-627).
gctgaaagttttcattcaa

SEQ ID NO: 128528 - DNA, 19 bp, Homo sapiens
  siRNA target sequence for AKAP10 (NM_007202.2,695-713).
ctctccatctaaaaagcat

SEQ ID NO: 128529 - DNA, 19 bp, Homo sapiens
  siRNA target sequence for AKAP10 (NM_007202.2,714-732).
gaaactacagcgtcttttt

SEQ ID NO: 128530 - DNA, 19 bp, Homo sapiens
  siRNA target sequence for AKAP10 (NM_007202.2,721-739).
cagcgtcttttttaactga

SEQ ID NO: 128531 - DNA, 19 bp, Homo sapiens
  siRNA target sequence for AKAP10 (NM_007202.2,723-741).
gcgtcttttttaactgatt

SEQ ID NO: 128532 - DNA, 19 bp, Homo sapiens
  siRNA target sequence for AKAP10 (NM_007202.2,777-795).
cagttgtttatgactcatt

SEQ ID NO: 128533 - DNA, 19 bp, Homo sapiens
  siRNA target sequence for AKAP10 (NM_007202.2,788-806).
gactcattcagaaggaatt

SEQ ID NO: 128534 - DNA, 19 bp, Homo sapiens
  siRNA target sequence for AKAP10 (NM_007202.2,798-816).
gaaggaattgacctgaata

SEQ ID NO: 128535 - DNA, 19 bp, Homo sapiens
  siRNA target sequence for AKAP10 (NM_007202.2,872-890).
ccattctctccgtcttgaa

SEQ ID NO: 128536 - DNA, 19 bp, Homo sapiens
  siRNA target sequence for AKAP10 (NM_007202.2,920-938).
catggaaacccaagaatct

SEQ ID NO: 128537 - DNA, 19 bp, Homo sapiens
  siRNA target sequence for AKAP10 (NM_007202.2,933-951).
gaatcttcctctacactta

SEQ ID NO: 128538 - DNA, 19 bp, Homo sapiens
  siRNA target sequence for AKAP10 (NM_007202.2,948-966).
cttacagtagccagtagaa

SEQ ID NO: 128539 - DNA, 19 bp, Homo sapiens
  siRNA target sequence for AKAP10 (NM_007202.2,970-988).
gtcccgcttctccactaaa

SEQ ID NO: 128540 - DNA, 19 bp, Homo sapiens
  siRNA target sequence for AKAP10 (NM_007202.2,973-991).
ccgcttctccactaaaaga

SEQ ID NO: 128541 - DNA, 19 bp, Homo sapiens
  siRNA target sequence for AKAP10 (NM_007202.2,1065-1083).
gctgctaaaccaataccaa

SEQ ID NO: 128542 - DNA, 19 bp, Homo sapiens
  siRNA target sequence for AKAP10 (NM_007202.2,1066-1084).
ctgctaaaccaataccaat

SEQ ID NO: 128543 - DNA, 19 bp, Homo sapiens
  siRNA target sequence for AKAP10 (NM_007202.2,1137-1155).
caggtggatcccaactgtt

SEQ ID NO: 128544 - DNA, 19 bp, Homo sapiens
  siRNA target sequence for AKAP10 (NM_007202.2,1217-1235).
gcgaagtcaccatttctgt

SEQ ID NO: 128545 - DNA, 19 bp, Homo sapiens
  siRNA target sequence for AKAP10 (NM_007202.2,1218-1236).
cgaagtcaccatttctgta

SEQ ID NO: 128546 - DNA, 19 bp, Homo sapiens
  siRNA target sequence for AKAP10 (NM_007202.2,1232-1250).
ctgtaaataccagattgaa

SEQ ID NO: 128547 - DNA, 19 bp, Homo sapiens
  siRNA target sequence for AKAP10 (NM_007202.2,1294-1312).
gtgagtcagccctctttta

SEQ ID NO: 128548 - DNA, 19 bp, Homo sapiens
  siRNA target sequence for AKAP10 (NM_007202.2,1344-1362).
gtgaatatcttacaattct

SEQ ID NO: 128549 - DNA, 19 bp, Homo sapiens
  siRNA target sequence for AKAP10 (NM_007202.2,1363-1381).
ggttggcagcagataactt

SEQ ID NO: 128550 - DNA, 19 bp, Homo sapiens
  siRNA target sequence for AKAP10 (NM_007202.2,1400-1418).
caaaaagggccaatatgat

SEQ ID NO: 128551 - DNA, 19 bp, Homo sapiens
  siRNA target sequence for AKAP10 (NM_007202.2,1500-1518).
gatgttgtacgattagaaa

SEQ ID NO: 128552 - DNA, 19 bp, Homo sapiens
  siRNA target sequence for AKAP10 (NM_007202.2,1506-1524).
gtacgattagaaattgaat

SEQ ID NO: 128553 - DNA, 19 bp, Homo sapiens
  siRNA target sequence for AKAP10 (NM_007202.2,1669-1687).
cggttcgaggagatgaatt

SEQ ID NO: 128554 - DNA, 19 bp, Homo sapiens
  siRNA target sequence for AKAP10 (NM_007202.2,1670-1688).
ggttcgaggagatgaattt

SEQ ID NO: 128555 - DNA, 19 bp, Homo sapiens
  siRNA target sequence for AKAP10 (NM_007202.2,1794-1812).
gccagtattaaaatactga

SEQ ID NO: 128556 - DNA, 19 bp, Homo sapiens
  siRNA target sequence for AKAP10 (NM_007202.2,1851-1869).
ctggatccagaatctttat

SEQ ID NO: 128557 - DNA, 19 bp, Homo sapiens
  siRNA target sequence for AKAP10 (NM_007202.2,1922-1940).
gcaattcatccgagaatct

SEQ ID NO: 128558 - DNA, 19 bp, Homo sapiens
  siRNA target sequence for AKAP10 (NM_007202.2,1941-1959).
gagcctgaacctgatgtaa

SEQ ID NO: 128559 - DNA, 19 bp, Homo sapiens
  siRNA target sequence for AKAP10 (NM_007202.2,1945-1963).
ctgaacctgatgtaaggaa

SEQ ID NO: 128560 - DNA, 19 bp, Homo sapiens
  siRNA target sequence for AKAP10 (NM_007202.2,1997-2015).
gaaatgggtgcaaggaaat

SEQ ID NO: 128561 - DNA, 19 bp, Homo sapiens
  siRNA target sequence for AKAP10 (NM_007202.2,2002-2020).
gggtgcaaggaaatactga

SEQ ID NO: 128562 - DNA, 19 bp, Homo sapiens
  siRNA target sequence for AKAP10 (NM_007202.2,2003-2021).
ggtgcaaggaaatactgat

SEQ ID NO: 128563 - DNA, 19 bp, Homo sapiens
  siRNA target sequence for AKAP10 (NM_007202.2,2037-2055).
ctagcttggaagattgcta

SEQ ID NO: 128564 - DNA, 19 bp, Homo sapiens
  siRNA target sequence for AKAP10 (NM_007202.2,2097-2115).
caaccgttagagaaatcta

SEQ ID NO: 128565 - DNA, 19 bp, Homo sapiens
  siRNA target sequence for AKAP10 (NM_007202.2,2100-2118).
ccgttagagaaatctacaa

SEQ ID NO: 128566 - DNA, 19 bp, Homo sapiens
  siRNA target sequence for AKAP9 (NM_005751.3,348-366).
gtcaagcagtaaacatgat

SEQ ID NO: 128567 - DNA, 19 bp, Homo sapiens
  siRNA target sequence for AKAP9 (NM_005751.3,371-389).
cagcacaccatgatttgaa

SEQ ID NO: 128568 - DNA, 19 bp, Homo sapiens
  siRNA target sequence for AKAP9 (NM_005751.3,373-391).
gcacaccatgatttgaata

SEQ ID NO: 128569 - DNA, 19 bp, Homo sapiens
  siRNA target sequence for AKAP9 (NM_005751.3,479-497).
ctctacatagtggagaaat

SEQ ID NO: 128570 - DNA, 19 bp, Homo sapiens
  siRNA target sequence for AKAP9 (NM_005751.3,481-499).
ctacatagtggagaaataa

SEQ ID NO: 128571 - DNA, 19 bp, Homo sapiens
  siRNA target sequence for AKAP9 (NM_005751.3,484-502).
catagtggagaaataacca

SEQ ID NO: 128572 - DNA, 19 bp, Homo sapiens
  siRNA target sequence for AKAP9 (NM_005751.3,561-579).
ctgcagttcagaggtaaat

SEQ ID NO: 128573 - DNA, 19 bp, Homo sapiens
  siRNA target sequence for AKAP9 (NM_005751.3,564-582).
cagttcagaggtaaatggt

SEQ ID NO: 128574 - DNA, 19 bp, Homo sapiens
  siRNA target sequence for AKAP9 (NM_005751.3,640-658).
ggtgttgatgattcttatt

SEQ ID NO: 128575 - DNA, 19 bp, Homo sapiens
  siRNA target sequence for AKAP9 (NM_005751.3,680-698).
gtccgactcatctagagat

SEQ ID NO: 128576 - DNA, 19 bp, Homo sapiens
  siRNA target sequence for AKAP9 (NM_005751.3,683-701).
cgactcatctagagatgat

SEQ ID NO: 128577 - DNA, 19 bp, Homo sapiens
  siRNA target sequence for AKAP9 (NM_005751.3,952-970).
caattacaggctagtgaaa

SEQ ID NO: 128578 - DNA, 19 bp, Homo sapiens
  siRNA target sequence for AKAP9 (NM_005751.3,962-980).
ctagtgaaactctgagaaa

SEQ ID NO: 128579 - DNA, 19 bp, Homo sapiens
  siRNA target sequence for AKAP9 (NM_005751.3,975-993).
gagaaacagcactcatagt

SEQ ID NO: 128580 - DNA, 19 bp, Homo sapiens
  siRNA target sequence for AKAP9 (NM_005751.3,996-1014).
cacagctgcagacttacta

SEQ ID NO: 128581 - DNA, 19 bp, Homo sapiens
  siRNA target sequence for AKAP9 (NM_005751.3,1054-1072).
gaagaacaagaccacttat

SEQ ID NO: 128582 - DNA, 19 bp, Homo sapiens
  siRNA target sequence for AKAP9 (NM_005751.3,1101-1119).
cttcacaatgcaaattagt

SEQ ID NO: 128583 - DNA, 19 bp, Homo sapiens
  siRNA target sequence for AKAP9 (NM_005751.3,1203-1221).
ggagacaatcattgaagaa

SEQ ID NO: 128584 - DNA, 19 bp, Homo sapiens
  siRNA target sequence for AKAP9 (NM_005751.3,1204-1222).
gagacaatcattgaagaat

SEQ ID NO: 128585 - DNA, 19 bp, Homo sapiens
  siRNA target sequence for AKAP9 (NM_005751.3,1206-1224).
gacaatcattgaagaatta

SEQ ID NO: 128586 - DNA, 19 bp, Homo sapiens
  siRNA target sequence for AKAP9 (NM_005751.3,1261-1279).
gagctaaaggataaattaa

SEQ ID NO: 128587 - DNA, 19 bp, Homo sapiens
  siRNA target sequence for AKAP9 (NM_005751.3,1416-1434).
ggggacagtcgaagaactt

SEQ ID NO: 128588 - DNA, 19 bp, Homo sapiens
  siRNA target sequence for AKAP9 (NM_005751.3,1457-1475).
gccagttcgaaactgatat

SEQ ID NO: 128589 - DNA, 19 bp, Homo sapiens
  siRNA target sequence for AKAP9 (NM_005751.3,1458-1476).
ccagttcgaaactgatata

SEQ ID NO: 128590 - DNA, 19 bp, Homo sapiens
  siRNA target sequence for AKAP9 (NM_005751.3,1461-1479).
gttcgaaactgatatagta

SEQ ID NO: 128591 - DNA, 19 bp, Homo sapiens
  siRNA target sequence for AKAP9 (NM_005751.3,1464-1482).
cgaaactgatatagtacaa

SEQ ID NO: 128592 - DNA, 19 bp, Homo sapiens
  siRNA target sequence for AKAP9 (NM_005751.3,1469-1487).
ctgatatagtacaacgaat

SEQ ID NO: 128593 - DNA, 19 bp, Homo sapiens
  siRNA target sequence for AKAP9 (NM_005751.3,1616-1634).
cacggcataagggagaaat

SEQ ID NO: 128594 - DNA, 19 bp, Homo sapiens
  siRNA target sequence for AKAP9 (NM_005751.3,1642-1660).
gctttaaggtcatattcaa

SEQ ID NO: 128595 - DNA, 19 bp, Homo sapiens
  siRNA target sequence for AKAP9 (NM_005751.3,1650-1668).
gtcatattcaaatattaca

SEQ ID NO: 128596 - DNA, 19 bp, Homo sapiens
  siRNA target sequence for AKAP9 (NM_005751.3,1729-1747).
caagatactaactctcaaa

SEQ ID NO: 128597 - DNA, 19 bp, Homo sapiens
  siRNA target sequence for AKAP9 (NM_005751.3,1762-1780).
gaagaactaggactaattt

SEQ ID NO: 128598 - DNA, 19 bp, Homo sapiens
  siRNA target sequence for AKAP9 (NM_005751.3,1903-1921).
gcacataagtcccttagta

SEQ ID NO: 128599 - DNA, 19 bp, Homo sapiens
  siRNA target sequence for AKAP9 (NM_005751.3,1915-1933).
cttagtacagtggaagatt

SEQ ID NO: 128600 - DNA, 19 bp, Homo sapiens
  siRNA target sequence for AKAP9 (NM_005751.3,1999-2017).
gttacaaattacaagataa

SEQ ID NO: 128601 - DNA, 19 bp, Homo sapiens
  siRNA target sequence for AKAP9 (NM_005751.3,2102-2120).
cacagcttctatttagtca

SEQ ID NO: 128602 - DNA, 19 bp, Homo sapiens
  siRNA target sequence for AKAP9 (NM_005751.3,2218-2236).
cagatagatggtttacaga

SEQ ID NO: 128603 - DNA, 19 bp, Homo sapiens
  siRNA target sequence for AKAP9 (NM_005751.3,2266-2284).
cagtttgaaaaggacaatt

SEQ ID NO: 128604 - DNA, 19 bp, Homo sapiens
  siRNA target sequence for AKAP9 (NM_005751.3,2338-2356).
cagcagtctcttgtaaatt

SEQ ID NO: 128605 - DNA, 19 bp, Homo sapiens
  siRNA target sequence for AKAP9 (NM_005751.3,2341-2359).
cagtctcttgtaaattcaa

SEQ ID NO: 128606 - DNA, 19 bp, Homo sapiens
  siRNA target sequence for AKAP9 (NM_005751.3,2375-2393).
ctcttcaaatcaatgaact

SEQ ID NO: 128607 - DNA, 19 bp, Homo sapiens
  siRNA target sequence for AKAP9 (NM_005751.3,2606-2624).
ctcctgttagccaagaaga

SEQ ID NO: 128608 - DNA, 19 bp, Homo sapiens
  siRNA target sequence for AKAP9 (NM_005751.3,2615-2633).
gccaagaagaaagattgat

SEQ ID NO: 128609 - DNA, 19 bp, Homo sapiens
  siRNA target sequence for AKAP9 (NM_005751.3,2616-2634).
ccaagaagaaagattgatt

SEQ ID NO: 128610 - DNA, 19 bp, Homo sapiens
  siRNA target sequence for AKAP9 (NM_005751.3,2712-2730).
ggacctcaaacaacaatgt

SEQ ID NO: 128611 - DNA, 19 bp, Homo sapiens
  siRNA target sequence for AKAP9 (NM_005751.3,2713-2731).
gacctcaaacaacaatgta

SEQ ID NO: 128612 - DNA, 19 bp, Homo sapiens
  siRNA target sequence for AKAP9 (NM_005751.3,2823-2841).
gtatgcttgccttctcaaa

SEQ ID NO: 128613 - DNA, 19 bp, Homo sapiens
  siRNA target sequence for AKAP9 (NM_005751.3,2828-2846).
cttgccttctcaaagtaaa

SEQ ID NO: 128614 - DNA, 19 bp, Homo sapiens
  siRNA target sequence for AKAP9 (NM_005751.3,2877-2895).
ggaattagagtataaaagt

SEQ ID NO: 128615 - DNA, 19 bp, Homo sapiens
  siRNA target sequence for AKAP9 (NM_005751.3,3019-3037).
gttgttgaaaaggatacaa

SEQ ID NO: 128616 - DNA, 19 bp, Homo sapiens
  siRNA target sequence for AKAP9 (NM_005751.3,3060-3078).
ggtaaccaagcgagagaaa

SEQ ID NO: 128617 - DNA, 19 bp, Homo sapiens
  siRNA target sequence for AKAP9 (NM_005751.3,3061-3079).
gtaaccaagcgagagaaat

SEQ ID NO: 128618 - DNA, 19 bp, Homo sapiens
  siRNA target sequence for AKAP9 (NM_005751.3,3065-3083).
ccaagcgagagaaattaga

SEQ ID NO: 128619 - DNA, 19 bp, Homo sapiens
  siRNA target sequence for AKAP9 (NM_005751.3,3099-3117).
gtctgatctttctgaacaa

SEQ ID NO: 128620 - DNA, 19 bp, Homo sapiens
  siRNA target sequence for AKAP9 (NM_005751.3,3103-3121).
gatctttctgaacaattga

SEQ ID NO: 128621 - DNA, 19 bp, Homo sapiens
  siRNA target sequence for AKAP9 (NM_005751.3,3178-3196).
gagaaagaacaagtttcat

SEQ ID NO: 128622 - DNA, 19 bp, Homo sapiens
  siRNA target sequence for AKAP9 (NM_005751.3,3184-3202).
gaacaagtttcattgagat

SEQ ID NO: 128623 - DNA, 19 bp, Homo sapiens
  siRNA target sequence for AKAP9 (NM_005751.3,3203-3221).
gtagagagctagaaatcat

SEQ ID NO: 128624 - DNA, 19 bp, Homo sapiens
  siRNA target sequence for AKAP9 (NM_005751.3,3309-3327).
gggtgctgaaggatcagtt

SEQ ID NO: 128625 - DNA, 19 bp, Homo sapiens
  siRNA target sequence for AKAP9 (NM_005751.3,3399-3417).
gactgttggagaagaaagt

SEQ ID NO: 128626 - DNA, 19 bp, Homo sapiens
  siRNA target sequence for AKAP9 (NM_005751.3,3416-3434).
gtaagcaagaacagttgat

SEQ ID NO: 128627 - DNA, 19 bp, Homo sapiens
  siRNA target sequence for AKAP9 (NM_005751.3,3429-3447).
gttgattttggatcactta

SEQ ID NO: 128628 - DNA, 19 bp, Homo sapiens
  siRNA target sequence for AKAP9 (NM_005751.3,3442-3460).
cacttaccatctgtaacaa

SEQ ID NO: 128629 - DNA, 19 bp, Homo sapiens
  siRNA target sequence for AKAP9 (NM_005751.3,3510-3528).
gaaagaactcaatgtactt

SEQ ID NO: 128630 - DNA, 19 bp, Homo sapiens
  siRNA target sequence for AKAP9 (NM_005751.3,3582-3600).
ctctctggtttattcaact

SEQ ID NO: 128631 - DNA, 19 bp, Homo sapiens
  siRNA target sequence for AKAP9 (NM_005751.3,3606-3624).
ggatcaggttcgtgaatat

SEQ ID NO: 128632 - DNA, 19 bp, Homo sapiens
  siRNA target sequence for AKAP9 (NM_005751.3,3845-3863).
gtgtccttggtgaatatta

SEQ ID NO: 128633 - DNA, 19 bp, Homo sapiens
  siRNA target sequence for AKAP9 (NM_005751.3,3847-3865).
gtccttggtgaatattata

SEQ ID NO: 128634 - DNA, 19 bp, Homo sapiens
  siRNA target sequence for AKAP9 (NM_005751.3,3959-3977).
gatatgaagttcaagactt

SEQ ID NO: 128635 - DNA, 19 bp, Homo sapiens
  siRNA target sequence for AKAP9 (NM_005751.3,4026-4044).
caaactcttggtacttcaa

SEQ ID NO: 128636 - DNA, 19 bp, Homo sapiens
  siRNA target sequence for AKAP9 (NM_005751.3,4067-4085).
gacagcagacagatggtat

SEQ ID NO: 128637 - DNA, 19 bp, Homo sapiens
  siRNA target sequence for AKAP9 (NM_005751.3,4078-4096).
gatggtatgaaacttgaat

SEQ ID NO: 128638 - DNA, 19 bp, Homo sapiens
  siRNA target sequence for AKAP9 (NM_005751.3,4275-4293).
gcaacagttgaaagaaact

SEQ ID NO: 128639 - DNA, 19 bp, Homo sapiens
  siRNA target sequence for AKAP9 (NM_005751.3,4334-4352).
ggcttcaagctgttagtga

SEQ ID NO: 128640 - DNA, 19 bp, Homo sapiens
  siRNA target sequence for AKAP9 (NM_005751.3,4356-4374).
cacggttccgccaagctta

SEQ ID NO: 128641 - DNA, 19 bp, Homo sapiens
  siRNA target sequence for AKAP9 (NM_005751.3,4365-4383).
gccaagcttacctgttgat

SEQ ID NO: 128642 - DNA, 19 bp, Homo sapiens
  siRNA target sequence for AKAP9 (NM_005751.3,4366-4384).
ccaagcttacctgttgatt

SEQ ID NO: 128643 - DNA, 19 bp, Homo sapiens
  siRNA target sequence for AKAP9 (NM_005751.3,4376-4394).
ctgttgattcggtggtaat

SEQ ID NO: 128644 - DNA, 19 bp, Homo sapiens
  siRNA target sequence for AKAP9 (NM_005751.3,4378-4396).
gttgattcggtggtaatta

SEQ ID NO: 128645 - DNA, 19 bp, Homo sapiens
  siRNA target sequence for AKAP9 (NM_005751.3,4389-4407).
ggtaattacagaatctgat

SEQ ID NO: 128646 - DNA, 19 bp, Homo sapiens
  siRNA target sequence for AKAP9 (NM_005751.3,4425-4443).
ccctggaagttgtgtgaaa

SEQ ID NO: 128647 - DNA, 19 bp, Homo sapiens
  siRNA target sequence for AKAP9 (NM_005751.3,4426-4444).
cctggaagttgtgtgaaaa

SEQ ID NO: 128648 - DNA, 19 bp, Homo sapiens
  siRNA target sequence for AKAP9 (NM_005751.3,4552-4570).
gtagctaaggttattgtgt

SEQ ID NO: 128649 - DNA, 19 bp, Homo sapiens
  siRNA target sequence for AKAP9 (NM_005751.3,4556-4574).
ctaaggttattgtgtcaat

SEQ ID NO: 128650 - DNA, 19 bp, Homo sapiens
  siRNA target sequence for AKAP9 (NM_005751.3,4567-4585).
gtgtcaatgagtatagcat

SEQ ID NO: 128651 - DNA, 19 bp, Homo sapiens
  siRNA target sequence for AKAP9 (NM_005751.3,4569-4587).
gtcaatgagtatagcattt

SEQ ID NO: 128652 - DNA, 19 bp, Homo sapiens
  siRNA target sequence for AKAP9 (NM_005751.3,4703-4721).
cacaggatcaaattggttt

SEQ ID NO: 128653 - DNA, 19 bp, Homo sapiens
  siRNA target sequence for AKAP9 (NM_005751.3,4828-4846).
catgatataccagaatcaa

SEQ ID NO: 128654 - DNA, 19 bp, Homo sapiens
  siRNA target sequence for AKAP9 (NM_005751.3,4849-4867).
gactgtgtgctgactattt

SEQ ID NO: 128655 - DNA, 19 bp, Homo sapiens
  siRNA target sequence for AKAP9 (NM_005751.3,4851-4869).
ctgtgtgctgactatttca

SEQ ID NO: 128656 - DNA, 19 bp, Homo sapiens
  siRNA target sequence for AKAP9 (NM_005751.3,4911-4929).
gtctattcatgatgagatt

SEQ ID NO: 128657 - DNA, 19 bp, Homo sapiens
  siRNA target sequence for AKAP9 (NM_005751.3,4941-4959).
catggatgcttctagacaa

SEQ ID NO: 128658 - DNA, 19 bp, Homo sapiens
  siRNA target sequence for AKAP9 (NM_005751.3,4944-4962).
ggatgcttctagacaacta

SEQ ID NO: 128659 - DNA, 19 bp, Homo sapiens
  siRNA target sequence for AKAP9 (NM_005751.3,4945-4963).
gatgcttctagacaactaa

SEQ ID NO: 128660 - DNA, 19 bp, Homo sapiens
  siRNA target sequence for AKAP9 (NM_005751.3,4948-4966).
gcttctagacaactaatgt

SEQ ID NO: 128661 - DNA, 19 bp, Homo sapiens
  siRNA target sequence for AKAP9 (NM_005751.3,5026-5044).
caacaggcaacggaattgt

SEQ ID NO: 128662 - DNA, 19 bp, Homo sapiens
  siRNA target sequence for AKAP9 (NM_005751.3,5029-5047).
caggcaacggaattgttaa

SEQ ID NO: 128663 - DNA, 19 bp, Homo sapiens
  siRNA target sequence for AKAP9 (NM_005751.3,5054-5072).
cacatatgcggcaaatgga

SEQ ID NO: 128664 - DNA, 19 bp, Homo sapiens
  siRNA target sequence for AKAP9 (NM_005751.3,5139-5157).
gagatcctccatagataat

SEQ ID NO: 128665 - DNA, 19 bp, Homo sapiens
  siRNA target sequence for AKAP9 (NM_005751.3,5147-5165).
ccatagataatgaaaacct

SEQ ID NO: 128666 - DNA, 19 bp, Homo sapiens
  siRNA target sequence for AKAP9 (NM_005751.3,5207-5225).
cactaaagcagctgtcttt

SEQ ID NO: 128667 - DNA, 19 bp, Homo sapiens
  siRNA target sequence for AKAP9 (NM_005751.3,5265-5283).
cagtacgcaaacacagaat

SEQ ID NO: 128668 - DNA, 19 bp, Homo sapiens
  siRNA target sequence for AKAP9 (NM_005751.3,5270-5288).
cgcaaacacagaatggaaa

SEQ ID NO: 128669 - DNA, 19 bp, Homo sapiens
  siRNA target sequence for AKAP9 (NM_005751.3,5353-5371).
gatgtgcctcctgagattt

SEQ ID NO: 128670 - DNA, 19 bp, Homo sapiens
  siRNA target sequence for AKAP9 (NM_005751.3,5397-5415).
gaaagctaataatagactt

SEQ ID NO: 128671 - DNA, 19 bp, Homo sapiens
  siRNA target sequence for AKAP9 (NM_005751.3,5421-5439).
gatcctcttagaagttgta

SEQ ID NO: 128672 - DNA, 19 bp, Homo sapiens
  siRNA target sequence for AKAP9 (NM_005751.3,5427-5445).
cttagaagttgtaaagaca

SEQ ID NO: 128673 - DNA, 19 bp, Homo sapiens
  siRNA target sequence for AKAP9 (NM_005751.3,5479-5497).
gtccttgggattctagata

SEQ ID NO: 128674 - DNA, 19 bp, Homo sapiens
  siRNA target sequence for AKAP9 (NM_005751.3,5481-5499).
ccttgggattctagataga

SEQ ID NO: 128675 - DNA, 19 bp, Homo sapiens
  siRNA target sequence for AKAP9 (NM_005751.3,5491-5509).
ctagatagatctagtaaaa

SEQ ID NO: 128676 - DNA, 19 bp, Homo sapiens
  siRNA target sequence for AKAP9 (NM_005751.3,5514-5532).
gtcatctgccagcctaatt

SEQ ID NO: 128677 - DNA, 19 bp, Homo sapiens
  siRNA target sequence for AKAP9 (NM_005751.3,5757-5775).
cattagctctcgactacaa

SEQ ID NO: 128678 - DNA, 19 bp, Homo sapiens
  siRNA target sequence for AKAP9 (NM_005751.3,5824-5842).
cttgaacatgcgaaagtga

SEQ ID NO: 128679 - DNA, 19 bp, Homo sapiens
  siRNA target sequence for AKAP9 (NM_005751.3,5856-5874).
gatgcgtgagtcatttaga

SEQ ID NO: 128680 - DNA, 19 bp, Homo sapiens
  siRNA target sequence for AKAP9 (NM_005751.3,6064-6082).
cttgagcaggagttgttat

SEQ ID NO: 128681 - DNA, 19 bp, Homo sapiens
  siRNA target sequence for AKAP9 (NM_005751.3,6089-6107).
gtaacaggttgcaagaatt

SEQ ID NO: 128682 - DNA, 19 bp, Homo sapiens
  siRNA target sequence for AKAP9 (NM_005751.3,6232-6250).
gaaaaactagaagtacaat

SEQ ID NO: 128683 - DNA, 19 bp, Homo sapiens
  siRNA target sequence for AKAP9 (NM_005751.3,6316-6334).
gaacaagtcagtaggttta

SEQ ID NO: 128684 - DNA, 19 bp, Homo sapiens
  siRNA target sequence for AKAP9 (NM_005751.3,6522-6540).
ccagcctatcagtgaacat

SEQ ID NO: 128685 - DNA, 19 bp, Homo sapiens
  siRNA target sequence for AKAP9 (NM_005751.3,6545-6563).
ctagagaggttgaacagtt

SEQ ID NO: 128686 - DNA, 19 bp, Homo sapiens
  siRNA target sequence for AKAP9 (NM_005751.3,6621-6639).
gcagcttcaaagggatata

SEQ ID NO: 128687 - DNA, 19 bp, Homo sapiens
  siRNA target sequence for AKAP9 (NM_005751.3,6730-6748).
gtagaggaccgaaaacact

SEQ ID NO: 128688 - DNA, 19 bp, Homo sapiens
  siRNA target sequence for AKAP9 (NM_005751.3,6802-6820).
gaacgagatgccatagaca

SEQ ID NO: 128689 - DNA, 19 bp, Homo sapiens
  siRNA target sequence for AKAP9 (NM_005751.3,6850-6868).
gagcaattagaacagttta

SEQ ID NO: 128690 - DNA, 19 bp, Homo sapiens
  siRNA target sequence for AKAP9 (NM_005751.3,6852-6870).
gcaattagaacagtttaga

SEQ ID NO: 128691 - DNA, 19 bp, Homo sapiens
  siRNA target sequence for AKAP9 (NM_005751.3,6928-6946).
cagaaaaaggaatctacta

SEQ ID NO: 128692 - DNA, 19 bp, Homo sapiens
  siRNA target sequence for AKAP9 (NM_005751.3,6941-6959).
ctactacccgcctacaaga

SEQ ID NO: 128693 - DNA, 19 bp, Homo sapiens
  siRNA target sequence for AKAP9 (NM_005751.3,6947-6965).
cccgcctacaagaacttga

SEQ ID NO: 128694 - DNA, 19 bp, Homo sapiens
  siRNA target sequence for AKAP9 (NM_005751.3,6948-6966).
ccgcctacaagaacttgaa

SEQ ID NO: 128695 - DNA, 19 bp, Homo sapiens
  siRNA target sequence for AKAP9 (NM_005751.3,6950-6968).
gcctacaagaacttgaaca

SEQ ID NO: 128696 - DNA, 19 bp, Homo sapiens
  siRNA target sequence for AKAP9 (NM_005751.3,7006-7024).
ggacttgccataaaggaat

SEQ ID NO: 128697 - DNA, 19 bp, Homo sapiens
  siRNA target sequence for AKAP9 (NM_005751.3,7037-7055).
ctactcaagaccaacatgt

SEQ ID NO: 128698 - DNA, 19 bp, Homo sapiens
  siRNA target sequence for AKAP9 (NM_005751.3,7138-7156).
cagcaacttaaaattacaa

SEQ ID NO: 128699 - DNA, 19 bp, Homo sapiens
  siRNA target sequence for AKAP9 (NM_005751.3,7157-7175).
cagataacaaggttattga

SEQ ID NO: 128700 - DNA, 19 bp, Homo sapiens
  siRNA target sequence for AKAP9 (NM_005751.3,7189-7207).
ctgataagggatcttgaaa

SEQ ID NO: 128701 - DNA, 19 bp, Homo sapiens
  siRNA target sequence for AKAP9 (NM_005751.3,7201-7219).
cttgaaacccaaatagaat

SEQ ID NO: 128702 - DNA, 19 bp, Homo sapiens
  siRNA target sequence for AKAP9 (NM_005751.3,7234-7252).
caagaatgtgtgaagagaa

SEQ ID NO: 128703 - DNA, 19 bp, Homo sapiens
  siRNA target sequence for AKAP9 (NM_005751.3,7429-7447).
gaaaccgctaatgaagaaa

SEQ ID NO: 128704 - DNA, 19 bp, Homo sapiens
  siRNA target sequence for AKAP9 (NM_005751.3,7495-7513).
cagctaacacaggaattat

SEQ ID NO: 128705 - DNA, 19 bp, Homo sapiens
  siRNA target sequence for AKAP9 (NM_005751.3,7498-7516).
ctaacacaggaattattca

SEQ ID NO: 128706 - DNA, 19 bp, Homo sapiens
  siRNA target sequence for AKAP9 (NM_005751.3,7562-7580).
cagagaatagtgttaacgt

SEQ ID NO: 128707 - DNA, 19 bp, Homo sapiens
  siRNA target sequence for AKAP9 (NM_005751.3,7571-7589).
gtgttaacgtggctataga

SEQ ID NO: 128708 - DNA, 19 bp, Homo sapiens
  siRNA target sequence for AKAP9 (NM_005751.3,7588-7606).
gatcatctgagcaaagaca

SEQ ID NO: 128709 - DNA, 19 bp, Homo sapiens
  siRNA target sequence for AKAP9 (NM_005751.3,7640-7658).
ctcttaaatccctagaaaa

SEQ ID NO: 128710 - DNA, 19 bp, Homo sapiens
  siRNA target sequence for AKAP9 (NM_005751.3,7649-7667).
ccctagaaaatcagacata

SEQ ID NO: 128711 - DNA, 19 bp, Homo sapiens
  siRNA target sequence for AKAP9 (NM_005751.3,7654-7672).
gaaaatcagacatacttca

SEQ ID NO: 128712 - DNA, 19 bp, Homo sapiens
  siRNA target sequence for AKAP9 (NM_005751.3,7690-7708).
ggcaaaggttccataatta

SEQ ID NO: 128713 - DNA, 19 bp, Homo sapiens
  siRNA target sequence for AKAP9 (NM_005751.3,7691-7709).
gcaaaggttccataattaa

SEQ ID NO: 128714 - DNA, 19 bp, Homo sapiens
  siRNA target sequence for AKAP9 (NM_005751.3,7692-7710).
caaaggttccataattaat

SEQ ID NO: 128715 - DNA, 19 bp, Homo sapiens
  siRNA target sequence for AKAP9 (NM_005751.3,7718-7736).
caaggttgctacaacttga

SEQ ID NO: 128716 - DNA, 19 bp, Homo sapiens
  siRNA target sequence for AKAP9 (NM_005751.3,7729-7747).
caacttgagagcactgtta

SEQ ID NO: 128717 - DNA, 19 bp, Homo sapiens
  siRNA target sequence for AKAP9 (NM_005751.3,7762-7780).
gaacttacccagtgttata

SEQ ID NO: 128718 - DNA, 19 bp, Homo sapiens
  siRNA target sequence for AKAP9 (NM_005751.3,7839-7857).
gattgtaaacctacagaaa

SEQ ID NO: 128719 - DNA, 19 bp, Homo sapiens
  siRNA target sequence for AKAP9 (NM_005751.3,7880-7898).
ctgctcttgtcagtcaaat

SEQ ID NO: 128720 - DNA, 19 bp, Homo sapiens
  siRNA target sequence for AKAP9 (NM_005751.3,7932-7950).
ctgtcaagataatcaaaca

SEQ ID NO: 128721 - DNA, 19 bp, Homo sapiens
  siRNA target sequence for AKAP9 (NM_005751.3,8005-8023).
gatgagttggggtcagata

SEQ ID NO: 128722 - DNA, 19 bp, Homo sapiens
  siRNA target sequence for AKAP9 (NM_005751.3,8008-8026).
gagttggggtcagatatat

SEQ ID NO: 128723 - DNA, 19 bp, Homo sapiens
  siRNA target sequence for AKAP9 (NM_005751.3,8010-8028).
gttggggtcagatatatca

SEQ ID NO: 128724 - DNA, 19 bp, Homo sapiens
  siRNA target sequence for AKAP9 (NM_005751.3,8068-8086).
gttgaaatgcatactagtt

SEQ ID NO: 128725 - DNA, 19 bp, Homo sapiens
  siRNA target sequence for AKAP9 (NM_005751.3,8076-8094).
gcatactagtttgatttta

SEQ ID NO: 128726 - DNA, 19 bp, Homo sapiens
  siRNA target sequence for AKAP9 (NM_005751.3,8167-8185).
ctattggagggcaatgaga

SEQ ID NO: 128727 - DNA, 19 bp, Homo sapiens
  siRNA target sequence for AKAP9 (NM_005751.3,8219-8237).
ctcaagatgttgaagttct

SEQ ID NO: 128728 - DNA, 19 bp, Homo sapiens
  siRNA target sequence for AKAP9 (NM_005751.3,8243-8261).
caactactgagctatttca

SEQ ID NO: 128729 - DNA, 19 bp, Homo sapiens
  siRNA target sequence for AKAP9 (NM_005751.3,8319-8337).
ggctaccaaagcagaactt

SEQ ID NO: 128730 - DNA, 19 bp, Homo sapiens
  siRNA target sequence for AKAP9 (NM_005751.3,8520-8538).
gtttgagccacttcctata

SEQ ID NO: 128731 - DNA, 19 bp, Homo sapiens
  siRNA target sequence for AKAP9 (NM_005751.3,8533-8551).
cctataaaactgagtaaga

SEQ ID NO: 128732 - DNA, 19 bp, Homo sapiens
  siRNA target sequence for AKAP9 (NM_005751.3,8542-8560).
ctgagtaagagcattgcat

SEQ ID NO: 128733 - DNA, 19 bp, Homo sapiens
  siRNA target sequence for AKAP9 (NM_005751.3,8572-8590).
gggactctgaagatcagta

SEQ ID NO: 128734 - DNA, 19 bp, Homo sapiens
  siRNA target sequence for AKAP9 (NM_005751.3,8777-8795).
ccttaaagagggaacacta

SEQ ID NO: 128735 - DNA, 19 bp, Homo sapiens
  siRNA target sequence for AKAP9 (NM_005751.3,8778-8796).
cttaaagagggaacactat

SEQ ID NO: 128736 - DNA, 19 bp, Homo sapiens
  siRNA target sequence for AKAP9 (NM_005751.3,8793-8811).
ctatgttgccgttcagtta

SEQ ID NO: 128737 - DNA, 19 bp, Homo sapiens
  siRNA target sequence for AKAP9 (NM_005751.3,8902-8920).
gcttaccagactagagaaa

SEQ ID NO: 128738 - DNA, 19 bp, Homo sapiens
  siRNA target sequence for AKAP9 (NM_005751.3,8903-8921).
cttaccagactagagaaat

SEQ ID NO: 128739 - DNA, 19 bp, Homo sapiens
  siRNA target sequence for AKAP9 (NM_005751.3,8971-8989).
cacagtcagggatttgaca

SEQ ID NO: 128740 - DNA, 19 bp, Homo sapiens
  siRNA target sequence for AKAP9 (NM_005751.3,8977-8995).
cagggatttgacatagcat

SEQ ID NO: 128741 - DNA, 19 bp, Homo sapiens
  siRNA target sequence for AKAP9 (NM_005751.3,9026-9044).
caacagattcctttccaaa

SEQ ID NO: 128742 - DNA, 19 bp, Homo sapiens
  siRNA target sequence for AKAP9 (NM_005751.3,9102-9120).
cactgagtctccctatagt

SEQ ID NO: 128743 - DNA, 19 bp, Homo sapiens
  siRNA target sequence for AKAP9 (NM_005751.3,9169-9187).
gagagaaaagcttacatca

SEQ ID NO: 128744 - DNA, 19 bp, Homo sapiens
  siRNA target sequence for AKAP9 (NM_005751.3,9171-9189).
gagaaaagcttacatcaat

SEQ ID NO: 128745 - DNA, 19 bp, Homo sapiens
  siRNA target sequence for AKAP9 (NM_005751.3,9178-9196).
gcttacatcaatacaatct

SEQ ID NO: 128746 - DNA, 19 bp, Homo sapiens
  siRNA target sequence for AKAP9 (NM_005751.3,9186-9204).
caatacaatctcatctcta

SEQ ID NO: 128747 - DNA, 19 bp, Homo sapiens
  siRNA target sequence for AKAP9 (NM_005751.3,9202-9220).
ctaaaggatttaattacaa

SEQ ID NO: 128748 - DNA, 19 bp, Homo sapiens
  siRNA target sequence for AKAP9 (NM_005751.3,9236-9254).
gagaagccgaggtttatga

SEQ ID NO: 128749 - DNA, 19 bp, Homo sapiens
  siRNA target sequence for AKAP9 (NM_005751.3,9238-9256).
gaagccgaggtttatgata

SEQ ID NO: 128750 - DNA, 19 bp, Homo sapiens
  siRNA target sequence for AKAP9 (NM_005751.3,9241-9259).
gccgaggtttatgatagtt

SEQ ID NO: 128751 - DNA, 19 bp, Homo sapiens
  siRNA target sequence for AKAP9 (NM_005751.3,9243-9261).
cgaggtttatgatagttct

SEQ ID NO: 128752 - DNA, 19 bp, Homo sapiens
  siRNA target sequence for AKAP9 (NM_005751.3,9303-9321).
gcttgcccttcaacaagtt

SEQ ID NO: 128753 - DNA, 19 bp, Homo sapiens
  siRNA target sequence for AKAP9 (NM_005751.3,9304-9322).
cttgcccttcaacaagttt

SEQ ID NO: 128754 - DNA, 19 bp, Homo sapiens
  siRNA target sequence for AKAP9 (NM_005751.3,9324-9342).
cttagaagagcgtagtgtt

SEQ ID NO: 128755 - DNA, 19 bp, Homo sapiens
  siRNA target sequence for AKAP9 (NM_005751.3,9369-9387).
gacagctctaggtactaca

SEQ ID NO: 128756 - DNA, 19 bp, Homo sapiens
  siRNA target sequence for AKAP9 (NM_005751.3,9388-9406).
gatgcagttggtttactaa

SEQ ID NO: 128757 - DNA, 19 bp, Homo sapiens
  siRNA target sequence for AKAP9 (NM_005751.3,9394-9412).
gttggtttactaaactgtt

SEQ ID NO: 128758 - DNA, 19 bp, Homo sapiens
  siRNA target sequence for AKAP9 (NM_005751.3,9465-9483).
cctccagaaagcagataga

SEQ ID NO: 128759 - DNA, 19 bp, Homo sapiens
  siRNA target sequence for AKAP9 (NM_005751.3,9485-9503).
ggagtttgttatctgaaat

SEQ ID NO: 128760 - DNA, 19 bp, Homo sapiens
  siRNA target sequence for AKAP9 (NM_005751.3,9514-9532).
catgcacaaatgaatggta

SEQ ID NO: 128761 - DNA, 19 bp, Homo sapiens
  siRNA target sequence for AKAP9 (NM_005751.3,9525-9543).
gaatggtaggaaaattact

SEQ ID NO: 128762 - DNA, 19 bp, Homo sapiens
  siRNA target sequence for AKAP9 (NM_005751.3,9717-9735).
gagtgagcttgcacaaact

SEQ ID NO: 128763 - DNA, 19 bp, Homo sapiens
  siRNA target sequence for AKAP9 (NM_005751.3,9719-9737).
gtgagcttgcacaaactaa

SEQ ID NO: 128764 - DNA, 19 bp, Homo sapiens
  siRNA target sequence for AKAP9 (NM_005751.3,9755-9773).
cactcaaggcacagcataa

SEQ ID NO: 128765 - DNA, 19 bp, Homo sapiens
  siRNA target sequence for AKAP9 (NM_005751.3,9769-9787).
cataaacacctaaaagaat

SEQ ID NO: 128766 - DNA, 19 bp, Homo sapiens
  siRNA target sequence for AKAP9 (NM_005751.3,9838-9856).
cttaatgacacattagcaa

SEQ ID NO: 128767 - DNA, 19 bp, Homo sapiens
  siRNA target sequence for AKAP9 (NM_005751.3,9912-9930).
gttgggacgcagtgaagaa

SEQ ID NO: 128768 - DNA, 19 bp, Homo sapiens
  siRNA target sequence for AKAP9 (NM_005751.3,9996-10014).
gctaaatctacttttggaa

SEQ ID NO: 128769 - DNA, 19 bp, Homo sapiens
  siRNA target sequence for AKAP9 (NM_005751.3,10035-10053).
cgaatcccagcaaaaaata

SEQ ID NO: 128770 - DNA, 19 bp, Homo sapiens
  siRNA target sequence for AKAP9 (NM_005751.3,10141-10159).
gttcgaattcgggaaatga

SEQ ID NO: 128771 - DNA, 19 bp, Homo sapiens
  siRNA target sequence for AKAP9 (NM_005751.3,10144-10162).
cgaattcgggaaatgagta

SEQ ID NO: 128772 - DNA, 19 bp, Homo sapiens
  siRNA target sequence for AKAP9 (NM_005751.3,10288-10306).
cacagtcgcatagtagaat

SEQ ID NO: 128773 - DNA, 19 bp, Homo sapiens
  siRNA target sequence for AKAP9 (NM_005751.3,10292-10310).
gtcgcatagtagaattgtt

SEQ ID NO: 128774 - DNA, 19 bp, Homo sapiens
  siRNA target sequence for AKAP9 (NM_005751.3,10520-10538).
gacagcgactacaaggaat

SEQ ID NO: 128775 - DNA, 19 bp, Homo sapiens
  siRNA target sequence for AKAP9 (NM_005751.3,10621-10639).
ccaaccacgtggagcttaa

SEQ ID NO: 128776 - DNA, 19 bp, Homo sapiens
  siRNA target sequence for AKAP9 (NM_005751.3,10632-10650).
gagcttaaccagtgataga

SEQ ID NO: 128777 - DNA, 19 bp, Homo sapiens
  siRNA target sequence for AKAP9 (NM_005751.3,10635-10653).
cttaaccagtgatagaact

SEQ ID NO: 128778 - DNA, 19 bp, Homo sapiens
  siRNA target sequence for AKAP9 (NM_005751.3,10652-10670).
ctagaaattgggttcttca

SEQ ID NO: 128779 - DNA, 19 bp, Homo sapiens
  siRNA target sequence for AKAP9 (NM_005751.3,10696-10714).
gaatcaaactacgctaaat

SEQ ID NO: 128780 - DNA, 19 bp, Homo sapiens
  siRNA target sequence for AKAP9 (NM_005751.3,10704-10722).
ctacgctaaattgattgaa

SEQ ID NO: 128781 - DNA, 19 bp, Homo sapiens
  siRNA target sequence for AKAP9 (NM_005751.3,10736-10754).
gaaccggctgtaatcatga

SEQ ID NO: 128782 - DNA, 19 bp, Homo sapiens
  siRNA target sequence for AKAP9 (NM_005751.3,10739-10757).
ccggctgtaatcatgaatt

SEQ ID NO: 128783 - DNA, 19 bp, Homo sapiens
  siRNA target sequence for AKAP9 (NM_005751.3,10740-10758).
cggctgtaatcatgaatta

SEQ ID NO: 128784 - DNA, 19 bp, Homo sapiens
  siRNA target sequence for AKAP9 (NM_005751.3,10769-10787).
gacaaaagcttcaatgtgt

SEQ ID NO: 128785 - DNA, 19 bp, Homo sapiens
  siRNA target sequence for AKAP9 (NM_005751.3,10784-10802).
gtgtagcttcaaaactaca

SEQ ID NO: 128786 - DNA, 19 bp, Homo sapiens
  siRNA target sequence for AKAP9 (NM_005751.3,10823-10841).
ctgagagactacagtttga

SEQ ID NO: 128787 - DNA, 19 bp, Homo sapiens
  siRNA target sequence for AKAP9 (NM_005751.3,10827-10845).
gagactacagtttgaaaca

SEQ ID NO: 128788 - DNA, 19 bp, Homo sapiens
  siRNA target sequence for AKAP9 (NM_005751.3,10968-10986).
ctcattgactgaaagacta

SEQ ID NO: 128789 - DNA, 19 bp, Homo sapiens
  siRNA target sequence for AKAP9 (NM_005751.3,11004-11022).
gctgacagggcatatcagt

SEQ ID NO: 128790 - DNA, 19 bp, Homo sapiens
  siRNA target sequence for AKAP9 (NM_005751.3,11228-11246).
cagaggctgaagtatacaa

SEQ ID NO: 128791 - DNA, 19 bp, Homo sapiens
  siRNA target sequence for AKAP9 (NM_005751.3,11289-11307).
gagccctgattctgaacat

SEQ ID NO: 128792 - DNA, 19 bp, Homo sapiens
  siRNA target sequence for AKAP9 (NM_005751.3,11291-11309).
gccctgattctgaacatgt

SEQ ID NO: 128793 - DNA, 19 bp, Homo sapiens
  siRNA target sequence for AKAP9 (NM_005751.3,11462-11480).
cagctttcacggatctaga

SEQ ID NO: 128794 - DNA, 19 bp, Homo sapiens
  siRNA target sequence for AKAP9 (NM_005751.3,11518-11536).
cggtcggccgtcagagtat

SEQ ID NO: 128795 - DNA, 19 bp, Homo sapiens
  siRNA target sequence for AKAP9 (NM_005751.3,11522-11540).
cggccgtcagagtatccat

SEQ ID NO: 128796 - DNA, 19 bp, Homo sapiens
  siRNA target sequence for AKAP9 (NM_005751.3,11523-11541).
ggccgtcagagtatccatt

SEQ ID NO: 128797 - DNA, 19 bp, Homo sapiens
  siRNA target sequence for AKAP9 (NM_005751.3,11527-11545).
gtcagagtatccattgcaa

SEQ ID NO: 128798 - DNA, 19 bp, Homo sapiens
  siRNA target sequence for AKAP9 (NM_005751.3,11533-11551).
gtatccattgcaatttcca

SEQ ID NO: 128799 - DNA, 19 bp, Homo sapiens
  siRNA target sequence for AKAP9 (NM_005751.3,11581-11599).
cgagtcacaggttctgttt

SEQ ID NO: 128800 - DNA, 19 bp, Homo sapiens
  siRNA target sequence for AKAP9 (NM_005751.3,11596-11614).
gtttccatcaatattaaca

SEQ ID NO: 128801 - DNA, 19 bp, Homo sapiens
  siRNA target sequence for AKAP9 (NM_005751.3,11644-11662).
gaaaagactgactcatttt

SEQ ID NO: 128802 - DNA, 19 bp, Homo sapiens
  siRNA target sequence for AKAP9 (NM_005751.3,11692-11710).
ggagaaccaagacatacta

SEQ ID NO: 128803 - DNA, 19 bp, Homo sapiens
  siRNA target sequence for AKAP9 (NM_005751.3,11728-11746).
gatctggactatattaggt

SEQ ID NO: 128804 - DNA, 19 bp, Homo sapiens
  siRNA target sequence for AKAP9 (NM_005751.3,11747-11765).
cccctttaccatttcagaa

SEQ ID NO: 128805 - DNA, 19 bp, Homo sapiens
  siRNA target sequence for AKAP9 (NM_005751.3,11748-11766).
ccctttaccatttcagaat

SEQ ID NO: 128806 - DNA, 19 bp, Homo sapiens
  siRNA target sequence for AKAP9 (NM_005751.3,11774-11792).
caggcactccagctgattt

SEQ ID NO: 128807 - DNA, 19 bp, Homo sapiens
  siRNA target sequence for AKAP9 (NM_005751.3,11793-11811).
caatcctggttctttagca

SEQ ID NO: 128808 - DNA, 19 bp, Homo sapiens
  siRNA target sequence for AKAP9 (NM_005751.3,11839-11857).
gacagagccctaacagatt

SEQ ID NO: 128809 - DNA, 19 bp, Homo sapiens
  siRNA target sequence for AKAP9 (NM_005751.3,11841-11859).
cagagccctaacagattat

SEQ ID NO: 128810 - DNA, 19 bp, Homo sapiens
  siRNA target sequence for AKAP9 (NM_005751.3,11843-11861).
gagccctaacagattatat

SEQ ID NO: 128811 - DNA, 19 bp, Homo sapiens
  siRNA target sequence for AKAP9 (NM_005751.3,11845-11863).
gccctaacagattatatca

SEQ ID NO: 128812 - DNA, 19 bp, Homo sapiens
  siRNA target sequence for AKAP9 (NM_005751.3,11847-11865).
cctaacagattatatcact

SEQ ID NO: 128813 - DNA, 19 bp, Homo sapiens
  siRNA target sequence for AKAP9 (NM_005751.3,11885-11903).
gacgacttggaactataca

SEQ ID NO: 128814 - DNA, 19 bp, Homo sapiens
  siRNA target sequence for AKAP9 (NM_005751.3,11887-11905).
cgacttggaactatacagt

SEQ ID NO: 128815 - DNA, 19 bp, Homo sapiens
  siRNA target sequence for AKAP9 (NM_005751.3,11909-11927).
gttcaactactcaatttca

SEQ ID NO: 128816 - DNA, 19 bp, Homo sapiens
  siRNA target sequence for AKAP9 (NM_147166.1,274-292).
gaagaactctctttagctt

SEQ ID NO: 128817 - DNA, 19 bp, Homo sapiens
  siRNA target sequence for AMFR (NM_001144.3,315-333).
gtgtgggttctagtaaata

SEQ ID NO: 128818 - DNA, 19 bp, Homo sapiens
  siRNA target sequence for AMFR (NM_001144.3,366-384).
ctcatccagtgtattgtgt

SEQ ID NO: 128819 - DNA, 19 bp, Homo sapiens
  siRNA target sequence for AMFR (NM_001144.3,749-767).
gaggactgctcatgtgatt

SEQ ID NO: 128820 - DNA, 19 bp, Homo sapiens
  siRNA target sequence for AMFR (NM_001144.3,751-769).
ggactgctcatgtgatttt

SEQ ID NO: 128821 - DNA, 19 bp, Homo sapiens
  siRNA target sequence for AMFR (NM_001144.3,752-770).
gactgctcatgtgatttta

SEQ ID NO: 128822 - DNA, 19 bp, Homo sapiens
  siRNA target sequence for AMFR (NM_001144.3,756-774).
gctcatgtgattttacgat

SEQ ID NO: 128823 - DNA, 19 bp, Homo sapiens
  siRNA target sequence for AMFR (NM_001144.3,757-775).
ctcatgtgattttacgata

SEQ ID NO: 128824 - DNA, 19 bp, Homo sapiens
  siRNA target sequence for AMFR (NM_001144.3,764-782).
gattttacgatacgtaatt

SEQ ID NO: 128825 - DNA, 19 bp, Homo sapiens
  siRNA target sequence for AMFR (NM_001144.3,819-837).
ggaaaggggacgtatgtct

SEQ ID NO: 128826 - DNA, 19 bp, Homo sapiens
  siRNA target sequence for AMFR (NM_001144.3,825-843).
gggacgtatgtctattaca

SEQ ID NO: 128827 - DNA, 19 bp, Homo sapiens
  siRNA target sequence for AMFR (NM_001144.3,827-845).
gacgtatgtctattacaca

SEQ ID NO: 128828 - DNA, 19 bp, Homo sapiens
  siRNA target sequence for AMFR (NM_001144.3,888-906).
caccatattcacatgttgt

SEQ ID NO: 128829 - DNA, 19 bp, Homo sapiens
  siRNA target sequence for AMFR (NM_001144.3,912-930).
ggcaacatctggttatcca

SEQ ID NO: 128830 - DNA, 19 bp, Homo sapiens
  siRNA target sequence for AMFR (NM_001144.3,937-955).
gcctggtcatctttatgca

SEQ ID NO: 128831 - DNA, 19 bp, Homo sapiens
  siRNA target sequence for AMFR (NM_001144.3,956-974).
gctgcgttacctgtttcat

SEQ ID NO: 128832 - DNA, 19 bp, Homo sapiens
  siRNA target sequence for AMFR (NM_001144.3,977-995).
ggtgcaacgtcgaattcgt

SEQ ID NO: 128833 - DNA, 19 bp, Homo sapiens
  siRNA target sequence for AMFR (NM_001144.3,988-1006).
gaattcgtcggcacaagaa

SEQ ID NO: 128834 - DNA, 19 bp, Homo sapiens
  siRNA target sequence for AMFR (NM_001144.3,994-1012).
gtcggcacaagaactatct

SEQ ID NO: 128835 - DNA, 19 bp, Homo sapiens
  siRNA target sequence for AMFR (NM_001144.3,1080-1098).
gacgactgtgccatctgtt

SEQ ID NO: 128836 - DNA, 19 bp, Homo sapiens
  siRNA target sequence for AMFR (NM_001144.3,1162-1180).
gttcctggctagaacaaga

SEQ ID NO: 128837 - DNA, 19 bp, Homo sapiens
  siRNA target sequence for AMFR (NM_001144.3,1195-1213).
catgcagaatgtctcttaa

SEQ ID NO: 128838 - DNA, 19 bp, Homo sapiens
  siRNA target sequence for AMFR (NM_001144.3,1209-1227).
cttaatattgccgacaata

SEQ ID NO: 128839 - DNA, 19 bp, Homo sapiens
  siRNA target sequence for AMFR (NM_001144.3,1298-1316).
gagacctcgcttaaaccaa

SEQ ID NO: 128840 - DNA, 19 bp, Homo sapiens
  siRNA target sequence for AMFR (NM_001144.3,1303-1321).
ctcgcttaaaccaacacaa

SEQ ID NO: 128841 - DNA, 19 bp, Homo sapiens
  siRNA target sequence for AMFR (NM_001144.3,1366-1384).
cgagtttttcggttgaagt

SEQ ID NO: 128842 - DNA, 19 bp, Homo sapiens
  siRNA target sequence for AMFR (NM_001144.3,1385-1403).
gatgcacaccaccaacatt

SEQ ID NO: 128843 - DNA, 19 bp, Homo sapiens
  siRNA target sequence for AMFR (NM_001144.3,1508-1526).
gctgacacgctcagttgaa

SEQ ID NO: 128844 - DNA, 19 bp, Homo sapiens
  siRNA target sequence for AMFR (NM_001144.3,1511-1529).
gacacgctcagttgaaata

SEQ ID NO: 128845 - DNA, 19 bp, Homo sapiens
  siRNA target sequence for AMFR (NM_001144.3,1515-1533).
cgctcagttgaaataacaa

SEQ ID NO: 128846 - DNA, 19 bp, Homo sapiens
  siRNA target sequence for AMFR (NM_001144.3,1531-1549).
caacagacaatattttaga

SEQ ID NO: 128847 - DNA, 19 bp, Homo sapiens
  siRNA target sequence for AMFR (NM_001144.3,1552-1570).
gacggattcaagtaccttt

SEQ ID NO: 128848 - DNA, 19 bp, Homo sapiens
  siRNA target sequence for AMFR (NM_001144.3,1572-1590).
cctacacagcggtcagata

SEQ ID NO: 128849 - DNA, 19 bp, Homo sapiens
  siRNA target sequence for AMFR (NM_001144.3,1576-1594).
cacagcggtcagatagcat

SEQ ID NO: 128850 - DNA, 19 bp, Homo sapiens
  siRNA target sequence for AMFR (NM_001144.3,1591-1609).
gcatcagacctgcattgaa

SEQ ID NO: 128851 - DNA, 19 bp, Homo sapiens
  siRNA target sequence for AMFR (NM_001144.3,1836-1854).
cagcaagctcgcaaacgtt

SEQ ID NO: 128852 - DNA, 19 bp, Homo sapiens
  siRNA target sequence for AMFR (NM_001144.3,1842-1860).
gctcgcaaacgtttcttga

SEQ ID NO: 128853 - DNA, 19 bp, Homo sapiens
  siRNA target sequence for AMFR (NM_001144.3,1843-1861).
ctcgcaaacgtttcttgaa

SEQ ID NO: 128854 - DNA, 19 bp, Homo sapiens
  siRNA target sequence for AMFR (NM_001144.3,1845-1863).
cgcaaacgtttcttgaaca

SEQ ID NO: 128855 - DNA, 19 bp, Homo sapiens
  siRNA target sequence for AMFR (NM_001144.3,1846-1864).
gcaaacgtttcttgaacaa

SEQ ID NO: 128856 - DNA, 19 bp, Homo sapiens
  siRNA target sequence for ANKFY1 (NM_016376.2,213-231).
gtacagcgatctgaagata

SEQ ID NO: 128857 - DNA, 19 bp, Homo sapiens
  siRNA target sequence for ANKFY1 (NM_016376.2,218-236).
gcgatctgaagataaaggt

SEQ ID NO: 128858 - DNA, 19 bp, Homo sapiens
  siRNA target sequence for ANKFY1 (NM_016376.2,249-267).
catcagtgctcacaagttt

SEQ ID NO: 128859 - DNA, 19 bp, Homo sapiens
  siRNA target sequence for ANKFY1 (NM_016376.2,327-345).
ggacctgtcagatgctaat

SEQ ID NO: 128860 - DNA, 19 bp, Homo sapiens
  siRNA target sequence for ANKFY1 (NM_016376.2,351-369).
ggtgacgatgacaatgctt

SEQ ID NO: 128861 - DNA, 19 bp, Homo sapiens
  siRNA target sequence for ANKFY1 (NM_016376.2,366-384).
gcttcgctggatctataca

SEQ ID NO: 128862 - DNA, 19 bp, Homo sapiens
  siRNA target sequence for ANKFY1 (NM_016376.2,499-517).
gtgaatgtcaggaactgta

SEQ ID NO: 128863 - DNA, 19 bp, Homo sapiens
  siRNA target sequence for ANKFY1 (NM_016376.2,626-644).
gcatgagcgctcagttgtt

SEQ ID NO: 128864 - DNA, 19 bp, Homo sapiens
  siRNA target sequence for ANKFY1 (NM_016376.2,632-650).
gcgctcagttgttatacaa

SEQ ID NO: 128865 - DNA, 19 bp, Homo sapiens
  siRNA target sequence for ANKFY1 (NM_016376.2,633-651).
cgctcagttgttatacaaa

SEQ ID NO: 128866 - DNA, 19 bp, Homo sapiens
  siRNA target sequence for ANKFY1 (NM_016376.2,714-732).
ggtcttcctgtatctgatt

SEQ ID NO: 128867 - DNA, 19 bp, Homo sapiens
  siRNA target sequence for ANKFY1 (NM_016376.2,717-735).
cttcctgtatctgattgaa

SEQ ID NO: 128868 - DNA, 19 bp, Homo sapiens
  siRNA target sequence for ANKFY1 (NM_016376.2,723-741).
gtatctgattgaaatggat

SEQ ID NO: 128869 - DNA, 19 bp, Homo sapiens
  siRNA target sequence for ANKFY1 (NM_016376.2,780-798).
cggagatctggcattagat

SEQ ID NO: 128870 - DNA, 19 bp, Homo sapiens
  siRNA target sequence for ANKFY1 (NM_016376.2,809-827).
cacgacgactggagagtat

SEQ ID NO: 128871 - DNA, 19 bp, Homo sapiens
  siRNA target sequence for ANKFY1 (NM_016376.2,830-848).
ccaccacgctggttagtca

SEQ ID NO: 128872 - DNA, 19 bp, Homo sapiens
  siRNA target sequence for ANKFY1 (NM_016376.2,834-852).
cacgctggttagtcacaaa

SEQ ID NO: 128873 - DNA, 19 bp, Homo sapiens
  siRNA target sequence for ANKFY1 (NM_016376.2,878-896).
gtggctggagcttgttaca

SEQ ID NO: 128874 - DNA, 19 bp, Homo sapiens
  siRNA target sequence for ANKFY1 (NM_016376.2,880-898).
ggctggagcttgttacaca

SEQ ID NO: 128875 - DNA, 19 bp, Homo sapiens
  siRNA target sequence for ANKFY1 (NM_016376.2,928-946).
gccactttcctcattaaga

SEQ ID NO: 128876 - DNA, 19 bp, Homo sapiens
  siRNA target sequence for ANKFY1 (NM_016376.2,929-947).
ccactttcctcattaagaa

SEQ ID NO: 128877 - DNA, 19 bp, Homo sapiens
  siRNA target sequence for ANKFY1 (NM_016376.2,997-1015).
caccttgtggccttgtaca

SEQ ID NO: 128878 - DNA, 19 bp, Homo sapiens
  siRNA target sequence for ANKFY1 (NM_016376.2,1000-1018).
cttgtggccttgtacagtt

SEQ ID NO: 128879 - DNA, 19 bp, Homo sapiens
  siRNA target sequence for ANKFY1 (NM_016376.2,1003-1021).
gtggccttgtacagttcaa

SEQ ID NO: 128880 - DNA, 19 bp, Homo sapiens
  siRNA target sequence for ANKFY1 (NM_016376.2,1110-1128).
caaggggaggactccttta

SEQ ID NO: 128881 - DNA, 19 bp, Homo sapiens
  siRNA target sequence for ANKFY1 (NM_016376.2,1115-1133).
ggaggactcctttacatgt

SEQ ID NO: 128882 - DNA, 19 bp, Homo sapiens
  siRNA target sequence for ANKFY1 (NM_016376.2,1173-1191).
gctgcagtgcaaacaacta

SEQ ID NO: 128883 - DNA, 19 bp, Homo sapiens
  siRNA target sequence for ANKFY1 (NM_016376.2,1179-1197).
gtgcaaacaactagattta

SEQ ID NO: 128884 - DNA, 19 bp, Homo sapiens
  siRNA target sequence for ANKFY1 (NM_016376.2,1181-1199).
gcaaacaactagatttaga

SEQ ID NO: 128885 - DNA, 19 bp, Homo sapiens
  siRNA target sequence for ANKFY1 (NM_016376.2,1182-1200).
caaacaactagatttagaa

SEQ ID NO: 128886 - DNA, 19 bp, Homo sapiens
  siRNA target sequence for ANKFY1 (NM_016376.2,1297-1315).
gtggtaaatgggacttcat

SEQ ID NO: 128887 - DNA, 19 bp, Homo sapiens
  siRNA target sequence for ANKFY1 (NM_016376.2,1377-1395).
cacggcgacaggaaactgt

SEQ ID NO: 128888 - DNA, 19 bp, Homo sapiens
  siRNA target sequence for ANKFY1 (NM_016376.2,1460-1478).
cccatgtcaaccacagaaa

SEQ ID NO: 128889 - DNA, 19 bp, Homo sapiens
  siRNA target sequence for ANKFY1 (NM_016376.2,1662-1680).
ggcgatcgcctataaccat

SEQ ID NO: 128890 - DNA, 19 bp, Homo sapiens
  siRNA target sequence for ANKFY1 (NM_016376.2,1849-1867).
ggagccgccatcaatgaca

SEQ ID NO: 128891 - DNA, 19 bp, Homo sapiens
  siRNA target sequence for ANKFY1 (NM_016376.2,1941-1959).
ggagcaccaggcagatata

SEQ ID NO: 128892 - DNA, 19 bp, Homo sapiens
  siRNA target sequence for ANKFY1 (NM_016376.2,1942-1960).
gagcaccaggcagatataa

SEQ ID NO: 128893 - DNA, 19 bp, Homo sapiens
  siRNA target sequence for ANKFY1 (NM_016376.2,1948-1966).
caggcagatataaatgtca

SEQ ID NO: 128894 - DNA, 19 bp, Homo sapiens
  siRNA target sequence for ANKFY1 (NM_016376.2,2013-2031).
gcttccactcgtagttgat

SEQ ID NO: 128895 - DNA, 19 bp, Homo sapiens
  siRNA target sequence for ANKFY1 (NM_016376.2,2023-2041).
gtagttgatgccatatgca

SEQ ID NO: 128896 - DNA, 19 bp, Homo sapiens
  siRNA target sequence for ANKFY1 (NM_016376.2,2093-2111).
ggcttgcattggcaaacaa

SEQ ID NO: 128897 - DNA, 19 bp, Homo sapiens
  siRNA target sequence for ANKFY1 (NM_016376.2,2094-2112).
gcttgcattggcaaacaat

SEQ ID NO: 128898 - DNA, 19 bp, Homo sapiens
  siRNA target sequence for ANKFY1 (NM_016376.2,2453-2471).
gccaacacggtgtcatcat

SEQ ID NO: 128899 - DNA, 19 bp, Homo sapiens
  siRNA target sequence for ANKFY1 (NM_016376.2,2454-2472).
ccaacacggtgtcatcatt

SEQ ID NO: 128900 - DNA, 19 bp, Homo sapiens
  siRNA target sequence for ANKFY1 (NM_016376.2,2490-2508).
ccccgatatccatttgaat

SEQ ID NO: 128901 - DNA, 19 bp, Homo sapiens
  siRNA target sequence for ANKFY1 (NM_016376.2,2690-2708).
gtgtccacgctaatgtgaa

SEQ ID NO: 128902 - DNA, 19 bp, Homo sapiens
  siRNA target sequence for ANKFY1 (NM_016376.2,2692-2710).
gtccacgctaatgtgaatt

SEQ ID NO: 128903 - DNA, 19 bp, Homo sapiens
  siRNA target sequence for ANKFY1 (NM_016376.2,2695-2713).
cacgctaatgtgaattcaa

SEQ ID NO: 128904 - DNA, 19 bp, Homo sapiens
  siRNA target sequence for ANKFY1 (NM_016376.2,2697-2715).
cgctaatgtgaattcaaga

SEQ ID NO: 128905 - DNA, 19 bp, Homo sapiens
  siRNA target sequence for ANKFY1 (NM_016376.2,2758-2776).
caagcaggctcagaaatta

SEQ ID NO: 128906 - DNA, 19 bp, Homo sapiens
  siRNA target sequence for ANKFY1 (NM_016376.2,2762-2780).
caggctcagaaattattgt

SEQ ID NO: 128907 - DNA, 19 bp, Homo sapiens
  siRNA target sequence for ANKFY1 (NM_016376.2,2800-2818).
ggagccaaagtgaacgaat

SEQ ID NO: 128908 - DNA, 19 bp, Homo sapiens
  siRNA target sequence for ANKFY1 (NM_016376.2,2879-2897).
gctcagtcctcctagagaa

SEQ ID NO: 128909 - DNA, 19 bp, Homo sapiens
  siRNA target sequence for ANKFY1 (NM_016376.2,2880-2898).
ctcagtcctcctagagaat

SEQ ID NO: 128910 - DNA, 19 bp, Homo sapiens
  siRNA target sequence for ANKFY1 (NM_016376.2,2930-2948).
gaaacaatgctcttcatct

SEQ ID NO: 128911 - DNA, 19 bp, Homo sapiens
  siRNA target sequence for ANKFY1 (NM_016376.2,3045-3063).
gcacattttgggacaatat

SEQ ID NO: 128912 - DNA, 19 bp, Homo sapiens
  siRNA target sequence for ANKFY1 (NM_016376.2,3072-3090).
gaatgcagcggccatcttt

SEQ ID NO: 128913 - DNA, 19 bp, Homo sapiens
  siRNA target sequence for ANKFY1 (NM_016376.2,3159-3177).
gctcctggcatacatgaaa

SEQ ID NO: 128914 - DNA, 19 bp, Homo sapiens
  siRNA target sequence for ANKFY1 (NM_016376.2,3220-3238).
cgcctcggggtgaataaca

SEQ ID NO: 128915 - DNA, 19 bp, Homo sapiens
  siRNA target sequence for ANKFY1 (NM_016376.2,3221-3239).
gcctcggggtgaataacaa

SEQ ID NO: 128916 - DNA, 19 bp, Homo sapiens
  siRNA target sequence for ANKFY1 (NM_016376.2,3241-3259).
cagggagtcaacatcttca

SEQ ID NO: 128917 - DNA, 19 bp, Homo sapiens
  siRNA target sequence for ANKFY1 (NM_016376.2,3397-3415).
cactgcggacgtcttcttt

SEQ ID NO: 128918 - DNA, 19 bp, Homo sapiens
  siRNA target sequence for ANKFY1 (NM_016376.2,3431-3449).
ccaaggagattcctattat

SEQ ID NO: 128919 - DNA, 19 bp, Homo sapiens
  siRNA target sequence for ANKFY1 (NM_016376.2,3472-3490).
gtgcgggtttgcaacattt

SEQ ID NO: 128920 - DNA, 19 bp, Homo sapiens
  siRNA target sequence for ANKFY1 (NM_020740.1,1377-1395).
cacggcgacaggtaaagca

SEQ ID NO: 128921 - DNA, 19 bp, Homo sapiens
  siRNA target sequence for ANKFY1 (NM_020740.1,1455-1473).
ccttcaccccaaatttaga

SEQ ID NO: 128922 - DNA, 19 bp, Homo sapiens
  siRNA target sequence for ANKFY1 (NM_020740.1,1459-1477).
caccccaaatttagaaact

SEQ ID NO: 128923 - DNA, 19 bp, Homo sapiens
  siRNA target sequence for ANXA11 (NM_001157.2,418-436).
catgtctgggacatttgga

SEQ ID NO: 128924 - DNA, 19 bp, Homo sapiens
  siRNA target sequence for ANXA11 (NM_001157.2,941-959).
cggcagcagatcctacttt

SEQ ID NO: 128925 - DNA, 19 bp, Homo sapiens
  siRNA target sequence for ANXA11 (NM_001157.2,969-987).
cggcttacggcaaggattt

SEQ ID NO: 128926 - DNA, 19 bp, Homo sapiens
  siRNA target sequence for ANXA11 (NM_001157.2,1096-1114).
gggggttggcactgatgaa

SEQ ID NO: 128927 - DNA, 19 bp, Homo sapiens
  siRNA target sequence for ANXA11 (NM_001157.2,1112-1130).
gaagcctgcctgattgaga

SEQ ID NO: 128928 - DNA, 19 bp, Homo sapiens
  siRNA target sequence for ANXA11 (NM_001157.2,1154-1172).
cacatccgagaattaaaca

SEQ ID NO: 128929 - DNA, 19 bp, Homo sapiens
  siRNA target sequence for ANXA11 (NM_001157.2,1514-1532).
gtgaaatgtctcaagaata

SEQ ID NO: 128930 - DNA, 19 bp, Homo sapiens
  siRNA target sequence for ANXA11 (NM_001157.2,1528-1546).
gaataccccagccttcttt

SEQ ID NO: 128931 - DNA, 19 bp, Homo sapiens
  siRNA target sequence for ANXA11 (NM_001157.2,1639-1657).
ggacatcagatcagagtat

SEQ ID NO: 128932 - DNA, 19 bp, Homo sapiens
  siRNA target sequence for ANXA11 (NM_001157.2,1640-1658).
gacatcagatcagagtata

SEQ ID NO: 128933 - DNA, 19 bp, Homo sapiens
  siRNA target sequence for ANXA11 (NM_001157.2,1687-1705).
cgacatctcgggagatact

SEQ ID NO: 128934 - DNA, 19 bp, Homo sapiens
  siRNA target sequence for ANXA11 (NM_001157.2,1688-1706).
gacatctcgggagatactt

SEQ ID NO: 128935 - DNA, 19 bp, Homo sapiens
  siRNA target sequence for ANXA11 (NM_001157.2,1690-1708).
catctcgggagatacttca

SEQ ID NO: 128936 - DNA, 19 bp, Homo sapiens
  siRNA target sequence for ANXA11 (NM_001157.2,1710-1728).
gggattaccggaagattct

SEQ ID NO: 128937 - DNA, 19 bp, Homo sapiens
  siRNA target sequence for APBA2 (NM_005503.2,1178-1196).
gcagcgctctgatctcaat

SEQ ID NO: 128938 - DNA, 19 bp, Homo sapiens
  siRNA target sequence for APBA2 (NM_005503.2,1193-1211).
caatggacctgttgacaat

SEQ ID NO: 128939 - DNA, 19 bp, Homo sapiens
  siRNA target sequence for APBA2 (NM_005503.2,1197-1215).
ggacctgttgacaataaca

SEQ ID NO: 128940 - DNA, 19 bp, Homo sapiens
  siRNA target sequence for APBA2 (NM_005503.2,1198-1216).
gacctgttgacaataacaa

SEQ ID NO: 128941 - DNA, 19 bp, Homo sapiens
  siRNA target sequence for APBA2 (NM_005503.2,1201-1219).
ctgttgacaataacaacat

SEQ ID NO: 128942 - DNA, 19 bp, Homo sapiens
  siRNA target sequence for APBA2 (NM_005503.2,1290-1308).
ctcatcgacgggatcatct

SEQ ID NO: 128943 - DNA, 19 bp, Homo sapiens
  siRNA target sequence for APBA2 (NM_005503.2,1292-1310).
catcgacgggatcatcttt

SEQ ID NO: 128944 - DNA, 19 bp, Homo sapiens
  siRNA target sequence for APBA2 (NM_005503.2,1347-1365).
gaacggaacccttccaaaa

SEQ ID NO: 128945 - DNA, 19 bp, Homo sapiens
  siRNA target sequence for APBA2 (NM_005503.2,1350-1368).
cggaacccttccaaaaaca

SEQ ID NO: 128946 - DNA, 19 bp, Homo sapiens
  siRNA target sequence for APBA2 (NM_005503.2,1351-1369).
ggaacccttccaaaaacat

SEQ ID NO: 128947 - DNA, 19 bp, Homo sapiens
  siRNA target sequence for APBA2 (NM_005503.2,1577-1595).
cgacattgggaacattgta

SEQ ID NO: 128948 - DNA, 19 bp, Homo sapiens
  siRNA target sequence for APBA2 (NM_005503.2,1671-1689).
ggcaagaagcagtataaga

SEQ ID NO: 128949 - DNA, 19 bp, Homo sapiens
  siRNA target sequence for APBA2 (NM_005503.2,2161-2179).
cggtcaccacggtccttat

SEQ ID NO: 128950 - DNA, 19 bp, Homo sapiens
  siRNA target sequence for APBA2 (NM_005503.2,2163-2181).
gtcaccacggtccttatca

SEQ ID NO: 128951 - DNA, 19 bp, Homo sapiens
  siRNA target sequence for APBA2 (NM_005503.2,2424-2442).
gagaccccgctgtacatct

SEQ ID NO: 128952 - DNA, 19 bp, Homo sapiens
  siRNA target sequence for APBA3 (NM_004886.2,310-328).
gtcggatggaacttgatga

SEQ ID NO: 128953 - DNA, 19 bp, Homo sapiens
  siRNA target sequence for APBA3 (NM_004886.2,812-830).
cctggacggtgtcatattt

SEQ ID NO: 128954 - DNA, 19 bp, Homo sapiens
  siRNA target sequence for APBA3 (NM_004886.2,1289-1307).
cgcctgccacctccataat

SEQ ID NO: 128955 - DNA, 19 bp, Homo sapiens
  siRNA target sequence for APBA3 (NM_004886.2,1730-1748).
cgtcggccaccgcatcatt

SEQ ID NO: 128956 - DNA, 19 bp, Homo sapiens
  siRNA target sequence for APBA3 (NM_004886.2,1813-1831).
cctatggcgaggtgcatat

SEQ ID NO: 128957 - DNA, 19 bp, Homo sapiens
  siRNA target sequence for APBA3 (NM_004886.2,1838-1856).
gatgccagctgccacatat

SEQ ID NO: 128958 - DNA, 19 bp, Homo sapiens
  siRNA target sequence for APBB3 (NM_006051.2,477-495).
gatgctgcaggtacttact

SEQ ID NO: 128959 - DNA, 19 bp, Homo sapiens
  siRNA target sequence for APBB3 (NM_006051.2,664-682).
ggtatggtggggaatccta

SEQ ID NO: 128960 - DNA, 19 bp, Homo sapiens
  siRNA target sequence for APBB3 (NM_006051.2,767-785).
ggggaagagcagtattgca

SEQ ID NO: 128961 - DNA, 19 bp, Homo sapiens
  siRNA target sequence for APBB3 (NM_006051.2,775-793).
gcagtattgcagtcaataa

SEQ ID NO: 128962 - DNA, 19 bp, Homo sapiens
  siRNA target sequence for APBB3 (NM_006051.2,1247-1265).
gaagtacgaggcactgtat

SEQ ID NO: 128963 - DNA, 19 bp, Homo sapiens
  siRNA target sequence for APBB3 (NM_006051.2,1308-1326).
ctgaacgaggccattggta

SEQ ID NO: 128964 - DNA, 19 bp, Homo sapiens
  siRNA target sequence for APBB3 (NM_006051.2,1455-1473).
gtgcgccttgtgacattta

SEQ ID NO: 128965 - DNA, 19 bp, Homo sapiens
  siRNA target sequence for APBB3 (NM_006051.2,1457-1475).
gcgccttgtgacatttatt

SEQ ID NO: 128966 - DNA, 19 bp, Homo sapiens
  siRNA target sequence for APBB3 (NM_006051.2,1589-1607).
gcaggctgcctgtatggtt

SEQ ID NO: 128967 - DNA, 19 bp, Homo sapiens
  siRNA target sequence for APBB3 (NM_006051.2,1594-1612).
ctgcctgtatggttcagta

SEQ ID NO: 128968 - DNA, 19 bp, Homo sapiens
  siRNA target sequence for APP (NM_000484.1,241-259).
ccccagattgccatgttct

SEQ ID NO: 128969 - DNA, 19 bp, Homo sapiens
  siRNA target sequence for APP (NM_000484.1,266-284).
gactgaacatgcacatgaa

SEQ ID NO: 128970 - DNA, 19 bp, Homo sapiens
  siRNA target sequence for APP (NM_000484.1,313-331).
ccatcagggaccaaaacct

SEQ ID NO: 128971 - DNA, 19 bp, Homo sapiens
  siRNA target sequence for APP (NM_000484.1,497-515).
gcttagttggtgagtttgt

SEQ ID NO: 128972 - DNA, 19 bp, Homo sapiens
  siRNA target sequence for APP (NM_000484.1,498-516).
cttagttggtgagtttgta

SEQ ID NO: 128973 - DNA, 19 bp, Homo sapiens
  siRNA target sequence for APP (NM_000484.1,532-550).
gttcctgacaagtgcaaat

SEQ ID NO: 128974 - DNA, 19 bp, Homo sapiens
  siRNA target sequence for APP (NM_000484.1,535-553).
cctgacaagtgcaaattct

SEQ ID NO: 128975 - DNA, 19 bp, Homo sapiens
  siRNA target sequence for APP (NM_000484.1,536-554).
ctgacaagtgcaaattctt

SEQ ID NO: 128976 - DNA, 19 bp, Homo sapiens
  siRNA target sequence for APP (NM_000484.1,598-616).
cacaccgtcgccaaagaga

SEQ ID NO: 128977 - DNA, 19 bp, Homo sapiens
  siRNA target sequence for APP (NM_000484.1,665-683).
cctgcggaattgacaagtt

SEQ ID NO: 128978 - DNA, 19 bp, Homo sapiens
  siRNA target sequence for APP (NM_000484.1,681-699).
gttccgaggggtagagttt

SEQ ID NO: 128979 - DNA, 19 bp, Homo sapiens
  siRNA target sequence for APP (NM_000484.1,685-703).
cgaggggtagagtttgtgt

SEQ ID NO: 128980 - DNA, 19 bp, Homo sapiens
  siRNA target sequence for APP (NM_000484.1,780-798).
cggagcagacacagactat

SEQ ID NO: 128981 - DNA, 19 bp, Homo sapiens
  siRNA target sequence for APP (NM_000484.1,1042-1060).
ccgtgccgagcaatgatct

SEQ ID NO: 128982 - DNA, 19 bp, Homo sapiens
  siRNA target sequence for APP (NM_000484.1,1059-1077).
ctcccgctggtactttgat

SEQ ID NO: 128983 - DNA, 19 bp, Homo sapiens
  siRNA target sequence for APP (NM_000484.1,1175-1193).
gcgccatgtcccaaagttt

SEQ ID NO: 128984 - DNA, 19 bp, Homo sapiens
  siRNA target sequence for APP (NM_000484.1,1176-1194).
cgccatgtcccaaagttta

SEQ ID NO: 128985 - DNA, 19 bp, Homo sapiens
  siRNA target sequence for APP (NM_000484.1,1186-1204).
caaagtttactcaagacta

SEQ ID NO: 128986 - DNA, 19 bp, Homo sapiens
  siRNA target sequence for APP (NM_000484.1,1221-1239).
ccgagatcctgttaaactt

SEQ ID NO: 128987 - DNA, 19 bp, Homo sapiens
  siRNA target sequence for APP (NM_000484.1,1346-1364).
ccaagcaccgagagagaat

SEQ ID NO: 128988 - DNA, 19 bp, Homo sapiens
  siRNA target sequence for APP (NM_000484.1,1436-1454).
cagttatccagcatttcca

SEQ ID NO: 128989 - DNA, 19 bp, Homo sapiens
  siRNA target sequence for APP (NM_000484.1,1604-1622).
ggcctcgtcacgtgttcaa

SEQ ID NO: 128990 - DNA, 19 bp, Homo sapiens
  siRNA target sequence for APP (NM_000484.1,1605-1623).
gcctcgtcacgtgttcaat

SEQ ID NO: 128991 - DNA, 19 bp, Homo sapiens
  siRNA target sequence for APP (NM_000484.1,1606-1624).
cctcgtcacgtgttcaata

SEQ ID NO: 128992 - DNA, 19 bp, Homo sapiens
  siRNA target sequence for APP (NM_000484.1,1607-1625).
ctcgtcacgtgttcaatat

SEQ ID NO: 128993 - DNA, 19 bp, Homo sapiens
  siRNA target sequence for APP (NM_000484.1,1661-1679).
gacagcacaccctaaagca

SEQ ID NO: 128994 - DNA, 19 bp, Homo sapiens
  siRNA target sequence for APP (NM_000484.1,1663-1681).
cagcacaccctaaagcatt

SEQ ID NO: 128995 - DNA, 19 bp, Homo sapiens
  siRNA target sequence for APP (NM_000484.1,1725-1743).
ccggtcccaggttatgaca

SEQ ID NO: 128996 - DNA, 19 bp, Homo sapiens
  siRNA target sequence for APP (NM_000484.1,1740-1758).
gacacacctccgtgtgatt

SEQ ID NO: 128997 - DNA, 19 bp, Homo sapiens
  siRNA target sequence for APP (NM_000484.1,1742-1760).
cacacctccgtgtgattta

SEQ ID NO: 128998 - DNA, 19 bp, Homo sapiens
  siRNA target sequence for APP (NM_000484.1,1755-1773).
gatttatgagcgcatgaat

SEQ ID NO: 128999 - DNA, 19 bp, Homo sapiens
  siRNA target sequence for APP (NM_000484.1,1818-1836).
gattcaggatgaagttgat

SEQ ID NO: 129000 - DNA, 19 bp, Homo sapiens
  siRNA target sequence for APP (NM_000484.1,1878-1896).
ggccaacatgattagtgaa

SEQ ID NO: 129001 - DNA, 19 bp, Homo sapiens
  siRNA target sequence for APP (NM_000484.1,1892-1910).
gtgaaccaaggatcagtta

SEQ ID NO: 129002 - DNA, 19 bp, Homo sapiens
  siRNA target sequence for APP (NM_000484.1,1902-1920).
gatcagttacggaaacgat

SEQ ID NO: 129003 - DNA, 19 bp, Homo sapiens
  siRNA target sequence for APP (NM_000484.1,1931-1949).
catctttgaccgaaacgaa

SEQ ID NO: 129004 - DNA, 19 bp, Homo sapiens
  siRNA target sequence for APP (NM_000484.1,2036-2054).
cagccaacacagaaaacga

SEQ ID NO: 129005 - DNA, 19 bp, Homo sapiens
  siRNA target sequence for APP (NM_000484.1,2116-2134).
gggttgacaaatatcaaga

SEQ ID NO: 129006 - DNA, 19 bp, Homo sapiens
  siRNA target sequence for APP (NM_000484.1,2172-2190).
ccgacatgactcaggatat

SEQ ID NO: 129007 - DNA, 19 bp, Homo sapiens
  siRNA target sequence for APP (NM_000484.1,2265-2283).
ggtgggcggtgttgtcata

SEQ ID NO: 129008 - DNA, 19 bp, Homo sapiens
  siRNA target sequence for APP (NM_000484.1,2328-2346).
gtacacatccattcatcat

SEQ ID NO: 129009 - DNA, 19 bp, Homo sapiens
  siRNA target sequence for APP (NM_000484.1,2404-2422).
cagcagaacggctacgaaa

SEQ ID NO: 129010 - DNA, 19 bp, Homo sapiens
  siRNA target sequence for APP (NM_000484.1,2409-2427).
gaacggctacgaaaatcca

SEQ ID NO: 129011 - DNA, 19 bp, Homo sapiens
  siRNA target sequence for APPL (NM_012096.1,108-126).
cgcagacaaggtctttact

SEQ ID NO: 129012 - DNA, 19 bp, Homo sapiens
  siRNA target sequence for APPL (NM_012096.1,109-127).
gcagacaaggtctttacta

SEQ ID NO: 129013 - DNA, 19 bp, Homo sapiens
  siRNA target sequence for APPL (NM_012096.1,117-135).
ggtctttactaggtgtatt

SEQ ID NO: 129014 - DNA, 19 bp, Homo sapiens
  siRNA target sequence for APPL (NM_012096.1,120-138).
ctttactaggtgtatttga

SEQ ID NO: 129015 - DNA, 19 bp, Homo sapiens
  siRNA target sequence for APPL (NM_012096.1,148-166).
cacagctatttccaactat

SEQ ID NO: 129016 - DNA, 19 bp, Homo sapiens
  siRNA target sequence for APPL (NM_012096.1,150-168).
cagctatttccaactatat

SEQ ID NO: 129017 - DNA, 19 bp, Homo sapiens
  siRNA target sequence for APPL (NM_012096.1,152-170).
gctatttccaactatatga

SEQ ID NO: 129018 - DNA, 19 bp, Homo sapiens
  siRNA target sequence for APPL (NM_012096.1,175-193).
gttgtatcaagctatgcat

SEQ ID NO: 129019 - DNA, 19 bp, Homo sapiens
  siRNA target sequence for APPL (NM_012096.1,186-204).
ctatgcatcggatttatga

SEQ ID NO: 129020 - DNA, 19 bp, Homo sapiens
  siRNA target sequence for APPL (NM_012096.1,235-253).
cctgacctcaaaactttta

SEQ ID NO: 129021 - DNA, 19 bp, Homo sapiens
  siRNA target sequence for APPL (NM_012096.1,279-297).
cattgggaggtgatgatga

SEQ ID NO: 129022 - DNA, 19 bp, Homo sapiens
  siRNA target sequence for APPL (NM_012096.1,287-305).
ggtgatgatgaagttatga

SEQ ID NO: 129023 - DNA, 19 bp, Homo sapiens
  siRNA target sequence for APPL (NM_012096.1,296-314).
gaagttatgagctctacat

SEQ ID NO: 129024 - DNA, 19 bp, Homo sapiens
  siRNA target sequence for APPL (NM_012096.1,306-324).
gctctacattgcaacagtt

SEQ ID NO: 129025 - DNA, 19 bp, Homo sapiens
  siRNA target sequence for APPL (NM_012096.1,307-325).
ctctacattgcaacagttt

SEQ ID NO: 129026 - DNA, 19 bp, Homo sapiens
  siRNA target sequence for APPL (NM_012096.1,460-478).
gattgcaagtaatgatcat

SEQ ID NO: 129027 - DNA, 19 bp, Homo sapiens
  siRNA target sequence for APPL (NM_012096.1,476-494).
catgatgctgcgattaata

SEQ ID NO: 129028 - DNA, 19 bp, Homo sapiens
  siRNA target sequence for APPL (NM_012096.1,479-497).
gatgctgcgattaatagat

SEQ ID NO: 129029 - DNA, 19 bp, Homo sapiens
  siRNA target sequence for APPL (NM_012096.1,482-500).
gctgcgattaatagatata

SEQ ID NO: 129030 - DNA, 19 bp, Homo sapiens
  siRNA target sequence for APPL (NM_012096.1,495-513).
gatatagccgtttatcaaa

SEQ ID NO: 129031 - DNA, 19 bp, Homo sapiens
  siRNA target sequence for APPL (NM_012096.1,529-547).
caaggtgaagtatgaagta

SEQ ID NO: 129032 - DNA, 19 bp, Homo sapiens
  siRNA target sequence for APPL (NM_012096.1,664-682).
gtacatgcaagctcagata

SEQ ID NO: 129033 - DNA, 19 bp, Homo sapiens
  siRNA target sequence for APPL (NM_012096.1,667-685).
catgcaagctcagataagt

SEQ ID NO: 129034 - DNA, 19 bp, Homo sapiens
  siRNA target sequence for APPL (NM_012096.1,671-689).
caagctcagataagtttct

SEQ ID NO: 129035 - DNA, 19 bp, Homo sapiens
  siRNA target sequence for APPL (NM_012096.1,674-692).
gctcagataagtttcttta

SEQ ID NO: 129036 - DNA, 19 bp, Homo sapiens
  siRNA target sequence for APPL (NM_012096.1,688-706).
ctttaagatgggttctgaa

SEQ ID NO: 129037 - DNA, 19 bp, Homo sapiens
  siRNA target sequence for APPL (NM_012096.1,694-712).
gatgggttctgaaaatctt

SEQ ID NO: 129038 - DNA, 19 bp, Homo sapiens
  siRNA target sequence for APPL (NM_012096.1,724-742).
ggaagaatttttagctaat

SEQ ID NO: 129039 - DNA, 19 bp, Homo sapiens
  siRNA target sequence for APPL (NM_012096.1,747-765).
gaacaagcgttcagaatgt

SEQ ID NO: 129040 - DNA, 19 bp, Homo sapiens
  siRNA target sequence for APPL (NM_012096.1,793-811).
gaccatgcaacagacaata

SEQ ID NO: 129041 - DNA, 19 bp, Homo sapiens
  siRNA target sequence for APPL (NM_012096.1,795-813).
ccatgcaacagacaataga

SEQ ID NO: 129042 - DNA, 19 bp, Homo sapiens
  siRNA target sequence for APPL (NM_012096.1,828-846).
ccagtgatcccttatatgt

SEQ ID NO: 129043 - DNA, 19 bp, Homo sapiens
  siRNA target sequence for APPL (NM_012096.1,872-890).
cctgttaatcgaaatttaa

SEQ ID NO: 129044 - DNA, 19 bp, Homo sapiens
  siRNA target sequence for APPL (NM_012096.1,893-911).
cgaaaggctggatacctta

SEQ ID NO: 129045 - DNA, 19 bp, Homo sapiens
  siRNA target sequence for APPL (NM_012096.1,898-916).
ggctggataccttaatgct

SEQ ID NO: 129046 - DNA, 19 bp, Homo sapiens
  siRNA target sequence for APPL (NM_012096.1,899-917).
gctggataccttaatgcta

SEQ ID NO: 129047 - DNA, 19 bp, Homo sapiens
  siRNA target sequence for APPL (NM_012096.1,964-982).
cttcacgcagggtggaaat

SEQ ID NO: 129048 - DNA, 19 bp, Homo sapiens
  siRNA target sequence for APPL (NM_012096.1,967-985).
cacgcagggtggaaattta

SEQ ID NO: 129049 - DNA, 19 bp, Homo sapiens
  siRNA target sequence for APPL (NM_012096.1,1064-1082).
gaagacagacgatattgtt

SEQ ID NO: 129050 - DNA, 19 bp, Homo sapiens
  siRNA target sequence for APPL (NM_012096.1,1071-1089).
gacgatattgttttcagat

SEQ ID NO: 129051 - DNA, 19 bp, Homo sapiens
  siRNA target sequence for APPL (NM_012096.1,1090-1108).
cacctctttcgatggaaaa

SEQ ID NO: 129052 - DNA, 19 bp, Homo sapiens
  siRNA target sequence for APPL (NM_012096.1,1092-1110).
cctctttcgatggaaaaaa

SEQ ID NO: 129053 - DNA, 19 bp, Homo sapiens
  siRNA target sequence for APPL (NM_012096.1,1145-1163).
catgaagagtggatctgta

SEQ ID NO: 129054 - DNA, 19 bp, Homo sapiens
  siRNA target sequence for APPL (NM_012096.1,1217-1235).
gctgcacgagtaaatcaat

SEQ ID NO: 129055 - DNA, 19 bp, Homo sapiens
  siRNA target sequence for APPL (NM_012096.1,1352-1370).
ggatctgagtctacaaatt

SEQ ID NO: 129056 - DNA, 19 bp, Homo sapiens
  siRNA target sequence for APPL (NM_012096.1,1353-1371).
gatctgagtctacaaattt

SEQ ID NO: 129057 - DNA, 19 bp, Homo sapiens
  siRNA target sequence for APPL (NM_012096.1,1373-1391).
gctgccctctctctagatt

SEQ ID NO: 129058 - DNA, 19 bp, Homo sapiens
  siRNA target sequence for APPL (NM_012096.1,1377-1395).
ccctctctctagattctct

SEQ ID NO: 129059 - DNA, 19 bp, Homo sapiens
  siRNA target sequence for APPL (NM_012096.1,1404-1422).
cagacaccccaatacagtt

SEQ ID NO: 129060 - DNA, 19 bp, Homo sapiens
  siRNA target sequence for APPL (NM_012096.1,1410-1428).
ccccaatacagtttgacat

SEQ ID NO: 129061 - DNA, 19 bp, Homo sapiens
  siRNA target sequence for APPL (NM_012096.1,1411-1429).
cccaatacagtttgacata

SEQ ID NO: 129062 - DNA, 19 bp, Homo sapiens
  siRNA target sequence for APPL (NM_012096.1,1434-1452).
ctcctgtgtgtgaagatca

SEQ ID NO: 129063 - DNA, 19 bp, Homo sapiens
  siRNA target sequence for APPL (NM_012096.1,1484-1502).
ggcaggcgtacaaatccat

SEQ ID NO: 129064 - DNA, 19 bp, Homo sapiens
  siRNA target sequence for APPL (NM_012096.1,1485-1503).
gcaggcgtacaaatccatt

SEQ ID NO: 129065 - DNA, 19 bp, Homo sapiens
  siRNA target sequence for APPL (NM_012096.1,1486-1504).
caggcgtacaaatccattt

SEQ ID NO: 129066 - DNA, 19 bp, Homo sapiens
  siRNA target sequence for APPL (NM_012096.1,1536-1554).
ctgaagattctattcttca

SEQ ID NO: 129067 - DNA, 19 bp, Homo sapiens
  siRNA target sequence for APPL (NM_012096.1,1545-1563).
ctattcttcatcagttatt

SEQ ID NO: 129068 - DNA, 19 bp, Homo sapiens
  siRNA target sequence for APPL (NM_012096.1,1580-1598).
ggttcaatggaggtgaaat

SEQ ID NO: 129069 - DNA, 19 bp, Homo sapiens
  siRNA target sequence for APPL (NM_012096.1,1625-1643).
gaaactatgcgccaaatct

SEQ ID NO: 129070 - DNA, 19 bp, Homo sapiens
  siRNA target sequence for APPL (NM_012096.1,1654-1672).
ggccatccataacatcttt

SEQ ID NO: 129071 - DNA, 19 bp, Homo sapiens
  siRNA target sequence for APPL (NM_012096.1,1682-1700).
gaatcgcatttattagtca

SEQ ID NO: 129072 - DNA, 19 bp, Homo sapiens
  siRNA target sequence for APPL (NM_012096.1,1724-1742).
gatccacagacacaagtta

SEQ ID NO: 129073 - DNA, 19 bp, Homo sapiens
  siRNA target sequence for APPL (NM_012096.1,1781-1799).
gctacacaccaggaaaata

SEQ ID NO: 129074 - DNA, 19 bp, Homo sapiens
  siRNA target sequence for APPL (NM_012096.1,1792-1810).
ggaaaataagcgccttttt

SEQ ID NO: 129075 - DNA, 19 bp, Homo sapiens
  siRNA target sequence for APPL (NM_012096.1,1853-1871).
ctgtcatcagtctgctata

SEQ ID NO: 129076 - DNA, 19 bp, Homo sapiens
  siRNA target sequence for APPL (NM_012096.1,1855-1873).
gtcatcagtctgctatata

SEQ ID NO: 129077 - DNA, 19 bp, Homo sapiens
  siRNA target sequence for APPL (NM_012096.1,1860-1878).
cagtctgctatatatttga

SEQ ID NO: 129078 - DNA, 19 bp, Homo sapiens
  siRNA target sequence for APPL (NM_012096.1,1919-1937).
ctggcaaaacagatagctt

SEQ ID NO: 129079 - DNA, 19 bp, Homo sapiens
  siRNA target sequence for APPL (NM_012096.1,1951-1969).
ggatcgtagggcatcagaa

SEQ ID NO: 129080 - DNA, 19 bp, Homo sapiens
  siRNA target sequence for APPL (NM_012096.1,2097-2115).
gtagtgaggggcagtttgt

SEQ ID NO: 129081 - DNA, 19 bp, Homo sapiens
  siRNA target sequence for APPL (NM_012096.1,2100-2118).
gtgaggggcagtttgttgt

SEQ ID NO: 129082 - DNA, 19 bp, Homo sapiens
  siRNA target sequence for ARHGDIA (NM_004309.3,156-174).
gagcactcggtcaactaca

SEQ ID NO: 129083 - DNA, 19 bp, Homo sapiens
  siRNA target sequence for ARHGDIA (NM_004309.3,228-246).
gagagcctgcgaaagtaca

SEQ ID NO: 129084 - DNA, 19 bp, Homo sapiens
  siRNA target sequence for ARHGDIA (NM_004309.3,412-430).
gtgtggagtaccggataaa

SEQ ID NO: 129085 - DNA, 19 bp, Homo sapiens
  siRNA target sequence for ARHGDIA (NM_004309.3,414-432).
gtggagtaccggataaaaa

SEQ ID NO: 129086 - DNA, 19 bp, Homo sapiens
  siRNA target sequence for ARHGDIA (NM_004309.3,419-437).
gtaccggataaaaatctct

SEQ ID NO: 129087 - DNA, 19 bp, Homo sapiens
  siRNA target sequence for ARHGDIA (NM_004309.3,440-458).
ccgggttaaccgagagata

SEQ ID NO: 129088 - DNA, 19 bp, Homo sapiens
  siRNA target sequence for ARHGDIA (NM_004309.3,442-460).
gggttaaccgagagatagt

SEQ ID NO: 129089 - DNA, 19 bp, Homo sapiens
  siRNA target sequence for ARHGDIA (NM_004309.3,444-462).
gttaaccgagagatagtgt

SEQ ID NO: 129090 - DNA, 19 bp, Homo sapiens
  siRNA target sequence for ARHGDIA (NM_004309.3,491-509).
caggaaaggcgtcaagatt

SEQ ID NO: 129091 - DNA, 19 bp, Homo sapiens
  siRNA target sequence for ARHGDIA (NM_004309.3,493-511).
ggaaaggcgtcaagattga

SEQ ID NO: 129092 - DNA, 19 bp, Homo sapiens
  siRNA target sequence for ASE-1 (NM_012099.1,1097-1115).
ggggtcgccagaaatggat

SEQ ID NO: 129093 - DNA, 19 bp, Homo sapiens
  siRNA target sequence for ASE-1 (NM_012099.1,1227-1245).
ccgtccaccaccaagaaga

SEQ ID NO: 129094 - DNA, 19 bp, Homo sapiens
  siRNA target sequence for ASE-1 (NM_012099.1,1344-1362).
ccgaccaaaaagagaaaga

SEQ ID NO: 129095 - DNA, 19 bp, Homo sapiens
  siRNA target sequence for ASE-1 (NM_012099.1,1740-1758).
cccacatccaccaagaaga

SEQ ID NO: 129096 - DNA, 19 bp, Homo sapiens
  siRNA target sequence for AVEN (NM_020371.1,362-380).
gatgaacagggaaattatt

SEQ ID NO: 129097 - DNA, 19 bp, Homo sapiens
  siRNA target sequence for AVEN (NM_020371.1,365-383).
gaacagggaaattattcta

SEQ ID NO: 129098 - DNA, 19 bp, Homo sapiens
  siRNA target sequence for AVEN (NM_020371.1,399-417).
ctaactgggatcgatatca

SEQ ID NO: 129099 - DNA, 19 bp, Homo sapiens
  siRNA target sequence for AVEN (NM_020371.1,403-421).
ctgggatcgatatcaagat

SEQ ID NO: 129100 - DNA, 19 bp, Homo sapiens
  siRNA target sequence for AVEN (NM_020371.1,405-423).
gggatcgatatcaagatat

SEQ ID NO: 129101 - DNA, 19 bp, Homo sapiens
  siRNA target sequence for AVEN (NM_020371.1,406-424).
ggatcgatatcaagatatt

SEQ ID NO: 129102 - DNA, 19 bp, Homo sapiens
  siRNA target sequence for AVEN (NM_020371.1,458-476).
cagaggggaacagatttca

SEQ ID NO: 129103 - DNA, 19 bp, Homo sapiens
  siRNA target sequence for AVEN (NM_020371.1,552-570).
cttcttgtccaaaacagaa

SEQ ID NO: 129104 - DNA, 19 bp, Homo sapiens
  siRNA target sequence for AVEN (NM_020371.1,586-604).
ggatagtgagttattggtt

SEQ ID NO: 129105 - DNA, 19 bp, Homo sapiens
  siRNA target sequence for AVEN (NM_020371.1,694-712).
gaaaccaaagagaactgat

SEQ ID NO: 129106 - DNA, 19 bp, Homo sapiens
  siRNA target sequence for AVEN (NM_020371.1,722-740).
ggattagggatgcagttaa

SEQ ID NO: 129107 - DNA, 19 bp, Homo sapiens
  siRNA target sequence for AVEN (NM_020371.1,723-741).
gattagggatgcagttaaa

SEQ ID NO: 129108 - DNA, 19 bp, Homo sapiens
  siRNA target sequence for AVEN (NM_020371.1,809-827).
gtgttgctgggcaaagaca

SEQ ID NO: 129109 - DNA, 19 bp, Homo sapiens
  siRNA target sequence for AVEN (NM_020371.1,905-923).
gaactagatctgttgctta

SEQ ID NO: 129110 - DNA, 19 bp, Homo sapiens
  siRNA target sequence for AVEN (NM_020371.1,908-926).
ctagatctgttgcttaatt

SEQ ID NO: 129111 - DNA, 19 bp, Homo sapiens
  siRNA target sequence for AVEN (NM_020371.1,1073-1091).
caaccaagtacctccaaaa

SEQ ID NO: 129112 - DNA, 19 bp, Homo sapiens
  siRNA target sequence for AVEN (NM_020371.1,1117-1135).
ctggttggacagcatgatt

SEQ ID NO: 129113 - DNA, 19 bp, Homo sapiens
  siRNA target sequence for BAG1 (NM_004323.2,394-412).
cgacccagggcgaagagat

SEQ ID NO: 129114 - DNA, 19 bp, Homo sapiens
  siRNA target sequence for BAG1 (NM_004323.2,398-416).
ccagggcgaagagatgaat

SEQ ID NO: 129115 - DNA, 19 bp, Homo sapiens
  siRNA target sequence for BAG1 (NM_004323.2,610-628).
gggttccacagtcttttca

SEQ ID NO: 129116 - DNA, 19 bp, Homo sapiens
  siRNA target sequence for BAG1 (NM_004323.2,673-691).
cgttgtcagcacttggaat

SEQ ID NO: 129117 - DNA, 19 bp, Homo sapiens
  siRNA target sequence for BAG1 (NM_004323.2,677-695).
gtcagcacttggaatacaa

SEQ ID NO: 129118 - DNA, 19 bp, Homo sapiens
  siRNA target sequence for BAG1 (NM_004323.2,699-717).
ggttgccgggtcatgttaa

SEQ ID NO: 129119 - DNA, 19 bp, Homo sapiens
  siRNA target sequence for BAG1 (NM_004323.2,700-718).
gttgccgggtcatgttaat

SEQ ID NO: 129120 - DNA, 19 bp, Homo sapiens
  siRNA target sequence for BAG1 (NM_004323.2,744-762).
gaggttgaactaaagaagt

SEQ ID NO: 129121 - DNA, 19 bp, Homo sapiens
  siRNA target sequence for BAG1 (NM_004323.2,873-891).
gctctctgcaaacttgata

SEQ ID NO: 129122 - DNA, 19 bp, Homo sapiens
  siRNA target sequence for BAG1 (NM_004323.2,895-913).
gagtaaaagccacaataga

SEQ ID NO: 129123 - DNA, 19 bp, Homo sapiens
  siRNA target sequence for BAG1 (NM_004323.2,948-966).
ctgatcctgccagaaaatt

SEQ ID NO: 129124 - DNA, 19 bp, Homo sapiens
  siRNA target sequence for BAG1 (NM_004323.2,1065-1083).
gagcggctgcagtctacaa

SEQ ID NO: 129125 - DNA, 19 bp, Homo sapiens
  siRNA target sequence for BAG2 (NM_004282.2,428-446).
gaactctcaccgttgaagt

SEQ ID NO: 129126 - DNA, 19 bp, Homo sapiens
  siRNA target sequence for BAG2 (NM_004282.2,438-456).
cgttgaagtgtcagtagaa

SEQ ID NO: 129127 - DNA, 19 bp, Homo sapiens
  siRNA target sequence for BAG2 (NM_004282.2,439-457).
gttgaagtgtcagtagaaa

SEQ ID NO: 129128 - DNA, 19 bp, Homo sapiens
  siRNA target sequence for BAG2 (NM_004282.2,477-495).
gcaagaatccctaaagcat

SEQ ID NO: 129129 - DNA, 19 bp, Homo sapiens
  siRNA target sequence for BAG2 (NM_004282.2,497-515).
ccacaaggattattgatga

SEQ ID NO: 129130 - DNA, 19 bp, Homo sapiens
  siRNA target sequence for BAG2 (NM_004282.2,573-591).
ctacagtgcatgttcatct

SEQ ID NO: 129131 - DNA, 19 bp, Homo sapiens
  siRNA target sequence for BAG2 (NM_004282.2,597-615).
gccacatgggccagttgat

SEQ ID NO: 129132 - DNA, 19 bp, Homo sapiens
  siRNA target sequence for BAG2 (NM_004282.2,618-636).
gaagtttcaatccatagta

SEQ ID NO: 129133 - DNA, 19 bp, Homo sapiens
  siRNA target sequence for BAG2 (NM_004282.2,756-774).
caaaactctgcaacaaaat

SEQ ID NO: 129134 - DNA, 19 bp, Homo sapiens
  siRNA target sequence for BAG3 (NM_004281.2,570-588).
gctccgaccaggctacatt

SEQ ID NO: 129135 - DNA, 19 bp, Homo sapiens
  siRNA target sequence for BAG3 (NM_004281.2,630-648).
gcaccctttccatgtctat

SEQ ID NO: 129136 - DNA, 19 bp, Homo sapiens
  siRNA target sequence for BAG3 (NM_004281.2,1221-1239).
catgacccatcgagaaact

SEQ ID NO: 129137 - DNA, 19 bp, Homo sapiens
  siRNA target sequence for BAG3 (NM_004281.2,1467-1485).
caagagtgtggctacagaa

SEQ ID NO: 129138 - DNA, 19 bp, Homo sapiens
  siRNA target sequence for BAG3 (NM_004281.2,1544-1562).
ccgaggctcccccaaaaca

SEQ ID NO: 129139 - DNA, 19 bp, Homo sapiens
  siRNA target sequence for BAG3 (NM_004281.2,1617-1635).
ggctgtagacaactttgaa

SEQ ID NO: 129140 - DNA, 19 bp, Homo sapiens
  siRNA target sequence for BAG3 (NM_004281.2,1659-1677).
cctgatgatcgaagagtat

SEQ ID NO: 129141 - DNA, 19 bp, Homo sapiens
  siRNA target sequence for BAG3 (NM_004281.2,1660-1678).
ctgatgatcgaagagtatt

SEQ ID NO: 129142 - DNA, 19 bp, Homo sapiens
  siRNA target sequence for BAG4 (NM_004874.2,552-570).
ggagcagccaccatatcct

SEQ ID NO: 129143 - DNA, 19 bp, Homo sapiens
  siRNA target sequence for BAG4 (NM_004874.2,568-586).
cctagctacaattctaact

SEQ ID NO: 129144 - DNA, 19 bp, Homo sapiens
  siRNA target sequence for BAG4 (NM_004874.2,569-587).
ctagctacaattctaacta

SEQ ID NO: 129145 - DNA, 19 bp, Homo sapiens
  siRNA target sequence for BAG4 (NM_004874.2,613-631).
gctccttacccaagtacat

SEQ ID NO: 129146 - DNA, 19 bp, Homo sapiens
  siRNA target sequence for BAG4 (NM_004874.2,652-670).
caaggccagagtttgaatt

SEQ ID NO: 129147 - DNA, 19 bp, Homo sapiens
  siRNA target sequence for BAG4 (NM_004874.2,666-684).
gaattcttatacaaatgga

SEQ ID NO: 129148 - DNA, 19 bp, Homo sapiens
  siRNA target sequence for BAG4 (NM_004874.2,683-701).
gagcgtatggtccaacata

SEQ ID NO: 129149 - DNA, 19 bp, Homo sapiens
  siRNA target sequence for BAG4 (NM_004874.2,718-736).
gcaaatactgcctcatact

SEQ ID NO: 129150 - DNA, 19 bp, Homo sapiens
  siRNA target sequence for BAG4 (NM_004874.2,731-749).
catactcaggggcttatta

SEQ ID NO: 129151 - DNA, 19 bp, Homo sapiens
  siRNA target sequence for BAG4 (NM_004874.2,735-753).
ctcaggggcttattatgca

SEQ ID NO: 129152 - DNA, 19 bp, Homo sapiens
  siRNA target sequence for BAG4 (NM_004874.2,927-945).
gaccctgccccattatcct

SEQ ID NO: 129153 - DNA, 19 bp, Homo sapiens
  siRNA target sequence for BAG4 (NM_004874.2,933-951).
gccccattatccttatgga

SEQ ID NO: 129154 - DNA, 19 bp, Homo sapiens
  siRNA target sequence for BAG4 (NM_004874.2,984-1002).
gactgtacgaccacaagaa

SEQ ID NO: 129155 - DNA, 19 bp, Homo sapiens
  siRNA target sequence for BAG4 (NM_004874.2,1072-1090).
gcaccacccggcaatctct

SEQ ID NO: 129156 - DNA, 19 bp, Homo sapiens
  siRNA target sequence for BAG4 (NM_004874.2,1073-1091).
caccacccggcaatctcta

SEQ ID NO: 129157 - DNA, 19 bp, Homo sapiens
  siRNA target sequence for BAG4 (NM_004874.2,1078-1096).
cccggcaatctctacatga

SEQ ID NO: 129158 - DNA, 19 bp, Homo sapiens
  siRNA target sequence for BAG4 (NM_004874.2,1087-1105).
ctctacatgactgaaagta

SEQ ID NO: 129159 - DNA, 19 bp, Homo sapiens
  siRNA target sequence for BAG4 (NM_004874.2,1089-1107).
ctacatgactgaaagtact

SEQ ID NO: 129160 - DNA, 19 bp, Homo sapiens
  siRNA target sequence for BAG4 (NM_004874.2,1159-1177).
cagcagcccaaggattctt

SEQ ID NO: 129161 - DNA, 19 bp, Homo sapiens
  siRNA target sequence for BAG4 (NM_004874.2,1182-1200).
cccctatagccaatcagat

SEQ ID NO: 129162 - DNA, 19 bp, Homo sapiens
  siRNA target sequence for BAG4 (NM_004874.2,1250-1268).
cctcggggacagtgaacaa

SEQ ID NO: 129163 - DNA, 19 bp, Homo sapiens
  siRNA target sequence for BAG4 (NM_004874.2,1251-1269).
ctcggggacagtgaacaat

SEQ ID NO: 129164 - DNA, 19 bp, Homo sapiens
  siRNA target sequence for BAG4 (NM_004874.2,1253-1271).
cggggacagtgaacaatga

SEQ ID NO: 129165 - DNA, 19 bp, Homo sapiens
  siRNA target sequence for BAG4 (NM_004874.2,1288-1306).
gattcccaagtccagtata

SEQ ID NO: 129166 - DNA, 19 bp, Homo sapiens
  siRNA target sequence for BAG4 (NM_004874.2,1312-1330).
gagcctcagctgtatggta

SEQ ID NO: 129167 - DNA, 19 bp, Homo sapiens
  siRNA target sequence for BAG4 (NM_004874.2,1338-1356).
cagtgaccatcccaacaat

SEQ ID NO: 129168 - DNA, 19 bp, Homo sapiens
  siRNA target sequence for BAG4 (NM_004874.2,1350-1368).
caacaatcaagatcaaagt

SEQ ID NO: 129169 - DNA, 19 bp, Homo sapiens
  siRNA target sequence for BAG4 (NM_004874.2,1409-1427).
ctcctccgagtattaaaaa

SEQ ID NO: 129170 - DNA, 19 bp, Homo sapiens
  siRNA target sequence for BAG4 (NM_004874.2,1411-1429).
cctccgagtattaaaaaaa

SEQ ID NO: 129171 - DNA, 19 bp, Homo sapiens
  siRNA target sequence for BAG4 (NM_004874.2,1449-1467).
ggtccagtatcttgaacaa

SEQ ID NO: 129172 - DNA, 19 bp, Homo sapiens
  siRNA target sequence for BAG4 (NM_004874.2,1455-1473).
gtatcttgaacaagaagta

SEQ ID NO: 129173 - DNA, 19 bp, Homo sapiens
  siRNA target sequence for BAG4 (NM_004874.2,1512-1530).
gcttctggaagaaatgcta

SEQ ID NO: 129174 - DNA, 19 bp, Homo sapiens
  siRNA target sequence for BAG4 (NM_004874.2,1545-1563).
ggaactggattcagttgaa

SEQ ID NO: 129175 - DNA, 19 bp, Homo sapiens
  siRNA target sequence for BAG5 (NM_004873.1,234-252).
gaaaccaacatccttctat

SEQ ID NO: 129176 - DNA, 19 bp, Homo sapiens
  siRNA target sequence for BAG5 (NM_004873.1,238-256).
ccaacatccttctattagt

SEQ ID NO: 129177 - DNA, 19 bp, Homo sapiens
  siRNA target sequence for BAG5 (NM_004873.1,239-257).
caacatccttctattagta

SEQ ID NO: 129178 - DNA, 19 bp, Homo sapiens
  siRNA target sequence for BAG5 (NM_004873.1,255-273).
gtaggcttcaggaaatcca

SEQ ID NO: 129179 - DNA, 19 bp, Homo sapiens
  siRNA target sequence for BAG5 (NM_004873.1,347-365).
ctggagaggattctaacaa

SEQ ID NO: 129180 - DNA, 19 bp, Homo sapiens
  siRNA target sequence for BAG5 (NM_004873.1,349-367).
ggagaggattctaacaaaa

SEQ ID NO: 129181 - DNA, 19 bp, Homo sapiens
  siRNA target sequence for BAG5 (NM_004873.1,449-467).
gaacgtcttctcaaagagt

SEQ ID NO: 129182 - DNA, 19 bp, Homo sapiens
  siRNA target sequence for BAG5 (NM_004873.1,487-505).
cccacaccggattgaaata

SEQ ID NO: 129183 - DNA, 19 bp, Homo sapiens
  siRNA target sequence for BAG5 (NM_004873.1,489-507).
cacaccggattgaaataca

SEQ ID NO: 129184 - DNA, 19 bp, Homo sapiens
  siRNA target sequence for BAG5 (NM_004873.1,529-547).
gtccctcgtgagagagaaa

SEQ ID NO: 129185 - DNA, 19 bp, Homo sapiens
  siRNA target sequence for BAG5 (NM_004873.1,532-550).
cctcgtgagagagaaaatt

SEQ ID NO: 129186 - DNA, 19 bp, Homo sapiens
  siRNA target sequence for BAG5 (NM_004873.1,567-585).
gaggcaactgcgtaactga

SEQ ID NO: 129187 - DNA, 19 bp, Homo sapiens
  siRNA target sequence for BAG5 (NM_004873.1,576-594).
gcgtaactgatgagtttga

SEQ ID NO: 129188 - DNA, 19 bp, Homo sapiens
  siRNA target sequence for BAG5 (NM_004873.1,577-595).
cgtaactgatgagtttgaa

SEQ ID NO: 129189 - DNA, 19 bp, Homo sapiens
  siRNA target sequence for BAG5 (NM_004873.1,655-673).
cttgcggaaagcaaggtat

SEQ ID NO: 129190 - DNA, 19 bp, Homo sapiens
  siRNA target sequence for BAG5 (NM_004873.1,659-677).
cggaaagcaaggtatcaca

SEQ ID NO: 129191 - DNA, 19 bp, Homo sapiens
  siRNA target sequence for BAG5 (NM_004873.1,670-688).
gtatcacactttaaccaaa

SEQ ID NO: 129192 - DNA, 19 bp, Homo sapiens
  siRNA target sequence for BAG5 (NM_004873.1,691-709).
ctgtgcggtgcaagagata

SEQ ID NO: 129193 - DNA, 19 bp, Homo sapiens
  siRNA target sequence for BAG5 (NM_004873.1,693-711).
gtgcggtgcaagagataat

SEQ ID NO: 129194 - DNA, 19 bp, Homo sapiens
  siRNA target sequence for BAG5 (NM_004873.1,696-714).
cggtgcaagagataatcga

SEQ ID NO: 129195 - DNA, 19 bp, Homo sapiens
  siRNA target sequence for BAG5 (NM_004873.1,697-715).
ggtgcaagagataatcgaa

SEQ ID NO: 129196 - DNA, 19 bp, Homo sapiens
  siRNA target sequence for BAG5 (NM_004873.1,953-971).
gaggtagtagaagatatca

SEQ ID NO: 129197 - DNA, 19 bp, Homo sapiens
  siRNA target sequence for BAG5 (NM_004873.1,965-983).
gatatcaacaaattattga

SEQ ID NO: 129198 - DNA, 19 bp, Homo sapiens
  siRNA target sequence for BAG5 (NM_004873.1,1109-1127).
gcacaaaacccttctgaat

SEQ ID NO: 129199 - DNA, 19 bp, Homo sapiens
  siRNA target sequence for BAG5 (NM_004873.1,1171-1189).
gttggatgaggtaagtctt

SEQ ID NO: 129200 - DNA, 19 bp, Homo sapiens
  siRNA target sequence for BAG5 (NM_004873.1,1175-1193).
gatgaggtaagtcttgaaa

SEQ ID NO: 129201 - DNA, 19 bp, Homo sapiens
  siRNA target sequence for BAG5 (NM_004873.1,1240-1258).
gcaaactctgatcacatat

SEQ ID NO: 129202 - DNA, 19 bp, Homo sapiens
  siRNA target sequence for BAG5 (NM_004873.1,1245-1263).
ctctgatcacatatattga

SEQ ID NO: 129203 - DNA, 19 bp, Homo sapiens
  siRNA target sequence for BAG5 (NM_004873.1,1306-1324).
ggagcacccatcccataaa

SEQ ID NO: 129204 - DNA, 19 bp, Homo sapiens
  siRNA target sequence for BAG5 (NM_004873.1,1360-1378).
ccagggagaagttctttca

SEQ ID NO: 129205 - DNA, 19 bp, Homo sapiens
  siRNA target sequence for BAG5 (NM_004873.1,1385-1403).
ggaaatcgaaccgataaga

SEQ ID NO: 129206 - DNA, 19 bp, Homo sapiens
  siRNA target sequence for BAG5 (NM_004873.1,1386-1404).
gaaatcgaaccgataagaa

SEQ ID NO: 129207 - DNA, 19 bp, Homo sapiens
  siRNA target sequence for BAG5 (NM_004873.1,1391-1409).
cgaaccgataagaactaca

SEQ ID NO: 129208 - DNA, 19 bp, Homo sapiens
  siRNA target sequence for BAG5 (NM_004873.1,1505-1523).
gtgaggcttgcgcagaata

SEQ ID NO: 129209 - DNA, 19 bp, Homo sapiens
  siRNA target sequence for BAG5 (NM_004873.1,1507-1525).
gaggcttgcgcagaatatt

SEQ ID NO: 129210 - DNA, 19 bp, Homo sapiens
  siRNA target sequence for BAG5 (NM_004873.1,1509-1527).
ggcttgcgcagaatattct

SEQ ID NO: 129211 - DNA, 19 bp, Homo sapiens
  siRNA target sequence for BAG5 (NM_004873.1,1511-1529).
cttgcgcagaatattctca

SEQ ID NO: 129212 - DNA, 19 bp, Homo sapiens
  siRNA target sequence for BAG5 (NM_004873.1,1531-1549).
ctatctcgacctgaaatct

SEQ ID NO: 129213 - DNA, 19 bp, Homo sapiens
  siRNA target sequence for BAI1 (NM_001702.1,317-335).
cgctggtgcagggaaagtt

SEQ ID NO: 129214 - DNA, 19 bp, Homo sapiens
  siRNA target sequence for BAI1 (NM_001702.1,419-437).
gctacactctctacatgaa

SEQ ID NO: 129215 - DNA, 19 bp, Homo sapiens
  siRNA target sequence for BAI1 (NM_001702.1,1522-1540).
gagggccctgagaagcaaa

SEQ ID NO: 129216 - DNA, 19 bp, Homo sapiens
  siRNA target sequence for BAI1 (NM_001702.1,1531-1549).
gagaagcaaaccaagttct

SEQ ID NO: 129217 - DNA, 19 bp, Homo sapiens
  siRNA target sequence for BAI1 (NM_001702.1,1904-1922).
gtcccgagccccatgagat

SEQ ID NO: 129218 - DNA, 19 bp, Homo sapiens
  siRNA target sequence for BAI1 (NM_001702.1,2076-2094).
catccgctgtgtttccatt

SEQ ID NO: 129219 - DNA, 19 bp, Homo sapiens
  siRNA target sequence for BAI1 (NM_001702.1,2090-2108).
ccattgactacagaaacat

SEQ ID NO: 129220 - DNA, 19 bp, Homo sapiens
  siRNA target sequence for BAI1 (NM_001702.1,2488-2506).
ctggttctcagcatccata

SEQ ID NO: 129221 - DNA, 19 bp, Homo sapiens
  siRNA target sequence for BAI1 (NM_001702.1,2961-2979).
ctccaccttcgccatctta

SEQ ID NO: 129222 - DNA, 19 bp, Homo sapiens
  siRNA target sequence for BAI1 (NM_001702.1,3409-3427).
gggtacagcaccatgaact

SEQ ID NO: 129223 - DNA, 19 bp, Homo sapiens
  siRNA target sequence for BAI1 (NM_001702.1,3410-3428).
ggtacagcaccatgaacta

SEQ ID NO: 129224 - DNA, 19 bp, Homo sapiens
  siRNA target sequence for BAI1 (NM_001702.1,3881-3899).
gtagatcagtgctgaacaa

SEQ ID NO: 129225 - DNA, 19 bp, Homo sapiens
  siRNA target sequence for BCL10 (NM_003921.2,759-777).
ggacgccttagaaaattta

SEQ ID NO: 129226 - DNA, 19 bp, Homo sapiens
  siRNA target sequence for BCL10 (NM_003921.2,762-780).
cgccttagaaaatttacgt

SEQ ID NO: 129227 - DNA, 19 bp, Homo sapiens
  siRNA target sequence for BCL10 (NM_003921.2,806-824).
ctgagagacattttgatca

SEQ ID NO: 129228 - DNA, 19 bp, Homo sapiens
  siRNA target sequence for BCL10 (NM_003921.2,810-828).
gagacattttgatcatcta

SEQ ID NO: 129229 - DNA, 19 bp, Homo sapiens
  siRNA target sequence for BCL10 (NM_003921.2,898-916).
gctggaaaattgttagact

SEQ ID NO: 129230 - DNA, 19 bp, Homo sapiens
  siRNA target sequence for BCL10 (NM_003921.2,902-920).
gaaaattgttagactactt

SEQ ID NO: 129231 - DNA, 19 bp, Homo sapiens
  siRNA target sequence for BCL10 (NM_003921.2,938-956).
gtctggacacccttgttga

SEQ ID NO: 129232 - DNA, 19 bp, Homo sapiens
  siRNA target sequence for BCL10 (NM_003921.2,940-958).
ctggacacccttgttgaat

SEQ ID NO: 129233 - DNA, 19 bp, Homo sapiens
  siRNA target sequence for BCL10 (NM_003921.2,943-961).
gacacccttgttgaatcta

SEQ ID NO: 129234 - DNA, 19 bp, Homo sapiens
  siRNA target sequence for BCL10 (NM_003921.2,945-963).
cacccttgttgaatctatt

SEQ ID NO: 129235 - DNA, 19 bp, Homo sapiens
  siRNA target sequence for BCL10 (NM_003921.2,1006-1024).
gatgaagtgctgaaactta

SEQ ID NO: 129236 - DNA, 19 bp, Homo sapiens
  siRNA target sequence for BCL10 (NM_003921.2,1012-1030).
gtgctgaaacttagaaata

SEQ ID NO: 129237 - DNA, 19 bp, Homo sapiens
  siRNA target sequence for BCL10 (NM_003921.2,1061-1079).
gtagcagttgtgaaccttt

SEQ ID NO: 129238 - DNA, 19 bp, Homo sapiens
  siRNA target sequence for BCL10 (NM_003921.2,1112-1130).
caaattcagatgagagtaa

SEQ ID NO: 129239 - DNA, 19 bp, Homo sapiens
  siRNA target sequence for BCL10 (NM_003921.2,1185-1203).
cagcacgacgccctttttt

SEQ ID NO: 129240 - DNA, 19 bp, Homo sapiens
  siRNA target sequence for BCL10 (NM_003921.2,1193-1211).
cgccctttttttctactaa

SEQ ID NO: 129241 - DNA, 19 bp, Homo sapiens
  siRNA target sequence for BCL10 (NM_003921.2,1252-1270).
gaaaataccatcttctctt

SEQ ID NO: 129242 - DNA, 19 bp, Homo sapiens
  siRNA target sequence for BCL10 (NM_003921.2,1314-1332).
gccaccagatctacagtta

SEQ ID NO: 129243 - DNA, 19 bp, Homo sapiens
  siRNA target sequence for BCL10 (NM_003921.2,1342-1360).
ggaacttgtgcaaactcta

SEQ ID NO: 129244 - DNA, 19 bp, Homo sapiens
  siRNA target sequence for BCL10 (NM_003921.2,1356-1374).
ctctagtgagatgtttctt

SEQ ID NO: 129245 - DNA, 19 bp, Homo sapiens
  siRNA target sequence for BCL10 (NM_003921.2,1377-1395).
cttaagatcacgtactgtt

SEQ ID NO: 129246 - DNA, 19 bp, Homo sapiens
  siRNA target sequence for BCL2L10 (NM_020396.2,221-239).
cagattcaccggtcctttt

SEQ ID NO: 129247 - DNA, 19 bp, Homo sapiens
  siRNA target sequence for BCL2L10 (NM_020396.2,534-552).
gctgggatggcttttgtca

SEQ ID NO: 129248 - DNA, 19 bp, Homo sapiens
  siRNA target sequence for BCL2L10 (NM_020396.2,613-631).
gtcatgcttgttaacaaca

SEQ ID NO: 129249 - DNA, 19 bp, Homo sapiens
  siRNA target sequence for BCL2L10 (NM_020396.2,622-640).
gttaacaacagccttcatt

SEQ ID NO: 129250 - DNA, 19 bp, Homo sapiens
  siRNA target sequence for BCL6B (NM_181844.2,241-259).
gtggcttcttctattcaat

SEQ ID NO: 129251 - DNA, 19 bp, Homo sapiens
  siRNA target sequence for BCL6B (NM_181844.2,325-343).
gcttcgcccctctattgga

SEQ ID NO: 129252 - DNA, 19 bp, Homo sapiens
  siRNA target sequence for BCL6B (NM_181844.2,331-349).
cccctctattggacttcat

SEQ ID NO: 129253 - DNA, 19 bp, Homo sapiens
  siRNA target sequence for BCL6B (NM_181844.2,334-352).
ctctattggacttcatgta

SEQ ID NO: 129254 - DNA, 19 bp, Homo sapiens
  siRNA target sequence for BCL6B (NM_181844.2,656-674).
gtacatcgtgctaaactct

SEQ ID NO: 129255 - DNA, 19 bp, Homo sapiens
  siRNA target sequence for BCL6B (NM_181844.2,696-714).
ctggtcggggagagaagtt

SEQ ID NO: 129256 - DNA, 19 bp, Homo sapiens
  siRNA target sequence for BCL6B (NM_181844.2,698-716).
ggtcggggagagaagttct

SEQ ID NO: 129257 - DNA, 19 bp, Homo sapiens
  siRNA target sequence for BCL6B (NM_181844.2,946-964).
cactaccgggaagtgaatt

SEQ ID NO: 129258 - DNA, 19 bp, Homo sapiens
  siRNA target sequence for BCL6B (NM_181844.2,951-969).
ccgggaagtgaatttttca

SEQ ID NO: 129259 - DNA, 19 bp, Homo sapiens
  siRNA target sequence for BCL6B (NM_181844.2,1229-1247).
gtgcggctcgcgctttgta

SEQ ID NO: 129260 - DNA, 19 bp, Homo sapiens
  siRNA target sequence for BCL6B (NM_181844.2,1231-1249).
gcggctcgcgctttgtaca

SEQ ID NO: 129261 - DNA, 19 bp, Homo sapiens
  siRNA target sequence for BTBD1 (NM_025238.1,473-491).
ggcgctgctgagatttcta

SEQ ID NO: 129262 - DNA, 19 bp, Homo sapiens
  siRNA target sequence for BTBD1 (NM_025238.1,482-500).
gagatttctatattcagat

SEQ ID NO: 129263 - DNA, 19 bp, Homo sapiens
  siRNA target sequence for BTBD1 (NM_025238.1,523-541).
cagttatgaccactcttta

SEQ ID NO: 129264 - DNA, 19 bp, Homo sapiens
  siRNA target sequence for BTBD1 (NM_025238.1,525-543).
gttatgaccactctttata

SEQ ID NO: 129265 - DNA, 19 bp, Homo sapiens
  siRNA target sequence for BTBD1 (NM_025238.1,573-591).
gaagcacactgtgtagaat

SEQ ID NO: 129266 - DNA, 19 bp, Homo sapiens
  siRNA target sequence for BTBD1 (NM_025238.1,622-640).
cctttatgttacttactca

SEQ ID NO: 129267 - DNA, 19 bp, Homo sapiens
  siRNA target sequence for BTBD1 (NM_025238.1,633-651).
cttactcaggctcgattat

SEQ ID NO: 129268 - DNA, 19 bp, Homo sapiens
  siRNA target sequence for BTBD1 (NM_025238.1,637-655).
ctcaggctcgattatttga

SEQ ID NO: 129269 - DNA, 19 bp, Homo sapiens
  siRNA target sequence for BTBD1 (NM_025238.1,641-659).
ggctcgattatttgatgaa

SEQ ID NO: 129270 - DNA, 19 bp, Homo sapiens
  siRNA target sequence for BTBD1 (NM_025238.1,679-697).
gtctagatacaatagacaa

SEQ ID NO: 129271 - DNA, 19 bp, Homo sapiens
  siRNA target sequence for BTBD1 (NM_025238.1,681-699).
ctagatacaatagacaaaa

SEQ ID NO: 129272 - DNA, 19 bp, Homo sapiens
  siRNA target sequence for BTBD1 (NM_025238.1,720-738).
gcagaagggtttactgata

SEQ ID NO: 129273 - DNA, 19 bp, Homo sapiens
  siRNA target sequence for BTBD1 (NM_025238.1,888-906).
ggaaaagcactttccttaa

SEQ ID NO: 129274 - DNA, 19 bp, Homo sapiens
  siRNA target sequence for BTBD1 (NM_025238.1,909-927).
cggttcccactgatgacaa

SEQ ID NO: 129275 - DNA, 19 bp, Homo sapiens
  siRNA target sequence for BTBD1 (NM_025238.1,910-928).
ggttcccactgatgacaat

SEQ ID NO: 129276 - DNA, 19 bp, Homo sapiens
  siRNA target sequence for BTBD1 (NM_025238.1,911-929).
gttcccactgatgacaatt

SEQ ID NO: 129277 - DNA, 19 bp, Homo sapiens
  siRNA target sequence for BTBD1 (NM_025238.1,920-938).
gatgacaattgaggaattt

SEQ ID NO: 129278 - DNA, 19 bp, Homo sapiens
  siRNA target sequence for BTBD1 (NM_025238.1,951-969).
gctcaatctggaattttgt

SEQ ID NO: 129279 - DNA, 19 bp, Homo sapiens
  siRNA target sequence for BTBD1 (NM_025238.1,970-988).
cagatcgtgaagtggtaaa

SEQ ID NO: 129280 - DNA, 19 bp, Homo sapiens
  siRNA target sequence for BTBD1 (NM_025238.1,1015-1033).
ctaaaccccgagttgaata

SEQ ID NO: 129281 - DNA, 19 bp, Homo sapiens
  siRNA target sequence for BTBD1 (NM_025238.1,1021-1039).
cccgagttgaatacattga

SEQ ID NO: 129282 - DNA, 19 bp, Homo sapiens
  siRNA target sequence for BTBD1 (NM_025238.1,1067-1085).
ggaatgctgcatcaataga

SEQ ID NO: 129283 - DNA, 19 bp, Homo sapiens
  siRNA target sequence for BTBD1 (NM_025238.1,1121-1139).
gacgagtgatcgaatcaga

SEQ ID NO: 129284 - DNA, 19 bp, Homo sapiens
  siRNA target sequence for BTBD1 (NM_025238.1,1123-1141).
cgagtgatcgaatcagatt

SEQ ID NO: 129285 - DNA, 19 bp, Homo sapiens
  siRNA target sequence for BTBD1 (NM_025238.1,1136-1154).
cagattcacagttaataga

SEQ ID NO: 129286 - DNA, 19 bp, Homo sapiens
  siRNA target sequence for BTBD1 (NM_025238.1,1146-1164).
gttaatagaaggatctcta

SEQ ID NO: 129287 - DNA, 19 bp, Homo sapiens
  siRNA target sequence for BTBD1 (NM_025238.1,1156-1174).
ggatctctatagttggatt

SEQ ID NO: 129288 - DNA, 19 bp, Homo sapiens
  siRNA target sequence for BTBD1 (NM_025238.1,1157-1175).
gatctctatagttggattt

SEQ ID NO: 129289 - DNA, 19 bp, Homo sapiens
  siRNA target sequence for BTBD1 (NM_025238.1,1177-1195).
gcttgtatggatctattca

SEQ ID NO: 129290 - DNA, 19 bp, Homo sapiens
  siRNA target sequence for BTBD1 (NM_025238.1,1198-1216).
gccctacagattatcaagt

SEQ ID NO: 129291 - DNA, 19 bp, Homo sapiens
  siRNA target sequence for BTBD1 (NM_025238.1,1204-1222).
cagattatcaagtgaatat

SEQ ID NO: 129292 - DNA, 19 bp, Homo sapiens
  siRNA target sequence for BTBD1 (NM_025238.1,1226-1244).
gatcattgaatatgagaaa

SEQ ID NO: 129293 - DNA, 19 bp, Homo sapiens
  siRNA target sequence for BTBD1 (NM_025238.1,1262-1280).
gaatgataccggctttagt

SEQ ID NO: 129294 - DNA, 19 bp, Homo sapiens
  siRNA target sequence for BTBD1 (NM_025238.1,1462-1480).
gttcccctggcaataataa

SEQ ID NO: 129295 - DNA, 19 bp, Homo sapiens
  siRNA target sequence for BTBD11 (NM_152322.1,280-298).
ggtagaaggaagaccattt

SEQ ID NO: 129296 - DNA, 19 bp, Homo sapiens
  siRNA target sequence for BTBD11 (NM_152322.1,352-370).
ctccagcaagccgacaaat

SEQ ID NO: 129297 - DNA, 19 bp, Homo sapiens
  siRNA target sequence for BTBD11 (NM_152322.1,354-372).
ccagcaagccgacaaatga

SEQ ID NO: 129298 - DNA, 19 bp, Homo sapiens
  siRNA target sequence for BTBD11 (NM_152322.1,381-399).
gcatagagattggttatgt

SEQ ID NO: 129299 - DNA, 19 bp, Homo sapiens
  siRNA target sequence for BTBD11 (NM_152322.1,491-509).
ctgtctgctgctaagtttt

SEQ ID NO: 129300 - DNA, 19 bp, Homo sapiens
  siRNA target sequence for BTBD11 (NM_152322.1,530-548).
cgacactgtgagattatct

SEQ ID NO: 129301 - DNA, 19 bp, Homo sapiens
  siRNA target sequence for BTBD11 (NM_152322.1,567-585).
ccgacaactgtgtggatat

SEQ ID NO: 129302 - DNA, 19 bp, Homo sapiens
  siRNA target sequence for BTBD11 (NM_152322.1,568-586).
cgacaactgtgtggatatt

SEQ ID NO: 129303 - DNA, 19 bp, Homo sapiens
  siRNA target sequence for BTBD11 (NM_152322.1,634-652).
cgaaggctactttctcaaa

SEQ ID NO: 129304 - DNA, 19 bp, Homo sapiens
  siRNA target sequence for BTBD11 (NM_152322.1,661-679).
ggtcctcattgaaaacgaa

SEQ ID NO: 129305 - DNA, 19 bp, Homo sapiens
  siRNA target sequence for BTBD11 (NM_152322.1,750-768).
ggacgttggccatcagaat

SEQ ID NO: 129306 - DNA, 19 bp, Homo sapiens
  siRNA target sequence for BTBD11 (NM_152322.1,753-771).
cgttggccatcagaattca

SEQ ID NO: 129307 - DNA, 19 bp, Homo sapiens
  siRNA target sequence for BTBD12 (NM_032444.1,133-151).
cccacaagttcgtgcttta

SEQ ID NO: 129308 - DNA, 19 bp, Homo sapiens
  siRNA target sequence for BTBD12 (NM_032444.1,134-152).
ccacaagttcgtgctttat

SEQ ID NO: 129309 - DNA, 19 bp, Homo sapiens
  siRNA target sequence for BTBD12 (NM_032444.1,163-181).
cgctcctcatccagtatgt

SEQ ID NO: 129310 - DNA, 19 bp, Homo sapiens
  siRNA target sequence for BTBD12 (NM_032444.1,165-183).
ctcctcatccagtatgtga

SEQ ID NO: 129311 - DNA, 19 bp, Homo sapiens
  siRNA target sequence for BTBD12 (NM_032444.1,448-466).
gcagggccgagaatttcca

SEQ ID NO: 129312 - DNA, 19 bp, Homo sapiens
  siRNA target sequence for BTBD12 (NM_032444.1,468-486).
gaactcttgaggtcaatgt

SEQ ID NO: 129313 - DNA, 19 bp, Homo sapiens
  siRNA target sequence for BTBD12 (NM_032444.1,507-525).
gcggagactttgttgaaat

SEQ ID NO: 129314 - DNA, 19 bp, Homo sapiens
  siRNA target sequence for BTBD12 (NM_032444.1,510-528).
gagactttgttgaaatcca

SEQ ID NO: 129315 - DNA, 19 bp, Homo sapiens
  siRNA target sequence for BTBD12 (NM_032444.1,527-545).
caaggaccacgaagaagat

SEQ ID NO: 129316 - DNA, 19 bp, Homo sapiens
  siRNA target sequence for BTBD12 (NM_032444.1,530-548).
ggaccacgaagaagatcaa

SEQ ID NO: 129317 - DNA, 19 bp, Homo sapiens
  siRNA target sequence for BTBD12 (NM_032444.1,1001-1019).
ctcagagccgtcccaaata

SEQ ID NO: 129318 - DNA, 19 bp, Homo sapiens
  siRNA target sequence for BTBD12 (NM_032444.1,1005-1023).
gagccgtcccaaataacaa

SEQ ID NO: 129319 - DNA, 19 bp, Homo sapiens
  siRNA target sequence for BTBD12 (NM_032444.1,1007-1025).
gccgtcccaaataacaagt

SEQ ID NO: 129320 - DNA, 19 bp, Homo sapiens
  siRNA target sequence for BTBD12 (NM_032444.1,1061-1079).
ggggctggaggtttctcat

SEQ ID NO: 129321 - DNA, 19 bp, Homo sapiens
  siRNA target sequence for BTBD12 (NM_032444.1,1110-1128).
cacccgtgccgcttcctat

SEQ ID NO: 129322 - DNA, 19 bp, Homo sapiens
  siRNA target sequence for BTBD12 (NM_032444.1,1243-1261).
ctccagctgtgccatcaaa

SEQ ID NO: 129323 - DNA, 19 bp, Homo sapiens
  siRNA target sequence for BTBD12 (NM_032444.1,1279-1297).
gcatcctcacgctgtctaa

SEQ ID NO: 129324 - DNA, 19 bp, Homo sapiens
  siRNA target sequence for BTBD12 (NM_032444.1,1280-1298).
catcctcacgctgtctaaa

SEQ ID NO: 129325 - DNA, 19 bp, Homo sapiens
  siRNA target sequence for BTBD12 (NM_032444.1,1334-1352).
cgtgctggagtgcagaaat

SEQ ID NO: 129326 - DNA, 19 bp, Homo sapiens
  siRNA target sequence for BTBD12 (NM_032444.1,1394-1412).
cctaacccagtcaaatcct

SEQ ID NO: 129327 - DNA, 19 bp, Homo sapiens
  siRNA target sequence for BTBD12 (NM_032444.1,1424-1442).
ctccagatctcagaaatct

SEQ ID NO: 129328 - DNA, 19 bp, Homo sapiens
  siRNA target sequence for BTBD12 (NM_032444.1,1448-1466).
caaactgaacgaagaagat

SEQ ID NO: 129329 - DNA, 19 bp, Homo sapiens
  siRNA target sequence for BTBD12 (NM_032444.1,1925-1943).
cgaagtcgcacagaagttt

SEQ ID NO: 129330 - DNA, 19 bp, Homo sapiens
  siRNA target sequence for BTBD12 (NM_032444.1,2128-2146).
gcaggcggttcctgaaaca

SEQ ID NO: 129331 - DNA, 19 bp, Homo sapiens
  siRNA target sequence for BTBD12 (NM_032444.1,2267-2285).
cagtgaccccccaattcca

SEQ ID NO: 129332 - DNA, 19 bp, Homo sapiens
  siRNA target sequence for BTBD12 (NM_032444.1,2269-2287).
gtgaccccccaattccaat

SEQ ID NO: 129333 - DNA, 19 bp, Homo sapiens
  siRNA target sequence for BTBD12 (NM_032444.1,2521-2539).
gcaggccgagctttctgaa

SEQ ID NO: 129334 - DNA, 19 bp, Homo sapiens
  siRNA target sequence for BTBD12 (NM_032444.1,2522-2540).
caggccgagctttctgaat

SEQ ID NO: 129335 - DNA, 19 bp, Homo sapiens
  siRNA target sequence for BTBD12 (NM_032444.1,2658-2676).
ggtgctaatcggaagaaga

SEQ ID NO: 129336 - DNA, 19 bp, Homo sapiens
  siRNA target sequence for BTBD12 (NM_032444.1,2661-2679).
gctaatcggaagaagaact

SEQ ID NO: 129337 - DNA, 19 bp, Homo sapiens
  siRNA target sequence for BTBD12 (NM_032444.1,2662-2680).
ctaatcggaagaagaactt

SEQ ID NO: 129338 - DNA, 19 bp, Homo sapiens
  siRNA target sequence for BTBD12 (NM_032444.1,2703-2721).
ccgatgccacagtattcca

SEQ ID NO: 129339 - DNA, 19 bp, Homo sapiens
  siRNA target sequence for BTBD14A (NM_144653.2,430-448).
cagctcgtggtcatgtaca

SEQ ID NO: 129340 - DNA, 19 bp, Homo sapiens
  siRNA target sequence for BTBD14A (NM_144653.2,487-505).
ggcaccgacctcatgttca

SEQ ID NO: 129341 - DNA, 19 bp, Homo sapiens
  siRNA target sequence for BTBD14A (NM_144653.2,488-506).
gcaccgacctcatgttcaa

SEQ ID NO: 129342 - DNA, 19 bp, Homo sapiens
  siRNA target sequence for BTBD14A (NM_144653.2,1190-1208).
caggctctggggtctacat

SEQ ID NO: 129343 - DNA, 19 bp, Homo sapiens
  siRNA target sequence for BTBD14A (NM_144653.2,1244-1262).
caggggtgaagcataaggt

SEQ ID NO: 129344 - DNA, 19 bp, Homo sapiens
  siRNA target sequence for BTBD14A (NM_144653.2,1520-1538).
cggagggcgtggagatgta

SEQ ID NO: 129345 - DNA, 19 bp, Homo sapiens
  siRNA target sequence for BTBD14A (NM_144653.2,1670-1688).
gaactgacgccgtgaatgt

SEQ ID NO: 129346 - DNA, 19 bp, Homo sapiens
  siRNA target sequence for BTBD14A (NM_144653.2,1673-1691).
ctgacgccgtgaatgttga

SEQ ID NO: 129347 - DNA, 19 bp, Homo sapiens
  siRNA target sequence for BTBD14B (NM_052876.2,1060-1078).
cggcagatctgcaacatgt

SEQ ID NO: 129348 - DNA, 19 bp, Homo sapiens
  siRNA target sequence for BTBD14B (NM_052876.2,1191-1209).
gtctctcccggctgaactt

SEQ ID NO: 129349 - DNA, 19 bp, Homo sapiens
  siRNA target sequence for BTBD14B (NM_052876.2,1193-1211).
ctctcccggctgaacttat

SEQ ID NO: 129350 - DNA, 19 bp, Homo sapiens
  siRNA target sequence for BTBD14B (NM_052876.2,1195-1213).
ctcccggctgaacttatca

SEQ ID NO: 129351 - DNA, 19 bp, Homo sapiens
  siRNA target sequence for BTBD14B (NM_052876.2,1477-1495).
ctccacgctgtcaagtact

SEQ ID NO: 129352 - DNA, 19 bp, Homo sapiens
  siRNA target sequence for BTBD14B (NM_052876.2,1480-1498).
cacgctgtcaagtactact

SEQ ID NO: 129353 - DNA, 19 bp, Homo sapiens
  siRNA target sequence for BTBD2 (NM_017797.2,467-485).
caacatccacggagattga

SEQ ID NO: 129354 - DNA, 19 bp, Homo sapiens
  siRNA target sequence for BTBD2 (NM_017797.2,517-535).
gcactgctcaagtttctct

SEQ ID NO: 129355 - DNA, 19 bp, Homo sapiens
  siRNA target sequence for BTBD2 (NM_017797.2,518-536).
cactgctcaagtttctcta

SEQ ID NO: 129356 - DNA, 19 bp, Homo sapiens
  siRNA target sequence for BTBD2 (NM_017797.2,568-586).
gtgatgaccacgctataca

SEQ ID NO: 129357 - DNA, 19 bp, Homo sapiens
  siRNA target sequence for BTBD2 (NM_017797.2,580-598).
ctatacaccgccaagaagt

SEQ ID NO: 129358 - DNA, 19 bp, Homo sapiens
  siRNA target sequence for BTBD2 (NM_017797.2,833-851).
gtgaggtgcggctgttcaa

SEQ ID NO: 129359 - DNA, 19 bp, Homo sapiens
  siRNA target sequence for BTBD2 (NM_017797.2,1062-1080).
gccacgagtggagttcatt

SEQ ID NO: 129360 - DNA, 19 bp, Homo sapiens
  siRNA target sequence for BTBD2 (NM_017797.2,1064-1082).
cacgagtggagttcattga

SEQ ID NO: 129361 - DNA, 19 bp, Homo sapiens
  siRNA target sequence for BTBD2 (NM_017797.2,1244-1262).
ccaccgactaccaagtgaa

SEQ ID NO: 129362 - DNA, 19 bp, Homo sapiens
  siRNA target sequence for BTBD2 (NM_017797.2,1247-1265).
ccgactaccaagtgaacat

SEQ ID NO: 129363 - DNA, 19 bp, Homo sapiens
  siRNA target sequence for BTBD2 (NM_017797.2,1343-1361).
ccttccgcgtcatgttcaa

SEQ ID NO: 129364 - DNA, 19 bp, Homo sapiens
  siRNA target sequence for BTBD2 (NM_017797.2,1555-1573).
cccgaggtcatcttctaca

SEQ ID NO: 129365 - DNA, 19 bp, Homo sapiens
  siRNA target sequence for BTBD3 (NM_014962.2,391-409).
gtctcaccttcttcttgat

SEQ ID NO: 129366 - DNA, 19 bp, Homo sapiens
  siRNA target sequence for BTBD3 (NM_014962.2,488-506).
caagttgccaccagtttgt

SEQ ID NO: 129367 - DNA, 19 bp, Homo sapiens
  siRNA target sequence for BTBD3 (NM_014962.2,491-509).
gttgccaccagtttgttat

SEQ ID NO: 129368 - DNA, 19 bp, Homo sapiens
  siRNA target sequence for BTBD3 (NM_014962.2,552-570).
gatatattcccccgtaaaa

SEQ ID NO: 129369 - DNA, 19 bp, Homo sapiens
  siRNA target sequence for BTBD3 (NM_014962.2,649-667).
caaactggcagggtcttta

SEQ ID NO: 129370 - DNA, 19 bp, Homo sapiens
  siRNA target sequence for BTBD3 (NM_014962.2,660-678).
ggtctttatcccaccatta

SEQ ID NO: 129371 - DNA, 19 bp, Homo sapiens
  siRNA target sequence for BTBD3 (NM_014962.2,681-699).
gagagaaatgcgatgatgt

SEQ ID NO: 129372 - DNA, 19 bp, Homo sapiens
  siRNA target sequence for BTBD3 (NM_014962.2,685-703).
gaaatgcgatgatgttcaa

SEQ ID NO: 129373 - DNA, 19 bp, Homo sapiens
  siRNA target sequence for BTBD3 (NM_014962.2,692-710).
gatgatgttcaataatgat

SEQ ID NO: 129374 - DNA, 19 bp, Homo sapiens
  siRNA target sequence for BTBD3 (NM_014962.2,890-908).
gctgaaatatatctattgt

SEQ ID NO: 129375 - DNA, 19 bp, Homo sapiens
  siRNA target sequence for BTBD3 (NM_014962.2,938-956).
gctggccacactttatgct

SEQ ID NO: 129376 - DNA, 19 bp, Homo sapiens
  siRNA target sequence for BTBD3 (NM_014962.2,981-999).
cttgccagagcctgtgtta

SEQ ID NO: 129377 - DNA, 19 bp, Homo sapiens
  siRNA target sequence for BTBD3 (NM_014962.2,984-1002).
gccagagcctgtgttaatt

SEQ ID NO: 129378 - DNA, 19 bp, Homo sapiens
  siRNA target sequence for BTBD3 (NM_014962.2,1138-1156).
gattctgcgatattgactt

SEQ ID NO: 129379 - DNA, 19 bp, Homo sapiens
  siRNA target sequence for BTBD3 (NM_014962.2,1229-1247).
caactgggctgaagtagaa

SEQ ID NO: 129380 - DNA, 19 bp, Homo sapiens
  siRNA target sequence for BTBD3 (NM_014962.2,1263-1281).
ctggcgttgagcattgaaa

SEQ ID NO: 129381 - DNA, 19 bp, Homo sapiens
  siRNA target sequence for BTBD3 (NM_014962.2,1266-1284).
gcgttgagcattgaaaata

SEQ ID NO: 129382 - DNA, 19 bp, Homo sapiens
  siRNA target sequence for BTBD3 (NM_014962.2,1267-1285).
cgttgagcattgaaaataa

SEQ ID NO: 129383 - DNA, 19 bp, Homo sapiens
  siRNA target sequence for BTBD3 (NM_014962.2,1299-1317).
ggaaaggcactttacttga

SEQ ID NO: 129384 - DNA, 19 bp, Homo sapiens
  siRNA target sequence for BTBD3 (NM_014962.2,1300-1318).
gaaaggcactttacttgat

SEQ ID NO: 129385 - DNA, 19 bp, Homo sapiens
  siRNA target sequence for BTBD3 (NM_014962.2,1330-1348).
caatggccctcgatgattt

SEQ ID NO: 129386 - DNA, 19 bp, Homo sapiens
  siRNA target sequence for BTBD3 (NM_014962.2,1334-1352).
ggccctcgatgattttgca

SEQ ID NO: 129387 - DNA, 19 bp, Homo sapiens
  siRNA target sequence for BTBD3 (NM_014962.2,1335-1353).
gccctcgatgattttgcaa

SEQ ID NO: 129388 - DNA, 19 bp, Homo sapiens
  siRNA target sequence for BTBD3 (NM_014962.2,1336-1354).
ccctcgatgattttgcaaa

SEQ ID NO: 129389 - DNA, 19 bp, Homo sapiens
  siRNA target sequence for BTBD3 (NM_014962.2,1362-1380).
gcacagtccggggtattaa

SEQ ID NO: 129390 - DNA, 19 bp, Homo sapiens
  siRNA target sequence for BTBD3 (NM_014962.2,1370-1388).
cggggtattaactctcaat

SEQ ID NO: 129391 - DNA, 19 bp, Homo sapiens
  siRNA target sequence for BTBD3 (NM_014962.2,1372-1390).
gggtattaactctcaatga

SEQ ID NO: 129392 - DNA, 19 bp, Homo sapiens
  siRNA target sequence for BTBD3 (NM_014962.2,1398-1416).
gacatcttcctctggtata

SEQ ID NO: 129393 - DNA, 19 bp, Homo sapiens
  siRNA target sequence for BTBD3 (NM_014962.2,1400-1418).
catcttcctctggtatact

SEQ ID NO: 129394 - DNA, 19 bp, Homo sapiens
  siRNA target sequence for BTBD3 (NM_014962.2,1494-1512).
cagtcgtgtgcctatcgaa

SEQ ID NO: 129395 - DNA, 19 bp, Homo sapiens
  siRNA target sequence for BTBD3 (NM_014962.2,1606-1624).
gctgtggttctgcagaata

SEQ ID NO: 129396 - DNA, 19 bp, Homo sapiens
  siRNA target sequence for BTBD3 (NM_014962.2,1627-1645).
gtgccaagattgaacttaa

SEQ ID NO: 129397 - DNA, 19 bp, Homo sapiens
  siRNA target sequence for BTBD3 (NM_014962.2,1757-1775).
ctacacagccagtgtgata

SEQ ID NO: 129398 - DNA, 19 bp, Homo sapiens
  siRNA target sequence for BTBD3 (NM_014962.2,1824-1842).
gttcagtgtggcaaagtga

SEQ ID NO: 129399 - DNA, 19 bp, Homo sapiens
  siRNA target sequence for BTBD3 (NM_014962.2,1839-1857).
gtgactgtccagtttcagt

SEQ ID NO: 129400 - DNA, 19 bp, Homo sapiens
  siRNA target sequence for BTBD3 (NM_014962.2,1899-1917).
cagatccctgaacttatat

SEQ ID NO: 129401 - DNA, 19 bp, Homo sapiens
  siRNA target sequence for BTBD3 (NM_014962.2,1904-1922).
ccctgaacttatattctat

SEQ ID NO: 129402 - DNA, 19 bp, Homo sapiens
  siRNA target sequence for BTBD5 (NM_017658.1,52-70).
cttgcattctgaacaactt

SEQ ID NO: 129403 - DNA, 19 bp, Homo sapiens
  siRNA target sequence for BTBD5 (NM_017658.1,103-121).
cgaactctgtgacatcatt

SEQ ID NO: 129404 - DNA, 19 bp, Homo sapiens
  siRNA target sequence for BTBD5 (NM_017658.1,125-143).
cgagtaggtgatgttaaaa

SEQ ID NO: 129405 - DNA, 19 bp, Homo sapiens
  siRNA target sequence for BTBD5 (NM_017658.1,168-186).
ccagcgtcagcccgtattt

SEQ ID NO: 129406 - DNA, 19 bp, Homo sapiens
  siRNA target sequence for BTBD5 (NM_017658.1,171-189).
gcgtcagcccgtatttcaa

SEQ ID NO: 129407 - DNA, 19 bp, Homo sapiens
  siRNA target sequence for BTBD5 (NM_017658.1,172-190).
cgtcagcccgtatttcaaa

SEQ ID NO: 129408 - DNA, 19 bp, Homo sapiens
  siRNA target sequence for BTBD5 (NM_017658.1,177-195).
gcccgtatttcaaagctat

SEQ ID NO: 129409 - DNA, 19 bp, Homo sapiens
  siRNA target sequence for BTBD5 (NM_017658.1,232-250).
ggttgagtttcaatgcatt

SEQ ID NO: 129410 - DNA, 19 bp, Homo sapiens
  siRNA target sequence for BTBD5 (NM_017658.1,284-302).
gcctatacagggactgttt

SEQ ID NO: 129411 - DNA, 19 bp, Homo sapiens
  siRNA target sequence for BTBD5 (NM_017658.1,285-303).
cctatacagggactgtttt

SEQ ID NO: 129412 - DNA, 19 bp, Homo sapiens
  siRNA target sequence for BTBD5 (NM_017658.1,286-304).
ctatacagggactgttttt

SEQ ID NO: 129413 - DNA, 19 bp, Homo sapiens
  siRNA target sequence for BTBD5 (NM_017658.1,341-359).
gcaaacctactccagataa

SEQ ID NO: 129414 - DNA, 19 bp, Homo sapiens
  siRNA target sequence for BTBD5 (NM_017658.1,342-360).
caaacctactccagataaa

SEQ ID NO: 129415 - DNA, 19 bp, Homo sapiens
  siRNA target sequence for BTBD5 (NM_017658.1,362-380).
cttgtcctgaaagaatgtt

SEQ ID NO: 129416 - DNA, 19 bp, Homo sapiens
  siRNA target sequence for BTBD5 (NM_017658.1,407-425).
cctggtaattgtattggaa

SEQ ID NO: 129417 - DNA, 19 bp, Homo sapiens
  siRNA target sequence for BTBD5 (NM_017658.1,410-428).
ggtaattgtattggaattt

SEQ ID NO: 129418 - DNA, 19 bp, Homo sapiens
  siRNA target sequence for BTBD5 (NM_017658.1,429-447).
ctcgttttgcagaaacata

SEQ ID NO: 129419 - DNA, 19 bp, Homo sapiens
  siRNA target sequence for BTBD5 (NM_017658.1,449-467).
ggttgccgtgacctttatt

SEQ ID NO: 129420 - DNA, 19 bp, Homo sapiens
  siRNA target sequence for BTBD5 (NM_017658.1,554-572).
gaaattgtttccaatgact

SEQ ID NO: 129421 - DNA, 19 bp, Homo sapiens
  siRNA target sequence for BTBD5 (NM_017658.1,585-603).
ctaccgaagagactgtttt

SEQ ID NO: 129422 - DNA, 19 bp, Homo sapiens
  siRNA target sequence for BTBD5 (NM_017658.1,616-634).
gtcttggatcaagtatgat

SEQ ID NO: 129423 - DNA, 19 bp, Homo sapiens
  siRNA target sequence for BTBD5 (NM_017658.1,622-640).
gatcaagtatgatgtacaa

SEQ ID NO: 129424 - DNA, 19 bp, Homo sapiens
  siRNA target sequence for BTBD5 (NM_017658.1,625-643).
caagtatgatgtacaagaa

SEQ ID NO: 129425 - DNA, 19 bp, Homo sapiens
  siRNA target sequence for BTBD5 (NM_017658.1,638-656).
caagaacgccagaaatact

SEQ ID NO: 129426 - DNA, 19 bp, Homo sapiens
  siRNA target sequence for BTBD5 (NM_017658.1,675-693).
gtgtacgattaccattgtt

SEQ ID NO: 129427 - DNA, 19 bp, Homo sapiens
  siRNA target sequence for BTBD5 (NM_017658.1,677-695).
gtacgattaccattgttga

SEQ ID NO: 129428 - DNA, 19 bp, Homo sapiens
  siRNA target sequence for BTBD5 (NM_017658.1,740-758).
cgtgatgatcgcacttgta

SEQ ID NO: 129429 - DNA, 19 bp, Homo sapiens
  siRNA target sequence for BTBD5 (NM_017658.1,741-759).
gtgatgatcgcacttgtaa

SEQ ID NO: 129430 - DNA, 19 bp, Homo sapiens
  siRNA target sequence for BTBD5 (NM_017658.1,776-794).
gccctaaagtaccacttta

SEQ ID NO: 129431 - DNA, 19 bp, Homo sapiens
  siRNA target sequence for BTBD5 (NM_017658.1,777-795).
ccctaaagtaccactttat

SEQ ID NO: 129432 - DNA, 19 bp, Homo sapiens
  siRNA target sequence for BTBD5 (NM_017658.1,787-805).
ccactttatgcctgaacat

SEQ ID NO: 129433 - DNA, 19 bp, Homo sapiens
  siRNA target sequence for BTBD5 (NM_017658.1,887-905).
ctctttgcctgtttggata

SEQ ID NO: 129434 - DNA, 19 bp, Homo sapiens
  siRNA target sequence for BTBD6 (NM_033271.1,399-417).
cggcagctccgtcttctat

SEQ ID NO: 129435 - DNA, 19 bp, Homo sapiens
  siRNA target sequence for BTBD6 (NM_033271.1,435-453).
cctggcggaagtcaaatct

SEQ ID NO: 129436 - DNA, 19 bp, Homo sapiens
  siRNA target sequence for BTBD6 (NM_033271.1,1170-1188).
ggacagaagggtatttatt

SEQ ID NO: 129437 - DNA, 19 bp, Homo sapiens
  siRNA target sequence for BTBD6 (NM_033271.1,1267-1285).
gttctggctcagaacttga

SEQ ID NO: 129438 - DNA, 19 bp, Homo sapiens
  siRNA target sequence for BTBD6 (NM_033271.1,1338-1356).
cccggtccaggttgaacaa

SEQ ID NO: 129439 - DNA, 19 bp, Homo sapiens
  siRNA target sequence for BTBD6 (NM_033271.1,1507-1525).
cagatccctgagctcattt

SEQ ID NO: 129440 - DNA, 19 bp, Homo sapiens
  siRNA target sequence for BTBD9 (NM_152733.1,373-391).
cattcacaatgctactcaa

SEQ ID NO: 129441 - DNA, 19 bp, Homo sapiens
  siRNA target sequence for BTBD9 (NM_152733.1,384-402).
ctactcaaatatatctaca

SEQ ID NO: 129442 - DNA, 19 bp, Homo sapiens
  siRNA target sequence for BTBD9 (NM_152733.1,412-430).
caacgctgacagatgagaa

SEQ ID NO: 129443 - DNA, 19 bp, Homo sapiens
  siRNA target sequence for BTBD9 (NM_152733.1,455-473).
gagcctggctcataaatat

SEQ ID NO: 129444 - DNA, 19 bp, Homo sapiens
  siRNA target sequence for BTBD9 (NM_152733.1,459-477).
ctggctcataaatatggat

SEQ ID NO: 129445 - DNA, 19 bp, Homo sapiens
  siRNA target sequence for BTBD9 (NM_152733.1,506-524).
gtatctctgcaccatactt

SEQ ID NO: 129446 - DNA, 19 bp, Homo sapiens
  siRNA target sequence for BTBD9 (NM_152733.1,512-530).
ctgcaccatacttaacatt

SEQ ID NO: 129447 - DNA, 19 bp, Homo sapiens
  siRNA target sequence for BTBD9 (NM_152733.1,680-698).
cgtgttaagagactcattt

SEQ ID NO: 129448 - DNA, 19 bp, Homo sapiens
  siRNA target sequence for BTBD9 (NM_152733.1,683-701).
gttaagagactcatttgca

SEQ ID NO: 129449 - DNA, 19 bp, Homo sapiens
  siRNA target sequence for BTBD9 (NM_152733.1,699-717).
gcagctcccgaaaaagata

SEQ ID NO: 129450 - DNA, 19 bp, Homo sapiens
  siRNA target sequence for BTBD9 (NM_152733.1,700-718).
cagctcccgaaaaagatat

SEQ ID NO: 129451 - DNA, 19 bp, Homo sapiens
  siRNA target sequence for BTBD9 (NM_152733.1,702-720).
gctcccgaaaaagatattt

SEQ ID NO: 129452 - DNA, 19 bp, Homo sapiens
  siRNA target sequence for BTBD9 (NM_152733.1,737-755).
ctggtgtaagcacaattca

SEQ ID NO: 129453 - DNA, 19 bp, Homo sapiens
  siRNA target sequence for BTBD9 (NM_152733.1,739-757).
ggtgtaagcacaattcaaa

SEQ ID NO: 129454 - DNA, 19 bp, Homo sapiens
  siRNA target sequence for BTBD9 (NM_152733.1,749-767).
caattcaaaggagaatcat

SEQ ID NO: 129455 - DNA, 19 bp, Homo sapiens
  siRNA target sequence for BTBD9 (NM_152733.1,894-912).
cgggatatggacctcaatt

SEQ ID NO: 129456 - DNA, 19 bp, Homo sapiens
  siRNA target sequence for BTBD9 (NM_152733.1,895-913).
gggatatggacctcaatta

SEQ ID NO: 129457 - DNA, 19 bp, Homo sapiens
  siRNA target sequence for BTBD9 (NM_152733.1,896-914).
ggatatggacctcaattat

SEQ ID NO: 129458 - DNA, 19 bp, Homo sapiens
  siRNA target sequence for BTBD9 (NM_152733.1,897-915).
gatatggacctcaattata

SEQ ID NO: 129459 - DNA, 19 bp, Homo sapiens
  siRNA target sequence for BTBD9 (NM_152733.1,941-959).
cattgcaactatgaagtat

SEQ ID NO: 129460 - DNA, 19 bp, Homo sapiens
  siRNA target sequence for BTBD9 (NM_152733.1,956-974).
gtatggagcccaagttgta

SEQ ID NO: 129461 - DNA, 19 bp, Homo sapiens
  siRNA target sequence for BTBD9 (NM_152733.1,972-990).
gtaaagggggagctgaaat

SEQ ID NO: 129462 - DNA, 19 bp, Homo sapiens
  siRNA target sequence for BTBD9 (NM_152733.1,983-1001).
gctgaaatcagccttatta

SEQ ID NO: 129463 - DNA, 19 bp, Homo sapiens
  siRNA target sequence for BTBD9 (NM_152733.1,1012-1030).
ctcaaaattatgatttgga

SEQ ID NO: 129464 - DNA, 19 bp, Homo sapiens
  siRNA target sequence for BTBD9 (NM_152733.1,1023-1041).
gatttggatcatggatttt

SEQ ID NO: 129465 - DNA, 19 bp, Homo sapiens
  siRNA target sequence for BTBD9 (NM_152733.1,1045-1063).
ggcacccaattgatgatga

SEQ ID NO: 129466 - DNA, 19 bp, Homo sapiens
  siRNA target sequence for BTBD9 (NM_152733.1,1068-1086).
cgttccggcatcgagatta

SEQ ID NO: 129467 - DNA, 19 bp, Homo sapiens
  siRNA target sequence for BTBD9 (NM_152733.1,1069-1087).
gttccggcatcgagattaa

SEQ ID NO: 129468 - DNA, 19 bp, Homo sapiens
  siRNA target sequence for BTBD9 (NM_152733.1,1072-1090).
ccggcatcgagattaagct

SEQ ID NO: 129469 - DNA, 19 bp, Homo sapiens
  siRNA target sequence for BTBD9 (NM_152733.1,1073-1091).
cggcatcgagattaagcta

SEQ ID NO: 129470 - DNA, 19 bp, Homo sapiens
  siRNA target sequence for BTBD9 (NM_152733.1,1137-1155).
cgagatagccggtcttact

SEQ ID NO: 129471 - DNA, 19 bp, Homo sapiens
  siRNA target sequence for BTBD9 (NM_152733.1,1140-1158).
gatagccggtcttactcat

SEQ ID NO: 129472 - DNA, 19 bp, Homo sapiens
  siRNA target sequence for BTBD9 (NM_152733.1,1144-1162).
gccggtcttactcatactt

SEQ ID NO: 129473 - DNA, 19 bp, Homo sapiens
  siRNA target sequence for BTBD9 (NM_152733.1,1146-1164).
cggtcttactcatacttca

SEQ ID NO: 129474 - DNA, 19 bp, Homo sapiens
  siRNA target sequence for BTBD9 (NM_152733.1,1147-1165).
ggtcttactcatacttcat

SEQ ID NO: 129475 - DNA, 19 bp, Homo sapiens
  siRNA target sequence for BTBD9 (NM_152733.1,1148-1166).
gtcttactcatacttcatt

SEQ ID NO: 129476 - DNA, 19 bp, Homo sapiens
  siRNA target sequence for BTBD9 (NM_152733.1,1150-1168).
cttactcatacttcattga

SEQ ID NO: 129477 - DNA, 19 bp, Homo sapiens
  siRNA target sequence for BTBD9 (NM_152733.1,1192-1210).
gggtcagagtgatagatca

SEQ ID NO: 129478 - DNA, 19 bp, Homo sapiens
  siRNA target sequence for BTBD9 (NM_152733.1,1193-1211).
ggtcagagtgatagatcat

SEQ ID NO: 129479 - DNA, 19 bp, Homo sapiens
  siRNA target sequence for BTBD9 (NM_152733.1,1194-1212).
gtcagagtgatagatcatt

SEQ ID NO: 129480 - DNA, 19 bp, Homo sapiens
  siRNA target sequence for BTBD9 (NM_152733.1,1198-1216).
gagtgatagatcattcaca

SEQ ID NO: 129481 - DNA, 19 bp, Homo sapiens
  siRNA target sequence for BTBD9 (NM_152733.1,1202-1220).
gatagatcattcacaatat

SEQ ID NO: 129482 - DNA, 19 bp, Homo sapiens
  siRNA target sequence for BTBD9 (NM_152733.1,1227-1245).
cgttcttggcagaaattat

SEQ ID NO: 129483 - DNA, 19 bp, Homo sapiens
  siRNA target sequence for BTBD9 (NM_152733.1,1254-1272).
gcccgtgtctgcaggtata

SEQ ID NO: 129484 - DNA, 19 bp, Homo sapiens
  siRNA target sequence for BTBD9 (NM_152733.1,1255-1273).
cccgtgtctgcaggtatat

SEQ ID NO: 129485 - DNA, 19 bp, Homo sapiens
  siRNA target sequence for BTBD9 (NM_152733.1,1256-1274).
ccgtgtctgcaggtatatt

SEQ ID NO: 129486 - DNA, 19 bp, Homo sapiens
  siRNA target sequence for BTBD9 (NM_152733.1,1260-1278).
gtctgcaggtatattcgaa

SEQ ID NO: 129487 - DNA, 19 bp, Homo sapiens
  siRNA target sequence for BTBD9 (NM_152733.1,1264-1282).
gcaggtatattcgaattgt

SEQ ID NO: 129488 - DNA, 19 bp, Homo sapiens
  siRNA target sequence for BTBD9 (NM_152733.1,1265-1283).
caggtatattcgaattgtt

SEQ ID NO: 129489 - DNA, 19 bp, Homo sapiens
  siRNA target sequence for BTBD9 (NM_152733.1,1320-1338).
gtggcttttgaatgtatgt

SEQ ID NO: 129490 - DNA, 19 bp, Homo sapiens
  siRNA target sequence for BTBD9 (NM_152733.1,1388-1406).
gaatgttgcaacaattgct

SEQ ID NO: 129491 - DNA, 19 bp, Homo sapiens
  siRNA target sequence for BTBD9 (NM_152733.1,1455-1473).
ctgaatggggacactaaga

SEQ ID NO: 129492 - DNA, 19 bp, Homo sapiens
  siRNA target sequence for BTBD9 (NM_152733.1,1462-1480).
gggacactaagaattatga

SEQ ID NO: 129493 - DNA, 19 bp, Homo sapiens
  siRNA target sequence for BTBD9 (NM_152733.1,1464-1482).
gacactaagaattatgact

SEQ ID NO: 129494 - DNA, 19 bp, Homo sapiens
  siRNA target sequence for BTBD9 (NM_152733.1,1519-1537).
gtgcgattgtggttcagtt

SEQ ID NO: 129495 - DNA, 19 bp, Homo sapiens
  siRNA target sequence for BTBD9 (NM_152733.1,1538-1556).
ggcacaaccgtacatgatt

SEQ ID NO: 129496 - DNA, 19 bp, Homo sapiens
  siRNA target sequence for BTBD9 (NM_152733.1,1547-1565).
gtacatgattgggtcaata

SEQ ID NO: 129497 - DNA, 19 bp, Homo sapiens
  siRNA target sequence for BTBD9 (NM_152733.1,1558-1576).
ggtcaatacggttactact

SEQ ID NO: 129498 - DNA, 19 bp, Homo sapiens
  siRNA target sequence for BTBD9 (NM_152733.1,1587-1605).
gatgatcgaagctatagct

SEQ ID NO: 129499 - DNA, 19 bp, Homo sapiens
  siRNA target sequence for BTBD9 (NM_152733.1,1681-1699).
ggcagtcagtaacttttga

SEQ ID NO: 129500 - DNA, 19 bp, Homo sapiens
  siRNA target sequence for BTBD9 (NM_152733.1,1682-1700).
gcagtcagtaacttttgaa

SEQ ID NO: 129501 - DNA, 19 bp, Homo sapiens
  siRNA target sequence for BTBD9 (NM_152733.1,1683-1701).
cagtcagtaacttttgaaa

SEQ ID NO: 129502 - DNA, 19 bp, Homo sapiens
  siRNA target sequence for BTBD9 (NM_152733.1,1712-1730).
ctccttcatccgtatcgtt

SEQ ID NO: 129503 - DNA, 19 bp, Homo sapiens
  siRNA target sequence for C16orf44 (NM_024731.2,167-185).
gagtgtctcggccatacaa

SEQ ID NO: 129504 - DNA, 19 bp, Homo sapiens
  siRNA target sequence for C16orf44 (NM_024731.2,169-187).
gtgtctcggccatacaaga

SEQ ID NO: 129505 - DNA, 19 bp, Homo sapiens
  siRNA target sequence for C16orf44 (NM_024731.2,183-201).
caagatcagcgaatcatca

SEQ ID NO: 129506 - DNA, 19 bp, Homo sapiens
  siRNA target sequence for C16orf44 (NM_024731.2,191-209).
gcgaatcatcaaaggtata

SEQ ID NO: 129507 - DNA, 19 bp, Homo sapiens
  siRNA target sequence for C16orf44 (NM_024731.2,475-493).
gatggcggcaacattgact

SEQ ID NO: 129508 - DNA, 19 bp, Homo sapiens
  siRNA target sequence for C16orf44 (NM_024731.2,1225-1243).
gcggcctccaatcttcttt

SEQ ID NO: 129509 - DNA, 19 bp, Homo sapiens
  siRNA target sequence for C16orf44 (NM_024731.2,1226-1244).
cggcctccaatcttcttta

SEQ ID NO: 129510 - DNA, 19 bp, Homo sapiens
  siRNA target sequence for C16orf44 (NM_024731.2,1227-1245).
ggcctccaatcttctttat

SEQ ID NO: 129511 - DNA, 19 bp, Homo sapiens
  siRNA target sequence for C16orf44 (NM_024731.2,1228-1246).
gcctccaatcttctttata

SEQ ID NO: 129512 - DNA, 19 bp, Homo sapiens
  siRNA target sequence for C16orf44 (NM_024731.2,1232-1250).
ccaatcttctttataggta

SEQ ID NO: 129513 - DNA, 19 bp, Homo sapiens
  siRNA target sequence for C16orf44 (NM_024731.2,1233-1251).
caatcttctttataggtat

SEQ ID NO: 129514 - DNA, 19 bp, Homo sapiens
  siRNA target sequence for C16orf44 (NM_024731.2,1294-1312).
cagcgccgtgtggatttct

SEQ ID NO: 129515 - DNA, 19 bp, Homo sapiens
  siRNA target sequence for C16orf44 (NM_024731.2,1456-1474).
ggcaccatctacaaagact

SEQ ID NO: 129516 - DNA, 19 bp, Homo sapiens
  siRNA target sequence for C3IP1 (NM_021633.2,233-251).
gacaaatactcatgctaaa

SEQ ID NO: 129517 - DNA, 19 bp, Homo sapiens
  siRNA target sequence for C3IP1 (NM_021633.2,246-264).
gctaaatccatcctcaatt

SEQ ID NO: 129518 - DNA, 19 bp, Homo sapiens
  siRNA target sequence for C3IP1 (NM_021633.2,292-310).
ccctctgtgatgtgacatt

SEQ ID NO: 129519 - DNA, 19 bp, Homo sapiens
  siRNA target sequence for C3IP1 (NM_021633.2,350-368).
gctggctgcctgtagtgat

SEQ ID NO: 129520 - DNA, 19 bp, Homo sapiens
  siRNA target sequence for C3IP1 (NM_021633.2,441-459).
gcctctaccatggaaattt

SEQ ID NO: 129521 - DNA, 19 bp, Homo sapiens
  siRNA target sequence for C3IP1 (NM_021633.2,542-560).
gttgaaaggtgtgaaacaa

SEQ ID NO: 129522 - DNA, 19 bp, Homo sapiens
  siRNA target sequence for C3IP1 (NM_021633.2,568-586).
gtgagttcttagaaagtca

SEQ ID NO: 129523 - DNA, 19 bp, Homo sapiens
  siRNA target sequence for C3IP1 (NM_021633.2,583-601).
gtcagttggacccttctaa

SEQ ID NO: 129524 - DNA, 19 bp, Homo sapiens
  siRNA target sequence for C3IP1 (NM_021633.2,585-603).
cagttggacccttctaatt

SEQ ID NO: 129525 - DNA, 19 bp, Homo sapiens
  siRNA target sequence for C3IP1 (NM_021633.2,605-623).
cctgggtattagggatttt

SEQ ID NO: 129526 - DNA, 19 bp, Homo sapiens
  siRNA target sequence for C3IP1 (NM_021633.2,666-684).
gtttttagccagaagcatt

SEQ ID NO: 129527 - DNA, 19 bp, Homo sapiens
  siRNA target sequence for C3IP1 (NM_021633.2,845-863).
gcctaacctgctacagtat

SEQ ID NO: 129528 - DNA, 19 bp, Homo sapiens
  siRNA target sequence for C3IP1 (NM_021633.2,847-865).
ctaacctgctacagtatgt

SEQ ID NO: 129529 - DNA, 19 bp, Homo sapiens
  siRNA target sequence for C3IP1 (NM_021633.2,864-882).
gtgcggatgcccctactaa

SEQ ID NO: 129530 - DNA, 19 bp, Homo sapiens
  siRNA target sequence for C3IP1 (NM_021633.2,887-905).
caggtatatcacagatgta

SEQ ID NO: 129531 - DNA, 19 bp, Homo sapiens
  siRNA target sequence for C3IP1 (NM_021633.2,889-907).
ggtatatcacagatgtaat

SEQ ID NO: 129532 - DNA, 19 bp, Homo sapiens
  siRNA target sequence for C3IP1 (NM_021633.2,918-936).
cctttcatccgctgtagtt

SEQ ID NO: 129533 - DNA, 19 bp, Homo sapiens
  siRNA target sequence for C3IP1 (NM_021633.2,919-937).
ctttcatccgctgtagttt

SEQ ID NO: 129534 - DNA, 19 bp, Homo sapiens
  siRNA target sequence for C3IP1 (NM_021633.2,923-941).
catccgctgtagtttacaa

SEQ ID NO: 129535 - DNA, 19 bp, Homo sapiens
  siRNA target sequence for C3IP1 (NM_021633.2,1036-1054).
ccaatgaagtgcttttggt

SEQ ID NO: 129536 - DNA, 19 bp, Homo sapiens
  siRNA target sequence for C3IP1 (NM_021633.2,1073-1091).
ccagcagtctcccattgat

SEQ ID NO: 129537 - DNA, 19 bp, Homo sapiens
  siRNA target sequence for C3IP1 (NM_021633.2,1145-1163).
cactcgtaagagacgttat

SEQ ID NO: 129538 - DNA, 19 bp, Homo sapiens
  siRNA target sequence for C3IP1 (NM_021633.2,1215-1233).
ggccgttcccgccttagtt

SEQ ID NO: 129539 - DNA, 19 bp, Homo sapiens
  siRNA target sequence for C3IP1 (NM_021633.2,1217-1235).
ccgttcccgccttagttca

SEQ ID NO: 129540 - DNA, 19 bp, Homo sapiens
  siRNA target sequence for C3IP1 (NM_021633.2,1234-1252).
cagtggaatgtctagacta

SEQ ID NO: 129541 - DNA, 19 bp, Homo sapiens
  siRNA target sequence for C3IP1 (NM_021633.2,1282-1300).
ctgtggcccctatgaatgt

SEQ ID NO: 129542 - DNA, 19 bp, Homo sapiens
  siRNA target sequence for C3IP1 (NM_021633.2,1327-1345).
ccctgggagatatgatcta

SEQ ID NO: 129543 - DNA, 19 bp, Homo sapiens
  siRNA target sequence for C3IP1 (NM_021633.2,1328-1346).
cctgggagatatgatctat

SEQ ID NO: 129544 - DNA, 19 bp, Homo sapiens
  siRNA target sequence for C3IP1 (NM_021633.2,1332-1350).
ggagatatgatctatgtct

SEQ ID NO: 129545 - DNA, 19 bp, Homo sapiens
  siRNA target sequence for C3IP1 (NM_021633.2,1391-1409).
gcgctatgatccaaacatt

SEQ ID NO: 129546 - DNA, 19 bp, Homo sapiens
  siRNA target sequence for C6orf46 (NM_181842.1,228-246).
gcaacgctacggaacatga

SEQ ID NO: 129547 - DNA, 19 bp, Homo sapiens
  siRNA target sequence for C6orf46 (NM_181842.1,229-247).
caacgctacggaacatgaa

SEQ ID NO: 129548 - DNA, 19 bp, Homo sapiens
  siRNA target sequence for C6orf46 (NM_181842.1,562-580).
ccaaaataggcctcaaaga

SEQ ID NO: 129549 - DNA, 19 bp, Homo sapiens
  siRNA target sequence for C6orf46 (NM_181842.1,960-978).
gtggtgaaggcctgctata

SEQ ID NO: 129550 - DNA, 19 bp, Homo sapiens
  siRNA target sequence for C6orf46 (NM_181842.1,1152-1170).
ggtggaaaccccttaaaga

SEQ ID NO: 129551 - DNA, 19 bp, Homo sapiens
  siRNA target sequence for C6orf46 (NM_181842.1,1153-1171).
gtggaaaccccttaaagaa

SEQ ID NO: 129552 - DNA, 19 bp, Homo sapiens
  siRNA target sequence for C6orf46 (NM_181842.1,1236-1254).
gcgcagcacttcatcttca

SEQ ID NO: 129553 - DNA, 19 bp, Homo sapiens
  siRNA target sequence for C6orf46 (NM_181842.1,1237-1255).
cgcagcacttcatcttcat

SEQ ID NO: 129554 - DNA, 19 bp, Homo sapiens
  siRNA target sequence for C6orf46 (NM_181842.1,1521-1539).
gccagtgtggccgagatta

SEQ ID NO: 129555 - DNA, 19 bp, Homo sapiens
  siRNA target sequence for C6orf46 (NM_181842.1,1522-1540).
ccagtgtggccgagattaa

SEQ ID NO: 129556 - DNA, 19 bp, Homo sapiens
  siRNA target sequence for C6orf46 (NM_181842.1,1525-1543).
gtgtggccgagattaacgt

SEQ ID NO: 129557 - DNA, 19 bp, Homo sapiens
  siRNA target sequence for CALB1 (NM_004929.2,217-235).
cagcctcacagtttttcga

SEQ ID NO: 129558 - DNA, 19 bp, Homo sapiens
  siRNA target sequence for CALB1 (NM_004929.2,265-283).
gtggttacctggaaggaaa

SEQ ID NO: 129559 - DNA, 19 bp, Homo sapiens
  siRNA target sequence for CALB1 (NM_004929.2,329-347).
ggctggattggagttatca

SEQ ID NO: 129560 - DNA, 19 bp, Homo sapiens
  siRNA target sequence for CALB1 (NM_004929.2,374-392).
gtatgggcaaagagatgat

SEQ ID NO: 129561 - DNA, 19 bp, Homo sapiens
  siRNA target sequence for CALB1 (NM_004929.2,545-563).
ggagcttaagaactttcta

SEQ ID NO: 129562 - DNA, 19 bp, Homo sapiens
  siRNA target sequence for CALB1 (NM_004929.2,561-579).
ctaaaggacctgctagaaa

SEQ ID NO: 129563 - DNA, 19 bp, Homo sapiens
  siRNA target sequence for CALB1 (NM_004929.2,590-608).
gactgttgatgacacaaaa

SEQ ID NO: 129564 - DNA, 19 bp, Homo sapiens
  siRNA target sequence for CALB1 (NM_004929.2,613-631).
ccgagtatacagacctaat

SEQ ID NO: 129565 - DNA, 19 bp, Homo sapiens
  siRNA target sequence for CALB1 (NM_004929.2,624-642).
gacctaatgctgaaactat

SEQ ID NO: 129566 - DNA, 19 bp, Homo sapiens
  siRNA target sequence for CALB1 (NM_004929.2,693-711).
ctaccagtgcaggagaatt

SEQ ID NO: 129567 - DNA, 19 bp, Homo sapiens
  siRNA target sequence for CALB1 (NM_004929.2,761-779).
ggcttttgagctgtatgat

SEQ ID NO: 129568 - DNA, 19 bp, Homo sapiens
  siRNA target sequence for CALB1 (NM_004929.2,763-781).
cttttgagctgtatgatca

SEQ ID NO: 129569 - DNA, 19 bp, Homo sapiens
  siRNA target sequence for CALB1 (NM_004929.2,785-803).
cggcaatggatacatagat

SEQ ID NO: 129570 - DNA, 19 bp, Homo sapiens
  siRNA target sequence for CALB1 (NM_004929.2,787-805).
gcaatggatacatagatga

SEQ ID NO: 129571 - DNA, 19 bp, Homo sapiens
  siRNA target sequence for CALB1 (NM_004929.2,831-849).
gatctgtgcgagaagaata

SEQ ID NO: 129572 - DNA, 19 bp, Homo sapiens
  siRNA target sequence for CALB1 (NM_004929.2,852-870).
caggatctggatattaata

SEQ ID NO: 129573 - DNA, 19 bp, Homo sapiens
  siRNA target sequence for CALB1 (NM_004929.2,928-946).
gaacggatcttgctcttat

SEQ ID NO: 129574 - DNA, 19 bp, Homo sapiens
  siRNA target sequence for CALB1 (NM_004929.2,931-949).
cggatcttgctcttattct

SEQ ID NO: 129575 - DNA, 19 bp, Homo sapiens
  siRNA target sequence for CALM1 (NM_006888.2,272-290).
ggcgatggcaccatcacaa

SEQ ID NO: 129576 - DNA, 19 bp, Homo sapiens
  siRNA target sequence for CALM1 (NM_006888.2,275-293).
gatggcaccatcacaacaa

SEQ ID NO: 129577 - DNA, 19 bp, Homo sapiens
  siRNA target sequence for CALM1 (NM_006888.2,341-359).
gctgaattgcaggatatga

SEQ ID NO: 129578 - DNA, 19 bp, Homo sapiens
  siRNA target sequence for CALM1 (NM_006888.2,401-419).
cccgaatttttgactatga

SEQ ID NO: 129579 - DNA, 19 bp, Homo sapiens
  siRNA target sequence for CALM1 (NM_006888.2,402-420).
ccgaatttttgactatgat

SEQ ID NO: 129580 - DNA, 19 bp, Homo sapiens
  siRNA target sequence for CALM1 (NM_006888.2,518-536).
ctacgtcacgtcatgacaa

SEQ ID NO: 129581 - DNA, 19 bp, Homo sapiens
  siRNA target sequence for CALM1 (NM_006888.2,521-539).
cgtcacgtcatgacaaact

SEQ ID NO: 129582 - DNA, 19 bp, Homo sapiens
  siRNA target sequence for CALM1 (NM_006888.2,522-540).
gtcacgtcatgacaaactt

SEQ ID NO: 129583 - DNA, 19 bp, Homo sapiens
  siRNA target sequence for CALM1 (NM_006888.2,604-622).
cggacaagtcaactatgaa

SEQ ID NO: 129584 - DNA, 19 bp, Homo sapiens
  siRNA target sequence for CALM1 (NM_006888.2,632-650).
cagatgatgactgcaaaat

SEQ ID NO: 129585 - DNA, 19 bp, Homo sapiens
  siRNA target sequence for CALM3 (NM_005184.1,540-558).
ggtcaattatgaagagttt

SEQ ID NO: 129586 - DNA, 19 bp, Homo sapiens
  siRNA target sequence for CARD10 (NM_014550.2,395-413).
gcctgacccaattcttgat

SEQ ID NO: 129587 - DNA, 19 bp, Homo sapiens
  siRNA target sequence for CARD10 (NM_014550.2,397-415).
ctgacccaattcttgatga

SEQ ID NO: 129588 - DNA, 19 bp, Homo sapiens
  siRNA target sequence for CARD10 (NM_014550.2,605-623).
ggctcaaggatgagaacta

SEQ ID NO: 129589 - DNA, 19 bp, Homo sapiens
  siRNA target sequence for CARD10 (NM_014550.2,660-678).
gaagaactcggctgtactt

SEQ ID NO: 129590 - DNA, 19 bp, Homo sapiens
  siRNA target sequence for CARD10 (NM_014550.2,709-727).
cagctcaagctcaaagtga

SEQ ID NO: 129591 - DNA, 19 bp, Homo sapiens
  siRNA target sequence for CARD10 (NM_014550.2,1621-1639).
cccgcaccccctaagagat

SEQ ID NO: 129592 - DNA, 19 bp, Homo sapiens
  siRNA target sequence for CARD10 (NM_014550.2,1855-1873).
ccagatggactgtcgtttt

SEQ ID NO: 129593 - DNA, 19 bp, Homo sapiens
  siRNA target sequence for CARD10 (NM_014550.2,1856-1874).
cagatggactgtcgtttta

SEQ ID NO: 129594 - DNA, 19 bp, Homo sapiens
  siRNA target sequence for CARD10 (NM_014550.2,2111-2129).
gtgccgagcccttctacat

SEQ ID NO: 129595 - DNA, 19 bp, Homo sapiens
  siRNA target sequence for CARD10 (NM_014550.2,2283-2301).
gggcaccgtgcccaattat

SEQ ID NO: 129596 - DNA, 19 bp, Homo sapiens
  siRNA target sequence for CARD10 (NM_014550.2,2368-2386).
cgcagtaatctgaagaaga

SEQ ID NO: 129597 - DNA, 19 bp, Homo sapiens
  siRNA target sequence for CARD11 (NM_032415.2,531-549).
gctgttggacattctacat

SEQ ID NO: 129598 - DNA, 19 bp, Homo sapiens
  siRNA target sequence for CARD11 (NM_032415.2,532-550).
ctgttggacattctacata

SEQ ID NO: 129599 - DNA, 19 bp, Homo sapiens
  siRNA target sequence for CARD11 (NM_032415.2,900-918).
ggacgacaactacaactta

SEQ ID NO: 129600 - DNA, 19 bp, Homo sapiens
  siRNA target sequence for CARD11 (NM_032415.2,999-1017).
gctaaagcaccggttgaat

SEQ ID NO: 129601 - DNA, 19 bp, Homo sapiens
  siRNA target sequence for CARD11 (NM_032415.2,1000-1018).
ctaaagcaccggttgaata

SEQ ID NO: 129602 - DNA, 19 bp, Homo sapiens
  siRNA target sequence for CARD11 (NM_032415.2,1044-1062).
gagaaatcagtctctaaaa

SEQ ID NO: 129603 - DNA, 19 bp, Homo sapiens
  siRNA target sequence for CARD11 (NM_032415.2,1480-1498).
cagtactcgcagtgcttaa

SEQ ID NO: 129604 - DNA, 19 bp, Homo sapiens
  siRNA target sequence for CARD11 (NM_032415.2,1485-1503).
ctcgcagtgcttaatcgaa

SEQ ID NO: 129605 - DNA, 19 bp, Homo sapiens
  siRNA target sequence for CARD11 (NM_032415.2,1487-1505).
cgcagtgcttaatcgaaaa

SEQ ID NO: 129606 - DNA, 19 bp, Homo sapiens
  siRNA target sequence for CARD11 (NM_032415.2,1658-1676).
ggaacctgccagtaaccat

SEQ ID NO: 129607 - DNA, 19 bp, Homo sapiens
  siRNA target sequence for CARD11 (NM_032415.2,1707-1725).
caggaccaatggtcaagaa

SEQ ID NO: 129608 - DNA, 19 bp, Homo sapiens
  siRNA target sequence for CARD11 (NM_032415.2,1756-1774).
cctgaagacagcaagtact

SEQ ID NO: 129609 - DNA, 19 bp, Homo sapiens
  siRNA target sequence for CARD11 (NM_032415.2,1852-1870).
ctgaagcgaacatcagatt

SEQ ID NO: 129610 - DNA, 19 bp, Homo sapiens
  siRNA target sequence for CARD11 (NM_032415.2,1854-1872).
gaagcgaacatcagatttt

SEQ ID NO: 129611 - DNA, 19 bp, Homo sapiens
  siRNA target sequence for CARD11 (NM_032415.2,1857-1875).
gcgaacatcagattttcaa

SEQ ID NO: 129612 - DNA, 19 bp, Homo sapiens
  siRNA target sequence for CARD11 (NM_032415.2,1975-1993).
cgcagcagcatcatgtcaa

SEQ ID NO: 129613 - DNA, 19 bp, Homo sapiens
  siRNA target sequence for CARD11 (NM_032415.2,2057-2075).
gcagcacagtcgaagaaga

SEQ ID NO: 129614 - DNA, 19 bp, Homo sapiens
  siRNA target sequence for CARD11 (NM_032415.2,2060-2078).
gcacagtcgaagaagacaa

SEQ ID NO: 129615 - DNA, 19 bp, Homo sapiens
  siRNA target sequence for CARD11 (NM_032415.2,2063-2081).
cagtcgaagaagacaatga

SEQ ID NO: 129616 - DNA, 19 bp, Homo sapiens
  siRNA target sequence for CARD11 (NM_032415.2,2065-2083).
gtcgaagaagacaatgaca

SEQ ID NO: 129617 - DNA, 19 bp, Homo sapiens
  siRNA target sequence for CARD11 (NM_032415.2,2088-2106).
cgggtttgacgccttagat

SEQ ID NO: 129618 - DNA, 19 bp, Homo sapiens
  siRNA target sequence for CARD11 (NM_032415.2,2090-2108).
ggtttgacgccttagatct

SEQ ID NO: 129619 - DNA, 19 bp, Homo sapiens
  siRNA target sequence for CARD11 (NM_032415.2,2543-2561).
ccgtcacgctgcactacaa

SEQ ID NO: 129620 - DNA, 19 bp, Homo sapiens
  siRNA target sequence for CARD11 (NM_032415.2,2602-2620).
gaggacggcctgatcacat

SEQ ID NO: 129621 - DNA, 19 bp, Homo sapiens
  siRNA target sequence for CARD11 (NM_032415.2,2774-2792).
cagaccatgacctggatat

SEQ ID NO: 129622 - DNA, 19 bp, Homo sapiens
  siRNA target sequence for CARD11 (NM_032415.2,3017-3035).
gcaggtccgagaacaagta

SEQ ID NO: 129623 - DNA, 19 bp, Homo sapiens
  siRNA target sequence for CARD11 (NM_032415.2,3018-3036).
caggtccgagaacaagtat

SEQ ID NO: 129624 - DNA, 19 bp, Homo sapiens
  siRNA target sequence for CARD11 (NM_032415.2,3020-3038).
ggtccgagaacaagtataa

SEQ ID NO: 129625 - DNA, 19 bp, Homo sapiens
  siRNA target sequence for CARD11 (NM_032415.2,3199-3217).
ctggtacgcgccttctact

SEQ ID NO: 129626 - DNA, 19 bp, Homo sapiens
  siRNA target sequence for CARD11 (NM_032415.2,3311-3329).
ccatctgcaagtcagatat

SEQ ID NO: 129627 - DNA, 19 bp, Homo sapiens
  siRNA target sequence for CARD11 (NM_032415.2,3398-3416).
ccaacgcgttcgaatgcat

SEQ ID NO: 129628 - DNA, 19 bp, Homo sapiens
  siRNA target sequence for CARD11 (NM_032415.2,3417-3435).
cgcccctgccaacattgaa

SEQ ID NO: 129629 - DNA, 19 bp, Homo sapiens
  siRNA target sequence for CARD11 (NM_032415.2,3485-3503).
gcacaagagacttgatcaa

SEQ ID NO: 129630 - DNA, 19 bp, Homo sapiens
  siRNA target sequence for CARD14 (NM_024110.2,796-814).
ctctcgctgcactatagca

SEQ ID NO: 129631 - DNA, 19 bp, Homo sapiens
  siRNA target sequence for CARD14 (NM_024110.2,798-816).
ctcgctgcactatagcaat

SEQ ID NO: 129632 - DNA, 19 bp, Homo sapiens
  siRNA target sequence for CARD14 (NM_024110.2,895-913).
cagcgagccaacatggttt

SEQ ID NO: 129633 - DNA, 19 bp, Homo sapiens
  siRNA target sequence for CARD14 (NM_024110.2,918-936).
ctgtgagctggaattgcaa

SEQ ID NO: 129634 - DNA, 19 bp, Homo sapiens
  siRNA target sequence for CARD14 (NM_024110.2,1675-1693).
gaagaaccctggtctttca

SEQ ID NO: 129635 - DNA, 19 bp, Homo sapiens
  siRNA target sequence for CARD14 (NM_024110.2,1751-1769).
gcgacccacacctggatta

SEQ ID NO: 129636 - DNA, 19 bp, Homo sapiens
  siRNA target sequence for CARD14 (NM_024110.2,1752-1770).
cgacccacacctggattat

SEQ ID NO: 129637 - DNA, 19 bp, Homo sapiens
  siRNA target sequence for CARD14 (NM_024110.2,1913-1931).
cgttccagggggatgcatt

SEQ ID NO: 129638 - DNA, 19 bp, Homo sapiens
  siRNA target sequence for CARD14 (NM_024110.2,2161-2179).
gtcaacacggacggttata

SEQ ID NO: 129639 - DNA, 19 bp, Homo sapiens
  siRNA target sequence for CARD14 (NM_024110.2,2350-2368).
caccgcgtgaactcttaca

SEQ ID NO: 129640 - DNA, 19 bp, Homo sapiens
  siRNA target sequence for CARD14 (NM_024110.2,2469-2487).
gacccgcaagccatcttct

SEQ ID NO: 129641 - DNA, 19 bp, Homo sapiens
  siRNA target sequence for CARD14 (NM_024110.2,2734-2752).
ctcctccaagggtttaaga

SEQ ID NO: 129642 - DNA, 19 bp, Homo sapiens
  siRNA target sequence for CBLB (NM_170662.2,312-330).
ccccgaaaaggtcgaattt

SEQ ID NO: 129643 - DNA, 19 bp, Homo sapiens
  siRNA target sequence for CBLB (NM_170662.2,313-331).
cccgaaaaggtcgaatttt

SEQ ID NO: 129644 - DNA, 19 bp, Homo sapiens
  siRNA target sequence for CBLB (NM_170662.2,321-339).
ggtcgaattttgggtatta

SEQ ID NO: 129645 - DNA, 19 bp, Homo sapiens
  siRNA target sequence for CBLB (NM_170662.2,322-340).
gtcgaattttgggtattat

SEQ ID NO: 129646 - DNA, 19 bp, Homo sapiens
  siRNA target sequence for CBLB (NM_170662.2,431-449).
ggtaagactgtgccaaaat

SEQ ID NO: 129647 - DNA, 19 bp, Homo sapiens
  siRNA target sequence for CBLB (NM_170662.2,451-469).
ccaaacttcagttgaaaaa

SEQ ID NO: 129648 - DNA, 19 bp, Homo sapiens
  siRNA target sequence for CBLB (NM_170662.2,472-490).
gcccaccatatatacttga

SEQ ID NO: 129649 - DNA, 19 bp, Homo sapiens
  siRNA target sequence for CBLB (NM_170662.2,475-493).
caccatatatacttgatat

SEQ ID NO: 129650 - DNA, 19 bp, Homo sapiens
  siRNA target sequence for CBLB (NM_170662.2,510-528).
cagcatttacgacttatat

SEQ ID NO: 129651 - DNA, 19 bp, Homo sapiens
  siRNA target sequence for CBLB (NM_170662.2,513-531).
catttacgacttatattga

SEQ ID NO: 129652 - DNA, 19 bp, Homo sapiens
  siRNA target sequence for CBLB (NM_170662.2,601-619).
gccttatgaaaaagtcaaa

SEQ ID NO: 129653 - DNA, 19 bp, Homo sapiens
  siRNA target sequence for CBLB (NM_170662.2,614-632).
gtcaaaacgggcaataaga

SEQ ID NO: 129654 - DNA, 19 bp, Homo sapiens
  siRNA target sequence for CBLB (NM_170662.2,616-634).
caaaacgggcaataagact

SEQ ID NO: 129655 - DNA, 19 bp, Homo sapiens
  siRNA target sequence for CBLB (NM_170662.2,621-639).
cgggcaataagactcttta

SEQ ID NO: 129656 - DNA, 19 bp, Homo sapiens
  siRNA target sequence for CBLB (NM_170662.2,625-643).
caataagactctttaaaga

SEQ ID NO: 129657 - DNA, 19 bp, Homo sapiens
  siRNA target sequence for CBLB (NM_170662.2,671-689).
gtcacaggacagacgaaat

SEQ ID NO: 129658 - DNA, 19 bp, Homo sapiens
  siRNA target sequence for CBLB (NM_170662.2,673-691).
cacaggacagacgaaatct

SEQ ID NO: 129659 - DNA, 19 bp, Homo sapiens
  siRNA target sequence for CBLB (NM_170662.2,675-693).
caggacagacgaaatctca

SEQ ID NO: 129660 - DNA, 19 bp, Homo sapiens
  siRNA target sequence for CBLB (NM_170662.2,680-698).
cagacgaaatctcacaaaa

SEQ ID NO: 129661 - DNA, 19 bp, Homo sapiens
  siRNA target sequence for CBLB (NM_170662.2,682-700).
gacgaaatctcacaaaact

SEQ ID NO: 129662 - DNA, 19 bp, Homo sapiens
  siRNA target sequence for CBLB (NM_170662.2,684-702).
cgaaatctcacaaaactgt

SEQ ID NO: 129663 - DNA, 19 bp, Homo sapiens
  siRNA target sequence for CBLB (NM_170662.2,754-772).
gtcaattccagggagataa

SEQ ID NO: 129664 - DNA, 19 bp, Homo sapiens
  siRNA target sequence for CBLB (NM_170662.2,867-885).
catgaggtccaccagatta

SEQ ID NO: 129665 - DNA, 19 bp, Homo sapiens
  siRNA target sequence for CBLB (NM_170662.2,907-925).
ctctaaaatcaacaattga

SEQ ID NO: 129666 - DNA, 19 bp, Homo sapiens
  siRNA target sequence for CBLB (NM_170662.2,924-942).
gatttaacttgcaatgatt

SEQ ID NO: 129667 - DNA, 19 bp, Homo sapiens
  siRNA target sequence for CBLB (NM_170662.2,1004-1022).
gcggaattggaatttctta

SEQ ID NO: 129668 - DNA, 19 bp, Homo sapiens
  siRNA target sequence for CBLB (NM_170662.2,1077-1095).
cgactacagaaatatagca

SEQ ID NO: 129669 - DNA, 19 bp, Homo sapiens
  siRNA target sequence for CBLB (NM_170662.2,1257-1275).
cctgatgggaggagttata

SEQ ID NO: 129670 - DNA, 19 bp, Homo sapiens
  siRNA target sequence for CBLB (NM_170662.2,1267-1285).
ggagttataatcctgattt

SEQ ID NO: 129671 - DNA, 19 bp, Homo sapiens
  siRNA target sequence for CBLB (NM_170662.2,1268-1286).
gagttataatcctgattta

SEQ ID NO: 129672 - DNA, 19 bp, Homo sapiens
  siRNA target sequence for CBLB (NM_170662.2,1303-1321).
ctacacctcatgaccatat

SEQ ID NO: 129673 - DNA, 19 bp, Homo sapiens
  siRNA target sequence for CBLB (NM_170662.2,1306-1324).
cacctcatgaccatataaa

SEQ ID NO: 129674 - DNA, 19 bp, Homo sapiens
  siRNA target sequence for CBLB (NM_170662.2,1369-1387).
cttttcagctctgtaagat

SEQ ID NO: 129675 - DNA, 19 bp, Homo sapiens
  siRNA target sequence for CBLB (NM_170662.2,1422-1440).
ccttgtgggcatttgatgt

SEQ ID NO: 129676 - DNA, 19 bp, Homo sapiens
  siRNA target sequence for CBLB (NM_170662.2,1513-1531).
gaactgagcccataatcgt

SEQ ID NO: 129677 - DNA, 19 bp, Homo sapiens
  siRNA target sequence for CBLB (NM_170662.2,1562-1580).
caggtgttgcagcatcatt

SEQ ID NO: 129678 - DNA, 19 bp, Homo sapiens
  siRNA target sequence for CBLB (NM_170662.2,1564-1582).
ggtgttgcagcatcattga

SEQ ID NO: 129679 - DNA, 19 bp, Homo sapiens
  siRNA target sequence for CBLB (NM_170662.2,1626-1644).
cgtgaggagtccttgatga

SEQ ID NO: 129680 - DNA, 19 bp, Homo sapiens
  siRNA target sequence for CBLB (NM_170662.2,1627-1645).
gtgaggagtccttgatgat

SEQ ID NO: 129681 - DNA, 19 bp, Homo sapiens
  siRNA target sequence for CBLB (NM_170662.2,1631-1649).
ggagtccttgatgatgaat

SEQ ID NO: 129682 - DNA, 19 bp, Homo sapiens
  siRNA target sequence for CBLB (NM_170662.2,1789-1807).
ctcgcctggatctaattca

SEQ ID NO: 129683 - DNA, 19 bp, Homo sapiens
  siRNA target sequence for CBLB (NM_170662.2,1791-1809).
cgcctggatctaattcaga

SEQ ID NO: 129684 - DNA, 19 bp, Homo sapiens
  siRNA target sequence for CBLB (NM_170662.2,1792-1810).
gcctggatctaattcagaa

SEQ ID NO: 129685 - DNA, 19 bp, Homo sapiens
  siRNA target sequence for CBLB (NM_170662.2,2018-2036).
cccgccaatgcctcttgaa

SEQ ID NO: 129686 - DNA, 19 bp, Homo sapiens
  siRNA target sequence for CBLB (NM_170662.2,2041-2059).
ggtgccctcgggatgtgtt

SEQ ID NO: 129687 - DNA, 19 bp, Homo sapiens
  siRNA target sequence for CBLB (NM_170662.2,2115-2133).
ggaatcacagcgagttcaa

SEQ ID NO: 129688 - DNA, 19 bp, Homo sapiens
  siRNA target sequence for CBLB (NM_170662.2,2122-2140).
cagcgagttcaaatgtcaa

SEQ ID NO: 129689 - DNA, 19 bp, Homo sapiens
  siRNA target sequence for CBLB (NM_170662.2,2211-2229).
gaaggagctaaggtctttt

SEQ ID NO: 129690 - DNA, 19 bp, Homo sapiens
  siRNA target sequence for CBLB (NM_170662.2,2214-2232).
ggagctaaggtcttttcca

SEQ ID NO: 129691 - DNA, 19 bp, Homo sapiens
  siRNA target sequence for CBLB (NM_170662.2,2215-2233).
gagctaaggtcttttccaa

SEQ ID NO: 129692 - DNA, 19 bp, Homo sapiens
  siRNA target sequence for CBLB (NM_170662.2,2304-2322).
ctccctagcataaagtgta

SEQ ID NO: 129693 - DNA, 19 bp, Homo sapiens
  siRNA target sequence for CBLB (NM_170662.2,2320-2338).
gtactggtccgttagcaaa

SEQ ID NO: 129694 - DNA, 19 bp, Homo sapiens
  siRNA target sequence for CBLB (NM_170662.2,2326-2344).
gtccgttagcaaattctct

SEQ ID NO: 129695 - DNA, 19 bp, Homo sapiens
  siRNA target sequence for CBLB (NM_170662.2,2328-2346).
ccgttagcaaattctcttt

SEQ ID NO: 129696 - DNA, 19 bp, Homo sapiens
  siRNA target sequence for CBLB (NM_170662.2,2330-2348).
gttagcaaattctctttca

SEQ ID NO: 129697 - DNA, 19 bp, Homo sapiens
  siRNA target sequence for CBLB (NM_170662.2,2420-2438).
gaattcacaaccatctcat

SEQ ID NO: 129698 - DNA, 19 bp, Homo sapiens
  siRNA target sequence for CBLB (NM_170662.2,2457-2475).
cctgttcggtcttgtgata

SEQ ID NO: 129699 - DNA, 19 bp, Homo sapiens
  siRNA target sequence for CBLB (NM_170662.2,2458-2476).
ctgttcggtcttgtgataa

SEQ ID NO: 129700 - DNA, 19 bp, Homo sapiens
  siRNA target sequence for CBLB (NM_170662.2,2481-2499).
cactgtatgctgaatggaa

SEQ ID NO: 129701 - DNA, 19 bp, Homo sapiens
  siRNA target sequence for CBLB (NM_170662.2,2506-2524).
gtccatcttcagagaagaa

SEQ ID NO: 129702 - DNA, 19 bp, Homo sapiens
  siRNA target sequence for CBLB (NM_170662.2,2534-2552).
ccctgacttaagcatatat

SEQ ID NO: 129703 - DNA, 19 bp, Homo sapiens
  siRNA target sequence for CBLB (NM_170662.2,2535-2553).
cctgacttaagcatatatt

SEQ ID NO: 129704 - DNA, 19 bp, Homo sapiens
  siRNA target sequence for CBLB (NM_170662.2,2613-2631).
ccaactcgggacaatccaa

SEQ ID NO: 129705 - DNA, 19 bp, Homo sapiens
  siRNA target sequence for CBLB (NM_170662.2,2614-2632).
caactcgggacaatccaaa

SEQ ID NO: 129706 - DNA, 19 bp, Homo sapiens
  siRNA target sequence for CBLB (NM_170662.2,2651-2669).
caggacgccctctgattat

SEQ ID NO: 129707 - DNA, 19 bp, Homo sapiens
  siRNA target sequence for CBLB (NM_170662.2,2653-2671).
ggacgccctctgattatga

SEQ ID NO: 129708 - DNA, 19 bp, Homo sapiens
  siRNA target sequence for CBLB (NM_170662.2,2656-2674).
cgccctctgattatgatct

SEQ ID NO: 129709 - DNA, 19 bp, Homo sapiens
  siRNA target sequence for CBLB (NM_170662.2,2657-2675).
gccctctgattatgatctt

SEQ ID NO: 129710 - DNA, 19 bp, Homo sapiens
  siRNA target sequence for CBLB (NM_170662.2,2662-2680).
ctgattatgatcttctcat

SEQ ID NO: 129711 - DNA, 19 bp, Homo sapiens
  siRNA target sequence for CBLB (NM_170662.2,2746-2764).
caaggcatagtctcattga

SEQ ID NO: 129712 - DNA, 19 bp, Homo sapiens
  siRNA target sequence for CBLB (NM_170662.2,2884-2902).
ggttaccaggtgaaaatgt

SEQ ID NO: 129713 - DNA, 19 bp, Homo sapiens
  siRNA target sequence for CBLB (NM_170662.2,2931-2949).
gatcagcttccttcatgtt

SEQ ID NO: 129714 - DNA, 19 bp, Homo sapiens
  siRNA target sequence for CBLB (NM_170662.2,3035-3053).
gcctgaggcggcattggaa

SEQ ID NO: 129715 - DNA, 19 bp, Homo sapiens
  siRNA target sequence for CBLB (NM_170662.2,3036-3054).
cctgaggcggcattggaaa

SEQ ID NO: 129716 - DNA, 19 bp, Homo sapiens
  siRNA target sequence for CBLB (NM_170662.2,3037-3055).
ctgaggcggcattggaaaa

SEQ ID NO: 129717 - DNA, 19 bp, Homo sapiens
  siRNA target sequence for CBLB (NM_170662.2,3057-3075).
gtcgatgcaaaaattgcaa

SEQ ID NO: 129718 - DNA, 19 bp, Homo sapiens
  siRNA target sequence for CBLB (NM_170662.2,3059-3077).
cgatgcaaaaattgcaaaa

SEQ ID NO: 129719 - DNA, 19 bp, Homo sapiens
  siRNA target sequence for CBLB (NM_170662.2,3110-3128).
gaagagagccttagagata

SEQ ID NO: 129720 - DNA, 19 bp, Homo sapiens
  siRNA target sequence for CBLB (NM_170662.2,3154-3172).
ggagcatcctccgagaatt

SEQ ID NO: 129721 - DNA, 19 bp, Homo sapiens
  siRNA target sequence for CBLB (NM_170662.2,3155-3173).
gagcatcctccgagaattt

SEQ ID NO: 129722 - DNA, 19 bp, Homo sapiens
  siRNA target sequence for CBLB (NM_170662.2,3187-3205).
cagtatccccacgtctaaa

SEQ ID NO: 129723 - DNA, 19 bp, Homo sapiens
  siRNA target sequence for CBLC (NM_012116.2,703-721).
ggccaacactcctcaagaa

SEQ ID NO: 129724 - DNA, 19 bp, Homo sapiens
  siRNA target sequence for CBLC (NM_012116.2,705-723).
ccaacactcctcaagaact

SEQ ID NO: 129725 - DNA, 19 bp, Homo sapiens
  siRNA target sequence for CBLC (NM_012116.2,1225-1243).
gctgggaggccgtgagtat

SEQ ID NO: 129726 - DNA, 19 bp, Homo sapiens
  siRNA target sequence for CBLC (NM_012116.2,1228-1246).
gggaggccgtgagtatcta

SEQ ID NO: 129727 - DNA, 19 bp, Homo sapiens
  siRNA target sequence for CCIN (NM_005893.1,119-137).
gaattcacggagaaaaact

SEQ ID NO: 129728 - DNA, 19 bp, Homo sapiens
  siRNA target sequence for CCIN (NM_005893.1,124-142).
cacggagaaaaactacaat

SEQ ID NO: 129729 - DNA, 19 bp, Homo sapiens
  siRNA target sequence for CCIN (NM_005893.1,170-188).
cagaggaaacgcaaagagt

SEQ ID NO: 129730 - DNA, 19 bp, Homo sapiens
  siRNA target sequence for CCIN (NM_005893.1,300-318).
ccgctgatgagcttttcat

SEQ ID NO: 129731 - DNA, 19 bp, Homo sapiens
  siRNA target sequence for CCIN (NM_005893.1,302-320).
gctgatgagcttttcatca

SEQ ID NO: 129732 - DNA, 19 bp, Homo sapiens
  siRNA target sequence for CCIN (NM_005893.1,362-380).
cttctggactacttctata

SEQ ID NO: 129733 - DNA, 19 bp, Homo sapiens
  siRNA target sequence for CCIN (NM_005893.1,391-409).
ggtgatctccgagcaaaat

SEQ ID NO: 129734 - DNA, 19 bp, Homo sapiens
  siRNA target sequence for CCIN (NM_005893.1,422-440).
cttcgtggggctcagtatt

SEQ ID NO: 129735 - DNA, 19 bp, Homo sapiens
  siRNA target sequence for CCIN (NM_005893.1,425-443).
cgtggggctcagtatttca

SEQ ID NO: 129736 - DNA, 19 bp, Homo sapiens
  siRNA target sequence for CCIN (NM_005893.1,426-444).
gtggggctcagtatttcaa

SEQ ID NO: 129737 - DNA, 19 bp, Homo sapiens
  siRNA target sequence for CCIN (NM_005893.1,428-446).
ggggctcagtatttcaaca

SEQ ID NO: 129738 - DNA, 19 bp, Homo sapiens
  siRNA target sequence for CCIN (NM_005893.1,464-482).
cactgtaacgacttcctta

SEQ ID NO: 129739 - DNA, 19 bp, Homo sapiens
  siRNA target sequence for CCIN (NM_005893.1,507-525).
gcttgcgctacctcttctt

SEQ ID NO: 129740 - DNA, 19 bp, Homo sapiens
  siRNA target sequence for CCIN (NM_005893.1,570-588).
ctggcattcgggacaactt

SEQ ID NO: 129741 - DNA, 19 bp, Homo sapiens
  siRNA target sequence for CCIN (NM_005893.1,629-647).
cgctgtccacctgttatct

SEQ ID NO: 129742 - DNA, 19 bp, Homo sapiens
  siRNA target sequence for CCIN (NM_005893.1,653-671).
cgcctgctccgtgatgaaa

SEQ ID NO: 129743 - DNA, 19 bp, Homo sapiens
  siRNA target sequence for CCIN (NM_005893.1,654-672).
gcctgctccgtgatgaaaa

SEQ ID NO: 129744 - DNA, 19 bp, Homo sapiens
  siRNA target sequence for CCIN (NM_005893.1,658-676).
gctccgtgatgaaaacctt

SEQ ID NO: 129745 - DNA, 19 bp, Homo sapiens
  siRNA target sequence for CCIN (NM_005893.1,673-691).
ccttcacgtgctcaatgaa

SEQ ID NO: 129746 - DNA, 19 bp, Homo sapiens
  siRNA target sequence for CCIN (NM_005893.1,699-717).
cgctcagcgcactcatcaa

SEQ ID NO: 129747 - DNA, 19 bp, Homo sapiens
  siRNA target sequence for CCIN (NM_005893.1,700-718).
gctcagcgcactcatcaat

SEQ ID NO: 129748 - DNA, 19 bp, Homo sapiens
  siRNA target sequence for CCIN (NM_005893.1,701-719).
ctcagcgcactcatcaatt

SEQ ID NO: 129749 - DNA, 19 bp, Homo sapiens
  siRNA target sequence for CCIN (NM_005893.1,736-754).
ggaggatcgggagaagtat

SEQ ID NO: 129750 - DNA, 19 bp, Homo sapiens
  siRNA target sequence for CCIN (NM_005893.1,737-755).
gaggatcgggagaagtatt

SEQ ID NO: 129751 - DNA, 19 bp, Homo sapiens
  siRNA target sequence for CCIN (NM_005893.1,740-758).
gatcgggagaagtatttca

SEQ ID NO: 129752 - DNA, 19 bp, Homo sapiens
  siRNA target sequence for CCIN (NM_005893.1,769-787).
caattacatcaatctcaat

SEQ ID NO: 129753 - DNA, 19 bp, Homo sapiens
  siRNA target sequence for CCIN (NM_005893.1,852-870).
cccatacaaccctgattga

SEQ ID NO: 129754 - DNA, 19 bp, Homo sapiens
  siRNA target sequence for CCIN (NM_005893.1,976-994).
ccacggccagttcaatgat

SEQ ID NO: 129755 - DNA, 19 bp, Homo sapiens
  siRNA target sequence for CCIN (NM_005893.1,985-1003).
gttcaatgatggagtgttt

SEQ ID NO: 129756 - DNA, 19 bp, Homo sapiens
  siRNA target sequence for CCIN (NM_005893.1,992-1010).
gatggagtgtttgcttata

SEQ ID NO: 129757 - DNA, 19 bp, Homo sapiens
  siRNA target sequence for CCIN (NM_005893.1,1080-1098).
ctgctggtcgctacatcta

SEQ ID NO: 129758 - DNA, 19 bp, Homo sapiens
  siRNA target sequence for CCIN (NM_005893.1,1082-1100).
gctggtcgctacatctaca

SEQ ID NO: 129759 - DNA, 19 bp, Homo sapiens
  siRNA target sequence for CCIN (NM_005893.1,1085-1103).
ggtcgctacatctacatct

SEQ ID NO: 129760 - DNA, 19 bp, Homo sapiens
  siRNA target sequence for CCIN (NM_005893.1,1109-1127).
ggcaccactgagcagattt

SEQ ID NO: 129761 - DNA, 19 bp, Homo sapiens
  siRNA target sequence for CCIN (NM_005893.1,1111-1129).
caccactgagcagatttca

SEQ ID NO: 129762 - DNA, 19 bp, Homo sapiens
  siRNA target sequence for CCIN (NM_005893.1,1140-1158).
cagcctggcggtatgacat

SEQ ID NO: 129763 - DNA, 19 bp, Homo sapiens
  siRNA target sequence for CCIN (NM_005893.1,1149-1167).
ggtatgacatggatgacaa

SEQ ID NO: 129764 - DNA, 19 bp, Homo sapiens
  siRNA target sequence for CCIN (NM_005893.1,1262-1280).
gccccaaggcggtatgtct

SEQ ID NO: 129765 - DNA, 19 bp, Homo sapiens
  siRNA target sequence for CCIN (NM_005893.1,1271-1289).
cggtatgtctccaacatct

SEQ ID NO: 129766 - DNA, 19 bp, Homo sapiens
  siRNA target sequence for CCIN (NM_005893.1,1282-1300).
caacatctatcgctatgat

SEQ ID NO: 129767 - DNA, 19 bp, Homo sapiens
  siRNA target sequence for CCIN (NM_005893.1,1352-1370).
ggcaccgccgtgatcacta

SEQ ID NO: 129768 - DNA, 19 bp, Homo sapiens
  siRNA target sequence for CCIN (NM_005893.1,1357-1375).
cgccgtgatcactaaagga

SEQ ID NO: 129769 - DNA, 19 bp, Homo sapiens
  siRNA target sequence for CCIN (NM_005893.1,1439-1457).
gtagtggactgctttgaca

SEQ ID NO: 129770 - DNA, 19 bp, Homo sapiens
  siRNA target sequence for CCIN (NM_005893.1,1467-1485).
gggacgtggtccagtgtat

SEQ ID NO: 129771 - DNA, 19 bp, Homo sapiens
  siRNA target sequence for CCIN (NM_005893.1,1469-1487).
gacgtggtccagtgtatca

SEQ ID NO: 129772 - DNA, 19 bp, Homo sapiens
  siRNA target sequence for CCIN (NM_005893.1,1648-1666).
ggatgtgtcccatgctata

SEQ ID NO: 129773 - DNA, 19 bp, Homo sapiens
  siRNA target sequence for CCIN (NM_005893.1,1649-1667).
gatgtgtcccatgctatat

SEQ ID NO: 129774 - DNA, 19 bp, Homo sapiens
  siRNA target sequence for CCIN (NM_005893.1,1679-1697).
gacagcaaggtgtttgtat

SEQ ID NO: 129775 - DNA, 19 bp, Homo sapiens
  siRNA target sequence for CCIN (NM_005893.1,1716-1734).
ccagcgatgtccagacaaa

SEQ ID NO: 129776 - DNA, 19 bp, Homo sapiens
  siRNA target sequence for CCIN (NM_005893.1,1736-1754).
gactacaccatcaatccaa

SEQ ID NO: 129777 - DNA, 19 bp, Homo sapiens
  siRNA target sequence for CCIN (NM_005893.1,1843-1861).
caagctaccttgcaagatt

SEQ ID NO: 129778 - DNA, 19 bp, Homo sapiens
  siRNA target sequence for CCIN (NM_005893.1,1846-1864).
gctaccttgcaagattctt

SEQ ID NO: 129779 - DNA, 19 bp, Homo sapiens
  siRNA target sequence for CD2 (NM_001767.2,80-98).
gtctccaaagagattacga

SEQ ID NO: 129780 - DNA, 19 bp, Homo sapiens
  siRNA target sequence for CD2 (NM_001767.2,120-138).
ccttgggtcaggacatcaa

SEQ ID NO: 129781 - DNA, 19 bp, Homo sapiens
  siRNA target sequence for CD2 (NM_001767.2,142-160).
ggacattcctagttttcaa

SEQ ID NO: 129782 - DNA, 19 bp, Homo sapiens
  siRNA target sequence for CD2 (NM_001767.2,214-232).
gattgcacaattcagaaaa

SEQ ID NO: 129783 - DNA, 19 bp, Homo sapiens
  siRNA target sequence for CD2 (NM_001767.2,241-259).
gactttcaaggaaaaagat

SEQ ID NO: 129784 - DNA, 19 bp, Homo sapiens
  siRNA target sequence for CD2 (NM_001767.2,257-275).
gatacatataagctattta

SEQ ID NO: 129785 - DNA, 19 bp, Homo sapiens
  siRNA target sequence for CD2 (NM_001767.2,282-300).
gaactctgaaaattaagca

SEQ ID NO: 129786 - DNA, 19 bp, Homo sapiens
  siRNA target sequence for CD2 (NM_001767.2,309-327).
ccgatgatcaggatatcta

SEQ ID NO: 129787 - DNA, 19 bp, Homo sapiens
  siRNA target sequence for CD2 (NM_001767.2,317-335).
caggatatctacaaggtat

SEQ ID NO: 129788 - DNA, 19 bp, Homo sapiens
  siRNA target sequence for CD2 (NM_001767.2,320-338).
gatatctacaaggtatcaa

SEQ ID NO: 129789 - DNA, 19 bp, Homo sapiens
  siRNA target sequence for CD2 (NM_001767.2,331-349).
ggtatcaatatatgataca

SEQ ID NO: 129790 - DNA, 19 bp, Homo sapiens
  siRNA target sequence for CD2 (NM_001767.2,395-413).
gagagggtctcaaaaccaa

SEQ ID NO: 129791 - DNA, 19 bp, Homo sapiens
  siRNA target sequence for CD2 (NM_001767.2,464-482).
ggaactgaccccgaattaa

SEQ ID NO: 129792 - DNA, 19 bp, Homo sapiens
  siRNA target sequence for CD2 (NM_001767.2,465-483).
gaactgaccccgaattaaa

SEQ ID NO: 129793 - DNA, 19 bp, Homo sapiens
  siRNA target sequence for CD2 (NM_001767.2,475-493).
cgaattaaacctgtatcaa

SEQ ID NO: 129794 - DNA, 19 bp, Homo sapiens
  siRNA target sequence for CD2 (NM_001767.2,499-517).
gaaacatctaaaactttct

SEQ ID NO: 129795 - DNA, 19 bp, Homo sapiens
  siRNA target sequence for CD2 (NM_001767.2,546-564).
ccagcctgagtgcaaaatt

SEQ ID NO: 129796 - DNA, 19 bp, Homo sapiens
  siRNA target sequence for CD2 (NM_001767.2,637-655).
ggacatctatctcatcatt

SEQ ID NO: 129797 - DNA, 19 bp, Homo sapiens
  siRNA target sequence for CD2 (NM_001767.2,692-710).
gtggcactgctcgttttct

SEQ ID NO: 129798 - DNA, 19 bp, Homo sapiens
  siRNA target sequence for CD2 (NM_001767.2,733-751).
gaggagtcggagaaatgat

SEQ ID NO: 129799 - DNA, 19 bp, Homo sapiens
  siRNA target sequence for CD2 (NM_001767.2,957-975).
cgtcgggcacacaagttca

SEQ ID NO: 129800 - DNA, 19 bp, Homo sapiens
  siRNA target sequence for CD2 (NM_001767.2,1031-1049).
ggggcagcagaaaactcat

SEQ ID NO: 129801 - DNA, 19 bp, Homo sapiens
  siRNA target sequence for CD2 (NM_001767.2,1032-1050).
gggcagcagaaaactcatt

SEQ ID NO: 129802 - DNA, 19 bp, Homo sapiens
  siRNA target sequence for CD2 (NM_001767.2,1034-1052).
gcagcagaaaactcattgt

SEQ ID NO: 129803 - DNA, 19 bp, Homo sapiens
  siRNA target sequence for CD244 (NM_016382.1,225-243).
gtgtatcagggcaaaggat

SEQ ID NO: 129804 - DNA, 19 bp, Homo sapiens
  siRNA target sequence for CD244 (NM_016382.1,278-296).
gggagtgcctcttcagtta

SEQ ID NO: 129805 - DNA, 19 bp, Homo sapiens
  siRNA target sequence for CD244 (NM_016382.1,286-304).
ctcttcagttacaaccaaa

SEQ ID NO: 129806 - DNA, 19 bp, Homo sapiens
  siRNA target sequence for CD244 (NM_016382.1,393-411).
ggctctttgccttccaata

SEQ ID NO: 129807 - DNA, 19 bp, Homo sapiens
  siRNA target sequence for CD244 (NM_016382.1,401-419).
gccttccaatacttccaat

SEQ ID NO: 129808 - DNA, 19 bp, Homo sapiens
  siRNA target sequence for CD244 (NM_016382.1,407-425).
caatacttccaatgataga

SEQ ID NO: 129809 - DNA, 19 bp, Homo sapiens
  siRNA target sequence for CD244 (NM_016382.1,497-515).
cctggaggtcaccagtata

SEQ ID NO: 129810 - DNA, 19 bp, Homo sapiens
  siRNA target sequence for CD244 (NM_016382.1,500-518).
ggaggtcaccagtatatct

SEQ ID NO: 129811 - DNA, 19 bp, Homo sapiens
  siRNA target sequence for CD244 (NM_016382.1,506-524).
caccagtatatctggaaaa

SEQ ID NO: 129812 - DNA, 19 bp, Homo sapiens
  siRNA target sequence for CD244 (NM_016382.1,509-527).
cagtatatctggaaaagtt

SEQ ID NO: 129813 - DNA, 19 bp, Homo sapiens
  siRNA target sequence for CD244 (NM_016382.1,535-553).
ccacgttccaggtttttgt

SEQ ID NO: 129814 - DNA, 19 bp, Homo sapiens
  siRNA target sequence for CD244 (NM_016382.1,536-554).
cacgttccaggtttttgta

SEQ ID NO: 129815 - DNA, 19 bp, Homo sapiens
  siRNA target sequence for CD244 (NM_016382.1,538-556).
cgttccaggtttttgtatt

SEQ ID NO: 129816 - DNA, 19 bp, Homo sapiens
  siRNA target sequence for CD244 (NM_016382.1,651-669).
ggcaatgtgtcctatgctt

SEQ ID NO: 129817 - DNA, 19 bp, Homo sapiens
  siRNA target sequence for CD244 (NM_016382.1,720-738).
gacgaggaggttgacatta

SEQ ID NO: 129818 - DNA, 19 bp, Homo sapiens
  siRNA target sequence for CD244 (NM_016382.1,806-824).
cactcaggactgtcagaat

SEQ ID NO: 129819 - DNA, 19 bp, Homo sapiens
  siRNA target sequence for CD244 (NM_016382.1,857-875).
ggtgatcatcgtgattcta

SEQ ID NO: 129820 - DNA, 19 bp, Homo sapiens
  siRNA target sequence for CD244 (NM_016382.1,858-876).
gtgatcatcgtgattctaa

SEQ ID NO: 129821 - DNA, 19 bp, Homo sapiens
  siRNA target sequence for CD244 (NM_016382.1,970-988).
caatttacgaagatgtcaa

SEQ ID NO: 129822 - DNA, 19 bp, Homo sapiens
  siRNA target sequence for CD244 (NM_016382.1,984-1002).
gtcaaggatctgaaaacca

SEQ ID NO: 129823 - DNA, 19 bp, Homo sapiens
  siRNA target sequence for CD244 (NM_016382.1,1038-1056).
ggggggagcaccatctact

SEQ ID NO: 129824 - DNA, 19 bp, Homo sapiens
  siRNA target sequence for CD244 (NM_016382.1,1041-1059).
gggagcaccatctactcta

SEQ ID NO: 129825 - DNA, 19 bp, Homo sapiens
  siRNA target sequence for CD244 (NM_016382.1,1042-1060).
ggagcaccatctactctat

SEQ ID NO: 129826 - DNA, 19 bp, Homo sapiens
  siRNA target sequence for CD244 (NM_016382.1,1045-1063).
gcaccatctactctatgat

SEQ ID NO: 129827 - DNA, 19 bp, Homo sapiens
  siRNA target sequence for CD244 (NM_016382.1,1098-1116).
cctgcatatacattatatt

SEQ ID NO: 129828 - DNA, 19 bp, Homo sapiens
  siRNA target sequence for CD244 (NM_016382.1,1253-1271).
ggagaactttgatgtttat

SEQ ID NO: 129829 - DNA, 19 bp, Homo sapiens
  siRNA target sequence for CD28 (NM_006139.1,255-273).
cccttcaattcaagtaaca

SEQ ID NO: 129830 - DNA, 19 bp, Homo sapiens
  siRNA target sequence for CD28 (NM_006139.1,319-337).
gacaatgcggtcaacctta

SEQ ID NO: 129831 - DNA, 19 bp, Homo sapiens
  siRNA target sequence for CD28 (NM_006139.1,330-348).
caaccttagctgcaagtat

SEQ ID NO: 129832 - DNA, 19 bp, Homo sapiens
  siRNA target sequence for CD28 (NM_006139.1,339-357).
ctgcaagtattcctacaat

SEQ ID NO: 129833 - DNA, 19 bp, Homo sapiens
  siRNA target sequence for CD28 (NM_006139.1,341-359).
gcaagtattcctacaatct

SEQ ID NO: 129834 - DNA, 19 bp, Homo sapiens
  siRNA target sequence for CD28 (NM_006139.1,419-437).
gtgttgtatatgggaatta

SEQ ID NO: 129835 - DNA, 19 bp, Homo sapiens
  siRNA target sequence for CD28 (NM_006139.1,421-439).
gttgtatatgggaattact

SEQ ID NO: 129836 - DNA, 19 bp, Homo sapiens
  siRNA target sequence for CD28 (NM_006139.1,444-462).
gcagcttcaggtttactca

SEQ ID NO: 129837 - DNA, 19 bp, Homo sapiens
  siRNA target sequence for CD28 (NM_006139.1,528-546).
gtatgttaaccaaacagat

SEQ ID NO: 129838 - DNA, 19 bp, Homo sapiens
  siRNA target sequence for CD28 (NM_006139.1,558-576).
caaaattgaagttatgtat

SEQ ID NO: 129839 - DNA, 19 bp, Homo sapiens
  siRNA target sequence for CD28 (NM_006139.1,611-629).
gaaccattatccatgtgaa

SEQ ID NO: 129840 - DNA, 19 bp, Homo sapiens
  siRNA target sequence for CD28 (NM_006139.1,717-735).
ctatagcttgctagtaaca

SEQ ID NO: 129841 - DNA, 19 bp, Homo sapiens
  siRNA target sequence for CD28 (NM_006139.1,781-799).
ctgcacagtgactacatga

SEQ ID NO: 129842 - DNA, 19 bp, Homo sapiens
  siRNA target sequence for CD28 (NM_006139.1,824-842).
ccacccgcaagcattacca

SEQ ID NO: 129843 - DNA, 19 bp, Homo sapiens
  siRNA target sequence for CD3Z (NM_000734.2,163-181).
ggcacagttgccgattaca

SEQ ID NO: 129844 - DNA, 19 bp, Homo sapiens
  siRNA target sequence for CD3Z (NM_000734.2,165-183).
cacagttgccgattacaga

SEQ ID NO: 129845 - DNA, 19 bp, Homo sapiens
  siRNA target sequence for CD3Z (NM_000734.2,323-341).
ggccagaaccagctctata

SEQ ID NO: 129846 - DNA, 19 bp, Homo sapiens
  siRNA target sequence for CD3Z (NM_000734.2,438-456).
ctcaggaaggcctgtacaa

SEQ ID NO: 129847 - DNA, 19 bp, Homo sapiens
  siRNA target sequence for CD3Z (NM_000734.2,490-508).
cagtgagattgggatgaaa

SEQ ID NO: 129848 - DNA, 19 bp, Homo sapiens
  siRNA target sequence for CD48 (NM_001778.2,95-113).
cctggtgaccagcattcaa

SEQ ID NO: 129849 - DNA, 19 bp, Homo sapiens
  siRNA target sequence for CD48 (NM_001778.2,111-129).
caaggtcacttggtacata

SEQ ID NO: 129850 - DNA, 19 bp, Homo sapiens
  siRNA target sequence for CD48 (NM_001778.2,198-216).
ctaacctggttttatactt

SEQ ID NO: 129851 - DNA, 19 bp, Homo sapiens
  siRNA target sequence for CD48 (NM_001778.2,214-232).
ctttcgaccagaagattgt

SEQ ID NO: 129852 - DNA, 19 bp, Homo sapiens
  siRNA target sequence for CD48 (NM_001778.2,218-236).
cgaccagaagattgtagaa

SEQ ID NO: 129853 - DNA, 19 bp, Homo sapiens
  siRNA target sequence for CD48 (NM_001778.2,234-252).
gaatgggattccagaaaat

SEQ ID NO: 129854 - DNA, 19 bp, Homo sapiens
  siRNA target sequence for CD48 (NM_001778.2,244-262).
ccagaaaatctaagtactt

SEQ ID NO: 129855 - DNA, 19 bp, Homo sapiens
  siRNA target sequence for CD48 (NM_001778.2,253-271).
ctaagtactttgaatccaa

SEQ ID NO: 129856 - DNA, 19 bp, Homo sapiens
  siRNA target sequence for CD48 (NM_001778.2,306-324).
ggcgcactgtacatctcta

SEQ ID NO: 129857 - DNA, 19 bp, Homo sapiens
  siRNA target sequence for CD48 (NM_001778.2,307-325).
gcgcactgtacatctctaa

SEQ ID NO: 129858 - DNA, 19 bp, Homo sapiens
  siRNA target sequence for CD48 (NM_001778.2,426-444).
cccaagcctgtcatcaaaa

SEQ ID NO: 129859 - DNA, 19 bp, Homo sapiens
  siRNA target sequence for CD48 (NM_001778.2,501-519).
cctggcgagtctgtaaact

SEQ ID NO: 129860 - DNA, 19 bp, Homo sapiens
  siRNA target sequence for CD48 (NM_001778.2,502-520).
ctggcgagtctgtaaacta

SEQ ID NO: 129861 - DNA, 19 bp, Homo sapiens
  siRNA target sequence for CD48 (NM_001778.2,504-522).
ggcgagtctgtaaactaca

SEQ ID NO: 129862 - DNA, 19 bp, Homo sapiens
  siRNA target sequence for CD48 (NM_001778.2,583-601).
cccttatgccacataatta

SEQ ID NO: 129863 - DNA, 19 bp, Homo sapiens
  siRNA target sequence for CD48 (NM_001778.2,585-603).
cttatgccacataattact

SEQ ID NO: 129864 - DNA, 19 bp, Homo sapiens
  siRNA target sequence for CD48 (NM_001778.2,686-704).
ccggtcctttggagtagaa

SEQ ID NO: 129865 - DNA, 19 bp, Homo sapiens
  siRNA target sequence for CD48 (NM_001778.2,687-705).
cggtcctttggagtagaat

SEQ ID NO: 129866 - DNA, 19 bp, Homo sapiens
  siRNA target sequence for CD48 (NM_001778.2,691-709).
cctttggagtagaatggat

SEQ ID NO: 129867 - DNA, 19 bp, Homo sapiens
  siRNA target sequence for CD48 (NM_001778.2,696-714).
ggagtagaatggattgcaa

SEQ ID NO: 129868 - DNA, 19 bp, Homo sapiens
  siRNA target sequence for CD48 (NM_001778.2,728-746).
cacggtgcccaccattctt

SEQ ID NO: 129869 - DNA, 19 bp, Homo sapiens
  siRNA target sequence for CD58 (NM_001779.1,92-110).
gtttttcccaacaaatata

SEQ ID NO: 129870 - DNA, 19 bp, Homo sapiens
  siRNA target sequence for CD58 (NM_001779.1,115-133).
gttgtgtatgggaatgtaa

SEQ ID NO: 129871 - DNA, 19 bp, Homo sapiens
  siRNA target sequence for CD58 (NM_001779.1,118-136).
gtgtatgggaatgtaactt

SEQ ID NO: 129872 - DNA, 19 bp, Homo sapiens
  siRNA target sequence for CD58 (NM_001779.1,145-163).
ccaagcaatgtgcctttaa

SEQ ID NO: 129873 - DNA, 19 bp, Homo sapiens
  siRNA target sequence for CD58 (NM_001779.1,146-164).
caagcaatgtgcctttaaa

SEQ ID NO: 129874 - DNA, 19 bp, Homo sapiens
  siRNA target sequence for CD58 (NM_001779.1,205-223).
ctggaaaattctgaattca

SEQ ID NO: 129875 - DNA, 19 bp, Homo sapiens
  siRNA target sequence for CD58 (NM_001779.1,275-293).
gcctcactatctacaactt

SEQ ID NO: 129876 - DNA, 19 bp, Homo sapiens
  siRNA target sequence for CD58 (NM_001779.1,276-294).
cctcactatctacaactta

SEQ ID NO: 129877 - DNA, 19 bp, Homo sapiens
  siRNA target sequence for CD58 (NM_001779.1,299-317).
catcagatgaagatgagta

SEQ ID NO: 129878 - DNA, 19 bp, Homo sapiens
  siRNA target sequence for CD58 (NM_001779.1,324-342).
ggaatcgccaaatattact

SEQ ID NO: 129879 - DNA, 19 bp, Homo sapiens
  siRNA target sequence for CD58 (NM_001779.1,332-350).
caaatattactgataccat

SEQ ID NO: 129880 - DNA, 19 bp, Homo sapiens
  siRNA target sequence for CD58 (NM_001779.1,341-359).
ctgataccatgaagttctt

SEQ ID NO: 129881 - DNA, 19 bp, Homo sapiens
  siRNA target sequence for CD58 (NM_001779.1,408-426).
gactaatggaagcattgaa

SEQ ID NO: 129882 - DNA, 19 bp, Homo sapiens
  siRNA target sequence for CD58 (NM_001779.1,434-452).
gcatgataccagagcatta

SEQ ID NO: 129883 - DNA, 19 bp, Homo sapiens
  siRNA target sequence for CD58 (NM_001779.1,456-474).
cagccatcgaggacttata

SEQ ID NO: 129884 - DNA, 19 bp, Homo sapiens
  siRNA target sequence for CD58 (NM_001779.1,458-476).
gccatcgaggacttataat

SEQ ID NO: 129885 - DNA, 19 bp, Homo sapiens
  siRNA target sequence for CD58 (NM_001779.1,460-478).
catcgaggacttataatgt

SEQ ID NO: 129886 - DNA, 19 bp, Homo sapiens
  siRNA target sequence for CD58 (NM_001779.1,463-481).
cgaggacttataatgtact

SEQ ID NO: 129887 - DNA, 19 bp, Homo sapiens
  siRNA target sequence for CD58 (NM_001779.1,491-509).
gtcctatggagcaatgtaa

SEQ ID NO: 129888 - DNA, 19 bp, Homo sapiens
  siRNA target sequence for CD58 (NM_001779.1,501-519).
gcaatgtaaacgtaactca

SEQ ID NO: 129889 - DNA, 19 bp, Homo sapiens
  siRNA target sequence for CD58 (NM_001779.1,502-520).
caatgtaaacgtaactcaa

SEQ ID NO: 129890 - DNA, 19 bp, Homo sapiens
  siRNA target sequence for CD58 (NM_001779.1,511-529).
cgtaactcaaccagtatat

SEQ ID NO: 129891 - DNA, 19 bp, Homo sapiens
  siRNA target sequence for CD58 (NM_001779.1,628-646).
ccaagcagcggtcattcaa

SEQ ID NO: 129892 - DNA, 19 bp, Homo sapiens
  siRNA target sequence for CD58 (NM_001779.1,658-676).
gcacttatacccataccat

SEQ ID NO: 129893 - DNA, 19 bp, Homo sapiens
  siRNA target sequence for CD58 (NM_001779.1,659-677).
cacttatacccataccatt

SEQ ID NO: 129894 - DNA, 19 bp, Homo sapiens
  siRNA target sequence for CD58 (NM_001779.1,679-697).
gcagtaattacaacatgta

SEQ ID NO: 129895 - DNA, 19 bp, Homo sapiens
  siRNA target sequence for CD58 (NM_001779.1,680-698).
cagtaattacaacatgtat

SEQ ID NO: 129896 - DNA, 19 bp, Homo sapiens
  siRNA target sequence for CD58 (NM_001779.1,702-720).
gctgtatatgaatggtatt

SEQ ID NO: 129897 - DNA, 19 bp, Homo sapiens
  siRNA target sequence for CD8A (NM_001768.4,648-666).
ctggacttcgcctgtgata

SEQ ID NO: 129898 - DNA, 19 bp, Homo sapiens
  siRNA target sequence for CD8A (NM_001768.4,749-767).
ccgaagacgtgtttgcaaa

SEQ ID NO: 129899 - DNA, 19 bp, Homo sapiens
  siRNA target sequence for CD8A (NM_001768.4,750-768).
cgaagacgtgtttgcaaat

SEQ ID NO: 129900 - DNA, 19 bp, Homo sapiens
  siRNA target sequence for CD8B1 (NM_004931.2,120-138).
cagacccctgcatacataa

SEQ ID NO: 129901 - DNA, 19 bp, Homo sapiens
  siRNA target sequence for CD8B1 (NM_004931.2,165-183).
ctgtcctgcgaggctaaaa

SEQ ID NO: 129902 - DNA, 19 bp, Homo sapiens
  siRNA target sequence for CD8B1 (NM_004931.2,332-350).
ggatgcaagccggttcatt

SEQ ID NO: 129903 - DNA, 19 bp, Homo sapiens
  siRNA target sequence for CD8B1 (NM_004931.2,336-354).
gcaagccggttcattctca

SEQ ID NO: 129904 - DNA, 19 bp, Homo sapiens
  siRNA target sequence for CD8B1 (NM_004931.2,340-358).
gccggttcattctcaatct

SEQ ID NO: 129905 - DNA, 19 bp, Homo sapiens
  siRNA target sequence for CD8B1 (NM_004931.2,342-360).
cggttcattctcaatctca

SEQ ID NO: 129906 - DNA, 19 bp, Homo sapiens
  siRNA target sequence for CD8B1 (NM_004931.2,652-670).
ggcttcgtttcatgaaaca

SEQ ID NO: 129907 - DNA, 19 bp, Homo sapiens
  siRNA target sequence for CD8B1 (NM_004931.2,657-675).
cgtttcatgaaacaatttt

SEQ ID NO: 129908 - DNA, 19 bp, Homo sapiens
  siRNA target sequence for CD8B1 (NM_172099.1,669-687).
cagaaattcaatatcgttt

SEQ ID NO: 129909 - DNA, 19 bp, Homo sapiens
  siRNA target sequence for CD8B1 (NM_172099.1,712-730).
cttgctgttgttttcagat

SEQ ID NO: 129910 - DNA, 19 bp, Homo sapiens
  siRNA target sequence for CD8B1 (NM_172099.1,743-761).
cagagaatacggttttggt

SEQ ID NO: 129911 - DNA, 19 bp, Homo sapiens
  siRNA target sequence for CD8B1 (NM_172099.1,760-778).
gtgtcctgctacaaaaaga

SEQ ID NO: 129912 - DNA, 19 bp, Homo sapiens
  siRNA target sequence for CD8B1 (NM_172099.1,762-780).
gtcctgctacaaaaagaca

SEQ ID NO: 129913 - DNA, 19 bp, Homo sapiens
  siRNA target sequence for CD8B1 (NM_172102.1,582-600).
cctcaaggggaaggtatat

SEQ ID NO: 129914 - DNA, 19 bp, Homo sapiens
  siRNA target sequence for CD8B1 (NM_172102.1,616-634).
cccaatgcctgcatggata

SEQ ID NO: 129915 - DNA, 19 bp, Homo sapiens
  siRNA target sequence for CDC37 (NM_007065.3,488-506).
cagcaagagcatggtaaat

SEQ ID NO: 129916 - DNA, 19 bp, Homo sapiens
  siRNA target sequence for CDC37 (NM_007065.3,560-578).
caagaccttcgtggaaaaa

SEQ ID NO: 129917 - DNA, 19 bp, Homo sapiens
  siRNA target sequence for CDC37 (NM_007065.3,664-682).
gcgaggagacagccaatta

SEQ ID NO: 129918 - DNA, 19 bp, Homo sapiens
  siRNA target sequence for CDC37 (NM_007065.3,750-768).
cagacaatcgtcatgcaat

SEQ ID NO: 129919 - DNA, 19 bp, Homo sapiens
  siRNA target sequence for CDC37 (NM_007065.3,752-770).
gacaatcgtcatgcaattt

SEQ ID NO: 129920 - DNA, 19 bp, Homo sapiens
  siRNA target sequence for CDC37 (NM_007065.3,754-772).
caatcgtcatgcaatttat

SEQ ID NO: 129921 - DNA, 19 bp, Homo sapiens
  siRNA target sequence for CDC37 (NM_007065.3,819-837).
cggcagttcttcactaaga

SEQ ID NO: 129922 - DNA, 19 bp, Homo sapiens
  siRNA target sequence for CDC37 (NM_007065.3,820-838).
ggcagttcttcactaagat

SEQ ID NO: 129923 - DNA, 19 bp, Homo sapiens
  siRNA target sequence for CDC37 (NM_007065.3,821-839).
gcagttcttcactaagatt

SEQ ID NO: 129924 - DNA, 19 bp, Homo sapiens
  siRNA target sequence for CDC37 (NM_007065.3,822-840).
cagttcttcactaagatta

SEQ ID NO: 129925 - DNA, 19 bp, Homo sapiens
  siRNA target sequence for CDC37 (NM_007065.3,1219-1237).
ccaagacgggcgatgagaa

SEQ ID NO: 129926 - DNA, 19 bp, Homo sapiens
  siRNA target sequence for CHC1L (NM_001268.2,617-635).
cgtccagagcaccattgaa

SEQ ID NO: 129927 - DNA, 19 bp, Homo sapiens
  siRNA target sequence for CHC1L (NM_001268.2,637-655).
ctcggagactggattcttt

SEQ ID NO: 129928 - DNA, 19 bp, Homo sapiens
  siRNA target sequence for CHC1L (NM_001268.2,688-706).
ggagtggtccacatattgt

SEQ ID NO: 129929 - DNA, 19 bp, Homo sapiens
  siRNA target sequence for CHC1L (NM_001268.2,736-754).
cctggggtcataatgctta

SEQ ID NO: 129930 - DNA, 19 bp, Homo sapiens
  siRNA target sequence for CHC1L (NM_001268.2,737-755).
ctggggtcataatgcttat

SEQ ID NO: 129931 - DNA, 19 bp, Homo sapiens
  siRNA target sequence for CHC1L (NM_001268.2,762-780).
ctgggcaatgggacaacta

SEQ ID NO: 129932 - DNA, 19 bp, Homo sapiens
  siRNA target sequence for CHC1L (NM_001268.2,772-790).
ggacaactaatcatggttt

SEQ ID NO: 129933 - DNA, 19 bp, Homo sapiens
  siRNA target sequence for CHC1L (NM_001268.2,773-791).
gacaactaatcatggttta

SEQ ID NO: 129934 - DNA, 19 bp, Homo sapiens
  siRNA target sequence for CHC1L (NM_001268.2,792-810).
gtgccctgtcatatctcta

SEQ ID NO: 129935 - DNA, 19 bp, Homo sapiens
  siRNA target sequence for CHC1L (NM_001268.2,811-829).
ctaatctgtcaaacaaaca

SEQ ID NO: 129936 - DNA, 19 bp, Homo sapiens
  siRNA target sequence for CHC1L (NM_001268.2,847-865).
gtgggtcttaccattcttt

SEQ ID NO: 129937 - DNA, 19 bp, Homo sapiens
  siRNA target sequence for CHC1L (NM_001268.2,896-914).
ctggggttataataactct

SEQ ID NO: 129938 - DNA, 19 bp, Homo sapiens
  siRNA target sequence for CHC1L (NM_001268.2,967-985).
ctggctgcctacaaaataa

SEQ ID NO: 129939 - DNA, 19 bp, Homo sapiens
  siRNA target sequence for CHC1L (NM_001268.2,1016-1034).
gtgctgcatggcagtagta

SEQ ID NO: 129940 - DNA, 19 bp, Homo sapiens
  siRNA target sequence for CHC1L (NM_001268.2,1018-1036).
gctgcatggcagtagtaga

SEQ ID NO: 129941 - DNA, 19 bp, Homo sapiens
  siRNA target sequence for CHC1L (NM_001268.2,1165-1183).
gctacgcacacacattagt

SEQ ID NO: 129942 - DNA, 19 bp, Homo sapiens
  siRNA target sequence for CHC1L (NM_001268.2,1166-1184).
ctacgcacacacattagta

SEQ ID NO: 129943 - DNA, 19 bp, Homo sapiens
  siRNA target sequence for CHC1L (NM_001268.2,1169-1187).
cgcacacacattagtatta

SEQ ID NO: 129944 - DNA, 19 bp, Homo sapiens
  siRNA target sequence for CHC1L (NM_001268.2,1591-1609).
cacataaagtccttctcaa

SEQ ID NO: 129945 - DNA, 19 bp, Homo sapiens
  siRNA target sequence for CHC1L (NM_001268.2,1599-1617).
gtccttctcaagattcgat

SEQ ID NO: 129946 - DNA, 19 bp, Homo sapiens
  siRNA target sequence for CHC1L (NM_001268.2,1610-1628).
gattcgatgtgagcatttt

SEQ ID NO: 129947 - DNA, 19 bp, Homo sapiens
  siRNA target sequence for CHC1L (NM_001268.2,1614-1632).
cgatgtgagcattttcgtt

SEQ ID NO: 129948 - DNA, 19 bp, Homo sapiens
  siRNA target sequence for CHC1L (NM_001268.2,1629-1647).
cgttcgtcattggaagata

SEQ ID NO: 129949 - DNA, 19 bp, Homo sapiens
  siRNA target sequence for CHC1L (NM_001268.2,1630-1648).
gttcgtcattggaagataa

SEQ ID NO: 129950 - DNA, 19 bp, Homo sapiens
  siRNA target sequence for CHC1L (NM_001268.2,1633-1651).
cgtcattggaagataacga

SEQ ID NO: 129951 - DNA, 19 bp, Homo sapiens
  siRNA target sequence for CHC1L (NM_001268.2,1670-1688).
gagtgaattttcatatcct

SEQ ID NO: 129952 - DNA, 19 bp, Homo sapiens
  siRNA target sequence for CHC1L (NM_001268.2,1697-1715).
ggccttcctggaataccta

SEQ ID NO: 129953 - DNA, 19 bp, Homo sapiens
  siRNA target sequence for CHC1L (NM_001268.2,1703-1721).
cctggaatacctatacaca

SEQ ID NO: 129954 - DNA, 19 bp, Homo sapiens
  siRNA target sequence for CHC1L (NM_001268.2,1750-1768).
cagtaggactgctagactt

SEQ ID NO: 129955 - DNA, 19 bp, Homo sapiens
  siRNA target sequence for CHC1L (NM_001268.2,1760-1778).
gctagacttggctacattt

SEQ ID NO: 129956 - DNA, 19 bp, Homo sapiens
  siRNA target sequence for CHC1L (NM_001268.2,1761-1779).
ctagacttggctacatttt

SEQ ID NO: 129957 - DNA, 19 bp, Homo sapiens
  siRNA target sequence for CHC1L (NM_001268.2,1764-1782).
gacttggctacattttata

SEQ ID NO: 129958 - DNA, 19 bp, Homo sapiens
  siRNA target sequence for CHC1L (NM_001268.2,1803-1821).
ctctgccaacaaactatca

SEQ ID NO: 129959 - DNA, 19 bp, Homo sapiens
  siRNA target sequence for CHC1L (NM_001268.2,1859-1877).
ctcggctgcggtgaagtat

SEQ ID NO: 129960 - DNA, 19 bp, Homo sapiens
  siRNA target sequence for CHC1L (NM_001268.2,1901-1919).
ctgcttcaggttttgcata

SEQ ID NO: 129961 - DNA, 19 bp, Homo sapiens
  siRNA target sequence for CHC1L (NM_001268.2,1907-1925).
caggttttgcataaaccat

SEQ ID NO: 129962 - DNA, 19 bp, Homo sapiens
  siRNA target sequence for CHC1L (NM_001268.2,1922-1940).
ccatctgactgtagtaaca

SEQ ID NO: 129963 - DNA, 19 bp, Homo sapiens
  siRNA target sequence for CHC1L (NM_001268.2,1971-1989).
gatctcctgaagaacttta

SEQ ID NO: 129964 - DNA, 19 bp, Homo sapiens
  siRNA target sequence for CHC1L (NM_001268.2,2007-2025).
gttggagcctttaaaaatt

SEQ ID NO: 129965 - DNA, 19 bp, Homo sapiens
  siRNA target sequence for CIB1 (NM_006384.2,155-173).
cccacaggcggttttgtga

SEQ ID NO: 129966 - DNA, 19 bp, Homo sapiens
  siRNA target sequence for CIB1 (NM_006384.2,311-329).
ccaaagacagccttagctt

SEQ ID NO: 129967 - DNA, 19 bp, Homo sapiens
  siRNA target sequence for CIB1 (NM_006384.2,368-386).
cagccacgccagacatcaa

SEQ ID NO: 129968 - DNA, 19 bp, Homo sapiens
  siRNA target sequence for CIB1 (NM_006384.2,370-388).
gccacgccagacatcaagt

SEQ ID NO: 129969 - DNA, 19 bp, Homo sapiens
  siRNA target sequence for CIB1 (NM_006384.2,421-439).
gatgacggaaccttgaaca

SEQ ID NO: 129970 - DNA, 19 bp, Homo sapiens
  siRNA target sequence for CKN1 (NM_000082.1,100-118).
gagtcaacacggagagttt

SEQ ID NO: 129971 - DNA, 19 bp, Homo sapiens
  siRNA target sequence for CKN1 (NM_000082.1,122-140).
gactggaattaaataaaga

SEQ ID NO: 129972 - DNA, 19 bp, Homo sapiens
  siRNA target sequence for CKN1 (NM_000082.1,160-178).
cacggcggtggaattaaca

SEQ ID NO: 129973 - DNA, 19 bp, Homo sapiens
  siRNA target sequence for CKN1 (NM_000082.1,170-188).
gaattaacacccttgacat

SEQ ID NO: 129974 - DNA, 19 bp, Homo sapiens
  siRNA target sequence for CKN1 (NM_000082.1,193-211).
cctgttgaagggagataca

SEQ ID NO: 129975 - DNA, 19 bp, Homo sapiens
  siRNA target sequence for CKN1 (NM_000082.1,229-247).
gatggtgtgattgtacttt

SEQ ID NO: 129976 - DNA, 19 bp, Homo sapiens
  siRNA target sequence for CKN1 (NM_000082.1,267-285).
cagacaatcttattacaca

SEQ ID NO: 129977 - DNA, 19 bp, Homo sapiens
  siRNA target sequence for CKN1 (NM_000082.1,319-337).
cctgatgttcacagataca

SEQ ID NO: 129978 - DNA, 19 bp, Homo sapiens
  siRNA target sequence for CKN1 (NM_000082.1,383-401).
catcaagctcatttgataa

SEQ ID NO: 129979 - DNA, 19 bp, Homo sapiens
  siRNA target sequence for CKN1 (NM_000082.1,406-424).
ctgaaagtatgggatacaa

SEQ ID NO: 129980 - DNA, 19 bp, Homo sapiens
  siRNA target sequence for CKN1 (NM_000082.1,412-430).
gtatgggatacaaatacat

SEQ ID NO: 129981 - DNA, 19 bp, Homo sapiens
  siRNA target sequence for CKN1 (NM_000082.1,433-451).
caaactgcagatgtattta

SEQ ID NO: 129982 - DNA, 19 bp, Homo sapiens
  siRNA target sequence for CKN1 (NM_000082.1,466-484).
gtttatagtcatcatatgt

SEQ ID NO: 129983 - DNA, 19 bp, Homo sapiens
  siRNA target sequence for CKN1 (NM_000082.1,524-542).
ctagaggacccaaagtaca

SEQ ID NO: 129984 - DNA, 19 bp, Homo sapiens
  siRNA target sequence for CKN1 (NM_000082.1,541-559).
caactttgtgacttgaagt

SEQ ID NO: 129985 - DNA, 19 bp, Homo sapiens
  siRNA target sequence for CKN1 (NM_000082.1,585-603).
gggtcacagacaagaaata

SEQ ID NO: 129986 - DNA, 19 bp, Homo sapiens
  siRNA target sequence for CKN1 (NM_000082.1,614-632).
cctggtctccacgttatga

SEQ ID NO: 129987 - DNA, 19 bp, Homo sapiens
  siRNA target sequence for CKN1 (NM_000082.1,617-635).
ggtctccacgttatgacta

SEQ ID NO: 129988 - DNA, 19 bp, Homo sapiens
  siRNA target sequence for CKN1 (NM_000082.1,620-638).
ctccacgttatgactatat

SEQ ID NO: 129989 - DNA, 19 bp, Homo sapiens
  siRNA target sequence for CKN1 (NM_000082.1,622-640).
ccacgttatgactatatct

SEQ ID NO: 129990 - DNA, 19 bp, Homo sapiens
  siRNA target sequence for CKN1 (NM_000082.1,623-641).
cacgttatgactatatctt

SEQ ID NO: 129991 - DNA, 19 bp, Homo sapiens
  siRNA target sequence for CKN1 (NM_000082.1,656-674).
ctgacagtagagtaaaatt

SEQ ID NO: 129992 - DNA, 19 bp, Homo sapiens
  siRNA target sequence for CKN1 (NM_000082.1,695-713).
caggatgtttgattactct

SEQ ID NO: 129993 - DNA, 19 bp, Homo sapiens
  siRNA target sequence for CKN1 (NM_000082.1,701-719).
gtttgattactcttgatca

SEQ ID NO: 129994 - DNA, 19 bp, Homo sapiens
  siRNA target sequence for CKN1 (NM_000082.1,705-723).
gattactcttgatcaacat

SEQ ID NO: 129995 - DNA, 19 bp, Homo sapiens
  siRNA target sequence for CKN1 (NM_000082.1,735-753).
gtcacaagctgttgaatca

SEQ ID NO: 129996 - DNA, 19 bp, Homo sapiens
  siRNA target sequence for CKN1 (NM_000082.1,752-770).
cagcaaacactgctcataa

SEQ ID NO: 129997 - DNA, 19 bp, Homo sapiens
  siRNA target sequence for CKN1 (NM_000082.1,763-781).
gctcataatgggaaagtta

SEQ ID NO: 129998 - DNA, 19 bp, Homo sapiens
  siRNA target sequence for CKN1 (NM_000082.1,817-835).
ctcactgttggtacagata

SEQ ID NO: 129999 - DNA, 19 bp, Homo sapiens
  siRNA target sequence for CKN1 (NM_000082.1,819-837).
cactgttggtacagataat

SEQ ID NO: 130000 - DNA, 19 bp, Homo sapiens
  siRNA target sequence for CKN1 (NM_000082.1,823-841).
gttggtacagataatcgaa

SEQ ID NO: 130001 - DNA, 19 bp, Homo sapiens
  siRNA target sequence for CKN1 (NM_000082.1,838-856).
cgaatgaggctctggaata

SEQ ID NO: 130002 - DNA, 19 bp, Homo sapiens
  siRNA target sequence for CKN1 (NM_000082.1,846-864).
gctctggaatagttccaat

SEQ ID NO: 130003 - DNA, 19 bp, Homo sapiens
  siRNA target sequence for CKN1 (NM_000082.1,889-907).
ggaaaagtttgtaataaca

SEQ ID NO: 130004 - DNA, 19 bp, Homo sapiens
  siRNA target sequence for CKN1 (NM_000082.1,974-992).
gtagcaccattgctgttta

SEQ ID NO: 130005 - DNA, 19 bp, Homo sapiens
  siRNA target sequence for CKN1 (NM_000082.1,978-996).
caccattgctgtttataca

SEQ ID NO: 130006 - DNA, 19 bp, Homo sapiens
  siRNA target sequence for CKN1 (NM_000082.1,1004-1022).
caggagaacagataactat

SEQ ID NO: 130007 - DNA, 19 bp, Homo sapiens
  siRNA target sequence for CKN1 (NM_000082.1,1009-1027).
gaacagataactatgctta

SEQ ID NO: 130008 - DNA, 19 bp, Homo sapiens
  siRNA target sequence for CKN1 (NM_000082.1,1052-1070).
gctgtgtatttcagtcaaa

SEQ ID NO: 130009 - DNA, 19 bp, Homo sapiens
  siRNA target sequence for CKN1 (NM_000082.1,1053-1071).
ctgtgtatttcagtcaaat

SEQ ID NO: 130010 - DNA, 19 bp, Homo sapiens
  siRNA target sequence for CKN1 (NM_000082.1,1094-1112).
gcagagactgcaacattct

SEQ ID NO: 130011 - DNA, 19 bp, Homo sapiens
  siRNA target sequence for CKN1 (NM_000082.1,1118-1136).
gggttccatccttatatga

SEQ ID NO: 130012 - DNA, 19 bp, Homo sapiens
  siRNA target sequence for CKN1 (NM_000082.1,1150-1168).
gatgatgagactacaacaa

SEQ ID NO: 130013 - DNA, 19 bp, Homo sapiens
  siRNA target sequence for CKTSF1B1 (NM_013372.4,121-139).
cggctgctgaagggaaaaa

SEQ ID NO: 130014 - DNA, 19 bp, Homo sapiens
  siRNA target sequence for CKTSF1B1 (NM_013372.4,581-599).
gaagcagtgtcgttgcata

SEQ ID NO: 130015 - DNA, 19 bp, Homo sapiens
  siRNA target sequence for CKTSF1B1 (NM_013372.4,585-603).
cagtgtcgttgcatatcca

SEQ ID NO: 130016 - DNA, 19 bp, Homo sapiens
  siRNA target sequence for CKTSF1B1 (NM_013372.4,591-609).
cgttgcatatccatcgatt

SEQ ID NO: 130017 - DNA, 19 bp, Homo sapiens
  siRNA target sequence for CKTSF1B1 (NM_013372.4,592-610).
gttgcatatccatcgattt

SEQ ID NO: 130018 - DNA, 19 bp, Homo sapiens
  siRNA target sequence for CKTSF1B1 (NM_013372.4,595-613).
gcatatccatcgatttgga

SEQ ID NO: 130019 - DNA, 19 bp, Homo sapiens
  siRNA target sequence for CKTSF1B1 (NM_013372.4,596-614).
catatccatcgatttggat

SEQ ID NO: 130020 - DNA, 19 bp, Homo sapiens
  siRNA target sequence for CLSPN (NM_022111.2,100-118).
ctgaggttcacctagaaat

SEQ ID NO: 130021 - DNA, 19 bp, Homo sapiens
  siRNA target sequence for CLSPN (NM_022111.2,176-194).
gggcagctatgaaacaatt

SEQ ID NO: 130022 - DNA, 19 bp, Homo sapiens
  siRNA target sequence for CLSPN (NM_022111.2,179-197).
cagctatgaaacaattgga

SEQ ID NO: 130023 - DNA, 19 bp, Homo sapiens
  siRNA target sequence for CLSPN (NM_022111.2,328-346).
gtgccgaggaggaaaataa

SEQ ID NO: 130024 - DNA, 19 bp, Homo sapiens
  siRNA target sequence for CLSPN (NM_022111.2,401-419).
ggcagacagtgatgaaagt

SEQ ID NO: 130025 - DNA, 19 bp, Homo sapiens
  siRNA target sequence for CLSPN (NM_022111.2,486-504).
cttcagtctggaaactcta

SEQ ID NO: 130026 - DNA, 19 bp, Homo sapiens
  siRNA target sequence for CLSPN (NM_022111.2,529-547).
gttccaaaaagcacataca

SEQ ID NO: 130027 - DNA, 19 bp, Homo sapiens
  siRNA target sequence for CLSPN (NM_022111.2,539-557).
gcacatacatgataaagaa

SEQ ID NO: 130028 - DNA, 19 bp, Homo sapiens
  siRNA target sequence for CLSPN (NM_022111.2,697-715).
gctgtcttcttgtggataa

SEQ ID NO: 130029 - DNA, 19 bp, Homo sapiens
  siRNA target sequence for CLSPN (NM_022111.2,847-865).
gtggggtccattcatttga

SEQ ID NO: 130030 - DNA, 19 bp, Homo sapiens
  siRNA target sequence for CLSPN (NM_022111.2,956-974).
gactcagcgccttattcga

SEQ ID NO: 130031 - DNA, 19 bp, Homo sapiens
  siRNA target sequence for CLSPN (NM_022111.2,979-997).
ctgcactgaaccttccata

SEQ ID NO: 130032 - DNA, 19 bp, Homo sapiens
  siRNA target sequence for CLSPN (NM_022111.2,982-1000).
cactgaaccttccatatca

SEQ ID NO: 130033 - DNA, 19 bp, Homo sapiens
  siRNA target sequence for CLSPN (NM_022111.2,1023-1041).
catgatttcttcaaacgta

SEQ ID NO: 130034 - DNA, 19 bp, Homo sapiens
  siRNA target sequence for CLSPN (NM_022111.2,1068-1086).
gccatggcactattgaagt

SEQ ID NO: 130035 - DNA, 19 bp, Homo sapiens
  siRNA target sequence for CLSPN (NM_022111.2,1077-1095).
ctattgaagtcatctaaat

SEQ ID NO: 130036 - DNA, 19 bp, Homo sapiens
  siRNA target sequence for CLSPN (NM_022111.2,1151-1169).
cagtgatcaccatagtaaa

SEQ ID NO: 130037 - DNA, 19 bp, Homo sapiens
  siRNA target sequence for CLSPN (NM_022111.2,1155-1173).
gatcaccatagtaaaggtt

SEQ ID NO: 130038 - DNA, 19 bp, Homo sapiens
  siRNA target sequence for CLSPN (NM_022111.2,1216-1234).
cactccctgtagtttcaaa

SEQ ID NO: 130039 - DNA, 19 bp, Homo sapiens
  siRNA target sequence for CLSPN (NM_022111.2,1277-1295).
ggatttggtaaaaaatgaa

SEQ ID NO: 130040 - DNA, 19 bp, Homo sapiens
  siRNA target sequence for CLSPN (NM_022111.2,1376-1394).
caacttcctcgggaacaat

SEQ ID NO: 130041 - DNA, 19 bp, Homo sapiens
  siRNA target sequence for CLSPN (NM_022111.2,1574-1592).
gcaactgggagtagatgtt

SEQ ID NO: 130042 - DNA, 19 bp, Homo sapiens
  siRNA target sequence for CLSPN (NM_022111.2,1606-1624).
ggctaggtgctgatgaaga

SEQ ID NO: 130043 - DNA, 19 bp, Homo sapiens
  siRNA target sequence for CLSPN (NM_022111.2,1607-1625).
gctaggtgctgatgaagat

SEQ ID NO: 130044 - DNA, 19 bp, Homo sapiens
  siRNA target sequence for CLSPN (NM_022111.2,1612-1630).
gtgctgatgaagattcctt

SEQ ID NO: 130045 - DNA, 19 bp, Homo sapiens
  siRNA target sequence for CLSPN (NM_022111.2,1718-1736).
ggctggtcagacagtgaat

SEQ ID NO: 130046 - DNA, 19 bp, Homo sapiens
  siRNA target sequence for CLSPN (NM_022111.2,1720-1738).
ctggtcagacagtgaatgt

SEQ ID NO: 130047 - DNA, 19 bp, Homo sapiens
  siRNA target sequence for CLSPN (NM_022111.2,1860-1878).
cttcaggtgttaaaagcta

SEQ ID NO: 130048 - DNA, 19 bp, Homo sapiens
  siRNA target sequence for CLSPN (NM_022111.2,1922-1940).
gaagcgccaagcactgttt

SEQ ID NO: 130049 - DNA, 19 bp, Homo sapiens
  siRNA target sequence for CLSPN (NM_022111.2,1926-1944).
cgccaagcactgtttaaat

SEQ ID NO: 130050 - DNA, 19 bp, Homo sapiens
  siRNA target sequence for CLSPN (NM_022111.2,1932-1950).
gcactgtttaaattagata

SEQ ID NO: 130051 - DNA, 19 bp, Homo sapiens
  siRNA target sequence for CLSPN (NM_022111.2,2112-2130).
gcagaattccttcttagta

SEQ ID NO: 130052 - DNA, 19 bp, Homo sapiens
  siRNA target sequence for CLSPN (NM_022111.2,2228-2246).
caagtctctctcatcagat

SEQ ID NO: 130053 - DNA, 19 bp, Homo sapiens
  siRNA target sequence for CLSPN (NM_022111.2,2231-2249).
gtctctctcatcagattct

SEQ ID NO: 130054 - DNA, 19 bp, Homo sapiens
  siRNA target sequence for CLSPN (NM_022111.2,2285-2303).
gggttactttcctactgaa

SEQ ID NO: 130055 - DNA, 19 bp, Homo sapiens
  siRNA target sequence for CLSPN (NM_022111.2,2349-2367).
ctggatgaggatgattcat

SEQ ID NO: 130056 - DNA, 19 bp, Homo sapiens
  siRNA target sequence for CLSPN (NM_022111.2,2351-2369).
ggatgaggatgattcatgt

SEQ ID NO: 130057 - DNA, 19 bp, Homo sapiens
  siRNA target sequence for CLSPN (NM_022111.2,2352-2370).
gatgaggatgattcatgtt

SEQ ID NO: 130058 - DNA, 19 bp, Homo sapiens
  siRNA target sequence for CLSPN (NM_022111.2,2420-2438).
ctccacgattccatcctat

SEQ ID NO: 130059 - DNA, 19 bp, Homo sapiens
  siRNA target sequence for CLSPN (NM_022111.2,2441-2459).
gccttgcaacagacaaaca

SEQ ID NO: 130060 - DNA, 19 bp, Homo sapiens
  siRNA target sequence for CLSPN (NM_022111.2,2460-2478).
ggccgtgggaccagttttt

SEQ ID NO: 130061 - DNA, 19 bp, Homo sapiens
  siRNA target sequence for CLSPN (NM_022111.2,2592-2610).
gattcccaggatctgtata

SEQ ID NO: 130062 - DNA, 19 bp, Homo sapiens
  siRNA target sequence for CLSPN (NM_022111.2,2619-2637).
ccagagcctaagacacttt

SEQ ID NO: 130063 - DNA, 19 bp, Homo sapiens
  siRNA target sequence for CLSPN (NM_022111.2,2624-2642).
gcctaagacacttttccta

SEQ ID NO: 130064 - DNA, 19 bp, Homo sapiens
  siRNA target sequence for CLSPN (NM_022111.2,2649-2667).
ggagacttccagttctgtt

SEQ ID NO: 130065 - DNA, 19 bp, Homo sapiens
  siRNA target sequence for CLSPN (NM_022111.2,2657-2675).
ccagttctgtttagaagat

SEQ ID NO: 130066 - DNA, 19 bp, Homo sapiens
  siRNA target sequence for CLSPN (NM_022111.2,2701-2719).
cagatgggttcttaaatgt

SEQ ID NO: 130067 - DNA, 19 bp, Homo sapiens
  siRNA target sequence for CLSPN (NM_022111.2,2703-2721).
gatgggttcttaaatgtta

SEQ ID NO: 130068 - DNA, 19 bp, Homo sapiens
  siRNA target sequence for CLSPN (NM_022111.2,2706-2724).
gggttcttaaatgttagaa

SEQ ID NO: 130069 - DNA, 19 bp, Homo sapiens
  siRNA target sequence for CLSPN (NM_022111.2,2762-2780).
gccattggccagtatggat

SEQ ID NO: 130070 - DNA, 19 bp, Homo sapiens
  siRNA target sequence for CLSPN (NM_022111.2,2805-2823).
gatgagctgttggatttgt

SEQ ID NO: 130071 - DNA, 19 bp, Homo sapiens
  siRNA target sequence for CLSPN (NM_022111.2,2892-2910).
gaggaacttctgaaccttt

SEQ ID NO: 130072 - DNA, 19 bp, Homo sapiens
  siRNA target sequence for CLSPN (NM_022111.2,2950-2968).
cctcatcagagttaaataa

SEQ ID NO: 130073 - DNA, 19 bp, Homo sapiens
  siRNA target sequence for CLSPN (NM_022111.2,2983-3001).
gcagcatgggtgatccaat

SEQ ID NO: 130074 - DNA, 19 bp, Homo sapiens
  siRNA target sequence for CLSPN (NM_022111.2,2987-3005).
catgggtgatccaatggaa

SEQ ID NO: 130075 - DNA, 19 bp, Homo sapiens
  siRNA target sequence for CLSPN (NM_022111.2,3075-3093).
ggagactttcggcttgttt

SEQ ID NO: 130076 - DNA, 19 bp, Homo sapiens
  siRNA target sequence for CLSPN (NM_022111.2,3080-3098).
ctttcggcttgtttcaaat

SEQ ID NO: 130077 - DNA, 19 bp, Homo sapiens
  siRNA target sequence for CLSPN (NM_022111.2,3085-3103).
ggcttgtttcaaatgataa

SEQ ID NO: 130078 - DNA, 19 bp, Homo sapiens
  siRNA target sequence for CLSPN (NM_022111.2,3133-3151).
gtgactctggtaatgatct

SEQ ID NO: 130079 - DNA, 19 bp, Homo sapiens
  siRNA target sequence for CLSPN (NM_022111.2,3197-3215).
gcgatctgagaagttgaaa

SEQ ID NO: 130080 - DNA, 19 bp, Homo sapiens
  siRNA target sequence for CLSPN (NM_022111.2,3323-3341).
ggacgtaattgatgaagta

SEQ ID NO: 130081 - DNA, 19 bp, Homo sapiens
  siRNA target sequence for CLSPN (NM_022111.2,3326-3344).
cgtaattgatgaagtactt

SEQ ID NO: 130082 - DNA, 19 bp, Homo sapiens
  siRNA target sequence for CLSPN (NM_022111.2,3360-3378).
ctgcagagtcaaatcaaga

SEQ ID NO: 130083 - DNA, 19 bp, Homo sapiens
  siRNA target sequence for CLSPN (NM_022111.2,3415-3433).
gacagctacgtttatacca

SEQ ID NO: 130084 - DNA, 19 bp, Homo sapiens
  siRNA target sequence for CLSPN (NM_022111.2,3480-3498).
cgaatgaggaagtttcgat

SEQ ID NO: 130085 - DNA, 19 bp, Homo sapiens
  siRNA target sequence for CLSPN (NM_022111.2,3684-3702).
gaggacagtcagtttatga

SEQ ID NO: 130086 - DNA, 19 bp, Homo sapiens
  siRNA target sequence for CLSPN (NM_022111.2,3744-3762).
gccagtcgccctatggtta

SEQ ID NO: 130087 - DNA, 19 bp, Homo sapiens
  siRNA target sequence for CLSPN (NM_022111.2,3745-3763).
ccagtcgccctatggttat

SEQ ID NO: 130088 - DNA, 19 bp, Homo sapiens
  siRNA target sequence for CLSPN (NM_022111.2,3746-3764).
cagtcgccctatggttatt

SEQ ID NO: 130089 - DNA, 19 bp, Homo sapiens
  siRNA target sequence for CLSPN (NM_022111.2,3748-3766).
gtcgccctatggttattca

SEQ ID NO: 130090 - DNA, 19 bp, Homo sapiens
  siRNA target sequence for CLSPN (NM_022111.2,3776-3794).
gtctttgctcagaaatcct

SEQ ID NO: 130091 - DNA, 19 bp, Homo sapiens
  siRNA target sequence for CLSPN (NM_022111.2,3835-3853).
caggctcactgctaaacca

SEQ ID NO: 130092 - DNA, 19 bp, Homo sapiens
  siRNA target sequence for CLSPN (NM_022111.2,3900-3918).
cccagtgctcctcgaaatt

SEQ ID NO: 130093 - DNA, 19 bp, Homo sapiens
  siRNA target sequence for CLSPN (NM_022111.2,3910-3928).
ctcgaaattcaagaaactt

SEQ ID NO: 130094 - DNA, 19 bp, Homo sapiens
  siRNA target sequence for CLSPN (NM_022111.2,3957-3975).
gctgaggcggcaaaggaat

SEQ ID NO: 130095 - DNA, 19 bp, Homo sapiens
  siRNA target sequence for CLSPN (NM_022111.2,3966-3984).
gcaaaggaatcgtctaagt

SEQ ID NO: 130096 - DNA, 19 bp, Homo sapiens
  siRNA target sequence for CLSPN (NM_022111.2,3976-3994).
cgtctaagtctcaggtaaa

SEQ ID NO: 130097 - DNA, 19 bp, Homo sapiens
  siRNA target sequence for CLSPN (NM_022111.2,4030-4048).
ctaagcacctcaaaacaga

SEQ ID NO: 130098 - DNA, 19 bp, Homo sapiens
  siRNA target sequence for CLSPN (NM_022111.2,4034-4052).
gcacctcaaaacagatgat

SEQ ID NO: 130099 - DNA, 19 bp, Homo sapiens
  siRNA target sequence for CLSPN (NM_022111.2,4069-4087).
cgcgaagcatcttcaaata

SEQ ID NO: 130100 - DNA, 19 bp, Homo sapiens
  siRNA target sequence for CLSPN (NM_022111.2,4070-4088).
gcgaagcatcttcaaatat

SEQ ID NO: 130101 - DNA, 19 bp, Homo sapiens
  siRNA target sequence for CNK1 (NM_006314.1,350-368).
ccaagacccctattgatgt

SEQ ID NO: 130102 - DNA, 19 bp, Homo sapiens
  siRNA target sequence for CNK1 (NM_006314.1,1147-1165).
cctgttggtcggaagaaat

SEQ ID NO: 130103 - DNA, 19 bp, Homo sapiens
  siRNA target sequence for CNK1 (NM_006314.1,1355-1373).
ctgagggcctcatcaatgt

SEQ ID NO: 130104 - DNA, 19 bp, Homo sapiens
  siRNA target sequence for CNK1 (NM_006314.1,1368-1386).
caatgtctccaactatagt

SEQ ID NO: 130105 - DNA, 19 bp, Homo sapiens
  siRNA target sequence for CNK1 (NM_006314.1,1491-1509).
gtgggtgcgtcatctcatt

SEQ ID NO: 130106 - DNA, 19 bp, Homo sapiens
  siRNA target sequence for CRHBP (NM_001882.2,96-114).
gtcgcccaacttcaaactt

SEQ ID NO: 130107 - DNA, 19 bp, Homo sapiens
  siRNA target sequence for CRHBP (NM_001882.2,98-116).
cgcccaacttcaaacttca

SEQ ID NO: 130108 - DNA, 19 bp, Homo sapiens
  siRNA target sequence for CRHBP (NM_001882.2,135-153).
cttcctgacggctctaaga

SEQ ID NO: 130109 - DNA, 19 bp, Homo sapiens
  siRNA target sequence for CRHBP (NM_001882.2,353-371).
gcgagcccgaggagttcat

SEQ ID NO: 130110 - DNA, 19 bp, Homo sapiens
  siRNA target sequence for CRHBP (NM_001882.2,354-372).
cgagcccgaggagttcatt

SEQ ID NO: 130111 - DNA, 19 bp, Homo sapiens
  siRNA target sequence for CRHBP (NM_001882.2,355-373).
gagcccgaggagttcatta

SEQ ID NO: 130112 - DNA, 19 bp, Homo sapiens
  siRNA target sequence for CRHBP (NM_001882.2,358-376).
cccgaggagttcattacca

SEQ ID NO: 130113 - DNA, 19 bp, Homo sapiens
  siRNA target sequence for CRHBP (NM_001882.2,359-377).
ccgaggagttcattaccat

SEQ ID NO: 130114 - DNA, 19 bp, Homo sapiens
  siRNA target sequence for CRHBP (NM_001882.2,413-431).
gcgacttcctgaaggtatt

SEQ ID NO: 130115 - DNA, 19 bp, Homo sapiens
  siRNA target sequence for CRHBP (NM_001882.2,426-444).
ggtatttgatggttggatt

SEQ ID NO: 130116 - DNA, 19 bp, Homo sapiens
  siRNA target sequence for CRHBP (NM_001882.2,489-507).
ctcagctgagcggtacata

SEQ ID NO: 130117 - DNA, 19 bp, Homo sapiens
  siRNA target sequence for CRHBP (NM_001882.2,493-511).
gctgagcggtacatagatt

SEQ ID NO: 130118 - DNA, 19 bp, Homo sapiens
  siRNA target sequence for CRHBP (NM_001882.2,494-512).
ctgagcggtacatagattt

SEQ ID NO: 130119 - DNA, 19 bp, Homo sapiens
  siRNA target sequence for CRHBP (NM_001882.2,496-514).
gagcggtacatagatttct

SEQ ID NO: 130120 - DNA, 19 bp, Homo sapiens
  siRNA target sequence for CRHBP (NM_001882.2,498-516).
gcggtacatagatttctgt

SEQ ID NO: 130121 - DNA, 19 bp, Homo sapiens
  siRNA target sequence for CRHBP (NM_001882.2,589-607).
ccaggaaatggattcacat

SEQ ID NO: 130122 - DNA, 19 bp, Homo sapiens
  siRNA target sequence for CRHBP (NM_001882.2,592-610).
ggaaatggattcacattaa

SEQ ID NO: 130123 - DNA, 19 bp, Homo sapiens
  siRNA target sequence for CRHBP (NM_001882.2,599-617).
gattcacattaaccataaa

SEQ ID NO: 130124 - DNA, 19 bp, Homo sapiens
  siRNA target sequence for CRHBP (NM_001882.2,707-725).
gcagcttctccataattta

SEQ ID NO: 130125 - DNA, 19 bp, Homo sapiens
  siRNA target sequence for CRHBP (NM_001882.2,708-726).
cagcttctccataatttat

SEQ ID NO: 130126 - DNA, 19 bp, Homo sapiens
  siRNA target sequence for CRHBP (NM_001882.2,765-783).
cgtaaatggtcttcagtta

SEQ ID NO: 130127 - DNA, 19 bp, Homo sapiens
  siRNA target sequence for CRHBP (NM_001882.2,766-784).
gtaaatggtcttcagttaa

SEQ ID NO: 130128 - DNA, 19 bp, Homo sapiens
  siRNA target sequence for CRHBP (NM_001882.2,804-822).
cgagggaataggagacttt

SEQ ID NO: 130129 - DNA, 19 bp, Homo sapiens
  siRNA target sequence for CRHBP (NM_001882.2,858-876).
caagatgacgcctttagct

SEQ ID NO: 130130 - DNA, 19 bp, Homo sapiens
  siRNA target sequence for CRHBP (NM_001882.2,950-968).
ccagtggaaaacacgtaaa

SEQ ID NO: 130131 - DNA, 19 bp, Homo sapiens
  siRNA target sequence for CRHBP (NM_001882.2,1008-1026).
gctggaaaacccaaatgga

SEQ ID NO: 130132 - DNA, 19 bp, Homo sapiens
  siRNA target sequence for CRI1 (NM_014335.1,274-292).
ggaaacggagccttgctaa

SEQ ID NO: 130133 - DNA, 19 bp, Homo sapiens
  siRNA target sequence for CRI1 (NM_014335.1,350-368).
ggacgagggcgaggaattt

SEQ ID NO: 130134 - DNA, 19 bp, Homo sapiens
  siRNA target sequence for CRI1 (NM_014335.1,453-471).
gccgacaagatgtttctga

SEQ ID NO: 130135 - DNA, 19 bp, Homo sapiens
  siRNA target sequence for CRI1 (NM_014335.1,495-513).
ggcgggtttcagatgcatt

SEQ ID NO: 130136 - DNA, 19 bp, Homo sapiens
  siRNA target sequence for CRI1 (NM_014335.1,496-514).
gcgggtttcagatgcatta

SEQ ID NO: 130137 - DNA, 19 bp, Homo sapiens
  siRNA target sequence for CRI1 (NM_014335.1,497-515).
cgggtttcagatgcattat

SEQ ID NO: 130138 - DNA, 19 bp, Homo sapiens
  siRNA target sequence for CRI1 (NM_014335.1,525-543).
ccgtttgatcagttagctt

SEQ ID NO: 130139 - DNA, 19 bp, Homo sapiens
  siRNA target sequence for CRI1 (NM_014335.1,526-544).
cgtttgatcagttagcttt

SEQ ID NO: 130140 - DNA, 19 bp, Homo sapiens
  siRNA target sequence for CRI1 (NM_014335.1,541-559).
cttttatcgaagagctttt

SEQ ID NO: 130141 - DNA, 19 bp, Homo sapiens
  siRNA target sequence for CRI1 (NM_014335.1,594-612).
ctcggctgtgatgagatta

SEQ ID NO: 130142 - DNA, 19 bp, Homo sapiens
  siRNA target sequence for CRI1 (NM_014335.1,596-614).
cggctgtgatgagattatt

SEQ ID NO: 130143 - DNA, 19 bp, Homo sapiens
  siRNA target sequence for CTNNBIP1 (NM_020248.1,305-323).
cggaggagatgtacattca

SEQ ID NO: 130144 - DNA, 19 bp, Homo sapiens
  siRNA target sequence for DAG1 (NM_004393.1,657-675).
cctccagtggagatatcat

SEQ ID NO: 130145 - DNA, 19 bp, Homo sapiens
  siRNA target sequence for DAG1 (NM_004393.1,765-783).
ctgataagggtgtgcatta

SEQ ID NO: 130146 - DNA, 19 bp, Homo sapiens
  siRNA target sequence for DAG1 (NM_004393.1,983-1001).
gccgacctcaccaagatga

SEQ ID NO: 130147 - DNA, 19 bp, Homo sapiens
  siRNA target sequence for DAG1 (NM_004393.1,1036-1054).
gcggagcttctcagaagta

SEQ ID NO: 130148 - DNA, 19 bp, Homo sapiens
  siRNA target sequence for DAG1 (NM_004393.1,1052-1070).
gtagagcttcacaacatga

SEQ ID NO: 130149 - DNA, 19 bp, Homo sapiens
  siRNA target sequence for DAG1 (NM_004393.1,1076-1094).
gtgccggtggtgaataaca

SEQ ID NO: 130150 - DNA, 19 bp, Homo sapiens
  siRNA target sequence for DAG1 (NM_004393.1,1078-1096).
gccggtggtgaataacaga

SEQ ID NO: 130151 - DNA, 19 bp, Homo sapiens
  siRNA target sequence for DAG1 (NM_004393.1,1198-1216).
gaacagtgtgcctgacatt

SEQ ID NO: 130152 - DNA, 19 bp, Homo sapiens
  siRNA target sequence for DAG1 (NM_004393.1,1281-1299).
gttggcacatcgccaataa

SEQ ID NO: 130153 - DNA, 19 bp, Homo sapiens
  siRNA target sequence for DAG1 (NM_004393.1,1284-1302).
ggcacatcgccaataagaa

SEQ ID NO: 130154 - DNA, 19 bp, Homo sapiens
  siRNA target sequence for DAG1 (NM_004393.1,1506-1524).
ggactcgaggcgccattat

SEQ ID NO: 130155 - DNA, 19 bp, Homo sapiens
  siRNA target sequence for DAG1 (NM_004393.1,1507-1525).
gactcgaggcgccattatt

SEQ ID NO: 130156 - DNA, 19 bp, Homo sapiens
  siRNA target sequence for DAG1 (NM_004393.1,1509-1527).
ctcgaggcgccattattca

SEQ ID NO: 130157 - DNA, 19 bp, Homo sapiens
  siRNA target sequence for DAG1 (NM_004393.1,1511-1529).
cgaggcgccattattcaaa

SEQ ID NO: 130158 - DNA, 19 bp, Homo sapiens
  siRNA target sequence for DAG1 (NM_004393.1,1775-1793).
cgggtcaccaccaaagttt

SEQ ID NO: 130159 - DNA, 19 bp, Homo sapiens
  siRNA target sequence for DAG1 (NM_004393.1,1816-1834).
ctcaccgcctactcgtatt

SEQ ID NO: 130160 - DNA, 19 bp, Homo sapiens
  siRNA target sequence for DAG1 (NM_004393.1,1950-1968).
cgtcagacactttctatga

SEQ ID NO: 130161 - DNA, 19 bp, Homo sapiens
  siRNA target sequence for DAG1 (NM_004393.1,2062-2080).
caacagccagctcatgtat

SEQ ID NO: 130162 - DNA, 19 bp, Homo sapiens
  siRNA target sequence for DAG1 (NM_004393.1,2105-2123).
ggcaaacacgagtatttca

SEQ ID NO: 130163 - DNA, 19 bp, Homo sapiens
  siRNA target sequence for DAG1 (NM_004393.1,2106-2124).
gcaaacacgagtatttcat

SEQ ID NO: 130164 - DNA, 19 bp, Homo sapiens
  siRNA target sequence for DAG1 (NM_004393.1,2241-2259).
cggcactggtgttgaatga

SEQ ID NO: 130165 - DNA, 19 bp, Homo sapiens
  siRNA target sequence for DAG1 (NM_004393.1,2243-2261).
gcactggtgttgaatgaca

SEQ ID NO: 130166 - DNA, 19 bp, Homo sapiens
  siRNA target sequence for DAG1 (NM_004393.1,2244-2262).
cactggtgttgaatgacat

SEQ ID NO: 130167 - DNA, 19 bp, Homo sapiens
  siRNA target sequence for DAG1 (NM_004393.1,2363-2381).
gtggaatggaccaacaaca

SEQ ID NO: 130168 - DNA, 19 bp, Homo sapiens
  siRNA target sequence for DAG1 (NM_004393.1,2478-2496).
ccctagagcctgactttaa

SEQ ID NO: 130169 - DNA, 19 bp, Homo sapiens
  siRNA target sequence for DAG1 (NM_004393.1,2529-2547).
gttgtcggcacctacagtt

SEQ ID NO: 130170 - DNA, 19 bp, Homo sapiens
  siRNA target sequence for DAG1 (NM_004393.1,2532-2550).
gtcggcacctacagtttat

SEQ ID NO: 130171 - DNA, 19 bp, Homo sapiens
  siRNA target sequence for DAG1 (NM_004393.1,2686-2704).
gctcattgctggcatcatt

SEQ ID NO: 130172 - DNA, 19 bp, Homo sapiens
  siRNA target sequence for DAG1 (NM_004393.1,2832-2850).
ccagcatgccactcattct

SEQ ID NO: 130173 - DNA, 19 bp, Homo sapiens
  siRNA target sequence for DBT (NM_001918.1,482-500).
gtctcatgatgaacataca

SEQ ID NO: 130174 - DNA, 19 bp, Homo sapiens
  siRNA target sequence for DBT (NM_001918.1,484-502).
ctcatgatgaacatacaca

SEQ ID NO: 130175 - DNA, 19 bp, Homo sapiens
  siRNA target sequence for DBT (NM_001918.1,547-565).
gccgtctggcaatggaaaa

SEQ ID NO: 130176 - DNA, 19 bp, Homo sapiens
  siRNA target sequence for DBT (NM_001918.1,549-567).
cgtctggcaatggaaaaca

SEQ ID NO: 130177 - DNA, 19 bp, Homo sapiens
  siRNA target sequence for DBT (NM_001918.1,670-688).
cttcacccaaagttgaaat

SEQ ID NO: 130178 - DNA, 19 bp, Homo sapiens
  siRNA target sequence for DBT (NM_001918.1,716-734).
catgactgttcctatacta

SEQ ID NO: 130179 - DNA, 19 bp, Homo sapiens
  siRNA target sequence for DBT (NM_001918.1,719-737).
gactgttcctatactagta

SEQ ID NO: 130180 - DNA, 19 bp, Homo sapiens
  siRNA target sequence for DBT (NM_001918.1,778-796).
ccataaaaggctttcaaaa

SEQ ID NO: 130181 - DNA, 19 bp, Homo sapiens
  siRNA target sequence for DBT (NM_001918.1,798-816).
gcaatggtcaagactatgt

SEQ ID NO: 130182 - DNA, 19 bp, Homo sapiens
  siRNA target sequence for DBT (NM_001918.1,823-841).
ccctgaagatacctcattt

SEQ ID NO: 130183 - DNA, 19 bp, Homo sapiens
  siRNA target sequence for DBT (NM_001918.1,875-893).
ggttaagctccgagaagaa

SEQ ID NO: 130184 - DNA, 19 bp, Homo sapiens
  siRNA target sequence for DBT (NM_001918.1,906-924).
gcatttgctcgtggaatta

SEQ ID NO: 130185 - DNA, 19 bp, Homo sapiens
  siRNA target sequence for DBT (NM_001918.1,912-930).
gctcgtggaattaaactct

SEQ ID NO: 130186 - DNA, 19 bp, Homo sapiens
  siRNA target sequence for DBT (NM_001918.1,958-976).
cttccttgggattactaca

SEQ ID NO: 130187 - DNA, 19 bp, Homo sapiens
  siRNA target sequence for DBT (NM_001918.1,967-985).
gattactacagtttcctat

SEQ ID NO: 130188 - DNA, 19 bp, Homo sapiens
  siRNA target sequence for DBT (NM_001918.1,1010-1028).
ctgccagaatataacatat

SEQ ID NO: 130189 - DNA, 19 bp, Homo sapiens
  siRNA target sequence for DBT (NM_001918.1,1072-1090).
gtttgattgtccctaatgt

SEQ ID NO: 130190 - DNA, 19 bp, Homo sapiens
  siRNA target sequence for DBT (NM_001918.1,1082-1100).
ccctaatgtgaaaaatgtt

SEQ ID NO: 130191 - DNA, 19 bp, Homo sapiens
  siRNA target sequence for DBT (NM_001918.1,1098-1116).
gttcagatctgctctatat

SEQ ID NO: 130192 - DNA, 19 bp, Homo sapiens
  siRNA target sequence for DBT (NM_001918.1,1170-1188).
ctcagcaccactgatctta

SEQ ID NO: 130193 - DNA, 19 bp, Homo sapiens
  siRNA target sequence for DBT (NM_001918.1,1172-1190).
cagcaccactgatcttaca

SEQ ID NO: 130194 - DNA, 19 bp, Homo sapiens
  siRNA target sequence for DBT (NM_001918.1,1185-1203).
cttacaggaggaacattta

SEQ ID NO: 130195 - DNA, 19 bp, Homo sapiens
  siRNA target sequence for DBT (NM_001918.1,1235-1253).
ctttgccaaaccagtgata

SEQ ID NO: 130196 - DNA, 19 bp, Homo sapiens
  siRNA target sequence for DBT (NM_001918.1,1250-1268).
gataatgccacctgaagta

SEQ ID NO: 130197 - DNA, 19 bp, Homo sapiens
  siRNA target sequence for DBT (NM_001918.1,1297-1315).
ccattccccgatttaacca

SEQ ID NO: 130198 - DNA, 19 bp, Homo sapiens
  siRNA target sequence for DBT (NM_001918.1,1326-1344).
gtatataaggcacagataa

SEQ ID NO: 130199 - DNA, 19 bp, Homo sapiens
  siRNA target sequence for DBT (NM_001918.1,1360-1378).
cagctgatcacagagttat

SEQ ID NO: 130200 - DNA, 19 bp, Homo sapiens
  siRNA target sequence for DBT (NM_001918.1,1405-1423).
ccaatttgtggaaatccta

SEQ ID NO: 130201 - DNA, 19 bp, Homo sapiens
  siRNA target sequence for DBT (NM_001918.1,1406-1424).
caatttgtggaaatcctat

SEQ ID NO: 130202 - DNA, 19 bp, Homo sapiens
  siRNA target sequence for DBT (NM_001918.1,1435-1453).
cagcttttatgctactaga

SEQ ID NO: 130203 - DNA, 19 bp, Homo sapiens
  siRNA target sequence for DLC1 (NM_006094.3,336-354).
ccggacaccatgatcctaa

SEQ ID NO: 130204 - DNA, 19 bp, Homo sapiens
  siRNA target sequence for DLC1 (NM_006094.3,341-359).
caccatgatcctaacacaa

SEQ ID NO: 130205 - DNA, 19 bp, Homo sapiens
  siRNA target sequence for DLC1 (NM_006094.3,343-361).
ccatgatcctaacacaaat

SEQ ID NO: 130206 - DNA, 19 bp, Homo sapiens
  siRNA target sequence for DLC1 (NM_006094.3,434-452).
cctgttccccatcgatatt

SEQ ID NO: 130207 - DNA, 19 bp, Homo sapiens
  siRNA target sequence for DLC1 (NM_006094.3,435-453).
ctgttccccatcgatattt

SEQ ID NO: 130208 - DNA, 19 bp, Homo sapiens
  siRNA target sequence for DLC1 (NM_006094.3,466-484).
gagagcatgattttttgga

SEQ ID NO: 130209 - DNA, 19 bp, Homo sapiens
  siRNA target sequence for DLC1 (NM_006094.3,502-520).
ctctatgcaggcgtctaaa

SEQ ID NO: 130210 - DNA, 19 bp, Homo sapiens
  siRNA target sequence for DLC1 (NM_006094.3,508-526).
gcaggcgtctaaatacttt

SEQ ID NO: 130211 - DNA, 19 bp, Homo sapiens
  siRNA target sequence for DLC1 (NM_006094.3,509-527).
caggcgtctaaatacttta

SEQ ID NO: 130212 - DNA, 19 bp, Homo sapiens
  siRNA target sequence for DLC1 (NM_006094.3,511-529).
ggcgtctaaatactttaaa

SEQ ID NO: 130213 - DNA, 19 bp, Homo sapiens
  siRNA target sequence for DLC1 (NM_006094.3,538-556).
cggtgatgaagctagaaat

SEQ ID NO: 130214 - DNA, 19 bp, Homo sapiens
  siRNA target sequence for DLC1 (NM_006094.3,649-667).
ggtcccggcttgaagagtt

SEQ ID NO: 130215 - DNA, 19 bp, Homo sapiens
  siRNA target sequence for DLC1 (NM_006094.3,650-668).
gtcccggcttgaagagttt

SEQ ID NO: 130216 - DNA, 19 bp, Homo sapiens
  siRNA target sequence for DLC1 (NM_006094.3,653-671).
ccggcttgaagagtttgat

SEQ ID NO: 130217 - DNA, 19 bp, Homo sapiens
  siRNA target sequence for DLC1 (NM_006094.3,901-919).
caggcaatgacgactcttt

SEQ ID NO: 130218 - DNA, 19 bp, Homo sapiens
  siRNA target sequence for DLC1 (NM_006094.3,964-982).
gcatgaaaggccacgaaaa

SEQ ID NO: 130219 - DNA, 19 bp, Homo sapiens
  siRNA target sequence for DLC1 (NM_006094.3,1072-1090).
caaagctggggttgatcat

SEQ ID NO: 130220 - DNA, 19 bp, Homo sapiens
  siRNA target sequence for DLC1 (NM_006094.3,1319-1337).
gcgggtgggcatgtactta

SEQ ID NO: 130221 - DNA, 19 bp, Homo sapiens
  siRNA target sequence for DLC1 (NM_006094.3,1321-1339).
gggtgggcatgtacttaga

SEQ ID NO: 130222 - DNA, 19 bp, Homo sapiens
  siRNA target sequence for DLC1 (NM_006094.3,1340-1358).
gggcttcgatcctttcaat

SEQ ID NO: 130223 - DNA, 19 bp, Homo sapiens
  siRNA target sequence for DLC1 (NM_006094.3,1342-1360).
gcttcgatcctttcaatca

SEQ ID NO: 130224 - DNA, 19 bp, Homo sapiens
  siRNA target sequence for DLC1 (NM_006094.3,1416-1434).
gaggacacggtgttctaca

SEQ ID NO: 130225 - DNA, 19 bp, Homo sapiens
  siRNA target sequence for DLC1 (NM_006094.3,1427-1445).
gttctacatccctgaagat

SEQ ID NO: 130226 - DNA, 19 bp, Homo sapiens
  siRNA target sequence for DLC1 (NM_006094.3,1473-1491).
ctcaccaatggcagtttct

SEQ ID NO: 130227 - DNA, 19 bp, Homo sapiens
  siRNA target sequence for DLC1 (NM_006094.3,1596-1614).
ctgaagagacgcaattctt

SEQ ID NO: 130228 - DNA, 19 bp, Homo sapiens
  siRNA target sequence for DLC1 (NM_006094.3,1752-1770).
gggatgcagcggatagtca

SEQ ID NO: 130229 - DNA, 19 bp, Homo sapiens
  siRNA target sequence for DLC1 (NM_006094.3,1754-1772).
gatgcagcggatagtcaat

SEQ ID NO: 130230 - DNA, 19 bp, Homo sapiens
  siRNA target sequence for DLC1 (NM_006094.3,1758-1776).
cagcggatagtcaatcagt

SEQ ID NO: 130231 - DNA, 19 bp, Homo sapiens
  siRNA target sequence for DLC1 (NM_006094.3,1773-1791).
cagtggtcggagaagtttt

SEQ ID NO: 130232 - DNA, 19 bp, Homo sapiens
  siRNA target sequence for DLC1 (NM_006094.3,1778-1796).
gtcggagaagttttctgat

SEQ ID NO: 130233 - DNA, 19 bp, Homo sapiens
  siRNA target sequence for DLC1 (NM_006094.3,1839-1857).
ccgtcctctccaaaacaga

SEQ ID NO: 130234 - DNA, 19 bp, Homo sapiens
  siRNA target sequence for DLC1 (NM_006094.3,2044-2062).
gcctcaactctgtatcact

SEQ ID NO: 130235 - DNA, 19 bp, Homo sapiens
  siRNA target sequence for DLC1 (NM_006094.3,2045-2063).
cctcaactctgtatcacta

SEQ ID NO: 130236 - DNA, 19 bp, Homo sapiens
  siRNA target sequence for DLC1 (NM_006094.3,2053-2071).
ctgtatcactacagattaa

SEQ ID NO: 130237 - DNA, 19 bp, Homo sapiens
  siRNA target sequence for DLC1 (NM_006094.3,2055-2073).
gtatcactacagattaact

SEQ ID NO: 130238 - DNA, 19 bp, Homo sapiens
  siRNA target sequence for DLC1 (NM_006094.3,2176-2194).
gggccgtgcccaagttcat

SEQ ID NO: 130239 - DNA, 19 bp, Homo sapiens
  siRNA target sequence for DLC1 (NM_006094.3,2178-2196).
gccgtgcccaagttcatga

SEQ ID NO: 130240 - DNA, 19 bp, Homo sapiens
  siRNA target sequence for DLC1 (NM_006094.3,2179-2197).
ccgtgcccaagttcatgaa

SEQ ID NO: 130241 - DNA, 19 bp, Homo sapiens
  siRNA target sequence for DLC1 (NM_006094.3,2219-2237).
caaggaccggagtgtgttt

SEQ ID NO: 130242 - DNA, 19 bp, Homo sapiens
  siRNA target sequence for DLC1 (NM_006094.3,2307-2325).
cgatacctccggaaccatt

SEQ ID NO: 130243 - DNA, 19 bp, Homo sapiens
  siRNA target sequence for DLC1 (NM_006094.3,2336-2354).
ggttgggctcttcagaaaa

SEQ ID NO: 130244 - DNA, 19 bp, Homo sapiens
  siRNA target sequence for DLC1 (NM_006094.3,2337-2355).
gttgggctcttcagaaaat

SEQ ID NO: 130245 - DNA, 19 bp, Homo sapiens
  siRNA target sequence for DLC1 (NM_006094.3,2380-2398).
ctctgcgccagatgaatga

SEQ ID NO: 130246 - DNA, 19 bp, Homo sapiens
  siRNA target sequence for DLC1 (NM_006094.3,2404-2422).
ccatagactgtgtcaacta

SEQ ID NO: 130247 - DNA, 19 bp, Homo sapiens
  siRNA target sequence for DLC1 (NM_006094.3,2423-2441).
cgaaggacagtctgcttat

SEQ ID NO: 130248 - DNA, 19 bp, Homo sapiens
  siRNA target sequence for DLC1 (NM_006094.3,2478-2496).
cttcctgagccactaatga

SEQ ID NO: 130249 - DNA, 19 bp, Homo sapiens
  siRNA target sequence for DLC1 (NM_006094.3,2486-2504).
gccactaatgacgaacaaa

SEQ ID NO: 130250 - DNA, 19 bp, Homo sapiens
  siRNA target sequence for DLC1 (NM_006094.3,2488-2506).
cactaatgacgaacaaact

SEQ ID NO: 130251 - DNA, 19 bp, Homo sapiens
  siRNA target sequence for DLC1 (NM_006094.3,2501-2519).
caaactctcggaaaccttt

SEQ ID NO: 130252 - DNA, 19 bp, Homo sapiens
  siRNA target sequence for DLC1 (NM_006094.3,2509-2527).
cggaaacctttctacagat

SEQ ID NO: 130253 - DNA, 19 bp, Homo sapiens
  siRNA target sequence for DLC1 (NM_006094.3,2610-2628).
ctgcagaccctgctttatt

SEQ ID NO: 130254 - DNA, 19 bp, Homo sapiens
  siRNA target sequence for DLC1 (NM_006094.3,2841-2859).
gccgagtgcaagaagcttt

SEQ ID NO: 130255 - DNA, 19 bp, Homo sapiens
  siRNA target sequence for DLC1 (NM_006094.3,2881-2899).
gccgatgtcgtaattccta

SEQ ID NO: 130256 - DNA, 19 bp, Homo sapiens
  siRNA target sequence for DLC1 (NM_006094.3,2882-2900).
ccgatgtcgtaattcctat

SEQ ID NO: 130257 - DNA, 19 bp, Homo sapiens
  siRNA target sequence for DLC1 (NM_006094.3,2883-2901).
cgatgtcgtaattcctata

SEQ ID NO: 130258 - DNA, 19 bp, Homo sapiens
  siRNA target sequence for DLC1 (NM_006094.3,2939-2957).
cgggcacctgggtaatgat

SEQ ID NO: 130259 - DNA, 19 bp, Homo sapiens
  siRNA target sequence for DLC1 (NM_006094.3,2941-2959).
ggcacctgggtaatgatga

SEQ ID NO: 130260 - DNA, 19 bp, Homo sapiens
  siRNA target sequence for DLC1 (NM_006094.3,2962-2980).
cagctgactaccaacactt

SEQ ID NO: 130261 - DNA, 19 bp, Homo sapiens
  siRNA target sequence for DLC1 (NM_006094.3,3064-3082).
ctgagctgtcctataagaa

SEQ ID NO: 130262 - DNA, 19 bp, Homo sapiens
  siRNA target sequence for DLC1 (NM_006094.3,3107-3125).
gctttggaggtcagtcatt

SEQ ID NO: 130263 - DNA, 19 bp, Homo sapiens
  siRNA target sequence for DLC1 (NM_006094.3,3112-3130).
ggaggtcagtcattgaagt

SEQ ID NO: 130264 - DNA, 19 bp, Homo sapiens
  siRNA target sequence for DLC1 (NM_006094.3,3205-3223).
caaaagtgatcgaaattct

SEQ ID NO: 130265 - DNA, 19 bp, Homo sapiens
  siRNA target sequence for DLC1 (NM_006094.3,3225-3243).
gacagccaaactgaaattt

SEQ ID NO: 130266 - DNA, 19 bp, Homo sapiens
  siRNA target sequence for DLC1 (NM_006094.3,3282-3300).
cgagactacgttgttttaa

SEQ ID NO: 130267 - DNA, 19 bp, Homo sapiens
  siRNA target sequence for DLC1 (NM_006094.3,3285-3303).
gactacgttgttttaagaa

SEQ ID NO: 130268 - DNA, 19 bp, Homo sapiens
  siRNA target sequence for DLC1 (NM_006094.3,3301-3319).
gaacctggaggactaattt

SEQ ID NO: 130269 - DNA, 19 bp, Homo sapiens
  siRNA target sequence for DLC1 (NM_006094.3,3330-3348).
gcctgtgcccttttactaa

SEQ ID NO: 130270 - DNA, 19 bp, Homo sapiens
  siRNA target sequence for DLC1 (NM_006094.3,3401-3419).
cttgtccaggtatttgatt

SEQ ID NO: 130271 - DNA, 19 bp, Homo sapiens
  siRNA target sequence for DLC1 (NM_006094.3,3455-3473).
catgtgcagagttgactta

SEQ ID NO: 130272 - DNA, 19 bp, Homo sapiens
  siRNA target sequence for DLC1 (NM_006094.3,3478-3496).
gccacatgccagaatggta

SEQ ID NO: 130273 - DNA, 19 bp, Homo sapiens
  siRNA target sequence for DLC1 (NM_006094.3,3494-3512).
gtacacaaaatcttttgga

SEQ ID NO: 130274 - DNA, 19 bp, Homo sapiens
  siRNA target sequence for DLC1 (NM_006094.3,3570-3588).
gaaaccaaagacaccaaat

SEQ ID NO: 130275 - DNA, 19 bp, Homo sapiens
  siRNA target sequence for DLC1 (NM_024767.2,543-561).
gaaaaagatgcaactctaa

SEQ ID NO: 130276 - DNA, 19 bp, Homo sapiens
  siRNA target sequence for DLC1 (NM_024767.2,570-588).
cgcaaagagaagtgtgttt

SEQ ID NO: 130277 - DNA, 19 bp, Homo sapiens
  siRNA target sequence for DLC1 (NM_024767.2,609-627).
ggatcagagctgagagatt

SEQ ID NO: 130278 - DNA, 19 bp, Homo sapiens
  siRNA target sequence for DLC1 (NM_024767.2,638-656).
gccaatgggtcatctttca

SEQ ID NO: 130279 - DNA, 19 bp, Homo sapiens
  siRNA target sequence for DLC1 (NM_024767.2,727-745).
cactagtgcatgtttctga

SEQ ID NO: 130280 - DNA, 19 bp, Homo sapiens
  siRNA target sequence for DLC1 (NM_024767.2,738-756).
gtttctgatgaggataaca

SEQ ID NO: 130281 - DNA, 19 bp, Homo sapiens
  siRNA target sequence for DLC1 (NM_024767.2,800-818).
ccaagggcagaaaacatca

SEQ ID NO: 130282 - DNA, 19 bp, Homo sapiens
  siRNA target sequence for DLC1 (NM_024767.2,814-832).
catcaggccaacatatgat

SEQ ID NO: 130283 - DNA, 19 bp, Homo sapiens
  siRNA target sequence for DLC1 (NM_024767.2,838-856).
gagcaggctccttagaaaa

SEQ ID NO: 130284 - DNA, 19 bp, Homo sapiens
  siRNA target sequence for DLC1 (NM_024767.2,857-875).
ggcactgcccatcatacaa

SEQ ID NO: 130285 - DNA, 19 bp, Homo sapiens
  siRNA target sequence for DLC1 (NM_024767.2,877-895).
gtaaccaagtttcttctaa

SEQ ID NO: 130286 - DNA, 19 bp, Homo sapiens
  siRNA target sequence for DLC1 (NM_024767.2,919-937).
ctgaattagcactggtaaa

SEQ ID NO: 130287 - DNA, 19 bp, Homo sapiens
  siRNA target sequence for DLC1 (NM_024767.2,957-975).
gttactgactctataagta

SEQ ID NO: 130288 - DNA, 19 bp, Homo sapiens
  siRNA target sequence for DLC1 (NM_024767.2,981-999).
ctggagctttgcaatgaaa

SEQ ID NO: 130289 - DNA, 19 bp, Homo sapiens
  siRNA target sequence for DLC1 (NM_024767.2,983-1001).
ggagctttgcaatgaaata

SEQ ID NO: 130290 - DNA, 19 bp, Homo sapiens
  siRNA target sequence for DLC1 (NM_024767.2,984-1002).
gagctttgcaatgaaataa

SEQ ID NO: 130291 - DNA, 19 bp, Homo sapiens
  siRNA target sequence for DLC1 (NM_024767.2,1071-1089).
cctgagaaacaattgctta

SEQ ID NO: 130292 - DNA, 19 bp, Homo sapiens
  siRNA target sequence for DLC1 (NM_024767.2,1085-1103).
gcttaactctgctgtaatt

SEQ ID NO: 130293 - DNA, 19 bp, Homo sapiens
  siRNA target sequence for DLC1 (NM_024767.2,1127-1145).
cccccctaaagatgaaaat

SEQ ID NO: 130294 - DNA, 19 bp, Homo sapiens
  siRNA target sequence for DLC1 (NM_024767.2,1150-1168).
gaagcacctgcaatgtagt

SEQ ID NO: 130295 - DNA, 19 bp, Homo sapiens
  siRNA target sequence for DLC1 (NM_024767.2,1154-1172).
cacctgcaatgtagtacaa

SEQ ID NO: 130296 - DNA, 19 bp, Homo sapiens
  siRNA target sequence for DLC1 (NM_024767.2,1159-1177).
gcaatgtagtacaaaatga

SEQ ID NO: 130297 - DNA, 19 bp, Homo sapiens
  siRNA target sequence for DLC1 (NM_024767.2,1185-1203).
gatactccttgcacaaaca

SEQ ID NO: 130298 - DNA, 19 bp, Homo sapiens
  siRNA target sequence for DLC1 (NM_024767.2,1255-1273).
cttcctgccccaatggaat

SEQ ID NO: 130299 - DNA, 19 bp, Homo sapiens
  siRNA target sequence for DLC1 (NM_024767.2,1259-1277).
ctgccccaatggaatgtca

SEQ ID NO: 130300 - DNA, 19 bp, Homo sapiens
  siRNA target sequence for DLC1 (NM_024767.2,1302-1320).
ggtttttcacaacatcaaa

SEQ ID NO: 130301 - DNA, 19 bp, Homo sapiens
  siRNA target sequence for DLC1 (NM_024767.2,1353-1371).
ggcatgcagtgtttacaat

SEQ ID NO: 130302 - DNA, 19 bp, Homo sapiens
  siRNA target sequence for DLC1 (NM_024767.2,1354-1372).
gcatgcagtgtttacaatt

SEQ ID NO: 130303 - DNA, 19 bp, Homo sapiens
  siRNA target sequence for DLC1 (NM_024767.2,1413-1431).
gtcagacttcgtaagagaa

SEQ ID NO: 130304 - DNA, 19 bp, Homo sapiens
  siRNA target sequence for DLC1 (NM_024767.2,1502-1520).
gcttgatcaggacatagaa

SEQ ID NO: 130305 - DNA, 19 bp, Homo sapiens
  siRNA target sequence for DLC1 (NM_024767.2,1609-1627).
gagcagataccatttcagt

SEQ ID NO: 130306 - DNA, 19 bp, Homo sapiens
  siRNA target sequence for DLC1 (NM_024767.2,1611-1629).
gcagataccatttcagtaa

SEQ ID NO: 130307 - DNA, 19 bp, Homo sapiens
  siRNA target sequence for DLC1 (NM_024767.2,1612-1630).
cagataccatttcagtaaa

SEQ ID NO: 130308 - DNA, 19 bp, Homo sapiens
  siRNA target sequence for DLC1 (NM_024767.2,1632-1650).
cagacacgagtaaatttgt

SEQ ID NO: 130309 - DNA, 19 bp, Homo sapiens
  siRNA target sequence for DLC1 (NM_024767.2,1634-1652).
gacacgagtaaatttgtct

SEQ ID NO: 130310 - DNA, 19 bp, Homo sapiens
  siRNA target sequence for DLC1 (NM_024767.2,1704-1722).
ggaaccaaacccaagacta

SEQ ID NO: 130311 - DNA, 19 bp, Homo sapiens
  siRNA target sequence for DLC1 (NM_024767.2,1715-1733).
caagactacggctattcaa

SEQ ID NO: 130312 - DNA, 19 bp, Homo sapiens
  siRNA target sequence for DLC1 (NM_024767.2,1720-1738).
ctacggctattcaaggtat

SEQ ID NO: 130313 - DNA, 19 bp, Homo sapiens
  siRNA target sequence for DLC1 (NM_024767.2,1749-1767).
gaaaaggctgcggtaaaat

SEQ ID NO: 130314 - DNA, 19 bp, Homo sapiens
  siRNA target sequence for DLC1 (NM_024767.2,1754-1772).
ggctgcggtaaaatcagta

SEQ ID NO: 130315 - DNA, 19 bp, Homo sapiens
  siRNA target sequence for DLC1 (NM_024767.2,1755-1773).
gctgcggtaaaatcagtaa

SEQ ID NO: 130316 - DNA, 19 bp, Homo sapiens
  siRNA target sequence for DLC1 (NM_024767.2,1756-1774).
ctgcggtaaaatcagtaaa

SEQ ID NO: 130317 - DNA, 19 bp, Homo sapiens
  siRNA target sequence for DLC1 (NM_024767.2,1758-1776).
gcggtaaaatcagtaaagt

SEQ ID NO: 130318 - DNA, 19 bp, Homo sapiens
  siRNA target sequence for DLC1 (NM_024767.2,1759-1777).
cggtaaaatcagtaaagtt

SEQ ID NO: 130319 - DNA, 19 bp, Homo sapiens
  siRNA target sequence for DLC1 (NM_024767.2,1796-1814).
gagcacaaagggatccaat

SEQ ID NO: 130320 - DNA, 19 bp, Homo sapiens
  siRNA target sequence for DLC1 (NM_024767.2,1823-1841).
ctcggaagtggcaattggt

SEQ ID NO: 130321 - DNA, 19 bp, Homo sapiens
  siRNA target sequence for DLC1 (NM_024767.2,1825-1843).
cggaagtggcaattggttt

SEQ ID NO: 130322 - DNA, 19 bp, Homo sapiens
  siRNA target sequence for DLG5 (NM_004747.2,208-226).
catggcacggcctttgaca

SEQ ID NO: 130323 - DNA, 19 bp, Homo sapiens
  siRNA target sequence for DLG5 (NM_004747.2,240-258).
caggctgaatcctgactat

SEQ ID NO: 130324 - DNA, 19 bp, Homo sapiens
  siRNA target sequence for DLG5 (NM_004747.2,244-262).
ctgaatcctgactatgaga

SEQ ID NO: 130325 - DNA, 19 bp, Homo sapiens
  siRNA target sequence for DLG5 (NM_004747.2,319-337).
cacaccaacgccttgaaga

SEQ ID NO: 130326 - DNA, 19 bp, Homo sapiens
  siRNA target sequence for DLG5 (NM_004747.2,574-592).
gggtcatccgagattctca

SEQ ID NO: 130327 - DNA, 19 bp, Homo sapiens
  siRNA target sequence for DLG5 (NM_004747.2,575-593).
ggtcatccgagattctcaa

SEQ ID NO: 130328 - DNA, 19 bp, Homo sapiens
  siRNA target sequence for DLG5 (NM_004747.2,578-596).
catccgagattctcaacaa

SEQ ID NO: 130329 - DNA, 19 bp, Homo sapiens
  siRNA target sequence for DLG5 (NM_004747.2,581-599).
ccgagattctcaacaaact

SEQ ID NO: 130330 - DNA, 19 bp, Homo sapiens
  siRNA target sequence for DLG5 (NM_004747.2,589-607).
ctcaacaaactgtatgaca

SEQ ID NO: 130331 - DNA, 19 bp, Homo sapiens
  siRNA target sequence for DLG5 (NM_004747.2,974-992).
ctgtgtacagcgagtacaa

SEQ ID NO: 130332 - DNA, 19 bp, Homo sapiens
  siRNA target sequence for DLG5 (NM_004747.2,1278-1296).
ggagcgagacaagattgta

SEQ ID NO: 130333 - DNA, 19 bp, Homo sapiens
  siRNA target sequence for DLG5 (NM_004747.2,1395-1413).
cacccgcaagcagaagaat

SEQ ID NO: 130334 - DNA, 19 bp, Homo sapiens
  siRNA target sequence for DLG5 (NM_004747.2,1397-1415).
cccgcaagcagaagaatga

SEQ ID NO: 130335 - DNA, 19 bp, Homo sapiens
  siRNA target sequence for DLG5 (NM_004747.2,1517-1535).
ccattgacacggattccat

SEQ ID NO: 130336 - DNA, 19 bp, Homo sapiens
  siRNA target sequence for DLG5 (NM_004747.2,1539-1557).
gtgggaaacggaagttgta

SEQ ID NO: 130337 - DNA, 19 bp, Homo sapiens
  siRNA target sequence for DLG5 (NM_004747.2,1649-1667).
gtggcatatttgtcactaa

SEQ ID NO: 130338 - DNA, 19 bp, Homo sapiens
  siRNA target sequence for DLG5 (NM_004747.2,1694-1712).
gccgcttaagggtcaatga

SEQ ID NO: 130339 - DNA, 19 bp, Homo sapiens
  siRNA target sequence for DLG5 (NM_004747.2,1931-1949).
gaagccctgccgctaaaga

SEQ ID NO: 130340 - DNA, 19 bp, Homo sapiens
  siRNA target sequence for DLG5 (NM_004747.2,1971-1989).
caggatcgttgcgatcaat

SEQ ID NO: 130341 - DNA, 19 bp, Homo sapiens
  siRNA target sequence for DLG5 (NM_004747.2,2099-2117).
ggagtggccagaacatttt

SEQ ID NO: 130342 - DNA, 19 bp, Homo sapiens
  siRNA target sequence for DLG5 (NM_004747.2,2168-2186).
cggaggtccaggctcataa

SEQ ID NO: 130343 - DNA, 19 bp, Homo sapiens
  siRNA target sequence for DLG5 (NM_004747.2,2216-2234).
ccacgcagacagacatctt

SEQ ID NO: 130344 - DNA, 19 bp, Homo sapiens
  siRNA target sequence for DLG5 (NM_004747.2,2285-2303).
gcagctcctttctgcataa

SEQ ID NO: 130345 - DNA, 19 bp, Homo sapiens
  siRNA target sequence for DLG5 (NM_004747.2,2571-2589).
gaagctctctgtttataaa

SEQ ID NO: 130346 - DNA, 19 bp, Homo sapiens
  siRNA target sequence for DLG5 (NM_004747.2,2747-2765).
ggagcgactccattaagtt

SEQ ID NO: 130347 - DNA, 19 bp, Homo sapiens
  siRNA target sequence for DLG5 (NM_004747.2,2899-2917).
gccagggtccgcattgctt

SEQ ID NO: 130348 - DNA, 19 bp, Homo sapiens
  siRNA target sequence for DLG5 (NM_004747.2,3060-3078).
gcttgctccagtagtgatt

SEQ ID NO: 130349 - DNA, 19 bp, Homo sapiens
  siRNA target sequence for DLG5 (NM_004747.2,3268-3286).
ctgcggaaccccatctaca

SEQ ID NO: 130350 - DNA, 19 bp, Homo sapiens
  siRNA target sequence for DLG5 (NM_004747.2,3475-3493).
ctgggttcttcgagtaact

SEQ ID NO: 130351 - DNA, 19 bp, Homo sapiens
  siRNA target sequence for DLG5 (NM_004747.2,3485-3503).
cgagtaacttgcagttcaa

SEQ ID NO: 130352 - DNA, 19 bp, Homo sapiens
  siRNA target sequence for DLG5 (NM_004747.2,3501-3519).
caaggcggaacgcattaaa

SEQ ID NO: 130353 - DNA, 19 bp, Homo sapiens
  siRNA target sequence for DLG5 (NM_004747.2,3513-3531).
cattaaaatcccatcaaca

SEQ ID NO: 130354 - DNA, 19 bp, Homo sapiens
  siRNA target sequence for DLG5 (NM_004747.2,3858-3876).
cgagtatggggatcagtta

SEQ ID NO: 130355 - DNA, 19 bp, Homo sapiens
  siRNA target sequence for DLG5 (NM_004747.2,3938-3956).
ggcagcagtgtgataccat

SEQ ID NO: 130356 - DNA, 19 bp, Homo sapiens
  siRNA target sequence for DLG5 (NM_004747.2,4163-4181).
cgggagatgccaacaagaa

SEQ ID NO: 130357 - DNA, 19 bp, Homo sapiens
  siRNA target sequence for DLG5 (NM_004747.2,4192-4210).
ccacgcgttgtcttcatca

SEQ ID NO: 130358 - DNA, 19 bp, Homo sapiens
  siRNA target sequence for DLG5 (NM_004747.2,4193-4211).
cacgcgttgtcttcatcaa

SEQ ID NO: 130359 - DNA, 19 bp, Homo sapiens
  siRNA target sequence for DLG5 (NM_004747.2,4639-4657).
gggcagattcccagcaaat

SEQ ID NO: 130360 - DNA, 19 bp, Homo sapiens
  siRNA target sequence for DLG5 (NM_004747.2,4640-4658).
ggcagattcccagcaaata

SEQ ID NO: 130361 - DNA, 19 bp, Homo sapiens
  siRNA target sequence for DLG5 (NM_004747.2,4641-4659).
gcagattcccagcaaatat

SEQ ID NO: 130362 - DNA, 19 bp, Homo sapiens
  siRNA target sequence for DLG5 (NM_004747.2,4711-4729).
gacaatagcgccacaaaga

SEQ ID NO: 130363 - DNA, 19 bp, Homo sapiens
  siRNA target sequence for DLG5 (NM_004747.2,4839-4857).
ctccattccactctttgaa

SEQ ID NO: 130364 - DNA, 19 bp, Homo sapiens
  siRNA target sequence for DLG5 (NM_004747.2,4841-4859).
ccattccactctttgaaga

SEQ ID NO: 130365 - DNA, 19 bp, Homo sapiens
  siRNA target sequence for DLG5 (NM_004747.2,4994-5012).
gtccccttgaggtgatgaa

SEQ ID NO: 130366 - DNA, 19 bp, Homo sapiens
  siRNA target sequence for DLG5 (NM_004747.2,5028-5046).
cattgagcggggtgtcaaa

SEQ ID NO: 130367 - DNA, 19 bp, Homo sapiens
  siRNA target sequence for DLG5 (NM_004747.2,5032-5050).
gagcggggtgtcaaagatt

SEQ ID NO: 130368 - DNA, 19 bp, Homo sapiens
  siRNA target sequence for DLG5 (NM_004747.2,5072-5090).
ggagaagcggccatttcga

SEQ ID NO: 130369 - DNA, 19 bp, Homo sapiens
  siRNA target sequence for DLG5 (NM_004747.2,5073-5091).
gagaagcggccatttcgat

SEQ ID NO: 130370 - DNA, 19 bp, Homo sapiens
  siRNA target sequence for DLG5 (NM_004747.2,5094-5112).
gaccactgtggcgtcaata

SEQ ID NO: 130371 - DNA, 19 bp, Homo sapiens
  siRNA target sequence for DLG5 (NM_004747.2,5096-5114).
ccactgtggcgtcaataaa

SEQ ID NO: 130372 - DNA, 19 bp, Homo sapiens
  siRNA target sequence for DLG5 (NM_004747.2,5099-5117).
ctgtggcgtcaataaagga

SEQ ID NO: 130373 - DNA, 19 bp, Homo sapiens
  siRNA target sequence for DLG5 (NM_004747.2,5277-5295).
gactcagaggcattccaaa

SEQ ID NO: 130374 - DNA, 19 bp, Homo sapiens
  siRNA target sequence for DLG5 (NM_004747.2,5368-5386).
gccctgtcaagcatttgca

SEQ ID NO: 130375 - DNA, 19 bp, Homo sapiens
  siRNA target sequence for DLG5 (NM_004747.2,5397-5415).
ggcaatggtcaatcaagaa

SEQ ID NO: 130376 - DNA, 19 bp, Homo sapiens
  siRNA target sequence for DLG5 (NM_004747.2,5399-5417).
caatggtcaatcaagaaca

SEQ ID NO: 130377 - DNA, 19 bp, Homo sapiens
  siRNA target sequence for DLGAP2 (NM_004745.3,1349-1367).
gaccccgctgcgaactaca

SEQ ID NO: 130378 - DNA, 19 bp, Homo sapiens
  siRNA target sequence for DLGAP2 (NM_004745.3,1352-1370).
cccgctgcgaactacaact

SEQ ID NO: 130379 - DNA, 19 bp, Homo sapiens
  siRNA target sequence for DLGAP2 (NM_004745.3,1388-1406).
cggaaccagagctacatga

SEQ ID NO: 130380 - DNA, 19 bp, Homo sapiens
  siRNA target sequence for DLGAP2 (NM_004745.3,1450-1468).
gagcgaggcggagatcaat

SEQ ID NO: 130381 - DNA, 19 bp, Homo sapiens
  siRNA target sequence for DLGAP2 (NM_004745.3,1492-1510).
gtccgtcttcagtgaagtt

SEQ ID NO: 130382 - DNA, 19 bp, Homo sapiens
  siRNA target sequence for DLGAP2 (NM_004745.3,1494-1512).
ccgtcttcagtgaagttga

SEQ ID NO: 130383 - DNA, 19 bp, Homo sapiens
  siRNA target sequence for DLGAP2 (NM_004745.3,1498-1516).
cttcagtgaagttgaatct

SEQ ID NO: 130384 - DNA, 19 bp, Homo sapiens
  siRNA target sequence for DLGAP2 (NM_004745.3,1590-1608).
ccggctactcccaagatga

SEQ ID NO: 130385 - DNA, 19 bp, Homo sapiens
  siRNA target sequence for DLGAP2 (NM_004745.3,1610-1628).
gaatgtattcccatgatga

SEQ ID NO: 130386 - DNA, 19 bp, Homo sapiens
  siRNA target sequence for DLGAP2 (NM_004745.3,1664-1682).
gcagctgtctcatatacaa

SEQ ID NO: 130387 - DNA, 19 bp, Homo sapiens
  siRNA target sequence for DLGAP2 (NM_004745.3,2094-2112).
gcggtctgcgggaatacca

SEQ ID NO: 130388 - DNA, 19 bp, Homo sapiens
  siRNA target sequence for DLGAP2 (NM_004745.3,2140-2158).
gaagcgacacggacgtttt

SEQ ID NO: 130389 - DNA, 19 bp, Homo sapiens
  siRNA target sequence for DLGAP2 (NM_004745.3,2143-2161).
gcgacacggacgttttaaa

SEQ ID NO: 130390 - DNA, 19 bp, Homo sapiens
  siRNA target sequence for DLGAP2 (NM_004745.3,2147-2165).
cacggacgttttaaacgtt

SEQ ID NO: 130391 - DNA, 19 bp, Homo sapiens
  siRNA target sequence for DLGAP2 (NM_004745.3,2153-2171).
cgttttaaacgttctaaca

SEQ ID NO: 130392 - DNA, 19 bp, Homo sapiens
  siRNA target sequence for DLGAP2 (NM_004745.3,2302-2320).
cagcgcggtgagaactgta

SEQ ID NO: 130393 - DNA, 19 bp, Homo sapiens
  siRNA target sequence for DLGAP2 (NM_004745.3,2329-2347).
ggggctcttcagctataga

SEQ ID NO: 130394 - DNA, 19 bp, Homo sapiens
  siRNA target sequence for DLGAP2 (NM_004745.3,2480-2498).
ctgcacgcagagacaaaga

SEQ ID NO: 130395 - DNA, 19 bp, Homo sapiens
  siRNA target sequence for DLGAP2 (NM_004745.3,2545-2563).
cgacctctcggaggaaatt

SEQ ID NO: 130396 - DNA, 19 bp, Homo sapiens
  siRNA target sequence for DLGAP2 (NM_004745.3,2555-2573).
gaggaaattctcggtaaaa

SEQ ID NO: 130397 - DNA, 19 bp, Homo sapiens
  siRNA target sequence for DLGAP2 (NM_004745.3,2558-2576).
gaaattctcggtaaaatca

SEQ ID NO: 130398 - DNA, 19 bp, Homo sapiens
  siRNA target sequence for DLGAP2 (NM_004745.3,2634-2652).
ggctttgccaacagaatat

SEQ ID NO: 130399 - DNA, 19 bp, Homo sapiens
  siRNA target sequence for DLGAP2 (NM_004745.3,2768-2786).
ctcaacgactggaagatga

SEQ ID NO: 130400 - DNA, 19 bp, Homo sapiens
  siRNA target sequence for DLGAP2 (NM_004745.3,2818-2836).
ggtcccgcctccaatacca

SEQ ID NO: 130401 - DNA, 19 bp, Homo sapiens
  siRNA target sequence for DLGAP2 (NM_004745.3,2819-2837).
gtcccgcctccaataccaa

SEQ ID NO: 130402 - DNA, 19 bp, Homo sapiens
  siRNA target sequence for DLGAP2 (NM_004745.3,2823-2841).
cgcctccaataccaaagaa

SEQ ID NO: 130403 - DNA, 19 bp, Homo sapiens
  siRNA target sequence for DLGAP2 (NM_004745.3,2945-2963).
gcgtccttccggcagaatt

SEQ ID NO: 130404 - DNA, 19 bp, Homo sapiens
  siRNA target sequence for DMN (NM_015286.4,213-231).
gctggagcgcgaaaaccta

SEQ ID NO: 130405 - DNA, 19 bp, Homo sapiens
  siRNA target sequence for DMN (NM_015286.4,598-616).
gccagccttaccatgcatt

SEQ ID NO: 130406 - DNA, 19 bp, Homo sapiens
  siRNA target sequence for DMN (NM_015286.4,1100-1118).
ctgagcacgttgaaaacat

SEQ ID NO: 130407 - DNA, 19 bp, Homo sapiens
  siRNA target sequence for DMN (NM_015286.4,1126-1144).
gaattcagaaacaaatcct

SEQ ID NO: 130408 - DNA, 19 bp, Homo sapiens
  siRNA target sequence for DMN (NM_015286.4,1149-1167).
ctataccgactcactacta

SEQ ID NO: 130409 - DNA, 19 bp, Homo sapiens
  siRNA target sequence for DMN (NM_015286.4,1207-1225).
gcacctttggcaagtttca

SEQ ID NO: 130410 - DNA, 19 bp, Homo sapiens
  siRNA target sequence for DMN (NM_015286.4,1208-1226).
cacctttggcaagtttcaa

SEQ ID NO: 130411 - DNA, 19 bp, Homo sapiens
  siRNA target sequence for DMN (NM_015286.4,1275-1293).
gacgggcacatctattgga

SEQ ID NO: 130412 - DNA, 19 bp, Homo sapiens
  siRNA target sequence for DMN (NM_015286.4,1314-1332).
cttgggctcgggatattct

SEQ ID NO: 130413 - DNA, 19 bp, Homo sapiens
  siRNA target sequence for DMN (NM_015286.4,1373-1391).
ccgtcagcagtcaaaccaa

SEQ ID NO: 130414 - DNA, 19 bp, Homo sapiens
  siRNA target sequence for DMN (NM_015286.4,1384-1402).
caaaccaacgtcagaactt

SEQ ID NO: 130415 - DNA, 19 bp, Homo sapiens
  siRNA target sequence for DMN (NM_015286.4,1413-1431).
ctatggccttttaagaaat

SEQ ID NO: 130416 - DNA, 19 bp, Homo sapiens
  siRNA target sequence for DMN (NM_015286.4,1484-1502).
gggaggtccccgtttacat

SEQ ID NO: 130417 - DNA, 19 bp, Homo sapiens
  siRNA target sequence for DMN (NM_015286.4,1485-1503).
ggaggtccccgtttacata

SEQ ID NO: 130418 - DNA, 19 bp, Homo sapiens
  siRNA target sequence for DMN (NM_015286.4,1572-1590).
ggaaagcacacggtcaaat

SEQ ID NO: 130419 - DNA, 19 bp, Homo sapiens
  siRNA target sequence for DMN (NM_015286.4,1684-1702).
gagaaaatgttcgattcta

SEQ ID NO: 130420 - DNA, 19 bp, Homo sapiens
  siRNA target sequence for DMN (NM_015286.4,1746-1764).
gacaaagttagataaggaa

SEQ ID NO: 130421 - DNA, 19 bp, Homo sapiens
  siRNA target sequence for DMN (NM_015286.4,1842-1860).
gagagaggtgccgattagt

SEQ ID NO: 130422 - DNA, 19 bp, Homo sapiens
  siRNA target sequence for DMN (NM_015286.4,1844-1862).
gagaggtgccgattagtct

SEQ ID NO: 130423 - DNA, 19 bp, Homo sapiens
  siRNA target sequence for DMN (NM_015286.4,1848-1866).
ggtgccgattagtctagaa

SEQ ID NO: 130424 - DNA, 19 bp, Homo sapiens
  siRNA target sequence for DMN (NM_015286.4,1851-1869).
gccgattagtctagaagta

SEQ ID NO: 130425 - DNA, 19 bp, Homo sapiens
  siRNA target sequence for DMN (NM_015286.4,1852-1870).
ccgattagtctagaagtat

SEQ ID NO: 130426 - DNA, 19 bp, Homo sapiens
  siRNA target sequence for DMN (NM_015286.4,2003-2021).
ctctgcaaggcgattccat

SEQ ID NO: 130427 - DNA, 19 bp, Homo sapiens
  siRNA target sequence for DMN (NM_015286.4,2011-2029).
ggcgattccatgacagaaa

SEQ ID NO: 130428 - DNA, 19 bp, Homo sapiens
  siRNA target sequence for DMN (NM_015286.4,2032-2050).
gtagcagaaaacatcgtta

SEQ ID NO: 130429 - DNA, 19 bp, Homo sapiens
  siRNA target sequence for DMN (NM_015286.4,2105-2123).
cttttccagacacaaaagt

SEQ ID NO: 130430 - DNA, 19 bp, Homo sapiens
  siRNA target sequence for DMN (NM_015286.4,2230-2248).
ctggactaccttttaagca

SEQ ID NO: 130431 - DNA, 19 bp, Homo sapiens
  siRNA target sequence for DMN (NM_015286.4,2280-2298).
gtcagccgagcagatgata

SEQ ID NO: 130432 - DNA, 19 bp, Homo sapiens
  siRNA target sequence for DMN (NM_015286.4,2371-2389).
gagcccgtgagttatgtca

SEQ ID NO: 130433 - DNA, 19 bp, Homo sapiens
  siRNA target sequence for DMN (NM_015286.4,2409-2427).
gttttccgtcccattcaaa

SEQ ID NO: 130434 - DNA, 19 bp, Homo sapiens
  siRNA target sequence for DMN (NM_015286.4,2456-2474).
gcccctgggggttggttaa

SEQ ID NO: 130435 - DNA, 19 bp, Homo sapiens
  siRNA target sequence for DMN (NM_015286.4,2555-2573).
cgactcacgtggaagaagt

SEQ ID NO: 130436 - DNA, 19 bp, Homo sapiens
  siRNA target sequence for DMN (NM_015286.4,2591-2609).
cagagggcgagcagagtta

SEQ ID NO: 130437 - DNA, 19 bp, Homo sapiens
  siRNA target sequence for DMN (NM_015286.4,2593-2611).
gagggcgagcagagttatt

SEQ ID NO: 130438 - DNA, 19 bp, Homo sapiens
  siRNA target sequence for DMN (NM_015286.4,2595-2613).
gggcgagcagagttatttt

SEQ ID NO: 130439 - DNA, 19 bp, Homo sapiens
  siRNA target sequence for DMN (NM_015286.4,2597-2615).
gcgagcagagttattttgt

SEQ ID NO: 130440 - DNA, 19 bp, Homo sapiens
  siRNA target sequence for DMN (NM_015286.4,2852-2870).
ctagaagcggtgaatttca

SEQ ID NO: 130441 - DNA, 19 bp, Homo sapiens
  siRNA target sequence for DMN (NM_015286.4,3124-3142).
gaagtcaacgtctcacaaa

SEQ ID NO: 130442 - DNA, 19 bp, Homo sapiens
  siRNA target sequence for DMN (NM_015286.4,3326-3344).
ccacccgggagctgtacat

SEQ ID NO: 130443 - DNA, 19 bp, Homo sapiens
  siRNA target sequence for DMN (NM_015286.4,3527-3545).
ggactgagcgaatgtcata

SEQ ID NO: 130444 - DNA, 19 bp, Homo sapiens
  siRNA target sequence for DMN (NM_015286.4,3530-3548).
ctgagcgaatgtcatatga

SEQ ID NO: 130445 - DNA, 19 bp, Homo sapiens
  siRNA target sequence for DMN (NM_015286.4,3682-3700).
gcagttggtgtgagcttta

SEQ ID NO: 130446 - DNA, 19 bp, Homo sapiens
  siRNA target sequence for DMN (NM_015286.4,3683-3701).
cagttggtgtgagctttaa

SEQ ID NO: 130447 - DNA, 19 bp, Homo sapiens
  siRNA target sequence for DMN (NM_015286.4,3748-3766).
gagcaggccatgtttgata

SEQ ID NO: 130448 - DNA, 19 bp, Homo sapiens
  siRNA target sequence for DMN (NM_015286.4,3793-3811).
gaccaaaggtcggtgattt

SEQ ID NO: 130449 - DNA, 19 bp, Homo sapiens
  siRNA target sequence for DMN (NM_015286.4,3831-3849).
cctcctctatctagacaat

SEQ ID NO: 130450 - DNA, 19 bp, Homo sapiens
  siRNA target sequence for DMN (NM_145728.1,3581-3599).
cgggaggtgacctaagtca

SEQ ID NO: 130451 - DNA, 19 bp, Homo sapiens
  siRNA target sequence for DMN (NM_145728.1,3645-3663).
gctgggtcccggtcaaagt

SEQ ID NO: 130452 - DNA, 19 bp, Homo sapiens
  siRNA target sequence for DMN (NM_145728.1,3785-3803).
catttggctgcagacaatt

SEQ ID NO: 130453 - DNA, 19 bp, Homo sapiens
  siRNA target sequence for DMN (NM_145728.1,3848-3866).
cagggaaggttggtgatta

SEQ ID NO: 130454 - DNA, 19 bp, Homo sapiens
  siRNA target sequence for DMN (NM_145728.1,4079-4097).
ccacccagcagatagttta

SEQ ID NO: 130455 - DNA, 19 bp, Homo sapiens
  siRNA target sequence for DMN (NM_145728.1,4082-4100).
cccagcagatagtttacca

SEQ ID NO: 130456 - DNA, 19 bp, Homo sapiens
  siRNA target sequence for DMN (NM_145728.1,4083-4101).
ccagcagatagtttaccat

SEQ ID NO: 130457 - DNA, 19 bp, Homo sapiens
  siRNA target sequence for DMN (NM_145728.1,4177-4195).
caggccactcacagtcata

SEQ ID NO: 130458 - DNA, 19 bp, Homo sapiens
  siRNA target sequence for DMN (NM_145728.1,4207-4225).
caaaccgttatgactgaaa

SEQ ID NO: 130459 - DNA, 19 bp, Homo sapiens
  siRNA target sequence for DMN (NM_145728.1,4305-4323).
gggtgttagcagatccttt

SEQ ID NO: 130460 - DNA, 19 bp, Homo sapiens
  siRNA target sequence for DMN (NM_145728.1,4306-4324).
ggtgttagcagatccttta

SEQ ID NO: 130461 - DNA, 19 bp, Homo sapiens
  siRNA target sequence for DMN (NM_145728.1,4333-4351).
cgactaggtcctacagaaa

SEQ ID NO: 130462 - DNA, 19 bp, Homo sapiens
  siRNA target sequence for DMN (NM_145728.1,4381-4399).
ggacccgtgtccagaacat

SEQ ID NO: 130463 - DNA, 19 bp, Homo sapiens
  siRNA target sequence for DMN (NM_145728.1,4382-4400).
gacccgtgtccagaacatt

SEQ ID NO: 130464 - DNA, 19 bp, Homo sapiens
  siRNA target sequence for DMN (NM_145728.1,4425-4443).
ccctgagctaggcaagtta

SEQ ID NO: 130465 - DNA, 19 bp, Homo sapiens
  siRNA target sequence for DMN (NM_145728.1,4482-4500).
gcccaaagaaacttcgttt

SEQ ID NO: 130466 - DNA, 19 bp, Homo sapiens
  siRNA target sequence for DMXL1 (NM_005509.3,158-176).
gcgcttcacggcttatgca

SEQ ID NO: 130467 - DNA, 19 bp, Homo sapiens
  siRNA target sequence for DMXL1 (NM_005509.3,159-177).
cgcttcacggcttatgcat

SEQ ID NO: 130468 - DNA, 19 bp, Homo sapiens
  siRNA target sequence for DMXL1 (NM_005509.3,178-196).
ctggatgtgacattgtaat

SEQ ID NO: 130469 - DNA, 19 bp, Homo sapiens
  siRNA target sequence for DMXL1 (NM_005509.3,181-199).
gatgtgacattgtaatact

SEQ ID NO: 130470 - DNA, 19 bp, Homo sapiens
  siRNA target sequence for DMXL1 (NM_005509.3,205-223).
gcgattttgaaagattaca

SEQ ID NO: 130471 - DNA, 19 bp, Homo sapiens
  siRNA target sequence for DMXL1 (NM_005509.3,235-253).
gagctaaacatggaaatat

SEQ ID NO: 130472 - DNA, 19 bp, Homo sapiens
  siRNA target sequence for DMXL1 (NM_005509.3,261-279).
ggatgtgtagactgttcaa

SEQ ID NO: 130473 - DNA, 19 bp, Homo sapiens
  siRNA target sequence for DMXL1 (NM_005509.3,262-280).
gatgtgtagactgttcaat

SEQ ID NO: 130474 - DNA, 19 bp, Homo sapiens
  siRNA target sequence for DMXL1 (NM_005509.3,290-308).
caagattgcagcgtcttat

SEQ ID NO: 130475 - DNA, 19 bp, Homo sapiens
  siRNA target sequence for DMXL1 (NM_005509.3,298-316).
cagcgtcttatggaaatgt

SEQ ID NO: 130476 - DNA, 19 bp, Homo sapiens
  siRNA target sequence for DMXL1 (NM_005509.3,383-401).
gcagaaaagtggccaattt

SEQ ID NO: 130477 - DNA, 19 bp, Homo sapiens
  siRNA target sequence for DMXL1 (NM_005509.3,384-402).
cagaaaagtggccaatttt

SEQ ID NO: 130478 - DNA, 19 bp, Homo sapiens
  siRNA target sequence for DMXL1 (NM_005509.3,439-457).
ccacaggcagtcgtctttt

SEQ ID NO: 130479 - DNA, 19 bp, Homo sapiens
  siRNA target sequence for DMXL1 (NM_005509.3,440-458).
cacaggcagtcgtctttta

SEQ ID NO: 130480 - DNA, 19 bp, Homo sapiens
  siRNA target sequence for DMXL1 (NM_005509.3,476-494).
gcaactctggtccaatact

SEQ ID NO: 130481 - DNA, 19 bp, Homo sapiens
  siRNA target sequence for DMXL1 (NM_005509.3,480-498).
ctctggtccaatactaact

SEQ ID NO: 130482 - DNA, 19 bp, Homo sapiens
  siRNA target sequence for DMXL1 (NM_005509.3,683-701).
ctggcggacagctgttact

SEQ ID NO: 130483 - DNA, 19 bp, Homo sapiens
  siRNA target sequence for DMXL1 (NM_005509.3,686-704).
gcggacagctgttacttct

SEQ ID NO: 130484 - DNA, 19 bp, Homo sapiens
  siRNA target sequence for DMXL1 (NM_005509.3,766-784).
cccatcctcgagcagtaaa

SEQ ID NO: 130485 - DNA, 19 bp, Homo sapiens
  siRNA target sequence for DMXL1 (NM_005509.3,794-812).
ctggcgtaaaacaagcaaa

SEQ ID NO: 130486 - DNA, 19 bp, Homo sapiens
  siRNA target sequence for DMXL1 (NM_005509.3,796-814).
ggcgtaaaacaagcaaata

SEQ ID NO: 130487 - DNA, 19 bp, Homo sapiens
  siRNA target sequence for DMXL1 (NM_005509.3,818-836).
gcctagggcttctgtatgt

SEQ ID NO: 130488 - DNA, 19 bp, Homo sapiens
  siRNA target sequence for DMXL1 (NM_005509.3,819-837).
cctagggcttctgtatgta

SEQ ID NO: 130489 - DNA, 19 bp, Homo sapiens
  siRNA target sequence for DMXL1 (NM_005509.3,820-838).
ctagggcttctgtatgtaa

SEQ ID NO: 130490 - DNA, 19 bp, Homo sapiens
  siRNA target sequence for DMXL1 (NM_005509.3,829-847).
ctgtatgtaatgtactgtt

SEQ ID NO: 130491 - DNA, 19 bp, Homo sapiens
  siRNA target sequence for DMXL1 (NM_005509.3,876-894).
ctttgggtagagacatttt

SEQ ID NO: 130492 - DNA, 19 bp, Homo sapiens
  siRNA target sequence for DMXL1 (NM_005509.3,882-900).
gtagagacatttttaccaa

SEQ ID NO: 130493 - DNA, 19 bp, Homo sapiens
  siRNA target sequence for DMXL1 (NM_005509.3,929-947).
cagccattggactgaatca

SEQ ID NO: 130494 - DNA, 19 bp, Homo sapiens
  siRNA target sequence for DMXL1 (NM_005509.3,983-1001).
cagtaaagaacgagttcaa

SEQ ID NO: 130495 - DNA, 19 bp, Homo sapiens
  siRNA target sequence for DMXL1 (NM_005509.3,1005-1023).
gctttagaagtaaatctga

SEQ ID NO: 130496 - DNA, 19 bp, Homo sapiens
  siRNA target sequence for DMXL1 (NM_005509.3,1207-1225).
catctctgagtctaaatga

SEQ ID NO: 130497 - DNA, 19 bp, Homo sapiens
  siRNA target sequence for DMXL1 (NM_005509.3,1238-1256).
gaccggaccttttgttgta

SEQ ID NO: 130498 - DNA, 19 bp, Homo sapiens
  siRNA target sequence for DMXL1 (NM_005509.3,1240-1258).
ccggaccttttgttgtaca

SEQ ID NO: 130499 - DNA, 19 bp, Homo sapiens
  siRNA target sequence for DMXL1 (NM_005509.3,1261-1279).
ggctaaacaataaagaact

SEQ ID NO: 130500 - DNA, 19 bp, Homo sapiens
  siRNA target sequence for DMXL1 (NM_005509.3,1349-1367).
ggccagtgtagaagattct

SEQ ID NO: 130501 - DNA, 19 bp, Homo sapiens
  siRNA target sequence for DMXL1 (NM_005509.3,1366-1384).
ctaatcaggcagatgtaaa

SEQ ID NO: 130502 - DNA, 19 bp, Homo sapiens
  siRNA target sequence for DMXL1 (NM_005509.3,1373-1391).
ggcagatgtaaaatctgat

SEQ ID NO: 130503 - DNA, 19 bp, Homo sapiens
  siRNA target sequence for DMXL1 (NM_005509.3,1453-1471).
gtgataaaatggtaccaaa

SEQ ID NO: 130504 - DNA, 19 bp, Homo sapiens
  siRNA target sequence for DMXL1 (NM_005509.3,1467-1485).
ccaaactcaagttttacat

SEQ ID NO: 130505 - DNA, 19 bp, Homo sapiens
  siRNA target sequence for DMXL1 (NM_005509.3,1492-1510).
cgtcagctgccattgatca

SEQ ID NO: 130506 - DNA, 19 bp, Homo sapiens
  siRNA target sequence for DMXL1 (NM_005509.3,1501-1519).
ccattgatcatcagattga

SEQ ID NO: 130507 - DNA, 19 bp, Homo sapiens
  siRNA target sequence for DMXL1 (NM_005509.3,1502-1520).
cattgatcatcagattgaa

SEQ ID NO: 130508 - DNA, 19 bp, Homo sapiens
  siRNA target sequence for DMXL1 (NM_005509.3,1574-1592).
catggatggttctttgcta

SEQ ID NO: 130509 - DNA, 19 bp, Homo sapiens
  siRNA target sequence for DMXL1 (NM_005509.3,1685-1703).
cacaggtgatgcaaactct

SEQ ID NO: 130510 - DNA, 19 bp, Homo sapiens
  siRNA target sequence for DMXL1 (NM_005509.3,1732-1750).
gtaccaagaatgttgactt

SEQ ID NO: 130511 - DNA, 19 bp, Homo sapiens
  siRNA target sequence for DMXL1 (NM_005509.3,1785-1803).
ctcacccgttccacatcaa

SEQ ID NO: 130512 - DNA, 19 bp, Homo sapiens
  siRNA target sequence for DMXL1 (NM_005509.3,1790-1808).
ccgttccacatcaatgctt

SEQ ID NO: 130513 - DNA, 19 bp, Homo sapiens
  siRNA target sequence for DMXL1 (NM_005509.3,1791-1809).
cgttccacatcaatgctta

SEQ ID NO: 130514 - DNA, 19 bp, Homo sapiens
  siRNA target sequence for DMXL1 (NM_005509.3,1792-1810).
gttccacatcaatgcttat

SEQ ID NO: 130515 - DNA, 19 bp, Homo sapiens
  siRNA target sequence for DMXL1 (NM_005509.3,1818-1836).
ggtcacaataaatcatcta

SEQ ID NO: 130516 - DNA, 19 bp, Homo sapiens
  siRNA target sequence for DMXL1 (NM_005509.3,1819-1837).
gtcacaataaatcatctaa

SEQ ID NO: 130517 - DNA, 19 bp, Homo sapiens
  siRNA target sequence for DMXL1 (NM_005509.3,1852-1870).
gtatttttacgcctaatgt

SEQ ID NO: 130518 - DNA, 19 bp, Homo sapiens
  siRNA target sequence for DMXL1 (NM_005509.3,1964-1982).
ccacaaatccagatattgt

SEQ ID NO: 130519 - DNA, 19 bp, Homo sapiens
  siRNA target sequence for DMXL1 (NM_005509.3,2039-2057).
gacaacatcacaccataat

SEQ ID NO: 130520 - DNA, 19 bp, Homo sapiens
  siRNA target sequence for DMXL1 (NM_005509.3,2049-2067).
caccataatgcattaagga

SEQ ID NO: 130521 - DNA, 19 bp, Homo sapiens
  siRNA target sequence for DMXL1 (NM_005509.3,2084-2102).
cccagagcaaccttttgat

SEQ ID NO: 130522 - DNA, 19 bp, Homo sapiens
  siRNA target sequence for DMXL1 (NM_005509.3,2149-2167).
ctgttgacgtggcatttca

SEQ ID NO: 130523 - DNA, 19 bp, Homo sapiens
  siRNA target sequence for DMXL1 (NM_005509.3,2169-2187).
gatcccagtgcagtttaca

SEQ ID NO: 130524 - DNA, 19 bp, Homo sapiens
  siRNA target sequence for DMXL1 (NM_005509.3,2215-2233).
cagttgggccattgtcttt

SEQ ID NO: 130525 - DNA, 19 bp, Homo sapiens
  siRNA target sequence for DMXL1 (NM_005509.3,2248-2266).
ctgagcttgcccggattaa

SEQ ID NO: 130526 - DNA, 19 bp, Homo sapiens
  siRNA target sequence for DMXL1 (NM_005509.3,2250-2268).
gagcttgcccggattaatt

SEQ ID NO: 130527 - DNA, 19 bp, Homo sapiens
  siRNA target sequence for DMXL1 (NM_005509.3,2258-2276).
ccggattaattctcttcat

SEQ ID NO: 130528 - DNA, 19 bp, Homo sapiens
  siRNA target sequence for DMXL1 (NM_005509.3,2298-2316).
gcatggctgcccactctta

SEQ ID NO: 130529 - DNA, 19 bp, Homo sapiens
  siRNA target sequence for DMXL1 (NM_005509.3,2309-2327).
cactcttatacccagttat

SEQ ID NO: 130530 - DNA, 19 bp, Homo sapiens
  siRNA target sequence for DMXL1 (NM_005509.3,2348-2366).
ctctcctagtgcatgcttt

SEQ ID NO: 130531 - DNA, 19 bp, Homo sapiens
  siRNA target sequence for DMXL1 (NM_005509.3,2379-2397).
ggacaatatctgagattat

SEQ ID NO: 130532 - DNA, 19 bp, Homo sapiens
  siRNA target sequence for DMXL1 (NM_005509.3,2380-2398).
gacaatatctgagattata

SEQ ID NO: 130533 - DNA, 19 bp, Homo sapiens
  siRNA target sequence for DMXL1 (NM_005509.3,2480-2498).
catcgtcagtcaacaatca

SEQ ID NO: 130534 - DNA, 19 bp, Homo sapiens
  siRNA target sequence for DMXL1 (NM_005509.3,2508-2526).
ccaggatgcattattgcat

SEQ ID NO: 130535 - DNA, 19 bp, Homo sapiens
  siRNA target sequence for DMXL1 (NM_005509.3,2509-2527).
caggatgcattattgcatt

SEQ ID NO: 130536 - DNA, 19 bp, Homo sapiens
  siRNA target sequence for DMXL1 (NM_005509.3,2512-2530).
gatgcattattgcattaga

SEQ ID NO: 130537 - DNA, 19 bp, Homo sapiens
  siRNA target sequence for DMXL1 (NM_005509.3,2524-2542).
cattagatcccattaccaa

SEQ ID NO: 130538 - DNA, 19 bp, Homo sapiens
  siRNA target sequence for DMXL1 (NM_005509.3,2588-2606).
cttcattttgaataacctt

SEQ ID NO: 130539 - DNA, 19 bp, Homo sapiens
  siRNA target sequence for DMXL1 (NM_005509.3,2649-2667).
ggcagctcacctaatggat

SEQ ID NO: 130540 - DNA, 19 bp, Homo sapiens
  siRNA target sequence for DMXL1 (NM_005509.3,2681-2699).
ctacctaattgtaatagaa

SEQ ID NO: 130541 - DNA, 19 bp, Homo sapiens
  siRNA target sequence for DMXL1 (NM_005509.3,2721-2739).
ctgttacacatgtggaatt

SEQ ID NO: 130542 - DNA, 19 bp, Homo sapiens
  siRNA target sequence for DMXL1 (NM_005509.3,2723-2741).
gttacacatgtggaattta

SEQ ID NO: 130543 - DNA, 19 bp, Homo sapiens
  siRNA target sequence for DMXL1 (NM_005509.3,2735-2753).
gaatttacatctaaagtca

SEQ ID NO: 130544 - DNA, 19 bp, Homo sapiens
  siRNA target sequence for DMXL1 (NM_005509.3,2806-2824).
ggcagccagaagaacatta

SEQ ID NO: 130545 - DNA, 19 bp, Homo sapiens
  siRNA target sequence for DMXL1 (NM_005509.3,2807-2825).
gcagccagaagaacattat

SEQ ID NO: 130546 - DNA, 19 bp, Homo sapiens
  siRNA target sequence for DMXL1 (NM_005509.3,2840-2858).
gaagatcctatctcctttt

SEQ ID NO: 130547 - DNA, 19 bp, Homo sapiens
  siRNA target sequence for DMXL1 (NM_005509.3,2847-2865).
ctatctcctttttcacaaa

SEQ ID NO: 130548 - DNA, 19 bp, Homo sapiens
  siRNA target sequence for DMXL1 (NM_005509.3,2936-2954).
ccaagaattgcatttacca

SEQ ID NO: 130549 - DNA, 19 bp, Homo sapiens
  siRNA target sequence for DMXL1 (NM_005509.3,2955-2973).
gaaggagttgagataataa

SEQ ID NO: 130550 - DNA, 19 bp, Homo sapiens
  siRNA target sequence for DMXL1 (NM_005509.3,3025-3043).
gcagtgctccttatttatt

SEQ ID NO: 130551 - DNA, 19 bp, Homo sapiens
  siRNA target sequence for DMXL1 (NM_005509.3,3060-3078).
gatgagaaagtaagattct

SEQ ID NO: 130552 - DNA, 19 bp, Homo sapiens
  siRNA target sequence for DMXL1 (NM_005509.3,3102-3120).
gaatctgccacgtcaaaga

SEQ ID NO: 130553 - DNA, 19 bp, Homo sapiens
  siRNA target sequence for DMXL1 (NM_005509.3,3108-3126).
gccacgtcaaagaatggaa

SEQ ID NO: 130554 - DNA, 19 bp, Homo sapiens
  siRNA target sequence for DMXL1 (NM_005509.3,3150-3168).
gaagaatggccattactta

SEQ ID NO: 130555 - DNA, 19 bp, Homo sapiens
  siRNA target sequence for DMXL1 (NM_005509.3,3177-3195).
ggacttcagagcaatagta

SEQ ID NO: 130556 - DNA, 19 bp, Homo sapiens
  siRNA target sequence for DMXL1 (NM_005509.3,3180-3198).
cttcagagcaatagtagta

SEQ ID NO: 130557 - DNA, 19 bp, Homo sapiens
  siRNA target sequence for DMXL1 (NM_005509.3,3183-3201).
cagagcaatagtagtataa

SEQ ID NO: 130558 - DNA, 19 bp, Homo sapiens
  siRNA target sequence for DMXL1 (NM_005509.3,3185-3203).
gagcaatagtagtataact

SEQ ID NO: 130559 - DNA, 19 bp, Homo sapiens
  siRNA target sequence for DMXL1 (NM_005509.3,3210-3228).
ggtaggcctgtagaagtta

SEQ ID NO: 130560 - DNA, 19 bp, Homo sapiens
  siRNA target sequence for DMXL1 (NM_005509.3,3230-3248).
ctgtgcacatacaaatcgt

SEQ ID NO: 130561 - DNA, 19 bp, Homo sapiens
  siRNA target sequence for DMXL1 (NM_005509.3,3232-3250).
gtgcacatacaaatcgttt

SEQ ID NO: 130562 - DNA, 19 bp, Homo sapiens
  siRNA target sequence for DMXL1 (NM_005509.3,3246-3264).
cgtttagcagtagcttata

SEQ ID NO: 130563 - DNA, 19 bp, Homo sapiens
  siRNA target sequence for DMXL1 (NM_005509.3,3247-3265).
gtttagcagtagcttataa

SEQ ID NO: 130564 - DNA, 19 bp, Homo sapiens
  siRNA target sequence for DMXL1 (NM_005509.3,3266-3284).
gcagcctgcatctaatagt

SEQ ID NO: 130565 - DNA, 19 bp, Homo sapiens
  siRNA target sequence for DMXL1 (NM_005509.3,3267-3285).
cagcctgcatctaatagta

SEQ ID NO: 130566 - DNA, 19 bp, Homo sapiens
  siRNA target sequence for DMXL1 (NM_005509.3,3269-3287).
gcctgcatctaatagtaga

SEQ ID NO: 130567 - DNA, 19 bp, Homo sapiens
  siRNA target sequence for DMXL1 (NM_005509.3,3270-3288).
cctgcatctaatagtagat

SEQ ID NO: 130568 - DNA, 19 bp, Homo sapiens
  siRNA target sequence for DMXL1 (NM_005509.3,3332-3350).
gtcaacaggaggttcatgt

SEQ ID NO: 130569 - DNA, 19 bp, Homo sapiens
  siRNA target sequence for DMXL1 (NM_005509.3,3357-3375).
cttgagcagacaattcatt

SEQ ID NO: 130570 - DNA, 19 bp, Homo sapiens
  siRNA target sequence for DMXL1 (NM_005509.3,3362-3380).
gcagacaattcatttagat

SEQ ID NO: 130571 - DNA, 19 bp, Homo sapiens
  siRNA target sequence for DMXL1 (NM_005509.3,3383-3401).
gttaagcacagtattggat

SEQ ID NO: 130572 - DNA, 19 bp, Homo sapiens
  siRNA target sequence for DMXL1 (NM_005509.3,3407-3425).
cattagtgttgatagcaat

SEQ ID NO: 130573 - DNA, 19 bp, Homo sapiens
  siRNA target sequence for DMXL1 (NM_005509.3,3433-3451).
cctataataaacaagacat

SEQ ID NO: 130574 - DNA, 19 bp, Homo sapiens
  siRNA target sequence for DMXL1 (NM_005509.3,3501-3519).
cacttagattggatgtcta

SEQ ID NO: 130575 - DNA, 19 bp, Homo sapiens
  siRNA target sequence for DMXL1 (NM_005509.3,3539-3557).
cctgactgtaggaattgga

SEQ ID NO: 130576 - DNA, 19 bp, Homo sapiens
  siRNA target sequence for DMXL1 (NM_005509.3,3556-3574).
gatcaaaactttttatgta

SEQ ID NO: 130577 - DNA, 19 bp, Homo sapiens
  siRNA target sequence for DMXL1 (NM_005509.3,3614-3632).
ggaaaccctggcatttcct

SEQ ID NO: 130578 - DNA, 19 bp, Homo sapiens
  siRNA target sequence for DMXL1 (NM_005509.3,3635-3653).
ctgggagagtaccaaagtt

SEQ ID NO: 130579 - DNA, 19 bp, Homo sapiens
  siRNA target sequence for DMXL1 (NM_005509.3,3651-3669).
gttgtgcccctttctaaat

SEQ ID NO: 130580 - DNA, 19 bp, Homo sapiens
  siRNA target sequence for DMXL1 (NM_005509.3,3681-3699).
cgaagtgtggacctagttt

SEQ ID NO: 130581 - DNA, 19 bp, Homo sapiens
  siRNA target sequence for DMXL1 (NM_005509.3,3797-3815).
ccaatggcaaccatcttct

SEQ ID NO: 130582 - DNA, 19 bp, Homo sapiens
  siRNA target sequence for DMXL1 (NM_005509.3,3798-3816).
caatggcaaccatcttcta

SEQ ID NO: 130583 - DNA, 19 bp, Homo sapiens
  siRNA target sequence for DMXL1 (NM_005509.3,3826-3844).
ctgttataacagattcgta

SEQ ID NO: 130584 - DNA, 19 bp, Homo sapiens
  siRNA target sequence for DMXL1 (NM_005509.3,3847-3865).
gtgggagcactccatctat

SEQ ID NO: 130585 - DNA, 19 bp, Homo sapiens
  siRNA target sequence for DMXL1 (NM_005509.3,3890-3908).
ctccagttctgggttacat

SEQ ID NO: 130586 - DNA, 19 bp, Homo sapiens
  siRNA target sequence for DMXL1 (NM_005509.3,3901-3919).
ggttacatcctccaaagaa

SEQ ID NO: 130587 - DNA, 19 bp, Homo sapiens
  siRNA target sequence for DMXL1 (NM_005509.3,3902-3920).
gttacatcctccaaagaaa

SEQ ID NO: 130588 - DNA, 19 bp, Homo sapiens
  siRNA target sequence for DMXL1 (NM_005509.3,3940-3958).
ccagtcttgcacagaaaat

SEQ ID NO: 130589 - DNA, 19 bp, Homo sapiens
  siRNA target sequence for DMXL1 (NM_005509.3,4037-4055).
cccgactctacctcagtat

SEQ ID NO: 130590 - DNA, 19 bp, Homo sapiens
  siRNA target sequence for DMXL1 (NM_005509.3,4039-4057).
cgactctacctcagtatca

SEQ ID NO: 130591 - DNA, 19 bp, Homo sapiens
  siRNA target sequence for DMXL1 (NM_005509.3,4040-4058).
gactctacctcagtatcat

SEQ ID NO: 130592 - DNA, 19 bp, Homo sapiens
  siRNA target sequence for DMXL1 (NM_005509.3,4111-4129).
ccatcttgtcccatcttgt

SEQ ID NO: 130593 - DNA, 19 bp, Homo sapiens
  siRNA target sequence for DMXL1 (NM_005509.3,4112-4130).
catcttgtcccatcttgtt

SEQ ID NO: 130594 - DNA, 19 bp, Homo sapiens
  siRNA target sequence for DMXL1 (NM_005509.3,4191-4209).
cttaggtctctcacaatca

SEQ ID NO: 130595 - DNA, 19 bp, Homo sapiens
  siRNA target sequence for DMXL1 (NM_005509.3,4233-4251).
gacccccaggcattcaaca

SEQ ID NO: 130596 - DNA, 19 bp, Homo sapiens
  siRNA target sequence for DMXL1 (NM_005509.3,4266-4284).
gattacacagaaatagatt

SEQ ID NO: 130597 - DNA, 19 bp, Homo sapiens
  siRNA target sequence for DMXL1 (NM_005509.3,4329-4347).
gatagctgttactcatctt

SEQ ID NO: 130598 - DNA, 19 bp, Homo sapiens
  siRNA target sequence for DMXL1 (NM_005509.3,4340-4358).
ctcatctttggagaaatct

SEQ ID NO: 130599 - DNA, 19 bp, Homo sapiens
  siRNA target sequence for DMXL1 (NM_005509.3,4367-4385).
gagtacgttaagtaaatca

SEQ ID NO: 130600 - DNA, 19 bp, Homo sapiens
  siRNA target sequence for DMXL1 (NM_005509.3,4369-4387).
gtacgttaagtaaatcaaa

SEQ ID NO: 130601 - DNA, 19 bp, Homo sapiens
  siRNA target sequence for DMXL1 (NM_005509.3,4424-4442).
gactcaacttctaatgact

SEQ ID NO: 130602 - DNA, 19 bp, Homo sapiens
  siRNA target sequence for DMXL1 (NM_005509.3,4428-4446).
caacttctaatgactgata

SEQ ID NO: 130603 - DNA, 19 bp, Homo sapiens
  siRNA target sequence for DMXL1 (NM_005509.3,4434-4452).
ctaatgactgatactcata

SEQ ID NO: 130604 - DNA, 19 bp, Homo sapiens
  siRNA target sequence for DMXL1 (NM_005509.3,4439-4457).
gactgatactcatatgtta

SEQ ID NO: 130605 - DNA, 19 bp, Homo sapiens
  siRNA target sequence for DMXL1 (NM_005509.3,4477-4495).
caaagcctagagttattga

SEQ ID NO: 130606 - DNA, 19 bp, Homo sapiens
  siRNA target sequence for DMXL1 (NM_005509.3,4503-4521).
cagtacagtccgacttact

SEQ ID NO: 130607 - DNA, 19 bp, Homo sapiens
  siRNA target sequence for DMXL1 (NM_005509.3,4505-4523).
gtacagtccgacttacttt

SEQ ID NO: 130608 - DNA, 19 bp, Homo sapiens
  siRNA target sequence for DMXL1 (NM_005509.3,4588-4606).
ggatggagcagatgtcttt

SEQ ID NO: 130609 - DNA, 19 bp, Homo sapiens
  siRNA target sequence for DMXL1 (NM_005509.3,4610-4628).
ggccttagcagatacaatt

SEQ ID NO: 130610 - DNA, 19 bp, Homo sapiens
  siRNA target sequence for DMXL1 (NM_005509.3,4613-4631).
cttagcagatacaattgca

SEQ ID NO: 130611 - DNA, 19 bp, Homo sapiens
  siRNA target sequence for DMXL1 (NM_005509.3,4620-4638).
gatacaattgcaactacaa

SEQ ID NO: 130612 - DNA, 19 bp, Homo sapiens
  siRNA target sequence for DMXL1 (NM_005509.3,4629-4647).
gcaactacaagcactgata

SEQ ID NO: 130613 - DNA, 19 bp, Homo sapiens
  siRNA target sequence for DMXL1 (NM_005509.3,4717-4735).
ctgttcgactccatacctt

SEQ ID NO: 130614 - DNA, 19 bp, Homo sapiens
  siRNA target sequence for DMXL1 (NM_005509.3,4725-4743).
ctccatacctttcttacaa

SEQ ID NO: 130615 - DNA, 19 bp, Homo sapiens
  siRNA target sequence for DMXL1 (NM_005509.3,4783-4801).
gcctgtctacaagtcattt

SEQ ID NO: 130616 - DNA, 19 bp, Homo sapiens
  siRNA target sequence for DMXL1 (NM_005509.3,4787-4805).
gtctacaagtcattttgct

SEQ ID NO: 130617 - DNA, 19 bp, Homo sapiens
  siRNA target sequence for DMXL1 (NM_005509.3,4850-4868).
gccagccatgcagaaagat

SEQ ID NO: 130618 - DNA, 19 bp, Homo sapiens
  siRNA target sequence for DMXL1 (NM_005509.3,4872-4890).
cccacttggtctgaactaa

SEQ ID NO: 130619 - DNA, 19 bp, Homo sapiens
  siRNA target sequence for DMXL1 (NM_005509.3,4916-4934).
ccggaatacccgcatctta

SEQ ID NO: 130620 - DNA, 19 bp, Homo sapiens
  siRNA target sequence for DMXL1 (NM_005509.3,4926-4944).
cgcatcttacgcaaatgca

SEQ ID NO: 130621 - DNA, 19 bp, Homo sapiens
  siRNA target sequence for DMXL1 (NM_005509.3,4927-4945).
gcatcttacgcaaatgcat

SEQ ID NO: 130622 - DNA, 19 bp, Homo sapiens
  siRNA target sequence for DMXL1 (NM_005509.3,4928-4946).
catcttacgcaaatgcata

SEQ ID NO: 130623 - DNA, 19 bp, Homo sapiens
  siRNA target sequence for DMXL1 (NM_005509.3,4931-4949).
cttacgcaaatgcatagaa

SEQ ID NO: 130624 - DNA, 19 bp, Homo sapiens
  siRNA target sequence for DMXL1 (NM_005509.3,4942-4960).
gcatagaaaaagtagctaa

SEQ ID NO: 130625 - DNA, 19 bp, Homo sapiens
  siRNA target sequence for DMXL1 (NM_005509.3,4956-4974).
gctaaagcagccttttata

SEQ ID NO: 130626 - DNA, 19 bp, Homo sapiens
  siRNA target sequence for DMXL1 (NM_005509.3,4999-5017).
ccattttttaccttgcaat

SEQ ID NO: 130627 - DNA, 19 bp, Homo sapiens
  siRNA target sequence for DMXL1 (NM_005509.3,5033-5051).
gatttggggattatataga

SEQ ID NO: 130628 - DNA, 19 bp, Homo sapiens
  siRNA target sequence for DMXL1 (NM_005509.3,5108-5126).
gtggcgtaaagcagcttta

SEQ ID NO: 130629 - DNA, 19 bp, Homo sapiens
  siRNA target sequence for DMXL1 (NM_005509.3,5110-5128).
ggcgtaaagcagctttaaa

SEQ ID NO: 130630 - DNA, 19 bp, Homo sapiens
  siRNA target sequence for DMXL1 (NM_005509.3,5194-5212).
gttgcctcagagatgcaat

SEQ ID NO: 130631 - DNA, 19 bp, Homo sapiens
  siRNA target sequence for DMXL1 (NM_005509.3,5240-5258).
cattcagttggctcttgta

SEQ ID NO: 130632 - DNA, 19 bp, Homo sapiens
  siRNA target sequence for DMXL1 (NM_005509.3,5270-5288).
ctatgagtctgaatttgat

SEQ ID NO: 130633 - DNA, 19 bp, Homo sapiens
  siRNA target sequence for DMXL1 (NM_005509.3,5276-5294).
gtctgaatttgatacatct

SEQ ID NO: 130634 - DNA, 19 bp, Homo sapiens
  siRNA target sequence for DMXL1 (NM_005509.3,5286-5304).
gatacatctgcagcatata

SEQ ID NO: 130635 - DNA, 19 bp, Homo sapiens
  siRNA target sequence for DMXL1 (NM_005509.3,5295-5313).
gcagcatataaatctattt

SEQ ID NO: 130636 - DNA, 19 bp, Homo sapiens
  siRNA target sequence for DMXL1 (NM_005509.3,5346-5364).
gtcagtgaactgtgttcat

SEQ ID NO: 130637 - DNA, 19 bp, Homo sapiens
  siRNA target sequence for DMXL1 (NM_005509.3,5352-5370).
gaactgtgttcattgaaca

SEQ ID NO: 130638 - DNA, 19 bp, Homo sapiens
  siRNA target sequence for DMXL1 (NM_005509.3,5357-5375).
gtgttcattgaacataaat

SEQ ID NO: 130639 - DNA, 19 bp, Homo sapiens
  siRNA target sequence for DMXL1 (NM_005509.3,5394-5412).
cttcggagcatggcatatt

SEQ ID NO: 130640 - DNA, 19 bp, Homo sapiens
  siRNA target sequence for DMXL1 (NM_005509.3,5397-5415).
cggagcatggcatattgga

SEQ ID NO: 130641 - DNA, 19 bp, Homo sapiens
  siRNA target sequence for DMXL1 (NM_005509.3,5398-5416).
ggagcatggcatattggat

SEQ ID NO: 130642 - DNA, 19 bp, Homo sapiens
  siRNA target sequence for DMXL1 (NM_005509.3,5414-5432).
gattttggaagattatagt

SEQ ID NO: 130643 - DNA, 19 bp, Homo sapiens
  siRNA target sequence for DMXL1 (NM_005509.3,5436-5454).
gctctggaaacattaataa

SEQ ID NO: 130644 - DNA, 19 bp, Homo sapiens
  siRNA target sequence for DMXL1 (NM_005509.3,5456-5474).
gcaacctatcagagagaat

SEQ ID NO: 130645 - DNA, 19 bp, Homo sapiens
  siRNA target sequence for DMXL1 (NM_005509.3,5461-5479).
ctatcagagagaatgatga

SEQ ID NO: 130646 - DNA, 19 bp, Homo sapiens
  siRNA target sequence for DMXL1 (NM_005509.3,5550-5568).
ctgagacgtcattttggat

SEQ ID NO: 130647 - DNA, 19 bp, Homo sapiens
  siRNA target sequence for DMXL1 (NM_005509.3,5594-5612).
gagcctaacaggaaaaagt

SEQ ID NO: 130648 - DNA, 19 bp, Homo sapiens
  siRNA target sequence for DMXL1 (NM_005509.3,5611-5629).
gtggactggcaggaacaat

SEQ ID NO: 130649 - DNA, 19 bp, Homo sapiens
  siRNA target sequence for DMXL1 (NM_005509.3,5666-5684).
cagtgctcatttaaaagct

SEQ ID NO: 130650 - DNA, 19 bp, Homo sapiens
  siRNA target sequence for DMXL1 (NM_005509.3,5767-5785).
gttttctggatactagtaa

SEQ ID NO: 130651 - DNA, 19 bp, Homo sapiens
  siRNA target sequence for DMXL1 (NM_005509.3,5797-5815).
cttcttctccattaaagtt

SEQ ID NO: 130652 - DNA, 19 bp, Homo sapiens
  siRNA target sequence for DMXL1 (NM_005509.3,5852-5870).
gtcacagtcactgataaat

SEQ ID NO: 130653 - DNA, 19 bp, Homo sapiens
  siRNA target sequence for DMXL1 (NM_005509.3,5892-5910).
ggttcctcagagaagcaat

SEQ ID NO: 130654 - DNA, 19 bp, Homo sapiens
  siRNA target sequence for DMXL1 (NM_005509.3,5911-5929).
caaactccactctttcttt

SEQ ID NO: 130655 - DNA, 19 bp, Homo sapiens
  siRNA target sequence for DMXL1 (NM_005509.3,5938-5956).
gccaaccaagtgttgtgtt

SEQ ID NO: 130656 - DNA, 19 bp, Homo sapiens
  siRNA target sequence for DMXL1 (NM_005509.3,5961-5979).
gatgactctttagagttaa

SEQ ID NO: 130657 - DNA, 19 bp, Homo sapiens
  siRNA target sequence for DMXL1 (NM_005509.3,6009-6027).
gaggatgtccctatttcaa

SEQ ID NO: 130658 - DNA, 19 bp, Homo sapiens
  siRNA target sequence for DMXL1 (NM_005509.3,6033-6051).
gaactaaaacctttacaga

SEQ ID NO: 130659 - DNA, 19 bp, Homo sapiens
  siRNA target sequence for DMXL1 (NM_005509.3,6085-6103).
ctaactacacagaatcttt

SEQ ID NO: 130660 - DNA, 19 bp, Homo sapiens
  siRNA target sequence for DMXL1 (NM_005509.3,6174-6192).
gcatgtttaaagattctca

SEQ ID NO: 130661 - DNA, 19 bp, Homo sapiens
  siRNA target sequence for DMXL1 (NM_005509.3,6198-6216).
gaacttcgtactttatcta

SEQ ID NO: 130662 - DNA, 19 bp, Homo sapiens
  siRNA target sequence for DMXL1 (NM_005509.3,6214-6232).
ctactggctatgaaataga

SEQ ID NO: 130663 - DNA, 19 bp, Homo sapiens
  siRNA target sequence for DMXL1 (NM_005509.3,6255-6273).
ctataccactggcttgaaa

SEQ ID NO: 130664 - DNA, 19 bp, Homo sapiens
  siRNA target sequence for DMXL1 (NM_005509.3,6384-6402).
gatttgcctcaccaaacaa

SEQ ID NO: 130665 - DNA, 19 bp, Homo sapiens
  siRNA target sequence for DMXL1 (NM_005509.3,6516-6534).
ggtcttgcatctgtaagaa

SEQ ID NO: 130666 - DNA, 19 bp, Homo sapiens
  siRNA target sequence for DMXL1 (NM_005509.3,6657-6675).
gtagttgccaatccattat

SEQ ID NO: 130667 - DNA, 19 bp, Homo sapiens
  siRNA target sequence for DMXL1 (NM_005509.3,6669-6687).
ccattattgcaccttagta

SEQ ID NO: 130668 - DNA, 19 bp, Homo sapiens
  siRNA target sequence for DMXL1 (NM_005509.3,6670-6688).
cattattgcaccttagtaa

SEQ ID NO: 130669 - DNA, 19 bp, Homo sapiens
  siRNA target sequence for DMXL1 (NM_005509.3,6685-6703).
gtaatctgacacatgatat

SEQ ID NO: 130670 - DNA, 19 bp, Homo sapiens
  siRNA target sequence for DMXL1 (NM_005509.3,6733-6751).
caccccaccctgatatcca

SEQ ID NO: 130671 - DNA, 19 bp, Homo sapiens
  siRNA target sequence for DMXL1 (NM_005509.3,6735-6753).
ccccaccctgatatccaaa

SEQ ID NO: 130672 - DNA, 19 bp, Homo sapiens
  siRNA target sequence for DMXL1 (NM_005509.3,6762-6780).
gtgtatgtaatgcatactt

SEQ ID NO: 130673 - DNA, 19 bp, Homo sapiens
  siRNA target sequence for DMXL1 (NM_005509.3,6764-6782).
gtatgtaatgcatacttta

SEQ ID NO: 130674 - DNA, 19 bp, Homo sapiens
  siRNA target sequence for DMXL1 (NM_005509.3,6822-6840).
ggtagtcataactacagtt

SEQ ID NO: 130675 - DNA, 19 bp, Homo sapiens
  siRNA target sequence for DMXL1 (NM_005509.3,6855-6873).
cagtttactggaatggtat

SEQ ID NO: 130676 - DNA, 19 bp, Homo sapiens
  siRNA target sequence for DMXL1 (NM_005509.3,6892-6910).
ctcatcgaccttctttgaa

SEQ ID NO: 130677 - DNA, 19 bp, Homo sapiens
  siRNA target sequence for DMXL1 (NM_005509.3,6894-6912).
catcgaccttctttgaaaa

SEQ ID NO: 130678 - DNA, 19 bp, Homo sapiens
  siRNA target sequence for DMXL1 (NM_005509.3,6930-6948).
gcattaactcccaatacgt

SEQ ID NO: 130679 - DNA, 19 bp, Homo sapiens
  siRNA target sequence for DMXL1 (NM_005509.3,6963-6981).
ccaggaataacttgtctaa

SEQ ID NO: 130680 - DNA, 19 bp, Homo sapiens
  siRNA target sequence for DMXL1 (NM_005509.3,6964-6982).
caggaataacttgtctaat

SEQ ID NO: 130681 - DNA, 19 bp, Homo sapiens
  siRNA target sequence for DMXL1 (NM_005509.3,6973-6991).
cttgtctaattcgactttt

SEQ ID NO: 130682 - DNA, 19 bp, Homo sapiens
  siRNA target sequence for DMXL1 (NM_005509.3,6976-6994).
gtctaattcgacttttgaa

SEQ ID NO: 130683 - DNA, 19 bp, Homo sapiens
  siRNA target sequence for DMXL1 (NM_005509.3,6978-6996).
ctaattcgacttttgaatt

SEQ ID NO: 130684 - DNA, 19 bp, Homo sapiens
  siRNA target sequence for DMXL1 (NM_005509.3,7043-7061).
gattctcacagcagtgtat

SEQ ID NO: 130685 - DNA, 19 bp, Homo sapiens
  siRNA target sequence for DMXL1 (NM_005509.3,7080-7098).
ggcctggccacacattcaa

SEQ ID NO: 130686 - DNA, 19 bp, Homo sapiens
  siRNA target sequence for DMXL1 (NM_005509.3,7082-7100).
cctggccacacattcaagt

SEQ ID NO: 130687 - DNA, 19 bp, Homo sapiens
  siRNA target sequence for DMXL1 (NM_005509.3,7083-7101).
ctggccacacattcaagta

SEQ ID NO: 130688 - DNA, 19 bp, Homo sapiens
  siRNA target sequence for DMXL1 (NM_005509.3,7085-7103).
ggccacacattcaagtaat

SEQ ID NO: 130689 - DNA, 19 bp, Homo sapiens
  siRNA target sequence for DMXL1 (NM_005509.3,7087-7105).
ccacacattcaagtaatga

SEQ ID NO: 130690 - DNA, 19 bp, Homo sapiens
  siRNA target sequence for DMXL1 (NM_005509.3,7122-7140).
gcccatcctctaaatgaga

SEQ ID NO: 130691 - DNA, 19 bp, Homo sapiens
  siRNA target sequence for DMXL1 (NM_005509.3,7123-7141).
cccatcctctaaatgagaa

SEQ ID NO: 130692 - DNA, 19 bp, Homo sapiens
  siRNA target sequence for DMXL1 (NM_005509.3,7188-7206).
gaacagacacattcaaaaa

SEQ ID NO: 130693 - DNA, 19 bp, Homo sapiens
  siRNA target sequence for DMXL1 (NM_005509.3,7213-7231).
ctgtttcttcactagttga

SEQ ID NO: 130694 - DNA, 19 bp, Homo sapiens
  siRNA target sequence for DMXL1 (NM_005509.3,7254-7272).
cgttttaggccgtcaaaaa

SEQ ID NO: 130695 - DNA, 19 bp, Homo sapiens
  siRNA target sequence for DMXL1 (NM_005509.3,7332-7350).
ctggcggttaaagaaaagt

SEQ ID NO: 130696 - DNA, 19 bp, Homo sapiens
  siRNA target sequence for DMXL1 (NM_005509.3,7375-7393).
gggactatttcatagctaa

SEQ ID NO: 130697 - DNA, 19 bp, Homo sapiens
  siRNA target sequence for DMXL1 (NM_005509.3,7385-7403).
catagctaagccttttcta

SEQ ID NO: 130698 - DNA, 19 bp, Homo sapiens
  siRNA target sequence for DMXL1 (NM_005509.3,7420-7438).
gagccgaatatgattcaga

SEQ ID NO: 130699 - DNA, 19 bp, Homo sapiens
  siRNA target sequence for DMXL1 (NM_005509.3,7482-7500).
gatgttttagcatcagatt

SEQ ID NO: 130700 - DNA, 19 bp, Homo sapiens
  siRNA target sequence for DMXL1 (NM_005509.3,7506-7524).
ctccaggaacattctaatt

SEQ ID NO: 130701 - DNA, 19 bp, Homo sapiens
  siRNA target sequence for DMXL1 (NM_005509.3,7509-7527).
caggaacattctaattcaa

SEQ ID NO: 130702 - DNA, 19 bp, Homo sapiens
  siRNA target sequence for DMXL1 (NM_005509.3,7600-7618).
ccttcgcaggtcatgatct

SEQ ID NO: 130703 - DNA, 19 bp, Homo sapiens
  siRNA target sequence for DMXL1 (NM_005509.3,7601-7619).
cttcgcaggtcatgatctt

SEQ ID NO: 130704 - DNA, 19 bp, Homo sapiens
  siRNA target sequence for DMXL1 (NM_005509.3,7656-7674).
gttctaaaaactcttcaat

SEQ ID NO: 130705 - DNA, 19 bp, Homo sapiens
  siRNA target sequence for DMXL1 (NM_005509.3,7659-7677).
ctaaaaactcttcaatgtt

SEQ ID NO: 130706 - DNA, 19 bp, Homo sapiens
  siRNA target sequence for DMXL1 (NM_005509.3,7689-7707).
cttctccgacgacttgaaa

SEQ ID NO: 130707 - DNA, 19 bp, Homo sapiens
  siRNA target sequence for DMXL1 (NM_005509.3,7714-7732).
gtgggccacctcaaaatta

SEQ ID NO: 130708 - DNA, 19 bp, Homo sapiens
  siRNA target sequence for DMXL1 (NM_005509.3,7717-7735).
ggccacctcaaaattatat

SEQ ID NO: 130709 - DNA, 19 bp, Homo sapiens
  siRNA target sequence for DMXL1 (NM_005509.3,7748-7766).
cgccgaagagagtttgtct

SEQ ID NO: 130710 - DNA, 19 bp, Homo sapiens
  siRNA target sequence for DMXL1 (NM_005509.3,7765-7783).
ctgcaggtcctgcaattct

SEQ ID NO: 130711 - DNA, 19 bp, Homo sapiens
  siRNA target sequence for DMXL1 (NM_005509.3,7858-7876).
ggctttggcagtatttggt

SEQ ID NO: 130712 - DNA, 19 bp, Homo sapiens
  siRNA target sequence for DMXL1 (NM_005509.3,7921-7939).
caaagaaacggtgtctaaa

SEQ ID NO: 130713 - DNA, 19 bp, Homo sapiens
  siRNA target sequence for DMXL1 (NM_005509.3,7930-7948).
ggtgtctaaatgagataga

SEQ ID NO: 130714 - DNA, 19 bp, Homo sapiens
  siRNA target sequence for DMXL1 (NM_005509.3,7972-7990).
gtaaagcaagaattattca

SEQ ID NO: 130715 - DNA, 19 bp, Homo sapiens
  siRNA target sequence for DMXL1 (NM_005509.3,8054-8072).
cgcttccagtcatgatgtt

SEQ ID NO: 130716 - DNA, 19 bp, Homo sapiens
  siRNA target sequence for DMXL1 (NM_005509.3,8059-8077).
ccagtcatgatgttcaaga

SEQ ID NO: 130717 - DNA, 19 bp, Homo sapiens
  siRNA target sequence for DMXL1 (NM_005509.3,8111-8129).
ctacacttgggtagatgat

SEQ ID NO: 130718 - DNA, 19 bp, Homo sapiens
  siRNA target sequence for DMXL1 (NM_005509.3,8114-8132).
cacttgggtagatgatgat

SEQ ID NO: 130719 - DNA, 19 bp, Homo sapiens
  siRNA target sequence for DMXL1 (NM_005509.3,8116-8134).
cttgggtagatgatgatat

SEQ ID NO: 130720 - DNA, 19 bp, Homo sapiens
  siRNA target sequence for DMXL1 (NM_005509.3,8119-8137).
gggtagatgatgatataga

SEQ ID NO: 130721 - DNA, 19 bp, Homo sapiens
  siRNA target sequence for DMXL1 (NM_005509.3,8120-8138).
ggtagatgatgatatagaa

SEQ ID NO: 130722 - DNA, 19 bp, Homo sapiens
  siRNA target sequence for DMXL1 (NM_005509.3,8136-8154).
gaagtggaaaccaaaggat

SEQ ID NO: 130723 - DNA, 19 bp, Homo sapiens
  siRNA target sequence for DMXL1 (NM_005509.3,8155-8173).
cagaagatttcttggttat

SEQ ID NO: 130724 - DNA, 19 bp, Homo sapiens
  siRNA target sequence for DMXL1 (NM_005509.3,8202-8220).
caaggtacaactccatata

SEQ ID NO: 130725 - DNA, 19 bp, Homo sapiens
  siRNA target sequence for DMXL1 (NM_005509.3,8206-8224).
gtacaactccatatacaca

SEQ ID NO: 130726 - DNA, 19 bp, Homo sapiens
  siRNA target sequence for DMXL1 (NM_005509.3,8283-8301).
ggagcatctgtgatgatta

SEQ ID NO: 130727 - DNA, 19 bp, Homo sapiens
  siRNA target sequence for DMXL1 (NM_005509.3,8398-8416).
ggggccattctcaacaaat

SEQ ID NO: 130728 - DNA, 19 bp, Homo sapiens
  siRNA target sequence for DMXL1 (NM_005509.3,8399-8417).
gggccattctcaacaaata

SEQ ID NO: 130729 - DNA, 19 bp, Homo sapiens
  siRNA target sequence for DMXL1 (NM_005509.3,8400-8418).
ggccattctcaacaaataa

SEQ ID NO: 130730 - DNA, 19 bp, Homo sapiens
  siRNA target sequence for DMXL1 (NM_005509.3,8427-8445).
cgatctggtggcaattcaa

SEQ ID NO: 130731 - DNA, 19 bp, Homo sapiens
  siRNA target sequence for DMXL1 (NM_005509.3,8446-8464).
gagttacaagaatgagatt

SEQ ID NO: 130732 - DNA, 19 bp, Homo sapiens
  siRNA target sequence for DMXL1 (NM_005509.3,8448-8466).
gttacaagaatgagattta

SEQ ID NO: 130733 - DNA, 19 bp, Homo sapiens
  siRNA target sequence for DMXL1 (NM_005509.3,8455-8473).
gaatgagatttaactatca

SEQ ID NO: 130734 - DNA, 19 bp, Homo sapiens
  siRNA target sequence for DMXL1 (NM_005509.3,8574-8592).
ctgacttggcagtgtcata

SEQ ID NO: 130735 - DNA, 19 bp, Homo sapiens
  siRNA target sequence for DMXL1 (NM_005509.3,8594-8612).
caaaacagccaatgatttt

SEQ ID NO: 130736 - DNA, 19 bp, Homo sapiens
  siRNA target sequence for DMXL1 (NM_005509.3,8747-8765).
cacagttttagcatatgct

SEQ ID NO: 130737 - DNA, 19 bp, Homo sapiens
  siRNA target sequence for DMXL1 (NM_005509.3,8833-8851).
gacaacagaggcagctttt

SEQ ID NO: 130738 - DNA, 19 bp, Homo sapiens
  siRNA target sequence for DMXL1 (NM_005509.3,8847-8865).
cttttccagagccatgatt

SEQ ID NO: 130739 - DNA, 19 bp, Homo sapiens
  siRNA target sequence for DMXL1 (NM_005509.3,8893-8911).
caactgaagagtactttgt

SEQ ID NO: 130740 - DNA, 19 bp, Homo sapiens
  siRNA target sequence for DMXL1 (NM_005509.3,8917-8935).
gatctgccgaaggcaatat

SEQ ID NO: 130741 - DNA, 19 bp, Homo sapiens
  siRNA target sequence for DMXL1 (NM_005509.3,8920-8938).
ctgccgaaggcaatataaa

SEQ ID NO: 130742 - DNA, 19 bp, Homo sapiens
  siRNA target sequence for DMXL1 (NM_005509.3,8922-8940).
gccgaaggcaatataaaga

SEQ ID NO: 130743 - DNA, 19 bp, Homo sapiens
  siRNA target sequence for DMXL1 (NM_005509.3,8924-8942).
cgaaggcaatataaagatt

SEQ ID NO: 130744 - DNA, 19 bp, Homo sapiens
  siRNA target sequence for DMXL1 (NM_005509.3,9024-9042).
ggagtgatgcaaattgaga

SEQ ID NO: 130745 - DNA, 19 bp, Homo sapiens
  siRNA target sequence for DNAJC7 (NM_003315.1,73-91).
gggaagcagagactttcaa

SEQ ID NO: 130746 - DNA, 19 bp, Homo sapiens
  siRNA target sequence for DNAJC7 (NM_003315.1,106-124).
catactatgccaagaaaga

SEQ ID NO: 130747 - DNA, 19 bp, Homo sapiens
  siRNA target sequence for DNAJC7 (NM_003315.1,123-141).
gattacaatgaagcttata

SEQ ID NO: 130748 - DNA, 19 bp, Homo sapiens
  siRNA target sequence for DNAJC7 (NM_003315.1,199-217).
gagcagccaccttgatgat

SEQ ID NO: 130749 - DNA, 19 bp, Homo sapiens
  siRNA target sequence for DNAJC7 (NM_003315.1,265-283).
ggttggatgacagttttgt

SEQ ID NO: 130750 - DNA, 19 bp, Homo sapiens
  siRNA target sequence for DNAJC7 (NM_003315.1,360-378).
gccctagaactggatcata

SEQ ID NO: 130751 - DNA, 19 bp, Homo sapiens
  siRNA target sequence for DNAJC7 (NM_003315.1,385-403).
ctcaggcacaacaagagtt

SEQ ID NO: 130752 - DNA, 19 bp, Homo sapiens
  siRNA target sequence for DNAJC7 (NM_003315.1,390-408).
gcacaacaagagttcaaga

SEQ ID NO: 130753 - DNA, 19 bp, Homo sapiens
  siRNA target sequence for DNAJC7 (NM_003315.1,412-430).
ctaatgcagtcatggaata

SEQ ID NO: 130754 - DNA, 19 bp, Homo sapiens
  siRNA target sequence for DNAJC7 (NM_003315.1,417-435).
gcagtcatggaatatgaga

SEQ ID NO: 130755 - DNA, 19 bp, Homo sapiens
  siRNA target sequence for DNAJC7 (NM_003315.1,425-443).
ggaatatgagaaaatagca

SEQ ID NO: 130756 - DNA, 19 bp, Homo sapiens
  siRNA target sequence for DNAJC7 (NM_003315.1,520-538).
gccatcgcttcaaaatcct

SEQ ID NO: 130757 - DNA, 19 bp, Homo sapiens
  siRNA target sequence for DNAJC7 (NM_003315.1,539-557).
caaggcagaatgtttagca

SEQ ID NO: 130758 - DNA, 19 bp, Homo sapiens
  siRNA target sequence for DNAJC7 (NM_003315.1,586-604).
ctgtggctagtgacattct

SEQ ID NO: 130759 - DNA, 19 bp, Homo sapiens
  siRNA target sequence for DNAJC7 (NM_003315.1,597-615).
gacattctacgaatggatt

SEQ ID NO: 130760 - DNA, 19 bp, Homo sapiens
  siRNA target sequence for DNAJC7 (NM_003315.1,642-660).
cgaggtctttgcctttatt

SEQ ID NO: 130761 - DNA, 19 bp, Homo sapiens
  siRNA target sequence for DNAJC7 (NM_003315.1,646-664).
gtctttgcctttattacga

SEQ ID NO: 130762 - DNA, 19 bp, Homo sapiens
  siRNA target sequence for DNAJC7 (NM_003315.1,845-863).
ggggatagaccccaacaat

SEQ ID NO: 130763 - DNA, 19 bp, Homo sapiens
  siRNA target sequence for DNAJC7 (NM_003315.1,894-912).
cggggtacggttaattcca

SEQ ID NO: 130764 - DNA, 19 bp, Homo sapiens
  siRNA target sequence for DNAJC7 (NM_003315.1,914-932).
gcttaggaaactagatgat

SEQ ID NO: 130765 - DNA, 19 bp, Homo sapiens
  siRNA target sequence for DNAJC7 (NM_003315.1,1056-1074).
gtataccagacagagaaaa

SEQ ID NO: 130766 - DNA, 19 bp, Homo sapiens
  siRNA target sequence for DNAJC7 (NM_003315.1,1287-1305).
gttggagaggcctttacta

SEQ ID NO: 130767 - DNA, 19 bp, Homo sapiens
  siRNA target sequence for DNAJC7 (NM_003315.1,1342-1360).
gtggacaggacctagatga

SEQ ID NO: 130768 - DNA, 19 bp, Homo sapiens
  siRNA target sequence for DNAJC7 (NM_003315.1,1356-1374).
gatgaggagggcatgaata

SEQ ID NO: 130769 - DNA, 19 bp, Homo sapiens
  siRNA target sequence for DNAJC7 (NM_003315.1,1367-1385).
catgaatatgggtgatttt

SEQ ID NO: 130770 - DNA, 19 bp, Homo sapiens
  siRNA target sequence for DNAJC7 (NM_003315.1,1378-1396).
gtgattttgatccaaacaa

SEQ ID NO: 130771 - DNA, 19 bp, Homo sapiens
  siRNA target sequence for DNCL2A (NM_014183.2,301-319).
gcaccagataaagactatt

SEQ ID NO: 130772 - DNA, 19 bp, Homo sapiens
  siRNA target sequence for DNCL2A (NM_014183.2,313-331).
gactatttcctgattgtga

SEQ ID NO: 130773 - DNA, 19 bp, Homo sapiens
  siRNA target sequence for DNCL2B (NM_130897.1,156-174).
gagtcataaaggggttatt

SEQ ID NO: 130774 - DNA, 19 bp, Homo sapiens
  siRNA target sequence for DNCL2B (NM_130897.1,168-186).
ggttattggaactatggtt

SEQ ID NO: 130775 - DNA, 19 bp, Homo sapiens
  siRNA target sequence for DNCL2B (NM_130897.1,222-240).
ggacaactcaacaactgtt

SEQ ID NO: 130776 - DNA, 19 bp, Homo sapiens
  siRNA target sequence for DNCL2B (NM_130897.1,228-246).
ctcaacaactgttcaatat

SEQ ID NO: 130777 - DNA, 19 bp, Homo sapiens
  siRNA target sequence for DNCL2B (NM_130897.1,309-327).
gaacgacctgacttttctt

SEQ ID NO: 130778 - DNA, 19 bp, Homo sapiens
  siRNA target sequence for DNCL2B (NM_130897.1,325-343).
cttaggatcagatcaaaga

SEQ ID NO: 130779 - DNA, 19 bp, Homo sapiens
  siRNA target sequence for DNCL2B (NM_130897.1,357-375).
ggtagctccagataaggaa

SEQ ID NO: 130780 - DNA, 19 bp, Homo sapiens
  siRNA target sequence for DOK1 (NM_001381.2,1408-1426).
ctgtgggctctctagagta

SEQ ID NO: 130781 - DNA, 19 bp, Homo sapiens
  siRNA target sequence for DOK2 (NM_003974.1,3-21).
gggagacggggcagtgaaa

SEQ ID NO: 130782 - DNA, 19 bp, Homo sapiens
  siRNA target sequence for DOK2 (NM_003974.1,16-34).
gtgaaacaaggcttcttgt

SEQ ID NO: 130783 - DNA, 19 bp, Homo sapiens
  siRNA target sequence for DOK2 (NM_003974.1,18-36).
gaaacaaggcttcttgtat

SEQ ID NO: 130784 - DNA, 19 bp, Homo sapiens
  siRNA target sequence for DOK2 (NM_003974.1,43-61).
cagcagcagacgtttggaa

SEQ ID NO: 130785 - DNA, 19 bp, Homo sapiens
  siRNA target sequence for DOK2 (NM_003974.1,49-67).
cagacgtttggaaagaaat

SEQ ID NO: 130786 - DNA, 19 bp, Homo sapiens
  siRNA target sequence for DOK2 (NM_003974.1,390-408).
gccctgcatggaggaaaat

SEQ ID NO: 130787 - DNA, 19 bp, Homo sapiens
  siRNA target sequence for DOK2 (NM_003974.1,610-628).
cgggacaaggtaacctttt

SEQ ID NO: 130788 - DNA, 19 bp, Homo sapiens
  siRNA target sequence for DOK2 (NM_003974.1,615-633).
caaggtaaccttttccttt

SEQ ID NO: 130789 - DNA, 19 bp, Homo sapiens
  siRNA target sequence for DOK2 (NM_003974.1,664-682).
ggcaactttgagttcgaaa

SEQ ID NO: 130790 - DNA, 19 bp, Homo sapiens
  siRNA target sequence for DOK2 (NM_003974.1,683-701).
cccggcaaggcaatgagat

SEQ ID NO: 130791 - DNA, 19 bp, Homo sapiens
  siRNA target sequence for DOK2 (NM_003974.1,1016-1034).
ctcgacctgaccacatata

SEQ ID NO: 130792 - DNA, 19 bp, Homo sapiens
  siRNA target sequence for DOK2 (NM_003974.1,1019-1037).
gacctgaccacatatacga

SEQ ID NO: 130793 - DNA, 19 bp, Homo sapiens
  siRNA target sequence for DOK2 (NM_003974.1,1057-1075).
gccctgtccctctatgaca

SEQ ID NO: 130794 - DNA, 19 bp, Homo sapiens
  siRNA target sequence for DOK2 (NM_003974.1,1188-1206).
gcagccaggaactgagtat

SEQ ID NO: 130795 - DNA, 19 bp, Homo sapiens
  siRNA target sequence for DOK2 (NM_003974.1,1192-1210).
ccaggaactgagtatgaca

SEQ ID NO: 130796 - DNA, 19 bp, Homo sapiens
  siRNA target sequence for DOK2 (NM_003974.1,1193-1211).
caggaactgagtatgacaa

SEQ ID NO: 130797 - DNA, 19 bp, Homo sapiens
  siRNA target sequence for DOK2 (NM_003974.1,1203-1221).
gtatgacaatgttgtacta

SEQ ID NO: 130798 - DNA, 19 bp, Homo sapiens
  siRNA target sequence for DOK2 (NM_003974.1,1207-1225).
gacaatgttgtactaaaga

SEQ ID NO: 130799 - DNA, 19 bp, Homo sapiens
  siRNA target sequence for DOK2 (NM_003974.1,1209-1227).
caatgttgtactaaagaaa

SEQ ID NO: 130800 - DNA, 19 bp, Homo sapiens
  siRNA target sequence for DPT (NM_001937.3,67-85).
gggccagtatggcgattat

SEQ ID NO: 130801 - DNA, 19 bp, Homo sapiens
  siRNA target sequence for DPT (NM_001937.3,70-88).
ccagtatggcgattatgga

SEQ ID NO: 130802 - DNA, 19 bp, Homo sapiens
  siRNA target sequence for DPT (NM_001937.3,71-89).
cagtatggcgattatggat

SEQ ID NO: 130803 - DNA, 19 bp, Homo sapiens
  siRNA target sequence for DPT (NM_001937.3,93-111).
cataccagcagtatcatga

SEQ ID NO: 130804 - DNA, 19 bp, Homo sapiens
  siRNA target sequence for DPT (NM_001937.3,188-206).
gccgtgaggagcatcttca

SEQ ID NO: 130805 - DNA, 19 bp, Homo sapiens
  siRNA target sequence for DPT (NM_001937.3,325-343).
ccagacgtgctccaacaat

SEQ ID NO: 130806 - DNA, 19 bp, Homo sapiens
  siRNA target sequence for DPT (NM_001937.3,389-407).
gatcgggagtggcagtttt

SEQ ID NO: 130807 - DNA, 19 bp, Homo sapiens
  siRNA target sequence for DPT (NM_001937.3,392-410).
cgggagtggcagttttact

SEQ ID NO: 130808 - DNA, 19 bp, Homo sapiens
  siRNA target sequence for DPT (NM_001937.3,395-413).
gagtggcagttttactgtt

SEQ ID NO: 130809 - DNA, 19 bp, Homo sapiens
  siRNA target sequence for DPT (NM_001937.3,442-460).
ctgctggctaacaacagaa

SEQ ID NO: 130810 - DNA, 19 bp, Homo sapiens
  siRNA target sequence for DPT (NM_001937.3,444-462).
gctggctaacaacagaata

SEQ ID NO: 130811 - DNA, 19 bp, Homo sapiens
  siRNA target sequence for DPT (NM_001937.3,445-463).
ctggctaacaacagaatat

SEQ ID NO: 130812 - DNA, 19 bp, Homo sapiens
  siRNA target sequence for DPT (NM_001937.3,448-466).
gctaacaacagaatatcca

SEQ ID NO: 130813 - DNA, 19 bp, Homo sapiens
  siRNA target sequence for DPT (NM_001937.3,468-486).
gtcactatggtgaggaaat

SEQ ID NO: 130814 - DNA, 19 bp, Homo sapiens
  siRNA target sequence for DPT (NM_001937.3,488-506).
gacatgatttcctacaatt

SEQ ID NO: 130815 - DNA, 19 bp, Homo sapiens
  siRNA target sequence for DPT (NM_001937.3,498-516).
cctacaattatgattacta

SEQ ID NO: 130816 - DNA, 19 bp, Homo sapiens
  siRNA target sequence for DPT (NM_001937.3,557-575).
gatcgccagtggaagttca

SEQ ID NO: 130817 - DNA, 19 bp, Homo sapiens
  siRNA target sequence for DPT (NM_001937.3,560-578).
cgccagtggaagttcataa

SEQ ID NO: 130818 - DNA, 19 bp, Homo sapiens
  siRNA target sequence for DPT (NM_001937.3,561-579).
gccagtggaagttcataat

SEQ ID NO: 130819 - DNA, 19 bp, Homo sapiens
  siRNA target sequence for DPT (NM_001937.3,563-581).
cagtggaagttcataatgt

SEQ ID NO: 130820 - DNA, 19 bp, Homo sapiens
  siRNA target sequence for DPT (NM_001937.3,582-600).
gccggatgactgaatacga

SEQ ID NO: 130821 - DNA, 19 bp, Homo sapiens
  siRNA target sequence for DPT (NM_001937.3,591-609).
ctgaatacgactgtgaatt

SEQ ID NO: 130822 - DNA, 19 bp, Homo sapiens
  siRNA target sequence for DPT (NM_001937.3,598-616).
cgactgtgaatttgcaaat

SEQ ID NO: 130823 - DNA, 19 bp, Homo sapiens
  siRNA target sequence for DRE1 (NM_017644.2,310-328).
gggacgcagactaaacaga

SEQ ID NO: 130824 - DNA, 19 bp, Homo sapiens
  siRNA target sequence for DRE1 (NM_017644.2,356-374).
gcaactaagcgaaaagttt

SEQ ID NO: 130825 - DNA, 19 bp, Homo sapiens
  siRNA target sequence for DRE1 (NM_017644.2,360-378).
ctaagcgaaaagtttttga

SEQ ID NO: 130826 - DNA, 19 bp, Homo sapiens
  siRNA target sequence for DRE1 (NM_017644.2,397-415).
gacaggtcatgagtttttt

SEQ ID NO: 130827 - DNA, 19 bp, Homo sapiens
  siRNA target sequence for DRE1 (NM_017644.2,401-419).
ggtcatgagttttttgact

SEQ ID NO: 130828 - DNA, 19 bp, Homo sapiens
  siRNA target sequence for DRE1 (NM_017644.2,402-420).
gtcatgagttttttgactt

SEQ ID NO: 130829 - DNA, 19 bp, Homo sapiens
  siRNA target sequence for DRE1 (NM_017644.2,435-453).
cccatgccgaaaacatact

SEQ ID NO: 130830 - DNA, 19 bp, Homo sapiens
  siRNA target sequence for DRE1 (NM_017644.2,473-491).
cgtgatagccgcttattca

SEQ ID NO: 130831 - DNA, 19 bp, Homo sapiens
  siRNA target sequence for DRE1 (NM_017644.2,481-499).
ccgcttattcacagatgtt

SEQ ID NO: 130832 - DNA, 19 bp, Homo sapiens
  siRNA target sequence for DRE1 (NM_017644.2,565-583).
cttcagagctatgttttgt

SEQ ID NO: 130833 - DNA, 19 bp, Homo sapiens
  siRNA target sequence for DRE1 (NM_017644.2,568-586).
cagagctatgttttgtaat

SEQ ID NO: 130834 - DNA, 19 bp, Homo sapiens
  siRNA target sequence for DRE1 (NM_017644.2,594-612).
gggaaagccgagaaatgtt

SEQ ID NO: 130835 - DNA, 19 bp, Homo sapiens
  siRNA target sequence for DRE1 (NM_017644.2,619-637).
gatcaatggtattttagct

SEQ ID NO: 130836 - DNA, 19 bp, Homo sapiens
  siRNA target sequence for DRE1 (NM_017644.2,627-645).
gtattttagctgaagctat

SEQ ID NO: 130837 - DNA, 19 bp, Homo sapiens
  siRNA target sequence for DRE1 (NM_017644.2,701-719).
gtacagtatctctttgaga

SEQ ID NO: 130838 - DNA, 19 bp, Homo sapiens
  siRNA target sequence for DRE1 (NM_017644.2,769-787).
cttggaggagcaacttgat

SEQ ID NO: 130839 - DNA, 19 bp, Homo sapiens
  siRNA target sequence for DRE1 (NM_017644.2,788-806).
ccttgtaattgcttaggaa

SEQ ID NO: 130840 - DNA, 19 bp, Homo sapiens
  siRNA target sequence for DRE1 (NM_017644.2,821-839).
gatacccattcactcaaaa

SEQ ID NO: 130841 - DNA, 19 bp, Homo sapiens
  siRNA target sequence for DRE1 (NM_017644.2,825-843).
cccattcactcaaaacact

SEQ ID NO: 130842 - DNA, 19 bp, Homo sapiens
  siRNA target sequence for DRE1 (NM_017644.2,833-851).
ctcaaaacactcttcacaa

SEQ ID NO: 130843 - DNA, 19 bp, Homo sapiens
  siRNA target sequence for DRE1 (NM_017644.2,887-905).
gtatcccagcacgaagaat

SEQ ID NO: 130844 - DNA, 19 bp, Homo sapiens
  siRNA target sequence for DRE1 (NM_017644.2,891-909).
cccagcacgaagaatttct

SEQ ID NO: 130845 - DNA, 19 bp, Homo sapiens
  siRNA target sequence for DRE1 (NM_017644.2,950-968).
gatgaacttgttattggta

SEQ ID NO: 130846 - DNA, 19 bp, Homo sapiens
  siRNA target sequence for DRE1 (NM_017644.2,1070-1088).
ctgttgcatcccaactact

SEQ ID NO: 130847 - DNA, 19 bp, Homo sapiens
  siRNA target sequence for DRE1 (NM_017644.2,1072-1090).
gttgcatcccaactacttt

SEQ ID NO: 130848 - DNA, 19 bp, Homo sapiens
  siRNA target sequence for DRE1 (NM_017644.2,1087-1105).
ctttgttcaaacagttgaa

SEQ ID NO: 130849 - DNA, 19 bp, Homo sapiens
  siRNA target sequence for DRE1 (NM_017644.2,1098-1116).
cagttgaagtggaccaatt

SEQ ID NO: 130850 - DNA, 19 bp, Homo sapiens
  siRNA target sequence for DRE1 (NM_017644.2,1100-1118).
gttgaagtggaccaattga

SEQ ID NO: 130851 - DNA, 19 bp, Homo sapiens
  siRNA target sequence for DRE1 (NM_017644.2,1109-1127).
gaccaattgatccagaatt

SEQ ID NO: 130852 - DNA, 19 bp, Homo sapiens
  siRNA target sequence for DRE1 (NM_017644.2,1123-1141).
gaattctcctgagtgttat

SEQ ID NO: 130853 - DNA, 19 bp, Homo sapiens
  siRNA target sequence for DRE1 (NM_017644.2,1158-1176).
caagacggtaccacatact

SEQ ID NO: 130854 - DNA, 19 bp, Homo sapiens
  siRNA target sequence for DRE1 (NM_017644.2,1213-1231).
caggtccactggctattct

SEQ ID NO: 130855 - DNA, 19 bp, Homo sapiens
  siRNA target sequence for DRE1 (NM_017644.2,1215-1233).
ggtccactggctattctga

SEQ ID NO: 130856 - DNA, 19 bp, Homo sapiens
  siRNA target sequence for DRE1 (NM_017644.2,1259-1277).
gagcgagttggaggattta

SEQ ID NO: 130857 - DNA, 19 bp, Homo sapiens
  siRNA target sequence for DRE1 (NM_017644.2,1263-1281).
gagttggaggatttaatct

SEQ ID NO: 130858 - DNA, 19 bp, Homo sapiens
  siRNA target sequence for DRE1 (NM_017644.2,1365-1383).
cagtctgtgctctaaggaa

SEQ ID NO: 130859 - DNA, 19 bp, Homo sapiens
  siRNA target sequence for DRE1 (NM_017644.2,1416-1434).
gccgtgatgtctggattta

SEQ ID NO: 130860 - DNA, 19 bp, Homo sapiens
  siRNA target sequence for DRE1 (NM_017644.2,1418-1436).
cgtgatgtctggatttata

SEQ ID NO: 130861 - DNA, 19 bp, Homo sapiens
  siRNA target sequence for DRE1 (NM_017644.2,1419-1437).
gtgatgtctggatttataa

SEQ ID NO: 130862 - DNA, 19 bp, Homo sapiens
  siRNA target sequence for DRE1 (NM_017644.2,1459-1477).
cagagttgcctctctcaat

SEQ ID NO: 130863 - DNA, 19 bp, Homo sapiens
  siRNA target sequence for DRE1 (NM_017644.2,1461-1479).
gagttgcctctctcaataa

SEQ ID NO: 130864 - DNA, 19 bp, Homo sapiens
  siRNA target sequence for DRE1 (NM_017644.2,1481-1499).
ggcagatggcgtcacaaaa

SEQ ID NO: 130865 - DNA, 19 bp, Homo sapiens
  siRNA target sequence for DRE1 (NM_017644.2,1482-1500).
gcagatggcgtcacaaaat

SEQ ID NO: 130866 - DNA, 19 bp, Homo sapiens
  siRNA target sequence for DRE1 (NM_017644.2,1510-1528).
ccttggtaaagtatatgtt

SEQ ID NO: 130867 - DNA, 19 bp, Homo sapiens
  siRNA target sequence for DRE1 (NM_017644.2,1535-1553).
ggctatgatgggcaaaaca

SEQ ID NO: 130868 - DNA, 19 bp, Homo sapiens
  siRNA target sequence for DRE1 (NM_017644.2,1556-1574).
cttagcagcgtagaatgtt

SEQ ID NO: 130869 - DNA, 19 bp, Homo sapiens
  siRNA target sequence for DRE1 (NM_017644.2,1560-1578).
gcagcgtagaatgttatga

SEQ ID NO: 130870 - DNA, 19 bp, Homo sapiens
  siRNA target sequence for DRE1 (NM_017644.2,1561-1579).
cagcgtagaatgttatgat

SEQ ID NO: 130871 - DNA, 19 bp, Homo sapiens
  siRNA target sequence for DRE1 (NM_017644.2,1701-1719).
ctgataaggttcaatctta

SEQ ID NO: 130872 - DNA, 19 bp, Homo sapiens
  siRNA target sequence for DRE1 (NM_017644.2,1820-1838).
ggactgaccaaggcaatat

SEQ ID NO: 130873 - DNA, 19 bp, Homo sapiens
  siRNA target sequence for DRE1 (NM_017644.2,1821-1839).
gactgaccaaggcaatata

SEQ ID NO: 130874 - DNA, 19 bp, Homo sapiens
  siRNA target sequence for DRE1 (NM_017644.2,1823-1841).
ctgaccaaggcaatatact

SEQ ID NO: 130875 - DNA, 19 bp, Homo sapiens
  siRNA target sequence for DRE1 (NM_017644.2,1831-1849).
ggcaatatactgttacgat

SEQ ID NO: 130876 - DNA, 19 bp, Homo sapiens
  siRNA target sequence for DRE1 (NM_017644.2,1840-1858).
ctgttacgatccagttgaa

SEQ ID NO: 130877 - DNA, 19 bp, Homo sapiens
  siRNA target sequence for DRE1 (NM_017644.2,1842-1860).
gttacgatccagttgaaga

SEQ ID NO: 130878 - DNA, 19 bp, Homo sapiens
  siRNA target sequence for DRE1 (NM_017644.2,1867-1885).
gatgcacgtacagaataca

SEQ ID NO: 130879 - DNA, 19 bp, Homo sapiens
  siRNA target sequence for DRE1 (NM_017644.2,1871-1889).
cacgtacagaatacattca

SEQ ID NO: 130880 - DNA, 19 bp, Homo sapiens
  siRNA target sequence for DRE1 (NM_017644.2,1884-1902).
cattcagccgtcaggaaaa

SEQ ID NO: 130881 - DNA, 19 bp, Homo sapiens
  siRNA target sequence for DRE1 (NM_017644.2,1916-1934).
gtgtgtaatggtaaaatat

SEQ ID NO: 130882 - DNA, 19 bp, Homo sapiens
  siRNA target sequence for DRE1 (NM_017644.2,1942-1960).
gggcggaagacgggaaaat

SEQ ID NO: 130883 - DNA, 19 bp, Homo sapiens
  siRNA target sequence for DRE1 (NM_017644.2,1962-1980).
gagaagccacagacactat

SEQ ID NO: 130884 - DNA, 19 bp, Homo sapiens
  siRNA target sequence for DRE1 (NM_017644.2,1967-1985).
gccacagacactattctct

SEQ ID NO: 130885 - DNA, 19 bp, Homo sapiens
  siRNA target sequence for DRE1 (NM_017644.2,1975-1993).
cactattctctgttatgat

SEQ ID NO: 130886 - DNA, 19 bp, Homo sapiens
  siRNA target sequence for DRE1 (NM_017644.2,2053-2071).
ctgtgtgactattcataga

SEQ ID NO: 130887 - DNA, 19 bp, Homo sapiens
  siRNA target sequence for DRE1 (NM_017644.2,2059-2077).
gactattcatagatacaat

SEQ ID NO: 130888 - DNA, 19 bp, Homo sapiens
  siRNA target sequence for DRPLA (NM_001940.2,230-248).
gaagacacgacagaataaa

SEQ ID NO: 130889 - DNA, 19 bp, Homo sapiens
  siRNA target sequence for DRPLA (NM_001940.2,554-572).
gcggagccttaatgatgat

SEQ ID NO: 130890 - DNA, 19 bp, Homo sapiens
  siRNA target sequence for DRPLA (NM_001940.2,580-598).
gcgaccctagggatatcga

SEQ ID NO: 130891 - DNA, 19 bp, Homo sapiens
  siRNA target sequence for DRPLA (NM_001940.2,791-809).
gacacccactggatatcat

SEQ ID NO: 130892 - DNA, 19 bp, Homo sapiens
  siRNA target sequence for DRPLA (NM_001940.2,992-1010).
cactactcccatttcagta

SEQ ID NO: 130893 - DNA, 19 bp, Homo sapiens
  siRNA target sequence for DRPLA (NM_001940.2,1141-1159).
ccctgagacccctcaacaa

SEQ ID NO: 130894 - DNA, 19 bp, Homo sapiens
  siRNA target sequence for DRPLA (NM_001940.2,1142-1160).
cctgagacccctcaacaat

SEQ ID NO: 130895 - DNA, 19 bp, Homo sapiens
  siRNA target sequence for DRPLA (NM_001940.2,1331-1349).
ccccatgaggtttccttat

SEQ ID NO: 130896 - DNA, 19 bp, Homo sapiens
  siRNA target sequence for DRPLA (NM_001940.2,1344-1362).
ccttattcatcctctagta

SEQ ID NO: 130897 - DNA, 19 bp, Homo sapiens
  siRNA target sequence for DRPLA (NM_001940.2,2078-2096).
ctcgccagcaggctacaaa

SEQ ID NO: 130898 - DNA, 19 bp, Homo sapiens
  siRNA target sequence for DRPLA (NM_001940.2,2117-2135).
cccaccgtacggaaagaga

SEQ ID NO: 130899 - DNA, 19 bp, Homo sapiens
  siRNA target sequence for DRPLA (NM_001940.2,2165-2183).
caccccacccggatacaaa

SEQ ID NO: 130900 - DNA, 19 bp, Homo sapiens
  siRNA target sequence for DRPLA (NM_001940.2,2372-2390).
gagcgccacgcagatcaaa

SEQ ID NO: 130901 - DNA, 19 bp, Homo sapiens
  siRNA target sequence for DRPLA (NM_001940.2,2374-2392).
gcgccacgcagatcaaaca

SEQ ID NO: 130902 - DNA, 19 bp, Homo sapiens
  siRNA target sequence for DRPLA (NM_001940.2,2495-2513).
gtctgccaggttcaacaaa

SEQ ID NO: 130903 - DNA, 19 bp, Homo sapiens
  siRNA target sequence for DRPLA (NM_001940.2,2517-2535).
ctggatcgcggcttcaact

SEQ ID NO: 130904 - DNA, 19 bp, Homo sapiens
  siRNA target sequence for DRPLA (NM_001940.2,2783-2801).
ccatcgccctccatttgaa

SEQ ID NO: 130905 - DNA, 19 bp, Homo sapiens
  siRNA target sequence for DRPLA (NM_001940.2,2858-2876).
gcgcactctcagtgaatat

SEQ ID NO: 130906 - DNA, 19 bp, Homo sapiens
  siRNA target sequence for DRPLA (NM_001940.2,2902-2920).
gcaatcgcaaccatccatt

SEQ ID NO: 130907 - DNA, 19 bp, Homo sapiens
  siRNA target sequence for DRPLA (NM_001940.2,2950-2968).
ggctcctgggttacaatgt

SEQ ID NO: 130908 - DNA, 19 bp, Homo sapiens
  siRNA target sequence for DRPLA (NM_001940.2,3167-3185).
gcaccctttcccctttcat

SEQ ID NO: 130909 - DNA, 19 bp, Homo sapiens
  siRNA target sequence for DRPLA (NM_001940.2,3431-3449).
ctcggtgcaccctctcatt

SEQ ID NO: 130910 - DNA, 19 bp, Homo sapiens
  siRNA target sequence for DRPLA (NM_001940.2,3433-3451).
cggtgcaccctctcattga

SEQ ID NO: 130911 - DNA, 19 bp, Homo sapiens
  siRNA target sequence for DRPLA (NM_001940.2,3727-3745).
ctgcccaggaggactacta

SEQ ID NO: 130912 - DNA, 19 bp, Homo sapiens
  siRNA target sequence for DTNA (NM_001390.2,349-367).
cgactctccacctacagaa

SEQ ID NO: 130913 - DNA, 19 bp, Homo sapiens
  siRNA target sequence for DTNA (NM_001390.2,368-386).
cagcatgcaagcttaggtt

SEQ ID NO: 130914 - DNA, 19 bp, Homo sapiens
  siRNA target sequence for DTNA (NM_001390.2,409-427).
cacctggtggacatatgga

SEQ ID NO: 130915 - DNA, 19 bp, Homo sapiens
  siRNA target sequence for DTNA (NM_001390.2,417-435).
ggacatatggaatgtcata

SEQ ID NO: 130916 - DNA, 19 bp, Homo sapiens
  siRNA target sequence for DTNA (NM_001390.2,425-443).
ggaatgtcatagaagcatt

SEQ ID NO: 130917 - DNA, 19 bp, Homo sapiens
  siRNA target sequence for DTNA (NM_001390.2,619-637).
ccggaaggccatggtaaaa

SEQ ID NO: 130918 - DNA, 19 bp, Homo sapiens
  siRNA target sequence for DTNA (NM_001390.2,660-678).
ggctttagccacattgtgt

SEQ ID NO: 130919 - DNA, 19 bp, Homo sapiens
  siRNA target sequence for DTNA (NM_001390.2,752-770).
gacgatatgaccaattcct

SEQ ID NO: 130920 - DNA, 19 bp, Homo sapiens
  siRNA target sequence for DTNA (NM_001390.2,861-879).
gaaaaaagtcacgttaaat

SEQ ID NO: 130921 - DNA, 19 bp, Homo sapiens
  siRNA target sequence for DTNA (NM_001390.2,885-903).
cttggacacgcttatgtca

SEQ ID NO: 130922 - DNA, 19 bp, Homo sapiens
  siRNA target sequence for DTNA (NM_001390.2,995-1013).
gccacagtgagagtatgat

SEQ ID NO: 130923 - DNA, 19 bp, Homo sapiens
  siRNA target sequence for DTNA (NM_001390.2,1081-1099).
catgccggtggttctcata

SEQ ID NO: 130924 - DNA, 19 bp, Homo sapiens
  siRNA target sequence for DTNA (NM_001390.2,1085-1103).
ccggtggttctcatagcaa

SEQ ID NO: 130925 - DNA, 19 bp, Homo sapiens
  siRNA target sequence for DTNA (NM_001390.2,1120-1138).
gagtacacgtcatggaaat

SEQ ID NO: 130926 - DNA, 19 bp, Homo sapiens
  siRNA target sequence for DTNA (NM_001390.2,1122-1140).
gtacacgtcatggaaatca

SEQ ID NO: 130927 - DNA, 19 bp, Homo sapiens
  siRNA target sequence for DTNA (NM_001390.2,1149-1167).
gaagctgactaatgcatta

SEQ ID NO: 130928 - DNA, 19 bp, Homo sapiens
  siRNA target sequence for DTNA (NM_001390.2,1153-1171).
ctgactaatgcattaagca

SEQ ID NO: 130929 - DNA, 19 bp, Homo sapiens
  siRNA target sequence for DTNA (NM_001390.2,1187-1205).
cttccagccgtgaaccttt

SEQ ID NO: 130930 - DNA, 19 bp, Homo sapiens
  siRNA target sequence for DTNA (NM_001390.2,1458-1476).
caggctagctgatgaacat

SEQ ID NO: 130931 - DNA, 19 bp, Homo sapiens
  siRNA target sequence for DTNA (NM_001390.2,1460-1478).
ggctagctgatgaacatgt

SEQ ID NO: 130932 - DNA, 19 bp, Homo sapiens
  siRNA target sequence for DTNA (NM_001390.2,1480-1498).
ctcatcgggttgtatgtca

SEQ ID NO: 130933 - DNA, 19 bp, Homo sapiens
  siRNA target sequence for DTNA (NM_001390.2,1535-1553).
gttcaaaccggcttgatga

SEQ ID NO: 130934 - DNA, 19 bp, Homo sapiens
  siRNA target sequence for DTNA (NM_001390.2,1631-1649).
gtgctcctgacatctcttt

SEQ ID NO: 130935 - DNA, 19 bp, Homo sapiens
  siRNA target sequence for DTNA (NM_001390.2,1652-1670).
ccatcgatgcgaataagca

SEQ ID NO: 130936 - DNA, 19 bp, Homo sapiens
  siRNA target sequence for DTNA (NM_001390.2,1818-1836).
cctcagacagcgcaaagat

SEQ ID NO: 130937 - DNA, 19 bp, Homo sapiens
  siRNA target sequence for DTNA (NM_001390.2,1839-1857).
gctggaacagagaatgtct

SEQ ID NO: 130938 - DNA, 19 bp, Homo sapiens
  siRNA target sequence for DTNA (NM_001390.2,1871-1889).
gccggagagagctaatggt

SEQ ID NO: 130939 - DNA, 19 bp, Homo sapiens
  siRNA target sequence for DTNA (NM_001390.2,1900-1918).
ggtctcatgaagctactaa

SEQ ID NO: 130940 - DNA, 19 bp, Homo sapiens
  siRNA target sequence for DTNA (NM_001390.2,2065-2083).
gaggcatttgcacaaagtt

SEQ ID NO: 130941 - DNA, 19 bp, Homo sapiens
  siRNA target sequence for DTNA (NM_001390.2,2067-2085).
ggcatttgcacaaagttca

SEQ ID NO: 130942 - DNA, 19 bp, Homo sapiens
  siRNA target sequence for DTNA (NM_001390.2,2090-2108).
gaaacttaaggaatgactt

SEQ ID NO: 130943 - DNA, 19 bp, Homo sapiens
  siRNA target sequence for DTNA (NM_001390.2,2122-2140).
gattccatcactaacacta

SEQ ID NO: 130944 - DNA, 19 bp, Homo sapiens
  siRNA target sequence for DTNA (NM_001390.2,2178-2196).
gagtgaaacagagagtaat

SEQ ID NO: 130945 - DNA, 19 bp, Homo sapiens
  siRNA target sequence for DTNA (NM_001390.2,2219-2237).
ctcagtttgaggatcttgt

SEQ ID NO: 130946 - DNA, 19 bp, Homo sapiens
  siRNA target sequence for DTNA (NM_001390.2,2239-2257).
ccctcaccaacctctgaaa

SEQ ID NO: 130947 - DNA, 19 bp, Homo sapiens
  siRNA target sequence for DTNA (NM_001390.2,2261-2279).
cttttctagcgcaaatcca

SEQ ID NO: 130948 - DNA, 19 bp, Homo sapiens
  siRNA target sequence for DTNA (NM_001390.2,2285-2303).
gaaaacctgggtacattca

SEQ ID NO: 130949 - DNA, 19 bp, Homo sapiens
  siRNA target sequence for DTNA (NM_001390.2,2451-2469).
gctgcaagatgaagcttat

SEQ ID NO: 130950 - DNA, 19 bp, Homo sapiens
  siRNA target sequence for DTNA (NM_001391.2,1905-1923).
catgaagctactaaaggaa

SEQ ID NO: 130951 - DNA, 19 bp, Homo sapiens
  siRNA target sequence for DTNA (NM_001391.2,1930-1948).
ctgaagcagggagtaagtt

SEQ ID NO: 130952 - DNA, 19 bp, Homo sapiens
  siRNA target sequence for DTNA (NM_001391.2,1932-1950).
gaagcagggagtaagttat

SEQ ID NO: 130953 - DNA, 19 bp, Homo sapiens
  siRNA target sequence for DTNA (NM_001392.2,1416-1434).
gagctcggacggtgctttt

SEQ ID NO: 130954 - DNA, 19 bp, Homo sapiens
  siRNA target sequence for DTNA (NM_001392.2,1419-1437).
ctcggacggtgcttttggt

SEQ ID NO: 130955 - DNA, 19 bp, Homo sapiens
  siRNA target sequence for DTNB (NM_021907.3,295-313).
gaggcagctgttcatagaa

SEQ ID NO: 130956 - DNA, 19 bp, Homo sapiens
  siRNA target sequence for DTNB (NM_021907.3,311-329).
gaaatgcgtgctcagaatt

SEQ ID NO: 130957 - DNA, 19 bp, Homo sapiens
  siRNA target sequence for DTNB (NM_021907.3,332-350).
gatgtcatacgactatcaa

SEQ ID NO: 130958 - DNA, 19 bp, Homo sapiens
  siRNA target sequence for DTNB (NM_021907.3,335-353).
gtcatacgactatcaactt

SEQ ID NO: 130959 - DNA, 19 bp, Homo sapiens
  siRNA target sequence for DTNB (NM_021907.3,341-359).
cgactatcaacttacagaa

SEQ ID NO: 130960 - DNA, 19 bp, Homo sapiens
  siRNA target sequence for DTNB (NM_021907.3,360-378).
cagcctgcaaattacgatt

SEQ ID NO: 130961 - DNA, 19 bp, Homo sapiens
  siRNA target sequence for DTNB (NM_021907.3,363-381).
cctgcaaattacgatttgt

SEQ ID NO: 130962 - DNA, 19 bp, Homo sapiens
  siRNA target sequence for DTNB (NM_021907.3,364-382).
ctgcaaattacgatttgta

SEQ ID NO: 130963 - DNA, 19 bp, Homo sapiens
  siRNA target sequence for DTNB (NM_021907.3,366-384).
gcaaattacgatttgtaca

SEQ ID NO: 130964 - DNA, 19 bp, Homo sapiens
  siRNA target sequence for DTNB (NM_021907.3,374-392).
cgatttgtacaaaaacgat

SEQ ID NO: 130965 - DNA, 19 bp, Homo sapiens
  siRNA target sequence for DTNB (NM_021907.3,390-408).
gatgcaaccttcatcttgt

SEQ ID NO: 130966 - DNA, 19 bp, Homo sapiens
  siRNA target sequence for DTNB (NM_021907.3,436-454).
ccgagacaatggccttaat

SEQ ID NO: 130967 - DNA, 19 bp, Homo sapiens
  siRNA target sequence for DTNB (NM_021907.3,437-455).
cgagacaatggccttaata

SEQ ID NO: 130968 - DNA, 19 bp, Homo sapiens
  siRNA target sequence for DTNB (NM_021907.3,500-518).
gtcatctcctccatctact

SEQ ID NO: 130969 - DNA, 19 bp, Homo sapiens
  siRNA target sequence for DTNB (NM_021907.3,543-561).
ctactcaccaaattagtgt

SEQ ID NO: 130970 - DNA, 19 bp, Homo sapiens
  siRNA target sequence for DTNB (NM_021907.3,551-569).
caaattagtgtggaacaat

SEQ ID NO: 130971 - DNA, 19 bp, Homo sapiens
  siRNA target sequence for DTNB (NM_021907.3,589-607).
ctttatgattgctgcatat

SEQ ID NO: 130972 - DNA, 19 bp, Homo sapiens
  siRNA target sequence for DTNB (NM_021907.3,623-641).
ggcaagttgacggtatttt

SEQ ID NO: 130973 - DNA, 19 bp, Homo sapiens
  siRNA target sequence for DTNB (NM_021907.3,625-643).
caagttgacggtattttca

SEQ ID NO: 130974 - DNA, 19 bp, Homo sapiens
  siRNA target sequence for DTNB (NM_021907.3,631-649).
gacggtattttcagttaaa

SEQ ID NO: 130975 - DNA, 19 bp, Homo sapiens
  siRNA target sequence for DTNB (NM_021907.3,634-652).
ggtattttcagttaaagct

SEQ ID NO: 130976 - DNA, 19 bp, Homo sapiens
  siRNA target sequence for DTNB (NM_021907.3,644-662).
gttaaagctatgttagcaa

SEQ ID NO: 130977 - DNA, 19 bp, Homo sapiens
  siRNA target sequence for DTNB (NM_021907.3,682-700).
gctggacaaattgagatat

SEQ ID NO: 130978 - DNA, 19 bp, Homo sapiens
  siRNA target sequence for DTNB (NM_021907.3,709-727).
ccagatgtcagattccaat

SEQ ID NO: 130979 - DNA, 19 bp, Homo sapiens
  siRNA target sequence for DTNB (NM_021907.3,717-735).
cagattccaatggcttaat

SEQ ID NO: 130980 - DNA, 19 bp, Homo sapiens
  siRNA target sequence for DTNB (NM_021907.3,719-737).
gattccaatggcttaatga

SEQ ID NO: 130981 - DNA, 19 bp, Homo sapiens
  siRNA target sequence for DTNB (NM_021907.3,723-741).
ccaatggcttaatgatatt

SEQ ID NO: 130982 - DNA, 19 bp, Homo sapiens
  siRNA target sequence for DTNB (NM_021907.3,728-746).
ggcttaatgatatttagca

SEQ ID NO: 130983 - DNA, 19 bp, Homo sapiens
  siRNA target sequence for DTNB (NM_021907.3,778-796).
gctcccaacagctgtcttt

SEQ ID NO: 130984 - DNA, 19 bp, Homo sapiens
  siRNA target sequence for DTNB (NM_021907.3,797-815).
gaagggccatcttttggtt

SEQ ID NO: 130985 - DNA, 19 bp, Homo sapiens
  siRNA target sequence for DTNB (NM_021907.3,802-820).
gccatcttttggttacaca

SEQ ID NO: 130986 - DNA, 19 bp, Homo sapiens
  siRNA target sequence for DTNB (NM_021907.3,826-844).
ctcagtccgcacctgtttt

SEQ ID NO: 130987 - DNA, 19 bp, Homo sapiens
  siRNA target sequence for DTNB (NM_021907.3,987-1005).
gccgatgtgagagtatgat

SEQ ID NO: 130988 - DNA, 19 bp, Homo sapiens
  siRNA target sequence for DTNB (NM_021907.3,1111-1129).
ggagcattcctcttggaaa

SEQ ID NO: 130989 - DNA, 19 bp, Homo sapiens
  siRNA target sequence for DTNB (NM_021907.3,1141-1159).
gaagctgagccatgcaatt

SEQ ID NO: 130990 - DNA, 19 bp, Homo sapiens
  siRNA target sequence for DTNB (NM_021907.3,1144-1162).
gctgagccatgcaattagt

SEQ ID NO: 130991 - DNA, 19 bp, Homo sapiens
  siRNA target sequence for DTNB (NM_021907.3,1145-1163).
ctgagccatgcaattagta

SEQ ID NO: 130992 - DNA, 19 bp, Homo sapiens
  siRNA target sequence for DTNB (NM_021907.3,1254-1272).
ctcctcgccctctgactaa

SEQ ID NO: 130993 - DNA, 19 bp, Homo sapiens
  siRNA target sequence for DTNB (NM_021907.3,1256-1274).
cctcgccctctgactaata

SEQ ID NO: 130994 - DNA, 19 bp, Homo sapiens
  siRNA target sequence for DTNB (NM_021907.3,1257-1275).
ctcgccctctgactaatat

SEQ ID NO: 130995 - DNA, 19 bp, Homo sapiens
  siRNA target sequence for DTNB (NM_021907.3,1321-1339).
caccaagaggttacagtat

SEQ ID NO: 130996 - DNA, 19 bp, Homo sapiens
  siRNA target sequence for DTNB (NM_021907.3,1450-1468).
ggaacaccgtcttatagct

SEQ ID NO: 130997 - DNA, 19 bp, Homo sapiens
  siRNA target sequence for DTNB (NM_021907.3,1518-1536).
ccactgacttgagctttaa

SEQ ID NO: 130998 - DNA, 19 bp, Homo sapiens
  siRNA target sequence for EMILIN1 (NM_007046.1,275-293).
gtccccaaagcatcatgta

SEQ ID NO: 130999 - DNA, 19 bp, Homo sapiens
  siRNA target sequence for EMILIN1 (NM_007046.1,1590-1608).
cacgctggagggattacaa

SEQ ID NO: 131000 - DNA, 19 bp, Homo sapiens
  siRNA target sequence for EMILIN1 (NM_007046.1,1592-1610).
cgctggagggattacaaga

SEQ ID NO: 131001 - DNA, 19 bp, Homo sapiens
  siRNA target sequence for EMILIN1 (NM_007046.1,1968-1986).
cctcaatgactcactgaat

SEQ ID NO: 131002 - DNA, 19 bp, Homo sapiens
  siRNA target sequence for EMILIN1 (NM_007046.1,2039-2057).
caaccaaggaccgtatcat

SEQ ID NO: 131003 - DNA, 19 bp, Homo sapiens
  siRNA target sequence for EMILIN1 (NM_007046.1,2049-2067).
ccgtatcatttctgagatt

SEQ ID NO: 131004 - DNA, 19 bp, Homo sapiens
  siRNA target sequence for EMILIN1 (NM_007046.1,2050-2068).
cgtatcatttctgagatta

SEQ ID NO: 131005 - DNA, 19 bp, Homo sapiens
  siRNA target sequence for EMILIN1 (NM_007046.1,2279-2297).
ctgggctccgggaaaccaa

SEQ ID NO: 131006 - DNA, 19 bp, Homo sapiens
  siRNA target sequence for EMILIN1 (NM_007046.1,2365-2383).
cggctgggtgcccttaaca

SEQ ID NO: 131007 - DNA, 19 bp, Homo sapiens
  siRNA target sequence for EMILIN1 (NM_007046.1,2670-2688).
cagagtcctgctcaatgat

SEQ ID NO: 131008 - DNA, 19 bp, Homo sapiens
  siRNA target sequence for EMILIN1 (NM_007046.1,2682-2700).
caatgatggaggctattat

SEQ ID NO: 131009 - DNA, 19 bp, Homo sapiens
  siRNA target sequence for EMILIN1 (NM_007046.1,2768-2786).
ggcaccggcacgagaaagt

SEQ ID NO: 131010 - DNA, 19 bp, Homo sapiens
  siRNA target sequence for EMILIN2 (NM_032048.1,304-322).
gcctacatcgtgaacaaga

SEQ ID NO: 131011 - DNA, 19 bp, Homo sapiens
  siRNA target sequence for EMILIN2 (NM_032048.1,305-323).
cctacatcgtgaacaagaa

SEQ ID NO: 131012 - DNA, 19 bp, Homo sapiens
  siRNA target sequence for EMILIN2 (NM_032048.1,306-324).
ctacatcgtgaacaagaat

SEQ ID NO: 131013 - DNA, 19 bp, Homo sapiens
  siRNA target sequence for EMILIN2 (NM_032048.1,426-444).
gaacttcagacctagatat

SEQ ID NO: 131014 - DNA, 19 bp, Homo sapiens
  siRNA target sequence for EMILIN2 (NM_032048.1,440-458).
gatatgtcactaggtataa

SEQ ID NO: 131015 - DNA, 19 bp, Homo sapiens
  siRNA target sequence for EMILIN2 (NM_032048.1,659-677).
gctggggggtagatccaaa

SEQ ID NO: 131016 - DNA, 19 bp, Homo sapiens
  siRNA target sequence for EMILIN2 (NM_032048.1,660-678).
ctggggggtagatccaaaa

SEQ ID NO: 131017 - DNA, 19 bp, Homo sapiens
  siRNA target sequence for EMILIN2 (NM_032048.1,810-828).
ggatgatgccagtagaaca

SEQ ID NO: 131018 - DNA, 19 bp, Homo sapiens
  siRNA target sequence for EMILIN2 (NM_032048.1,957-975).
ggctgaagtcaaagatact

SEQ ID NO: 131019 - DNA, 19 bp, Homo sapiens
  siRNA target sequence for EMILIN2 (NM_032048.1,1069-1087).
ccgacggtgaccatgacaa

SEQ ID NO: 131020 - DNA, 19 bp, Homo sapiens
  siRNA target sequence for EMILIN2 (NM_032048.1,1106-1124).
cctatgtggacagtaagat

SEQ ID NO: 131021 - DNA, 19 bp, Homo sapiens
  siRNA target sequence for EMILIN2 (NM_032048.1,1239-1257).
cagctacctgggagtgata

SEQ ID NO: 131022 - DNA, 19 bp, Homo sapiens
  siRNA target sequence for EMILIN2 (NM_032048.1,1327-1345).
ccttcagcccaggcaaatt

SEQ ID NO: 131023 - DNA, 19 bp, Homo sapiens
  siRNA target sequence for EMILIN2 (NM_032048.1,1367-1385).
gtgacattggtcaacagat

SEQ ID NO: 131024 - DNA, 19 bp, Homo sapiens
  siRNA target sequence for EMILIN2 (NM_032048.1,1391-1409).
cattggaccagaaaatcga

SEQ ID NO: 131025 - DNA, 19 bp, Homo sapiens
  siRNA target sequence for EMILIN2 (NM_032048.1,1458-1476).
gtttgaccgccttatagtt

SEQ ID NO: 131026 - DNA, 19 bp, Homo sapiens
  siRNA target sequence for EMILIN2 (NM_032048.1,1489-1507).
gtggattttgatgcaaaat

SEQ ID NO: 131027 - DNA, 19 bp, Homo sapiens
  siRNA target sequence for EMILIN2 (NM_032048.1,1519-1537).
gatgcaaggatcaatgtga

SEQ ID NO: 131028 - DNA, 19 bp, Homo sapiens
  siRNA target sequence for EMILIN2 (NM_032048.1,1542-1560).
gaagaacgctgaagaacat

SEQ ID NO: 131029 - DNA, 19 bp, Homo sapiens
  siRNA target sequence for EMILIN2 (NM_032048.1,1548-1566).
cgctgaagaacattgcttt

SEQ ID NO: 131030 - DNA, 19 bp, Homo sapiens
  siRNA target sequence for EMILIN2 (NM_032048.1,1664-1682).
ggagcgttctcctacagat

SEQ ID NO: 131031 - DNA, 19 bp, Homo sapiens
  siRNA target sequence for EMILIN2 (NM_032048.1,1751-1769).
gagatgaacgggtcatgat

SEQ ID NO: 131032 - DNA, 19 bp, Homo sapiens
  siRNA target sequence for EMILIN2 (NM_032048.1,1756-1774).
gaacgggtcatgatggaat

SEQ ID NO: 131033 - DNA, 19 bp, Homo sapiens
  siRNA target sequence for EMILIN2 (NM_032048.1,1759-1777).
cgggtcatgatggaattaa

SEQ ID NO: 131034 - DNA, 19 bp, Homo sapiens
  siRNA target sequence for EMILIN2 (NM_032048.1,1889-1907).
gcgacagcctgcacctttt

SEQ ID NO: 131035 - DNA, 19 bp, Homo sapiens
  siRNA target sequence for EMILIN2 (NM_032048.1,1893-1911).
cagcctgcaccttttgaaa

SEQ ID NO: 131036 - DNA, 19 bp, Homo sapiens
  siRNA target sequence for EMILIN2 (NM_032048.1,1958-1976).
ccatccagaaacttcaaca

SEQ ID NO: 131037 - DNA, 19 bp, Homo sapiens
  siRNA target sequence for EMILIN2 (NM_032048.1,2020-2038).
gatgtgactcatcttcaaa

SEQ ID NO: 131038 - DNA, 19 bp, Homo sapiens
  siRNA target sequence for EMILIN2 (NM_032048.1,2075-2093).
gcatgggtaggttcactaa

SEQ ID NO: 131039 - DNA, 19 bp, Homo sapiens
  siRNA target sequence for EMILIN2 (NM_032048.1,2266-2284).
gagggcagggtgtctcata

SEQ ID NO: 131040 - DNA, 19 bp, Homo sapiens
  siRNA target sequence for EMILIN2 (NM_032048.1,2270-2288).
gcagggtgtctcatatgga

SEQ ID NO: 131041 - DNA, 19 bp, Homo sapiens
  siRNA target sequence for EMILIN2 (NM_032048.1,2275-2293).
gtgtctcatatggagaaaa

SEQ ID NO: 131042 - DNA, 19 bp, Homo sapiens
  siRNA target sequence for EMILIN2 (NM_032048.1,2310-2328).
ctctatctcaggaaatctt

SEQ ID NO: 131043 - DNA, 19 bp, Homo sapiens
  siRNA target sequence for EMILIN2 (NM_032048.1,2460-2478).
ccacgtcttccagatttct

SEQ ID NO: 131044 - DNA, 19 bp, Homo sapiens
  siRNA target sequence for EMILIN2 (NM_032048.1,2477-2495).
ctactgatttgcaagatct

SEQ ID NO: 131045 - DNA, 19 bp, Homo sapiens
  siRNA target sequence for EMILIN2 (NM_032048.1,2925-2943).
cgttgtcctctttaacaaa

SEQ ID NO: 131046 - DNA, 19 bp, Homo sapiens
  siRNA target sequence for EMILIN2 (NM_032048.1,2950-2968).
gtgaacgacggggatgttt

SEQ ID NO: 131047 - DNA, 19 bp, Homo sapiens
  siRNA target sequence for EMILIN2 (NM_032048.1,2988-3006).
cttcacggctccttatgat

SEQ ID NO: 131048 - DNA, 19 bp, Homo sapiens
  siRNA target sequence for EMILIN2 (NM_032048.1,3246-3264).
ggctcacacagactttgat

SEQ ID NO: 131049 - DNA, 19 bp, Homo sapiens
  siRNA target sequence for ENG (NM_000118.1,413-431).
cacaagtcttgcagaaaca

SEQ ID NO: 131050 - DNA, 19 bp, Homo sapiens
  siRNA target sequence for ENG (NM_000118.1,415-433).
caagtcttgcagaaacagt

SEQ ID NO: 131051 - DNA, 19 bp, Homo sapiens
  siRNA target sequence for ENG (NM_000118.1,464-482).
gaggggcgaggtgacatat

SEQ ID NO: 131052 - DNA, 19 bp, Homo sapiens
  siRNA target sequence for ENG (NM_000118.1,468-486).
ggcgaggtgacatatacca

SEQ ID NO: 131053 - DNA, 19 bp, Homo sapiens
  siRNA target sequence for ENG (NM_000118.1,1383-1401).
cctcccaaggacacttgta

SEQ ID NO: 131054 - DNA, 19 bp, Homo sapiens
  siRNA target sequence for ENG (NM_000118.1,1449-1467).
gccatgaccctggtactaa

SEQ ID NO: 131055 - DNA, 19 bp, Homo sapiens
  siRNA target sequence for ENG (NM_000118.1,1450-1468).
ccatgaccctggtactaaa

SEQ ID NO: 131056 - DNA, 19 bp, Homo sapiens
  siRNA target sequence for ENG (NM_000118.1,1476-1494).
cttgttgcgcatttgaagt

SEQ ID NO: 131057 - DNA, 19 bp, Homo sapiens
  siRNA target sequence for ENG (NM_000118.1,1541-1559).
ggacaggggtgacaagttt

SEQ ID NO: 131058 - DNA, 19 bp, Homo sapiens
  siRNA target sequence for ENG (NM_000118.1,2175-2193).
gcactctggtacatctact

SEQ ID NO: 131059 - DNA, 19 bp, Homo sapiens
  siRNA target sequence for ESPL1 (NM_012291.3,240-258).
ggcctgtgatggctactta

SEQ ID NO: 131060 - DNA, 19 bp, Homo sapiens
  siRNA target sequence for ESPL1 (NM_012291.3,281-299).
ccctctacctggaacgaat

SEQ ID NO: 131061 - DNA, 19 bp, Homo sapiens
  siRNA target sequence for ESPL1 (NM_012291.3,282-300).
cctctacctggaacgaatt

SEQ ID NO: 131062 - DNA, 19 bp, Homo sapiens
  siRNA target sequence for ESPL1 (NM_012291.3,292-310).
gaacgaattctctttgtct

SEQ ID NO: 131063 - DNA, 19 bp, Homo sapiens
  siRNA target sequence for ESPL1 (NM_012291.3,427-445).
gtggctcggggcagctttt

SEQ ID NO: 131064 - DNA, 19 bp, Homo sapiens
  siRNA target sequence for ESPL1 (NM_012291.3,477-495).
ggaacggcgagctgcattt

SEQ ID NO: 131065 - DNA, 19 bp, Homo sapiens
  siRNA target sequence for ESPL1 (NM_012291.3,512-530).
ccttgagcttcctagtact

SEQ ID NO: 131066 - DNA, 19 bp, Homo sapiens
  siRNA target sequence for ESPL1 (NM_012291.3,620-638).
ccagtggccatggtctaaa

SEQ ID NO: 131067 - DNA, 19 bp, Homo sapiens
  siRNA target sequence for ESPL1 (NM_012291.3,828-846).
gaaggctcacagttaccta

SEQ ID NO: 131068 - DNA, 19 bp, Homo sapiens
  siRNA target sequence for ESPL1 (NM_012291.3,833-851).
ctcacagttacctaaggaa

SEQ ID NO: 131069 - DNA, 19 bp, Homo sapiens
  siRNA target sequence for ESPL1 (NM_012291.3,843-861).
cctaaggaacaccaatcta

SEQ ID NO: 131070 - DNA, 19 bp, Homo sapiens
  siRNA target sequence for ESPL1 (NM_012291.3,866-884).
ctagccttcagctatgtca

SEQ ID NO: 131071 - DNA, 19 bp, Homo sapiens
  siRNA target sequence for ESPL1 (NM_012291.3,959-977).
ctgtcctgagcaagagtat

SEQ ID NO: 131072 - DNA, 19 bp, Homo sapiens
  siRNA target sequence for ESPL1 (NM_012291.3,992-1010).
ccccacttcgggcattgta

SEQ ID NO: 131073 - DNA, 19 bp, Homo sapiens
  siRNA target sequence for ESPL1 (NM_012291.3,993-1011).
cccacttcgggcattgtat

SEQ ID NO: 131074 - DNA, 19 bp, Homo sapiens
  siRNA target sequence for ESPL1 (NM_012291.3,995-1013).
cacttcgggcattgtatga

SEQ ID NO: 131075 - DNA, 19 bp, Homo sapiens
  siRNA target sequence for ESPL1 (NM_012291.3,997-1015).
cttcgggcattgtatgaga

SEQ ID NO: 131076 - DNA, 19 bp, Homo sapiens
  siRNA target sequence for ESPL1 (NM_012291.3,1052-1070).
ccaagaggcgctatagact

SEQ ID NO: 131077 - DNA, 19 bp, Homo sapiens
  siRNA target sequence for ESPL1 (NM_012291.3,1053-1071).
caagaggcgctatagactt

SEQ ID NO: 131078 - DNA, 19 bp, Homo sapiens
  siRNA target sequence for ESPL1 (NM_012291.3,1056-1074).
gaggcgctatagacttgat

SEQ ID NO: 131079 - DNA, 19 bp, Homo sapiens
  siRNA target sequence for ESPL1 (NM_012291.3,1235-1253).
cccaaggctgtcagatagt

SEQ ID NO: 131080 - DNA, 19 bp, Homo sapiens
  siRNA target sequence for ESPL1 (NM_012291.3,1236-1254).
ccaaggctgtcagatagtt

SEQ ID NO: 131081 - DNA, 19 bp, Homo sapiens
  siRNA target sequence for ESPL1 (NM_012291.3,1241-1259).
gctgtcagatagttgattt

SEQ ID NO: 131082 - DNA, 19 bp, Homo sapiens
  siRNA target sequence for ESPL1 (NM_012291.3,1262-1280).
ctgacctgacccaactagt

SEQ ID NO: 131083 - DNA, 19 bp, Homo sapiens
  siRNA target sequence for ESPL1 (NM_012291.3,1360-1378).
gggatgaccgcttcttaca

SEQ ID NO: 131084 - DNA, 19 bp, Homo sapiens
  siRNA target sequence for ESPL1 (NM_012291.3,1368-1386).
cgcttcttacaccagtaat

SEQ ID NO: 131085 - DNA, 19 bp, Homo sapiens
  siRNA target sequence for ESPL1 (NM_012291.3,1369-1387).
gcttcttacaccagtaatt

SEQ ID NO: 131086 - DNA, 19 bp, Homo sapiens
  siRNA target sequence for ESPL1 (NM_012291.3,1370-1388).
cttcttacaccagtaattt

SEQ ID NO: 131087 - DNA, 19 bp, Homo sapiens
  siRNA target sequence for ESPL1 (NM_012291.3,1389-1407).
ggcctacagcttctatagt

SEQ ID NO: 131088 - DNA, 19 bp, Homo sapiens
  siRNA target sequence for ESPL1 (NM_012291.3,1514-1532).
ggtgcttccggctacaagt

SEQ ID NO: 131089 - DNA, 19 bp, Homo sapiens
  siRNA target sequence for ESPL1 (NM_012291.3,1515-1533).
gtgcttccggctacaagta

SEQ ID NO: 131090 - DNA, 19 bp, Homo sapiens
  siRNA target sequence for ESPL1 (NM_012291.3,1517-1535).
gcttccggctacaagtaga

SEQ ID NO: 131091 - DNA, 19 bp, Homo sapiens
  siRNA target sequence for ESPL1 (NM_012291.3,1523-1541).
ggctacaagtagagagttt

SEQ ID NO: 131092 - DNA, 19 bp, Homo sapiens
  siRNA target sequence for ESPL1 (NM_012291.3,1525-1543).
ctacaagtagagagtttga

SEQ ID NO: 131093 - DNA, 19 bp, Homo sapiens
  siRNA target sequence for ESPL1 (NM_012291.3,1607-1625).
cctgtagccctgaacacat

SEQ ID NO: 131094 - DNA, 19 bp, Homo sapiens
  siRNA target sequence for ESPL1 (NM_012291.3,1627-1645).
gctgagccagtcactttct

SEQ ID NO: 131095 - DNA, 19 bp, Homo sapiens
  siRNA target sequence for ESPL1 (NM_012291.3,1799-1817).
gacaggaacgcttcaacat

SEQ ID NO: 131096 - DNA, 19 bp, Homo sapiens
  siRNA target sequence for ESPL1 (NM_012291.3,1906-1924).
ctctgctaccacgacttta

SEQ ID NO: 131097 - DNA, 19 bp, Homo sapiens
  siRNA target sequence for ESPL1 (NM_012291.3,2016-2034).
gcttctggacgataaagca

SEQ ID NO: 131098 - DNA, 19 bp, Homo sapiens
  siRNA target sequence for ESPL1 (NM_012291.3,2038-2056).
gccttgctgtggctttaca

SEQ ID NO: 131099 - DNA, 19 bp, Homo sapiens
  siRNA target sequence for ESPL1 (NM_012291.3,2044-2062).
ctgtggctttacatctgta

SEQ ID NO: 131100 - DNA, 19 bp, Homo sapiens
  siRNA target sequence for ESPL1 (NM_012291.3,2060-2078).
gtactctggaagccaaaat

SEQ ID NO: 131101 - DNA, 19 bp, Homo sapiens
  siRNA target sequence for ESPL1 (NM_012291.3,2120-2138).
gtaacttggaggaatttga

SEQ ID NO: 131102 - DNA, 19 bp, Homo sapiens
  siRNA target sequence for ESPL1 (NM_012291.3,2169-2187).
ccaggaagatcgtttccta

SEQ ID NO: 131103 - DNA, 19 bp, Homo sapiens
  siRNA target sequence for ESPL1 (NM_012291.3,2170-2188).
caggaagatcgtttcctat

SEQ ID NO: 131104 - DNA, 19 bp, Homo sapiens
  siRNA target sequence for ESPL1 (NM_012291.3,2176-2194).
gatcgtttcctatacagta

SEQ ID NO: 131105 - DNA, 19 bp, Homo sapiens
  siRNA target sequence for ESPL1 (NM_012291.3,2179-2197).
cgtttcctatacagtaaca

SEQ ID NO: 131106 - DNA, 19 bp, Homo sapiens
  siRNA target sequence for ESPL1 (NM_012291.3,2218-2236).
gatgctgctcagtccaaat

SEQ ID NO: 131107 - DNA, 19 bp, Homo sapiens
  siRNA target sequence for ESPL1 (NM_012291.3,2719-2737).
ctggtggcagcttacctta

SEQ ID NO: 131108 - DNA, 19 bp, Homo sapiens
  siRNA target sequence for ESPL1 (NM_012291.3,2734-2752).
cttagcctcccgtcaaaca

SEQ ID NO: 131109 - DNA, 19 bp, Homo sapiens
  siRNA target sequence for ESPL1 (NM_012291.3,2793-2811).
ctggcagacacctgagata

SEQ ID NO: 131110 - DNA, 19 bp, Homo sapiens
  siRNA target sequence for ESPL1 (NM_012291.3,2806-2824).
gagatagctctcatagact

SEQ ID NO: 131111 - DNA, 19 bp, Homo sapiens
  siRNA target sequence for ESPL1 (NM_012291.3,2920-2938).
ggtgaaaatctggtacaaa

SEQ ID NO: 131112 - DNA, 19 bp, Homo sapiens
  siRNA target sequence for ESPL1 (NM_012291.3,2921-2939).
gtgaaaatctggtacaaaa

SEQ ID NO: 131113 - DNA, 19 bp, Homo sapiens
  siRNA target sequence for ESPL1 (NM_012291.3,3039-3057).
ggccctaaaacttacaaca

SEQ ID NO: 131114 - DNA, 19 bp, Homo sapiens
  siRNA target sequence for ESPL1 (NM_012291.3,3040-3058).
gccctaaaacttacaacaa

SEQ ID NO: 131115 - DNA, 19 bp, Homo sapiens
  siRNA target sequence for ESPL1 (NM_012291.3,3353-3371).
ccatagcaccttctacaaa

SEQ ID NO: 131116 - DNA, 19 bp, Homo sapiens
  siRNA target sequence for ESPL1 (NM_012291.3,3479-3497).
gtctgcgctgggtattggt

SEQ ID NO: 131117 - DNA, 19 bp, Homo sapiens
  siRNA target sequence for ESPL1 (NM_012291.3,3607-3625).
caagcttccctgaatcata

SEQ ID NO: 131118 - DNA, 19 bp, Homo sapiens
  siRNA target sequence for ESPL1 (NM_012291.3,3610-3628).
gcttccctgaatcataaaa

SEQ ID NO: 131119 - DNA, 19 bp, Homo sapiens
  siRNA target sequence for ESPL1 (NM_012291.3,3744-3762).
gtcagggctgaagtttgta

SEQ ID NO: 131120 - DNA, 19 bp, Homo sapiens
  siRNA target sequence for ESPL1 (NM_012291.3,3810-3828).
gatttgggccctcacaaaa

SEQ ID NO: 131121 - DNA, 19 bp, Homo sapiens
  siRNA target sequence for ESPL1 (NM_012291.3,3846-3864).
ctgtactacccaacttttt

SEQ ID NO: 131122 - DNA, 19 bp, Homo sapiens
  siRNA target sequence for ESPL1 (NM_012291.3,3927-3945).
gactcagggccaaaaacgt

SEQ ID NO: 131123 - DNA, 19 bp, Homo sapiens
  siRNA target sequence for ESPL1 (NM_012291.3,3977-3995).
ctcccctgcgcctcaataa

SEQ ID NO: 131124 - DNA, 19 bp, Homo sapiens
  siRNA target sequence for ESPL1 (NM_012291.3,3979-3997).
cccctgcgcctcaataata

SEQ ID NO: 131125 - DNA, 19 bp, Homo sapiens
  siRNA target sequence for ESPL1 (NM_012291.3,3982-4000).
ctgcgcctcaataatacct

SEQ ID NO: 131126 - DNA, 19 bp, Homo sapiens
  siRNA target sequence for ESPL1 (NM_012291.3,4166-4184).
cgcgcctcaaggtgaactt

SEQ ID NO: 131127 - DNA, 19 bp, Homo sapiens
  siRNA target sequence for ESPL1 (NM_012291.3,4377-4395).
gaaggtggcatcaagacat

SEQ ID NO: 131128 - DNA, 19 bp, Homo sapiens
  siRNA target sequence for ESPL1 (NM_012291.3,4380-4398).
ggtggcatcaagacattgt

SEQ ID NO: 131129 - DNA, 19 bp, Homo sapiens
  siRNA target sequence for ESPL1 (NM_012291.3,4698-4716).
cgtagccactggtctttct

SEQ ID NO: 131130 - DNA, 19 bp, Homo sapiens
  siRNA target sequence for ESPL1 (NM_012291.3,4699-4717).
gtagccactggtctttcta

SEQ ID NO: 131131 - DNA, 19 bp, Homo sapiens
  siRNA target sequence for ESPL1 (NM_012291.3,4824-4842).
gggccaccgggatccttat

SEQ ID NO: 131132 - DNA, 19 bp, Homo sapiens
  siRNA target sequence for ESPL1 (NM_012291.3,4932-4950).
gaagcaccgaggatcactt

SEQ ID NO: 131133 - DNA, 19 bp, Homo sapiens
  siRNA target sequence for ESPL1 (NM_012291.3,4936-4954).
caccgaggatcacttgaaa

SEQ ID NO: 131134 - DNA, 19 bp, Homo sapiens
  siRNA target sequence for ESPL1 (NM_012291.3,5231-5249).
gccagaacaagcttcatct

SEQ ID NO: 131135 - DNA, 19 bp, Homo sapiens
  siRNA target sequence for ESPL1 (NM_012291.3,5503-5521).
gaccgcactctgctgaaaa

SEQ ID NO: 131136 - DNA, 19 bp, Homo sapiens
  siRNA target sequence for ESPL1 (NM_012291.3,5506-5524).
cgcactctgctgaaaatca

SEQ ID NO: 131137 - DNA, 19 bp, Homo sapiens
  siRNA target sequence for ESPL1 (NM_012291.3,5647-5665).
ctgacagtaccaagcaata

SEQ ID NO: 131138 - DNA, 19 bp, Homo sapiens
  siRNA target sequence for ESPL1 (NM_012291.3,5971-5989).
gccctgacaaagcatgatt

SEQ ID NO: 131139 - DNA, 19 bp, Homo sapiens
  siRNA target sequence for ESPL1 (NM_012291.3,5972-5990).
ccctgacaaagcatgattt

SEQ ID NO: 131140 - DNA, 19 bp, Homo sapiens
  siRNA target sequence for ESPL1 (NM_012291.3,6128-6146).
ctggcatcgtgctcaagta

SEQ ID NO: 131141 - DNA, 19 bp, Homo sapiens
  siRNA target sequence for ESPL1 (NM_012291.3,6131-6149).
gcatcgtgctcaagtacat

SEQ ID NO: 131142 - DNA, 19 bp, Homo sapiens
  siRNA target sequence for ESPL1 (NM_012291.3,6298-6316).
ccccgactcaagtatctta

SEQ ID NO: 131143 - DNA, 19 bp, Homo sapiens
  siRNA target sequence for ESPL1 (NM_012291.3,6299-6317).
cccgactcaagtatcttat

SEQ ID NO: 131144 - DNA, 19 bp, Homo sapiens
  siRNA target sequence for ESPL1 (NM_012291.3,6300-6318).
ccgactcaagtatcttatt

SEQ ID NO: 131145 - DNA, 19 bp, Homo sapiens
  siRNA target sequence for EVI5 (NM_005665.2,14-32).
ggttaccaacaaaatgact

SEQ ID NO: 131146 - DNA, 19 bp, Homo sapiens
  siRNA target sequence for EVI5 (NM_005665.2,300-318).
gaaacggatagtaagtctt

SEQ ID NO: 131147 - DNA, 19 bp, Homo sapiens
  siRNA target sequence for EVI5 (NM_005665.2,305-323).
ggatagtaagtctttaaga

SEQ ID NO: 131148 - DNA, 19 bp, Homo sapiens
  siRNA target sequence for EVI5 (NM_005665.2,306-324).
gatagtaagtctttaagat

SEQ ID NO: 131149 - DNA, 19 bp, Homo sapiens
  siRNA target sequence for EVI5 (NM_005665.2,416-434).
gattctttggggaagaatt

SEQ ID NO: 131150 - DNA, 19 bp, Homo sapiens
  siRNA target sequence for EVI5 (NM_005665.2,447-465).
gaagatgtacgcaaaaaga

SEQ ID NO: 131151 - DNA, 19 bp, Homo sapiens
  siRNA target sequence for EVI5 (NM_005665.2,498-516).
gggataccccatcacttta

SEQ ID NO: 131152 - DNA, 19 bp, Homo sapiens
  siRNA target sequence for EVI5 (NM_005665.2,500-518).
gataccccatcactttaga

SEQ ID NO: 131153 - DNA, 19 bp, Homo sapiens
  siRNA target sequence for EVI5 (NM_005665.2,520-538).
caatagtttggcaactttt

SEQ ID NO: 131154 - DNA, 19 bp, Homo sapiens
  siRNA target sequence for EVI5 (NM_005665.2,546-564).
gcacaaagtatgccaatta

SEQ ID NO: 131155 - DNA, 19 bp, Homo sapiens
  siRNA target sequence for EVI5 (NM_005665.2,598-616).
cgccttgtgaaaaattgat

SEQ ID NO: 131156 - DNA, 19 bp, Homo sapiens
  siRNA target sequence for EVI5 (NM_005665.2,642-660).
cctgaacacaactttttta

SEQ ID NO: 131157 - DNA, 19 bp, Homo sapiens
  siRNA target sequence for EVI5 (NM_005665.2,674-692).
ccttggacaggaggtttta

SEQ ID NO: 131158 - DNA, 19 bp, Homo sapiens
  siRNA target sequence for EVI5 (NM_005665.2,675-693).
cttggacaggaggttttat

SEQ ID NO: 131159 - DNA, 19 bp, Homo sapiens
  siRNA target sequence for EVI5 (NM_005665.2,699-717).
gtaatgaaggcttactctt

SEQ ID NO: 131160 - DNA, 19 bp, Homo sapiens
  siRNA target sequence for EVI5 (NM_005665.2,707-725).
ggcttactctttagtagat

SEQ ID NO: 131161 - DNA, 19 bp, Homo sapiens
  siRNA target sequence for EVI5 (NM_005665.2,740-758).
ctgtcaaggaagtgctttt

SEQ ID NO: 131162 - DNA, 19 bp, Homo sapiens
  siRNA target sequence for EVI5 (NM_005665.2,887-905).
ccagtttgaatgtatgata

SEQ ID NO: 131163 - DNA, 19 bp, Homo sapiens
  siRNA target sequence for EVI5 (NM_005665.2,976-994).
cctggtttctgactatctt

SEQ ID NO: 131164 - DNA, 19 bp, Homo sapiens
  siRNA target sequence for EVI5 (NM_005665.2,984-1002).
ctgactatctttcttacaa

SEQ ID NO: 131165 - DNA, 19 bp, Homo sapiens
  siRNA target sequence for EVI5 (NM_005665.2,986-1004).
gactatctttcttacaact

SEQ ID NO: 131166 - DNA, 19 bp, Homo sapiens
  siRNA target sequence for EVI5 (NM_005665.2,1021-1039).
caacaaggatatttgatat

SEQ ID NO: 131167 - DNA, 19 bp, Homo sapiens
  siRNA target sequence for EVI5 (NM_005665.2,1048-1066).
ctgagggtttagaaatagt

SEQ ID NO: 131168 - DNA, 19 bp, Homo sapiens
  siRNA target sequence for EVI5 (NM_005665.2,1050-1068).
gagggtttagaaatagtgt

SEQ ID NO: 131169 - DNA, 19 bp, Homo sapiens
  siRNA target sequence for EVI5 (NM_005665.2,1052-1070).
gggtttagaaatagtgttt

SEQ ID NO: 131170 - DNA, 19 bp, Homo sapiens
  siRNA target sequence for EVI5 (NM_005665.2,1067-1085).
gtttcgtgtaggattagca

SEQ ID NO: 131171 - DNA, 19 bp, Homo sapiens
  siRNA target sequence for EVI5 (NM_005665.2,1078-1096).
gattagcacttcttcagat

SEQ ID NO: 131172 - DNA, 19 bp, Homo sapiens
  siRNA target sequence for EVI5 (NM_005665.2,1132-1150).
ggatgttacagcactttca

SEQ ID NO: 131173 - DNA, 19 bp, Homo sapiens
  siRNA target sequence for EVI5 (NM_005665.2,1133-1151).
gatgttacagcactttcaa

SEQ ID NO: 131174 - DNA, 19 bp, Homo sapiens
  siRNA target sequence for EVI5 (NM_005665.2,1177-1195).
gtgtcccagacaagctaat

SEQ ID NO: 131175 - DNA, 19 bp, Homo sapiens
  siRNA target sequence for EVI5 (NM_005665.2,1181-1199).
cccagacaagctaatccaa

SEQ ID NO: 131176 - DNA, 19 bp, Homo sapiens
  siRNA target sequence for EVI5 (NM_005665.2,1304-1322).
gttacgcacagaaaataga

SEQ ID NO: 131177 - DNA, 19 bp, Homo sapiens
  siRNA target sequence for EVI5 (NM_005665.2,1334-1352).
gcgcatcgagacattagaa

SEQ ID NO: 131178 - DNA, 19 bp, Homo sapiens
  siRNA target sequence for EVI5 (NM_005665.2,1335-1353).
cgcatcgagacattagaaa

SEQ ID NO: 131179 - DNA, 19 bp, Homo sapiens
  siRNA target sequence for EVI5 (NM_005665.2,1336-1354).
gcatcgagacattagaaaa

SEQ ID NO: 131180 - DNA, 19 bp, Homo sapiens
  siRNA target sequence for EVI5 (NM_005665.2,1370-1388).
caactacaacgaagatttt

SEQ ID NO: 131181 - DNA, 19 bp, Homo sapiens
  siRNA target sequence for EVI5 (NM_005665.2,1464-1482).
caggataaagtcttggata

SEQ ID NO: 131182 - DNA, 19 bp, Homo sapiens
  siRNA target sequence for EVI5 (NM_005665.2,1544-1562).
cattgctgtgaaacttaga

SEQ ID NO: 131183 - DNA, 19 bp, Homo sapiens
  siRNA target sequence for EVI5 (NM_005665.2,1634-1652).
ccacttagctcgtactact

SEQ ID NO: 131184 - DNA, 19 bp, Homo sapiens
  siRNA target sequence for EVI5 (NM_005665.2,1709-1727).
gatgaccattcgacttaga

SEQ ID NO: 131185 - DNA, 19 bp, Homo sapiens
  siRNA target sequence for EVI5 (NM_005665.2,1712-1730).
gaccattcgacttagagaa

SEQ ID NO: 131186 - DNA, 19 bp, Homo sapiens
  siRNA target sequence for EVI5 (NM_005665.2,1732-1750).
ctgaaacacaagcagaaat

SEQ ID NO: 131187 - DNA, 19 bp, Homo sapiens
  siRNA target sequence for EVI5 (NM_005665.2,1788-1806).
cagaaccagatcaatagta

SEQ ID NO: 131188 - DNA, 19 bp, Homo sapiens
  siRNA target sequence for EVI5 (NM_005665.2,1848-1866).
gagaaagtgcagtatcttt

SEQ ID NO: 131189 - DNA, 19 bp, Homo sapiens
  siRNA target sequence for EVI5 (NM_005665.2,1877-1895).
caaaggactccttactcaa

SEQ ID NO: 131190 - DNA, 19 bp, Homo sapiens
  siRNA target sequence for EVI5 (NM_005665.2,1886-1904).
ccttactcaattaagtgaa

SEQ ID NO: 131191 - DNA, 19 bp, Homo sapiens
  siRNA target sequence for EVI5 (NM_005665.2,1910-1928).
gcgtaaacaagcagagatt

SEQ ID NO: 131192 - DNA, 19 bp, Homo sapiens
  siRNA target sequence for EVI5 (NM_005665.2,2052-2070).
caaggacagcttaacaagt

SEQ ID NO: 131193 - DNA, 19 bp, Homo sapiens
  siRNA target sequence for EVI5 (NM_005665.2,2071-2089).
ctgattctaaccagtatat

SEQ ID NO: 131194 - DNA, 19 bp, Homo sapiens
  siRNA target sequence for EVI5 (NM_005665.2,2108-2126).
gatagcagagctgaatcat

SEQ ID NO: 131195 - DNA, 19 bp, Homo sapiens
  siRNA target sequence for EVI5 (NM_005665.2,2189-2207).
cattgtcaaccatttaata

SEQ ID NO: 131196 - DNA, 19 bp, Homo sapiens
  siRNA target sequence for EVI5 (NM_005665.2,2198-2216).
ccatttaataggagatgat

SEQ ID NO: 131197 - DNA, 19 bp, Homo sapiens
  siRNA target sequence for EVI5 (NM_005665.2,2225-2243).
ccattcctccgatgaagat

SEQ ID NO: 131198 - DNA, 19 bp, Homo sapiens
  siRNA target sequence for EVI5 (NM_005665.2,2226-2244).
cattcctccgatgaagatt

SEQ ID NO: 131199 - DNA, 19 bp, Homo sapiens
  siRNA target sequence for EVI5 (NM_005665.2,2335-2353).
gtagtgagagcgaaacaga

SEQ ID NO: 131200 - DNA, 19 bp, Homo sapiens
  siRNA target sequence for EVI5 (NM_005665.2,2380-2398).
gcaaccaagtggttcaaaa

SEQ ID NO: 131201 - DNA, 19 bp, Homo sapiens
  siRNA target sequence for FBI1 (NM_015898.2,575-593).
gcagctggaccttgtagat

SEQ ID NO: 131202 - DNA, 19 bp, Homo sapiens
  siRNA target sequence for FBI1 (NM_015898.2,581-599).
ggaccttgtagatcaaatt

SEQ ID NO: 131203 - DNA, 19 bp, Homo sapiens
  siRNA target sequence for FBI1 (NM_015898.2,1200-1218).
gactactacctgaagtact

SEQ ID NO: 131204 - DNA, 19 bp, Homo sapiens
  siRNA target sequence for FBI1 (NM_015898.2,1872-1890).
gccaccgacggtaacttca

SEQ ID NO: 131205 - DNA, 19 bp, Homo sapiens
  siRNA target sequence for FBXL2 (NM_012157.2,74-92).
ggttttctcaaacaatgat

SEQ ID NO: 131206 - DNA, 19 bp, Homo sapiens
  siRNA target sequence for FBXL2 (NM_012157.2,93-111).
gaaggccttattaacaaaa

SEQ ID NO: 131207 - DNA, 19 bp, Homo sapiens
  siRNA target sequence for FBXL2 (NM_012157.2,167-185).
gtgccgatgtgcacagatt

SEQ ID NO: 131208 - DNA, 19 bp, Homo sapiens
  siRNA target sequence for FBXL2 (NM_012157.2,171-189).
cgatgtgcacagatttcca

SEQ ID NO: 131209 - DNA, 19 bp, Homo sapiens
  siRNA target sequence for FBXL2 (NM_012157.2,172-190).
gatgtgcacagatttccaa

SEQ ID NO: 131210 - DNA, 19 bp, Homo sapiens
  siRNA target sequence for FBXL2 (NM_012157.2,221-239).
caactggcaaagaatagat

SEQ ID NO: 131211 - DNA, 19 bp, Homo sapiens
  siRNA target sequence for FBXL2 (NM_012157.2,266-284).
gggtcgagtggtggaaaat

SEQ ID NO: 131212 - DNA, 19 bp, Homo sapiens
  siRNA target sequence for FBXL2 (NM_012157.2,267-285).
ggtcgagtggtggaaaata

SEQ ID NO: 131213 - DNA, 19 bp, Homo sapiens
  siRNA target sequence for FBXL2 (NM_012157.2,268-286).
gtcgagtggtggaaaatat

SEQ ID NO: 131214 - DNA, 19 bp, Homo sapiens
  siRNA target sequence for FBXL2 (NM_012157.2,270-288).
cgagtggtggaaaatatct

SEQ ID NO: 131215 - DNA, 19 bp, Homo sapiens
  siRNA target sequence for FBXL2 (NM_012157.2,345-363).
ggggattcctccttgaaga

SEQ ID NO: 131216 - DNA, 19 bp, Homo sapiens
  siRNA target sequence for FBXL2 (NM_012157.2,370-388).
cacagaactgccgaaacat

SEQ ID NO: 131217 - DNA, 19 bp, Homo sapiens
  siRNA target sequence for FBXL2 (NM_012157.2,374-392).
gaactgccgaaacattgaa

SEQ ID NO: 131218 - DNA, 19 bp, Homo sapiens
  siRNA target sequence for FBXL2 (NM_012157.2,377-395).
ctgccgaaacattgaacat

SEQ ID NO: 131219 - DNA, 19 bp, Homo sapiens
  siRNA target sequence for FBXL2 (NM_012157.2,382-400).
gaaacattgaacatttgaa

SEQ ID NO: 131220 - DNA, 19 bp, Homo sapiens
  siRNA target sequence for FBXL2 (NM_012157.2,457-475).
gttccaagctgaaacatct

SEQ ID NO: 131221 - DNA, 19 bp, Homo sapiens
  siRNA target sequence for FBXL2 (NM_012157.2,638-656).
gaggggctgcacacagtta

SEQ ID NO: 131222 - DNA, 19 bp, Homo sapiens
  siRNA target sequence for FBXL2 (NM_012157.2,640-658).
ggggctgcacacagttaga

SEQ ID NO: 131223 - DNA, 19 bp, Homo sapiens
  siRNA target sequence for FBXL2 (NM_012157.2,741-759).
gaaggtgtggtgcagatat

SEQ ID NO: 131224 - DNA, 19 bp, Homo sapiens
  siRNA target sequence for FBXL2 (NM_012157.2,744-762).
ggtgtggtgcagatatgca

SEQ ID NO: 131225 - DNA, 19 bp, Homo sapiens
  siRNA target sequence for FBXL2 (NM_012157.2,812-830).
cacagatgcctctcttaca

SEQ ID NO: 131226 - DNA, 19 bp, Homo sapiens
  siRNA target sequence for FBXL2 (NM_012157.2,845-863).
ctgtccgcgactgcaaatt

SEQ ID NO: 131227 - DNA, 19 bp, Homo sapiens
  siRNA target sequence for FBXL2 (NM_012157.2,847-865).
gtccgcgactgcaaatttt

SEQ ID NO: 131228 - DNA, 19 bp, Homo sapiens
  siRNA target sequence for FBXL2 (NM_012157.2,850-868).
cgcgactgcaaattttgga

SEQ ID NO: 131229 - DNA, 19 bp, Homo sapiens
  siRNA target sequence for FBXL2 (NM_012157.2,873-891).
gcccgatgctcccatttga

SEQ ID NO: 131230 - DNA, 19 bp, Homo sapiens
  siRNA target sequence for FBXL2 (NM_012157.2,875-893).
ccgatgctcccatttgact

SEQ ID NO: 131231 - DNA, 19 bp, Homo sapiens
  siRNA target sequence for FBXL2 (NM_012157.2,890-908).
gactgacgcaggttttaca

SEQ ID NO: 131232 - DNA, 19 bp, Homo sapiens
  siRNA target sequence for FBXL2 (NM_012157.2,892-910).
ctgacgcaggttttacact

SEQ ID NO: 131233 - DNA, 19 bp, Homo sapiens
  siRNA target sequence for FBXL2 (NM_012157.2,894-912).
gacgcaggttttacacttt

SEQ ID NO: 131234 - DNA, 19 bp, Homo sapiens
  siRNA target sequence for FBXL2 (NM_012157.2,916-934).
ctcggaattgccacgaatt

SEQ ID NO: 131235 - DNA, 19 bp, Homo sapiens
  siRNA target sequence for FBXL2 (NM_012157.2,919-937).
ggaattgccacgaattgga

SEQ ID NO: 131236 - DNA, 19 bp, Homo sapiens
  siRNA target sequence for FBXL2 (NM_012157.2,951-969).
gaagaatgcatcctgataa

SEQ ID NO: 131237 - DNA, 19 bp, Homo sapiens
  siRNA target sequence for FBXL2 (NM_012157.2,1237-1255).
ctcagctccctcatgtcaa

SEQ ID NO: 131238 - DNA, 19 bp, Homo sapiens
  siRNA target sequence for FLJ10572 (NM_018143.1,200-218).
gcccagaagccgaggattt

SEQ ID NO: 131239 - DNA, 19 bp, Homo sapiens
  siRNA target sequence for FLJ10572 (NM_018143.1,277-295).
ggcctcttctgcgacatta

SEQ ID NO: 131240 - DNA, 19 bp, Homo sapiens
  siRNA target sequence for FLJ10572 (NM_018143.1,353-371).
ctgccgccaccgagtactt

SEQ ID NO: 131241 - DNA, 19 bp, Homo sapiens
  siRNA target sequence for FLJ10572 (NM_018143.1,379-397).
ctgctctcgggccagtttt

SEQ ID NO: 131242 - DNA, 19 bp, Homo sapiens
  siRNA target sequence for FLJ10572 (NM_018143.1,464-482).
cagtggaagccgtaatcga

SEQ ID NO: 131243 - DNA, 19 bp, Homo sapiens
  siRNA target sequence for FLJ10572 (NM_018143.1,472-490).
gccgtaatcgagtacatgt

SEQ ID NO: 131244 - DNA, 19 bp, Homo sapiens
  siRNA target sequence for FLJ10572 (NM_018143.1,473-491).
ccgtaatcgagtacatgta

SEQ ID NO: 131245 - DNA, 19 bp, Homo sapiens
  siRNA target sequence for FLJ10572 (NM_018143.1,475-493).
gtaatcgagtacatgtaca

SEQ ID NO: 131246 - DNA, 19 bp, Homo sapiens
  siRNA target sequence for FLJ10572 (NM_018143.1,545-563).
ccgacaggttcctactcat

SEQ ID NO: 131247 - DNA, 19 bp, Homo sapiens
  siRNA target sequence for FLJ10572 (NM_018143.1,546-564).
cgacaggttcctactcatt

SEQ ID NO: 131248 - DNA, 19 bp, Homo sapiens
  siRNA target sequence for FLJ10572 (NM_018143.1,551-569).
ggttcctactcattcgttt

SEQ ID NO: 131249 - DNA, 19 bp, Homo sapiens
  siRNA target sequence for FLJ10572 (NM_018143.1,552-570).
gttcctactcattcgttta

SEQ ID NO: 131250 - DNA, 19 bp, Homo sapiens
  siRNA target sequence for FLJ10572 (NM_018143.1,561-579).
cattcgtttaaaagaattt

SEQ ID NO: 131251 - DNA, 19 bp, Homo sapiens
  siRNA target sequence for FLJ10572 (NM_018143.1,672-690).
gaaggctgctgatatgata

SEQ ID NO: 131252 - DNA, 19 bp, Homo sapiens
  siRNA target sequence for FLJ10572 (NM_018143.1,692-710).
ggagaaatttccacaaagt

SEQ ID NO: 131253 - DNA, 19 bp, Homo sapiens
  siRNA target sequence for FLJ10572 (NM_018143.1,724-742).
gaattttatacgttacctt

SEQ ID NO: 131254 - DNA, 19 bp, Homo sapiens
  siRNA target sequence for FLJ10572 (NM_018143.1,734-752).
cgttacctttccatctcat

SEQ ID NO: 131255 - DNA, 19 bp, Homo sapiens
  siRNA target sequence for FLJ10572 (NM_018143.1,802-820).
ctctttgaaaccgttttga

SEQ ID NO: 131256 - DNA, 19 bp, Homo sapiens
  siRNA target sequence for FLJ10572 (NM_018143.1,804-822).
ctttgaaaccgttttgaaa

SEQ ID NO: 131257 - DNA, 19 bp, Homo sapiens
  siRNA target sequence for FLJ10572 (NM_018143.1,852-870).
gagatactttgaagaactt

SEQ ID NO: 131258 - DNA, 19 bp, Homo sapiens
  siRNA target sequence for FLJ10572 (NM_018143.1,933-951).
gaggctggtagccaataat

SEQ ID NO: 131259 - DNA, 19 bp, Homo sapiens
  siRNA target sequence for FLJ10572 (NM_018143.1,935-953).
ggctggtagccaataatga

SEQ ID NO: 131260 - DNA, 19 bp, Homo sapiens
  siRNA target sequence for FLJ10572 (NM_018143.1,999-1017).
gagagctgagaatatacaa

SEQ ID NO: 131261 - DNA, 19 bp, Homo sapiens
  siRNA target sequence for FLJ10572 (NM_018143.1,1050-1068).
gtcactattgcctcgttat

SEQ ID NO: 131262 - DNA, 19 bp, Homo sapiens
  siRNA target sequence for FLJ10572 (NM_018143.1,1111-1129).
gaaggaggggactatttaa

SEQ ID NO: 131263 - DNA, 19 bp, Homo sapiens
  siRNA target sequence for FLJ10572 (NM_018143.1,1117-1135).
ggggactatttaagtgaat

SEQ ID NO: 131264 - DNA, 19 bp, Homo sapiens
  siRNA target sequence for FLJ10572 (NM_018143.1,1251-1269).
ggagccagggtttgctaaa

SEQ ID NO: 131265 - DNA, 19 bp, Homo sapiens
  siRNA target sequence for FLJ10572 (NM_018143.1,1252-1270).
gagccagggtttgctaaaa

SEQ ID NO: 131266 - DNA, 19 bp, Homo sapiens
  siRNA target sequence for FLJ10572 (NM_018143.1,1254-1272).
gccagggtttgctaaaact

SEQ ID NO: 131267 - DNA, 19 bp, Homo sapiens
  siRNA target sequence for FLJ10572 (NM_018143.1,1256-1274).
cagggtttgctaaaactgt

SEQ ID NO: 131268 - DNA, 19 bp, Homo sapiens
  siRNA target sequence for FLJ10572 (NM_018143.1,1276-1294).
gaaaggtataacccaaatt

SEQ ID NO: 131269 - DNA, 19 bp, Homo sapiens
  siRNA target sequence for FLJ10572 (NM_018143.1,1335-1353).
gcattcttttggactaaca

SEQ ID NO: 131270 - DNA, 19 bp, Homo sapiens
  siRNA target sequence for FLJ10572 (NM_018143.1,1357-1375).
gtcaaagggaagctctata

SEQ ID NO: 131271 - DNA, 19 bp, Homo sapiens
  siRNA target sequence for FLJ10572 (NM_018143.1,1392-1410).
caactttagtcctggtttt

SEQ ID NO: 131272 - DNA, 19 bp, Homo sapiens
  siRNA target sequence for FLJ10572 (NM_018143.1,1458-1476).
ggaatcggcaccaaagatt

SEQ ID NO: 131273 - DNA, 19 bp, Homo sapiens
  siRNA target sequence for FLJ10572 (NM_018143.1,1504-1522).
gaagaccggtttgtataca

SEQ ID NO: 131274 - DNA, 19 bp, Homo sapiens
  siRNA target sequence for FLJ10572 (NM_018143.1,1569-1587).
ggctgtaattacttgctat

SEQ ID NO: 131275 - DNA, 19 bp, Homo sapiens
  siRNA target sequence for FLJ10572 (NM_018143.1,1598-1616).
ctcgacagtggcaagatgt

SEQ ID NO: 131276 - DNA, 19 bp, Homo sapiens
  siRNA target sequence for FLJ10572 (NM_018143.1,1617-1635).
ggaatctttgccgcttatt

SEQ ID NO: 131277 - DNA, 19 bp, Homo sapiens
  siRNA target sequence for FLJ10572 (NM_018143.1,1622-1640).
ctttgccgcttattgacaa

SEQ ID NO: 131278 - DNA, 19 bp, Homo sapiens
  siRNA target sequence for FLJ10572 (NM_018143.1,1627-1645).
ccgcttattgacaattact

SEQ ID NO: 131279 - DNA, 19 bp, Homo sapiens
  siRNA target sequence for FLJ10572 (NM_018143.1,1694-1712).
catgttgtcccaagagtta

SEQ ID NO: 131280 - DNA, 19 bp, Homo sapiens
  siRNA target sequence for FLJ10572 (NM_018143.1,1784-1802).
ctccagaagtcctaagcat

SEQ ID NO: 131281 - DNA, 19 bp, Homo sapiens
  siRNA target sequence for FLJ10572 (NM_018143.1,1810-1828).
gcagccatttgctattaca

SEQ ID NO: 131282 - DNA, 19 bp, Homo sapiens
  siRNA target sequence for FLJ10572 (NM_018143.1,1947-1965).
gccacaacctcgttgtaga

SEQ ID NO: 131283 - DNA, 19 bp, Homo sapiens
  siRNA target sequence for FLJ10572 (NM_018143.1,2018-2036).
gataccctatgcctcaaaa

SEQ ID NO: 131284 - DNA, 19 bp, Homo sapiens
  siRNA target sequence for FLJ10572 (NM_018143.1,2109-2127).
gccaagctctcagattgaa

SEQ ID NO: 131285 - DNA, 19 bp, Homo sapiens
  siRNA target sequence for FLJ10572 (NM_018143.1,2110-2128).
ccaagctctcagattgaat

SEQ ID NO: 131286 - DNA, 19 bp, Homo sapiens
  siRNA target sequence for FLJ11078 (NM_018316.1,216-234).
cgatgttgtgctgactatt

SEQ ID NO: 131287 - DNA, 19 bp, Homo sapiens
  siRNA target sequence for FLJ11078 (NM_018316.1,362-380).
gtggcctgcggcacatcat

SEQ ID NO: 131288 - DNA, 19 bp, Homo sapiens
  siRNA target sequence for FLJ11078 (NM_018316.1,1095-1113).
ggccgtgctggacaatttt

SEQ ID NO: 131289 - DNA, 19 bp, Homo sapiens
  siRNA target sequence for FLJ11078 (NM_018316.1,1099-1117).
gtgctggacaattttgtgt

SEQ ID NO: 131290 - DNA, 19 bp, Homo sapiens
  siRNA target sequence for FLJ11078 (NM_018316.1,1605-1623).
gctggctgtggagtactat

SEQ ID NO: 131291 - DNA, 19 bp, Homo sapiens
  siRNA target sequence for FLJ11078 (NM_018316.1,1754-1772).
gcatcgtacaggtgtacaa

SEQ ID NO: 131292 - DNA, 19 bp, Homo sapiens
  siRNA target sequence for FLJ12587 (NM_022480.2,233-251).
cgcaagcactgcatgttca

SEQ ID NO: 131293 - DNA, 19 bp, Homo sapiens
  siRNA target sequence for FLJ12587 (NM_022480.2,310-328).
cgcctctagccgctatttt

SEQ ID NO: 131294 - DNA, 19 bp, Homo sapiens
  siRNA target sequence for FLJ12587 (NM_022480.2,312-330).
cctctagccgctattttga

SEQ ID NO: 131295 - DNA, 19 bp, Homo sapiens
  siRNA target sequence for FLJ12587 (NM_022480.2,1722-1740).
ccggcaacaagctctatgt

SEQ ID NO: 131296 - DNA, 19 bp, Homo sapiens
  siRNA target sequence for FLJ12587 (NM_022480.2,1757-1775).
gggacccagaggtgtaaga

SEQ ID NO: 131297 - DNA, 19 bp, Homo sapiens
  siRNA target sequence for FLJ12587 (NM_022480.2,1759-1777).
gacccagaggtgtaagact

SEQ ID NO: 131298 - DNA, 19 bp, Homo sapiens
  siRNA target sequence for FLJ13057 (NM_178439.3,325-343).
ggccacggattctgttact

SEQ ID NO: 131299 - DNA, 19 bp, Homo sapiens
  siRNA target sequence for FLJ13057 (NM_178439.3,863-881).
cagcagggacctatggatt

SEQ ID NO: 131300 - DNA, 19 bp, Homo sapiens
  siRNA target sequence for FLJ13057 (NM_178439.3,866-884).
cagggacctatggattaga

SEQ ID NO: 131301 - DNA, 19 bp, Homo sapiens
  siRNA target sequence for FLJ13063 (NM_024742.1,999-1017).
ctttggtgaccattcttca

SEQ ID NO: 131302 - DNA, 19 bp, Homo sapiens
  siRNA target sequence for FLJ13063 (NM_024742.1,1347-1365).
gtgctgagcagctaagtct

SEQ ID NO: 131303 - DNA, 19 bp, Homo sapiens
  siRNA target sequence for FLJ13063 (NM_024742.1,1422-1440).
gcgagggaaccattctgat

SEQ ID NO: 131304 - DNA, 19 bp, Homo sapiens
  siRNA target sequence for FLJ13063 (NM_024742.1,1635-1653).
gtggcttggatctactgat

SEQ ID NO: 131305 - DNA, 19 bp, Homo sapiens
  siRNA target sequence for FLJ13063 (NM_024742.1,1681-1699).
cgcatggcaccctcgtatt

SEQ ID NO: 131306 - DNA, 19 bp, Homo sapiens
  siRNA target sequence for FLJ13063 (NM_024742.1,1683-1701).
catggcaccctcgtattgt

SEQ ID NO: 131307 - DNA, 19 bp, Homo sapiens
  siRNA target sequence for FLJ13063 (NM_024742.1,1706-1724).
gcccttgtggggtttctgt

SEQ ID NO: 131308 - DNA, 19 bp, Homo sapiens
  siRNA target sequence for FLJ13063 (NM_024742.1,1707-1725).
cccttgtggggtttctgta

SEQ ID NO: 131309 - DNA, 19 bp, Homo sapiens
  siRNA target sequence for FLJ13063 (NM_024742.1,2612-2630).
cccagataccctaactcta

SEQ ID NO: 131310 - DNA, 19 bp, Homo sapiens
  siRNA target sequence for FLJ14360 (NM_032775.2,167-185).
ccacactgcgtgaacaaca

SEQ ID NO: 131311 - DNA, 19 bp, Homo sapiens
  siRNA target sequence for FLJ14360 (NM_032775.2,249-267).
gaatcctcttcgatgttgt

SEQ ID NO: 131312 - DNA, 19 bp, Homo sapiens
  siRNA target sequence for FLJ14360 (NM_032775.2,314-332).
gctgcgtcctgcgattact

SEQ ID NO: 131313 - DNA, 19 bp, Homo sapiens
  siRNA target sequence for FLJ14360 (NM_032775.2,315-333).
ctgcgtcctgcgattactt

SEQ ID NO: 131314 - DNA, 19 bp, Homo sapiens
  siRNA target sequence for FLJ14360 (NM_032775.2,388-406).
ccacggtgtgtcctacaat

SEQ ID NO: 131315 - DNA, 19 bp, Homo sapiens
  siRNA target sequence for FLJ14360 (NM_032775.2,392-410).
ggtgtgtcctacaatgcta

SEQ ID NO: 131316 - DNA, 19 bp, Homo sapiens
  siRNA target sequence for FLJ14360 (NM_032775.2,416-434).
caaatcctacatttcatat

SEQ ID NO: 131317 - DNA, 19 bp, Homo sapiens
  siRNA target sequence for FLJ14360 (NM_032775.2,456-474).
gcctgagcaatgtacaaga

SEQ ID NO: 131318 - DNA, 19 bp, Homo sapiens
  siRNA target sequence for FLJ14360 (NM_032775.2,546-564).
gggtggacgaagagaacat

SEQ ID NO: 131319 - DNA, 19 bp, Homo sapiens
  siRNA target sequence for FLJ14360 (NM_032775.2,623-641).
gacacctatatcctcaaaa

SEQ ID NO: 131320 - DNA, 19 bp, Homo sapiens
  siRNA target sequence for FLJ14360 (NM_032775.2,627-645).
cctatatcctcaaaaactt

SEQ ID NO: 131321 - DNA, 19 bp, Homo sapiens
  siRNA target sequence for FLJ14360 (NM_032775.2,732-750).
cctgcgagaccgaggtata

SEQ ID NO: 131322 - DNA, 19 bp, Homo sapiens
  siRNA target sequence for FLJ14360 (NM_032775.2,758-776).
gcccttctctaccattata

SEQ ID NO: 131323 - DNA, 19 bp, Homo sapiens
  siRNA target sequence for FLJ14360 (NM_032775.2,1051-1069).
cagcgaccaggccaagtat

SEQ ID NO: 131324 - DNA, 19 bp, Homo sapiens
  siRNA target sequence for FLJ14360 (NM_032775.2,1053-1071).
gcgaccaggccaagtatct

SEQ ID NO: 131325 - DNA, 19 bp, Homo sapiens
  siRNA target sequence for FLJ14360 (NM_032775.2,1054-1072).
cgaccaggccaagtatcta

SEQ ID NO: 131326 - DNA, 19 bp, Homo sapiens
  siRNA target sequence for FLJ14360 (NM_032775.2,1055-1073).
gaccaggccaagtatctaa

SEQ ID NO: 131327 - DNA, 19 bp, Homo sapiens
  siRNA target sequence for FLJ14360 (NM_032775.2,1137-1155).
gcatcgcggtgctcaacaa

SEQ ID NO: 131328 - DNA, 19 bp, Homo sapiens
  siRNA target sequence for FLJ14360 (NM_032775.2,1148-1166).
ctcaacaacttcgtatact

SEQ ID NO: 131329 - DNA, 19 bp, Homo sapiens
  siRNA target sequence for FLJ14360 (NM_032775.2,1168-1186).
gattggaggggacaacaat

SEQ ID NO: 131330 - DNA, 19 bp, Homo sapiens
  siRNA target sequence for FLJ14360 (NM_032775.2,1180-1198).
caacaatgtccaaggattt

SEQ ID NO: 131331 - DNA, 19 bp, Homo sapiens
  siRNA target sequence for FLJ14360 (NM_032775.2,1282-1300).
cctgtccgtgtgtgttgta

SEQ ID NO: 131332 - DNA, 19 bp, Homo sapiens
  siRNA target sequence for FLJ14360 (NM_032775.2,1295-1313).
gttgtaggcaggtacatct

SEQ ID NO: 131333 - DNA, 19 bp, Homo sapiens
  siRNA target sequence for FLJ14360 (NM_032775.2,1439-1457).
ctggaggggaagatgtata

SEQ ID NO: 131334 - DNA, 19 bp, Homo sapiens
  siRNA target sequence for FLJ14360 (NM_032775.2,1508-1526).
gatccaggcagcaacactt

SEQ ID NO: 131335 - DNA, 19 bp, Homo sapiens
  siRNA target sequence for FLJ14360 (NM_032775.2,1788-1806).
caggctacgtgcacattta

SEQ ID NO: 131336 - DNA, 19 bp, Homo sapiens
  siRNA target sequence for FLJ14360 (NM_032775.2,1791-1809).
gctacgtgcacatttacga

SEQ ID NO: 131337 - DNA, 19 bp, Homo sapiens
  siRNA target sequence for FLJ14360 (NM_032775.2,1792-1810).
ctacgtgcacatttacgat

SEQ ID NO: 131338 - DNA, 19 bp, Homo sapiens
  siRNA target sequence for FLJ31322 (NM_152387.1,182-200).
gaacgtgggtggctgtatt

SEQ ID NO: 131339 - DNA, 19 bp, Homo sapiens
  siRNA target sequence for FLJ31322 (NM_152387.1,288-306).
gagtcaggggcttgtgtta

SEQ ID NO: 131340 - DNA, 19 bp, Homo sapiens
  siRNA target sequence for FLJ31322 (NM_152387.1,290-308).
gtcaggggcttgtgttatt

SEQ ID NO: 131341 - DNA, 19 bp, Homo sapiens
  siRNA target sequence for FLJ31322 (NM_152387.1,292-310).
caggggcttgtgttattga

SEQ ID NO: 131342 - DNA, 19 bp, Homo sapiens
  siRNA target sequence for FLJ31322 (NM_152387.1,311-329).
ccgtgatggacgtctattt

SEQ ID NO: 131343 - DNA, 19 bp, Homo sapiens
  siRNA target sequence for FLJ31322 (NM_152387.1,312-330).
cgtgatggacgtctattta

SEQ ID NO: 131344 - DNA, 19 bp, Homo sapiens
  siRNA target sequence for FLJ31322 (NM_152387.1,313-331).
gtgatggacgtctatttaa

SEQ ID NO: 131345 - DNA, 19 bp, Homo sapiens
  siRNA target sequence for FLJ31322 (NM_152387.1,319-337).
gacgtctatttaaatacct

SEQ ID NO: 131346 - DNA, 19 bp, Homo sapiens
  siRNA target sequence for FLJ31322 (NM_152387.1,321-339).
cgtctatttaaataccttt

SEQ ID NO: 131347 - DNA, 19 bp, Homo sapiens
  siRNA target sequence for FLJ31322 (NM_152387.1,484-502).
ggtcaaatatagaacttaa

SEQ ID NO: 131348 - DNA, 19 bp, Homo sapiens
  siRNA target sequence for FLJ31322 (NM_152387.1,495-513).
gaacttaaaaaggctttaa

SEQ ID NO: 131349 - DNA, 19 bp, Homo sapiens
  siRNA target sequence for FLJ31322 (NM_152387.1,525-543).
gattcatatggcttagtct

SEQ ID NO: 131350 - DNA, 19 bp, Homo sapiens
  siRNA target sequence for FLJ31322 (NM_152387.1,536-554).
cttagtctgcaataaacca

SEQ ID NO: 131351 - DNA, 19 bp, Homo sapiens
  siRNA target sequence for FLJ31322 (NM_152387.1,564-582).
gttctccactatcttaaca

SEQ ID NO: 131352 - DNA, 19 bp, Homo sapiens
  siRNA target sequence for FLJ31322 (NM_152387.1,567-585).
ctccactatcttaacacat

SEQ ID NO: 131353 - DNA, 19 bp, Homo sapiens
  siRNA target sequence for FLJ31322 (NM_152387.1,592-610).
caagctgtgagagtagaat

SEQ ID NO: 131354 - DNA, 19 bp, Homo sapiens
  siRNA target sequence for FLJ31322 (NM_152387.1,595-613).
gctgtgagagtagaattat

SEQ ID NO: 131355 - DNA, 19 bp, Homo sapiens
  siRNA target sequence for FLJ31322 (NM_152387.1,639-657).
ggaacagacgctattgaaa

SEQ ID NO: 131356 - DNA, 19 bp, Homo sapiens
  siRNA target sequence for FLJ31322 (NM_152387.1,700-718).
gagaggcgggaaataatgt

SEQ ID NO: 131357 - DNA, 19 bp, Homo sapiens
  siRNA target sequence for FLJ31322 (NM_152387.1,706-724).
cgggaaataatgttcagta

SEQ ID NO: 131358 - DNA, 19 bp, Homo sapiens
  siRNA target sequence for FLJ31322 (NM_152387.1,720-738).
cagtacatttggagctatt

SEQ ID NO: 131359 - DNA, 19 bp, Homo sapiens
  siRNA target sequence for FLJ31322 (NM_152387.1,722-740).
gtacatttggagctattat

SEQ ID NO: 131360 - DNA, 19 bp, Homo sapiens
  siRNA target sequence for FMOD (NM_002023.2,147-165).
gacccttacccgtatgaga

SEQ ID NO: 131361 - DNA, 19 bp, Homo sapiens
  siRNA target sequence for FMOD (NM_002023.2,284-302).
ggccatgtactgtgacaat

SEQ ID NO: 131362 - DNA, 19 bp, Homo sapiens
  siRNA target sequence for FMOD (NM_002023.2,327-345).
gttccctcccgcatgaagt

SEQ ID NO: 131363 - DNA, 19 bp, Homo sapiens
  siRNA target sequence for FMOD (NM_002023.2,331-349).
cctcccgcatgaagtatgt

SEQ ID NO: 131364 - DNA, 19 bp, Homo sapiens
  siRNA target sequence for FMOD (NM_002023.2,334-352).
cccgcatgaagtatgtgta

SEQ ID NO: 131365 - DNA, 19 bp, Homo sapiens
  siRNA target sequence for FYB (NM_001465.2,299-317).
gacccagcaatgtacctaa

SEQ ID NO: 131366 - DNA, 19 bp, Homo sapiens
  siRNA target sequence for FYB (NM_001465.2,337-355).
cctgtggcagtcaaacctt

SEQ ID NO: 131367 - DNA, 19 bp, Homo sapiens
  siRNA target sequence for FYB (NM_001465.2,463-481).
gcgaaagtgggatttctga

SEQ ID NO: 131368 - DNA, 19 bp, Homo sapiens
  siRNA target sequence for FYB (NM_001465.2,559-577).
ccatctcttcacagtgtaa

SEQ ID NO: 131369 - DNA, 19 bp, Homo sapiens
  siRNA target sequence for FYB (NM_001465.2,597-615).
gccactaggcccgaaatct

SEQ ID NO: 131370 - DNA, 19 bp, Homo sapiens
  siRNA target sequence for FYB (NM_001465.2,695-713).
cagcatcacaagatcttga

SEQ ID NO: 131371 - DNA, 19 bp, Homo sapiens
  siRNA target sequence for FYB (NM_001465.2,767-785).
ccgagaactcccatgaaga

SEQ ID NO: 131372 - DNA, 19 bp, Homo sapiens
  siRNA target sequence for FYB (NM_001465.2,901-919).
gcaggggagatttcaagtt

SEQ ID NO: 131373 - DNA, 19 bp, Homo sapiens
  siRNA target sequence for FYB (NM_001465.2,923-941).
cctttcctggagtggtttt

SEQ ID NO: 131374 - DNA, 19 bp, Homo sapiens
  siRNA target sequence for FYB (NM_001465.2,1209-1227).
gggtccacctccaccaaaa

SEQ ID NO: 131375 - DNA, 19 bp, Homo sapiens
  siRNA target sequence for FYB (NM_001465.2,1252-1270).
ctgacgaaattccacaaaa

SEQ ID NO: 131376 - DNA, 19 bp, Homo sapiens
  siRNA target sequence for FYB (NM_001465.2,1297-1315).
ggccagacgtcttactcaa

SEQ ID NO: 131377 - DNA, 19 bp, Homo sapiens
  siRNA target sequence for FYB (NM_001465.2,1403-1421).
gcctacctcccagaaacat

SEQ ID NO: 131378 - DNA, 19 bp, Homo sapiens
  siRNA target sequence for FYB (NM_001465.2,1426-1444).
cctccgtttgacctaaaaa

SEQ ID NO: 131379 - DNA, 19 bp, Homo sapiens
  siRNA target sequence for FYB (NM_001465.2,1437-1455).
cctaaaaagccctgtcaat

SEQ ID NO: 131380 - DNA, 19 bp, Homo sapiens
  siRNA target sequence for FYB (NM_001465.2,1686-1704).
catccatcttgcaaaagct

SEQ ID NO: 131381 - DNA, 19 bp, Homo sapiens
  siRNA target sequence for FYB (NM_001465.2,1817-1835).
ggggttcatatggctatat

SEQ ID NO: 131382 - DNA, 19 bp, Homo sapiens
  siRNA target sequence for FYB (NM_001465.2,1818-1836).
gggttcatatggctatatt

SEQ ID NO: 131383 - DNA, 19 bp, Homo sapiens
  siRNA target sequence for FYB (NM_001465.2,1847-1865).
ctgtagagattgactatga

SEQ ID NO: 131384 - DNA, 19 bp, Homo sapiens
  siRNA target sequence for FYB (NM_001465.2,1942-1960).
gttgcagagcaggatgata

SEQ ID NO: 131385 - DNA, 19 bp, Homo sapiens
  siRNA target sequence for FYB (NM_001465.2,1948-1966).
gagcaggatgatattagca

SEQ ID NO: 131386 - DNA, 19 bp, Homo sapiens
  siRNA target sequence for FYB (NM_001465.2,2062-2080).
cctgctcctcctaaacaat

SEQ ID NO: 131387 - DNA, 19 bp, Homo sapiens
  siRNA target sequence for FYB (NM_001465.2,2063-2081).
ctgctcctcctaaacaatt

SEQ ID NO: 131388 - DNA, 19 bp, Homo sapiens
  siRNA target sequence for FYB (NM_001465.2,2066-2084).
ctcctcctaaacaattgga

SEQ ID NO: 131389 - DNA, 19 bp, Homo sapiens
  siRNA target sequence for FYB (NM_001465.2,2145-2163).
gatgagtcaaggaactaat

SEQ ID NO: 131390 - DNA, 19 bp, Homo sapiens
  siRNA target sequence for FYB (NM_001465.2,2148-2166).
gagtcaaggaactaatgtt

SEQ ID NO: 131391 - DNA, 19 bp, Homo sapiens
  siRNA target sequence for FYB (NM_001465.2,2258-2276).
gtgaaattagagtcctata

SEQ ID NO: 131392 - DNA, 19 bp, Homo sapiens
  siRNA target sequence for FYB (NM_001465.2,2271-2289).
cctatattcaactaaagtt

SEQ ID NO: 131393 - DNA, 19 bp, Homo sapiens
  siRNA target sequence for FYB (NM_001465.2,2272-2290).
ctatattcaactaaagtta

SEQ ID NO: 131394 - DNA, 19 bp, Homo sapiens
  siRNA target sequence for FYB (NM_001465.2,2315-2333).
ggggaaccagagatctaca

SEQ ID NO: 131395 - DNA, 19 bp, Homo sapiens
  siRNA target sequence for FYB (NM_001465.2,2321-2339).
ccagagatctacaggtaaa

SEQ ID NO: 131396 - DNA, 19 bp, Homo sapiens
  siRNA target sequence for FYB (NM_001465.2,2344-2362).
ggtgaatctctagaagtta

SEQ ID NO: 131397 - DNA, 19 bp, Homo sapiens
  siRNA target sequence for FYB (NM_001465.2,2345-2363).
gtgaatctctagaagttat

SEQ ID NO: 131398 - DNA, 19 bp, Homo sapiens
  siRNA target sequence for FYB (NM_001465.2,2432-2450).
gttacctagcggacaatga

SEQ ID NO: 131399 - DNA, 19 bp, Homo sapiens
  siRNA target sequence for FYB (NM_001465.2,2445-2463).
caatgatggagagatctat

SEQ ID NO: 131400 - DNA, 19 bp, Homo sapiens
  siRNA target sequence for G1P2 (NM_005101.1,164-182).
cgcagatcacccagaagat

SEQ ID NO: 131401 - DNA, 19 bp, Homo sapiens
  siRNA target sequence for G1P2 (NM_005101.1,506-524).
ccctgagcaccgtgttcat

SEQ ID NO: 131402 - DNA, 19 bp, Homo sapiens
  siRNA target sequence for G1P2 (NM_005101.1,508-526).
ctgagcaccgtgttcatga

SEQ ID NO: 131403 - DNA, 19 bp, Homo sapiens
  siRNA target sequence for G1P2 (NM_005101.1,510-528).
gagcaccgtgttcatgaat

SEQ ID NO: 131404 - DNA, 19 bp, Homo sapiens
  siRNA target sequence for GAB1 (NM_002039.1,283-301).
gaagcctattcgtattatt

SEQ ID NO: 131405 - DNA, 19 bp, Homo sapiens
  siRNA target sequence for GAB1 (NM_002039.1,286-304).
gcctattcgtattattgat

SEQ ID NO: 131406 - DNA, 19 bp, Homo sapiens
  siRNA target sequence for GAB1 (NM_002039.1,288-306).
ctattcgtattattgattt

SEQ ID NO: 131407 - DNA, 19 bp, Homo sapiens
  siRNA target sequence for GAB1 (NM_002039.1,293-311).
cgtattattgatttaaatt

SEQ ID NO: 131408 - DNA, 19 bp, Homo sapiens
  siRNA target sequence for GAB1 (NM_002039.1,326-344).
gatgctggattgacattta

SEQ ID NO: 131409 - DNA, 19 bp, Homo sapiens
  siRNA target sequence for GAB1 (NM_002039.1,387-405).
ctattgaccggattttcta

SEQ ID NO: 131410 - DNA, 19 bp, Homo sapiens
  siRNA target sequence for GAB1 (NM_002039.1,439-457).
gtgggttcgttgtatttgt

SEQ ID NO: 131411 - DNA, 19 bp, Homo sapiens
  siRNA target sequence for GAB1 (NM_002039.1,521-539).
gcaccagctgatttacctt

SEQ ID NO: 131412 - DNA, 19 bp, Homo sapiens
  siRNA target sequence for GAB1 (NM_002039.1,764-782).
gataacgtcccttctcata

SEQ ID NO: 131413 - DNA, 19 bp, Homo sapiens
  siRNA target sequence for GAB1 (NM_002039.1,769-787).
cgtcccttctcataaaaat

SEQ ID NO: 131414 - DNA, 19 bp, Homo sapiens
  siRNA target sequence for GAB1 (NM_002039.1,798-816).
cccagagcaaacatggaat

SEQ ID NO: 131415 - DNA, 19 bp, Homo sapiens
  siRNA target sequence for GAB1 (NM_002039.1,909-927).
ggagttattcccatgatgt

SEQ ID NO: 131416 - DNA, 19 bp, Homo sapiens
  siRNA target sequence for GAB1 (NM_002039.1,910-928).
gagttattcccatgatgtt

SEQ ID NO: 131417 - DNA, 19 bp, Homo sapiens
  siRNA target sequence for GAB1 (NM_002039.1,918-936).
cccatgatgttttaccaaa

SEQ ID NO: 131418 - DNA, 19 bp, Homo sapiens
  siRNA target sequence for GAB1 (NM_002039.1,1002-1020).
cgagtgtagagactcaaat

SEQ ID NO: 131419 - DNA, 19 bp, Homo sapiens
  siRNA target sequence for GAB1 (NM_002039.1,1016-1034).
caaatgaggcatgtatcta

SEQ ID NO: 131420 - DNA, 19 bp, Homo sapiens
  siRNA target sequence for GAB1 (NM_002039.1,1021-1039).
gaggcatgtatctattagt

SEQ ID NO: 131421 - DNA, 19 bp, Homo sapiens
  siRNA target sequence for GAB1 (NM_002039.1,1023-1041).
ggcatgtatctattagtta

SEQ ID NO: 131422 - DNA, 19 bp, Homo sapiens
  siRNA target sequence for GAB1 (NM_002039.1,1024-1042).
gcatgtatctattagttat

SEQ ID NO: 131423 - DNA, 19 bp, Homo sapiens
  siRNA target sequence for GAB1 (NM_002039.1,1049-1067).
cctccaacacctggtaata

SEQ ID NO: 131424 - DNA, 19 bp, Homo sapiens
  siRNA target sequence for GAB1 (NM_002039.1,1052-1070).
ccaacacctggtaatactt

SEQ ID NO: 131425 - DNA, 19 bp, Homo sapiens
  siRNA target sequence for GAB1 (NM_002039.1,1053-1071).
caacacctggtaatactta

SEQ ID NO: 131426 - DNA, 19 bp, Homo sapiens
  siRNA target sequence for GAB1 (NM_002039.1,1056-1074).
cacctggtaatacttatca

SEQ ID NO: 131427 - DNA, 19 bp, Homo sapiens
  siRNA target sequence for GAB1 (NM_002039.1,1058-1076).
cctggtaatacttatcaga

SEQ ID NO: 131428 - DNA, 19 bp, Homo sapiens
  siRNA target sequence for GAB1 (NM_002039.1,1059-1077).
ctggtaatacttatcagat

SEQ ID NO: 131429 - DNA, 19 bp, Homo sapiens
  siRNA target sequence for GAB1 (NM_002039.1,1113-1131).
catcaaagctagacactat

SEQ ID NO: 131430 - DNA, 19 bp, Homo sapiens
  siRNA target sequence for GAB1 (NM_002039.1,1188-1206).
ctgtggaaacgtgtagtat

SEQ ID NO: 131431 - DNA, 19 bp, Homo sapiens
  siRNA target sequence for GAB1 (NM_002039.1,1221-1239).
cagacactgacagtagtta

SEQ ID NO: 131432 - DNA, 19 bp, Homo sapiens
  siRNA target sequence for GAB1 (NM_002039.1,1223-1241).
gacactgacagtagttact

SEQ ID NO: 131433 - DNA, 19 bp, Homo sapiens
  siRNA target sequence for GAB1 (NM_002039.1,1225-1243).
cactgacagtagttactgt

SEQ ID NO: 131434 - DNA, 19 bp, Homo sapiens
  siRNA target sequence for GAB1 (NM_002039.1,1261-1279).
gtcgccttcacgtagtaat

SEQ ID NO: 131435 - DNA, 19 bp, Homo sapiens
  siRNA target sequence for GAB1 (NM_002039.1,1266-1284).
cttcacgtagtaataccat

SEQ ID NO: 131436 - DNA, 19 bp, Homo sapiens
  siRNA target sequence for GAB1 (NM_002039.1,1271-1289).
cgtagtaataccatttcca

SEQ ID NO: 131437 - DNA, 19 bp, Homo sapiens
  siRNA target sequence for GAB1 (NM_002039.1,1309-1327).
gcgaaaagatgctagttct

SEQ ID NO: 131438 - DNA, 19 bp, Homo sapiens
  siRNA target sequence for GAB1 (NM_002039.1,1326-1344).
ctcaagactgctatgatat

SEQ ID NO: 131439 - DNA, 19 bp, Homo sapiens
  siRNA target sequence for GAB1 (NM_002039.1,1349-1367).
cgagcatttccaagtgata

SEQ ID NO: 131440 - DNA, 19 bp, Homo sapiens
  siRNA target sequence for GAB1 (NM_002039.1,1493-1511).
caacattccagcagtttta

SEQ ID NO: 131441 - DNA, 19 bp, Homo sapiens
  siRNA target sequence for GAB1 (NM_002039.1,1542-1560).
caatgactccaggaacatt

SEQ ID NO: 131442 - DNA, 19 bp, Homo sapiens
  siRNA target sequence for GAB1 (NM_002039.1,1766-1784).
gttagatctcccatcacta

SEQ ID NO: 131443 - DNA, 19 bp, Homo sapiens
  siRNA target sequence for GAB1 (NM_002039.1,1838-1856).
gtgcatagcacaacttcaa

SEQ ID NO: 131444 - DNA, 19 bp, Homo sapiens
  siRNA target sequence for GAB1 (NM_002039.1,1870-1888).
cgacagtgaagagaattat

SEQ ID NO: 131445 - DNA, 19 bp, Homo sapiens
  siRNA target sequence for GAB1 (NM_002039.1,2002-2020).
cttagatctcgacttagat

SEQ ID NO: 131446 - DNA, 19 bp, Homo sapiens
  siRNA target sequence for GAB1 (NM_002039.1,2079-2097).
cagatgagagagtggatta

SEQ ID NO: 131447 - DNA, 19 bp, Homo sapiens
  siRNA target sequence for GAB1 (NM_002039.1,2088-2106).
gagtggattatgttgttgt

SEQ ID NO: 131448 - DNA, 19 bp, Homo sapiens
  siRNA target sequence for GAB1 (NM_002039.1,2159-2177).
gggagacagtccacagaat

SEQ ID NO: 131449 - DNA, 19 bp, Homo sapiens
  siRNA target sequence for GAB1 (NM_002039.1,2186-2204).
ccagcgaagagtgtgaaat

SEQ ID NO: 131450 - DNA, 19 bp, Homo sapiens
  siRNA target sequence for GAN (NM_022041.2,301-319).
ccgtacatcaggacaaagt

SEQ ID NO: 131451 - DNA, 19 bp, Homo sapiens
  siRNA target sequence for GAN (NM_022041.2,309-327).
caggacaaagttaaactat

SEQ ID NO: 131452 - DNA, 19 bp, Homo sapiens
  siRNA target sequence for GAN (NM_022041.2,340-358).
gatgatggatcaacttata

SEQ ID NO: 131453 - DNA, 19 bp, Homo sapiens
  siRNA target sequence for GAN (NM_022041.2,343-361).
gatggatcaacttataaga

SEQ ID NO: 131454 - DNA, 19 bp, Homo sapiens
  siRNA target sequence for GAN (NM_022041.2,353-371).
cttataagattgaacttga

SEQ ID NO: 131455 - DNA, 19 bp, Homo sapiens
  siRNA target sequence for GAN (NM_022041.2,373-391).
gggatatcggtaatggtta

SEQ ID NO: 131456 - DNA, 19 bp, Homo sapiens
  siRNA target sequence for GAN (NM_022041.2,374-392).
ggatatcggtaatggttat

SEQ ID NO: 131457 - DNA, 19 bp, Homo sapiens
  siRNA target sequence for GAN (NM_022041.2,481-499).
ctactgacggaccttaaaa

SEQ ID NO: 131458 - DNA, 19 bp, Homo sapiens
  siRNA target sequence for GAN (NM_022041.2,500-518).
ccctgtgctgtgagttttt

SEQ ID NO: 131459 - DNA, 19 bp, Homo sapiens
  siRNA target sequence for GAN (NM_022041.2,578-596).
gcctccatcacgttcatta

SEQ ID NO: 131460 - DNA, 19 bp, Homo sapiens
  siRNA target sequence for GAN (NM_022041.2,592-610).
cattaccttgccacagaat

SEQ ID NO: 131461 - DNA, 19 bp, Homo sapiens
  siRNA target sequence for GAN (NM_022041.2,675-693).
gcttaaagaagtgatttct

SEQ ID NO: 131462 - DNA, 19 bp, Homo sapiens
  siRNA target sequence for GAN (NM_022041.2,692-710).
ctcttgagaagttaaacgt

SEQ ID NO: 131463 - DNA, 19 bp, Homo sapiens
  siRNA target sequence for GAN (NM_022041.2,708-726).
cgttggcaatgaaagatat

SEQ ID NO: 131464 - DNA, 19 bp, Homo sapiens
  siRNA target sequence for GAN (NM_022041.2,745-763).
cgatggatagcacatgata

SEQ ID NO: 131465 - DNA, 19 bp, Homo sapiens
  siRNA target sequence for GAN (NM_022041.2,749-767).
ggatagcacatgatacaga

SEQ ID NO: 131466 - DNA, 19 bp, Homo sapiens
  siRNA target sequence for GAN (NM_022041.2,750-768).
gatagcacatgatacagaa

SEQ ID NO: 131467 - DNA, 19 bp, Homo sapiens
  siRNA target sequence for GAN (NM_022041.2,778-796).
gtccacatgaaggatgtta

SEQ ID NO: 131468 - DNA, 19 bp, Homo sapiens
  siRNA target sequence for GAN (NM_022041.2,817-835).
gggttggactccagttatt

SEQ ID NO: 131469 - DNA, 19 bp, Homo sapiens
  siRNA target sequence for GAN (NM_022041.2,818-836).
ggttggactccagttattt

SEQ ID NO: 131470 - DNA, 19 bp, Homo sapiens
  siRNA target sequence for GAN (NM_022041.2,819-837).
gttggactccagttattta

SEQ ID NO: 131471 - DNA, 19 bp, Homo sapiens
  siRNA target sequence for GAN (NM_022041.2,830-848).
gttatttacgggaacagat

SEQ ID NO: 131472 - DNA, 19 bp, Homo sapiens
  siRNA target sequence for GAN (NM_022041.2,860-878).
cattagtacgagaaattgt

SEQ ID NO: 131473 - DNA, 19 bp, Homo sapiens
  siRNA target sequence for GAN (NM_022041.2,868-886).
cgagaaattgtcaaagagt

SEQ ID NO: 131474 - DNA, 19 bp, Homo sapiens
  siRNA target sequence for GAN (NM_022041.2,1025-1043).
gcatgtgccctctctatga

SEQ ID NO: 131475 - DNA, 19 bp, Homo sapiens
  siRNA target sequence for GAN (NM_022041.2,1082-1100).
gcatgccgagaattaacca

SEQ ID NO: 131476 - DNA, 19 bp, Homo sapiens
  siRNA target sequence for GAN (NM_022041.2,1083-1101).
catgccgagaattaaccat

SEQ ID NO: 131477 - DNA, 19 bp, Homo sapiens
  siRNA target sequence for GAN (NM_022041.2,1163-1181).
ctcttagctcaggagaaaa

SEQ ID NO: 131478 - DNA, 19 bp, Homo sapiens
  siRNA target sequence for GAN (NM_022041.2,1165-1183).
cttagctcaggagaaaagt

SEQ ID NO: 131479 - DNA, 19 bp, Homo sapiens
  siRNA target sequence for GAN (NM_022041.2,1169-1187).
gctcaggagaaaagtatga

SEQ ID NO: 131480 - DNA, 19 bp, Homo sapiens
  siRNA target sequence for GAN (NM_022041.2,1235-1253).
gacataacttcggaattgt

SEQ ID NO: 131481 - DNA, 19 bp, Homo sapiens
  siRNA target sequence for GAN (NM_022041.2,1245-1263).
cggaattgtggagatagat

SEQ ID NO: 131482 - DNA, 19 bp, Homo sapiens
  siRNA target sequence for GAN (NM_022041.2,1317-1335).
ggagtgttacgatatttat

SEQ ID NO: 131483 - DNA, 19 bp, Homo sapiens
  siRNA target sequence for GAN (NM_022041.2,1318-1336).
gagtgttacgatatttatt

SEQ ID NO: 131484 - DNA, 19 bp, Homo sapiens
  siRNA target sequence for GAN (NM_022041.2,1320-1338).
gtgttacgatatttattct

SEQ ID NO: 131485 - DNA, 19 bp, Homo sapiens
  siRNA target sequence for GAN (NM_022041.2,1322-1340).
gttacgatatttattctaa

SEQ ID NO: 131486 - DNA, 19 bp, Homo sapiens
  siRNA target sequence for GAN (NM_022041.2,1346-1364).
ggacaaagcaacctgattt

SEQ ID NO: 131487 - DNA, 19 bp, Homo sapiens
  siRNA target sequence for GAN (NM_022041.2,1386-1404).
ctgctatgcagctatgaaa

SEQ ID NO: 131488 - DNA, 19 bp, Homo sapiens
  siRNA target sequence for GAN (NM_022041.2,1452-1470).
gtctgtagagtgttatgat

SEQ ID NO: 131489 - DNA, 19 bp, Homo sapiens
  siRNA target sequence for GAN (NM_022041.2,1482-1500).
gcagtggactgccatatgt

SEQ ID NO: 131490 - DNA, 19 bp, Homo sapiens
  siRNA target sequence for GAN (NM_022041.2,1490-1508).
ctgccatatgtccactaaa

SEQ ID NO: 131491 - DNA, 19 bp, Homo sapiens
  siRNA target sequence for GAN (NM_022041.2,1591-1609).
cagggtagcgagatggtaa

SEQ ID NO: 131492 - DNA, 19 bp, Homo sapiens
  siRNA target sequence for GAN (NM_022041.2,1594-1612).
ggtagcgagatggtaactt

SEQ ID NO: 131493 - DNA, 19 bp, Homo sapiens
  siRNA target sequence for GAN (NM_022041.2,1610-1628).
cttgcaagtccgagttcta

SEQ ID NO: 131494 - DNA, 19 bp, Homo sapiens
  siRNA target sequence for GAN (NM_022041.2,1619-1637).
ccgagttctaccatgatga

SEQ ID NO: 131495 - DNA, 19 bp, Homo sapiens
  siRNA target sequence for GAN (NM_022041.2,1626-1644).
ctaccatgatgagtttaaa

SEQ ID NO: 131496 - DNA, 19 bp, Homo sapiens
  siRNA target sequence for GAN (NM_022041.2,1638-1656).
gtttaaaaggtggatctat

SEQ ID NO: 131497 - DNA, 19 bp, Homo sapiens
  siRNA target sequence for GAN (NM_022041.2,1646-1664).
ggtggatctatcttaacga

SEQ ID NO: 131498 - DNA, 19 bp, Homo sapiens
  siRNA target sequence for GAN (NM_022041.2,1657-1675).
cttaacgaccagaatttat

SEQ ID NO: 131499 - DNA, 19 bp, Homo sapiens
  siRNA target sequence for GAN (NM_022041.2,1714-1732).
cctataggagccagtattt

SEQ ID NO: 131500 - DNA, 19 bp, Homo sapiens
  siRNA target sequence for GAN (NM_022041.2,1715-1733).
ctataggagccagtattta

SEQ ID NO: 131501 - DNA, 19 bp, Homo sapiens
  siRNA target sequence for GAN (NM_022041.2,1747-1765).
cttgatacaggtaccaatt

SEQ ID NO: 131502 - DNA, 19 bp, Homo sapiens
  siRNA target sequence for GAN (NM_022041.2,1767-1785).
cgactacgtgcgtgagttt

SEQ ID NO: 131503 - DNA, 19 bp, Homo sapiens
  siRNA target sequence for GAN (NM_022041.2,1770-1788).
ctacgtgcgtgagtttaaa

SEQ ID NO: 131504 - DNA, 19 bp, Homo sapiens
  siRNA target sequence for GAN (NM_022041.2,1773-1791).
cgtgcgtgagtttaaaaga

SEQ ID NO: 131505 - DNA, 19 bp, Homo sapiens
  siRNA target sequence for GAN (NM_022041.2,1799-1817).
gaacctggcaccacactaa

SEQ ID NO: 131506 - DNA, 19 bp, Homo sapiens
  siRNA target sequence for GDF5 (NM_000557.2,329-347).
cccaaactcctcactttct

SEQ ID NO: 131507 - DNA, 19 bp, Homo sapiens
  siRNA target sequence for GDF5 (NM_000557.2,977-995).
cagaggtacgtgtttgaca

SEQ ID NO: 131508 - DNA, 19 bp, Homo sapiens
  siRNA target sequence for GDF5 (NM_000557.2,979-997).
gaggtacgtgtttgacatt

SEQ ID NO: 131509 - DNA, 19 bp, Homo sapiens
  siRNA target sequence for GDF5 (NM_000557.2,1373-1391).
gacctgttctttaatgaga

SEQ ID NO: 131510 - DNA, 19 bp, Homo sapiens
  siRNA target sequence for GDF5 (NM_000557.2,1490-1508).
cgacccagcaagaacctta

SEQ ID NO: 131511 - DNA, 19 bp, Homo sapiens
  siRNA target sequence for GDF5 (NM_000557.2,1491-1509).
gacccagcaagaaccttaa

SEQ ID NO: 131512 - DNA, 19 bp, Homo sapiens
  siRNA target sequence for GDF5 (NM_000557.2,1524-1542).
ggaaggcactgcatgtcaa

SEQ ID NO: 131513 - DNA, 19 bp, Homo sapiens
  siRNA target sequence for GMCL (NM_022471.2,242-260).
gcgagctacggcttctgtt

SEQ ID NO: 131514 - DNA, 19 bp, Homo sapiens
  siRNA target sequence for GMCL (NM_022471.2,243-261).
cgagctacggcttctgtta

SEQ ID NO: 131515 - DNA, 19 bp, Homo sapiens
  siRNA target sequence for GMCL (NM_022471.2,769-787).
cggttattacacatcagta

SEQ ID NO: 131516 - DNA, 19 bp, Homo sapiens
  siRNA target sequence for GMCL (NM_022471.2,783-801).
cagtagagatctatggatt

SEQ ID NO: 131517 - DNA, 19 bp, Homo sapiens
  siRNA target sequence for GMRP-1 (NM_032320.3,361-379).
gatcggaaattgcatagta

SEQ ID NO: 131518 - DNA, 19 bp, Homo sapiens
  siRNA target sequence for GMRP-1 (NM_032320.3,372-390).
gcatagtagacctcgtaaa

SEQ ID NO: 131519 - DNA, 19 bp, Homo sapiens
  siRNA target sequence for GMRP-1 (NM_032320.3,377-395).
gtagacctcgtaaacttta

SEQ ID NO: 131520 - DNA, 19 bp, Homo sapiens
  siRNA target sequence for GMRP-1 (NM_032320.3,383-401).
ctcgtaaactttataaaca

SEQ ID NO: 131521 - DNA, 19 bp, Homo sapiens
  siRNA target sequence for GMRP-1 (NM_032320.3,778-796).
gaaggagctcggaatataa

SEQ ID NO: 131522 - DNA, 19 bp, Homo sapiens
  siRNA target sequence for GMRP-1 (NM_032320.3,781-799).
ggagctcggaatataagaa

SEQ ID NO: 131523 - DNA, 19 bp, Homo sapiens
  siRNA target sequence for GMRP-1 (NM_032320.3,982-1000).
cgagcgattctggattact

SEQ ID NO: 131524 - DNA, 19 bp, Homo sapiens
  siRNA target sequence for GMRP-1 (NM_032320.3,1058-1076).
catgtgactatctttgtat

SEQ ID NO: 131525 - DNA, 19 bp, Homo sapiens
  siRNA target sequence for GMRP-1 (NM_032320.3,1115-1133).
gtgccctaatgcatgagtt

SEQ ID NO: 131526 - DNA, 19 bp, Homo sapiens
  siRNA target sequence for GMRP-1 (NM_032320.3,1117-1135).
gccctaatgcatgagttat

SEQ ID NO: 131527 - DNA, 19 bp, Homo sapiens
  siRNA target sequence for GMRP-1 (NM_032320.3,1125-1143).
gcatgagttatcaaatgat

SEQ ID NO: 131528 - DNA, 19 bp, Homo sapiens
  siRNA target sequence for GMRP-1 (NM_032320.3,1141-1159).
gatggtgctcgtagacaat

SEQ ID NO: 131529 - DNA, 19 bp, Homo sapiens
  siRNA target sequence for GMRP-1 (NM_032320.3,1145-1163).
gtgctcgtagacaatttga

SEQ ID NO: 131530 - DNA, 19 bp, Homo sapiens
  siRNA target sequence for GMRP-1 (NM_032320.3,1147-1165).
gctcgtagacaatttgaat

SEQ ID NO: 131531 - DNA, 19 bp, Homo sapiens
  siRNA target sequence for GMRP-1 (NM_032320.3,1148-1166).
ctcgtagacaatttgaatt

SEQ ID NO: 131532 - DNA, 19 bp, Homo sapiens
  siRNA target sequence for GMRP-1 (NM_032320.3,1218-1236).
ggaacgggaatgtcatata

SEQ ID NO: 131533 - DNA, 19 bp, Homo sapiens
  siRNA target sequence for GMRP-1 (NM_032320.3,1261-1279).
gttgattgggatgaagaat

SEQ ID NO: 131534 - DNA, 19 bp, Homo sapiens
  siRNA target sequence for GMRP-1 (NM_032320.3,1389-1407).
gaggggtcttaagaagatt

SEQ ID NO: 131535 - DNA, 19 bp, Homo sapiens
  siRNA target sequence for GMRP-1 (NM_032320.3,1413-1431).
gggaatagaaggttatcct

SEQ ID NO: 131536 - DNA, 19 bp, Homo sapiens
  siRNA target sequence for GMRP-1 (NM_032320.3,1424-1442).
gttatcctacctacaaaga

SEQ ID NO: 131537 - DNA, 19 bp, Homo sapiens
  siRNA target sequence for GMRP-1 (NM_032320.3,1469-1487).
gcccagaagtgatctacaa

SEQ ID NO: 131538 - DNA, 19 bp, Homo sapiens
  siRNA target sequence for GMRP-1 (NM_032320.3,1494-1512).
ccaaagaccctttattcga

SEQ ID NO: 131539 - DNA, 19 bp, Homo sapiens
  siRNA target sequence for GMRP-1 (NM_032320.3,1539-1557).
gagtcggcatgtagacttt

SEQ ID NO: 131540 - DNA, 19 bp, Homo sapiens
  siRNA target sequence for GMRP-1 (NM_032320.3,1541-1559).
gtcggcatgtagactttca

SEQ ID NO: 131541 - DNA, 19 bp, Homo sapiens
  siRNA target sequence for GMRP-1 (NM_032320.3,1543-1561).
cggcatgtagactttcagt

SEQ ID NO: 131542 - DNA, 19 bp, Homo sapiens
  siRNA target sequence for GMRP-1 (NM_032320.3,1549-1567).
gtagactttcagtgtgtaa

SEQ ID NO: 131543 - DNA, 19 bp, Homo sapiens
  siRNA target sequence for GMRP-1 (NM_032320.3,1552-1570).
gactttcagtgtgtaaaga

SEQ ID NO: 131544 - DNA, 19 bp, Homo sapiens
  siRNA target sequence for GMRP-1 (NM_032320.3,1564-1582).
gtaaagagtaaatctatca

SEQ ID NO: 131545 - DNA, 19 bp, Homo sapiens
  siRNA target sequence for GMRP-1 (NM_032320.3,1704-1722).
cgatcctgatgcacagaat

SEQ ID NO: 131546 - DNA, 19 bp, Homo sapiens
  siRNA target sequence for GRF2 (NM_005312.2,239-257).
gctgaggtgtccgtaaaga

SEQ ID NO: 131547 - DNA, 19 bp, Homo sapiens
  siRNA target sequence for GRF2 (NM_005312.2,240-258).
ctgaggtgtccgtaaagat

SEQ ID NO: 131548 - DNA, 19 bp, Homo sapiens
  siRNA target sequence for GRF2 (NM_005312.2,368-386).
gtggcttccaggtctcaaa

SEQ ID NO: 131549 - DNA, 19 bp, Homo sapiens
  siRNA target sequence for GRF2 (NM_005312.2,437-455).
gccctgcgctactttaaga

SEQ ID NO: 131550 - DNA, 19 bp, Homo sapiens
  siRNA target sequence for GRF2 (NM_005312.2,520-538).
ggtgctggaggccatctta

SEQ ID NO: 131551 - DNA, 19 bp, Homo sapiens
  siRNA target sequence for GRF2 (NM_005312.2,547-565).
gcagaacgatcctcgaatt

SEQ ID NO: 131552 - DNA, 19 bp, Homo sapiens
  siRNA target sequence for GRF2 (NM_005312.2,630-648).
gctggtctgaccaagtgat

SEQ ID NO: 131553 - DNA, 19 bp, Homo sapiens
  siRNA target sequence for GRF2 (NM_005312.2,840-858).
cagaccgcgaggtagagat

SEQ ID NO: 131554 - DNA, 19 bp, Homo sapiens
  siRNA target sequence for GRF2 (NM_005312.2,845-863).
cgcgaggtagagatcctaa

SEQ ID NO: 131555 - DNA, 19 bp, Homo sapiens
  siRNA target sequence for GRF2 (NM_005312.2,950-968).
ggcattcgggtggttgata

SEQ ID NO: 131556 - DNA, 19 bp, Homo sapiens
  siRNA target sequence for GRF2 (NM_005312.2,951-969).
gcattcgggtggttgataa

SEQ ID NO: 131557 - DNA, 19 bp, Homo sapiens
  siRNA target sequence for GRF2 (NM_005312.2,1346-1364).
cagacggcctggaacctta

SEQ ID NO: 131558 - DNA, 19 bp, Homo sapiens
  siRNA target sequence for GRF2 (NM_005312.2,1466-1484).
ccagggcagcagacagata

SEQ ID NO: 131559 - DNA, 19 bp, Homo sapiens
  siRNA target sequence for GRF2 (NM_005312.2,1569-1587).
ggcatccctcgcagtatga

SEQ ID NO: 131560 - DNA, 19 bp, Homo sapiens
  siRNA target sequence for GRF2 (NM_005312.2,1571-1589).
catccctcgcagtatgaca

SEQ ID NO: 131561 - DNA, 19 bp, Homo sapiens
  siRNA target sequence for GRF2 (NM_005312.2,1575-1593).
cctcgcagtatgacaacat

SEQ ID NO: 131562 - DNA, 19 bp, Homo sapiens
  siRNA target sequence for GRF2 (NM_005312.2,1683-1701).
cctcagcccctgtcgaatt

SEQ ID NO: 131563 - DNA, 19 bp, Homo sapiens
  siRNA target sequence for GRF2 (NM_005312.2,1684-1702).
ctcagcccctgtcgaattt

SEQ ID NO: 131564 - DNA, 19 bp, Homo sapiens
  siRNA target sequence for GRF2 (NM_005312.2,1686-1704).
cagcccctgtcgaatttgt

SEQ ID NO: 131565 - DNA, 19 bp, Homo sapiens
  siRNA target sequence for GRF2 (NM_005312.2,1728-1746).
caaccggtgacccagaaaa

SEQ ID NO: 131566 - DNA, 19 bp, Homo sapiens
  siRNA target sequence for GRF2 (NM_005312.2,1732-1750).
cggtgacccagaaaaacca

SEQ ID NO: 131567 - DNA, 19 bp, Homo sapiens
  siRNA target sequence for GRF2 (NM_005312.2,1848-1866).
cacagaacgagcacatcta

SEQ ID NO: 131568 - DNA, 19 bp, Homo sapiens
  siRNA target sequence for GRF2 (NM_005312.2,2138-2156).
ctcattgaccacaacgaaa

SEQ ID NO: 131569 - DNA, 19 bp, Homo sapiens
  siRNA target sequence for GRF2 (NM_005312.2,2140-2158).
cattgaccacaacgaaatt

SEQ ID NO: 131570 - DNA, 19 bp, Homo sapiens
  siRNA target sequence for GRF2 (NM_005312.2,2144-2162).
gaccacaacgaaattatgt

SEQ ID NO: 131571 - DNA, 19 bp, Homo sapiens
  siRNA target sequence for GRF2 (NM_005312.2,2246-2264).
gagactgacaggaaagatt

SEQ ID NO: 131572 - DNA, 19 bp, Homo sapiens
  siRNA target sequence for GRF2 (NM_005312.2,2256-2274).
ggaaagatttggtgttgta

SEQ ID NO: 131573 - DNA, 19 bp, Homo sapiens
  siRNA target sequence for GRF2 (NM_005312.2,2332-2350).
gaagctgcagtacagatat

SEQ ID NO: 131574 - DNA, 19 bp, Homo sapiens
  siRNA target sequence for GRF2 (NM_005312.2,2361-2379).
ctccctttgccgacacatt

SEQ ID NO: 131575 - DNA, 19 bp, Homo sapiens
  siRNA target sequence for GRF2 (NM_005312.2,2363-2381).
ccctttgccgacacattca

SEQ ID NO: 131576 - DNA, 19 bp, Homo sapiens
  siRNA target sequence for GRF2 (NM_005312.2,2364-2382).
cctttgccgacacattcaa

SEQ ID NO: 131577 - DNA, 19 bp, Homo sapiens
  siRNA target sequence for GRF2 (NM_005312.2,2631-2649).
ggaccttgcacgactttca

SEQ ID NO: 131578 - DNA, 19 bp, Homo sapiens
  siRNA target sequence for GRF2 (NM_005312.2,2687-2705).
gctgagctcttctataaaa

SEQ ID NO: 131579 - DNA, 19 bp, Homo sapiens
  siRNA target sequence for GRF2 (NM_005312.2,2710-2728).
gattcctgaggttttgctt

SEQ ID NO: 131580 - DNA, 19 bp, Homo sapiens
  siRNA target sequence for GRF2 (NM_005312.2,2778-2796).
cggagcacttcaacaacat

SEQ ID NO: 131581 - DNA, 19 bp, Homo sapiens
  siRNA target sequence for GRF2 (NM_005312.2,2805-2823).
gggtccggtccataatcat

SEQ ID NO: 131582 - DNA, 19 bp, Homo sapiens
  siRNA target sequence for GRF2 (NM_005312.2,2807-2825).
gtccggtccataatcatgt

SEQ ID NO: 131583 - DNA, 19 bp, Homo sapiens
  siRNA target sequence for GRF2 (NM_005312.2,2811-2829).
ggtccataatcatgttaca

SEQ ID NO: 131584 - DNA, 19 bp, Homo sapiens
  siRNA target sequence for GRF2 (NM_005312.2,2849-2867).
gaacggctgctcttgaagt

SEQ ID NO: 131585 - DNA, 19 bp, Homo sapiens
  siRNA target sequence for GRF2 (NM_005312.2,2885-2903).
cacttgcggaagctgaata

SEQ ID NO: 131586 - DNA, 19 bp, Homo sapiens
  siRNA target sequence for GRF2 (NM_005312.2,2891-2909).
cggaagctgaataacttca

SEQ ID NO: 131587 - DNA, 19 bp, Homo sapiens
  siRNA target sequence for GRF2 (NM_005312.2,3164-3182).
cggtggcagcagttcaaca

SEQ ID NO: 131588 - DNA, 19 bp, Homo sapiens
  siRNA target sequence for GRF2 (NM_005312.2,3165-3183).
ggtggcagcagttcaacat

SEQ ID NO: 131589 - DNA, 19 bp, Homo sapiens
  siRNA target sequence for GRF2 (NM_005312.2,3206-3224).
cagcaggcgcactatgaca

SEQ ID NO: 131590 - DNA, 19 bp, Homo sapiens
  siRNA target sequence for GRF2 (NM_005312.2,3227-3245).
cggaggaacgacgacatta

SEQ ID NO: 131591 - DNA, 19 bp, Homo sapiens
  siRNA target sequence for GRF2 (NM_005312.2,3228-3246).
ggaggaacgacgacattat

SEQ ID NO: 131592 - DNA, 19 bp, Homo sapiens
  siRNA target sequence for GRF2 (NM_005312.2,3229-3247).
gaggaacgacgacattata

SEQ ID NO: 131593 - DNA, 19 bp, Homo sapiens
  siRNA target sequence for GRF2 (NM_005312.2,3231-3249).
ggaacgacgacattataaa

SEQ ID NO: 131594 - DNA, 19 bp, Homo sapiens
  siRNA target sequence for GRF2 (NM_198679.1,181-199).
cagaagcccttgaaacgaa

SEQ ID NO: 131595 - DNA, 19 bp, Homo sapiens
  siRNA target sequence for GRF2 (NM_198679.1,186-204).
gcccttgaaacgaagtcat

SEQ ID NO: 131596 - DNA, 19 bp, Homo sapiens
  siRNA target sequence for GTF3C2 (NM_001521.1,48-66).
ctgcggggtcggctatgtt

SEQ ID NO: 131597 - DNA, 19 bp, Homo sapiens
  siRNA target sequence for GTF3C2 (NM_001521.1,116-134).
ctggacaagaggtgctaaa

SEQ ID NO: 131598 - DNA, 19 bp, Homo sapiens
  siRNA target sequence for GTF3C2 (NM_001521.1,119-137).
gacaagaggtgctaaatca

SEQ ID NO: 131599 - DNA, 19 bp, Homo sapiens
  siRNA target sequence for GTF3C2 (NM_001521.1,173-191).
cagaggcttccgtagagat

SEQ ID NO: 131600 - DNA, 19 bp, Homo sapiens
  siRNA target sequence for GTF3C2 (NM_001521.1,178-196).
gcttccgtagagatgtcat

SEQ ID NO: 131601 - DNA, 19 bp, Homo sapiens
  siRNA target sequence for GTF3C2 (NM_001521.1,179-197).
cttccgtagagatgtcatt

SEQ ID NO: 131602 - DNA, 19 bp, Homo sapiens
  siRNA target sequence for GTF3C2 (NM_001521.1,183-201).
cgtagagatgtcattacct

SEQ ID NO: 131603 - DNA, 19 bp, Homo sapiens
  siRNA target sequence for GTF3C2 (NM_001521.1,767-785).
cacgggatgaagacttttt

SEQ ID NO: 131604 - DNA, 19 bp, Homo sapiens
  siRNA target sequence for GTF3C2 (NM_001521.1,873-891).
cccacgaggatctacttca

SEQ ID NO: 131605 - DNA, 19 bp, Homo sapiens
  siRNA target sequence for GTF3C2 (NM_001521.1,926-944).
ccaatggcttaccaaatca

SEQ ID NO: 131606 - DNA, 19 bp, Homo sapiens
  siRNA target sequence for GTF3C2 (NM_001521.1,927-945).
caatggcttaccaaatcat

SEQ ID NO: 131607 - DNA, 19 bp, Homo sapiens
  siRNA target sequence for GTF3C2 (NM_001521.1,990-1008).
ccgagagcagaaacattca

SEQ ID NO: 131608 - DNA, 19 bp, Homo sapiens
  siRNA target sequence for GTF3C2 (NM_001521.1,1144-1162).
ggcaccctctaccgaataa

SEQ ID NO: 131609 - DNA, 19 bp, Homo sapiens
  siRNA target sequence for GTF3C2 (NM_001521.1,1145-1163).
gcaccctctaccgaataaa

SEQ ID NO: 131610 - DNA, 19 bp, Homo sapiens
  siRNA target sequence for GTF3C2 (NM_001521.1,1149-1167).
cctctaccgaataaacaga

SEQ ID NO: 131611 - DNA, 19 bp, Homo sapiens
  siRNA target sequence for GTF3C2 (NM_001521.1,1263-1281).
ggcaggagcctcgcaatat

SEQ ID NO: 131612 - DNA, 19 bp, Homo sapiens
  siRNA target sequence for GTF3C2 (NM_001521.1,1274-1292).
cgcaatatgtggctctttt

SEQ ID NO: 131613 - DNA, 19 bp, Homo sapiens
  siRNA target sequence for GTF3C2 (NM_001521.1,1445-1463).
gcatctgggacctcaagtt

SEQ ID NO: 131614 - DNA, 19 bp, Homo sapiens
  siRNA target sequence for GTF3C2 (NM_001521.1,1662-1680).
gcaggtggggtctatgcaa

SEQ ID NO: 131615 - DNA, 19 bp, Homo sapiens
  siRNA target sequence for GTF3C2 (NM_001521.1,1825-1843).
ctctctgatggctccttaa

SEQ ID NO: 131616 - DNA, 19 bp, Homo sapiens
  siRNA target sequence for GTF3C2 (NM_001521.1,1851-1869).
ccccttccagtgtttccta

SEQ ID NO: 131617 - DNA, 19 bp, Homo sapiens
  siRNA target sequence for GTF3C2 (NM_001521.1,1882-1900).
gctgtgcgtacccttcaat

SEQ ID NO: 131618 - DNA, 19 bp, Homo sapiens
  siRNA target sequence for GTF3C2 (NM_001521.1,1894-1912).
cttcaatggtgcaaagcta

SEQ ID NO: 131619 - DNA, 19 bp, Homo sapiens
  siRNA target sequence for GTF3C2 (NM_001521.1,1938-1956).
gagtgaccggaaaatcaaa

SEQ ID NO: 131620 - DNA, 19 bp, Homo sapiens
  siRNA target sequence for GTF3C2 (NM_001521.1,1942-1960).
gaccggaaaatcaaattct

SEQ ID NO: 131621 - DNA, 19 bp, Homo sapiens
  siRNA target sequence for GTF3C2 (NM_001521.1,1965-1983).
ccttcgacgtccttacgaa

SEQ ID NO: 131622 - DNA, 19 bp, Homo sapiens
  siRNA target sequence for GTF3C2 (NM_001521.1,1981-1999).
gaacccataaactctatca

SEQ ID NO: 131623 - DNA, 19 bp, Homo sapiens
  siRNA target sequence for GTF3C2 (NM_001521.1,2064-2082).
caactgctatgcctcttat

SEQ ID NO: 131624 - DNA, 19 bp, Homo sapiens
  siRNA target sequence for GTF3C2 (NM_001521.1,2136-2154).
cttcactgctcctcgaaaa

SEQ ID NO: 131625 - DNA, 19 bp, Homo sapiens
  siRNA target sequence for GTF3C2 (NM_001521.1,2155-2173).
ggcaccgtttggagtcttt

SEQ ID NO: 131626 - DNA, 19 bp, Homo sapiens
  siRNA target sequence for GTF3C2 (NM_001521.1,2157-2175).
caccgtttggagtctttca

SEQ ID NO: 131627 - DNA, 19 bp, Homo sapiens
  siRNA target sequence for GTF3C2 (NM_001521.1,2181-2199).
cgactggcttgggacaata

SEQ ID NO: 131628 - DNA, 19 bp, Homo sapiens
  siRNA target sequence for GTF3C2 (NM_001521.1,2184-2202).
ctggcttgggacaatagct

SEQ ID NO: 131629 - DNA, 19 bp, Homo sapiens
  siRNA target sequence for GTF3C2 (NM_001521.1,2195-2213).
caatagctgcaggagatat

SEQ ID NO: 131630 - DNA, 19 bp, Homo sapiens
  siRNA target sequence for GTF3C2 (NM_001521.1,2220-2238).
ggagctcattgctgctata

SEQ ID NO: 131631 - DNA, 19 bp, Homo sapiens
  siRNA target sequence for GTF3C2 (NM_001521.1,2221-2239).
gagctcattgctgctatat

SEQ ID NO: 131632 - DNA, 19 bp, Homo sapiens
  siRNA target sequence for GTF3C2 (NM_001521.1,2223-2241).
gctcattgctgctatatta

SEQ ID NO: 131633 - DNA, 19 bp, Homo sapiens
  siRNA target sequence for GTF3C2 (NM_001521.1,2250-2268).
ggcactgaatccaataaat

SEQ ID NO: 131634 - DNA, 19 bp, Homo sapiens
  siRNA target sequence for GTF3C2 (NM_001521.1,2281-2299).
gtagagcgaagatttccta

SEQ ID NO: 131635 - DNA, 19 bp, Homo sapiens
  siRNA target sequence for GTF3C2 (NM_001521.1,2286-2304).
gcgaagatttcctatatat

SEQ ID NO: 131636 - DNA, 19 bp, Homo sapiens
  siRNA target sequence for GTF3C2 (NM_001521.1,2287-2305).
cgaagatttcctatatata

SEQ ID NO: 131637 - DNA, 19 bp, Homo sapiens
  siRNA target sequence for GTF3C2 (NM_001521.1,2338-2356).
gaaggtccagaccattctt

SEQ ID NO: 131638 - DNA, 19 bp, Homo sapiens
  siRNA target sequence for GTF3C2 (NM_001521.1,2389-2407).
gctcgaacttacactgaaa

SEQ ID NO: 131639 - DNA, 19 bp, Homo sapiens
  siRNA target sequence for GTF3C2 (NM_001521.1,2408-2426).
ctgtcaaccatcactactt

SEQ ID NO: 131640 - DNA, 19 bp, Homo sapiens
  siRNA target sequence for HAT1 (NM_003642.1,49-67).
ggtgctatggagaaatttt

SEQ ID NO: 131641 - DNA, 19 bp, Homo sapiens
  siRNA target sequence for HAT1 (NM_003642.1,100-118).
ctggcagagtacaaatgta

SEQ ID NO: 131642 - DNA, 19 bp, Homo sapiens
  siRNA target sequence for HAT1 (NM_003642.1,122-140).
ccaacacagcaattgaact

SEQ ID NO: 131643 - DNA, 19 bp, Homo sapiens
  siRNA target sequence for HAT1 (NM_003642.1,123-141).
caacacagcaattgaacta

SEQ ID NO: 131644 - DNA, 19 bp, Homo sapiens
  siRNA target sequence for HAT1 (NM_003642.1,194-212).
ctgagtatacccatcaact

SEQ ID NO: 131645 - DNA, 19 bp, Homo sapiens
  siRNA target sequence for HAT1 (NM_003642.1,238-256).
ggttacaagggtctaaaga

SEQ ID NO: 131646 - DNA, 19 bp, Homo sapiens
  siRNA target sequence for HAT1 (NM_003642.1,247-265).
ggtctaaagatcctgttat

SEQ ID NO: 131647 - DNA, 19 bp, Homo sapiens
  siRNA target sequence for HAT1 (NM_003642.1,248-266).
gtctaaagatcctgttata

SEQ ID NO: 131648 - DNA, 19 bp, Homo sapiens
  siRNA target sequence for HAT1 (NM_003642.1,255-273).
gatcctgttatactatatt

SEQ ID NO: 131649 - DNA, 19 bp, Homo sapiens
  siRNA target sequence for HAT1 (NM_003642.1,277-295).
ggtagcctgtcaacaatgt

SEQ ID NO: 131650 - DNA, 19 bp, Homo sapiens
  siRNA target sequence for HAT1 (NM_003642.1,278-296).
gtagcctgtcaacaatgtt

SEQ ID NO: 131651 - DNA, 19 bp, Homo sapiens
  siRNA target sequence for HAT1 (NM_003642.1,294-312).
gttccgtgttgaatatgca

SEQ ID NO: 131652 - DNA, 19 bp, Homo sapiens
  siRNA target sequence for HAT1 (NM_003642.1,361-379).
ggcaaaattagacaaatca

SEQ ID NO: 131653 - DNA, 19 bp, Homo sapiens
  siRNA target sequence for HAT1 (NM_003642.1,444-462).
caagccattcggaacctta

SEQ ID NO: 131654 - DNA, 19 bp, Homo sapiens
  siRNA target sequence for HAT1 (NM_003642.1,447-465).
gccattcggaaccttactt

SEQ ID NO: 131655 - DNA, 19 bp, Homo sapiens
  siRNA target sequence for HAT1 (NM_003642.1,449-467).
cattcggaaccttacttca

SEQ ID NO: 131656 - DNA, 19 bp, Homo sapiens
  siRNA target sequence for HAT1 (NM_003642.1,455-473).
gaaccttacttcataccta

SEQ ID NO: 131657 - DNA, 19 bp, Homo sapiens
  siRNA target sequence for HAT1 (NM_003642.1,525-543).
ggctgacatgacatgtaga

SEQ ID NO: 131658 - DNA, 19 bp, Homo sapiens
  siRNA target sequence for HAT1 (NM_003642.1,539-557).
gtagaggctttcgagaata

SEQ ID NO: 131659 - DNA, 19 bp, Homo sapiens
  siRNA target sequence for HAT1 (NM_003642.1,542-560).
gaggctttcgagaatatca

SEQ ID NO: 131660 - DNA, 19 bp, Homo sapiens
  siRNA target sequence for HAT1 (NM_003642.1,545-563).
gctttcgagaatatcatga

SEQ ID NO: 131661 - DNA, 19 bp, Homo sapiens
  siRNA target sequence for HAT1 (NM_003642.1,632-650).
ggcactactttctagtatt

SEQ ID NO: 131662 - DNA, 19 bp, Homo sapiens
  siRNA target sequence for HAT1 (NM_003642.1,633-651).
gcactactttctagtattt

SEQ ID NO: 131663 - DNA, 19 bp, Homo sapiens
  siRNA target sequence for HAT1 (NM_003642.1,685-703).
gcgaccgtaggctacatga

SEQ ID NO: 131664 - DNA, 19 bp, Homo sapiens
  siRNA target sequence for HAT1 (NM_003642.1,717-735).
ctatgtgtacccagacaaa

SEQ ID NO: 131665 - DNA, 19 bp, Homo sapiens
  siRNA target sequence for HAT1 (NM_003642.1,797-815).
ctcaacttcttgaaacagt

SEQ ID NO: 131666 - DNA, 19 bp, Homo sapiens
  siRNA target sequence for HAT1 (NM_003642.1,805-823).
cttgaaacagttcatagat

SEQ ID NO: 131667 - DNA, 19 bp, Homo sapiens
  siRNA target sequence for HAT1 (NM_003642.1,828-846).
cactgaatttcctacagtt

SEQ ID NO: 131668 - DNA, 19 bp, Homo sapiens
  siRNA target sequence for HAT1 (NM_003642.1,838-856).
cctacagttcttgatatta

SEQ ID NO: 131669 - DNA, 19 bp, Homo sapiens
  siRNA target sequence for HAT1 (NM_003642.1,859-877).
gcggaagatccatccaaaa

SEQ ID NO: 131670 - DNA, 19 bp, Homo sapiens
  siRNA target sequence for HAT1 (NM_003642.1,862-880).
gaagatccatccaaaagct

SEQ ID NO: 131671 - DNA, 19 bp, Homo sapiens
  siRNA target sequence for HAT1 (NM_003642.1,938-956).
cccgggaaaaattaatgca

SEQ ID NO: 131672 - DNA, 19 bp, Homo sapiens
  siRNA target sequence for HAT1 (NM_003642.1,939-957).
ccgggaaaaattaatgcaa

SEQ ID NO: 131673 - DNA, 19 bp, Homo sapiens
  siRNA target sequence for HAT1 (NM_003642.1,977-995).
cgatagaggcacaacagaa

SEQ ID NO: 131674 - DNA, 19 bp, Homo sapiens
  siRNA target sequence for HAT1 (NM_003642.1,982-1000).
gaggcacaacagaagttca

SEQ ID NO: 131675 - DNA, 19 bp, Homo sapiens
  siRNA target sequence for HAT1 (NM_003642.1,984-1002).
ggcacaacagaagttcaaa

SEQ ID NO: 131676 - DNA, 19 bp, Homo sapiens
  siRNA target sequence for HAT1 (NM_003642.1,985-1003).
gcacaacagaagttcaaaa

SEQ ID NO: 131677 - DNA, 19 bp, Homo sapiens
  siRNA target sequence for HAT1 (NM_003642.1,1017-1035).
cgctagaagggtttatgaa

SEQ ID NO: 131678 - DNA, 19 bp, Homo sapiens
  siRNA target sequence for HAT1 (NM_003642.1,1019-1037).
ctagaagggtttatgaaat

SEQ ID NO: 131679 - DNA, 19 bp, Homo sapiens
  siRNA target sequence for HAT1 (NM_003642.1,1082-1100).
gaagctacagactggatat

SEQ ID NO: 131680 - DNA, 19 bp, Homo sapiens
  siRNA target sequence for HAT1 (NM_003642.1,1085-1103).
gctacagactggatattaa

SEQ ID NO: 131681 - DNA, 19 bp, Homo sapiens
  siRNA target sequence for HAT1 (NM_003642.1,1086-1104).
ctacagactggatattaaa

SEQ ID NO: 131682 - DNA, 19 bp, Homo sapiens
  siRNA target sequence for HAT1 (NM_003642.1,1109-1127).
gactaattagcccatataa

SEQ ID NO: 131683 - DNA, 19 bp, Homo sapiens
  siRNA target sequence for HAT1 (NM_003642.1,1111-1129).
ctaattagcccatataaga

SEQ ID NO: 131684 - DNA, 19 bp, Homo sapiens
  siRNA target sequence for HAT1 (NM_003642.1,1141-1159).
gatcttgctaagatgagaa

SEQ ID NO: 131685 - DNA, 19 bp, Homo sapiens
  siRNA target sequence for HAT1 (NM_003642.1,1144-1162).
cttgctaagatgagaaaat

SEQ ID NO: 131686 - DNA, 19 bp, Homo sapiens
  siRNA target sequence for HAT1 (NM_003642.1,1184-1202).
caaaccagatgaaccaaat

SEQ ID NO: 131687 - DNA, 19 bp, Homo sapiens
  siRNA target sequence for HLA-DMA (NM_006120.2,68-86).
gagctgcgctgctacagat

SEQ ID NO: 131688 - DNA, 19 bp, Homo sapiens
  siRNA target sequence for HLA-DMA (NM_006120.2,71-89).
ctgcgctgctacagatgtt

SEQ ID NO: 131689 - DNA, 19 bp, Homo sapiens
  siRNA target sequence for HLA-DMA (NM_006120.2,282-300).
gcctcgcctgcccgaattt

SEQ ID NO: 131690 - DNA, 19 bp, Homo sapiens
  siRNA target sequence for HLA-DMA (NM_006120.2,325-343).
gatgctcctgccattttat

SEQ ID NO: 131691 - DNA, 19 bp, Homo sapiens
  siRNA target sequence for HLA-DMA (NM_006120.2,409-427).
gtgtccagagggtttccta

SEQ ID NO: 131692 - DNA, 19 bp, Homo sapiens
  siRNA target sequence for HLA-DMA (NM_006120.2,539-557).
ccgtccctgtggaaggatt

SEQ ID NO: 131693 - DNA, 19 bp, Homo sapiens
  siRNA target sequence for HLA-DMA (NM_006120.2,540-558).
cgtccctgtggaaggattt

SEQ ID NO: 131694 - DNA, 19 bp, Homo sapiens
  siRNA target sequence for HLA-DMA (NM_006120.2,593-611).
gcttccaggccttttctta

SEQ ID NO: 131695 - DNA, 19 bp, Homo sapiens
  siRNA target sequence for HLA-DMA (NM_006120.2,597-615).
ccaggccttttcttactta

SEQ ID NO: 131696 - DNA, 19 bp, Homo sapiens
  siRNA target sequence for HLA-DMA (NM_006120.2,650-668).
gcattgtgactcacgaaat

SEQ ID NO: 131697 - DNA, 19 bp, Homo sapiens
  siRNA target sequence for HLA-DMA (NM_006120.2,651-669).
cattgtgactcacgaaatt

SEQ ID NO: 131698 - DNA, 19 bp, Homo sapiens
  siRNA target sequence for HOMER1 (NM_004272.2,300-318).
gcactcgagctcatgtctt

SEQ ID NO: 131699 - DNA, 19 bp, Homo sapiens
  siRNA target sequence for HOMER1 (NM_004272.2,358-376).
cagcaagcatgcagttact

SEQ ID NO: 131700 - DNA, 19 bp, Homo sapiens
  siRNA target sequence for HOMER1 (NM_004272.2,388-406).
ctatgacagcacaagaaat

SEQ ID NO: 131701 - DNA, 19 bp, Homo sapiens
  siRNA target sequence for HOMER1 (NM_004272.2,399-417).
caagaaatgtgtataggat

SEQ ID NO: 131702 - DNA, 19 bp, Homo sapiens
  siRNA target sequence for HOMER1 (NM_004272.2,402-420).
gaaatgtgtataggataat

SEQ ID NO: 131703 - DNA, 19 bp, Homo sapiens
  siRNA target sequence for HOMER1 (NM_004272.2,407-425).
gtgtataggataatcagtt

SEQ ID NO: 131704 - DNA, 19 bp, Homo sapiens
  siRNA target sequence for HOMER1 (NM_004272.2,409-427).
gtataggataatcagttta

SEQ ID NO: 131705 - DNA, 19 bp, Homo sapiens
  siRNA target sequence for HOMER1 (NM_004272.2,428-446).
gatggctcaaaggcaataa

SEQ ID NO: 131706 - DNA, 19 bp, Homo sapiens
  siRNA target sequence for HOMER1 (NM_004272.2,480-498).
ctaaaacatctcagaagtt

SEQ ID NO: 131707 - DNA, 19 bp, Homo sapiens
  siRNA target sequence for HOMER1 (NM_004272.2,522-540).
caaacaccgtttatggatt

SEQ ID NO: 131708 - DNA, 19 bp, Homo sapiens
  siRNA target sequence for HOMER1 (NM_004272.2,692-710).
cctttaacaccggaaagta

SEQ ID NO: 131709 - DNA, 19 bp, Homo sapiens
  siRNA target sequence for HOMER1 (NM_004272.2,886-904).
gtccactgccaatgtgaaa

SEQ ID NO: 131710 - DNA, 19 bp, Homo sapiens
  siRNA target sequence for HOMER1 (NM_004272.2,961-979).
ggtgactgaacttgaatgt

SEQ ID NO: 131711 - DNA, 19 bp, Homo sapiens
  siRNA target sequence for HOMER1 (NM_004272.2,998-1016).
gcagtacatactcataaga

SEQ ID NO: 131712 - DNA, 19 bp, Homo sapiens
  siRNA target sequence for HOMER1 (NM_004272.2,1004-1022).
catactcataagacagaat

SEQ ID NO: 131713 - DNA, 19 bp, Homo sapiens
  siRNA target sequence for HOMER1 (NM_004272.2,1046-1064).
gaagagacactgaaactga

SEQ ID NO: 131714 - DNA, 19 bp, Homo sapiens
  siRNA target sequence for HOMER1 (NM_004272.2,1121-1139).
gaacagagggattctttga

SEQ ID NO: 131715 - DNA, 19 bp, Homo sapiens
  siRNA target sequence for HOMER1 (NM_004272.2,1299-1317).
cagaattacgagataactt

SEQ ID NO: 131716 - DNA, 19 bp, Homo sapiens
  siRNA target sequence for HOMER3 (NM_004838.2,202-220).
ccagggagcagccaatctt

SEQ ID NO: 131717 - DNA, 19 bp, Homo sapiens
  siRNA target sequence for HOMER3 (NM_004838.2,232-250).
cgcacgtgttccaaattga

SEQ ID NO: 131718 - DNA, 19 bp, Homo sapiens
  siRNA target sequence for HOMER3 (NM_004838.2,291-309).
gcactcactgtctcctatt

SEQ ID NO: 131719 - DNA, 19 bp, Homo sapiens
  siRNA target sequence for HOMER3 (NM_004838.2,690-708).
gagcgcgagcggctaaaga

SEQ ID NO: 131720 - DNA, 19 bp, Homo sapiens
  siRNA target sequence for HOMER3 (NM_004838.2,694-712).
gcgagcggctaaagaagat

SEQ ID NO: 131721 - DNA, 19 bp, Homo sapiens
  siRNA target sequence for HOMER3 (NM_004838.2,699-717).
cggctaaagaagatgttgt

SEQ ID NO: 131722 - DNA, 19 bp, Homo sapiens
  siRNA target sequence for HOMER3 (NM_004838.2,741-759).
cagtgggaggccgagtttt

SEQ ID NO: 131723 - DNA, 19 bp, Homo sapiens
  siRNA target sequence for HSPB2 (NM_001541.2,89-107).
gccaccgccgagtacgaat

SEQ ID NO: 131724 - DNA, 19 bp, Homo sapiens
  siRNA target sequence for HSPB2 (NM_001541.2,90-108).
ccaccgccgagtacgaatt

SEQ ID NO: 131725 - DNA, 19 bp, Homo sapiens
  siRNA target sequence for HSPB2 (NM_001541.2,91-109).
caccgccgagtacgaattt

SEQ ID NO: 131726 - DNA, 19 bp, Homo sapiens
  siRNA target sequence for HSPB2 (NM_001541.2,270-288).
gcaagttccaggcatttct

SEQ ID NO: 131727 - DNA, 19 bp, Homo sapiens
  siRNA target sequence for HSPB2 (NM_001541.2,463-481).
ctcccatgatggcatctta

SEQ ID NO: 131728 - DNA, 19 bp, Homo sapiens
  siRNA target sequence for HSPB2 (NM_001541.2,495-513).
ctcggggtggccgacattt

SEQ ID NO: 131729 - DNA, 19 bp, Homo sapiens
  siRNA target sequence for HSPB2 (NM_001541.2,498-516).
ggggtggccgacatttgga

SEQ ID NO: 131730 - DNA, 19 bp, Homo sapiens
  siRNA target sequence for HSPB2 (NM_001541.2,524-542).
gtcaatgaggtctacatct

SEQ ID NO: 131731 - DNA, 19 bp, Homo sapiens
  siRNA target sequence for HUMGT198A (NM_013290.3,316-334).
cgcaacaaggcaagatcaa

SEQ ID NO: 131732 - DNA, 19 bp, Homo sapiens
  siRNA target sequence for HUMGT198A (NM_013290.3,347-365).
cggcaagcagaagatctat

SEQ ID NO: 131733 - DNA, 19 bp, Homo sapiens
  siRNA target sequence for HUMGT198A (NM_013290.3,370-388).
cggatcaggaccagtttga

SEQ ID NO: 131734 - DNA, 19 bp, Homo sapiens
  siRNA target sequence for HUMGT198A (NM_013290.3,540-558).
gagagattgaagaacatta

SEQ ID NO: 131735 - DNA, 19 bp, Homo sapiens
  siRNA target sequence for HUMGT198A (NM_013290.3,554-572).
cattaaagcagctaccaat

SEQ ID NO: 131736 - DNA, 19 bp, Homo sapiens
  siRNA target sequence for HUMGT198A (NM_013290.3,665-683).
gtctgatgcaatacttgaa

SEQ ID NO: 131737 - DNA, 19 bp, Homo sapiens
  siRNA target sequence for HUMGT198A (NM_016556.1,380-398).
gagctcaaggaattatcta

SEQ ID NO: 131738 - DNA, 19 bp, Homo sapiens
  siRNA target sequence for HYPE (NM_007076.1,397-415).
cctctccagcgggtaagtt

SEQ ID NO: 131739 - DNA, 19 bp, Homo sapiens
  siRNA target sequence for HYPE (NM_007076.1,769-787).
cctactaccatcacatcta

SEQ ID NO: 131740 - DNA, 19 bp, Homo sapiens
  siRNA target sequence for HYPE (NM_007076.1,1075-1093).
cgcaggatgtggaaaagca

SEQ ID NO: 131741 - DNA, 19 bp, Homo sapiens
  siRNA target sequence for HYPE (NM_007076.1,1158-1176).
gcagccttagcccattata

SEQ ID NO: 131742 - DNA, 19 bp, Homo sapiens
  siRNA target sequence for HYPE (NM_007076.1,1330-1348).
gcgacgtgaggcctttcat

SEQ ID NO: 131743 - DNA, 19 bp, Homo sapiens
  siRNA target sequence for HYPE (NM_007076.1,1331-1349).
cgacgtgaggcctttcatt

SEQ ID NO: 131744 - DNA, 19 bp, Homo sapiens
  siRNA target sequence for HYPE (NM_007076.1,1350-1368).
cgcttcatcgccaagtgta

SEQ ID NO: 131745 - DNA, 19 bp, Homo sapiens
  siRNA target sequence for IFI35 (NM_005533.2,324-342).
gtgcctaagtctttagttt

SEQ ID NO: 131746 - DNA, 19 bp, Homo sapiens
  siRNA target sequence for IFI35 (NM_005533.2,603-621).
gacaagctagagatcttct

SEQ ID NO: 131747 - DNA, 19 bp, Homo sapiens
  siRNA target sequence for IFI35 (NM_005533.2,775-793).
gagtctctccgtatgtgaa

SEQ ID NO: 131748 - DNA, 19 bp, Homo sapiens
  siRNA target sequence for IFI35 (NM_005533.2,841-859).
cggtactggtgctcaacat

SEQ ID NO: 131749 - DNA, 19 bp, Homo sapiens
  siRNA target sequence for IFI35 (NM_005533.2,842-860).
ggtactggtgctcaacatt

SEQ ID NO: 131750 - DNA, 19 bp, Homo sapiens
  siRNA target sequence for IFI35 (NM_005533.2,852-870).
ctcaacattcctgatatct

SEQ ID NO: 131751 - DNA, 19 bp, Homo sapiens
  siRNA target sequence for INADL (NM_005799.2,121-139).
gaaaatcctgctacagata

SEQ ID NO: 131752 - DNA, 19 bp, Homo sapiens
  siRNA target sequence for INADL (NM_005799.2,147-165).
ggtgctgcaggtacttgat

SEQ ID NO: 131753 - DNA, 19 bp, Homo sapiens
  siRNA target sequence for INADL (NM_005799.2,157-175).
gtacttgatcgcctgaaaa

SEQ ID NO: 131754 - DNA, 19 bp, Homo sapiens
  siRNA target sequence for INADL (NM_005799.2,196-214).
gacacgtcgcagaatgaga

SEQ ID NO: 131755 - DNA, 19 bp, Homo sapiens
  siRNA target sequence for INADL (NM_005799.2,200-218).
cgtcgcagaatgagaagtt

SEQ ID NO: 131756 - DNA, 19 bp, Homo sapiens
  siRNA target sequence for INADL (NM_005799.2,201-219).
gtcgcagaatgagaagtta

SEQ ID NO: 131757 - DNA, 19 bp, Homo sapiens
  siRNA target sequence for INADL (NM_005799.2,205-223).
cagaatgagaagttatcta

SEQ ID NO: 131758 - DNA, 19 bp, Homo sapiens
  siRNA target sequence for INADL (NM_005799.2,350-368).
ggaaaggtttgttagtgtt

SEQ ID NO: 131759 - DNA, 19 bp, Homo sapiens
  siRNA target sequence for INADL (NM_005799.2,397-415).
gtccacaggccctctaata

SEQ ID NO: 131760 - DNA, 19 bp, Homo sapiens
  siRNA target sequence for INADL (NM_005799.2,400-418).
cacaggccctctaataact

SEQ ID NO: 131761 - DNA, 19 bp, Homo sapiens
  siRNA target sequence for INADL (NM_005799.2,419-437).
cgactgtatctgggttatt

SEQ ID NO: 131762 - DNA, 19 bp, Homo sapiens
  siRNA target sequence for INADL (NM_005799.2,468-486).
ctttaactcagtcattcaa

SEQ ID NO: 131763 - DNA, 19 bp, Homo sapiens
  siRNA target sequence for INADL (NM_005799.2,561-579).
ggtggccctcagaagtcaa

SEQ ID NO: 131764 - DNA, 19 bp, Homo sapiens
  siRNA target sequence for INADL (NM_005799.2,631-649).
gcagacagggatcaaagat

SEQ ID NO: 131765 - DNA, 19 bp, Homo sapiens
  siRNA target sequence for INADL (NM_005799.2,632-650).
cagacagggatcaaagatt

SEQ ID NO: 131766 - DNA, 19 bp, Homo sapiens
  siRNA target sequence for INADL (NM_005799.2,686-704).
cgccattggatcagaacat

SEQ ID NO: 131767 - DNA, 19 bp, Homo sapiens
  siRNA target sequence for INADL (NM_005799.2,687-705).
gccattggatcagaacatt

SEQ ID NO: 131768 - DNA, 19 bp, Homo sapiens
  siRNA target sequence for INADL (NM_005799.2,688-706).
ccattggatcagaacattt

SEQ ID NO: 131769 - DNA, 19 bp, Homo sapiens
  siRNA target sequence for INADL (NM_005799.2,709-727).
catcagcaagcaattgcat

SEQ ID NO: 131770 - DNA, 19 bp, Homo sapiens
  siRNA target sequence for INADL (NM_005799.2,712-730).
cagcaagcaattgcattat

SEQ ID NO: 131771 - DNA, 19 bp, Homo sapiens
  siRNA target sequence for INADL (NM_005799.2,714-732).
gcaagcaattgcattatta

SEQ ID NO: 131772 - DNA, 19 bp, Homo sapiens
  siRNA target sequence for INADL (NM_005799.2,771-789).
ggaaccagtccacacaaaa

SEQ ID NO: 131773 - DNA, 19 bp, Homo sapiens
  siRNA target sequence for INADL (NM_005799.2,772-790).
gaaccagtccacacaaaaa

SEQ ID NO: 131774 - DNA, 19 bp, Homo sapiens
  siRNA target sequence for INADL (NM_005799.2,783-801).
cacaaaaagcagtacttct

SEQ ID NO: 131775 - DNA, 19 bp, Homo sapiens
  siRNA target sequence for INADL (NM_005799.2,797-815).
cttctagcagcctaaatga

SEQ ID NO: 131776 - DNA, 19 bp, Homo sapiens
  siRNA target sequence for INADL (NM_005799.2,804-822).
cagcctaaatgatacaact

SEQ ID NO: 131777 - DNA, 19 bp, Homo sapiens
  siRNA target sequence for INADL (NM_005799.2,858-876).
ggttgagctcattaatgat

SEQ ID NO: 131778 - DNA, 19 bp, Homo sapiens
  siRNA target sequence for INADL (NM_005799.2,924-942).
ggttgtgaggactatagtt

SEQ ID NO: 131779 - DNA, 19 bp, Homo sapiens
  siRNA target sequence for INADL (NM_005799.2,980-998).
caggggaccacatcttgaa

SEQ ID NO: 131780 - DNA, 19 bp, Homo sapiens
  siRNA target sequence for INADL (NM_005799.2,983-1001).
gggaccacatcttgaagat

SEQ ID NO: 131781 - DNA, 19 bp, Homo sapiens
  siRNA target sequence for INADL (NM_005799.2,1035-1053).
gcaagttgcacaagttcta

SEQ ID NO: 131782 - DNA, 19 bp, Homo sapiens
  siRNA target sequence for INADL (NM_005799.2,1077-1095).
gatgctcgttgctagagat

SEQ ID NO: 131783 - DNA, 19 bp, Homo sapiens
  siRNA target sequence for INADL (NM_005799.2,1093-1111).
gatccagctggtgacattt

SEQ ID NO: 131784 - DNA, 19 bp, Homo sapiens
  siRNA target sequence for INADL (NM_005799.2,1236-1254).
gagtcttggaattagaatt

SEQ ID NO: 131785 - DNA, 19 bp, Homo sapiens
  siRNA target sequence for INADL (NM_005799.2,1283-1301).
gggaagcttcagggattta

SEQ ID NO: 131786 - DNA, 19 bp, Homo sapiens
  siRNA target sequence for INADL (NM_005799.2,1295-1313).
ggatttatgtgaaaagtat

SEQ ID NO: 131787 - DNA, 19 bp, Homo sapiens
  siRNA target sequence for INADL (NM_005799.2,1343-1361).
gccacattcaagtgaatga

SEQ ID NO: 131788 - DNA, 19 bp, Homo sapiens
  siRNA target sequence for INADL (NM_005799.2,1397-1415).
gttttgccaaccatgatgt

SEQ ID NO: 131789 - DNA, 19 bp, Homo sapiens
  siRNA target sequence for INADL (NM_005799.2,1414-1432).
gttgttgaagtattacgaa

SEQ ID NO: 131790 - DNA, 19 bp, Homo sapiens
  siRNA target sequence for INADL (NM_005799.2,1470-1488).
gaagacatcctcatctact

SEQ ID NO: 131791 - DNA, 19 bp, Homo sapiens
  siRNA target sequence for INADL (NM_005799.2,1512-1530).
cagaggaactgttgtagaa

SEQ ID NO: 131792 - DNA, 19 bp, Homo sapiens
  siRNA target sequence for INADL (NM_005799.2,1638-1656).
caacatacaagccttagaa

SEQ ID NO: 131793 - DNA, 19 bp, Homo sapiens
  siRNA target sequence for INADL (NM_005799.2,1724-1742).
ctgattatgaagtaatggt

SEQ ID NO: 131794 - DNA, 19 bp, Homo sapiens
  siRNA target sequence for INADL (NM_005799.2,1768-1786).
gatgatgctgagttacaga

SEQ ID NO: 131795 - DNA, 19 bp, Homo sapiens
  siRNA target sequence for INADL (NM_005799.2,1841-1859).
cctttgatgggcaccatta

SEQ ID NO: 131796 - DNA, 19 bp, Homo sapiens
  siRNA target sequence for INADL (NM_005799.2,1852-1870).
caccattatatttcttcaa

SEQ ID NO: 131797 - DNA, 19 bp, Homo sapiens
  siRNA target sequence for INADL (NM_005799.2,1880-1898).
gtggtcctgttgatacatt

SEQ ID NO: 131798 - DNA, 19 bp, Homo sapiens
  siRNA target sequence for INADL (NM_005799.2,1935-1953).
caatggcatgcagctttat

SEQ ID NO: 131799 - DNA, 19 bp, Homo sapiens
  siRNA target sequence for INADL (NM_005799.2,2018-2036).
gctgtcggaggttgtttga

SEQ ID NO: 131800 - DNA, 19 bp, Homo sapiens
  siRNA target sequence for INADL (NM_005799.2,2019-2037).
ctgtcggaggttgtttgat

SEQ ID NO: 131801 - DNA, 19 bp, Homo sapiens
  siRNA target sequence for INADL (NM_005799.2,2094-2112).
ggttgaccacaatatggat

SEQ ID NO: 131802 - DNA, 19 bp, Homo sapiens
  siRNA target sequence for INADL (NM_005799.2,2101-2119).
cacaatatggatgtcaata

SEQ ID NO: 131803 - DNA, 19 bp, Homo sapiens
  siRNA target sequence for INADL (NM_005799.2,2156-2174).
cccctgaagtcaagattgt

SEQ ID NO: 131804 - DNA, 19 bp, Homo sapiens
  siRNA target sequence for INADL (NM_005799.2,2157-2175).
ccctgaagtcaagattgtt

SEQ ID NO: 131805 - DNA, 19 bp, Homo sapiens
  siRNA target sequence for INADL (NM_005799.2,2166-2184).
caagattgttgaactagta

SEQ ID NO: 131806 - DNA, 19 bp, Homo sapiens
  siRNA target sequence for INADL (NM_005799.2,2229-2247).
ccctttagatcctacaaga

SEQ ID NO: 131807 - DNA, 19 bp, Homo sapiens
  siRNA target sequence for INADL (NM_005799.2,2230-2248).
cctttagatcctacaagat

SEQ ID NO: 131808 - DNA, 19 bp, Homo sapiens
  siRNA target sequence for INADL (NM_005799.2,2321-2339).
gcctggtctcagtcaatga

SEQ ID NO: 131809 - DNA, 19 bp, Homo sapiens
  siRNA target sequence for INADL (NM_005799.2,2322-2340).
cctggtctcagtcaatgaa

SEQ ID NO: 131810 - DNA, 19 bp, Homo sapiens
  siRNA target sequence for INADL (NM_005799.2,2323-2341).
ctggtctcagtcaatgaat

SEQ ID NO: 131811 - DNA, 19 bp, Homo sapiens
  siRNA target sequence for INADL (NM_005799.2,2474-2492).
caagcagtaatgaagacaa

SEQ ID NO: 131812 - DNA, 19 bp, Homo sapiens
  siRNA target sequence for INADL (NM_005799.2,2506-2524).
ggaacaattcatgatataa

SEQ ID NO: 131813 - DNA, 19 bp, Homo sapiens
  siRNA target sequence for INADL (NM_005799.2,2542-2560).
gaagcacccaagggattta

SEQ ID NO: 131814 - DNA, 19 bp, Homo sapiens
  siRNA target sequence for INADL (NM_005799.2,2546-2564).
cacccaagggatttagaga

SEQ ID NO: 131815 - DNA, 19 bp, Homo sapiens
  siRNA target sequence for INADL (NM_005799.2,2663-2681).
cctgggagatgcatgaatt

SEQ ID NO: 131816 - DNA, 19 bp, Homo sapiens
  siRNA target sequence for INADL (NM_005799.2,2783-2801).
ccttgtcgcacattcaaga

SEQ ID NO: 131817 - DNA, 19 bp, Homo sapiens
  siRNA target sequence for INADL (NM_005799.2,2847-2865).
gtggttgcatgataatgaa

SEQ ID NO: 131818 - DNA, 19 bp, Homo sapiens
  siRNA target sequence for INADL (NM_005799.2,3025-3043).
gacgacctggaaaatctta

SEQ ID NO: 131819 - DNA, 19 bp, Homo sapiens
  siRNA target sequence for INADL (NM_005799.2,3074-3092).
gcatgatcccgaatgatgt

SEQ ID NO: 131820 - DNA, 19 bp, Homo sapiens
  siRNA target sequence for INADL (NM_005799.2,3098-3116).
gtcctagcttgctcattga

SEQ ID NO: 131821 - DNA, 19 bp, Homo sapiens
  siRNA target sequence for INADL (NM_005799.2,3171-3189).
ccaagcgacacgagttatt

SEQ ID NO: 131822 - DNA, 19 bp, Homo sapiens
  siRNA target sequence for INADL (NM_005799.2,3172-3190).
caagcgacacgagttattt

SEQ ID NO: 131823 - DNA, 19 bp, Homo sapiens
  siRNA target sequence for INADL (NM_005799.2,3175-3193).
gcgacacgagttatttcca

SEQ ID NO: 131824 - DNA, 19 bp, Homo sapiens
  siRNA target sequence for INADL (NM_005799.2,3176-3194).
cgacacgagttatttccaa

SEQ ID NO: 131825 - DNA, 19 bp, Homo sapiens
  siRNA target sequence for INADL (NM_005799.2,3200-3218).
cagcatacacaggaatgtt

SEQ ID NO: 131826 - DNA, 19 bp, Homo sapiens
  siRNA target sequence for INADL (NM_005799.2,3212-3230).
gaatgttgtcttctagata

SEQ ID NO: 131827 - DNA, 19 bp, Homo sapiens
  siRNA target sequence for INADL (NM_005799.2,3300-3318).
ctggggtccaccgagaatt

SEQ ID NO: 131828 - DNA, 19 bp, Homo sapiens
  siRNA target sequence for INADL (NM_005799.2,3305-3323).
gtccaccgagaattgttga

SEQ ID NO: 131829 - DNA, 19 bp, Homo sapiens
  siRNA target sequence for INADL (NM_005799.2,3311-3329).
cgagaattgttgagatttt

SEQ ID NO: 131830 - DNA, 19 bp, Homo sapiens
  siRNA target sequence for INADL (NM_005799.2,3367-3385).
ggtggacaaactgttataa

SEQ ID NO: 131831 - DNA, 19 bp, Homo sapiens
  siRNA target sequence for INADL (NM_005799.2,3368-3386).
gtggacaaactgttataaa

SEQ ID NO: 131832 - DNA, 19 bp, Homo sapiens
  siRNA target sequence for INADL (NM_005799.2,3377-3395).
ctgttataaaacgtctaaa

SEQ ID NO: 131833 - DNA, 19 bp, Homo sapiens
  siRNA target sequence for INADL (NM_005799.2,3403-3421).
gaggagcttaaaggtatat

SEQ ID NO: 131834 - DNA, 19 bp, Homo sapiens
  siRNA target sequence for INADL (NM_005799.2,3455-3473).
ggaagacgaacgcacttaa

SEQ ID NO: 131835 - DNA, 19 bp, Homo sapiens
  siRNA target sequence for INADL (NM_005799.2,3456-3474).
gaagacgaacgcacttaaa

SEQ ID NO: 131836 - DNA, 19 bp, Homo sapiens
  siRNA target sequence for INADL (NM_005799.2,3459-3477).
gacgaacgcacttaaaact

SEQ ID NO: 131837 - DNA, 19 bp, Homo sapiens
  siRNA target sequence for INADL (NM_005799.2,3535-3553).
gcagttgaggccattaaga

SEQ ID NO: 131838 - DNA, 19 bp, Homo sapiens
  siRNA target sequence for INADL (NM_005799.2,3599-3617).
ctccacgagtcattcctaa

SEQ ID NO: 131839 - DNA, 19 bp, Homo sapiens
  siRNA target sequence for INADL (NM_005799.2,3607-3625).
gtcattcctaacgtacata

SEQ ID NO: 131840 - DNA, 19 bp, Homo sapiens
  siRNA target sequence for INADL (NM_005799.2,3738-3756).
gactgatgacagtgatgaa

SEQ ID NO: 131841 - DNA, 19 bp, Homo sapiens
  siRNA target sequence for INADL (NM_005799.2,3772-3790).
gcctttaccgaccaaaaaa

SEQ ID NO: 131842 - DNA, 19 bp, Homo sapiens
  siRNA target sequence for INADL (NM_005799.2,3825-3843).
gcacattattgaacttgaa

SEQ ID NO: 131843 - DNA, 19 bp, Homo sapiens
  siRNA target sequence for INADL (NM_005799.2,3889-3907).
cgatcacgcatgagcatat

SEQ ID NO: 131844 - DNA, 19 bp, Homo sapiens
  siRNA target sequence for INADL (NM_005799.2,3890-3908).
gatcacgcatgagcatatt

SEQ ID NO: 131845 - DNA, 19 bp, Homo sapiens
  siRNA target sequence for INADL (NM_005799.2,3893-3911).
cacgcatgagcatatttgt

SEQ ID NO: 131846 - DNA, 19 bp, Homo sapiens
  siRNA target sequence for INADL (NM_005799.2,3964-3982).
ggagatgaactcttagaga

SEQ ID NO: 131847 - DNA, 19 bp, Homo sapiens
  siRNA target sequence for INADL (NM_005799.2,4110-4128).
ctttccagtgccatcaagt

SEQ ID NO: 131848 - DNA, 19 bp, Homo sapiens
  siRNA target sequence for INADL (NM_005799.2,4152-4170).
gagcggcaccgaacctatt

SEQ ID NO: 131849 - DNA, 19 bp, Homo sapiens
  siRNA target sequence for INADL (NM_005799.2,4155-4173).
cggcaccgaacctattagt

SEQ ID NO: 131850 - DNA, 19 bp, Homo sapiens
  siRNA target sequence for INADL (NM_005799.2,4156-4174).
ggcaccgaacctattagta

SEQ ID NO: 131851 - DNA, 19 bp, Homo sapiens
  siRNA target sequence for INADL (NM_005799.2,4158-4176).
caccgaacctattagtagt

SEQ ID NO: 131852 - DNA, 19 bp, Homo sapiens
  siRNA target sequence for INADL (NM_005799.2,4187-4205).
gcagcgtcgaagttggtat

SEQ ID NO: 131853 - DNA, 19 bp, Homo sapiens
  siRNA target sequence for INADL (NM_005799.2,4188-4206).
cagcgtcgaagttggtatt

SEQ ID NO: 131854 - DNA, 19 bp, Homo sapiens
  siRNA target sequence for INADL (NM_005799.2,4190-4208).
gcgtcgaagttggtattaa

SEQ ID NO: 131855 - DNA, 19 bp, Homo sapiens
  siRNA target sequence for INADL (NM_005799.2,4191-4209).
cgtcgaagttggtattaaa

SEQ ID NO: 131856 - DNA, 19 bp, Homo sapiens
  siRNA target sequence for INADL (NM_005799.2,4194-4212).
cgaagttggtattaaacaa

SEQ ID NO: 131857 - DNA, 19 bp, Homo sapiens
  siRNA target sequence for INADL (NM_005799.2,4284-4302).
cttcagttcacaagagata

SEQ ID NO: 131858 - DNA, 19 bp, Homo sapiens
  siRNA target sequence for INADL (NM_005799.2,4315-4333).
gcttcatcataccattcaa

SEQ ID NO: 131859 - DNA, 19 bp, Homo sapiens
  siRNA target sequence for INADL (NM_005799.2,4576-4594).
gggcaaaatgctatagtta

SEQ ID NO: 131860 - DNA, 19 bp, Homo sapiens
  siRNA target sequence for INADL (NM_005799.2,4577-4595).
ggcaaaatgctatagttat

SEQ ID NO: 131861 - DNA, 19 bp, Homo sapiens
  siRNA target sequence for INADL (NM_005799.2,4644-4662).
ggctggtgaccagatatta

SEQ ID NO: 131862 - DNA, 19 bp, Homo sapiens
  siRNA target sequence for INADL (NM_005799.2,4646-4664).
ctggtgaccagatattaga

SEQ ID NO: 131863 - DNA, 19 bp, Homo sapiens
  siRNA target sequence for INADL (NM_005799.2,4738-4756).
gtgcggctggtggtgtata

SEQ ID NO: 131864 - DNA, 19 bp, Homo sapiens
  siRNA target sequence for INADL (NM_005799.2,4740-4758).
gcggctggtggtgtataga

SEQ ID NO: 131865 - DNA, 19 bp, Homo sapiens
  siRNA target sequence for INADL (NM_170605.2,4480-4498).
gacacacccttgaatgcta

SEQ ID NO: 131866 - DNA, 19 bp, Homo sapiens
  siRNA target sequence for INADL (NM_170605.2,4482-4500).
cacacccttgaatgctata

SEQ ID NO: 131867 - DNA, 19 bp, Homo sapiens
  siRNA target sequence for INADL (NM_170605.2,4755-4773).
catcgttgggaaacgaaat

SEQ ID NO: 131868 - DNA, 19 bp, Homo sapiens
  siRNA target sequence for INADL (NM_170605.2,4758-4776).
cgttgggaaacgaaatgga

SEQ ID NO: 131869 - DNA, 19 bp, Homo sapiens
  siRNA target sequence for INADL (NM_170605.2,4774-4792).
ggaagcggagtgtttattt

SEQ ID NO: 131870 - DNA, 19 bp, Homo sapiens
  siRNA target sequence for INADL (NM_170605.2,4821-4839).
cctggatgggagattgatt

SEQ ID NO: 131871 - DNA, 19 bp, Homo sapiens
  siRNA target sequence for INADL (NM_170605.2,4842-4860).
gggagatcagatcttatct

SEQ ID NO: 131872 - DNA, 19 bp, Homo sapiens
  siRNA target sequence for INADL (NM_170605.2,4928-4946).
gacttgtgcagctagagat

SEQ ID NO: 131873 - DNA, 19 bp, Homo sapiens
  siRNA target sequence for INADL (NM_170605.2,5076-5094).
ggttggcacaaaaagagtt

SEQ ID NO: 131874 - DNA, 19 bp, Homo sapiens
  siRNA target sequence for INADL (NM_170605.2,5134-5152).
ccaaggactgttgagataa

SEQ ID NO: 131875 - DNA, 19 bp, Homo sapiens
  siRNA target sequence for INADL (NM_170605.2,5135-5153).
caaggactgttgagataaa

SEQ ID NO: 131876 - DNA, 19 bp, Homo sapiens
  siRNA target sequence for INADL (NM_170605.2,5212-5230).
ggagatatccccgtattta

SEQ ID NO: 131877 - DNA, 19 bp, Homo sapiens
  siRNA target sequence for INADL (NM_170605.2,5223-5241).
cgtatttattgccatgatt

SEQ ID NO: 131878 - DNA, 19 bp, Homo sapiens
  siRNA target sequence for INADL (NM_170605.2,5261-5279).
cacggacacagaagcttaa

SEQ ID NO: 131879 - DNA, 19 bp, Homo sapiens
  siRNA target sequence for INADL (NM_170605.2,5300-5318).
gcattaacgggcaaccttt

SEQ ID NO: 131880 - DNA, 19 bp, Homo sapiens
  siRNA target sequence for INADL (NM_170605.2,5385-5403).
ggttgtagcagataccaat

SEQ ID NO: 131881 - DNA, 19 bp, Homo sapiens
  siRNA target sequence for INADL (NM_170605.2,5416-5434).
gcagctcagcttgaaaaca

SEQ ID NO: 131882 - DNA, 19 bp, Homo sapiens
  siRNA target sequence for INADL (NM_170605.2,5419-5437).
gctcagcttgaaaacatgt

SEQ ID NO: 131883 - DNA, 19 bp, Homo sapiens
  siRNA target sequence for INHA (NM_002191.2,312-330).
gcggctgccccgaagacat

SEQ ID NO: 131884 - DNA, 19 bp, Homo sapiens
  siRNA target sequence for INHA (NM_002191.2,463-481).
gaggagggcctcttcagat

SEQ ID NO: 131885 - DNA, 19 bp, Homo sapiens
  siRNA target sequence for INHA (NM_002191.2,470-488).
gcctcttcagatacatgtt

SEQ ID NO: 131886 - DNA, 19 bp, Homo sapiens
  siRNA target sequence for INHA (NM_002191.2,1173-1191).
ctcggatggaggttactct

SEQ ID NO: 131887 - DNA, 19 bp, Homo sapiens
  siRNA target sequence for INHA (NM_002191.2,1175-1193).
cggatggaggttactcttt

SEQ ID NO: 131888 - DNA, 19 bp, Homo sapiens
  siRNA target sequence for INHA (NM_002191.2,1180-1198).
ggaggttactctttcaagt

SEQ ID NO: 131889 - DNA, 19 bp, Homo sapiens
  siRNA target sequence for INHA (NM_002191.2,1181-1199).
gaggttactctttcaagta

SEQ ID NO: 131890 - DNA, 19 bp, Homo sapiens
  siRNA target sequence for INHA (NM_002191.2,1184-1202).
gttactctttcaagtatga

SEQ ID NO: 131891 - DNA, 19 bp, Homo sapiens
  siRNA target sequence for INHBA (NM_002192.1,94-112).
gctttggctgagaggattt

SEQ ID NO: 131892 - DNA, 19 bp, Homo sapiens
  siRNA target sequence for INHBA (NM_002192.1,99-117).
ggctgagaggatttctgtt

SEQ ID NO: 131893 - DNA, 19 bp, Homo sapiens
  siRNA target sequence for INHBA (NM_002192.1,120-138).
caagttgctggattatagt

SEQ ID NO: 131894 - DNA, 19 bp, Homo sapiens
  siRNA target sequence for INHBA (NM_002192.1,332-350).
cttctgaacgcgatcagaa

SEQ ID NO: 131895 - DNA, 19 bp, Homo sapiens
  siRNA target sequence for INHBA (NM_002192.1,337-355).
gaacgcgatcagaaagctt

SEQ ID NO: 131896 - DNA, 19 bp, Homo sapiens
  siRNA target sequence for INHBA (NM_002192.1,491-509).
ctgcacttcgagatttcca

SEQ ID NO: 131897 - DNA, 19 bp, Homo sapiens
  siRNA target sequence for INHBA (NM_002192.1,660-678).
ccgaggaagtgggcttaaa

SEQ ID NO: 131898 - DNA, 19 bp, Homo sapiens
  siRNA target sequence for INHBA (NM_002192.1,697-715).
gttgctctctgaaaaagta

SEQ ID NO: 131899 - DNA, 19 bp, Homo sapiens
  siRNA target sequence for INHBA (NM_002192.1,1037-1055).
gtcaacatctgctgtaaga

SEQ ID NO: 131900 - DNA, 19 bp, Homo sapiens
  siRNA target sequence for INHBA (NM_002192.1,1039-1057).
caacatctgctgtaagaaa

SEQ ID NO: 131901 - DNA, 19 bp, Homo sapiens
  siRNA target sequence for INHBA (NM_002192.1,1144-1162).
gtgcccgagccatatagca

SEQ ID NO: 131902 - DNA, 19 bp, Homo sapiens
  siRNA target sequence for INHBA (NM_002192.1,1275-1293).
gacccatgtccatgttgta

SEQ ID NO: 131903 - DNA, 19 bp, Homo sapiens
  siRNA target sequence for INHBA (NM_002192.1,1279-1297).
catgtccatgttgtactat

SEQ ID NO: 131904 - DNA, 19 bp, Homo sapiens
  siRNA target sequence for INHBA (NM_002192.1,1284-1302).
ccatgttgtactatgatga

SEQ ID NO: 131905 - DNA, 19 bp, Homo sapiens
  siRNA target sequence for INHBA (NM_002192.1,1301-1319).
gatggtcaaaacatcatca

SEQ ID NO: 131906 - DNA, 19 bp, Homo sapiens
  siRNA target sequence for IRS1 (NM_005544.1,1243-1261).
cgggctgactccaagaaca

SEQ ID NO: 131907 - DNA, 19 bp, Homo sapiens
  siRNA target sequence for IRS1 (NM_005544.1,1487-1505).
caggacccgcattcaaaga

SEQ ID NO: 131908 - DNA, 19 bp, Homo sapiens
  siRNA target sequence for IRS1 (NM_005544.1,1661-1679).
gtggccactcggaaaactt

SEQ ID NO: 131909 - DNA, 19 bp, Homo sapiens
  siRNA target sequence for IRS1 (NM_005544.1,2222-2240).
gctccacctcggattgtct

SEQ ID NO: 131910 - DNA, 19 bp, Homo sapiens
  siRNA target sequence for IRS1 (NM_005544.1,2241-2259).
cttcccacggcgatctagt

SEQ ID NO: 131911 - DNA, 19 bp, Homo sapiens
  siRNA target sequence for IRS1 (NM_005544.1,2279-2297).
ccagcgatggcggtttcat

SEQ ID NO: 131912 - DNA, 19 bp, Homo sapiens
  siRNA target sequence for IRS1 (NM_005544.1,2295-2313).
catctcctcggatgagtat

SEQ ID NO: 131913 - DNA, 19 bp, Homo sapiens
  siRNA target sequence for IRS1 (NM_005544.1,2397-2415).
ggaggagctaagcaactat

SEQ ID NO: 131914 - DNA, 19 bp, Homo sapiens
  siRNA target sequence for IRS1 (NM_005544.1,2401-2419).
gagctaagcaactatatct

SEQ ID NO: 131915 - DNA, 19 bp, Homo sapiens
  siRNA target sequence for IRS1 (NM_005544.1,2454-2472).
ccccaacggtcactacatt

SEQ ID NO: 131916 - DNA, 19 bp, Homo sapiens
  siRNA target sequence for IRS1 (NM_005544.1,2455-2473).
cccaacggtcactacattt

SEQ ID NO: 131917 - DNA, 19 bp, Homo sapiens
  siRNA target sequence for IRS1 (NM_005544.1,2456-2474).
ccaacggtcactacatttt

SEQ ID NO: 131918 - DNA, 19 bp, Homo sapiens
  siRNA target sequence for IRS1 (NM_005544.1,2460-2478).
cggtcactacattttgtct

SEQ ID NO: 131919 - DNA, 19 bp, Homo sapiens
  siRNA target sequence for IRS1 (NM_005544.1,2605-2623).
ggcacatcccctaccatta

SEQ ID NO: 131920 - DNA, 19 bp, Homo sapiens
  siRNA target sequence for IRS1 (NM_005544.1,2942-2960).
ctgccccacagcagatcat

SEQ ID NO: 131921 - DNA, 19 bp, Homo sapiens
  siRNA target sequence for IRS1 (NM_005544.1,3092-3110).
ccgggaccagctatggaaa

SEQ ID NO: 131922 - DNA, 19 bp, Homo sapiens
  siRNA target sequence for IRS1 (NM_005544.1,3184-3202).
ggtggtaagctcttacctt

SEQ ID NO: 131923 - DNA, 19 bp, Homo sapiens
  siRNA target sequence for IRS1 (NM_005544.1,3200-3218).
cttgcacaggtgactacat

SEQ ID NO: 131924 - DNA, 19 bp, Homo sapiens
  siRNA target sequence for IRS1 (NM_005544.1,3206-3224).
caggtgactacatgaacat

SEQ ID NO: 131925 - DNA, 19 bp, Homo sapiens
  siRNA target sequence for IRS1 (NM_005544.1,3317-3335).
cattgccaagatcctttaa

SEQ ID NO: 131926 - DNA, 19 bp, Homo sapiens
  siRNA target sequence for IRS1 (NM_005544.1,3402-3420).
ctctggtcgccttctctat

SEQ ID NO: 131927 - DNA, 19 bp, Homo sapiens
  siRNA target sequence for IRS1 (NM_005544.1,3421-3439).
gctgcaacagcagatgatt

SEQ ID NO: 131928 - DNA, 19 bp, Homo sapiens
  siRNA target sequence for IRS1 (NM_005544.1,3424-3442).
gcaacagcagatgattctt

SEQ ID NO: 131929 - DNA, 19 bp, Homo sapiens
  siRNA target sequence for IRS1 (NM_005544.1,3701-3719).
gggaatatgtcaatattga

SEQ ID NO: 131930 - DNA, 19 bp, Homo sapiens
  siRNA target sequence for IRS1 (NM_005544.1,4037-4055).
cagctgcccctgtaagcta

SEQ ID NO: 131931 - DNA, 19 bp, Homo sapiens
  siRNA target sequence for IRS1 (NM_005544.1,4313-4331).
ggcatagctccgagacttt

SEQ ID NO: 131932 - DNA, 19 bp, Homo sapiens
  siRNA target sequence for IRS1 (NM_005544.1,4419-4437).
cagcagcgaggatgtgaaa

SEQ ID NO: 131933 - DNA, 19 bp, Homo sapiens
  siRNA target sequence for IRS1 (NM_005544.1,4681-4699).
cgctcaagtgaggatttaa

SEQ ID NO: 131934 - DNA, 19 bp, Homo sapiens
  siRNA target sequence for ISLR (NM_005545.2,391-409).
gcctaccgcgacctagaat

SEQ ID NO: 131935 - DNA, 19 bp, Homo sapiens
  siRNA target sequence for ISLR (NM_005545.2,1205-1223).
ccaatggcagcctgcttat

SEQ ID NO: 131936 - DNA, 19 bp, Homo sapiens
  siRNA target sequence for ISLR (NM_005545.2,1385-1403).
gctgctatacggttgacaa

SEQ ID NO: 131937 - DNA, 19 bp, Homo sapiens
  siRNA target sequence for ITGB1 (NM_002211.2,154-172).
ggactgatcagttcagttt

SEQ ID NO: 131938 - DNA, 19 bp, Homo sapiens
  siRNA target sequence for ITGB1 (NM_002211.2,222-240).
caaatcatgtggagaatgt

SEQ ID NO: 131939 - DNA, 19 bp, Homo sapiens
  siRNA target sequence for ITGB1 (NM_002211.2,262-280).
gggtggtgcacaaattcaa

SEQ ID NO: 131940 - DNA, 19 bp, Homo sapiens
  siRNA target sequence for ITGB1 (NM_002211.2,308-326).
ctgcacgatgtgatgattt

SEQ ID NO: 131941 - DNA, 19 bp, Homo sapiens
  siRNA target sequence for ITGB1 (NM_002211.2,311-329).
cacgatgtgatgatttaga

SEQ ID NO: 131942 - DNA, 19 bp, Homo sapiens
  siRNA target sequence for ITGB1 (NM_002211.2,478-496).
cagttggttttgcgattaa

SEQ ID NO: 131943 - DNA, 19 bp, Homo sapiens
  siRNA target sequence for ITGB1 (NM_002211.2,480-498).
gttggttttgcgattaaga

SEQ ID NO: 131944 - DNA, 19 bp, Homo sapiens
  siRNA target sequence for ITGB1 (NM_002211.2,483-501).
ggttttgcgattaagatca

SEQ ID NO: 131945 - DNA, 19 bp, Homo sapiens
  siRNA target sequence for ITGB1 (NM_002211.2,841-859).
cagcgcatatctggaaatt

SEQ ID NO: 131946 - DNA, 19 bp, Homo sapiens
  siRNA target sequence for ITGB1 (NM_002211.2,997-1015).
ggtggcattgttttaccaa

SEQ ID NO: 131947 - DNA, 19 bp, Homo sapiens
  siRNA target sequence for ITGB1 (NM_002211.2,998-1016).
gtggcattgttttaccaaa

SEQ ID NO: 131948 - DNA, 19 bp, Homo sapiens
  siRNA target sequence for ITGB1 (NM_002211.2,1047-1065).
gtacacaatgagccattat

SEQ ID NO: 131949 - DNA, 19 bp, Homo sapiens
  siRNA target sequence for ITGB1 (NM_002211.2,1052-1070).
caatgagccattattatga

SEQ ID NO: 131950 - DNA, 19 bp, Homo sapiens
  siRNA target sequence for ITGB1 (NM_002211.2,1303-1321).
gtaacaataagttacaaat

SEQ ID NO: 131951 - DNA, 19 bp, Homo sapiens
  siRNA target sequence for ITGB1 (NM_002211.2,1396-1414).
gttcaatttgaaattagca

SEQ ID NO: 131952 - DNA, 19 bp, Homo sapiens
  siRNA target sequence for ITGB1 (NM_002211.2,1430-1448).
gtccaaaaaaggattctga

SEQ ID NO: 131953 - DNA, 19 bp, Homo sapiens
  siRNA target sequence for ITGB1 (NM_002211.2,1472-1490).
gctttacggaggaagtaga

SEQ ID NO: 131954 - DNA, 19 bp, Homo sapiens
  siRNA target sequence for ITGB1 (NM_002211.2,1530-1548).
cgaaggcatccctgaaagt

SEQ ID NO: 131955 - DNA, 19 bp, Homo sapiens
  siRNA target sequence for ITGB1 (NM_002211.2,1587-1605).
cgcgtgcaggtgcaatgaa

SEQ ID NO: 131956 - DNA, 19 bp, Homo sapiens
  siRNA target sequence for ITGB1 (NM_002211.2,1608-1626).
gcgtgttggtagacattgt

SEQ ID NO: 131957 - DNA, 19 bp, Homo sapiens
  siRNA target sequence for ITGB1 (NM_002211.2,1610-1628).
gtgttggtagacattgtga

SEQ ID NO: 131958 - DNA, 19 bp, Homo sapiens
  siRNA target sequence for ITGB1 (NM_002211.2,1612-1630).
gttggtagacattgtgaat

SEQ ID NO: 131959 - DNA, 19 bp, Homo sapiens
  siRNA target sequence for ITGB1 (NM_002211.2,1631-1649).
gcagcacagatgaagttaa

SEQ ID NO: 131960 - DNA, 19 bp, Homo sapiens
  siRNA target sequence for ITGB1 (NM_002211.2,1784-1802).
gcgagtgtgataatttcaa

SEQ ID NO: 131961 - DNA, 19 bp, Homo sapiens
  siRNA target sequence for ITGB1 (NM_002211.2,1786-1804).
gagtgtgataatttcaact

SEQ ID NO: 131962 - DNA, 19 bp, Homo sapiens
  siRNA target sequence for ITGB1 (NM_002211.2,1800-1818).
caactgtgatagatccaat

SEQ ID NO: 131963 - DNA, 19 bp, Homo sapiens
  siRNA target sequence for ITGB1 (NM_002211.2,1897-1915).
gactgttctttggatacta

SEQ ID NO: 131964 - DNA, 19 bp, Homo sapiens
  siRNA target sequence for ITGB1 (NM_002211.2,1908-1926).
ggatactagtacttgtgaa

SEQ ID NO: 131965 - DNA, 19 bp, Homo sapiens
  siRNA target sequence for ITGB1 (NM_002211.2,1964-1982).
gcgagtgtggtgtctgtaa

SEQ ID NO: 131966 - DNA, 19 bp, Homo sapiens
  siRNA target sequence for ITGB1 (NM_002211.2,2048-2066).
ctgagcataaagaatgtgt

SEQ ID NO: 131967 - DNA, 19 bp, Homo sapiens
  siRNA target sequence for ITGB1 (NM_002211.2,2068-2086).
cagtgcagagccttcaata

SEQ ID NO: 131968 - DNA, 19 bp, Homo sapiens
  siRNA target sequence for ITGB1 (NM_002211.2,2133-2151).
cattaccaaggtagaaagt

SEQ ID NO: 131969 - DNA, 19 bp, Homo sapiens
  siRNA target sequence for ITGB1 (NM_002211.2,2143-2161).
gtagaaagtcgggacaaat

SEQ ID NO: 131970 - DNA, 19 bp, Homo sapiens
  siRNA target sequence for ITGB1 (NM_002211.2,2215-2233).
gacgactgttggttctatt

SEQ ID NO: 131971 - DNA, 19 bp, Homo sapiens
  siRNA target sequence for ITGB1 (NM_002211.2,2217-2235).
cgactgttggttctatttt

SEQ ID NO: 131972 - DNA, 19 bp, Homo sapiens
  siRNA target sequence for ITGB1 (NM_002211.2,2218-2236).
gactgttggttctatttta

SEQ ID NO: 131973 - DNA, 19 bp, Homo sapiens
  siRNA target sequence for ITGB1 (NM_002211.2,2226-2244).
gttctattttacgtattca

SEQ ID NO: 131974 - DNA, 19 bp, Homo sapiens
  siRNA target sequence for ITGB1 (NM_002211.2,2298-2316).
cactggtccagacatcatt

SEQ ID NO: 131975 - DNA, 19 bp, Homo sapiens
  siRNA target sequence for ITGB1 (NM_002211.2,2330-2348).
gtgtggttgctggaattgt

SEQ ID NO: 131976 - DNA, 19 bp, Homo sapiens
  siRNA target sequence for ITGB1 (NM_002211.2,2368-2386).
ctgctgatatggaagcttt

SEQ ID NO: 131977 - DNA, 19 bp, Homo sapiens
  siRNA target sequence for ITGB1 (NM_002211.2,2370-2388).
gctgatatggaagctttta

SEQ ID NO: 131978 - DNA, 19 bp, Homo sapiens
  siRNA target sequence for ITGB1 (NM_002211.2,2409-2427).
ggagtttgctaaatttgaa

SEQ ID NO: 131979 - DNA, 19 bp, Homo sapiens
  siRNA target sequence for ITGB1 (NM_002211.2,2451-2469).
ggacacgggtgaaaatcct

SEQ ID NO: 131980 - DNA, 19 bp, Homo sapiens
  siRNA target sequence for ITGB1 (NM_002211.2,2452-2470).
gacacgggtgaaaatccta

SEQ ID NO: 131981 - DNA, 19 bp, Homo sapiens
  siRNA target sequence for ITGB1 (NM_002211.2,2454-2472).
cacgggtgaaaatcctatt

SEQ ID NO: 131982 - DNA, 19 bp, Homo sapiens
  siRNA target sequence for ITGB1 (NM_033666.1,2324-2342).
gggacacggtaagttacaa

SEQ ID NO: 131983 - DNA, 19 bp, Homo sapiens
  siRNA target sequence for ITGB1 (NM_033666.1,2325-2343).
ggacacggtaagttacaaa

SEQ ID NO: 131984 - DNA, 19 bp, Homo sapiens
  siRNA target sequence for ITGB1 (NM_033666.1,2326-2344).
gacacggtaagttacaaaa

SEQ ID NO: 131985 - DNA, 19 bp, Homo sapiens
  siRNA target sequence for ITGB1 (NM_033666.1,2328-2346).
cacggtaagttacaaaaca

SEQ ID NO: 131986 - DNA, 19 bp, Homo sapiens
  siRNA target sequence for ITGB1 (NM_033668.1,2330-2348).
cgcaagaaaatccgattta

SEQ ID NO: 131987 - DNA, 19 bp, Homo sapiens
  siRNA target sequence for ITGB1 (NM_033668.1,2349-2367).
caagagtcctattaataat

SEQ ID NO: 131988 - DNA, 19 bp, Homo sapiens
  siRNA target sequence for ITGB1BP2 (NM_012278.1,34-52).
ctctactctgtcgtaacaa

SEQ ID NO: 131989 - DNA, 19 bp, Homo sapiens
  siRNA target sequence for ITGB1BP2 (NM_012278.1,63-81).
cagcactttgaccctaata

SEQ ID NO: 131990 - DNA, 19 bp, Homo sapiens
  siRNA target sequence for ITGB1BP2 (NM_012278.1,66-84).
cactttgaccctaatacca

SEQ ID NO: 131991 - DNA, 19 bp, Homo sapiens
  siRNA target sequence for ITGB1BP2 (NM_012278.1,155-173).
ctgccgaaagcgaactgta

SEQ ID NO: 131992 - DNA, 19 bp, Homo sapiens
  siRNA target sequence for ITGB1BP2 (NM_012278.1,158-176).
ccgaaagcgaactgtagat

SEQ ID NO: 131993 - DNA, 19 bp, Homo sapiens
  siRNA target sequence for ITGB1BP2 (NM_012278.1,159-177).
cgaaagcgaactgtagatt

SEQ ID NO: 131994 - DNA, 19 bp, Homo sapiens
  siRNA target sequence for ITGB1BP2 (NM_012278.1,160-178).
gaaagcgaactgtagattt

SEQ ID NO: 131995 - DNA, 19 bp, Homo sapiens
  siRNA target sequence for ITGB1BP2 (NM_012278.1,164-182).
gcgaactgtagatttctct

SEQ ID NO: 131996 - DNA, 19 bp, Homo sapiens
  siRNA target sequence for ITGB1BP2 (NM_012278.1,294-312).
cctctgaatgtgattccaa

SEQ ID NO: 131997 - DNA, 19 bp, Homo sapiens
  siRNA target sequence for ITGB1BP2 (NM_012278.1,299-317).
gaatgtgattccaaagtca

SEQ ID NO: 131998 - DNA, 19 bp, Homo sapiens
  siRNA target sequence for ITGB1BP2 (NM_012278.1,362-380).
gaagctgctgccgctaaat

SEQ ID NO: 131999 - DNA, 19 bp, Homo sapiens
  siRNA target sequence for ITGB1BP2 (NM_012278.1,366-384).
ctgctgccgctaaatatat

SEQ ID NO: 132000 - DNA, 19 bp, Homo sapiens
  siRNA target sequence for ITGB1BP2 (NM_012278.1,476-494).
ccagaacccaggatgtgat

SEQ ID NO: 132001 - DNA, 19 bp, Homo sapiens
  siRNA target sequence for ITGB1BP2 (NM_012278.1,635-653).
gtgcagagtcggtagacat

SEQ ID NO: 132002 - DNA, 19 bp, Homo sapiens
  siRNA target sequence for ITGB1BP2 (NM_012278.1,675-693).
gcatcttgccgccatgatt

SEQ ID NO: 132003 - DNA, 19 bp, Homo sapiens
  siRNA target sequence for ITGB1BP2 (NM_012278.1,690-708).
gattggcaccagacagatt

SEQ ID NO: 132004 - DNA, 19 bp, Homo sapiens
  siRNA target sequence for ITGB1BP2 (NM_012278.1,694-712).
ggcaccagacagattcctt

SEQ ID NO: 132005 - DNA, 19 bp, Homo sapiens
  siRNA target sequence for ITGB1BP2 (NM_012278.1,695-713).
gcaccagacagattcctta

SEQ ID NO: 132006 - DNA, 19 bp, Homo sapiens
  siRNA target sequence for ITGB1BP2 (NM_012278.1,946-964).
ctgatgcactagctaagaa

SEQ ID NO: 132007 - DNA, 19 bp, Homo sapiens
  siRNA target sequence for ITGB1BP2 (NM_012278.1,970-988).
gggcaggggttgtgttaga

SEQ ID NO: 132008 - DNA, 19 bp, Homo sapiens
  siRNA target sequence for ITGB1BP2 (NM_012278.1,972-990).
gcaggggttgtgttagaga

SEQ ID NO: 132009 - DNA, 19 bp, Homo sapiens
  siRNA target sequence for ITGB1BP2 (NM_012278.1,973-991).
caggggttgtgttagagat

SEQ ID NO: 132010 - DNA, 19 bp, Homo sapiens
  siRNA target sequence for IVNS1ABP (NM_006469.2,562-580).
cccaatggatatttgatgt

SEQ ID NO: 132011 - DNA, 19 bp, Homo sapiens
  siRNA target sequence for IVNS1ABP (NM_006469.2,563-581).
ccaatggatatttgatgtt

SEQ ID NO: 132012 - DNA, 19 bp, Homo sapiens
  siRNA target sequence for IVNS1ABP (NM_006469.2,564-582).
caatggatatttgatgttt

SEQ ID NO: 132013 - DNA, 19 bp, Homo sapiens
  siRNA target sequence for IVNS1ABP (NM_006469.2,603-621).
gtcttctgttgccaaatta

SEQ ID NO: 132014 - DNA, 19 bp, Homo sapiens
  siRNA target sequence for IVNS1ABP (NM_006469.2,707-725).
cttgctgcagtccctattt

SEQ ID NO: 132015 - DNA, 19 bp, Homo sapiens
  siRNA target sequence for IVNS1ABP (NM_006469.2,710-728).
gctgcagtccctatttatt

SEQ ID NO: 132016 - DNA, 19 bp, Homo sapiens
  siRNA target sequence for IVNS1ABP (NM_006469.2,711-729).
ctgcagtccctatttattt

SEQ ID NO: 132017 - DNA, 19 bp, Homo sapiens
  siRNA target sequence for IVNS1ABP (NM_006469.2,730-748).
gaaatctttaatagtgata

SEQ ID NO: 132018 - DNA, 19 bp, Homo sapiens
  siRNA target sequence for IVNS1ABP (NM_006469.2,761-779).
gaatttctcacgttaaatt

SEQ ID NO: 132019 - DNA, 19 bp, Homo sapiens
  siRNA target sequence for IVNS1ABP (NM_006469.2,799-817).
gctgttgaagtcttgttga

SEQ ID NO: 132020 - DNA, 19 bp, Homo sapiens
  siRNA target sequence for IVNS1ABP (NM_006469.2,800-818).
ctgttgaagtcttgttgaa

SEQ ID NO: 132021 - DNA, 19 bp, Homo sapiens
  siRNA target sequence for IVNS1ABP (NM_006469.2,833-851).
ctcagttgaaagcagataa

SEQ ID NO: 132022 - DNA, 19 bp, Homo sapiens
  siRNA target sequence for IVNS1ABP (NM_006469.2,956-974).
gcatctcttaccgaaattt

SEQ ID NO: 132023 - DNA, 19 bp, Homo sapiens
  siRNA target sequence for IVNS1ABP (NM_006469.2,960-978).
ctcttaccgaaattttgca

SEQ ID NO: 132024 - DNA, 19 bp, Homo sapiens
  siRNA target sequence for IVNS1ABP (NM_006469.2,988-1006).
ggagactcccgtttgttga

SEQ ID NO: 132025 - DNA, 19 bp, Homo sapiens
  siRNA target sequence for IVNS1ABP (NM_006469.2,989-1007).
gagactcccgtttgttgaa

SEQ ID NO: 132026 - DNA, 19 bp, Homo sapiens
  siRNA target sequence for IVNS1ABP (NM_006469.2,991-1009).
gactcccgtttgttgaata

SEQ ID NO: 132027 - DNA, 19 bp, Homo sapiens
  siRNA target sequence for IVNS1ABP (NM_006469.2,995-1013).
cccgtttgttgaataaggt

SEQ ID NO: 132028 - DNA, 19 bp, Homo sapiens
  siRNA target sequence for IVNS1ABP (NM_006469.2,996-1014).
ccgtttgttgaataaggtt

SEQ ID NO: 132029 - DNA, 19 bp, Homo sapiens
  siRNA target sequence for IVNS1ABP (NM_006469.2,1029-1047).
ggagcatttgttacaaatt

SEQ ID NO: 132030 - DNA, 19 bp, Homo sapiens
  siRNA target sequence for IVNS1ABP (NM_006469.2,1079-1097).
ggctaaagttggaggtaat

SEQ ID NO: 132031 - DNA, 19 bp, Homo sapiens
  siRNA target sequence for IVNS1ABP (NM_006469.2,1089-1107).
ggaggtaatgcttgaagat

SEQ ID NO: 132032 - DNA, 19 bp, Homo sapiens
  siRNA target sequence for IVNS1ABP (NM_006469.2,1119-1137).
gcccagcaatggcaaatta

SEQ ID NO: 132033 - DNA, 19 bp, Homo sapiens
  siRNA target sequence for IVNS1ABP (NM_006469.2,1210-1228).
gaggttcaaaccttgtact

SEQ ID NO: 132034 - DNA, 19 bp, Homo sapiens
  siRNA target sequence for IVNS1ABP (NM_006469.2,1351-1369).
cagataagtagcagttcaa

SEQ ID NO: 132035 - DNA, 19 bp, Homo sapiens
  siRNA target sequence for IVNS1ABP (NM_006469.2,1408-1426).
cctaagcatgagtggaaaa

SEQ ID NO: 132036 - DNA, 19 bp, Homo sapiens
  siRNA target sequence for IVNS1ABP (NM_006469.2,1535-1553).
caacaagtactccaaaact

SEQ ID NO: 132037 - DNA, 19 bp, Homo sapiens
  siRNA target sequence for IVNS1ABP (NM_006469.2,1541-1559).
gtactccaaaactaagtaa

SEQ ID NO: 132038 - DNA, 19 bp, Homo sapiens
  siRNA target sequence for IVNS1ABP (NM_006469.2,1582-1600).
caagatgagctaatcgaaa

SEQ ID NO: 132039 - DNA, 19 bp, Homo sapiens
  siRNA target sequence for IVNS1ABP (NM_006469.2,1648-1666).
gagatgaatggcaaactca

SEQ ID NO: 132040 - DNA, 19 bp, Homo sapiens
  siRNA target sequence for IVNS1ABP (NM_006469.2,1702-1720).
cgaacagtcgaatgctata

SEQ ID NO: 132041 - DNA, 19 bp, Homo sapiens
  siRNA target sequence for IVNS1ABP (NM_006469.2,1715-1733).
gctataatccacatacaga

SEQ ID NO: 132042 - DNA, 19 bp, Homo sapiens
  siRNA target sequence for IVNS1ABP (NM_006469.2,1765-1783).
ccaagagcccgatttcaaa

SEQ ID NO: 132043 - DNA, 19 bp, Homo sapiens
  siRNA target sequence for IVNS1ABP (NM_006469.2,1845-1863).
gagttgtggagagatgtat

SEQ ID NO: 132044 - DNA, 19 bp, Homo sapiens
  siRNA target sequence for IVNS1ABP (NM_006469.2,1852-1870).
ggagagatgtatgattcaa

SEQ ID NO: 132045 - DNA, 19 bp, Homo sapiens
  siRNA target sequence for IVNS1ABP (NM_006469.2,1853-1871).
gagagatgtatgattcaaa

SEQ ID NO: 132046 - DNA, 19 bp, Homo sapiens
  siRNA target sequence for IVNS1ABP (NM_006469.2,1857-1875).
gatgtatgattcaaacata

SEQ ID NO: 132047 - DNA, 19 bp, Homo sapiens
  siRNA target sequence for IVNS1ABP (NM_006469.2,1883-1901).
ggattcctgttccagaatt

SEQ ID NO: 132048 - DNA, 19 bp, Homo sapiens
  siRNA target sequence for IVNS1ABP (NM_006469.2,1902-1920).
gagaactaaccgttgtaat

SEQ ID NO: 132049 - DNA, 19 bp, Homo sapiens
  siRNA target sequence for IVNS1ABP (NM_006469.2,1936-1954).
ctgaatggaaagttataca

SEQ ID NO: 132050 - DNA, 19 bp, Homo sapiens
  siRNA target sequence for IVNS1ABP (NM_006469.2,1967-1985).
ctgatccatatggtcaaaa

SEQ ID NO: 132051 - DNA, 19 bp, Homo sapiens
  siRNA target sequence for IVNS1ABP (NM_006469.2,1978-1996).
ggtcaaaaaggactgaaaa

SEQ ID NO: 132052 - DNA, 19 bp, Homo sapiens
  siRNA target sequence for IVNS1ABP (NM_006469.2,2005-2023).
gtatttgatcctgtaacaa

SEQ ID NO: 132053 - DNA, 19 bp, Homo sapiens
  siRNA target sequence for IVNS1ABP (NM_006469.2,2011-2029).
gatcctgtaacaaagttgt

SEQ ID NO: 132054 - DNA, 19 bp, Homo sapiens
  siRNA target sequence for IVNS1ABP (NM_006469.2,2033-2051).
caagctgtgcccctcttaa

SEQ ID NO: 132055 - DNA, 19 bp, Homo sapiens
  siRNA target sequence for IVNS1ABP (NM_006469.2,2076-2094).
ctgtgagcttggtggttat

SEQ ID NO: 132056 - DNA, 19 bp, Homo sapiens
  siRNA target sequence for IVNS1ABP (NM_006469.2,2078-2096).
gtgagcttggtggttattt

SEQ ID NO: 132057 - DNA, 19 bp, Homo sapiens
  siRNA target sequence for IVNS1ABP (NM_006469.2,2146-2164).
cgatacaatcctgaaaata

SEQ ID NO: 132058 - DNA, 19 bp, Homo sapiens
  siRNA target sequence for IVNS1ABP (NM_006469.2,2219-2237).
ctgttcttaatggaaaact

SEQ ID NO: 132059 - DNA, 19 bp, Homo sapiens
  siRNA target sequence for IVNS1ABP (NM_006469.2,2289-2307).
gtatgatccaactagaaat

SEQ ID NO: 132060 - DNA, 19 bp, Homo sapiens
  siRNA target sequence for IVNS1ABP (NM_006469.2,2392-2410).
ggattcgatggcaatgaat

SEQ ID NO: 132061 - DNA, 19 bp, Homo sapiens
  siRNA target sequence for IVNS1ABP (NM_006469.2,2393-2411).
gattcgatggcaatgaatt

SEQ ID NO: 132062 - DNA, 19 bp, Homo sapiens
  siRNA target sequence for IVNS1ABP (NM_006469.2,2415-2433).
gaatacggtggaagtctat

SEQ ID NO: 132063 - DNA, 19 bp, Homo sapiens
  siRNA target sequence for IVNS1ABP (NM_006469.2,2430-2448).
ctataaccttgagtcaaat

SEQ ID NO: 132064 - DNA, 19 bp, Homo sapiens
  siRNA target sequence for IVNS1ABP (NM_006469.2,2449-2467).
gaatggagcccctatacaa

SEQ ID NO: 132065 - DNA, 19 bp, Homo sapiens
  siRNA target sequence for IVNS1ABP (NM_006469.2,2454-2472).
gagcccctatacaaagatt

SEQ ID NO: 132066 - DNA, 19 bp, Homo sapiens
  siRNA target sequence for IVNS1ABP (NM_006469.2,2456-2474).
gcccctatacaaagatttt

SEQ ID NO: 132067 - DNA, 19 bp, Homo sapiens
  siRNA target sequence for IVNS1ABP (NM_006469.2,2459-2477).
cctatacaaagattttcca

SEQ ID NO: 132068 - DNA, 19 bp, Homo sapiens
  siRNA target sequence for KBTBD3 (NM_152433.2,169-187).
ggctatggataattcatat

SEQ ID NO: 132069 - DNA, 19 bp, Homo sapiens
  siRNA target sequence for KBTBD3 (NM_152433.2,200-218).
cgaagcacatgtaatggaa

SEQ ID NO: 132070 - DNA, 19 bp, Homo sapiens
  siRNA target sequence for KBTBD3 (NM_152433.2,201-219).
gaagcacatgtaatggaat

SEQ ID NO: 132071 - DNA, 19 bp, Homo sapiens
  siRNA target sequence for KBTBD3 (NM_152433.2,244-262).
ccttgtatcagaagatcat

SEQ ID NO: 132072 - DNA, 19 bp, Homo sapiens
  siRNA target sequence for KBTBD3 (NM_152433.2,274-292).
cttaagtgtactacagaat

SEQ ID NO: 132073 - DNA, 19 bp, Homo sapiens
  siRNA target sequence for KBTBD3 (NM_152433.2,428-446).
gatggaagtgttaccatta

SEQ ID NO: 132074 - DNA, 19 bp, Homo sapiens
  siRNA target sequence for KBTBD3 (NM_152433.2,431-449).
ggaagtgttaccattacta

SEQ ID NO: 132075 - DNA, 19 bp, Homo sapiens
  siRNA target sequence for KBTBD3 (NM_152433.2,435-453).
gtgttaccattactaattt

SEQ ID NO: 132076 - DNA, 19 bp, Homo sapiens
  siRNA target sequence for KBTBD3 (NM_152433.2,437-455).
gttaccattactaatttgt

SEQ ID NO: 132077 - DNA, 19 bp, Homo sapiens
  siRNA target sequence for KBTBD3 (NM_152433.2,454-472).
gtcctccaaggcagtaaaa

SEQ ID NO: 132078 - DNA, 19 bp, Homo sapiens
  siRNA target sequence for KBTBD3 (NM_152433.2,518-536).
gataatgtggaaatgttct

SEQ ID NO: 132079 - DNA, 19 bp, Homo sapiens
  siRNA target sequence for KBTBD3 (NM_152433.2,538-556).
ccagttgtcatcatttctt

SEQ ID NO: 132080 - DNA, 19 bp, Homo sapiens
  siRNA target sequence for KBTBD3 (NM_152433.2,611-629).
cttgtcaattgtttacagt

SEQ ID NO: 132081 - DNA, 19 bp, Homo sapiens
  siRNA target sequence for KBTBD3 (NM_152433.2,628-646).
gttattatctatatcagat

SEQ ID NO: 132082 - DNA, 19 bp, Homo sapiens
  siRNA target sequence for KBTBD3 (NM_152433.2,654-672).
gctccaccagtttgtttga

SEQ ID NO: 132083 - DNA, 19 bp, Homo sapiens
  siRNA target sequence for KBTBD3 (NM_152433.2,655-673).
ctccaccagtttgtttgat

SEQ ID NO: 132084 - DNA, 19 bp, Homo sapiens
  siRNA target sequence for KBTBD3 (NM_152433.2,657-675).
ccaccagtttgtttgatca

SEQ ID NO: 132085 - DNA, 19 bp, Homo sapiens
  siRNA target sequence for KBTBD3 (NM_152433.2,678-696).
cattacactttgtacaaca

SEQ ID NO: 132086 - DNA, 19 bp, Homo sapiens
  siRNA target sequence for KBTBD3 (NM_152433.2,817-835).
ccttagttggactaaacat

SEQ ID NO: 132087 - DNA, 19 bp, Homo sapiens
  siRNA target sequence for KBTBD3 (NM_152433.2,822-840).
gttggactaaacataactt

SEQ ID NO: 132088 - DNA, 19 bp, Homo sapiens
  siRNA target sequence for KBTBD3 (NM_152433.2,826-844).
gactaaacataacttagaa

SEQ ID NO: 132089 - DNA, 19 bp, Homo sapiens
  siRNA target sequence for KBTBD3 (NM_152433.2,885-903).
gattacatcagttatctga

SEQ ID NO: 132090 - DNA, 19 bp, Homo sapiens
  siRNA target sequence for KBTBD3 (NM_152433.2,935-953).
gagagtttactcaaaagca

SEQ ID NO: 132091 - DNA, 19 bp, Homo sapiens
  siRNA target sequence for KBTBD3 (NM_152433.2,951-969).
gcacaaactgttttgacat

SEQ ID NO: 132092 - DNA, 19 bp, Homo sapiens
  siRNA target sequence for KBTBD3 (NM_152433.2,954-972).
caaactgttttgacataat

SEQ ID NO: 132093 - DNA, 19 bp, Homo sapiens
  siRNA target sequence for KBTBD3 (NM_152433.2,973-991).
catggatgcaattaagtgt

SEQ ID NO: 132094 - DNA, 19 bp, Homo sapiens
  siRNA target sequence for KBTBD3 (NM_152433.2,1135-1153).
gcaatcacacctgattgat

SEQ ID NO: 132095 - DNA, 19 bp, Homo sapiens
  siRNA target sequence for KBTBD3 (NM_152433.2,1227-1245).
gaacggttcgactgcatat

SEQ ID NO: 132096 - DNA, 19 bp, Homo sapiens
  siRNA target sequence for KBTBD3 (NM_152433.2,1240-1258).
gcatattgccgagtcatat

SEQ ID NO: 132097 - DNA, 19 bp, Homo sapiens
  siRNA target sequence for KBTBD3 (NM_152433.2,1282-1300).
gtgctactgtccagtgaaa

SEQ ID NO: 132098 - DNA, 19 bp, Homo sapiens
  siRNA target sequence for KBTBD3 (NM_152433.2,1288-1306).
ctgtccagtgaaaaatgat

SEQ ID NO: 132099 - DNA, 19 bp, Homo sapiens
  siRNA target sequence for KBTBD3 (NM_152433.2,1315-1333).
ggtatcaactatgaaaaca

SEQ ID NO: 132100 - DNA, 19 bp, Homo sapiens
  siRNA target sequence for KBTBD3 (NM_152433.2,1355-1373).
gttatggctctcgatagat

SEQ ID NO: 132101 - DNA, 19 bp, Homo sapiens
  siRNA target sequence for KBTBD3 (NM_152433.2,1362-1380).
ctctcgatagattatttgt

SEQ ID NO: 132102 - DNA, 19 bp, Homo sapiens
  siRNA target sequence for KBTBD3 (NM_152433.2,1364-1382).
ctcgatagattatttgtca

SEQ ID NO: 132103 - DNA, 19 bp, Homo sapiens
  siRNA target sequence for KBTBD3 (NM_152433.2,1398-1416).
gaggatcccgggacattaa

SEQ ID NO: 132104 - DNA, 19 bp, Homo sapiens
  siRNA target sequence for KBTBD3 (NM_152433.2,1404-1422).
cccgggacattaaaagtct

SEQ ID NO: 132105 - DNA, 19 bp, Homo sapiens
  siRNA target sequence for KBTBD3 (NM_152433.2,1408-1426).
ggacattaaaagtctctta

SEQ ID NO: 132106 - DNA, 19 bp, Homo sapiens
  siRNA target sequence for KBTBD3 (NM_152433.2,1421-1439).
ctcttagatgttgaatctt

SEQ ID NO: 132107 - DNA, 19 bp, Homo sapiens
  siRNA target sequence for KBTBD3 (NM_152433.2,1446-1464).
ctctttccaaagaatggat

SEQ ID NO: 132108 - DNA, 19 bp, Homo sapiens
  siRNA target sequence for KBTBD3 (NM_152433.2,1448-1466).
ctttccaaagaatggatat

SEQ ID NO: 132109 - DNA, 19 bp, Homo sapiens
  siRNA target sequence for KBTBD3 (NM_152433.2,1538-1556).
ggatcagaggtagagatta

SEQ ID NO: 132110 - DNA, 19 bp, Homo sapiens
  siRNA target sequence for KBTBD3 (NM_152433.2,1670-1688).
gctgtaccagtaaactgta

SEQ ID NO: 132111 - DNA, 19 bp, Homo sapiens
  siRNA target sequence for KBTBD3 (NM_152433.2,1701-1719).
gtgacctttccacctataa

SEQ ID NO: 132112 - DNA, 19 bp, Homo sapiens
  siRNA target sequence for KBTBD3 (NM_152433.2,1706-1724).
ctttccacctataaggttt

SEQ ID NO: 132113 - DNA, 19 bp, Homo sapiens
  siRNA target sequence for KBTBD3 (NM_152433.2,1711-1729).
cacctataaggtttatagt

SEQ ID NO: 132114 - DNA, 19 bp, Homo sapiens
  siRNA target sequence for KBTBD3 (NM_152433.2,1774-1792).
gtgtgcaggctttaatgca

SEQ ID NO: 132115 - DNA, 19 bp, Homo sapiens
  siRNA target sequence for KBTBD3 (NM_152433.2,1783-1801).
ctttaatgcaggtgcaatt

SEQ ID NO: 132116 - DNA, 19 bp, Homo sapiens
  siRNA target sequence for KBTBD3 (NM_152433.2,1794-1812).
gtgcaattggaattgaaga

SEQ ID NO: 132117 - DNA, 19 bp, Homo sapiens
  siRNA target sequence for KBTBD3 (NM_152433.2,1835-1853).
gattatgcaccagatgaaa

SEQ ID NO: 132118 - DNA, 19 bp, Homo sapiens
  siRNA target sequence for KBTBD3 (NM_152433.2,1968-1986).
gagacccatggttttctaa

SEQ ID NO: 132119 - DNA, 19 bp, Homo sapiens
  siRNA target sequence for KBTBD4 (NM_016506.3,176-194).
gagcatccatggatgagaa

SEQ ID NO: 132120 - DNA, 19 bp, Homo sapiens
  siRNA target sequence for KBTBD4 (NM_016506.3,179-197).
catccatggatgagaacta

SEQ ID NO: 132121 - DNA, 19 bp, Homo sapiens
  siRNA target sequence for KBTBD4 (NM_016506.3,183-201).
catggatgagaactacttt

SEQ ID NO: 132122 - DNA, 19 bp, Homo sapiens
  siRNA target sequence for KBTBD4 (NM_016506.3,216-234).
caaagatcggtcacattca

SEQ ID NO: 132123 - DNA, 19 bp, Homo sapiens
  siRNA target sequence for KBTBD4 (NM_016506.3,243-261).
ggctcaaggcatcatgaaa

SEQ ID NO: 132124 - DNA, 19 bp, Homo sapiens
  siRNA target sequence for KBTBD4 (NM_016506.3,421-439).
gatgtcagcgagtctgttt

SEQ ID NO: 132125 - DNA, 19 bp, Homo sapiens
  siRNA target sequence for KBTBD4 (NM_016506.3,442-460).
cagctcctggttgattata

SEQ ID NO: 132126 - DNA, 19 bp, Homo sapiens
  siRNA target sequence for KBTBD4 (NM_016506.3,465-483).
ccatgggactgtgaaactt

SEQ ID NO: 132127 - DNA, 19 bp, Homo sapiens
  siRNA target sequence for KBTBD4 (NM_016506.3,492-510).
ggagttgcaggaaatttat

SEQ ID NO: 132128 - DNA, 19 bp, Homo sapiens
  siRNA target sequence for KBTBD4 (NM_016506.3,684-702).
gcagaatacagaggaattt

SEQ ID NO: 132129 - DNA, 19 bp, Homo sapiens
  siRNA target sequence for KBTBD4 (NM_016506.3,715-733).
caccgcttactcacagata

SEQ ID NO: 132130 - DNA, 19 bp, Homo sapiens
  siRNA target sequence for KBTBD4 (NM_016506.3,718-736).
cgcttactcacagatatca

SEQ ID NO: 132131 - DNA, 19 bp, Homo sapiens
  siRNA target sequence for KBTBD4 (NM_016506.3,719-737).
gcttactcacagatatcat

SEQ ID NO: 132132 - DNA, 19 bp, Homo sapiens
  siRNA target sequence for KBTBD4 (NM_016506.3,784-802).
gcctggatcaactttaata

SEQ ID NO: 132133 - DNA, 19 bp, Homo sapiens
  siRNA target sequence for KBTBD4 (NM_016506.3,785-803).
cctggatcaactttaataa

SEQ ID NO: 132134 - DNA, 19 bp, Homo sapiens
  siRNA target sequence for KBTBD4 (NM_016506.3,837-855).
gacaagcttgaaggaaatt

SEQ ID NO: 132135 - DNA, 19 bp, Homo sapiens
  siRNA target sequence for KBTBD4 (NM_016506.3,937-955).
gatgactccatcagtgtaa

SEQ ID NO: 132136 - DNA, 19 bp, Homo sapiens
  siRNA target sequence for KBTBD4 (NM_016506.3,952-970).
gtaagtggccaaaacagtt

SEQ ID NO: 132137 - DNA, 19 bp, Homo sapiens
  siRNA target sequence for KBTBD4 (NM_016506.3,999-1017).
gcatggtggagacttgtat

SEQ ID NO: 132138 - DNA, 19 bp, Homo sapiens
  siRNA target sequence for KBTBD4 (NM_016506.3,1134-1152).
cgggaaagatgccatatat

SEQ ID NO: 132139 - DNA, 19 bp, Homo sapiens
  siRNA target sequence for KBTBD4 (NM_016506.3,1135-1153).
gggaaagatgccatatatt

SEQ ID NO: 132140 - DNA, 19 bp, Homo sapiens
  siRNA target sequence for KBTBD4 (NM_016506.3,1185-1203).
ctccaacgcagtcatttat

SEQ ID NO: 132141 - DNA, 19 bp, Homo sapiens
  siRNA target sequence for KBTBD4 (NM_016506.3,1207-1225).
cgcgtaggtgataatgtgt

SEQ ID NO: 132142 - DNA, 19 bp, Homo sapiens
  siRNA target sequence for KBTBD4 (NM_016506.3,1279-1297).
ctcaacgggatcatctact

SEQ ID NO: 132143 - DNA, 19 bp, Homo sapiens
  siRNA target sequence for KBTBD4 (NM_016506.3,1284-1302).
cgggatcatctacttacta

SEQ ID NO: 132144 - DNA, 19 bp, Homo sapiens
  siRNA target sequence for KBTBD4 (NM_016506.3,1318-1336).
gatctggacttctttacca

SEQ ID NO: 132145 - DNA, 19 bp, Homo sapiens
  siRNA target sequence for KBTBD4 (NM_016506.3,1324-1342).
gacttctttaccaaacctt

SEQ ID NO: 132146 - DNA, 19 bp, Homo sapiens
  siRNA target sequence for KBTBD4 (NM_016506.3,1422-1440).
gcacgcagctgtgcataaa

SEQ ID NO: 132147 - DNA, 19 bp, Homo sapiens
  siRNA target sequence for KBTBD4 (NM_016506.3,1425-1443).
cgcagctgtgcataaagat

SEQ ID NO: 132148 - DNA, 19 bp, Homo sapiens
  siRNA target sequence for KBTBD4 (NM_016506.3,1566-1584).
ctgtaacgggagcatctat

SEQ ID NO: 132149 - DNA, 19 bp, Homo sapiens
  siRNA target sequence for KBTBD4 (NM_016506.3,1568-1586).
gtaacgggagcatctatgt

SEQ ID NO: 132150 - DNA, 19 bp, Homo sapiens
  siRNA target sequence for KBTBD4 (NM_016506.3,1585-1603).
gtcttccgggaccgatata

SEQ ID NO: 132151 - DNA, 19 bp, Homo sapiens
  siRNA target sequence for KBTBD4 (NM_016506.3,1587-1605).
cttccgggaccgatataaa

SEQ ID NO: 132152 - DNA, 19 bp, Homo sapiens
  siRNA target sequence for KBTBD5 (NM_152393.1,140-158).
caagacgggctcaaagaca

SEQ ID NO: 132153 - DNA, 19 bp, Homo sapiens
  siRNA target sequence for KBTBD5 (NM_152393.1,377-395).
gcgagcgtgcaggatttgt

SEQ ID NO: 132154 - DNA, 19 bp, Homo sapiens
  siRNA target sequence for KBTBD5 (NM_152393.1,378-396).
cgagcgtgcaggatttgtt

SEQ ID NO: 132155 - DNA, 19 bp, Homo sapiens
  siRNA target sequence for KBTBD5 (NM_152393.1,970-988).
ggaggccgaacgtatcctt

SEQ ID NO: 132156 - DNA, 19 bp, Homo sapiens
  siRNA target sequence for KBTBD5 (NM_152393.1,1031-1049).
caggatctcatcttcatga

SEQ ID NO: 132157 - DNA, 19 bp, Homo sapiens
  siRNA target sequence for KBTBD5 (NM_152393.1,1387-1405).
cgacaggctgtcattcaaa

SEQ ID NO: 132158 - DNA, 19 bp, Homo sapiens
  siRNA target sequence for KBTBD5 (NM_152393.1,1388-1406).
gacaggctgtcattcaaat

SEQ ID NO: 132159 - DNA, 19 bp, Homo sapiens
  siRNA target sequence for KBTBD6 (NM_152903.1,1631-1649).
gctccactgccccattctt

SEQ ID NO: 132160 - DNA, 19 bp, Homo sapiens
  siRNA target sequence for KBTBD6 (NM_152903.1,1656-1674).
cctttgacctaatggtaat

SEQ ID NO: 132161 - DNA, 19 bp, Homo sapiens
  siRNA target sequence for KBTBD6 (NM_152903.1,1670-1688).
gtaattcgagactatctct

SEQ ID NO: 132162 - DNA, 19 bp, Homo sapiens
  siRNA target sequence for KBTBD6 (NM_152903.1,1701-1719).
gtaagcgcatgttctgtta

SEQ ID NO: 132163 - DNA, 19 bp, Homo sapiens
  siRNA target sequence for KBTBD6 (NM_152903.1,1705-1723).
gcgcatgttctgttatgat

SEQ ID NO: 132164 - DNA, 19 bp, Homo sapiens
  siRNA target sequence for KBTBD6 (NM_152903.1,1755-1773).
ctctgaagcgcaatgactt

SEQ ID NO: 132165 - DNA, 19 bp, Homo sapiens
  siRNA target sequence for KBTBD6 (NM_152903.1,1892-1910).
gagaccaacaactacagaa

SEQ ID NO: 132166 - DNA, 19 bp, Homo sapiens
  siRNA target sequence for KBTBD6 (NM_152903.1,1894-1912).
gaccaacaactacagaatt

SEQ ID NO: 132167 - DNA, 19 bp, Homo sapiens
  siRNA target sequence for KBTBD6 (NM_152903.1,1896-1914).
ccaacaactacagaattat

SEQ ID NO: 132168 - DNA, 19 bp, Homo sapiens
  siRNA target sequence for KBTBD6 (NM_152903.1,1949-1967).
cgcaccccacagtggaaaa

SEQ ID NO: 132169 - DNA, 19 bp, Homo sapiens
  siRNA target sequence for KBTBD6 (NM_152903.1,1972-1990).
ccgggtgactgtgtatgaa

SEQ ID NO: 132170 - DNA, 19 bp, Homo sapiens
  siRNA target sequence for KBTBD6 (NM_152903.1,1973-1991).
cgggtgactgtgtatgaat

SEQ ID NO: 132171 - DNA, 19 bp, Homo sapiens
  siRNA target sequence for KBTBD6 (NM_152903.1,2002-2020).
gggagaccaatggattaat

SEQ ID NO: 132172 - DNA, 19 bp, Homo sapiens
  siRNA target sequence for KBTBD7 (NM_032138.3,1009-1027).
gagagtgagcggactgtat

SEQ ID NO: 132173 - DNA, 19 bp, Homo sapiens
  siRNA target sequence for KBTBD7 (NM_032138.3,1397-1415).
cgggggacatttacacaat

SEQ ID NO: 132174 - DNA, 19 bp, Homo sapiens
  siRNA target sequence for KBTBD7 (NM_032138.3,1727-1745).
ccttctattcctttgaact

SEQ ID NO: 132175 - DNA, 19 bp, Homo sapiens
  siRNA target sequence for KBTBD7 (NM_032138.3,1731-1749).
ctattcctttgaactcata

SEQ ID NO: 132176 - DNA, 19 bp, Homo sapiens
  siRNA target sequence for KBTBD7 (NM_032138.3,1750-1768).
gtggttcagaactatcttt

SEQ ID NO: 132177 - DNA, 19 bp, Homo sapiens
  siRNA target sequence for KBTBD7 (NM_032138.3,1752-1770).
ggttcagaactatctttat

SEQ ID NO: 132178 - DNA, 19 bp, Homo sapiens
  siRNA target sequence for KBTBD7 (NM_032138.3,1781-1799).
gtaagcgcatgctttgcta

SEQ ID NO: 132179 - DNA, 19 bp, Homo sapiens
  siRNA target sequence for KBTBD7 (NM_032138.3,1785-1803).
gcgcatgctttgctatgat

SEQ ID NO: 132180 - DNA, 19 bp, Homo sapiens
  siRNA target sequence for KBTBD7 (NM_032138.3,1827-1845).
ctgtgcttctcttaaacgt

SEQ ID NO: 132181 - DNA, 19 bp, Homo sapiens
  siRNA target sequence for KBTBD7 (NM_032138.3,1862-1880).
catgtgtcttcaatgatga

SEQ ID NO: 132182 - DNA, 19 bp, Homo sapiens
  siRNA target sequence for KBTBD7 (NM_032138.3,1936-1954).
gaatggaggcggattagta

SEQ ID NO: 132183 - DNA, 19 bp, Homo sapiens
  siRNA target sequence for KBTBD7 (NM_032138.3,1940-1958).
ggaggcggattagtaatat

SEQ ID NO: 132184 - DNA, 19 bp, Homo sapiens
  siRNA target sequence for KBTBD7 (NM_032138.3,1941-1959).
gaggcggattagtaatatt

SEQ ID NO: 132185 - DNA, 19 bp, Homo sapiens
  siRNA target sequence for KBTBD7 (NM_032138.3,1944-1962).
gcggattagtaatattcct

SEQ ID NO: 132186 - DNA, 19 bp, Homo sapiens
  siRNA target sequence for KBTBD7 (NM_032138.3,1945-1963).
cggattagtaatattcctt

SEQ ID NO: 132187 - DNA, 19 bp, Homo sapiens
  siRNA target sequence for KBTBD7 (NM_032138.3,1978-1996).
cacaactaccagattgtca

SEQ ID NO: 132188 - DNA, 19 bp, Homo sapiens
  siRNA target sequence for KBTBD7 (NM_032138.3,1980-1998).
caactaccagattgtcaat

SEQ ID NO: 132189 - DNA, 19 bp, Homo sapiens
  siRNA target sequence for KBTBD7 (NM_032138.3,1983-2001).
ctaccagattgtcaatcat

SEQ ID NO: 132190 - DNA, 19 bp, Homo sapiens
  siRNA target sequence for KBTBD7 (NM_032138.3,1993-2011).
gtcaatcatgaccaaaagt

SEQ ID NO: 132191 - DNA, 19 bp, Homo sapiens
  siRNA target sequence for KBTBD7 (NM_032138.3,2013-2031).
gcttctcatcacttctaca

SEQ ID NO: 132192 - DNA, 19 bp, Homo sapiens
  siRNA target sequence for KBTBD7 (NM_032138.3,2081-2099).
gggaagatcagtggattaa

SEQ ID NO: 132193 - DNA, 19 bp, Homo sapiens
  siRNA target sequence for KBTBD7 (NM_032138.3,2108-2126).
ccatgttaggccttttgca

SEQ ID NO: 132194 - DNA, 19 bp, Homo sapiens
  siRNA target sequence for KBTBD7 (NM_032138.3,2186-2204).
gtcagagttttattactga

SEQ ID NO: 132195 - DNA, 19 bp, Homo sapiens
  siRNA target sequence for KBTBD7 (NM_032138.3,2215-2233).
gcacggagtgagtctagta

SEQ ID NO: 132196 - DNA, 19 bp, Homo sapiens
  siRNA target sequence for KBTBD7 (NM_032138.3,2344-2362).
gatcagcagggttctttgt

SEQ ID NO: 132197 - DNA, 19 bp, Homo sapiens
  siRNA target sequence for KCNA1 (NM_000217.1,339-357).
ctccgaggagatcaagttt

SEQ ID NO: 132198 - DNA, 19 bp, Homo sapiens
  siRNA target sequence for KCNA1 (NM_000217.1,341-359).
ccgaggagatcaagtttta

SEQ ID NO: 132199 - DNA, 19 bp, Homo sapiens
  siRNA target sequence for KCNA1 (NM_000217.1,735-753).
caagacggacttcttcaaa

SEQ ID NO: 132200 - DNA, 19 bp, Homo sapiens
  siRNA target sequence for KCNA1 (NM_000217.1,882-900).
ccgcttggtaagggttttt

SEQ ID NO: 132201 - DNA, 19 bp, Homo sapiens
  siRNA target sequence for KCNA1 (NM_000217.1,883-901).
cgcttggtaagggttttta

SEQ ID NO: 132202 - DNA, 19 bp, Homo sapiens
  siRNA target sequence for KCNA1 (NM_000217.1,1070-1088).
ccagtatccccgatgcttt

SEQ ID NO: 132203 - DNA, 19 bp, Homo sapiens
  siRNA target sequence for KCNA1 (NM_000217.1,1131-1149).
catgtaccctgtgacaatt

SEQ ID NO: 132204 - DNA, 19 bp, Homo sapiens
  siRNA target sequence for KCNA1 (NM_000217.1,1134-1152).
gtaccctgtgacaattgga

SEQ ID NO: 132205 - DNA, 19 bp, Homo sapiens
  siRNA target sequence for KCNA1 (NM_000217.1,1182-1200).
cgctggtgtgctaacaatt

SEQ ID NO: 132206 - DNA, 19 bp, Homo sapiens
  siRNA target sequence for KCNA1 (NM_000217.1,1203-1221).
cctgcccgtacctgtcatt

SEQ ID NO: 132207 - DNA, 19 bp, Homo sapiens
  siRNA target sequence for KCNA1 (NM_000217.1,1287-1305).
cgtcagttcccctaactta

SEQ ID NO: 132208 - DNA, 19 bp, Homo sapiens
  siRNA target sequence for KCNA1 (NM_000217.1,1327-1345).
cgccgcagttcctctacta

SEQ ID NO: 132209 - DNA, 19 bp, Homo sapiens
  siRNA target sequence for KCNA1 (NM_000217.1,1328-1346).
gccgcagttcctctactat

SEQ ID NO: 132210 - DNA, 19 bp, Homo sapiens
  siRNA target sequence for KCNA1 (NM_000217.1,1377-1395).
ggatatgaataatagcata

SEQ ID NO: 132211 - DNA, 19 bp, Homo sapiens
  siRNA target sequence for KCNA1 (NM_000217.1,1391-1409).
gcatagcccattatagaca

SEQ ID NO: 132212 - DNA, 19 bp, Homo sapiens
  siRNA target sequence for KCNA1 (NM_000217.1,1399-1417).
cattatagacaggtcaata

SEQ ID NO: 132213 - DNA, 19 bp, Homo sapiens
  siRNA target sequence for KCNA10 (NM_005549.2,416-434).
gaggttgcgctggtcaatt

SEQ ID NO: 132214 - DNA, 19 bp, Homo sapiens
  siRNA target sequence for KCNA10 (NM_005549.2,418-436).
ggttgcgctggtcaatttt

SEQ ID NO: 132215 - DNA, 19 bp, Homo sapiens
  siRNA target sequence for KCNA10 (NM_005549.2,580-598).
caagcttccgggagactat

SEQ ID NO: 132216 - DNA, 19 bp, Homo sapiens
  siRNA target sequence for KCNA10 (NM_005549.2,619-637).
gccagtggtcctaaatgaa

SEQ ID NO: 132217 - DNA, 19 bp, Homo sapiens
  siRNA target sequence for KCNA10 (NM_005549.2,639-657).
gaaaccagcgggtgatcat

SEQ ID NO: 132218 - DNA, 19 bp, Homo sapiens
  siRNA target sequence for KCNA10 (NM_005549.2,755-773).
gactccatgagaaatgagt

SEQ ID NO: 132219 - DNA, 19 bp, Homo sapiens
  siRNA target sequence for KCNA10 (NM_005549.2,757-775).
ctccatgagaaatgagtat

SEQ ID NO: 132220 - DNA, 19 bp, Homo sapiens
  siRNA target sequence for KCNA10 (NM_005549.2,796-814).
cagttttgatggaatccta

SEQ ID NO: 132221 - DNA, 19 bp, Homo sapiens
  siRNA target sequence for KCNA10 (NM_005549.2,798-816).
gttttgatggaatcctata

SEQ ID NO: 132222 - DNA, 19 bp, Homo sapiens
  siRNA target sequence for KCNA10 (NM_005549.2,803-821).
gatggaatcctatattatt

SEQ ID NO: 132223 - DNA, 19 bp, Homo sapiens
  siRNA target sequence for KCNA10 (NM_005549.2,823-841).
ccaatctggtgggaaaatt

SEQ ID NO: 132224 - DNA, 19 bp, Homo sapiens
  siRNA target sequence for KCNA10 (NM_005549.2,851-869).
gccaatgttcccattgata

SEQ ID NO: 132225 - DNA, 19 bp, Homo sapiens
  siRNA target sequence for KCNA10 (NM_005549.2,1113-1131).
gggaggatagggagctaaa

SEQ ID NO: 132226 - DNA, 19 bp, Homo sapiens
  siRNA target sequence for KCNA10 (NM_005549.2,1140-1158).
gagaccccaatctcaacat

SEQ ID NO: 132227 - DNA, 19 bp, Homo sapiens
  siRNA target sequence for KCNA10 (NM_005549.2,1374-1392).
cgagtgcccaacagaacat

SEQ ID NO: 132228 - DNA, 19 bp, Homo sapiens
  siRNA target sequence for KCNA2 (NM_004974.2,624-642).
ggtttgagacccagctaaa

SEQ ID NO: 132229 - DNA, 19 bp, Homo sapiens
  siRNA target sequence for KCNA2 (NM_004974.2,704-722).
gaccccctccgaaatgagt

SEQ ID NO: 132230 - DNA, 19 bp, Homo sapiens
  siRNA target sequence for KCNA2 (NM_004974.2,714-732).
gaaatgagtactttttcga

SEQ ID NO: 132231 - DNA, 19 bp, Homo sapiens
  siRNA target sequence for KCNA2 (NM_004974.2,806-824).
gtgcccttagatatattct

SEQ ID NO: 132232 - DNA, 19 bp, Homo sapiens
  siRNA target sequence for KCNA2 (NM_004974.2,808-826).
gcccttagatatattctct

SEQ ID NO: 132233 - DNA, 19 bp, Homo sapiens
  siRNA target sequence for KCNA2 (NM_004974.2,825-843).
ctgaagaaattcggtttta

SEQ ID NO: 132234 - DNA, 19 bp, Homo sapiens
  siRNA target sequence for KCNA2 (NM_004974.2,977-995).
cctgccaggattatagcta

SEQ ID NO: 132235 - DNA, 19 bp, Homo sapiens
  siRNA target sequence for KCNA2 (NM_004974.2,1009-1027).
ggtgattctgatctcaatt

SEQ ID NO: 132236 - DNA, 19 bp, Homo sapiens
  siRNA target sequence for KCNA2 (NM_004974.2,1094-1112).
gtgaccttccacacctatt

SEQ ID NO: 132237 - DNA, 19 bp, Homo sapiens
  siRNA target sequence for KCNA2 (NM_004974.2,1098-1116).
ccttccacacctattccaa

SEQ ID NO: 132238 - DNA, 19 bp, Homo sapiens
  siRNA target sequence for KCNA2 (NM_004974.2,1376-1394).
cgtgtcatccggttggtaa

SEQ ID NO: 132239 - DNA, 19 bp, Homo sapiens
  siRNA target sequence for KCNA2 (NM_004974.2,1384-1402).
ccggttggtaagagtcttt

SEQ ID NO: 132240 - DNA, 19 bp, Homo sapiens
  siRNA target sequence for KCNA2 (NM_004974.2,1385-1403).
cggttggtaagagtcttta

SEQ ID NO: 132241 - DNA, 19 bp, Homo sapiens
  siRNA target sequence for KCNA2 (NM_004974.2,1390-1408).
ggtaagagtctttaggatt

SEQ ID NO: 132242 - DNA, 19 bp, Homo sapiens
  siRNA target sequence for KCNA2 (NM_004974.2,1391-1409).
gtaagagtctttaggattt

SEQ ID NO: 132243 - DNA, 19 bp, Homo sapiens
  siRNA target sequence for KCNA2 (NM_004974.2,1428-1446).
ccaaaggtctccagattct

SEQ ID NO: 132244 - DNA, 19 bp, Homo sapiens
  siRNA target sequence for KCNA2 (NM_004974.2,1480-1498).
gggcctcctgatattcttt

SEQ ID NO: 132245 - DNA, 19 bp, Homo sapiens
  siRNA target sequence for KCNA2 (NM_004974.2,1633-1651).
catggttccgactaccatt

SEQ ID NO: 132246 - DNA, 19 bp, Homo sapiens
  siRNA target sequence for KCNA2 (NM_004974.2,1644-1662).
ctaccattgggggaaagat

SEQ ID NO: 132247 - DNA, 19 bp, Homo sapiens
  siRNA target sequence for KCNA2 (NM_004974.2,1679-1697).
gcgattgcaggtgtgttaa

SEQ ID NO: 132248 - DNA, 19 bp, Homo sapiens
  siRNA target sequence for KCNA2 (NM_004974.2,1766-1784).
gaggaacaggcccaatact

SEQ ID NO: 132249 - DNA, 19 bp, Homo sapiens
  siRNA target sequence for KCNA2 (NM_004974.2,1823-1841).
gacctaaagaaaagtagaa

SEQ ID NO: 132250 - DNA, 19 bp, Homo sapiens
  siRNA target sequence for KCNA2 (NM_004974.2,1846-1864).
ctctaccattagtaagtct

SEQ ID NO: 132251 - DNA, 19 bp, Homo sapiens
  siRNA target sequence for KCNA2 (NM_004974.2,1882-1900).
ggagggtgtaaataacagt

SEQ ID NO: 132252 - DNA, 19 bp, Homo sapiens
  siRNA target sequence for KCNA2 (NM_004974.2,1939-1957).
ctgtaccttggctaacaca

SEQ ID NO: 132253 - DNA, 19 bp, Homo sapiens
  siRNA target sequence for KCNA2 (NM_004974.2,1941-1959).
gtaccttggctaacacaaa

SEQ ID NO: 132254 - DNA, 19 bp, Homo sapiens
  siRNA target sequence for KCNA2 (NM_004974.2,1950-1968).
ctaacacaaactatgtgaa

SEQ ID NO: 132255 - DNA, 19 bp, Homo sapiens
  siRNA target sequence for KCNA3 (NM_002232.2,649-667).
cgctccgcaacgagtactt

SEQ ID NO: 132256 - DNA, 19 bp, Homo sapiens
  siRNA target sequence for KCNA3 (NM_002232.2,1027-1045).
cgacgtcgcaggactcatt

SEQ ID NO: 132257 - DNA, 19 bp, Homo sapiens
  siRNA target sequence for KCNA3 (NM_002232.2,1031-1049).
gtcgcaggactcattcgaa

SEQ ID NO: 132258 - DNA, 19 bp, Homo sapiens
  siRNA target sequence for KCNA3 (NM_002232.2,1166-1184).
cttcgcttgtcctagcaaa

SEQ ID NO: 132259 - DNA, 19 bp, Homo sapiens
  siRNA target sequence for KCNA3 (NM_002232.2,1186-1204).
ccaccttctcgcgaaacat

SEQ ID NO: 132260 - DNA, 19 bp, Homo sapiens
  siRNA target sequence for KCNA3 (NM_002232.2,1189-1207).
ccttctcgcgaaacatcat

SEQ ID NO: 132261 - DNA, 19 bp, Homo sapiens
  siRNA target sequence for KCNA3 (NM_002232.2,1770-1788).
cgaaaagcaaggagtaact

SEQ ID NO: 132262 - DNA, 19 bp, Homo sapiens
  siRNA target sequence for KCNA3 (NM_002232.2,1783-1801).
gtaactcgactctgagtaa

SEQ ID NO: 132263 - DNA, 19 bp, Homo sapiens
  siRNA target sequence for KCNA3 (NM_002232.2,1794-1812).
ctgagtaagtcggagtata

SEQ ID NO: 132264 - DNA, 19 bp, Homo sapiens
  siRNA target sequence for KCNA3 (NM_002232.2,1798-1816).
gtaagtcggagtatatggt

SEQ ID NO: 132265 - DNA, 19 bp, Homo sapiens
  siRNA target sequence for KCNA3 (NM_002232.2,1824-1842).
gaggggggtatgaaccata

SEQ ID NO: 132266 - DNA, 19 bp, Homo sapiens
  siRNA target sequence for KCNA3 (NM_002232.2,1889-1907).
ctgcaccacgaacaataat

SEQ ID NO: 132267 - DNA, 19 bp, Homo sapiens
  siRNA target sequence for KCNA4 (NM_002233.2,1200-1218).
catgccttatggttatgct

SEQ ID NO: 132268 - DNA, 19 bp, Homo sapiens
  siRNA target sequence for KCNA4 (NM_002233.2,1412-1430).
gacagcggtctgagaagaa

SEQ ID NO: 132269 - DNA, 19 bp, Homo sapiens
  siRNA target sequence for KCNA4 (NM_002233.2,1563-1581).
gggaaggttttactatagt

SEQ ID NO: 132270 - DNA, 19 bp, Homo sapiens
  siRNA target sequence for KCNA4 (NM_002233.2,1676-1694).
gtgaacgtgtggtgataaa

SEQ ID NO: 132271 - DNA, 19 bp, Homo sapiens
  siRNA target sequence for KCNA4 (NM_002233.2,1708-1726).
cgctttgagacccaaatga

SEQ ID NO: 132272 - DNA, 19 bp, Homo sapiens
  siRNA target sequence for KCNA4 (NM_002233.2,1789-1807).
gaccctttgcgcaatgagt

SEQ ID NO: 132273 - DNA, 19 bp, Homo sapiens
  siRNA target sequence for KCNA4 (NM_002233.2,1791-1809).
ccctttgcgcaatgagtat

SEQ ID NO: 132274 - DNA, 19 bp, Homo sapiens
  siRNA target sequence for KCNA4 (NM_002233.2,1793-1811).
ctttgcgcaatgagtattt

SEQ ID NO: 132275 - DNA, 19 bp, Homo sapiens
  siRNA target sequence for KCNA4 (NM_002233.2,1872-1890).
cctgaagaggccagtcaat

SEQ ID NO: 132276 - DNA, 19 bp, Homo sapiens
  siRNA target sequence for KCNA4 (NM_002233.2,1915-1933).
gaggtgaagttctatcagt

SEQ ID NO: 132277 - DNA, 19 bp, Homo sapiens
  siRNA target sequence for KCNA4 (NM_002233.2,2002-2020).
ctccccgagaatgaattta

SEQ ID NO: 132278 - DNA, 19 bp, Homo sapiens
  siRNA target sequence for KCNA4 (NM_002233.2,2090-2108).
ccgtcctggtcatcttaat

SEQ ID NO: 132279 - DNA, 19 bp, Homo sapiens
  siRNA target sequence for KCNA4 (NM_002233.2,2199-2217).
gttgttgaatgatacttca

SEQ ID NO: 132280 - DNA, 19 bp, Homo sapiens
  siRNA target sequence for KCNA4 (NM_002233.2,2311-2329).
gtggttcgctgctttgctt

SEQ ID NO: 132281 - DNA, 19 bp, Homo sapiens
  siRNA target sequence for KCNA4 (NM_002233.2,2579-2597).
gggaactgggccttctgat

SEQ ID NO: 132282 - DNA, 19 bp, Homo sapiens
  siRNA target sequence for KCNA4 (NM_002233.2,2785-2803).
gccattgcgggtgtcttaa

SEQ ID NO: 132283 - DNA, 19 bp, Homo sapiens
  siRNA target sequence for KCNA4 (NM_002233.2,2795-2813).
gtgtcttaaccattgcttt

SEQ ID NO: 132284 - DNA, 19 bp, Homo sapiens
  siRNA target sequence for KCNA4 (NM_002233.2,2821-2839).
ccagtgattgtctctaact

SEQ ID NO: 132285 - DNA, 19 bp, Homo sapiens
  siRNA target sequence for KCNA4 (NM_002233.2,2822-2840).
cagtgattgtctctaactt

SEQ ID NO: 132286 - DNA, 19 bp, Homo sapiens
  siRNA target sequence for KCNA4 (NM_002233.2,2830-2848).
gtctctaactttaactatt

SEQ ID NO: 132287 - DNA, 19 bp, Homo sapiens
  siRNA target sequence for KCNA4 (NM_002233.2,3067-3085).
gataaaaacaactgttcta

SEQ ID NO: 132288 - DNA, 19 bp, Homo sapiens
  siRNA target sequence for KCNA5 (NM_002234.2,587-605).
cagcgcgtccacatcaaca

SEQ ID NO: 132289 - DNA, 19 bp, Homo sapiens
  siRNA target sequence for KCNA5 (NM_002234.2,590-608).
cgcgtccacatcaacatct

SEQ ID NO: 132290 - DNA, 19 bp, Homo sapiens
  siRNA target sequence for KCNA5 (NM_002234.2,1280-1298).
gggttctcccggaacatca

SEQ ID NO: 132291 - DNA, 19 bp, Homo sapiens
  siRNA target sequence for KCNA6 (NM_002235.2,990-1008).
cggctggtgatcaatatct

SEQ ID NO: 132292 - DNA, 19 bp, Homo sapiens
  siRNA target sequence for KCNA6 (NM_002235.2,1014-1032).
ctgcgctttgagacacaat

SEQ ID NO: 132293 - DNA, 19 bp, Homo sapiens
  siRNA target sequence for KCNA6 (NM_002235.2,1548-1566).
gaagacgattcctacacat

SEQ ID NO: 132294 - DNA, 19 bp, Homo sapiens
  siRNA target sequence for KCNA6 (NM_002235.2,1553-1571).
cgattcctacacatttcat

SEQ ID NO: 132295 - DNA, 19 bp, Homo sapiens
  siRNA target sequence for KCNA6 (NM_002235.2,2066-2084).
cgatgacgattcgcttttt

SEQ ID NO: 132296 - DNA, 19 bp, Homo sapiens
  siRNA target sequence for KCNA6 (NM_002235.2,2122-2140).
caatgaccacggtaggtta

SEQ ID NO: 132297 - DNA, 19 bp, Homo sapiens
  siRNA target sequence for KCNA6 (NM_002235.2,2418-2436).
cgggcctatgcagagaaaa

SEQ ID NO: 132298 - DNA, 19 bp, Homo sapiens
  siRNA target sequence for KCNA7 (NM_031886.2,992-1010).
ggagacgctgtgtatttgt

SEQ ID NO: 132299 - DNA, 19 bp, Homo sapiens
  siRNA target sequence for KCNA7 (NM_031886.2,993-1011).
gagacgctgtgtatttgtt

SEQ ID NO: 132300 - DNA, 19 bp, Homo sapiens
  siRNA target sequence for KCNA7 (NM_031886.2,1048-1066).
gtccaagcaaggctatctt

SEQ ID NO: 132301 - DNA, 19 bp, Homo sapiens
  siRNA target sequence for KCNA7 (NM_031886.2,1050-1068).
ccaagcaaggctatcttct

SEQ ID NO: 132302 - DNA, 19 bp, Homo sapiens
  siRNA target sequence for KCNA7 (NM_031886.2,1051-1069).
caagcaaggctatcttctt

SEQ ID NO: 132303 - DNA, 19 bp, Homo sapiens
  siRNA target sequence for KCNA7 (NM_031886.2,1054-1072).
gcaaggctatcttcttcaa

SEQ ID NO: 132304 - DNA, 19 bp, Homo sapiens
  siRNA target sequence for KCNA7 (NM_031886.2,1077-1095).
gtgatgaacctcatcgatt

SEQ ID NO: 132305 - DNA, 19 bp, Homo sapiens
  siRNA target sequence for KCNA7 (NM_031886.2,1240-1258).
caaagggcctgcaaatctt

SEQ ID NO: 132306 - DNA, 19 bp, Homo sapiens
  siRNA target sequence for KCNA7 (NM_031886.2,1320-1338).
ggtgtggtcctcttttcca

SEQ ID NO: 132307 - DNA, 19 bp, Homo sapiens
  siRNA target sequence for KCNA7 (NM_031886.2,1365-1383).
cgggtggactcccatttca

SEQ ID NO: 132308 - DNA, 19 bp, Homo sapiens
  siRNA target sequence for KCNA7 (NM_031886.2,1368-1386).
gtggactcccatttcacta

SEQ ID NO: 132309 - DNA, 19 bp, Homo sapiens
  siRNA target sequence for KCNA7 (NM_031886.2,1457-1475).
cactgtgggtggcaagata

SEQ ID NO: 132310 - DNA, 19 bp, Homo sapiens
  siRNA target sequence for KCNA7 (NM_031886.2,1459-1477).
ctgtgggtggcaagatagt

SEQ ID NO: 132311 - DNA, 19 bp, Homo sapiens
  siRNA target sequence for KCNB1 (NM_004975.2,466-484).
ctgggcgactgcacatgat

SEQ ID NO: 132312 - DNA, 19 bp, Homo sapiens
  siRNA target sequence for KCNB1 (NM_004975.2,569-587).
ccgctaccaccagaagaaa

SEQ ID NO: 132313 - DNA, 19 bp, Homo sapiens
  siRNA target sequence for KCNB1 (NM_004975.2,639-657).
gaaggcgaggagttcgata

SEQ ID NO: 132314 - DNA, 19 bp, Homo sapiens
  siRNA target sequence for KCNB1 (NM_004975.2,727-745).
ccaagatccttgccataat

SEQ ID NO: 132315 - DNA, 19 bp, Homo sapiens
  siRNA target sequence for KCNB1 (NM_004975.2,728-746).
caagatccttgccataatt

SEQ ID NO: 132316 - DNA, 19 bp, Homo sapiens
  siRNA target sequence for KCNB1 (NM_004975.2,738-756).
gccataatttccatcatgt

SEQ ID NO: 132317 - DNA, 19 bp, Homo sapiens
  siRNA target sequence for KCNB1 (NM_004975.2,945-963).
ccactcaatgccattgact

SEQ ID NO: 132318 - DNA, 19 bp, Homo sapiens
  siRNA target sequence for KCNB1 (NM_004975.2,946-964).
cactcaatgccattgactt

SEQ ID NO: 132319 - DNA, 19 bp, Homo sapiens
  siRNA target sequence for KCNB1 (NM_004975.2,968-986).
ggccattctgccatactat

SEQ ID NO: 132320 - DNA, 19 bp, Homo sapiens
  siRNA target sequence for KCNB1 (NM_004975.2,970-988).
ccattctgccatactatgt

SEQ ID NO: 132321 - DNA, 19 bp, Homo sapiens
  siRNA target sequence for KCNB1 (NM_004975.2,1071-1089).
cgaattctccgcatcctta

SEQ ID NO: 132322 - DNA, 19 bp, Homo sapiens
  siRNA target sequence for KCNB1 (NM_004975.2,1137-1155).
cggaggagctacaatgagt

SEQ ID NO: 132323 - DNA, 19 bp, Homo sapiens
  siRNA target sequence for KCNB1 (NM_004975.2,1138-1156).
ggaggagctacaatgagtt

SEQ ID NO: 132324 - DNA, 19 bp, Homo sapiens
  siRNA target sequence for KCNB1 (NM_004975.2,1180-1198).
ccatgggcattatgatctt

SEQ ID NO: 132325 - DNA, 19 bp, Homo sapiens
  siRNA target sequence for KCNB1 (NM_004975.2,1232-1250).
ggacgacaccaagttcaaa

SEQ ID NO: 132326 - DNA, 19 bp, Homo sapiens
  siRNA target sequence for KCNB1 (NM_004975.2,1233-1251).
gacgacaccaagttcaaaa

SEQ ID NO: 132327 - DNA, 19 bp, Homo sapiens
  siRNA target sequence for KCNB1 (NM_004975.2,1392-1410).
cccatcatcgtcaataact

SEQ ID NO: 132328 - DNA, 19 bp, Homo sapiens
  siRNA target sequence for KCNB1 (NM_004975.2,1528-1546).
cccggagcattgagatgat

SEQ ID NO: 132329 - DNA, 19 bp, Homo sapiens
  siRNA target sequence for KCNB1 (NM_004975.2,1653-1671).
gaaaccagctcaagtaagt

SEQ ID NO: 132330 - DNA, 19 bp, Homo sapiens
  siRNA target sequence for KCNB1 (NM_004975.2,1888-1906).
gcacagaaggggtcattga

SEQ ID NO: 132331 - DNA, 19 bp, Homo sapiens
  siRNA target sequence for KCNB1 (NM_004975.2,1905-1923).
gacatgcgaagtatgtcaa

SEQ ID NO: 132332 - DNA, 19 bp, Homo sapiens
  siRNA target sequence for KCNB1 (NM_004975.2,1910-1928).
gcgaagtatgtcaagcatt

SEQ ID NO: 132333 - DNA, 19 bp, Homo sapiens
  siRNA target sequence for KCNB1 (NM_004975.2,1959-1977).
cctgaggccaccagattct

SEQ ID NO: 132334 - DNA, 19 bp, Homo sapiens
  siRNA target sequence for KCNB1 (NM_004975.2,2104-2122).
gccagcactctagtttctt

SEQ ID NO: 132335 - DNA, 19 bp, Homo sapiens
  siRNA target sequence for KCNB1 (NM_004975.2,2140-2158).
gttccatgaaaactaacaa

SEQ ID NO: 132336 - DNA, 19 bp, Homo sapiens
  siRNA target sequence for KCNB1 (NM_004975.2,2169-2187).
ctccgagcacttaaagtca

SEQ ID NO: 132337 - DNA, 19 bp, Homo sapiens
  siRNA target sequence for KCNB1 (NM_004975.2,2389-2407).
cagcaatagcgttcaactt

SEQ ID NO: 132338 - DNA, 19 bp, Homo sapiens
  siRNA target sequence for KCNB1 (NM_004975.2,2392-2410).
caatagcgttcaactttga

SEQ ID NO: 132339 - DNA, 19 bp, Homo sapiens
  siRNA target sequence for KCNB1 (NM_004975.2,2413-2431).
cgggtgtccaccagtacat

SEQ ID NO: 132340 - DNA, 19 bp, Homo sapiens
  siRNA target sequence for KCNB1 (NM_004975.2,2414-2432).
gggtgtccaccagtacatt

SEQ ID NO: 132341 - DNA, 19 bp, Homo sapiens
  siRNA target sequence for KCNB1 (NM_004975.2,2416-2434).
gtgtccaccagtacattga

SEQ ID NO: 132342 - DNA, 19 bp, Homo sapiens
  siRNA target sequence for KCNB1 (NM_004975.2,2530-2548).
ggacaagatcggagaaaaa

SEQ ID NO: 132343 - DNA, 19 bp, Homo sapiens
  siRNA target sequence for KCNB1 (NM_004975.2,2533-2551).
caagatcggagaaaaacca

SEQ ID NO: 132344 - DNA, 19 bp, Homo sapiens
  siRNA target sequence for KCNB1 (NM_004975.2,2539-2557).
cggagaaaaaccactttga

SEQ ID NO: 132345 - DNA, 19 bp, Homo sapiens
  siRNA target sequence for KCNB1 (NM_004975.2,2573-2591).
cacctcccctaagttctta

SEQ ID NO: 132346 - DNA, 19 bp, Homo sapiens
  siRNA target sequence for KCNB1 (NM_004975.2,2609-2627).
ctccacagaagcattgact

SEQ ID NO: 132347 - DNA, 19 bp, Homo sapiens
  siRNA target sequence for KCNB2 (NM_004770.2,664-682).
gacattatccggagcaaaa

SEQ ID NO: 132348 - DNA, 19 bp, Homo sapiens
  siRNA target sequence for KCNB2 (NM_004770.2,666-684).
cattatccggagcaaaaca

SEQ ID NO: 132349 - DNA, 19 bp, Homo sapiens
  siRNA target sequence for KCNB2 (NM_004770.2,683-701).
catgctccaggagagttaa

SEQ ID NO: 132350 - DNA, 19 bp, Homo sapiens
  siRNA target sequence for KCNB2 (NM_004770.2,818-836).
gcgacgactataatctgaa

SEQ ID NO: 132351 - DNA, 19 bp, Homo sapiens
  siRNA target sequence for KCNB2 (NM_004770.2,832-850).
ctgaacgagaacgagtatt

SEQ ID NO: 132352 - DNA, 19 bp, Homo sapiens
  siRNA target sequence for KCNB2 (NM_004770.2,899-917).
ggaccgggaaactccatat

SEQ ID NO: 132353 - DNA, 19 bp, Homo sapiens
  siRNA target sequence for KCNB2 (NM_004770.2,902-920).
ccgggaaactccatatgat

SEQ ID NO: 132354 - DNA, 19 bp, Homo sapiens
  siRNA target sequence for KCNB2 (NM_004770.2,941-959).
cgtttggccaagaacttga

SEQ ID NO: 132355 - DNA, 19 bp, Homo sapiens
  siRNA target sequence for KCNB2 (NM_004770.2,946-964).
ggccaagaacttgattact

SEQ ID NO: 132356 - DNA, 19 bp, Homo sapiens
  siRNA target sequence for KCNB2 (NM_004770.2,965-983).
gggggattgatgagatcta

SEQ ID NO: 132357 - DNA, 19 bp, Homo sapiens
  siRNA target sequence for KCNB2 (NM_004770.2,967-985).
gggattgatgagatctact

SEQ ID NO: 132358 - DNA, 19 bp, Homo sapiens
  siRNA target sequence for KCNB2 (NM_004770.2,968-986).
ggattgatgagatctactt

SEQ ID NO: 132359 - DNA, 19 bp, Homo sapiens
  siRNA target sequence for KCNB2 (NM_004770.2,996-1014).
ctgccaggccagatatcat

SEQ ID NO: 132360 - DNA, 19 bp, Homo sapiens
  siRNA target sequence for KCNB2 (NM_004770.2,999-1017).
ccaggccagatatcatcaa

SEQ ID NO: 132361 - DNA, 19 bp, Homo sapiens
  siRNA target sequence for KCNB2 (NM_004770.2,1000-1018).
caggccagatatcatcaaa

SEQ ID NO: 132362 - DNA, 19 bp, Homo sapiens
  siRNA target sequence for KCNB2 (NM_004770.2,1071-1089).
gcgagaaggagaagagttt

SEQ ID NO: 132363 - DNA, 19 bp, Homo sapiens
  siRNA target sequence for KCNB2 (NM_004770.2,1100-1118).
gctgccctgataaaaggaa

SEQ ID NO: 132364 - DNA, 19 bp, Homo sapiens
  siRNA target sequence for KCNB2 (NM_004770.2,1179-1197).
cgtgtctatcctgttcatt

SEQ ID NO: 132365 - DNA, 19 bp, Homo sapiens
  siRNA target sequence for KCNB2 (NM_004770.2,1242-1260).
gcaggaaacggacgaattt

SEQ ID NO: 132366 - DNA, 19 bp, Homo sapiens
  siRNA target sequence for KCNB2 (NM_004770.2,1245-1263).
ggaaacggacgaatttgga

SEQ ID NO: 132367 - DNA, 19 bp, Homo sapiens
  siRNA target sequence for KCNB2 (NM_004770.2,1269-1287).
caatgacaaccgccaatta

SEQ ID NO: 132368 - DNA, 19 bp, Homo sapiens
  siRNA target sequence for KCNB2 (NM_004770.2,1296-1314).
ggaggctgtgtgtattgca

SEQ ID NO: 132369 - DNA, 19 bp, Homo sapiens
  siRNA target sequence for KCNB2 (NM_004770.2,1297-1315).
gaggctgtgtgtattgcat

SEQ ID NO: 132370 - DNA, 19 bp, Homo sapiens
  siRNA target sequence for KCNB2 (NM_004770.2,1307-1325).
gtattgcatggtttaccat

SEQ ID NO: 132371 - DNA, 19 bp, Homo sapiens
  siRNA target sequence for KCNB2 (NM_004770.2,1333-1351).
cttttgcgattcttatcct

SEQ ID NO: 132372 - DNA, 19 bp, Homo sapiens
  siRNA target sequence for KCNB2 (NM_004770.2,1344-1362).
cttatcctcaccaaataaa

SEQ ID NO: 132373 - DNA, 19 bp, Homo sapiens
  siRNA target sequence for KCNB2 (NM_004770.2,1355-1373).
caaataaatggaagttctt

SEQ ID NO: 132374 - DNA, 19 bp, Homo sapiens
  siRNA target sequence for KCNB2 (NM_004770.2,1404-1422).
ggccatcttgccgtactat

SEQ ID NO: 132375 - DNA, 19 bp, Homo sapiens
  siRNA target sequence for KCNB2 (NM_004770.2,1568-1586).
cccttaggcggagttacaa

SEQ ID NO: 132376 - DNA, 19 bp, Homo sapiens
  siRNA target sequence for KCNB2 (NM_004770.2,1569-1587).
ccttaggcggagttacaat

SEQ ID NO: 132377 - DNA, 19 bp, Homo sapiens
  siRNA target sequence for KCNB2 (NM_004770.2,1574-1592).
ggcggagttacaatgaatt

SEQ ID NO: 132378 - DNA, 19 bp, Homo sapiens
  siRNA target sequence for KCNB2 (NM_004770.2,1595-1613).
gcttgttgatattgtttct

SEQ ID NO: 132379 - DNA, 19 bp, Homo sapiens
  siRNA target sequence for KCNB2 (NM_004770.2,1732-1750).
gttggctatggtgacattt

SEQ ID NO: 132380 - DNA, 19 bp, Homo sapiens
  siRNA target sequence for KCNB2 (NM_004770.2,1779-1797).
gggaggtctgtgctgtatt

SEQ ID NO: 132381 - DNA, 19 bp, Homo sapiens
  siRNA target sequence for KCNB2 (NM_004770.2,1823-1841).
ctatcccaattattgtgaa

SEQ ID NO: 132382 - DNA, 19 bp, Homo sapiens
  siRNA target sequence for KCNB2 (NM_004770.2,1827-1845).
cccaattattgtgaacaat

SEQ ID NO: 132383 - DNA, 19 bp, Homo sapiens
  siRNA target sequence for KCNB2 (NM_004770.2,1828-1846).
ccaattattgtgaacaatt

SEQ ID NO: 132384 - DNA, 19 bp, Homo sapiens
  siRNA target sequence for KCNB2 (NM_004770.2,1959-1977).
cttcgctcgaagtatggaa

SEQ ID NO: 132385 - DNA, 19 bp, Homo sapiens
  siRNA target sequence for KCNB2 (NM_004770.2,1964-1982).
ctcgaagtatggaactgat

SEQ ID NO: 132386 - DNA, 19 bp, Homo sapiens
  siRNA target sequence for KCNB2 (NM_004770.2,1970-1988).
gtatggaactgatagatgt

SEQ ID NO: 132387 - DNA, 19 bp, Homo sapiens
  siRNA target sequence for KCNB2 (NM_004770.2,2005-2023).
ggagagtccgccaacacaa

SEQ ID NO: 132388 - DNA, 19 bp, Homo sapiens
  siRNA target sequence for KCNB2 (NM_004770.2,2006-2024).
gagagtccgccaacacaaa

SEQ ID NO: 132389 - DNA, 19 bp, Homo sapiens
  siRNA target sequence for KCNB2 (NM_004770.2,2025-2043).
ggactccgccgacgataat

SEQ ID NO: 132390 - DNA, 19 bp, Homo sapiens
  siRNA target sequence for KCNB2 (NM_004770.2,2124-2142).
ccaggaggttagccaaaaa

SEQ ID NO: 132391 - DNA, 19 bp, Homo sapiens
  siRNA target sequence for KCNB2 (NM_004770.2,2147-2165).
cccacgagcagctgaacaa

SEQ ID NO: 132392 - DNA, 19 bp, Homo sapiens
  siRNA target sequence for KCNB2 (NM_004770.2,2283-2301).
gaggccatctgcatatgaa

SEQ ID NO: 132393 - DNA, 19 bp, Homo sapiens
  siRNA target sequence for KCNB2 (NM_004770.2,2592-2610).
gtatgccccagttgacata

SEQ ID NO: 132394 - DNA, 19 bp, Homo sapiens
  siRNA target sequence for KCNB2 (NM_004770.2,2684-2702).
gtcctaagagctctctaaa

SEQ ID NO: 132395 - DNA, 19 bp, Homo sapiens
  siRNA target sequence for KCNB2 (NM_004770.2,2704-2722).
ggcagcaacccactaaagt

SEQ ID NO: 132396 - DNA, 19 bp, Homo sapiens
  siRNA target sequence for KCNB2 (NM_004770.2,2967-2985).
gttccctttctcttcaaga

SEQ ID NO: 132397 - DNA, 19 bp, Homo sapiens
  siRNA target sequence for KCNB2 (NM_004770.2,2990-3008).
ggaggagcttcactgaaat

SEQ ID NO: 132398 - DNA, 19 bp, Homo sapiens
  siRNA target sequence for KCNB2 (NM_004770.2,2997-3015).
cttcactgaaatagatact

SEQ ID NO: 132399 - DNA, 19 bp, Homo sapiens
  siRNA target sequence for KCNB2 (NM_004770.2,3017-3035).
gtgacgacgaagacttctt

SEQ ID NO: 132400 - DNA, 19 bp, Homo sapiens
  siRNA target sequence for KCNB2 (NM_004770.2,3067-3085).
gtggactccagcccaaatt

SEQ ID NO: 132401 - DNA, 19 bp, Homo sapiens
  siRNA target sequence for KCNB2 (NM_004770.2,3240-3258).
gatggaaaatcacttgttt

SEQ ID NO: 132402 - DNA, 19 bp, Homo sapiens
  siRNA target sequence for KCNB2 (NM_004770.2,3255-3273).
gtttgccccagaaattcat

SEQ ID NO: 132403 - DNA, 19 bp, Homo sapiens
  siRNA target sequence for KCNC1 (NM_004976.2,215-233).
cgcgtgctgacgagttctt

SEQ ID NO: 132404 - DNA, 19 bp, Homo sapiens
  siRNA target sequence for KCNC1 (NM_004976.2,217-235).
cgtgctgacgagttcttct

SEQ ID NO: 132405 - DNA, 19 bp, Homo sapiens
  siRNA target sequence for KCNC1 (NM_004976.2,259-277).
gcgcacatcctgaactact

SEQ ID NO: 132406 - DNA, 19 bp, Homo sapiens
  siRNA target sequence for KCNC1 (NM_004976.2,260-278).
cgcacatcctgaactacta

SEQ ID NO: 132407 - DNA, 19 bp, Homo sapiens
  siRNA target sequence for KCNC1 (NM_004976.2,866-884).
gccccaacaaggtagagtt

SEQ ID NO: 132408 - DNA, 19 bp, Homo sapiens
  siRNA target sequence for KCNC1 (NM_004976.2,869-887).
ccaacaaggtagagttcat

SEQ ID NO: 132409 - DNA, 19 bp, Homo sapiens
  siRNA target sequence for KCNC1 (NM_004976.2,877-895).
gtagagttcatcaagaact

SEQ ID NO: 132410 - DNA, 19 bp, Homo sapiens
  siRNA target sequence for KCNC1 (NM_004976.2,1014-1032).
gcgcatcttgcgcatcttt

SEQ ID NO: 132411 - DNA, 19 bp, Homo sapiens
  siRNA target sequence for KCNC1 (NM_004976.2,1202-1220).
gtgagcacacgcactttaa

SEQ ID NO: 132412 - DNA, 19 bp, Homo sapiens
  siRNA target sequence for KCNC1 (NM_004976.2,1207-1225).
cacacgcactttaagaaca

SEQ ID NO: 132413 - DNA, 19 bp, Homo sapiens
  siRNA target sequence for KCNC1 (NM_004976.2,1374-1392).
gaacaatttcgggatgtat

SEQ ID NO: 132414 - DNA, 19 bp, Homo sapiens
  siRNA target sequence for KCNC1 (NM_004976.2,1462-1480).
ctgggatctcccaattatt

SEQ ID NO: 132415 - DNA, 19 bp, Homo sapiens
  siRNA target sequence for KCNC2 (NM_139136.2,1219-1237).
cagagccgccaggtttatt

SEQ ID NO: 132416 - DNA, 19 bp, Homo sapiens
  siRNA target sequence for KCNC2 (NM_139136.2,1223-1241).
gccgccaggtttattgctt

SEQ ID NO: 132417 - DNA, 19 bp, Homo sapiens
  siRNA target sequence for KCNC2 (NM_139136.2,1293-1311).
cacatgaagctttcaatat

SEQ ID NO: 132418 - DNA, 19 bp, Homo sapiens
  siRNA target sequence for KCNC2 (NM_139136.2,1336-1354).
catcaatggcacaagtgtt

SEQ ID NO: 132419 - DNA, 19 bp, Homo sapiens
  siRNA target sequence for KCNC2 (NM_139136.2,1383-1401).
ctgccttgacgtatgtaga

SEQ ID NO: 132420 - DNA, 19 bp, Homo sapiens
  siRNA target sequence for KCNC2 (NM_139136.2,1408-1426).
gtgtgtggtgtggtttact

SEQ ID NO: 132421 - DNA, 19 bp, Homo sapiens
  siRNA target sequence for KCNC2 (NM_139136.2,1410-1428).
gtgtggtgtggtttacttt

SEQ ID NO: 132422 - DNA, 19 bp, Homo sapiens
  siRNA target sequence for KCNC2 (NM_139136.2,1455-1473).
cacccaataaacttgaatt

SEQ ID NO: 132423 - DNA, 19 bp, Homo sapiens
  siRNA target sequence for KCNC2 (NM_139136.2,1508-1526).
gccatcctacctttctact

SEQ ID NO: 132424 - DNA, 19 bp, Homo sapiens
  siRNA target sequence for KCNC2 (NM_139136.2,1510-1528).
catcctacctttctactta

SEQ ID NO: 132425 - DNA, 19 bp, Homo sapiens
  siRNA target sequence for KCNC2 (NM_139136.2,1540-1558).
cagtgggctgtcatccaaa

SEQ ID NO: 132426 - DNA, 19 bp, Homo sapiens
  siRNA target sequence for KCNC2 (NM_139136.2,1605-1623).
ggatcctgagaattttcaa

SEQ ID NO: 132427 - DNA, 19 bp, Homo sapiens
  siRNA target sequence for KCNC2 (NM_139136.2,1621-1639).
caagctcacccgccatttt

SEQ ID NO: 132428 - DNA, 19 bp, Homo sapiens
  siRNA target sequence for KCNC2 (NM_139136.2,1624-1642).
gctcacccgccattttgta

SEQ ID NO: 132429 - DNA, 19 bp, Homo sapiens
  siRNA target sequence for KCNC2 (NM_139136.2,1648-1666).
gagggtgcttggacatact

SEQ ID NO: 132430 - DNA, 19 bp, Homo sapiens
  siRNA target sequence for KCNC2 (NM_139136.2,1650-1668).
gggtgcttggacatactct

SEQ ID NO: 132431 - DNA, 19 bp, Homo sapiens
  siRNA target sequence for KCNC2 (NM_139136.2,1665-1683).
ctcttcgagctagtactaa

SEQ ID NO: 132432 - DNA, 19 bp, Homo sapiens
  siRNA target sequence for KCNC2 (NM_139136.2,1670-1688).
cgagctagtactaatgaat

SEQ ID NO: 132433 - DNA, 19 bp, Homo sapiens
  siRNA target sequence for KCNC2 (NM_139136.2,1671-1689).
gagctagtactaatgaatt

SEQ ID NO: 132434 - DNA, 19 bp, Homo sapiens
  siRNA target sequence for KCNC2 (NM_139136.2,1673-1691).
gctagtactaatgaatttt

SEQ ID NO: 132435 - DNA, 19 bp, Homo sapiens
  siRNA target sequence for KCNC2 (NM_139136.2,1677-1695).
gtactaatgaatttttgct

SEQ ID NO: 132436 - DNA, 19 bp, Homo sapiens
  siRNA target sequence for KCNC2 (NM_139136.2,1709-1727).
ctggctctaggagttttga

SEQ ID NO: 132437 - DNA, 19 bp, Homo sapiens
  siRNA target sequence for KCNC2 (NM_139136.2,1711-1729).
ggctctaggagttttgata

SEQ ID NO: 132438 - DNA, 19 bp, Homo sapiens
  siRNA target sequence for KCNC2 (NM_139136.2,1713-1731).
ctctaggagttttgatatt

SEQ ID NO: 132439 - DNA, 19 bp, Homo sapiens
  siRNA target sequence for KCNC2 (NM_139136.2,1791-1809).
gtgagcacacacagttcaa

SEQ ID NO: 132440 - DNA, 19 bp, Homo sapiens
  siRNA target sequence for KCNC2 (NM_139136.2,1856-1874).
ctgggttatggggatatgt

SEQ ID NO: 132441 - DNA, 19 bp, Homo sapiens
  siRNA target sequence for KCNC2 (NM_139136.2,1921-1939).
ggctggagtgctgacaata

SEQ ID NO: 132442 - DNA, 19 bp, Homo sapiens
  siRNA target sequence for KCNC2 (NM_139136.2,1953-1971).
ctgtcattgtcaataattt

SEQ ID NO: 132443 - DNA, 19 bp, Homo sapiens
  siRNA target sequence for KCNC2 (NM_139136.2,2050-2068).
ggcaagctcacctactttt

SEQ ID NO: 132444 - DNA, 19 bp, Homo sapiens
  siRNA target sequence for KCNC2 (NM_139136.2,2051-2069).
gcaagctcacctacttttt

SEQ ID NO: 132445 - DNA, 19 bp, Homo sapiens
  siRNA target sequence for KCNC2 (NM_139136.2,2055-2073).
gctcacctactttttgcaa

SEQ ID NO: 132446 - DNA, 19 bp, Homo sapiens
  siRNA target sequence for KCNC2 (NM_139136.2,2135-2153).
cgacttctggaacataaca

SEQ ID NO: 132447 - DNA, 19 bp, Homo sapiens
  siRNA target sequence for KCNC2 (NM_139136.2,2138-2156).
cttctggaacataacagat

SEQ ID NO: 132448 - DNA, 19 bp, Homo sapiens
  siRNA target sequence for KCNC2 (NM_139136.2,2147-2165).
cataacagatcagtgttat

SEQ ID NO: 132449 - DNA, 19 bp, Homo sapiens
  siRNA target sequence for KCNC2 (NM_139136.2,2219-2237).
cccatcagacgctctagta

SEQ ID NO: 132450 - DNA, 19 bp, Homo sapiens
  siRNA target sequence for KCNC2 (NM_139136.2,2230-2248).
ctctagtaccagagacaaa

SEQ ID NO: 132451 - DNA, 19 bp, Homo sapiens
  siRNA target sequence for KCNC2 (NM_139136.2,2253-2271).
gaagaggggaaacatgttt

SEQ ID NO: 132452 - DNA, 19 bp, Homo sapiens
  siRNA target sequence for KCNC2 (NM_139136.2,2276-2294).
ctgacgacaggtgattaca

SEQ ID NO: 132453 - DNA, 19 bp, Homo sapiens
  siRNA target sequence for KCNC2 (NM_139136.2,2363-2381).
gccgaggccagatctctta

SEQ ID NO: 132454 - DNA, 19 bp, Homo sapiens
  siRNA target sequence for KCNC2 (NM_139136.2,2366-2384).
gaggccagatctcttactt

SEQ ID NO: 132455 - DNA, 19 bp, Homo sapiens
  siRNA target sequence for KCNC2 (NM_139137.2,2330-2348).
gaaaaatcccgaagcttaa

SEQ ID NO: 132456 - DNA, 19 bp, Homo sapiens
  siRNA target sequence for KCNC2 (NM_139137.2,2337-2355).
cccgaagcttaaacaacat

SEQ ID NO: 132457 - DNA, 19 bp, Homo sapiens
  siRNA target sequence for KCNC2 (NM_139137.2,2393-2411).
gtaacatcaccctacaact

SEQ ID NO: 132458 - DNA, 19 bp, Homo sapiens
  siRNA target sequence for KCNC2 (NM_139137.2,2441-2459).
cccatcccatctatcttgt

SEQ ID NO: 132459 - DNA, 19 bp, Homo sapiens
  siRNA target sequence for KCNC2 (NM_153748.1,2144-2162).
gaacataacagatcagata

SEQ ID NO: 132460 - DNA, 19 bp, Homo sapiens
  siRNA target sequence for KCNC2 (NM_153748.1,2147-2165).
cataacagatcagataact

SEQ ID NO: 132461 - DNA, 19 bp, Homo sapiens
  siRNA target sequence for KCNC3 (NM_004977.2,555-573).
gcggcaagatcgtgatcaa

SEQ ID NO: 132462 - DNA, 19 bp, Homo sapiens
  siRNA target sequence for KCNC3 (NM_004977.2,1232-1250).
gagggcttcatccatatta

SEQ ID NO: 132463 - DNA, 19 bp, Homo sapiens
  siRNA target sequence for KCNC3 (NM_004977.2,1287-1305).
gggcacctccggagaacat

SEQ ID NO: 132464 - DNA, 19 bp, Homo sapiens
  siRNA target sequence for KCNC3 (NM_004977.2,1289-1307).
gcacctccggagaacatca

SEQ ID NO: 132465 - DNA, 19 bp, Homo sapiens
  siRNA target sequence for KCNC3 (NM_004977.2,1740-1758).
ccaaccacacctacttcaa

SEQ ID NO: 132466 - DNA, 19 bp, Homo sapiens
  siRNA target sequence for KCNC3 (NM_004977.2,2000-2018).
ccgggctcgcccaactact

SEQ ID NO: 132467 - DNA, 19 bp, Homo sapiens
  siRNA target sequence for KCNC4 (NM_004978.2,199-217).
gcctccgtccaaaacatgt

SEQ ID NO: 132468 - DNA, 19 bp, Homo sapiens
  siRNA target sequence for KCNC4 (NM_004978.2,240-258).
gcgaggcgtcggagaagat

SEQ ID NO: 132469 - DNA, 19 bp, Homo sapiens
  siRNA target sequence for KCNC4 (NM_004978.2,883-901).
gacccatgaggcctttaat

SEQ ID NO: 132470 - DNA, 19 bp, Homo sapiens
  siRNA target sequence for KCNC4 (NM_004978.2,885-903).
cccatgaggcctttaatat

SEQ ID NO: 132471 - DNA, 19 bp, Homo sapiens
  siRNA target sequence for KCNC4 (NM_004978.2,926-944).
ctccgcgtagggaacatca

SEQ ID NO: 132472 - DNA, 19 bp, Homo sapiens
  siRNA target sequence for KCNC4 (NM_004978.2,1694-1712).
gacagcacctgcagtgata

SEQ ID NO: 132473 - DNA, 19 bp, Homo sapiens
  siRNA target sequence for KCNC4 (NM_004978.2,1749-1767).
ggaaacgggcagactctaa

SEQ ID NO: 132474 - DNA, 19 bp, Homo sapiens
  siRNA target sequence for KCNC4 (NM_004978.2,1875-1893).
ccaccactcgagacagaaa

SEQ ID NO: 132475 - DNA, 19 bp, Homo sapiens
  siRNA target sequence for KCNC4 (NM_004978.2,1878-1896).
ccactcgagacagaaacaa

SEQ ID NO: 132476 - DNA, 19 bp, Homo sapiens
  siRNA target sequence for KCNC4 (NM_153763.1,1803-1821).
ggcctagggagtttccaaa

SEQ ID NO: 132477 - DNA, 19 bp, Homo sapiens
  siRNA target sequence for KCNC4 (NM_153763.1,1860-1878).
ggggcttccctaagcataa

SEQ ID NO: 132478 - DNA, 19 bp, Homo sapiens
  siRNA target sequence for KCNC4 (NM_153763.1,1861-1879).
gggcttccctaagcataaa

SEQ ID NO: 132479 - DNA, 19 bp, Homo sapiens
  siRNA target sequence for KCNC4 (NM_153763.1,1863-1881).
gcttccctaagcataaaga

SEQ ID NO: 132480 - DNA, 19 bp, Homo sapiens
  siRNA target sequence for KCNC4 (NM_153763.1,1864-1882).
cttccctaagcataaagat

SEQ ID NO: 132481 - DNA, 19 bp, Homo sapiens
  siRNA target sequence for KCND1 (NM_004979.3,1572-1590).
cgccatgtgctgaacttct

SEQ ID NO: 132482 - DNA, 19 bp, Homo sapiens
  siRNA target sequence for KCND1 (NM_004979.3,1843-1861).
gcaccgcagccctcgtttt

SEQ ID NO: 132483 - DNA, 19 bp, Homo sapiens
  siRNA target sequence for KCND1 (NM_004979.3,1846-1864).
ccgcagccctcgttttcta

SEQ ID NO: 132484 - DNA, 19 bp, Homo sapiens
  siRNA target sequence for KCND1 (NM_004979.3,1848-1866).
gcagccctcgttttctact

SEQ ID NO: 132485 - DNA, 19 bp, Homo sapiens
  siRNA target sequence for KCND1 (NM_004979.3,2007-2025).
gcctgtgtactcatattca

SEQ ID NO: 132486 - DNA, 19 bp, Homo sapiens
  siRNA target sequence for KCND1 (NM_004979.3,2681-2699).
cgaggaacaggctctttgt

SEQ ID NO: 132487 - DNA, 19 bp, Homo sapiens
  siRNA target sequence for KCND1 (NM_004979.3,3216-3234).
gagactgtcaagatctcat

SEQ ID NO: 132488 - DNA, 19 bp, Homo sapiens
  siRNA target sequence for KCND2 (NM_012281.2,984-1002).
gcgtggctgccttttgcaa

SEQ ID NO: 132489 - DNA, 19 bp, Homo sapiens
  siRNA target sequence for KCND2 (NM_012281.2,1076-1094).
gacccaagatgctctcatt

SEQ ID NO: 132490 - DNA, 19 bp, Homo sapiens
  siRNA target sequence for KCND2 (NM_012281.2,1301-1319).
ctctgcttacgatgaagaa

SEQ ID NO: 132491 - DNA, 19 bp, Homo sapiens
  siRNA target sequence for KCND2 (NM_012281.2,1332-1350).
ggcctcatcccggaaatca

SEQ ID NO: 132492 - DNA, 19 bp, Homo sapiens
  siRNA target sequence for KCND2 (NM_012281.2,1349-1367).
catcggcgactgctgttat

SEQ ID NO: 132493 - DNA, 19 bp, Homo sapiens
  siRNA target sequence for KCND2 (NM_012281.2,1518-1536).
ctggtgttctactatgtca

SEQ ID NO: 132494 - DNA, 19 bp, Homo sapiens
  siRNA target sequence for KCND2 (NM_012281.2,1603-1621).
caggtcacattaaagaact

SEQ ID NO: 132495 - DNA, 19 bp, Homo sapiens
  siRNA target sequence for KCND2 (NM_012281.2,1720-1738).
ctagtcgttaccgttttgt

SEQ ID NO: 132496 - DNA, 19 bp, Homo sapiens
  siRNA target sequence for KCND2 (NM_012281.2,1737-1755).
gtgcgtagtgtcatgagta

SEQ ID NO: 132497 - DNA, 19 bp, Homo sapiens
  siRNA target sequence for KCND2 (NM_012281.2,1740-1758).
cgtagtgtcatgagtatca

SEQ ID NO: 132498 - DNA, 19 bp, Homo sapiens
  siRNA target sequence for KCND2 (NM_012281.2,1741-1759).
gtagtgtcatgagtatcat

SEQ ID NO: 132499 - DNA, 19 bp, Homo sapiens
  siRNA target sequence for KCND2 (NM_012281.2,1818-1836).
gtcagcggagcctttgtca

SEQ ID NO: 132500 - DNA, 19 bp, Homo sapiens
  siRNA target sequence for KCND2 (NM_012281.2,1970-1988).
catcatcttcgctacagtt

SEQ ID NO: 132501 - DNA, 19 bp, Homo sapiens
  siRNA target sequence for KCND2 (NM_012281.2,2085-2103).
ggtgacatggtgccaaaaa

SEQ ID NO: 132502 - DNA, 19 bp, Homo sapiens
  siRNA target sequence for KCND2 (NM_012281.2,2088-2106).
gacatggtgccaaaaacca

SEQ ID NO: 132503 - DNA, 19 bp, Homo sapiens
  siRNA target sequence for KCND2 (NM_012281.2,2090-2108).
catggtgccaaaaaccata

SEQ ID NO: 132504 - DNA, 19 bp, Homo sapiens
  siRNA target sequence for KCND2 (NM_012281.2,2117-2135).
gatttttggttctatctgt

SEQ ID NO: 132505 - DNA, 19 bp, Homo sapiens
  siRNA target sequence for KCND2 (NM_012281.2,2166-2184).
cctgttccggtgattgtat

SEQ ID NO: 132506 - DNA, 19 bp, Homo sapiens
  siRNA target sequence for KCND2 (NM_012281.2,2210-2228).
gaatcaacgagcagacaaa

SEQ ID NO: 132507 - DNA, 19 bp, Homo sapiens
  siRNA target sequence for KCND2 (NM_012281.2,2214-2232).
caacgagcagacaaacgaa

SEQ ID NO: 132508 - DNA, 19 bp, Homo sapiens
  siRNA target sequence for KCND2 (NM_012281.2,2281-2299).
gaagcgcaaatgcttacat

SEQ ID NO: 132509 - DNA, 19 bp, Homo sapiens
  siRNA target sequence for KCND2 (NM_012281.2,2301-2319).
cagagcaaacggaatggtt

SEQ ID NO: 132510 - DNA, 19 bp, Homo sapiens
  siRNA target sequence for KCND2 (NM_012281.2,2303-2321).
gagcaaacggaatggttta

SEQ ID NO: 132511 - DNA, 19 bp, Homo sapiens
  siRNA target sequence for KCND2 (NM_012281.2,2311-2329).
ggaatggtttactcagtaa

SEQ ID NO: 132512 - DNA, 19 bp, Homo sapiens
  siRNA target sequence for KCND2 (NM_012281.2,2312-2330).
gaatggtttactcagtaat

SEQ ID NO: 132513 - DNA, 19 bp, Homo sapiens
  siRNA target sequence for KCND2 (NM_012281.2,2354-2372).
gcaggcttttgttagcaaa

SEQ ID NO: 132514 - DNA, 19 bp, Homo sapiens
  siRNA target sequence for KCND2 (NM_012281.2,2355-2373).
caggcttttgttagcaaat

SEQ ID NO: 132515 - DNA, 19 bp, Homo sapiens
  siRNA target sequence for KCND2 (NM_012281.2,2428-2446).
ccacgaatcacgagtttgt

SEQ ID NO: 132516 - DNA, 19 bp, Homo sapiens
  siRNA target sequence for KCND2 (NM_012281.2,2447-2465).
ggacgaacaagtctttgaa

SEQ ID NO: 132517 - DNA, 19 bp, Homo sapiens
  siRNA target sequence for KCND2 (NM_012281.2,2474-2492).
catggaagttgcaactgtt

SEQ ID NO: 132518 - DNA, 19 bp, Homo sapiens
  siRNA target sequence for KCND2 (NM_012281.2,2552-2570).
ctgttcacgacgacacaaa

SEQ ID NO: 132519 - DNA, 19 bp, Homo sapiens
  siRNA target sequence for KCND2 (NM_012281.2,2554-2572).
gttcacgacgacacaaaaa

SEQ ID NO: 132520 - DNA, 19 bp, Homo sapiens
  siRNA target sequence for KCND2 (NM_012281.2,2559-2577).
cgacgacacaaaaaaactt

SEQ ID NO: 132521 - DNA, 19 bp, Homo sapiens
  siRNA target sequence for KCND2 (NM_012281.2,2560-2578).
gacgacacaaaaaaacttt

SEQ ID NO: 132522 - DNA, 19 bp, Homo sapiens
  siRNA target sequence for KCND2 (NM_012281.2,2605-2623).
gaagccatcaaggtagtat

SEQ ID NO: 132523 - DNA, 19 bp, Homo sapiens
  siRNA target sequence for KCND2 (NM_012281.2,2608-2626).
gccatcaaggtagtataca

SEQ ID NO: 132524 - DNA, 19 bp, Homo sapiens
  siRNA target sequence for KCND2 (NM_012281.2,2609-2627).
ccatcaaggtagtatacaa

SEQ ID NO: 132525 - DNA, 19 bp, Homo sapiens
  siRNA target sequence for KCND2 (NM_012281.2,2628-2646).
gaactcagcacgattcaga

SEQ ID NO: 132526 - DNA, 19 bp, Homo sapiens
  siRNA target sequence for KCND2 (NM_012281.2,2709-2727).
gagtgtgttaaactaaact

SEQ ID NO: 132527 - DNA, 19 bp, Homo sapiens
  siRNA target sequence for KCND2 (NM_012281.2,2711-2729).
gtgtgttaaactaaactgt

SEQ ID NO: 132528 - DNA, 19 bp, Homo sapiens
  siRNA target sequence for KCND2 (NM_012281.2,2742-2760).
gtgactacagcaataataa

SEQ ID NO: 132529 - DNA, 19 bp, Homo sapiens
  siRNA target sequence for KCND3 (NM_004980.3,1779-1797).
caaaacaggcagttcgaat

SEQ ID NO: 132530 - DNA, 19 bp, Homo sapiens
  siRNA target sequence for KCND3 (NM_004980.3,1784-1802).
caggcagttcgaatgcata

SEQ ID NO: 132531 - DNA, 19 bp, Homo sapiens
  siRNA target sequence for KCND3 (NM_004980.3,1938-1956).
cactgggttgtcctatctt

SEQ ID NO: 132532 - DNA, 19 bp, Homo sapiens
  siRNA target sequence for KCND3 (NM_004980.3,1957-1975).
gtggatgatcccctgttat

SEQ ID NO: 132533 - DNA, 19 bp, Homo sapiens
  siRNA target sequence for KCND3 (NM_004980.3,1959-1977).
ggatgatcccctgttatct

SEQ ID NO: 132534 - DNA, 19 bp, Homo sapiens
  siRNA target sequence for KCND3 (NM_004980.3,2061-2079).
ctacccatccacaagaagt

SEQ ID NO: 132535 - DNA, 19 bp, Homo sapiens
  siRNA target sequence for KCND3 (NM_004980.3,2117-2135).
gctgctcccgtcgtagtaa

SEQ ID NO: 132536 - DNA, 19 bp, Homo sapiens
  siRNA target sequence for KCND3 (NM_004980.3,2120-2138).
gctcccgtcgtagtaagaa

SEQ ID NO: 132537 - DNA, 19 bp, Homo sapiens
  siRNA target sequence for KCND3 (NM_004980.3,2142-2160).
cacacacctgcccaattct

SEQ ID NO: 132538 - DNA, 19 bp, Homo sapiens
  siRNA target sequence for KCND3 (NM_004980.3,2246-2264).
gtcgctccagccttaattt

SEQ ID NO: 132539 - DNA, 19 bp, Homo sapiens
  siRNA target sequence for KCND3 (NM_004980.3,2392-2410).
cccaacacgaacattcctt

SEQ ID NO: 132540 - DNA, 19 bp, Homo sapiens
  siRNA target sequence for KCNF1 (NM_002236.4,543-561).
ctgccagcgacgacataga

SEQ ID NO: 132541 - DNA, 19 bp, Homo sapiens
  siRNA target sequence for KCNF1 (NM_002236.4,547-565).
cagcgacgacatagagata

SEQ ID NO: 132542 - DNA, 19 bp, Homo sapiens
  siRNA target sequence for KCNF1 (NM_002236.4,665-683).
ggctacgacaccatcttct

SEQ ID NO: 132543 - DNA, 19 bp, Homo sapiens
  siRNA target sequence for KCNF1 (NM_002236.4,707-725).
ggcaagcgcgagttctact

SEQ ID NO: 132544 - DNA, 19 bp, Homo sapiens
  siRNA target sequence for KCNF1 (NM_002236.4,708-726).
gcaagcgcgagttctactt

SEQ ID NO: 132545 - DNA, 19 bp, Homo sapiens
  siRNA target sequence for KCNF1 (NM_002236.4,734-752).
gacccggacgccttcaagt

SEQ ID NO: 132546 - DNA, 19 bp, Homo sapiens
  siRNA target sequence for KCNF1 (NM_002236.4,753-771).
gtgtcatcgaggtgtacta

SEQ ID NO: 132547 - DNA, 19 bp, Homo sapiens
  siRNA target sequence for KCNF1 (NM_002236.4,1538-1556).
ccagagaccctgtttaaga

SEQ ID NO: 132548 - DNA, 19 bp, Homo sapiens
  siRNA target sequence for KCNG1 (NM_002237.2,6-24).
cctcttaccgggagacaat

SEQ ID NO: 132549 - DNA, 19 bp, Homo sapiens
  siRNA target sequence for KCNG1 (NM_002237.2,332-350).
cctgcaacgagttcttctt

SEQ ID NO: 132550 - DNA, 19 bp, Homo sapiens
  siRNA target sequence for KCNG1 (NM_002237.2,1486-1504).
caggacagtgacatcttgt

SEQ ID NO: 132551 - DNA, 19 bp, Homo sapiens
  siRNA target sequence for KCNG1 (NM_002237.2,1522-1540).
gacaccagagacaataact

SEQ ID NO: 132552 - DNA, 19 bp, Homo sapiens
  siRNA target sequence for KCNG2 (NM_012283.1,748-766).
ccactcaacatcattgaca

SEQ ID NO: 132553 - DNA, 19 bp, Homo sapiens
  siRNA target sequence for KCNG4 (NM_133490.2,413-431).
gtgcagctctgcgatgatt

SEQ ID NO: 132554 - DNA, 19 bp, Homo sapiens
  siRNA target sequence for KCNG4 (NM_172347.1,1566-1584).
gtccagccagtgaatgtga

SEQ ID NO: 132555 - DNA, 19 bp, Homo sapiens
  siRNA target sequence for KCNG4 (NM_172347.1,1618-1636).
gctcatgaacgatgtcaat

SEQ ID NO: 132556 - DNA, 19 bp, Homo sapiens
  siRNA target sequence for KCNRG (NM_173605.1,282-300).
gatattcacgacaaggttt

SEQ ID NO: 132557 - DNA, 19 bp, Homo sapiens
  siRNA target sequence for KCNRG (NM_173605.1,291-309).
gacaaggttttctacgata

SEQ ID NO: 132558 - DNA, 19 bp, Homo sapiens
  siRNA target sequence for KCNRG (NM_173605.1,296-314).
ggttttctacgataaagca

SEQ ID NO: 132559 - DNA, 19 bp, Homo sapiens
  siRNA target sequence for KCNRG (NM_173605.1,329-347).
gtttggcacgcatgttaga

SEQ ID NO: 132560 - DNA, 19 bp, Homo sapiens
  siRNA target sequence for KCNRG (NM_173605.1,504-522).
ctatgaacttcgttctcta

SEQ ID NO: 132561 - DNA, 19 bp, Homo sapiens
  siRNA target sequence for KCNRG (NM_173605.1,515-533).
gttctctagttgatctctt

SEQ ID NO: 132562 - DNA, 19 bp, Homo sapiens
  siRNA target sequence for KCNRG (NM_173605.1,518-536).
ctctagttgatctcttaaa

SEQ ID NO: 132563 - DNA, 19 bp, Homo sapiens
  siRNA target sequence for KCNRG (NM_173605.1,587-605).
gccggaacactcaagcttt

SEQ ID NO: 132564 - DNA, 19 bp, Homo sapiens
  siRNA target sequence for KCNRG (NM_173605.1,588-606).
ccggaacactcaagctttt

SEQ ID NO: 132565 - DNA, 19 bp, Homo sapiens
  siRNA target sequence for KCNRG (NM_173605.1,645-663).
gctaacagggaggattaca

SEQ ID NO: 132566 - DNA, 19 bp, Homo sapiens
  siRNA target sequence for KCNRG (NM_173605.1,685-703).
gcgccgacctggaatggta

SEQ ID NO: 132567 - DNA, 19 bp, Homo sapiens
  siRNA target sequence for KCNRG (NM_173605.1,686-704).
cgccgacctggaatggtaa

SEQ ID NO: 132568 - DNA, 19 bp, Homo sapiens
  siRNA target sequence for KCNRG (NM_173605.1,689-707).
cgacctggaatggtaactt

SEQ ID NO: 132569 - DNA, 19 bp, Homo sapiens
  siRNA target sequence for KCNRG (NM_173605.1,690-708).
gacctggaatggtaacttt

SEQ ID NO: 132570 - DNA, 19 bp, Homo sapiens
  siRNA target sequence for KCNRG (NM_173605.1,692-710).
cctggaatggtaacttttt

SEQ ID NO: 132571 - DNA, 19 bp, Homo sapiens
  siRNA target sequence for KCNRG (NM_173605.1,910-928).
catttggtcagcactagaa

SEQ ID NO: 132572 - DNA, 19 bp, Homo sapiens
  siRNA target sequence for KCNRG (NM_173605.1,916-934).
gtcagcactagaacagtat

SEQ ID NO: 132573 - DNA, 19 bp, Homo sapiens
  siRNA target sequence for KCNRG (NM_173605.1,943-961).
gacaaaactgaatgctata

SEQ ID NO: 132574 - DNA, 19 bp, Homo sapiens
  siRNA target sequence for KCNRG (NM_173605.1,956-974).
gctatagctttgaaaggat

SEQ ID NO: 132575 - DNA, 19 bp, Homo sapiens
  siRNA target sequence for KCNRG (NM_173605.1,957-975).
ctatagctttgaaaggata

SEQ ID NO: 132576 - DNA, 19 bp, Homo sapiens
  siRNA target sequence for KCNRG (NM_173605.1,988-1006).
gtgctcatcacgaatgaaa

SEQ ID NO: 132577 - DNA, 19 bp, Homo sapiens
  siRNA target sequence for KCNRG (NM_173605.1,990-1008).
gctcatcacgaatgaaaca

SEQ ID NO: 132578 - DNA, 19 bp, Homo sapiens
  siRNA target sequence for KCNRG (NM_173605.1,1007-1025).
caccaaaaccagagactat

SEQ ID NO: 132579 - DNA, 19 bp, Homo sapiens
  siRNA target sequence for KCNS1 (NM_002251.3,412-430).
ggtccggggaacacactat

SEQ ID NO: 132580 - DNA, 19 bp, Homo sapiens
  siRNA target sequence for KCNS1 (NM_002251.3,475-493).
gaggagcactgaaaccttt

SEQ ID NO: 132581 - DNA, 19 bp, Homo sapiens
  siRNA target sequence for KCNS1 (NM_002251.3,1280-1298).
cccagtacgcgcaacttct

SEQ ID NO: 132582 - DNA, 19 bp, Homo sapiens
  siRNA target sequence for KCNS1 (NM_002251.3,1281-1299).
ccagtacgcgcaacttctt

SEQ ID NO: 132583 - DNA, 19 bp, Homo sapiens
  siRNA target sequence for KCNS1 (NM_002251.3,1332-1350).
ctgtgctgcccttctatct

SEQ ID NO: 132584 - DNA, 19 bp, Homo sapiens
  siRNA target sequence for KCNS1 (NM_002251.3,1825-1843).
cagcaaccaccaagagttt

SEQ ID NO: 132585 - DNA, 19 bp, Homo sapiens
  siRNA target sequence for KCNS1 (NM_002251.3,1917-1935).
gacagtctgcagatctaga

SEQ ID NO: 132586 - DNA, 19 bp, Homo sapiens
  siRNA target sequence for KCNS1 (NM_002251.3,1958-1976).
ccacaccctcagatgtatt

SEQ ID NO: 132587 - DNA, 19 bp, Homo sapiens
  siRNA target sequence for KCNS3 (NM_002252.3,386-404).
gtttggtgagtttttccat

SEQ ID NO: 132588 - DNA, 19 bp, Homo sapiens
  siRNA target sequence for KCNS3 (NM_002252.3,654-672).
gaggagctgtgcgtattct

SEQ ID NO: 132589 - DNA, 19 bp, Homo sapiens
  siRNA target sequence for KCNS3 (NM_002252.3,657-675).
gagctgtgcgtattctcat

SEQ ID NO: 132590 - DNA, 19 bp, Homo sapiens
  siRNA target sequence for KCNS3 (NM_002252.3,805-823).
ccgactcctcgtttgaaga

SEQ ID NO: 132591 - DNA, 19 bp, Homo sapiens
  siRNA target sequence for KCNS3 (NM_002252.3,822-840).
gagtcgtctctgtttgaga

SEQ ID NO: 132592 - DNA, 19 bp, Homo sapiens
  siRNA target sequence for KCNS3 (NM_002252.3,824-842).
gtcgtctctgtttgagaaa

SEQ ID NO: 132593 - DNA, 19 bp, Homo sapiens
  siRNA target sequence for KCNS3 (NM_002252.3,826-844).
cgtctctgtttgagaaaga

SEQ ID NO: 132594 - DNA, 19 bp, Homo sapiens
  siRNA target sequence for KCNS3 (NM_002252.3,882-900).
cggaagaaaatctggatta

SEQ ID NO: 132595 - DNA, 19 bp, Homo sapiens
  siRNA target sequence for KCNS3 (NM_002252.3,920-938).
ctgcctgtccgctaagctt

SEQ ID NO: 132596 - DNA, 19 bp, Homo sapiens
  siRNA target sequence for KCNS3 (NM_002252.3,922-940).
gcctgtccgctaagcttat

SEQ ID NO: 132597 - DNA, 19 bp, Homo sapiens
  siRNA target sequence for KCNS3 (NM_002252.3,1103-1121).
ggctgccgctccttgtcaa

SEQ ID NO: 132598 - DNA, 19 bp, Homo sapiens
  siRNA target sequence for KCNS3 (NM_002252.3,1108-1126).
ccgctccttgtcaaaagaa

SEQ ID NO: 132599 - DNA, 19 bp, Homo sapiens
  siRNA target sequence for KCNS3 (NM_002252.3,1109-1127).
cgctccttgtcaaaagaaa

SEQ ID NO: 132600 - DNA, 19 bp, Homo sapiens
  siRNA target sequence for KCNS3 (NM_002252.3,1248-1266).
cagatcctacggcttatga

SEQ ID NO: 132601 - DNA, 19 bp, Homo sapiens
  siRNA target sequence for KCNS3 (NM_002252.3,1254-1272).
ctacggcttatgaggattt

SEQ ID NO: 132602 - DNA, 19 bp, Homo sapiens
  siRNA target sequence for KCNS3 (NM_002252.3,1265-1283).
gaggattttccgaattcta

SEQ ID NO: 132603 - DNA, 19 bp, Homo sapiens
  siRNA target sequence for KCNS3 (NM_002252.3,1333-1351).
gacacagctaccatgaagt

SEQ ID NO: 132604 - DNA, 19 bp, Homo sapiens
  siRNA target sequence for KCNS3 (NM_002252.3,1373-1391).
ctctgtgggcatttccatt

SEQ ID NO: 132605 - DNA, 19 bp, Homo sapiens
  siRNA target sequence for KCNS3 (NM_002252.3,1675-1693).
gtcatgagctaccttactt

SEQ ID NO: 132606 - DNA, 19 bp, Homo sapiens
  siRNA target sequence for KCNS3 (NM_002252.3,1682-1700).
gctaccttactttaacatt

SEQ ID NO: 132607 - DNA, 19 bp, Homo sapiens
  siRNA target sequence for KCNS3 (NM_002252.3,1683-1701).
ctaccttactttaacatta

SEQ ID NO: 132608 - DNA, 19 bp, Homo sapiens
  siRNA target sequence for KCNS3 (NM_002252.3,1691-1709).
ctttaacattagggatata

SEQ ID NO: 132609 - DNA, 19 bp, Homo sapiens
  siRNA target sequence for KCNS3 (NM_002252.3,1697-1715).
cattagggatatatatgca

SEQ ID NO: 132610 - DNA, 19 bp, Homo sapiens
  siRNA target sequence for KCNS3 (NM_002252.3,1718-1736).
gcggatgcacaccttcatt

SEQ ID NO: 132611 - DNA, 19 bp, Homo sapiens
  siRNA target sequence for KCNS3 (NM_002252.3,1719-1737).
cggatgcacaccttcatta

SEQ ID NO: 132612 - DNA, 19 bp, Homo sapiens
  siRNA target sequence for KCNS3 (NM_002252.3,1781-1799).
cacagatgcttcaagcatt

SEQ ID NO: 132613 - DNA, 19 bp, Homo sapiens
  siRNA target sequence for KCNV1 (NM_014379.2,674-692).
gatatgtcctgcactacta

SEQ ID NO: 132614 - DNA, 19 bp, Homo sapiens
  siRNA target sequence for KCNV1 (NM_014379.2,769-787).
gatgagctcagcatcgatt

SEQ ID NO: 132615 - DNA, 19 bp, Homo sapiens
  siRNA target sequence for KCNV1 (NM_014379.2,919-937).
cgccagaagctctggaata

SEQ ID NO: 132616 - DNA, 19 bp, Homo sapiens
  siRNA target sequence for KCNV1 (NM_014379.2,920-938).
gccagaagctctggaatat

SEQ ID NO: 132617 - DNA, 19 bp, Homo sapiens
  siRNA target sequence for KCNV1 (NM_014379.2,959-977).
ccacagctgcccgtatctt

SEQ ID NO: 132618 - DNA, 19 bp, Homo sapiens
  siRNA target sequence for KCNV1 (NM_014379.2,960-978).
cacagctgcccgtatcttt

SEQ ID NO: 132619 - DNA, 19 bp, Homo sapiens
  siRNA target sequence for KCNV1 (NM_014379.2,1003-1021).
gtggtgtccatcattaaca

SEQ ID NO: 132620 - DNA, 19 bp, Homo sapiens
  siRNA target sequence for KCNV1 (NM_014379.2,1026-1044).
cctgatgtcagctgagtta

SEQ ID NO: 132621 - DNA, 19 bp, Homo sapiens
  siRNA target sequence for KCNV1 (NM_014379.2,1075-1093).
ctggagtatgtgtgcatta

SEQ ID NO: 132622 - DNA, 19 bp, Homo sapiens
  siRNA target sequence for KCNV1 (NM_014379.2,1138-1156).
gacaggtgtcgcttcctaa

SEQ ID NO: 132623 - DNA, 19 bp, Homo sapiens
  siRNA target sequence for KCNV1 (NM_014379.2,1142-1160).
ggtgtcgcttcctaagaaa

SEQ ID NO: 132624 - DNA, 19 bp, Homo sapiens
  siRNA target sequence for KCNV1 (NM_014379.2,1298-1316).
ctctgcgcatgctaaagct

SEQ ID NO: 132625 - DNA, 19 bp, Homo sapiens
  siRNA target sequence for KCNV1 (NM_014379.2,1309-1327).
ctaaagctgggcagacatt

SEQ ID NO: 132626 - DNA, 19 bp, Homo sapiens
  siRNA target sequence for KCNV1 (NM_014379.2,1320-1338).
cagacattccacaggatta

SEQ ID NO: 132627 - DNA, 19 bp, Homo sapiens
  siRNA target sequence for KCNV1 (NM_014379.2,1339-1357).
cgctcccttgggatgacaa

SEQ ID NO: 132628 - DNA, 19 bp, Homo sapiens
  siRNA target sequence for KCNV1 (NM_014379.2,1361-1379).
cccagtgttacgaagaagt

SEQ ID NO: 132629 - DNA, 19 bp, Homo sapiens
  siRNA target sequence for KCNV1 (NM_014379.2,1384-1402).
ctactgctcctatttctat

SEQ ID NO: 132630 - DNA, 19 bp, Homo sapiens
  siRNA target sequence for KCNV1 (NM_014379.2,1399-1417).
ctatccgtgggaatctcta

SEQ ID NO: 132631 - DNA, 19 bp, Homo sapiens
  siRNA target sequence for KCNV1 (NM_014379.2,1403-1421).
ccgtgggaatctctatatt

SEQ ID NO: 132632 - DNA, 19 bp, Homo sapiens
  siRNA target sequence for KCNV1 (NM_014379.2,1437-1455).
ctttgctgagcaaagcatt

SEQ ID NO: 132633 - DNA, 19 bp, Homo sapiens
  siRNA target sequence for KCNV1 (NM_014379.2,1456-1474).
cctgacacaaccttcacaa

SEQ ID NO: 132634 - DNA, 19 bp, Homo sapiens
  siRNA target sequence for KCNV1 (NM_014379.2,1521-1539).
gggatatggggacattaga

SEQ ID NO: 132635 - DNA, 19 bp, Homo sapiens
  siRNA target sequence for KCNV1 (NM_014379.2,1547-1565).
ccaccacaggcaaaatcgt

SEQ ID NO: 132636 - DNA, 19 bp, Homo sapiens
  siRNA target sequence for KCNV1 (NM_014379.2,1563-1581).
cgtggccttcatgtgtata

SEQ ID NO: 132637 - DNA, 19 bp, Homo sapiens
  siRNA target sequence for KCNV1 (NM_014379.2,1566-1584).
ggccttcatgtgtatatta

SEQ ID NO: 132638 - DNA, 19 bp, Homo sapiens
  siRNA target sequence for KCNV1 (NM_014379.2,1567-1585).
gccttcatgtgtatattat

SEQ ID NO: 132639 - DNA, 19 bp, Homo sapiens
  siRNA target sequence for KCNV1 (NM_014379.2,1602-1620).
ggccttgcctattgctatt

SEQ ID NO: 132640 - DNA, 19 bp, Homo sapiens
  siRNA target sequence for KCNV1 (NM_014379.2,1610-1628).
ctattgctattattaacga

SEQ ID NO: 132641 - DNA, 19 bp, Homo sapiens
  siRNA target sequence for KCNV1 (NM_014379.2,1691-1709).
ccctaaagaagcttaccaa

SEQ ID NO: 132642 - DNA, 19 bp, Homo sapiens
  siRNA target sequence for KCNV1 (NM_014379.2,1717-1735).
gccactgactcatatatca

SEQ ID NO: 132643 - DNA, 19 bp, Homo sapiens
  siRNA target sequence for KCNV1 (NM_014379.2,1719-1737).
cactgactcatatatcagt

SEQ ID NO: 132644 - DNA, 19 bp, Homo sapiens
  siRNA target sequence for KCNV1 (NM_014379.2,1753-1771).
gtctatgcccggagtatca

SEQ ID NO: 132645 - DNA, 19 bp, Homo sapiens
  siRNA target sequence for KCTD10 (NM_031954.2,115-133).
cgagccccagctccaaata

SEQ ID NO: 132646 - DNA, 19 bp, Homo sapiens
  siRNA target sequence for KCTD10 (NM_031954.2,150-168).
ggtggagccctctactata

SEQ ID NO: 132647 - DNA, 19 bp, Homo sapiens
  siRNA target sequence for KCTD10 (NM_031954.2,153-171).
ggagccctctactatacca

SEQ ID NO: 132648 - DNA, 19 bp, Homo sapiens
  siRNA target sequence for KCTD10 (NM_031954.2,278-296).
gaagcactttggtacgata

SEQ ID NO: 132649 - DNA, 19 bp, Homo sapiens
  siRNA target sequence for KCTD10 (NM_031954.2,360-378).
ctagcagaagccaagtact

SEQ ID NO: 132650 - DNA, 19 bp, Homo sapiens
  siRNA target sequence for KCTD10 (NM_031954.2,414-432).
gccctacaaaacaaagata

SEQ ID NO: 132651 - DNA, 19 bp, Homo sapiens
  siRNA target sequence for KCTD10 (NM_031954.2,417-435).
ctacaaaacaaagatactt

SEQ ID NO: 132652 - DNA, 19 bp, Homo sapiens
  siRNA target sequence for KCTD10 (NM_031954.2,489-507).
cttatagcgacttcaaata

SEQ ID NO: 132653 - DNA, 19 bp, Homo sapiens
  siRNA target sequence for KCTD10 (NM_031954.2,562-580).
gcaattctgacgacaatat

SEQ ID NO: 132654 - DNA, 19 bp, Homo sapiens
  siRNA target sequence for KCTD10 (NM_031954.2,568-586).
ctgacgacaatatgttgaa

SEQ ID NO: 132655 - DNA, 19 bp, Homo sapiens
  siRNA target sequence for KCTD10 (NM_031954.2,570-588).
gacgacaatatgttgaaaa

SEQ ID NO: 132656 - DNA, 19 bp, Homo sapiens
  siRNA target sequence for KCTD10 (NM_031954.2,573-591).
gacaatatgttgaaaaaca

SEQ ID NO: 132657 - DNA, 19 bp, Homo sapiens
  siRNA target sequence for KCTD10 (NM_031954.2,626-644).
cggaagggtcctgttcata

SEQ ID NO: 132658 - DNA, 19 bp, Homo sapiens
  siRNA target sequence for KCTD10 (NM_031954.2,627-645).
ggaagggtcctgttcataa

SEQ ID NO: 132659 - DNA, 19 bp, Homo sapiens
  siRNA target sequence for KCTD10 (NM_031954.2,632-650).
ggtcctgttcataaaggat

SEQ ID NO: 132660 - DNA, 19 bp, Homo sapiens
  siRNA target sequence for KCTD10 (NM_031954.2,731-749).
ctatgccactgagaagaaa

SEQ ID NO: 132661 - DNA, 19 bp, Homo sapiens
  siRNA target sequence for KCTD10 (NM_031954.2,769-787).
ccgaagcccggatttatga

SEQ ID NO: 132662 - DNA, 19 bp, Homo sapiens
  siRNA target sequence for KCTD12 (NM_138444.2,254-272).
ggacagcacacgtggatta

SEQ ID NO: 132663 - DNA, 19 bp, Homo sapiens
  siRNA target sequence for KCTD12 (NM_138444.2,990-1008).
ggggacaccctgaacgaaa

SEQ ID NO: 132664 - DNA, 19 bp, Homo sapiens
  siRNA target sequence for KCTD12 (NM_138444.2,1036-1054).
gctacacctcgcgctatta

SEQ ID NO: 132665 - DNA, 19 bp, Homo sapiens
  siRNA target sequence for KCTD12 (NM_138444.2,1048-1066).
gctattacctcaagttcaa

SEQ ID NO: 132666 - DNA, 19 bp, Homo sapiens
  siRNA target sequence for KCTD13 (NM_178863.2,297-315).
ctgaccccgaacagcaaat

SEQ ID NO: 132667 - DNA, 19 bp, Homo sapiens
  siRNA target sequence for KCTD13 (NM_178863.2,433-451).
gaggttgggtgctgattga

SEQ ID NO: 132668 - DNA, 19 bp, Homo sapiens
  siRNA target sequence for KCTD13 (NM_178863.2,460-478).
gccgtcactttggtacaat

SEQ ID NO: 132669 - DNA, 19 bp, Homo sapiens
  siRNA target sequence for KCTD13 (NM_178863.2,711-729).
ctgcacaaccgcagtaaca

SEQ ID NO: 132670 - DNA, 19 bp, Homo sapiens
  siRNA target sequence for KCTD13 (NM_178863.2,720-738).
cgcagtaacaacaagtact

SEQ ID NO: 132671 - DNA, 19 bp, Homo sapiens
  siRNA target sequence for KCTD13 (NM_178863.2,754-772).
cagatgacaacctacttaa

SEQ ID NO: 132672 - DNA, 19 bp, Homo sapiens
  siRNA target sequence for KCTD13 (NM_178863.2,901-919).
gctgcacctccattgtcta

SEQ ID NO: 132673 - DNA, 19 bp, Homo sapiens
  siRNA target sequence for KCTD13 (NM_178863.2,1150-1168).
ctcatggccaacaaattgt

SEQ ID NO: 132674 - DNA, 19 bp, Homo sapiens
  siRNA target sequence for KCTD13 (NM_178863.2,1152-1170).
catggccaacaaattgtct

SEQ ID NO: 132675 - DNA, 19 bp, Homo sapiens
  siRNA target sequence for KCTD14 (NM_023930.2,319-337).
gctcagttctacgaaatca

SEQ ID NO: 132676 - DNA, 19 bp, Homo sapiens
  siRNA target sequence for KCTD14 (NM_023930.2,320-338).
ctcagttctacgaaatcaa

SEQ ID NO: 132677 - DNA, 19 bp, Homo sapiens
  siRNA target sequence for KCTD14 (NM_023930.2,388-406).
gtgtctcggaagcagtttt

SEQ ID NO: 132678 - DNA, 19 bp, Homo sapiens
  siRNA target sequence for KCTD14 (NM_023930.2,576-594).
caagtctgttgtcaagttt

SEQ ID NO: 132679 - DNA, 19 bp, Homo sapiens
  siRNA target sequence for KCTD14 (NM_023930.2,602-620).
ggaaggcggtcctagacaa

SEQ ID NO: 132680 - DNA, 19 bp, Homo sapiens
  siRNA target sequence for KCTD14 (NM_023930.2,638-656).
gcctggagatggacattaa

SEQ ID NO: 132681 - DNA, 19 bp, Homo sapiens
  siRNA target sequence for KCTD14 (NM_023930.2,658-676).
gcccaggggtacaaggtat

SEQ ID NO: 132682 - DNA, 19 bp, Homo sapiens
  siRNA target sequence for KCTD14 (NM_023930.2,659-677).
cccaggggtacaaggtatt

SEQ ID NO: 132683 - DNA, 19 bp, Homo sapiens
  siRNA target sequence for KCTD14 (NM_023930.2,661-679).
caggggtacaaggtattct

SEQ ID NO: 132684 - DNA, 19 bp, Homo sapiens
  siRNA target sequence for KCTD14 (NM_023930.2,693-711).
gacgtaccccaccaaaaga

SEQ ID NO: 132685 - DNA, 19 bp, Homo sapiens
  siRNA target sequence for KCTD14 (NM_023930.2,701-719).
ccaccaaaagaaacgaatt

SEQ ID NO: 132686 - DNA, 19 bp, Homo sapiens
  siRNA target sequence for KCTD15 (NM_024076.1,494-512).
ggataagccgcctcttcaa

SEQ ID NO: 132687 - DNA, 19 bp, Homo sapiens
  siRNA target sequence for KCTD15 (NM_024076.1,495-513).
gataagccgcctcttcaat

SEQ ID NO: 132688 - DNA, 19 bp, Homo sapiens
  siRNA target sequence for KCTD15 (NM_024076.1,562-580).
gaccgggatggggagattt

SEQ ID NO: 132689 - DNA, 19 bp, Homo sapiens
  siRNA target sequence for KCTD3 (NM_016121.2,194-212).
gcgagatcgtccaactgaa

SEQ ID NO: 132690 - DNA, 19 bp, Homo sapiens
  siRNA target sequence for KCTD3 (NM_016121.2,213-231).
cgtaggggggaccagattt

SEQ ID NO: 132691 - DNA, 19 bp, Homo sapiens
  siRNA target sequence for KCTD3 (NM_016121.2,214-232).
gtaggggggaccagattta

SEQ ID NO: 132692 - DNA, 19 bp, Homo sapiens
  siRNA target sequence for KCTD3 (NM_016121.2,217-235).
ggggggaccagatttagta

SEQ ID NO: 132693 - DNA, 19 bp, Homo sapiens
  siRNA target sequence for KCTD3 (NM_016121.2,236-254).
cctcaagacaaactcttat

SEQ ID NO: 132694 - DNA, 19 bp, Homo sapiens
  siRNA target sequence for KCTD3 (NM_016121.2,316-334).
gaaactggtgctatattta

SEQ ID NO: 132695 - DNA, 19 bp, Homo sapiens
  siRNA target sequence for KCTD3 (NM_016121.2,326-344).
ctatatttattgatagaga

SEQ ID NO: 132696 - DNA, 19 bp, Homo sapiens
  siRNA target sequence for KCTD3 (NM_016121.2,401-419).
ggggagtgagtattaatgt

SEQ ID NO: 132697 - DNA, 19 bp, Homo sapiens
  siRNA target sequence for KCTD3 (NM_016121.2,404-422).
gagtgagtattaatgttct

SEQ ID NO: 132698 - DNA, 19 bp, Homo sapiens
  siRNA target sequence for KCTD3 (NM_016121.2,425-443).
ggcatgaagcagaatttta

SEQ ID NO: 132699 - DNA, 19 bp, Homo sapiens
  siRNA target sequence for KCTD3 (NM_016121.2,444-462).
cgggatcactccattagta

SEQ ID NO: 132700 - DNA, 19 bp, Homo sapiens
  siRNA target sequence for KCTD3 (NM_016121.2,447-465).
gatcactccattagtaaga

SEQ ID NO: 132701 - DNA, 19 bp, Homo sapiens
  siRNA target sequence for KCTD3 (NM_016121.2,509-527).
gtgtcctttttcatggtta

SEQ ID NO: 132702 - DNA, 19 bp, Homo sapiens
  siRNA target sequence for KCTD3 (NM_016121.2,531-549).
gcccccaccaggtattcct

SEQ ID NO: 132703 - DNA, 19 bp, Homo sapiens
  siRNA target sequence for KCTD3 (NM_016121.2,541-559).
ggtattcctagtcgtaaaa

SEQ ID NO: 132704 - DNA, 19 bp, Homo sapiens
  siRNA target sequence for KCTD3 (NM_016121.2,542-560).
gtattcctagtcgtaaaat

SEQ ID NO: 132705 - DNA, 19 bp, Homo sapiens
  siRNA target sequence for KCTD3 (NM_016121.2,547-565).
cctagtcgtaaaataaaca

SEQ ID NO: 132706 - DNA, 19 bp, Homo sapiens
  siRNA target sequence for KCTD3 (NM_016121.2,729-747).
ctggattgtagctgcatat

SEQ ID NO: 132707 - DNA, 19 bp, Homo sapiens
  siRNA target sequence for KCTD3 (NM_016121.2,787-805).
ggatggcagcaagtgttta

SEQ ID NO: 132708 - DNA, 19 bp, Homo sapiens
  siRNA target sequence for KCTD3 (NM_016121.2,799-817).
gtgtttacgagcccatatt

SEQ ID NO: 132709 - DNA, 19 bp, Homo sapiens
  siRNA target sequence for KCTD3 (NM_016121.2,827-845).
ctatcgaacgagtagcttt

SEQ ID NO: 132710 - DNA, 19 bp, Homo sapiens
  siRNA target sequence for KCTD3 (NM_016121.2,831-849).
cgaacgagtagctttaaat

SEQ ID NO: 132711 - DNA, 19 bp, Homo sapiens
  siRNA target sequence for KCTD3 (NM_016121.2,835-853).
cgagtagctttaaatgcaa

SEQ ID NO: 132712 - DNA, 19 bp, Homo sapiens
  siRNA target sequence for KCTD3 (NM_016121.2,991-1009).
gctctcttctttattggta

SEQ ID NO: 132713 - DNA, 19 bp, Homo sapiens
  siRNA target sequence for KCTD3 (NM_016121.2,992-1010).
ctctcttctttattggtaa

SEQ ID NO: 132714 - DNA, 19 bp, Homo sapiens
  siRNA target sequence for KCTD3 (NM_016121.2,1071-1089).
ctggcaggttcaagatgtt

SEQ ID NO: 132715 - DNA, 19 bp, Homo sapiens
  siRNA target sequence for KCTD3 (NM_016121.2,1084-1102).
gatgttgttcctataacta

SEQ ID NO: 132716 - DNA, 19 bp, Homo sapiens
  siRNA target sequence for KCTD3 (NM_016121.2,1087-1105).
gttgttcctataactagtt

SEQ ID NO: 132717 - DNA, 19 bp, Homo sapiens
  siRNA target sequence for KCTD3 (NM_016121.2,1110-1128).
cactgctggatcattcctt

SEQ ID NO: 132718 - DNA, 19 bp, Homo sapiens
  siRNA target sequence for KCTD3 (NM_016121.2,1221-1239).
gtatcatgatccttcaaat

SEQ ID NO: 132719 - DNA, 19 bp, Homo sapiens
  siRNA target sequence for KCTD3 (NM_016121.2,1250-1268).
ctgctctgagtgtttacct

SEQ ID NO: 132720 - DNA, 19 bp, Homo sapiens
  siRNA target sequence for KCTD3 (NM_016121.2,1328-1346).
gagcagtacgagtgattgt

SEQ ID NO: 132721 - DNA, 19 bp, Homo sapiens
  siRNA target sequence for KCTD3 (NM_016121.2,1331-1349).
cagtacgagtgattgtaca

SEQ ID NO: 132722 - DNA, 19 bp, Homo sapiens
  siRNA target sequence for KCTD3 (NM_016121.2,1372-1390).
ggtcctcagctttttcaga

SEQ ID NO: 132723 - DNA, 19 bp, Homo sapiens
  siRNA target sequence for KCTD3 (NM_016121.2,1402-1420).
caccgaagtcccgtaacaa

SEQ ID NO: 132724 - DNA, 19 bp, Homo sapiens
  siRNA target sequence for KCTD3 (NM_016121.2,1404-1422).
ccgaagtcccgtaacaaaa

SEQ ID NO: 132725 - DNA, 19 bp, Homo sapiens
  siRNA target sequence for KCTD3 (NM_016121.2,1406-1424).
gaagtcccgtaacaaaaat

SEQ ID NO: 132726 - DNA, 19 bp, Homo sapiens
  siRNA target sequence for KCTD3 (NM_016121.2,1409-1427).
gtcccgtaacaaaaatcat

SEQ ID NO: 132727 - DNA, 19 bp, Homo sapiens
  siRNA target sequence for KCTD3 (NM_016121.2,1455-1473).
ctgtgcagataataatcat

SEQ ID NO: 132728 - DNA, 19 bp, Homo sapiens
  siRNA target sequence for KCTD3 (NM_016121.2,1474-1492).
gtccggacgtggacagtaa

SEQ ID NO: 132729 - DNA, 19 bp, Homo sapiens
  siRNA target sequence for KCTD3 (NM_016121.2,1476-1494).
ccggacgtggacagtaaca

SEQ ID NO: 132730 - DNA, 19 bp, Homo sapiens
  siRNA target sequence for KCTD3 (NM_016121.2,1493-1511).
cacgattcagaggaatgat

SEQ ID NO: 132731 - DNA, 19 bp, Homo sapiens
  siRNA target sequence for KCTD3 (NM_016121.2,1495-1513).
cgattcagaggaatgatct

SEQ ID NO: 132732 - DNA, 19 bp, Homo sapiens
  siRNA target sequence for KCTD3 (NM_016121.2,1534-1552).
cctttagcgtcattcaaga

SEQ ID NO: 132733 - DNA, 19 bp, Homo sapiens
  siRNA target sequence for KCTD3 (NM_016121.2,1535-1553).
ctttagcgtcattcaagat

SEQ ID NO: 132734 - DNA, 19 bp, Homo sapiens
  siRNA target sequence for KCTD3 (NM_016121.2,1540-1558).
gcgtcattcaagatactat

SEQ ID NO: 132735 - DNA, 19 bp, Homo sapiens
  siRNA target sequence for KCTD3 (NM_016121.2,1619-1637).
gagagcgagacgatcaaca

SEQ ID NO: 132736 - DNA, 19 bp, Homo sapiens
  siRNA target sequence for KCTD3 (NM_016121.2,1627-1645).
gacgatcaacaggtgttta

SEQ ID NO: 132737 - DNA, 19 bp, Homo sapiens
  siRNA target sequence for KCTD3 (NM_016121.2,1722-1740).
ggctgttgactgtactaca

SEQ ID NO: 132738 - DNA, 19 bp, Homo sapiens
  siRNA target sequence for KCTD3 (NM_016121.2,1723-1741).
gctgttgactgtactacaa

SEQ ID NO: 132739 - DNA, 19 bp, Homo sapiens
  siRNA target sequence for KCTD3 (NM_016121.2,1724-1742).
ctgttgactgtactacaat

SEQ ID NO: 132740 - DNA, 19 bp, Homo sapiens
  siRNA target sequence for KCTD3 (NM_016121.2,1793-1811).
gaccaaggcgctacttgtt

SEQ ID NO: 132741 - DNA, 19 bp, Homo sapiens
  siRNA target sequence for KCTD3 (NM_016121.2,1795-1813).
ccaaggcgctacttgttca

SEQ ID NO: 132742 - DNA, 19 bp, Homo sapiens
  siRNA target sequence for KCTD3 (NM_016121.2,1849-1867).
ctgaccactgctatggata

SEQ ID NO: 132743 - DNA, 19 bp, Homo sapiens
  siRNA target sequence for KCTD3 (NM_016121.2,1858-1876).
gctatggatatggttaaca

SEQ ID NO: 132744 - DNA, 19 bp, Homo sapiens
  siRNA target sequence for KCTD3 (NM_016121.2,1859-1877).
ctatggatatggttaacaa

SEQ ID NO: 132745 - DNA, 19 bp, Homo sapiens
  siRNA target sequence for KCTD3 (NM_016121.2,1863-1881).
ggatatggttaacaaaagt

SEQ ID NO: 132746 - DNA, 19 bp, Homo sapiens
  siRNA target sequence for KCTD3 (NM_016121.2,1898-1916).
gtggtccaaccgaagaaga

SEQ ID NO: 132747 - DNA, 19 bp, Homo sapiens
  siRNA target sequence for KCTD3 (NM_016121.2,1908-1926).
cgaagaagagctactcaaa

SEQ ID NO: 132748 - DNA, 19 bp, Homo sapiens
  siRNA target sequence for KCTD3 (NM_016121.2,1909-1927).
gaagaagagctactcaaat

SEQ ID NO: 132749 - DNA, 19 bp, Homo sapiens
  siRNA target sequence for KCTD3 (NM_016121.2,1921-1939).
ctcaaattactcgatcaat

SEQ ID NO: 132750 - DNA, 19 bp, Homo sapiens
  siRNA target sequence for KCTD3 (NM_016121.2,1930-1948).
ctcgatcaatgtgatttga

SEQ ID NO: 132751 - DNA, 19 bp, Homo sapiens
  siRNA target sequence for KCTD3 (NM_016121.2,1958-1976).
gctgtgctactcctaacat

SEQ ID NO: 132752 - DNA, 19 bp, Homo sapiens
  siRNA target sequence for KCTD3 (NM_016121.2,1982-2000).
cagcaacttccgtagttca

SEQ ID NO: 132753 - DNA, 19 bp, Homo sapiens
  siRNA target sequence for KCTD3 (NM_016121.2,2007-2025).
ccacttacgagaatcaaat

SEQ ID NO: 132754 - DNA, 19 bp, Homo sapiens
  siRNA target sequence for KCTD3 (NM_016121.2,2008-2026).
cacttacgagaatcaaatt

SEQ ID NO: 132755 - DNA, 19 bp, Homo sapiens
  siRNA target sequence for KCTD3 (NM_016121.2,2010-2028).
cttacgagaatcaaattct

SEQ ID NO: 132756 - DNA, 19 bp, Homo sapiens
  siRNA target sequence for KCTD3 (NM_016121.2,2057-2075).
cccatgaagcagctactta

SEQ ID NO: 132757 - DNA, 19 bp, Homo sapiens
  siRNA target sequence for KCTD3 (NM_016121.2,2129-2147).
ctgagagctttcacagtta

SEQ ID NO: 132758 - DNA, 19 bp, Homo sapiens
  siRNA target sequence for KCTD3 (NM_016121.2,2150-2168).
gggacttccagactattaa

SEQ ID NO: 132759 - DNA, 19 bp, Homo sapiens
  siRNA target sequence for KCTD3 (NM_016121.2,2151-2169).
ggacttccagactattaat

SEQ ID NO: 132760 - DNA, 19 bp, Homo sapiens
  siRNA target sequence for KCTD3 (NM_016121.2,2207-2225).
gtaacttgggtccaataca

SEQ ID NO: 132761 - DNA, 19 bp, Homo sapiens
  siRNA target sequence for KCTD3 (NM_016121.2,2239-2257).
ggggcaacaggggaatgta

SEQ ID NO: 132762 - DNA, 19 bp, Homo sapiens
  siRNA target sequence for KCTD3 (NM_016121.2,2243-2261).
caacaggggaatgtaatat

SEQ ID NO: 132763 - DNA, 19 bp, Homo sapiens
  siRNA target sequence for KCTD3 (NM_016121.2,2249-2267).
gggaatgtaatatatctga

SEQ ID NO: 132764 - DNA, 19 bp, Homo sapiens
  siRNA target sequence for KCTD3 (NM_016121.2,2315-2333).
gtggattggaagtgcataa

SEQ ID NO: 132765 - DNA, 19 bp, Homo sapiens
  siRNA target sequence for KCTD3 (NM_016121.2,2317-2335).
ggattggaagtgcataaaa

SEQ ID NO: 132766 - DNA, 19 bp, Homo sapiens
  siRNA target sequence for KCTD3 (NM_016121.2,2318-2336).
gattggaagtgcataaaat

SEQ ID NO: 132767 - DNA, 19 bp, Homo sapiens
  siRNA target sequence for KCTD5 (NM_018992.1,429-447).
gcagaattttacaatatca

SEQ ID NO: 132768 - DNA, 19 bp, Homo sapiens
  siRNA target sequence for KCTD5 (NM_018992.1,446-464).
cacctcattaataaaactt

SEQ ID NO: 132769 - DNA, 19 bp, Homo sapiens
  siRNA target sequence for KCTD5 (NM_018992.1,449-467).
ctcattaataaaacttgta

SEQ ID NO: 132770 - DNA, 19 bp, Homo sapiens
  siRNA target sequence for KCTD5 (NM_018992.1,713-731).
cagcgagaaggccaagatt

SEQ ID NO: 132771 - DNA, 19 bp, Homo sapiens
  siRNA target sequence for KCTD6 (NM_153331.2,401-419).
ggagactggggctatatga

SEQ ID NO: 132772 - DNA, 19 bp, Homo sapiens
  siRNA target sequence for KCTD6 (NM_153331.2,402-420).
gagactggggctatatgat

SEQ ID NO: 132773 - DNA, 19 bp, Homo sapiens
  siRNA target sequence for KCTD6 (NM_153331.2,404-422).
gactggggctatatgatga

SEQ ID NO: 132774 - DNA, 19 bp, Homo sapiens
  siRNA target sequence for KCTD6 (NM_153331.2,443-461).
gtaggtggacacttgtata

SEQ ID NO: 132775 - DNA, 19 bp, Homo sapiens
  siRNA target sequence for KCTD6 (NM_153331.2,446-464).
ggtggacacttgtatacaa

SEQ ID NO: 132776 - DNA, 19 bp, Homo sapiens
  siRNA target sequence for KCTD6 (NM_153331.2,498-516).
ccatgcttggagctatgtt

SEQ ID NO: 132777 - DNA, 19 bp, Homo sapiens
  siRNA target sequence for KCTD6 (NM_153331.2,499-517).
catgcttggagctatgttt

SEQ ID NO: 132778 - DNA, 19 bp, Homo sapiens
  siRNA target sequence for KCTD6 (NM_153331.2,542-560).
gaccctcaaggcaattact

SEQ ID NO: 132779 - DNA, 19 bp, Homo sapiens
  siRNA target sequence for KCTD6 (NM_153331.2,576-594).
gacctcttttccgatatgt

SEQ ID NO: 132780 - DNA, 19 bp, Homo sapiens
  siRNA target sequence for KCTD6 (NM_153331.2,587-605).
cgatatgtcctcaacttct

SEQ ID NO: 132781 - DNA, 19 bp, Homo sapiens
  siRNA target sequence for KCTD6 (NM_153331.2,588-606).
gatatgtcctcaacttctt

SEQ ID NO: 132782 - DNA, 19 bp, Homo sapiens
  siRNA target sequence for KCTD6 (NM_153331.2,596-614).
ctcaacttcttaagaactt

SEQ ID NO: 132783 - DNA, 19 bp, Homo sapiens
  siRNA target sequence for KCTD6 (NM_153331.2,622-640).
gaccttaccgttggatttt

SEQ ID NO: 132784 - DNA, 19 bp, Homo sapiens
  siRNA target sequence for KCTD6 (NM_153331.2,624-642).
ccttaccgttggattttaa

SEQ ID NO: 132785 - DNA, 19 bp, Homo sapiens
  siRNA target sequence for KCTD6 (NM_153331.2,629-647).
ccgttggattttaaggaat

SEQ ID NO: 132786 - DNA, 19 bp, Homo sapiens
  siRNA target sequence for KCTD6 (NM_153331.2,669-687).
cagatttttaccagattga

SEQ ID NO: 132787 - DNA, 19 bp, Homo sapiens
  siRNA target sequence for KCTD6 (NM_153331.2,694-712).
gattcagtgtctcaatgat

SEQ ID NO: 132788 - DNA, 19 bp, Homo sapiens
  siRNA target sequence for KCTD6 (NM_153331.2,719-737).
cctttgtatcccatggata

SEQ ID NO: 132789 - DNA, 19 bp, Homo sapiens
  siRNA target sequence for KCTD6 (NM_153331.2,724-742).
gtatcccatggatactttt

SEQ ID NO: 132790 - DNA, 19 bp, Homo sapiens
  siRNA target sequence for KCTD6 (NM_153331.2,749-767).
gttgtggagctgtctagta

SEQ ID NO: 132791 - DNA, 19 bp, Homo sapiens
  siRNA target sequence for KCTD6 (NM_153331.2,765-783).
gtactcggaagctttctaa

SEQ ID NO: 132792 - DNA, 19 bp, Homo sapiens
  siRNA target sequence for KCTD6 (NM_153331.2,793-811).
cccagtggctgtcatcata

SEQ ID NO: 132793 - DNA, 19 bp, Homo sapiens
  siRNA target sequence for KCTD6 (NM_153331.2,794-812).
ccagtggctgtcatcataa

SEQ ID NO: 132794 - DNA, 19 bp, Homo sapiens
  siRNA target sequence for KCTD6 (NM_153331.2,803-821).
gtcatcataacgcaactaa

SEQ ID NO: 132795 - DNA, 19 bp, Homo sapiens
  siRNA target sequence for KCTD6 (NM_153331.2,851-869).
gaaggcatctcaaattatt

SEQ ID NO: 132796 - DNA, 19 bp, Homo sapiens
  siRNA target sequence for KCTD6 (NM_153331.2,903-921).
gagactgccaggtttcctt

SEQ ID NO: 132797 - DNA, 19 bp, Homo sapiens
  siRNA target sequence for KCTD6 (NM_153331.2,909-927).
gccaggtttcctttacttt

SEQ ID NO: 132798 - DNA, 19 bp, Homo sapiens
  siRNA target sequence for KCTD6 (NM_153331.2,924-942).
cttttggaccctgtgatta

SEQ ID NO: 132799 - DNA, 19 bp, Homo sapiens
  siRNA target sequence for KCTD6 (NM_153331.2,963-981).
gggtccacctgatggaata

SEQ ID NO: 132800 - DNA, 19 bp, Homo sapiens
  siRNA target sequence for KCTD6 (NM_153331.2,970-988).
cctgatggaatacattaca

SEQ ID NO: 132801 - DNA, 19 bp, Homo sapiens
  siRNA target sequence for KCTD6 (NM_153331.2,1058-1076).
gagcacaactggactttct

SEQ ID NO: 132802 - DNA, 19 bp, Homo sapiens
  siRNA target sequence for KCTD7 (NM_153033.1,258-276).
gaggttgttccccttaaca

SEQ ID NO: 132803 - DNA, 19 bp, Homo sapiens
  siRNA target sequence for KCTD7 (NM_153033.1,279-297).
ggaggggctcacttcacta

SEQ ID NO: 132804 - DNA, 19 bp, Homo sapiens
  siRNA target sequence for KCTD7 (NM_153033.1,401-419).
ccgagatggcacacacttt

SEQ ID NO: 132805 - DNA, 19 bp, Homo sapiens
  siRNA target sequence for KCTD7 (NM_153033.1,469-487).
gtgttcgagctgtgtacaa

SEQ ID NO: 132806 - DNA, 19 bp, Homo sapiens
  siRNA target sequence for KCTD7 (NM_153033.1,579-597).
ggactcatgccctattaca

SEQ ID NO: 132807 - DNA, 19 bp, Homo sapiens
  siRNA target sequence for KCTD7 (NM_153033.1,815-833).
ggctgtggctgatgtttat

SEQ ID NO: 132808 - DNA, 19 bp, Homo sapiens
  siRNA target sequence for KCTD7 (NM_153033.1,918-936).
ctcgtgaaccactactact

SEQ ID NO: 132809 - DNA, 19 bp, Homo sapiens
  siRNA target sequence for KEAP1 (NM_012289.2,192-210).
caggggacgcggtgatgta

SEQ ID NO: 132810 - DNA, 19 bp, Homo sapiens
  siRNA target sequence for KEAP1 (NM_012289.2,564-582).
gtgtcctccacgtcatgaa

SEQ ID NO: 132811 - DNA, 19 bp, Homo sapiens
  siRNA target sequence for KEAP1 (NM_012289.2,858-876).
gcatcaactgggtcaagta

SEQ ID NO: 132812 - DNA, 19 bp, Homo sapiens
  siRNA target sequence for KEAP1 (NM_012289.2,1549-1567).
cgggacaaaccgccttaat

SEQ ID NO: 132813 - DNA, 19 bp, Homo sapiens
  siRNA target sequence for KEAP1 (NM_012289.2,1552-1570).
gacaaaccgccttaattca

SEQ ID NO: 132814 - DNA, 19 bp, Homo sapiens
  siRNA target sequence for KEAP1 (NM_012289.2,1593-1611).
ggaacgagtggcgaatgat

SEQ ID NO: 132815 - DNA, 19 bp, Homo sapiens
  siRNA target sequence for KEAP1 (NM_012289.2,1650-1668).
gcgtcctgcacaactgtat

SEQ ID NO: 132816 - DNA, 19 bp, Homo sapiens
  siRNA target sequence for KEAP1 (NM_012289.2,1654-1672).
cctgcacaactgtatctat

SEQ ID NO: 132817 - DNA, 19 bp, Homo sapiens
  siRNA target sequence for KIAA0469 (NM_014851.1,1179-1197).
cgctgggcaatgacatcta

SEQ ID NO: 132818 - DNA, 19 bp, Homo sapiens
  siRNA target sequence for KIAA0469 (NM_014851.1,1217-1235).
ggctcccggctctatgact

SEQ ID NO: 132819 - DNA, 19 bp, Homo sapiens
  siRNA target sequence for KIAA0469 (NM_014851.1,1238-1256).
gtgtggaggtacaactcaa

SEQ ID NO: 132820 - DNA, 19 bp, Homo sapiens
  siRNA target sequence for KIAA0469 (NM_014851.1,1571-1589).
cccaagactgcgactctaa

SEQ ID NO: 132821 - DNA, 19 bp, Homo sapiens
  siRNA target sequence for KIAA0469 (NM_014851.1,1572-1590).
ccaagactgcgactctaaa

SEQ ID NO: 132822 - DNA, 19 bp, Homo sapiens
  siRNA target sequence for KIAA0469 (NM_014851.1,1584-1602).
ctctaaacggactcatgta

SEQ ID NO: 132823 - DNA, 19 bp, Homo sapiens
  siRNA target sequence for KIAA0469 (NM_014851.1,1586-1604).
ctaaacggactcatgtact

SEQ ID NO: 132824 - DNA, 19 bp, Homo sapiens
  siRNA target sequence for KIAA0469 (NM_014851.1,1623-1641).
ctgaggtggacgtgtacaa

SEQ ID NO: 132825 - DNA, 19 bp, Homo sapiens
  siRNA target sequence for KIAA0469 (NM_014851.1,1650-1668).
ggaacgaatgggacaagat

SEQ ID NO: 132826 - DNA, 19 bp, Homo sapiens
  siRNA target sequence for KIAA0469 (NM_014851.1,1675-1693).
catgaatcaggtaaatttt

SEQ ID NO: 132827 - DNA, 19 bp, Homo sapiens
  siRNA target sequence for KIAA0469 (NM_014851.1,1746-1764).
gtcatcgtgatgagtgttt

SEQ ID NO: 132828 - DNA, 19 bp, Homo sapiens
  siRNA target sequence for KIAA0711 (NM_014867.1,2324-2342).
cctgccacggcgagatcta

SEQ ID NO: 132829 - DNA, 19 bp, Homo sapiens
  siRNA target sequence for KIAA0711 (NM_014867.1,2364-2382).
ctatcgcctgctcaagtat

SEQ ID NO: 132830 - DNA, 19 bp, Homo sapiens
  siRNA target sequence for KIAA0711 (NM_014867.1,2452-2470).
gctctcgacggcttcatct

SEQ ID NO: 132831 - DNA, 19 bp, Homo sapiens
  siRNA target sequence for KIAA0711 (NM_014867.1,2453-2471).
ctctcgacggcttcatcta

SEQ ID NO: 132832 - DNA, 19 bp, Homo sapiens
  siRNA target sequence for KIAA0795 (NM_025010.1,635-653).
cattggcctgggtcagata

SEQ ID NO: 132833 - DNA, 19 bp, Homo sapiens
  siRNA target sequence for KIAA0795 (NM_025010.1,682-700).
cctgagctgctgtccaata

SEQ ID NO: 132834 - DNA, 19 bp, Homo sapiens
  siRNA target sequence for KIAA0795 (NM_025010.1,683-701).
ctgagctgctgtccaatat

SEQ ID NO: 132835 - DNA, 19 bp, Homo sapiens
  siRNA target sequence for KIAA0795 (NM_025010.1,760-778).
gtgcgttgctgccacaaat

SEQ ID NO: 132836 - DNA, 19 bp, Homo sapiens
  siRNA target sequence for KIAA0795 (NM_025010.1,875-893).
ccatcgctggacttatcta

SEQ ID NO: 132837 - DNA, 19 bp, Homo sapiens
  siRNA target sequence for KIAA0795 (NM_025010.1,949-967).
gaccccattgccaattgct

SEQ ID NO: 132838 - DNA, 19 bp, Homo sapiens
  siRNA target sequence for KIAA0795 (NM_025010.1,1113-1131).
cagagtggggagcatgaat

SEQ ID NO: 132839 - DNA, 19 bp, Homo sapiens
  siRNA target sequence for KIAA0795 (NM_025010.1,1156-1174).
cacgtgcagcccgaacata

SEQ ID NO: 132840 - DNA, 19 bp, Homo sapiens
  siRNA target sequence for KIAA0795 (NM_025010.1,1158-1176).
cgtgcagcccgaacataca

SEQ ID NO: 132841 - DNA, 19 bp, Homo sapiens
  siRNA target sequence for KIAA1309 (NM_033495.1,215-233).
gcctctcatcccatttgca

SEQ ID NO: 132842 - DNA, 19 bp, Homo sapiens
  siRNA target sequence for KIAA1309 (NM_033495.1,247-265).
ggacctacacgcatcttta

SEQ ID NO: 132843 - DNA, 19 bp, Homo sapiens
  siRNA target sequence for KIAA1309 (NM_033495.1,250-268).
cctacacgcatctttacca

SEQ ID NO: 132844 - DNA, 19 bp, Homo sapiens
  siRNA target sequence for KIAA1309 (NM_033495.1,348-366).
gccaggtgacacagatgat

SEQ ID NO: 132845 - DNA, 19 bp, Homo sapiens
  siRNA target sequence for KIAA1309 (NM_033495.1,374-392).
ctgtgcatagagtcatgat

SEQ ID NO: 132846 - DNA, 19 bp, Homo sapiens
  siRNA target sequence for KIAA1309 (NM_033495.1,479-497).
gcaaagtcggtctaaggaa

SEQ ID NO: 132847 - DNA, 19 bp, Homo sapiens
  siRNA target sequence for KIAA1309 (NM_033495.1,480-498).
caaagtcggtctaaggaaa

SEQ ID NO: 132848 - DNA, 19 bp, Homo sapiens
  siRNA target sequence for KIAA1309 (NM_033495.1,618-636).
catatctggggtcacttta

SEQ ID NO: 132849 - DNA, 19 bp, Homo sapiens
  siRNA target sequence for KIAA1309 (NM_033495.1,683-701).
ccgaagtggataaatacgt

SEQ ID NO: 132850 - DNA, 19 bp, Homo sapiens
  siRNA target sequence for KIAA1309 (NM_033495.1,690-708).
ggataaatacgttaacagt

SEQ ID NO: 132851 - DNA, 19 bp, Homo sapiens
  siRNA target sequence for KIAA1309 (NM_033495.1,691-709).
gataaatacgttaacagtt

SEQ ID NO: 132852 - DNA, 19 bp, Homo sapiens
  siRNA target sequence for KIAA1309 (NM_033495.1,743-761).
caggggagttcttgaaact

SEQ ID NO: 132853 - DNA, 19 bp, Homo sapiens
  siRNA target sequence for KIAA1309 (NM_033495.1,870-888).
gatggactttgctgcaaaa

SEQ ID NO: 132854 - DNA, 19 bp, Homo sapiens
  siRNA target sequence for KIAA1309 (NM_033495.1,874-892).
gactttgctgcaaaattaa

SEQ ID NO: 132855 - DNA, 19 bp, Homo sapiens
  siRNA target sequence for KIAA1309 (NM_033495.1,943-961).
gtgcaaacggtggatttca

SEQ ID NO: 132856 - DNA, 19 bp, Homo sapiens
  siRNA target sequence for KIAA1309 (NM_033495.1,946-964).
caaacggtggatttcatga

SEQ ID NO: 132857 - DNA, 19 bp, Homo sapiens
  siRNA target sequence for KIAA1309 (NM_033495.1,963-981).
gagaactgacaatacttgt

SEQ ID NO: 132858 - DNA, 19 bp, Homo sapiens
  siRNA target sequence for KIAA1309 (NM_033495.1,1048-1066).
gacaggactgccattaggt

SEQ ID NO: 132859 - DNA, 19 bp, Homo sapiens
  siRNA target sequence for KIAA1309 (NM_033495.1,1128-1146).
ggaattgcgcatgtatgat

SEQ ID NO: 132860 - DNA, 19 bp, Homo sapiens
  siRNA target sequence for KIAA1309 (NM_033495.1,1153-1171).
gcccatgagtggaaatcgt

SEQ ID NO: 132861 - DNA, 19 bp, Homo sapiens
  siRNA target sequence for KIAA1309 (NM_033495.1,1154-1172).
cccatgagtggaaatcgtt

SEQ ID NO: 132862 - DNA, 19 bp, Homo sapiens
  siRNA target sequence for KIAA1309 (NM_033495.1,1155-1173).
ccatgagtggaaatcgtta

SEQ ID NO: 132863 - DNA, 19 bp, Homo sapiens
  siRNA target sequence for KIAA1309 (NM_033495.1,1204-1222).
ggcatcgccgtcattggaa

SEQ ID NO: 132864 - DNA, 19 bp, Homo sapiens
  siRNA target sequence for KIAA1309 (NM_033495.1,1206-1224).
catcgccgtcattggaaat

SEQ ID NO: 132865 - DNA, 19 bp, Homo sapiens
  siRNA target sequence for KIAA1309 (NM_033495.1,1236-1254).
ggttggcggacagagtaat

SEQ ID NO: 132866 - DNA, 19 bp, Homo sapiens
  siRNA target sequence for KIAA1309 (NM_033495.1,1363-1381).
ctaagtgccctcaaaggat

SEQ ID NO: 132867 - DNA, 19 bp, Homo sapiens
  siRNA target sequence for KIAA1309 (NM_033495.1,1497-1515).
ccatgctggaactgtgtat

SEQ ID NO: 132868 - DNA, 19 bp, Homo sapiens
  siRNA target sequence for KIAA1309 (NM_033495.1,1586-1604).
ctgatactgacaaatggat

SEQ ID NO: 132869 - DNA, 19 bp, Homo sapiens
  siRNA target sequence for KIAA1309 (NM_033495.1,1798-1816).
ggggtcgctgtcttcgaaa

SEQ ID NO: 132870 - DNA, 19 bp, Homo sapiens
  siRNA target sequence for KIAA1309 (NM_033495.1,1799-1817).
gggtcgctgtcttcgaaaa

SEQ ID NO: 132871 - DNA, 19 bp, Homo sapiens
  siRNA target sequence for KIAA1309 (NM_033495.1,1800-1818).
ggtcgctgtcttcgaaaat

SEQ ID NO: 132872 - DNA, 19 bp, Homo sapiens
  siRNA target sequence for KIAA1309 (NM_033495.1,1801-1819).
gtcgctgtcttcgaaaata

SEQ ID NO: 132873 - DNA, 19 bp, Homo sapiens
  siRNA target sequence for KIAA1309 (NM_033495.1,1803-1821).
cgctgtcttcgaaaataaa

SEQ ID NO: 132874 - DNA, 19 bp, Homo sapiens
  siRNA target sequence for KIAA1309 (NM_033495.1,1983-2001).
cacaccatcaccttctaga

SEQ ID NO: 132875 - DNA, 19 bp, Homo sapiens
  siRNA target sequence for KIAA1354 (NM_018847.1,545-563).
gcgtctctgcccatttgca

SEQ ID NO: 132876 - DNA, 19 bp, Homo sapiens
  siRNA target sequence for KIAA1354 (NM_018847.1,554-572).
cccatttgcagccttgtaa

SEQ ID NO: 132877 - DNA, 19 bp, Homo sapiens
  siRNA target sequence for KIAA1354 (NM_018847.1,577-595).
ggaaccacacgctttttta

SEQ ID NO: 132878 - DNA, 19 bp, Homo sapiens
  siRNA target sequence for KIAA1354 (NM_018847.1,588-606).
cttttttaccagcaatact

SEQ ID NO: 132879 - DNA, 19 bp, Homo sapiens
  siRNA target sequence for KIAA1354 (NM_018847.1,609-627).
cagttcggtggtattgcaa

SEQ ID NO: 132880 - DNA, 19 bp, Homo sapiens
  siRNA target sequence for KIAA1354 (NM_018847.1,618-636).
ggtattgcaaggctttgat

SEQ ID NO: 132881 - DNA, 19 bp, Homo sapiens
  siRNA target sequence for KIAA1354 (NM_018847.1,683-701).
gtgatggagatgaaatctt

SEQ ID NO: 132882 - DNA, 19 bp, Homo sapiens
  siRNA target sequence for KIAA1900 (NM_052904.1,366-384).
ctgaacgctgcctcagtat

SEQ ID NO: 132883 - DNA, 19 bp, Homo sapiens
  siRNA target sequence for KIAA1900 (NM_052904.1,375-393).
gcctcagtattcaagaaat

SEQ ID NO: 132884 - DNA, 19 bp, Homo sapiens
  siRNA target sequence for KIAA1900 (NM_052904.1,415-433).
ccactccgaatctcacaat

SEQ ID NO: 132885 - DNA, 19 bp, Homo sapiens
  siRNA target sequence for KIAA1900 (NM_052904.1,560-578).
cgggcaatgttcagtcttt

SEQ ID NO: 132886 - DNA, 19 bp, Homo sapiens
  siRNA target sequence for KIAA1900 (NM_052904.1,563-581).
gcaatgttcagtctttgta

SEQ ID NO: 132887 - DNA, 19 bp, Homo sapiens
  siRNA target sequence for KIAA1900 (NM_052904.1,641-659).
caggctctggagtttgcat

SEQ ID NO: 132888 - DNA, 19 bp, Homo sapiens
  siRNA target sequence for KIAA1900 (NM_052904.1,656-674).
gcatacacaggacagattt

SEQ ID NO: 132889 - DNA, 19 bp, Homo sapiens
  siRNA target sequence for KIAA1900 (NM_052904.1,734-752).
gagcttctcaatttatgct

SEQ ID NO: 132890 - DNA, 19 bp, Homo sapiens
  siRNA target sequence for KIAA1900 (NM_052904.1,761-779).
ctcatccaggaattaaata

SEQ ID NO: 132891 - DNA, 19 bp, Homo sapiens
  siRNA target sequence for KIAA1900 (NM_052904.1,804-822).
gacttgctgacctctttaa

SEQ ID NO: 132892 - DNA, 19 bp, Homo sapiens
  siRNA target sequence for KIAA1900 (NM_052904.1,836-854).
gagaaggcagtgatcgatt

SEQ ID NO: 132893 - DNA, 19 bp, Homo sapiens
  siRNA target sequence for KIAA1900 (NM_052904.1,841-859).
ggcagtgatcgatttctta

SEQ ID NO: 132894 - DNA, 19 bp, Homo sapiens
  siRNA target sequence for KIAA1900 (NM_052904.1,843-861).
cagtgatcgatttcttagt

SEQ ID NO: 132895 - DNA, 19 bp, Homo sapiens
  siRNA target sequence for KIAA1900 (NM_052904.1,845-863).
gtgatcgatttcttagtga

SEQ ID NO: 132896 - DNA, 19 bp, Homo sapiens
  siRNA target sequence for KIAA1900 (NM_052904.1,847-865).
gatcgatttcttagtgaaa

SEQ ID NO: 132897 - DNA, 19 bp, Homo sapiens
  siRNA target sequence for KIAA1900 (NM_052904.1,1072-1090).
ggatactctccatacagtt

SEQ ID NO: 132898 - DNA, 19 bp, Homo sapiens
  siRNA target sequence for KIAA1900 (NM_052904.1,1216-1234).
ccagtcagacactctgtat

SEQ ID NO: 132899 - DNA, 19 bp, Homo sapiens
  siRNA target sequence for KIAA1900 (NM_052904.1,1221-1239).
cagacactctgtatatcat

SEQ ID NO: 132900 - DNA, 19 bp, Homo sapiens
  siRNA target sequence for KIAA1900 (NM_052904.1,1273-1291).
ggaacttcggtacttcaat

SEQ ID NO: 132901 - DNA, 19 bp, Homo sapiens
  siRNA target sequence for KIAA1900 (NM_052904.1,1496-1514).
gagatagcacccatgaaaa

SEQ ID NO: 132902 - DNA, 19 bp, Homo sapiens
  siRNA target sequence for KIAA1900 (NM_052904.1,1539-1557).
gtgccatggaggaatacct

SEQ ID NO: 132903 - DNA, 19 bp, Homo sapiens
  siRNA target sequence for KIAA1900 (NM_052904.1,1598-1616).
cctacagttgagcgatatt

SEQ ID NO: 132904 - DNA, 19 bp, Homo sapiens
  siRNA target sequence for KIAA1900 (NM_052904.1,1610-1628).
cgatattgccccaagaaga

SEQ ID NO: 132905 - DNA, 19 bp, Homo sapiens
  siRNA target sequence for KIAA1900 (NM_052904.1,1668-1686).
catgccatgctggatatgt

SEQ ID NO: 132906 - DNA, 19 bp, Homo sapiens
  siRNA target sequence for KIAA1900 (NM_052904.1,1705-1723).
gatatcaggtggagtaact

SEQ ID NO: 132907 - DNA, 19 bp, Homo sapiens
  siRNA target sequence for KIAA1900 (NM_052904.1,1744-1762).
caggctaatggtgtatgaa

SEQ ID NO: 132908 - DNA, 19 bp, Homo sapiens
  siRNA target sequence for KIAA1900 (NM_052904.1,1760-1778).
gaacctaaccagaataagt

SEQ ID NO: 132909 - DNA, 19 bp, Homo sapiens
  siRNA target sequence for KIAA1900 (NM_052904.1,1860-1878).
gcaatgacctagactacaa

SEQ ID NO: 132910 - DNA, 19 bp, Homo sapiens
  siRNA target sequence for KIAA1900 (NM_052904.1,1888-1906).
gatccttgtgcgccatata

SEQ ID NO: 132911 - DNA, 19 bp, Homo sapiens
  siRNA target sequence for KIAA1900 (NM_052904.1,1891-1909).
ccttgtgcgccatatagat

SEQ ID NO: 132912 - DNA, 19 bp, Homo sapiens
  siRNA target sequence for KIAA1900 (NM_052904.1,1895-1913).
gtgcgccatatagattctt

SEQ ID NO: 132913 - DNA, 19 bp, Homo sapiens
  siRNA target sequence for KIAA1900 (NM_052904.1,1898-1916).
cgccatatagattcttaca

SEQ ID NO: 132914 - DNA, 19 bp, Homo sapiens
  siRNA target sequence for KIAA1900 (NM_052904.1,1899-1917).
gccatatagattcttacaa

SEQ ID NO: 132915 - DNA, 19 bp, Homo sapiens
  siRNA target sequence for KIAA1900 (NM_052904.1,1930-1948).
ccagtggacacgttgtaat

SEQ ID NO: 132916 - DNA, 19 bp, Homo sapiens
  siRNA target sequence for KIAA1900 (NM_052904.1,1931-1949).
cagtggacacgttgtaatt

SEQ ID NO: 132917 - DNA, 19 bp, Homo sapiens
  siRNA target sequence for KIAA1900 (NM_052904.1,1935-1953).
ggacacgttgtaatttcaa

SEQ ID NO: 132918 - DNA, 19 bp, Homo sapiens
  siRNA target sequence for KIAA1900 (NM_052904.1,1988-2006).
gtccataatgggagaatat

SEQ ID NO: 132919 - DNA, 19 bp, Homo sapiens
  siRNA target sequence for KIAA1900 (NM_052904.1,2104-2122).
gcctacactcccttttgct

SEQ ID NO: 132920 - DNA, 19 bp, Homo sapiens
  siRNA target sequence for KIAA1900 (NM_052904.1,2170-2188).
ccctaaccttcaaactctt

SEQ ID NO: 132921 - DNA, 19 bp, Homo sapiens
  siRNA target sequence for KIP2 (NM_006383.1,32-50).
ccgaagagcagctagacaa

SEQ ID NO: 132922 - DNA, 19 bp, Homo sapiens
  siRNA target sequence for KIP2 (NM_006383.1,93-111).
gctgcattcgcgattctat

SEQ ID NO: 132923 - DNA, 19 bp, Homo sapiens
  siRNA target sequence for KIP2 (NM_006383.1,251-269).
gtgaggggaacctcacttt

SEQ ID NO: 132924 - DNA, 19 bp, Homo sapiens
  siRNA target sequence for KLHL6 (NM_130446.1,10-28).
gatgtggtcgagaagagtt

SEQ ID NO: 132925 - DNA, 19 bp, Homo sapiens
  siRNA target sequence for KLHL6 (NM_130446.1,15-33).
ggtcgagaagagtttggaa

SEQ ID NO: 132926 - DNA, 19 bp, Homo sapiens
  siRNA target sequence for KLHL6 (NM_130446.1,77-95).
gagacttggtcgagatctt

SEQ ID NO: 132927 - DNA, 19 bp, Homo sapiens
  siRNA target sequence for KLHL6 (NM_130446.1,79-97).
gacttggtcgagatcttaa

SEQ ID NO: 132928 - DNA, 19 bp, Homo sapiens
  siRNA target sequence for KLHL6 (NM_130446.1,81-99).
cttggtcgagatcttaaat

SEQ ID NO: 132929 - DNA, 19 bp, Homo sapiens
  siRNA target sequence for KLHL6 (NM_130446.1,121-139).
gacgcgggactctccttaa

SEQ ID NO: 132930 - DNA, 19 bp, Homo sapiens
  siRNA target sequence for KLHL6 (NM_130446.1,123-141).
cgcgggactctccttaatt

SEQ ID NO: 132931 - DNA, 19 bp, Homo sapiens
  siRNA target sequence for KLHL6 (NM_130446.1,125-143).
cgggactctccttaattct

SEQ ID NO: 132932 - DNA, 19 bp, Homo sapiens
  siRNA target sequence for KLHL6 (NM_130446.1,181-199).
ctgacagatgtcatcttgt

SEQ ID NO: 132933 - DNA, 19 bp, Homo sapiens
  siRNA target sequence for KLHL6 (NM_130446.1,241-259).
gccgcagccagcaactatt

SEQ ID NO: 132934 - DNA, 19 bp, Homo sapiens
  siRNA target sequence for KLHL6 (NM_130446.1,242-260).
ccgcagccagcaactattt

SEQ ID NO: 132935 - DNA, 19 bp, Homo sapiens
  siRNA target sequence for KLHL6 (NM_130446.1,266-284).
ccatgttctgcaacgattt

SEQ ID NO: 132936 - DNA, 19 bp, Homo sapiens
  siRNA target sequence for KLHL6 (NM_130446.1,267-285).
catgttctgcaacgattta

SEQ ID NO: 132937 - DNA, 19 bp, Homo sapiens
  siRNA target sequence for KLHL6 (NM_130446.1,482-500).
cagaaaactgcgttggaat

SEQ ID NO: 132938 - DNA, 19 bp, Homo sapiens
  siRNA target sequence for KLHL6 (NM_130446.1,524-542).
cgctggacagtctaaagaa

SEQ ID NO: 132939 - DNA, 19 bp, Homo sapiens
  siRNA target sequence for KLHL6 (NM_130446.1,544-562).
caggttcagagttacatca

SEQ ID NO: 132940 - DNA, 19 bp, Homo sapiens
  siRNA target sequence for KLHL6 (NM_130446.1,546-564).
ggttcagagttacatcatt

SEQ ID NO: 132941 - DNA, 19 bp, Homo sapiens
  siRNA target sequence for KLHL6 (NM_130446.1,620-638).
ctctgcaccacatcttgaa

SEQ ID NO: 132942 - DNA, 19 bp, Homo sapiens
  siRNA target sequence for KLHL6 (NM_130446.1,699-717).
ccggcacaagccatcagaa

SEQ ID NO: 132943 - DNA, 19 bp, Homo sapiens
  siRNA target sequence for KLHL6 (NM_130446.1,919-937).
cagtctgaggtgttcatga

SEQ ID NO: 132944 - DNA, 19 bp, Homo sapiens
  siRNA target sequence for KLHL6 (NM_130446.1,1022-1040).
ccaagctcccgctaacaga

SEQ ID NO: 132945 - DNA, 19 bp, Homo sapiens
  siRNA target sequence for KLHL6 (NM_130446.1,1113-1131).
ctcaggtggcaaagaaaca

SEQ ID NO: 132946 - DNA, 19 bp, Homo sapiens
  siRNA target sequence for KLHL6 (NM_130446.1,1164-1182).
caacaagtggattcagatt

SEQ ID NO: 132947 - DNA, 19 bp, Homo sapiens
  siRNA target sequence for KLHL6 (NM_130446.1,1170-1188).
gtggattcagattgagtat

SEQ ID NO: 132948 - DNA, 19 bp, Homo sapiens
  siRNA target sequence for KLHL6 (NM_130446.1,1173-1191).
gattcagattgagtattta

SEQ ID NO: 132949 - DNA, 19 bp, Homo sapiens
  siRNA target sequence for KLHL6 (NM_130446.1,1198-1216).
ggccgctggaggcataaga

SEQ ID NO: 132950 - DNA, 19 bp, Homo sapiens
  siRNA target sequence for KLHL6 (NM_130446.1,1199-1217).
gccgctggaggcataagat

SEQ ID NO: 132951 - DNA, 19 bp, Homo sapiens
  siRNA target sequence for KLHL6 (NM_130446.1,1229-1247).
gtggcaaggtctatgtgat

SEQ ID NO: 132952 - DNA, 19 bp, Homo sapiens
  siRNA target sequence for KLHL6 (NM_130446.1,1258-1276).
gacggcttacagagaatca

SEQ ID NO: 132953 - DNA, 19 bp, Homo sapiens
  siRNA target sequence for KLHL6 (NM_130446.1,1263-1281).
cttacagagaatcaacaat

SEQ ID NO: 132954 - DNA, 19 bp, Homo sapiens
  siRNA target sequence for KLHL6 (NM_130446.1,1477-1495).
cccgtggaggctaaatgca

SEQ ID NO: 132955 - DNA, 19 bp, Homo sapiens
  siRNA target sequence for KLHL6 (NM_130446.1,1478-1496).
ccgtggaggctaaatgcat

SEQ ID NO: 132956 - DNA, 19 bp, Homo sapiens
  siRNA target sequence for KLHL6 (NM_130446.1,1482-1500).
ggaggctaaatgcatcaat

SEQ ID NO: 132957 - DNA, 19 bp, Homo sapiens
  siRNA target sequence for KLHL6 (NM_130446.1,1493-1511).
gcatcaatgcagtgagttt

SEQ ID NO: 132958 - DNA, 19 bp, Homo sapiens
  siRNA target sequence for KLHL8 (NM_020803.3,284-302).
caagctaggaatcacatta

SEQ ID NO: 132959 - DNA, 19 bp, Homo sapiens
  siRNA target sequence for KLHL8 (NM_020803.3,340-358).
gaacagatcctcaattagt

SEQ ID NO: 132960 - DNA, 19 bp, Homo sapiens
  siRNA target sequence for KLHL8 (NM_020803.3,419-437).
ggttctcttcttcgatttt

SEQ ID NO: 132961 - DNA, 19 bp, Homo sapiens
  siRNA target sequence for KLHL8 (NM_020803.3,423-441).
ctcttcttcgattttatga

SEQ ID NO: 132962 - DNA, 19 bp, Homo sapiens
  siRNA target sequence for KLHL8 (NM_020803.3,473-491).
gttggctcaaagctaatct

SEQ ID NO: 132963 - DNA, 19 bp, Homo sapiens
  siRNA target sequence for KLHL8 (NM_020803.3,476-494).
ggctcaaagctaatctctt

SEQ ID NO: 132964 - DNA, 19 bp, Homo sapiens
  siRNA target sequence for KLHL8 (NM_020803.3,502-520).
gctggtattggcttgtgtt

SEQ ID NO: 132965 - DNA, 19 bp, Homo sapiens
  siRNA target sequence for KLHL8 (NM_020803.3,503-521).
ctggtattggcttgtgtta

SEQ ID NO: 132966 - DNA, 19 bp, Homo sapiens
  siRNA target sequence for KLHL8 (NM_020803.3,505-523).
ggtattggcttgtgttatt

SEQ ID NO: 132967 - DNA, 19 bp, Homo sapiens
  siRNA target sequence for KLHL8 (NM_020803.3,564-582).
ccaagcaaacgctgattga

SEQ ID NO: 132968 - DNA, 19 bp, Homo sapiens
  siRNA target sequence for KLHL8 (NM_020803.3,573-591).
cgctgattgagattagaga

SEQ ID NO: 132969 - DNA, 19 bp, Homo sapiens
  siRNA target sequence for KLHL8 (NM_020803.3,574-592).
gctgattgagattagagat

SEQ ID NO: 132970 - DNA, 19 bp, Homo sapiens
  siRNA target sequence for KLHL8 (NM_020803.3,676-694).
cttatatgcagcctgtatt

SEQ ID NO: 132971 - DNA, 19 bp, Homo sapiens
  siRNA target sequence for KLHL8 (NM_020803.3,690-708).
gtattctgcaggttgaact

SEQ ID NO: 132972 - DNA, 19 bp, Homo sapiens
  siRNA target sequence for KLHL8 (NM_020803.3,712-730).
ggctagagcttgttgtgaa

SEQ ID NO: 132973 - DNA, 19 bp, Homo sapiens
  siRNA target sequence for KLHL8 (NM_020803.3,713-731).
gctagagcttgttgtgaat

SEQ ID NO: 132974 - DNA, 19 bp, Homo sapiens
  siRNA target sequence for KLHL8 (NM_020803.3,714-732).
ctagagcttgttgtgaata

SEQ ID NO: 132975 - DNA, 19 bp, Homo sapiens
  siRNA target sequence for KLHL8 (NM_020803.3,719-737).
gcttgttgtgaatacatga

SEQ ID NO: 132976 - DNA, 19 bp, Homo sapiens
  siRNA target sequence for KLHL8 (NM_020803.3,720-738).
cttgttgtgaatacatgaa

SEQ ID NO: 132977 - DNA, 19 bp, Homo sapiens
  siRNA target sequence for KLHL8 (NM_020803.3,723-741).
gttgtgaatacatgaagtt

SEQ ID NO: 132978 - DNA, 19 bp, Homo sapiens
  siRNA target sequence for KLHL8 (NM_020803.3,726-744).
gtgaatacatgaagttaca

SEQ ID NO: 132979 - DNA, 19 bp, Homo sapiens
  siRNA target sequence for KLHL8 (NM_020803.3,733-751).
catgaagttacattttcat

SEQ ID NO: 132980 - DNA, 19 bp, Homo sapiens
  siRNA target sequence for KLHL8 (NM_020803.3,782-800).
gcagaaagtcacaatcgaa

SEQ ID NO: 132981 - DNA, 19 bp, Homo sapiens
  siRNA target sequence for KLHL8 (NM_020803.3,783-801).
cagaaagtcacaatcgaat

SEQ ID NO: 132982 - DNA, 19 bp, Homo sapiens
  siRNA target sequence for KLHL8 (NM_020803.3,789-807).
gtcacaatcgaatagactt

SEQ ID NO: 132983 - DNA, 19 bp, Homo sapiens
  siRNA target sequence for KLHL8 (NM_020803.3,791-809).
cacaatcgaatagacttaa

SEQ ID NO: 132984 - DNA, 19 bp, Homo sapiens
  siRNA target sequence for KLHL8 (NM_020803.3,811-829).
ggacatggcggatcagtat

SEQ ID NO: 132985 - DNA, 19 bp, Homo sapiens
  siRNA target sequence for KLHL8 (NM_020803.3,826-844).
gtatgcctgtgaccatttt

SEQ ID NO: 132986 - DNA, 19 bp, Homo sapiens
  siRNA target sequence for KLHL8 (NM_020803.3,831-849).
cctgtgaccattttactga

SEQ ID NO: 132987 - DNA, 19 bp, Homo sapiens
  siRNA target sequence for KLHL8 (NM_020803.3,832-850).
ctgtgaccattttactgaa

SEQ ID NO: 132988 - DNA, 19 bp, Homo sapiens
  siRNA target sequence for KLHL8 (NM_020803.3,856-874).
ggagtgtgaagactttgta

SEQ ID NO: 132989 - DNA, 19 bp, Homo sapiens
  siRNA target sequence for KLHL8 (NM_020803.3,882-900).
caccgcagcacctccataa

SEQ ID NO: 132990 - DNA, 19 bp, Homo sapiens
  siRNA target sequence for KLHL8 (NM_020803.3,885-903).
cgcagcacctccataagct

SEQ ID NO: 132991 - DNA, 19 bp, Homo sapiens
  siRNA target sequence for KLHL8 (NM_020803.3,886-904).
gcagcacctccataagctt

SEQ ID NO: 132992 - DNA, 19 bp, Homo sapiens
  siRNA target sequence for KLHL8 (NM_020803.3,890-908).
cacctccataagcttttgt

SEQ ID NO: 132993 - DNA, 19 bp, Homo sapiens
  siRNA target sequence for KLHL8 (NM_020803.3,907-925).
gtcctccagtgatctaaat

SEQ ID NO: 132994 - DNA, 19 bp, Homo sapiens
  siRNA target sequence for KLHL8 (NM_020803.3,910-928).
ctccagtgatctaaatatt

SEQ ID NO: 132995 - DNA, 19 bp, Homo sapiens
  siRNA target sequence for KLHL8 (NM_020803.3,974-992).
gccaatcctcagcatcatt

SEQ ID NO: 132996 - DNA, 19 bp, Homo sapiens
  siRNA target sequence for KLHL8 (NM_020803.3,1031-1049).
ccattgttgccggttgatt

SEQ ID NO: 132997 - DNA, 19 bp, Homo sapiens
  siRNA target sequence for KLHL8 (NM_020803.3,1036-1054).
gttgccggttgattttctt

SEQ ID NO: 132998 - DNA, 19 bp, Homo sapiens
  siRNA target sequence for KLHL8 (NM_020803.3,1125-1143).
gaaattaccaccttcactt

SEQ ID NO: 132999 - DNA, 19 bp, Homo sapiens
  siRNA target sequence for KLHL8 (NM_020803.3,1152-1170).
gagcagtacctgactttga

SEQ ID NO: 133000 - DNA, 19 bp, Homo sapiens
  siRNA target sequence for KLHL8 (NM_020803.3,1154-1172).
gcagtacctgactttgaat

SEQ ID NO: 133001 - DNA, 19 bp, Homo sapiens
  siRNA target sequence for KLHL8 (NM_020803.3,1155-1173).
cagtacctgactttgaata

SEQ ID NO: 133002 - DNA, 19 bp, Homo sapiens
  siRNA target sequence for KLHL8 (NM_020803.3,1157-1175).
gtacctgactttgaatact

SEQ ID NO: 133003 - DNA, 19 bp, Homo sapiens
  siRNA target sequence for KLHL8 (NM_020803.3,1249-1267).
cccctttcgcagtattgaa

SEQ ID NO: 133004 - DNA, 19 bp, Homo sapiens
  siRNA target sequence for KLHL8 (NM_020803.3,1250-1268).
ccctttcgcagtattgaat

SEQ ID NO: 133005 - DNA, 19 bp, Homo sapiens
  siRNA target sequence for KLHL8 (NM_020803.3,1256-1274).
cgcagtattgaatgctatt

SEQ ID NO: 133006 - DNA, 19 bp, Homo sapiens
  siRNA target sequence for KLHL8 (NM_020803.3,1297-1315).
ctttggaccagaaatgaat

SEQ ID NO: 133007 - DNA, 19 bp, Homo sapiens
  siRNA target sequence for KLHL8 (NM_020803.3,1323-1341).
ggcgacatgtgggtgtaat

SEQ ID NO: 133008 - DNA, 19 bp, Homo sapiens
  siRNA target sequence for KLHL8 (NM_020803.3,1325-1343).
cgacatgtgggtgtaatct

SEQ ID NO: 133009 - DNA, 19 bp, Homo sapiens
  siRNA target sequence for KLHL8 (NM_020803.3,1398-1416).
ggagtatggagatgtttga

SEQ ID NO: 133010 - DNA, 19 bp, Homo sapiens
  siRNA target sequence for KLHL8 (NM_020803.3,1411-1429).
gtttgatcctctcactaat

SEQ ID NO: 133011 - DNA, 19 bp, Homo sapiens
  siRNA target sequence for KLHL8 (NM_020803.3,1456-1474).
cacaaagaggcgaggaatt

SEQ ID NO: 133012 - DNA, 19 bp, Homo sapiens
  siRNA target sequence for KLHL8 (NM_020803.3,1485-1503).
ccttaggaggcccaattta

SEQ ID NO: 133013 - DNA, 19 bp, Homo sapiens
  siRNA target sequence for KLHL8 (NM_020803.3,1486-1504).
cttaggaggcccaatttat

SEQ ID NO: 133014 - DNA, 19 bp, Homo sapiens
  siRNA target sequence for KLHL8 (NM_020803.3,1491-1509).
gaggcccaatttatgcaat

SEQ ID NO: 133015 - DNA, 19 bp, Homo sapiens
  siRNA target sequence for KLHL8 (NM_020803.3,1506-1524).
caattggagggttagatga

SEQ ID NO: 133016 - DNA, 19 bp, Homo sapiens
  siRNA target sequence for KLHL8 (NM_020803.3,1514-1532).
gggttagatgacaatactt

SEQ ID NO: 133017 - DNA, 19 bp, Homo sapiens
  siRNA target sequence for KLHL8 (NM_020803.3,1525-1543).
caatacttgcttcaatgat

SEQ ID NO: 133018 - DNA, 19 bp, Homo sapiens
  siRNA target sequence for KLHL8 (NM_020803.3,1546-1564).
ggagagatatgacatagaa

SEQ ID NO: 133019 - DNA, 19 bp, Homo sapiens
  siRNA target sequence for KLHL8 (NM_020803.3,1578-1596).
gtacagtggcaccaatgaa

SEQ ID NO: 133020 - DNA, 19 bp, Homo sapiens
  siRNA target sequence for KLHL8 (NM_020803.3,1616-1634).
ggctctgttgctctagtaa

SEQ ID NO: 133021 - DNA, 19 bp, Homo sapiens
  siRNA target sequence for KLHL8 (NM_020803.3,1625-1643).
gctctagtaaaccatgttt

SEQ ID NO: 133022 - DNA, 19 bp, Homo sapiens
  siRNA target sequence for KLHL8 (NM_020803.3,1661-1679).
gatggaatggcttctttat

SEQ ID NO: 133023 - DNA, 19 bp, Homo sapiens
  siRNA target sequence for KLHL8 (NM_020803.3,1680-1698).
ctagcgtggagagatatga

SEQ ID NO: 133024 - DNA, 19 bp, Homo sapiens
  siRNA target sequence for KLHL8 (NM_020803.3,1765-1783).
caagcttcatggttgctta

SEQ ID NO: 133025 - DNA, 19 bp, Homo sapiens
  siRNA target sequence for KLHL8 (NM_020803.3,1786-1804).
cgtagttggtggttttgat

SEQ ID NO: 133026 - DNA, 19 bp, Homo sapiens
  siRNA target sequence for KLHL8 (NM_020803.3,1793-1811).
ggtggttttgatgataatt

SEQ ID NO: 133027 - DNA, 19 bp, Homo sapiens
  siRNA target sequence for KLHL8 (NM_020803.3,1838-1856).
gacccccgaagcaacaagt

SEQ ID NO: 133028 - DNA, 19 bp, Homo sapiens
  siRNA target sequence for KLHL8 (NM_020803.3,1848-1866).
gcaacaagtgggattatgt

SEQ ID NO: 133029 - DNA, 19 bp, Homo sapiens
  siRNA target sequence for KLHL8 (NM_020803.3,1937-1955).
ggtcataatggcaatgcat

SEQ ID NO: 133030 - DNA, 19 bp, Homo sapiens
  siRNA target sequence for KLHL8 (NM_020803.3,1938-1956).
gtcataatggcaatgcata

SEQ ID NO: 133031 - DNA, 19 bp, Homo sapiens
  siRNA target sequence for KLHL8 (NM_020803.3,1946-1964).
ggcaatgcatacttaaata

SEQ ID NO: 133032 - DNA, 19 bp, Homo sapiens
  siRNA target sequence for KLHL8 (NM_020803.3,1979-1997).
gatccagtgctgaataggt

SEQ ID NO: 133033 - DNA, 19 bp, Homo sapiens
  siRNA target sequence for KLHL8 (NM_020803.3,2056-2074).
ctgtttaactagccaaatt

SEQ ID NO: 133034 - DNA, 19 bp, Homo sapiens
  siRNA target sequence for KLHL8 (NM_020803.3,2081-2099).
gtaggtcatggatccaata

SEQ ID NO: 133035 - DNA, 19 bp, Homo sapiens
  siRNA target sequence for KLHL8 (NM_020803.3,2085-2103).
gtcatggatccaataatgt

SEQ ID NO: 133036 - DNA, 19 bp, Homo sapiens
  siRNA target sequence for KNTC1 (NM_014708.2,214-232).
cctgagtgtcggttcaaga

SEQ ID NO: 133037 - DNA, 19 bp, Homo sapiens
  siRNA target sequence for KNTC1 (NM_014708.2,215-233).
ctgagtgtcggttcaagaa

SEQ ID NO: 133038 - DNA, 19 bp, Homo sapiens
  siRNA target sequence for KNTC1 (NM_014708.2,217-235).
gagtgtcggttcaagaaaa

SEQ ID NO: 133039 - DNA, 19 bp, Homo sapiens
  siRNA target sequence for KNTC1 (NM_014708.2,219-237).
gtgtcggttcaagaaaaga

SEQ ID NO: 133040 - DNA, 19 bp, Homo sapiens
  siRNA target sequence for KNTC1 (NM_014708.2,246-264).
ctgctttatatcaagtaga

SEQ ID NO: 133041 - DNA, 19 bp, Homo sapiens
  siRNA target sequence for KNTC1 (NM_014708.2,248-266).
gctttatatcaagtagatt

SEQ ID NO: 133042 - DNA, 19 bp, Homo sapiens
  siRNA target sequence for KNTC1 (NM_014708.2,316-334).
ggcatgcagcttaagtgat

SEQ ID NO: 133043 - DNA, 19 bp, Homo sapiens
  siRNA target sequence for KNTC1 (NM_014708.2,324-342).
gcttaagtgatgggtttat

SEQ ID NO: 133044 - DNA, 19 bp, Homo sapiens
  siRNA target sequence for KNTC1 (NM_014708.2,325-343).
cttaagtgatgggtttatt

SEQ ID NO: 133045 - DNA, 19 bp, Homo sapiens
  siRNA target sequence for KNTC1 (NM_014708.2,350-368).
gccgaccaatcagtgatat

SEQ ID NO: 133046 - DNA, 19 bp, Homo sapiens
  siRNA target sequence for KNTC1 (NM_014708.2,351-369).
ccgaccaatcagtgatatt

SEQ ID NO: 133047 - DNA, 19 bp, Homo sapiens
  siRNA target sequence for KNTC1 (NM_014708.2,355-373).
ccaatcagtgatattgctt

SEQ ID NO: 133048 - DNA, 19 bp, Homo sapiens
  siRNA target sequence for KNTC1 (NM_014708.2,364-382).
gatattgcttgacagtatt

SEQ ID NO: 133049 - DNA, 19 bp, Homo sapiens
  siRNA target sequence for KNTC1 (NM_014708.2,370-388).
gcttgacagtatttgtaga

SEQ ID NO: 133050 - DNA, 19 bp, Homo sapiens
  siRNA target sequence for KNTC1 (NM_014708.2,477-495).
gtggcaacctacatcttat

SEQ ID NO: 133051 - DNA, 19 bp, Homo sapiens
  siRNA target sequence for KNTC1 (NM_014708.2,480-498).
gcaacctacatcttattca

SEQ ID NO: 133052 - DNA, 19 bp, Homo sapiens
  siRNA target sequence for KNTC1 (NM_014708.2,491-509).
cttattcatgtaacatcaa

SEQ ID NO: 133053 - DNA, 19 bp, Homo sapiens
  siRNA target sequence for KNTC1 (NM_014708.2,561-579).
ggcggacttaccagaatct

SEQ ID NO: 133054 - DNA, 19 bp, Homo sapiens
  siRNA target sequence for KNTC1 (NM_014708.2,562-580).
gcggacttaccagaatctt

SEQ ID NO: 133055 - DNA, 19 bp, Homo sapiens
  siRNA target sequence for KNTC1 (NM_014708.2,567-585).
cttaccagaatcttgtcat

SEQ ID NO: 133056 - DNA, 19 bp, Homo sapiens
  siRNA target sequence for KNTC1 (NM_014708.2,600-618).
caaatgaaggtacctatta

SEQ ID NO: 133057 - DNA, 19 bp, Homo sapiens
  siRNA target sequence for KNTC1 (NM_014708.2,612-630).
cctattatatgctacttct

SEQ ID NO: 133058 - DNA, 19 bp, Homo sapiens
  siRNA target sequence for KNTC1 (NM_014708.2,613-631).
ctattatatgctacttctt

SEQ ID NO: 133059 - DNA, 19 bp, Homo sapiens
  siRNA target sequence for KNTC1 (NM_014708.2,791-809).
gtggctggagatttagcaa

SEQ ID NO: 133060 - DNA, 19 bp, Homo sapiens
  siRNA target sequence for KNTC1 (NM_014708.2,810-828).
gtgaagttcctgtgataat

SEQ ID NO: 133061 - DNA, 19 bp, Homo sapiens
  siRNA target sequence for KNTC1 (NM_014708.2,838-856).
cggtaattgtgcattctca

SEQ ID NO: 133062 - DNA, 19 bp, Homo sapiens
  siRNA target sequence for KNTC1 (NM_014708.2,839-857).
ggtaattgtgcattctcaa

SEQ ID NO: 133063 - DNA, 19 bp, Homo sapiens
  siRNA target sequence for KNTC1 (NM_014708.2,840-858).
gtaattgtgcattctcaaa

SEQ ID NO: 133064 - DNA, 19 bp, Homo sapiens
  siRNA target sequence for KNTC1 (NM_014708.2,889-907).
gacagttaagaaccttatt

SEQ ID NO: 133065 - DNA, 19 bp, Homo sapiens
  siRNA target sequence for KNTC1 (NM_014708.2,902-920).
cttattgatgcagagatta

SEQ ID NO: 133066 - DNA, 19 bp, Homo sapiens
  siRNA target sequence for KNTC1 (NM_014708.2,985-1003).
gctgagtttatgggatatt

SEQ ID NO: 133067 - DNA, 19 bp, Homo sapiens
  siRNA target sequence for KNTC1 (NM_014708.2,986-1004).
ctgagtttatgggatattt

SEQ ID NO: 133068 - DNA, 19 bp, Homo sapiens
  siRNA target sequence for KNTC1 (NM_014708.2,1035-1053).
ctcttcacgtagaagagtt

SEQ ID NO: 133069 - DNA, 19 bp, Homo sapiens
  siRNA target sequence for KNTC1 (NM_014708.2,1043-1061).
gtagaagagtttcttctta

SEQ ID NO: 133070 - DNA, 19 bp, Homo sapiens
  siRNA target sequence for KNTC1 (NM_014708.2,1086-1104).
cagtcacgtggcaaggaat

SEQ ID NO: 133071 - DNA, 19 bp, Homo sapiens
  siRNA target sequence for KNTC1 (NM_014708.2,1088-1106).
gtcacgtggcaaggaatta

SEQ ID NO: 133072 - DNA, 19 bp, Homo sapiens
  siRNA target sequence for KNTC1 (NM_014708.2,1101-1119).
gaattacaaatctcaaatt

SEQ ID NO: 133073 - DNA, 19 bp, Homo sapiens
  siRNA target sequence for KNTC1 (NM_014708.2,1178-1196).
cctacaatggaaatactat

SEQ ID NO: 133074 - DNA, 19 bp, Homo sapiens
  siRNA target sequence for KNTC1 (NM_014708.2,1179-1197).
ctacaatggaaatactata

SEQ ID NO: 133075 - DNA, 19 bp, Homo sapiens
  siRNA target sequence for KNTC1 (NM_014708.2,1245-1263).
gcacagataccatatacct

SEQ ID NO: 133076 - DNA, 19 bp, Homo sapiens
  siRNA target sequence for KNTC1 (NM_014708.2,1246-1264).
cacagataccatatacctt

SEQ ID NO: 133077 - DNA, 19 bp, Homo sapiens
  siRNA target sequence for KNTC1 (NM_014708.2,1306-1324).
ctcagtctctgtgttagta

SEQ ID NO: 133078 - DNA, 19 bp, Homo sapiens
  siRNA target sequence for KNTC1 (NM_014708.2,1329-1347).
gatgtcttacggaagcttt

SEQ ID NO: 133079 - DNA, 19 bp, Homo sapiens
  siRNA target sequence for KNTC1 (NM_014708.2,1357-1375).
cagattgagtcggttactt

SEQ ID NO: 133080 - DNA, 19 bp, Homo sapiens
  siRNA target sequence for KNTC1 (NM_014708.2,1363-1381).
gagtcggttacttcacaaa

SEQ ID NO: 133081 - DNA, 19 bp, Homo sapiens
  siRNA target sequence for KNTC1 (NM_014708.2,1365-1383).
gtcggttacttcacaaaca

SEQ ID NO: 133082 - DNA, 19 bp, Homo sapiens
  siRNA target sequence for KNTC1 (NM_014708.2,1367-1385).
cggttacttcacaaacaca

SEQ ID NO: 133083 - DNA, 19 bp, Homo sapiens
  siRNA target sequence for KNTC1 (NM_014708.2,1427-1445).
gatgttgagcttgtttaca

SEQ ID NO: 133084 - DNA, 19 bp, Homo sapiens
  siRNA target sequence for KNTC1 (NM_014708.2,1469-1487).
gagaaactggcattgagtt

SEQ ID NO: 133085 - DNA, 19 bp, Homo sapiens
  siRNA target sequence for KNTC1 (NM_014708.2,1507-1525).
gaccgaatggcaacaactt

SEQ ID NO: 133086 - DNA, 19 bp, Homo sapiens
  siRNA target sequence for KNTC1 (NM_014708.2,1526-1544).
gtagacgacgctaaggaaa

SEQ ID NO: 133087 - DNA, 19 bp, Homo sapiens
  siRNA target sequence for KNTC1 (NM_014708.2,1531-1549).
cgacgctaaggaaaatcta

SEQ ID NO: 133088 - DNA, 19 bp, Homo sapiens
  siRNA target sequence for KNTC1 (NM_014708.2,1598-1616).
cagtggataacctatgaaa

SEQ ID NO: 133089 - DNA, 19 bp, Homo sapiens
  siRNA target sequence for KNTC1 (NM_014708.2,1667-1685).
gataaaactgctctcattt

SEQ ID NO: 133090 - DNA, 19 bp, Homo sapiens
  siRNA target sequence for KNTC1 (NM_014708.2,1674-1692).
ctgctctcatttattctga

SEQ ID NO: 133091 - DNA, 19 bp, Homo sapiens
  siRNA target sequence for KNTC1 (NM_014708.2,1715-1733).
gctcatgcaaaattgacta

SEQ ID NO: 133092 - DNA, 19 bp, Homo sapiens
  siRNA target sequence for KNTC1 (NM_014708.2,1718-1736).
catgcaaaattgactactt

SEQ ID NO: 133093 - DNA, 19 bp, Homo sapiens
  siRNA target sequence for KNTC1 (NM_014708.2,1743-1761).
gagcatttggaccagaaaa

SEQ ID NO: 133094 - DNA, 19 bp, Homo sapiens
  siRNA target sequence for KNTC1 (NM_014708.2,1769-1787).
ggcagttcttggattgaat

SEQ ID NO: 133095 - DNA, 19 bp, Homo sapiens
  siRNA target sequence for KNTC1 (NM_014708.2,1773-1791).
gttcttggattgaatttct

SEQ ID NO: 133096 - DNA, 19 bp, Homo sapiens
  siRNA target sequence for KNTC1 (NM_014708.2,1843-1861).
ccttgtttgtgcacagtat

SEQ ID NO: 133097 - DNA, 19 bp, Homo sapiens
  siRNA target sequence for KNTC1 (NM_014708.2,2059-2077).
gaaccttgaattaactgat

SEQ ID NO: 133098 - DNA, 19 bp, Homo sapiens
  siRNA target sequence for KNTC1 (NM_014708.2,2102-2120).
cttcaattggcagagatat

SEQ ID NO: 133099 - DNA, 19 bp, Homo sapiens
  siRNA target sequence for KNTC1 (NM_014708.2,2172-2190).
ggatttccttgaaagatta

SEQ ID NO: 133100 - DNA, 19 bp, Homo sapiens
  siRNA target sequence for KNTC1 (NM_014708.2,2243-2261).
gagttgatcacgttgcata

SEQ ID NO: 133101 - DNA, 19 bp, Homo sapiens
  siRNA target sequence for KNTC1 (NM_014708.2,2253-2271).
cgttgcataggaagtacaa

SEQ ID NO: 133102 - DNA, 19 bp, Homo sapiens
  siRNA target sequence for KNTC1 (NM_014708.2,2283-2301).
ccctctctgattttgagaa

SEQ ID NO: 133103 - DNA, 19 bp, Homo sapiens
  siRNA target sequence for KNTC1 (NM_014708.2,2316-2334).
ccatagtgttccgaatgtt

SEQ ID NO: 133104 - DNA, 19 bp, Homo sapiens
  siRNA target sequence for KNTC1 (NM_014708.2,2321-2339).
gtgttccgaatgtttgata

SEQ ID NO: 133105 - DNA, 19 bp, Homo sapiens
  siRNA target sequence for KNTC1 (NM_014708.2,2356-2374).
gcttattccctccatctta

SEQ ID NO: 133106 - DNA, 19 bp, Homo sapiens
  siRNA target sequence for KNTC1 (NM_014708.2,2473-2491).
gtccacatcactctttgaa

SEQ ID NO: 133107 - DNA, 19 bp, Homo sapiens
  siRNA target sequence for KNTC1 (NM_014708.2,2476-2494).
cacatcactctttgaaaca

SEQ ID NO: 133108 - DNA, 19 bp, Homo sapiens
  siRNA target sequence for KNTC1 (NM_014708.2,2515-2533).
ggcagtaatagcgtgttta

SEQ ID NO: 133109 - DNA, 19 bp, Homo sapiens
  siRNA target sequence for KNTC1 (NM_014708.2,2558-2576).
gccgtgctcaagatcatgt

SEQ ID NO: 133110 - DNA, 19 bp, Homo sapiens
  siRNA target sequence for KNTC1 (NM_014708.2,2641-2659).
ccatcccaaagtcaagtta

SEQ ID NO: 133111 - DNA, 19 bp, Homo sapiens
  siRNA target sequence for KNTC1 (NM_014708.2,2642-2660).
catcccaaagtcaagttat

SEQ ID NO: 133112 - DNA, 19 bp, Homo sapiens
  siRNA target sequence for KNTC1 (NM_014708.2,2674-2692).
caaactaatggagatgaaa

SEQ ID NO: 133113 - DNA, 19 bp, Homo sapiens
  siRNA target sequence for KNTC1 (NM_014708.2,2686-2704).
gatgaaaaaacttttacga

SEQ ID NO: 133114 - DNA, 19 bp, Homo sapiens
  siRNA target sequence for KNTC1 (NM_014708.2,2751-2769).
gagtggttagatacattct

SEQ ID NO: 133115 - DNA, 19 bp, Homo sapiens
  siRNA target sequence for KNTC1 (NM_014708.2,2753-2771).
gtggttagatacattctca

SEQ ID NO: 133116 - DNA, 19 bp, Homo sapiens
  siRNA target sequence for KNTC1 (NM_014708.2,2755-2773).
ggttagatacattctcaaa

SEQ ID NO: 133117 - DNA, 19 bp, Homo sapiens
  siRNA target sequence for KNTC1 (NM_014708.2,2810-2828).
gtagcccaagcgtttatgt

SEQ ID NO: 133118 - DNA, 19 bp, Homo sapiens
  siRNA target sequence for KNTC1 (NM_014708.2,2815-2833).
ccaagcgtttatgttatct

SEQ ID NO: 133119 - DNA, 19 bp, Homo sapiens
  siRNA target sequence for KNTC1 (NM_014708.2,2821-2839).
gtttatgttatctgatgat

SEQ ID NO: 133120 - DNA, 19 bp, Homo sapiens
  siRNA target sequence for KNTC1 (NM_014708.2,2837-2855).
gatgagatctacagtctaa

SEQ ID NO: 133121 - DNA, 19 bp, Homo sapiens
  siRNA target sequence for KNTC1 (NM_014708.2,2840-2858).
gagatctacagtctaagaa

SEQ ID NO: 133122 - DNA, 19 bp, Homo sapiens
  siRNA target sequence for KNTC1 (NM_014708.2,2845-2863).
ctacagtctaagaattatt

SEQ ID NO: 133123 - DNA, 19 bp, Homo sapiens
  siRNA target sequence for KNTC1 (NM_014708.2,2940-2958).
ctgcagaaagagtcatcat

SEQ ID NO: 133124 - DNA, 19 bp, Homo sapiens
  siRNA target sequence for KNTC1 (NM_014708.2,2961-2979).
gggcacgactggcattaca

SEQ ID NO: 133125 - DNA, 19 bp, Homo sapiens
  siRNA target sequence for KNTC1 (NM_014708.2,2962-2980).
ggcacgactggcattacaa

SEQ ID NO: 133126 - DNA, 19 bp, Homo sapiens
  siRNA target sequence for KNTC1 (NM_014708.2,2964-2982).
cacgactggcattacaaga

SEQ ID NO: 133127 - DNA, 19 bp, Homo sapiens
  siRNA target sequence for KNTC1 (NM_014708.2,3036-3054).
catccgtggacattcttaa

SEQ ID NO: 133128 - DNA, 19 bp, Homo sapiens
  siRNA target sequence for KNTC1 (NM_014708.2,3046-3064).
cattcttaagatactatgt

SEQ ID NO: 133129 - DNA, 19 bp, Homo sapiens
  siRNA target sequence for KNTC1 (NM_014708.2,3135-3153).
ctagcttacaggagaactt

SEQ ID NO: 133130 - DNA, 19 bp, Homo sapiens
  siRNA target sequence for KNTC1 (NM_014708.2,3206-3224).
ctccgtgagcagcacatta

SEQ ID NO: 133131 - DNA, 19 bp, Homo sapiens
  siRNA target sequence for KNTC1 (NM_014708.2,3208-3226).
ccgtgagcagcacattaaa

SEQ ID NO: 133132 - DNA, 19 bp, Homo sapiens
  siRNA target sequence for KNTC1 (NM_014708.2,3297-3315).
gcccaagcatggaatcaaa

SEQ ID NO: 133133 - DNA, 19 bp, Homo sapiens
  siRNA target sequence for KNTC1 (NM_014708.2,3373-3391).
gaccttgagagccttaaaa

SEQ ID NO: 133134 - DNA, 19 bp, Homo sapiens
  siRNA target sequence for KNTC1 (NM_014708.2,3423-3441).
gcagcgacttgtttaagta

SEQ ID NO: 133135 - DNA, 19 bp, Homo sapiens
  siRNA target sequence for KNTC1 (NM_014708.2,3424-3442).
cagcgacttgtttaagtat

SEQ ID NO: 133136 - DNA, 19 bp, Homo sapiens
  siRNA target sequence for KNTC1 (NM_014708.2,3455-3473).
gacactgggaaattgctat

SEQ ID NO: 133137 - DNA, 19 bp, Homo sapiens
  siRNA target sequence for KNTC1 (NM_014708.2,3480-3498).
catgtcagaagctttgtca

SEQ ID NO: 133138 - DNA, 19 bp, Homo sapiens
  siRNA target sequence for KNTC1 (NM_014708.2,3529-3547).
gcctgtgggactgaatctt

SEQ ID NO: 133139 - DNA, 19 bp, Homo sapiens
  siRNA target sequence for KNTC1 (NM_014708.2,3591-3609).
gcagtccagattttttact

SEQ ID NO: 133140 - DNA, 19 bp, Homo sapiens
  siRNA target sequence for KNTC1 (NM_014708.2,3611-3629).
gatgctttagaactatgta

SEQ ID NO: 133141 - DNA, 19 bp, Homo sapiens
  siRNA target sequence for KNTC1 (NM_014708.2,3647-3665).
gtagagctttccagacaat

SEQ ID NO: 133142 - DNA, 19 bp, Homo sapiens
  siRNA target sequence for KNTC1 (NM_014708.2,3699-3717).
cttcttttgggacacataa

SEQ ID NO: 133143 - DNA, 19 bp, Homo sapiens
  siRNA target sequence for KNTC1 (NM_014708.2,3708-3726).
ggacacataaagatccata

SEQ ID NO: 133144 - DNA, 19 bp, Homo sapiens
  siRNA target sequence for KNTC1 (NM_014708.2,3711-3729).
cacataaagatccatatga

SEQ ID NO: 133145 - DNA, 19 bp, Homo sapiens
  siRNA target sequence for KNTC1 (NM_014708.2,3784-3802).
gatggtgcttccagtgatt

SEQ ID NO: 133146 - DNA, 19 bp, Homo sapiens
  siRNA target sequence for KNTC1 (NM_014708.2,3873-3891).
catactgctcccttaatga

SEQ ID NO: 133147 - DNA, 19 bp, Homo sapiens
  siRNA target sequence for KNTC1 (NM_014708.2,3900-3918).
gccttgttttacctgttat

SEQ ID NO: 133148 - DNA, 19 bp, Homo sapiens
  siRNA target sequence for KNTC1 (NM_014708.2,3901-3919).
ccttgttttacctgttata

SEQ ID NO: 133149 - DNA, 19 bp, Homo sapiens
  siRNA target sequence for KNTC1 (NM_014708.2,3981-3999).
gatttgtggttggttcatt

SEQ ID NO: 133150 - DNA, 19 bp, Homo sapiens
  siRNA target sequence for KNTC1 (NM_014708.2,4020-4038).
ctgtgtcaaacttcatgaa

SEQ ID NO: 133151 - DNA, 19 bp, Homo sapiens
  siRNA target sequence for KNTC1 (NM_014708.2,4040-4058).
gccactttgagtgaaaagt

SEQ ID NO: 133152 - DNA, 19 bp, Homo sapiens
  siRNA target sequence for KNTC1 (NM_014708.2,4041-4059).
ccactttgagtgaaaagtt

SEQ ID NO: 133153 - DNA, 19 bp, Homo sapiens
  siRNA target sequence for KNTC1 (NM_014708.2,4044-4062).
ctttgagtgaaaagttatt

SEQ ID NO: 133154 - DNA, 19 bp, Homo sapiens
  siRNA target sequence for KNTC1 (NM_014708.2,4064-4082).
ggagagactacattagtta

SEQ ID NO: 133155 - DNA, 19 bp, Homo sapiens
  siRNA target sequence for KNTC1 (NM_014708.2,4149-4167).
cactactgcacaaagtatt

SEQ ID NO: 133156 - DNA, 19 bp, Homo sapiens
  siRNA target sequence for KNTC1 (NM_014708.2,4154-4172).
ctgcacaaagtatttaatt

SEQ ID NO: 133157 - DNA, 19 bp, Homo sapiens
  siRNA target sequence for KNTC1 (NM_014708.2,4173-4191).
gtcgcttggtagatcttga

SEQ ID NO: 133158 - DNA, 19 bp, Homo sapiens
  siRNA target sequence for KNTC1 (NM_014708.2,4201-4219).
gggttactgcactctctta

SEQ ID NO: 133159 - DNA, 19 bp, Homo sapiens
  siRNA target sequence for KNTC1 (NM_014708.2,4209-4227).
gcactctcttacctcaaaa

SEQ ID NO: 133160 - DNA, 19 bp, Homo sapiens
  siRNA target sequence for KNTC1 (NM_014708.2,4269-4287).
ggcagaattacgacaaaat

SEQ ID NO: 133161 - DNA, 19 bp, Homo sapiens
  siRNA target sequence for KNTC1 (NM_014708.2,4271-4289).
cagaattacgacaaaatct

SEQ ID NO: 133162 - DNA, 19 bp, Homo sapiens
  siRNA target sequence for KNTC1 (NM_014708.2,4357-4375).
ccgtgaactcagtactgat

SEQ ID NO: 133163 - DNA, 19 bp, Homo sapiens
  siRNA target sequence for KNTC1 (NM_014708.2,4384-4402).
gggcattcgtcttggtaaa

SEQ ID NO: 133164 - DNA, 19 bp, Homo sapiens
  siRNA target sequence for KNTC1 (NM_014708.2,4386-4404).
gcattcgtcttggtaaact

SEQ ID NO: 133165 - DNA, 19 bp, Homo sapiens
  siRNA target sequence for KNTC1 (NM_014708.2,4387-4405).
cattcgtcttggtaaactt

SEQ ID NO: 133166 - DNA, 19 bp, Homo sapiens
  siRNA target sequence for KNTC1 (NM_014708.2,4394-4412).
cttggtaaacttggtattt

SEQ ID NO: 133167 - DNA, 19 bp, Homo sapiens
  siRNA target sequence for KNTC1 (NM_014708.2,4499-4517).
ctcattttggaatattgca

SEQ ID NO: 133168 - DNA, 19 bp, Homo sapiens
  siRNA target sequence for KNTC1 (NM_014708.2,4507-4525).
ggaatattgcagcacattt

SEQ ID NO: 133169 - DNA, 19 bp, Homo sapiens
  siRNA target sequence for KNTC1 (NM_014708.2,4531-4549).
ggactgcgatgcagttctt

SEQ ID NO: 133170 - DNA, 19 bp, Homo sapiens
  siRNA target sequence for KNTC1 (NM_014708.2,4566-4584).
cgctgctccacaacacaaa

SEQ ID NO: 133171 - DNA, 19 bp, Homo sapiens
  siRNA target sequence for KNTC1 (NM_014708.2,4567-4585).
gctgctccacaacacaaat

SEQ ID NO: 133172 - DNA, 19 bp, Homo sapiens
  siRNA target sequence for KNTC1 (NM_014708.2,4656-4674).
cccttgagatggttccttt

SEQ ID NO: 133173 - DNA, 19 bp, Homo sapiens
  siRNA target sequence for KNTC1 (NM_014708.2,4657-4675).
ccttgagatggttccttta

SEQ ID NO: 133174 - DNA, 19 bp, Homo sapiens
  siRNA target sequence for KNTC1 (NM_014708.2,4676-4694).
ctgacgagcacaaaagatt

SEQ ID NO: 133175 - DNA, 19 bp, Homo sapiens
  siRNA target sequence for KNTC1 (NM_014708.2,4680-4698).
cgagcacaaaagatttggt

SEQ ID NO: 133176 - DNA, 19 bp, Homo sapiens
  siRNA target sequence for KNTC1 (NM_014708.2,4691-4709).
gatttggtcatcagtctta

SEQ ID NO: 133177 - DNA, 19 bp, Homo sapiens
  siRNA target sequence for KNTC1 (NM_014708.2,4733-4751).
ccttatgactatgaaatga

SEQ ID NO: 133178 - DNA, 19 bp, Homo sapiens
  siRNA target sequence for KNTC1 (NM_014708.2,4778-4796).
cgagctgatgaaaagataa

SEQ ID NO: 133179 - DNA, 19 bp, Homo sapiens
  siRNA target sequence for KNTC1 (NM_014708.2,4814-4832).
caggcattgagtattctga

SEQ ID NO: 133180 - DNA, 19 bp, Homo sapiens
  siRNA target sequence for KNTC1 (NM_014708.2,4860-4878).
ctcctcccgtggatctaga

SEQ ID NO: 133181 - DNA, 19 bp, Homo sapiens
  siRNA target sequence for KNTC1 (NM_014708.2,4862-4880).
cctcccgtggatctagaat

SEQ ID NO: 133182 - DNA, 19 bp, Homo sapiens
  siRNA target sequence for KNTC1 (NM_014708.2,4863-4881).
ctcccgtggatctagaata

SEQ ID NO: 133183 - DNA, 19 bp, Homo sapiens
  siRNA target sequence for KNTC1 (NM_014708.2,4866-4884).
ccgtggatctagaatatca

SEQ ID NO: 133184 - DNA, 19 bp, Homo sapiens
  siRNA target sequence for KNTC1 (NM_014708.2,4868-4886).
gtggatctagaatatcagt

SEQ ID NO: 133185 - DNA, 19 bp, Homo sapiens
  siRNA target sequence for KNTC1 (NM_014708.2,4870-4888).
ggatctagaatatcagtat

SEQ ID NO: 133186 - DNA, 19 bp, Homo sapiens
  siRNA target sequence for KNTC1 (NM_014708.2,4891-4909).
gttggaacatgtcataact

SEQ ID NO: 133187 - DNA, 19 bp, Homo sapiens
  siRNA target sequence for KNTC1 (NM_014708.2,5024-5042).
ctcttaatttcgaaattaa

SEQ ID NO: 133188 - DNA, 19 bp, Homo sapiens
  siRNA target sequence for KNTC1 (NM_014708.2,5065-5083).
gtacgtgtctacagcaaaa

SEQ ID NO: 133189 - DNA, 19 bp, Homo sapiens
  siRNA target sequence for KNTC1 (NM_014708.2,5076-5094).
cagcaaaacacgttttcga

SEQ ID NO: 133190 - DNA, 19 bp, Homo sapiens
  siRNA target sequence for KNTC1 (NM_014708.2,5087-5105).
gttttcgaaaaaaaactga

SEQ ID NO: 133191 - DNA, 19 bp, Homo sapiens
  siRNA target sequence for KNTC1 (NM_014708.2,5113-5131).
gctcctgaagttaacacaa

SEQ ID NO: 133192 - DNA, 19 bp, Homo sapiens
  siRNA target sequence for KNTC1 (NM_014708.2,5258-5276).
cctgaaggttccttcaaga

SEQ ID NO: 133193 - DNA, 19 bp, Homo sapiens
  siRNA target sequence for KNTC1 (NM_014708.2,5259-5277).
ctgaaggttccttcaagat

SEQ ID NO: 133194 - DNA, 19 bp, Homo sapiens
  siRNA target sequence for KNTC1 (NM_014708.2,5261-5279).
gaaggttccttcaagatat

SEQ ID NO: 133195 - DNA, 19 bp, Homo sapiens
  siRNA target sequence for KNTC1 (NM_014708.2,5329-5347).
cccatcgcaggacgaaaaa

SEQ ID NO: 133196 - DNA, 19 bp, Homo sapiens
  siRNA target sequence for KNTC1 (NM_014708.2,5357-5375).
gccgaggctttgttgaaga

SEQ ID NO: 133197 - DNA, 19 bp, Homo sapiens
  siRNA target sequence for KNTC1 (NM_014708.2,5494-5512).
cgaacatcctagcatcaat

SEQ ID NO: 133198 - DNA, 19 bp, Homo sapiens
  siRNA target sequence for KNTC1 (NM_014708.2,5498-5516).
catcctagcatcaatcaaa

SEQ ID NO: 133199 - DNA, 19 bp, Homo sapiens
  siRNA target sequence for KNTC1 (NM_014708.2,5501-5519).
cctagcatcaatcaaagaa

SEQ ID NO: 133200 - DNA, 19 bp, Homo sapiens
  siRNA target sequence for KNTC1 (NM_014708.2,5502-5520).
ctagcatcaatcaaagaat

SEQ ID NO: 133201 - DNA, 19 bp, Homo sapiens
  siRNA target sequence for KNTC1 (NM_014708.2,5505-5523).
gcatcaatcaaagaattca

SEQ ID NO: 133202 - DNA, 19 bp, Homo sapiens
  siRNA target sequence for KNTC1 (NM_014708.2,5535-5553).
gcacagattatcctgatat

SEQ ID NO: 133203 - DNA, 19 bp, Homo sapiens
  siRNA target sequence for KNTC1 (NM_014708.2,5536-5554).
cacagattatcctgatatt

SEQ ID NO: 133204 - DNA, 19 bp, Homo sapiens
  siRNA target sequence for KNTC1 (NM_014708.2,5576-5594).
gccgaagtcaatgaaatta

SEQ ID NO: 133205 - DNA, 19 bp, Homo sapiens
  siRNA target sequence for KNTC1 (NM_014708.2,5577-5595).
ccgaagtcaatgaaattaa

SEQ ID NO: 133206 - DNA, 19 bp, Homo sapiens
  siRNA target sequence for KNTC1 (NM_014708.2,5578-5596).
cgaagtcaatgaaattaat

SEQ ID NO: 133207 - DNA, 19 bp, Homo sapiens
  siRNA target sequence for KNTC1 (NM_014708.2,5632-5650).
gctatgcccttcaacaaaa

SEQ ID NO: 133208 - DNA, 19 bp, Homo sapiens
  siRNA target sequence for KNTC1 (NM_014708.2,5655-5673).
gtgaaaaaccatcagaatt

SEQ ID NO: 133209 - DNA, 19 bp, Homo sapiens
  siRNA target sequence for KNTC1 (NM_014708.2,5722-5740).
cctgtctcgtccaattgat

SEQ ID NO: 133210 - DNA, 19 bp, Homo sapiens
  siRNA target sequence for KNTC1 (NM_014708.2,5723-5741).
ctgtctcgtccaattgatt

SEQ ID NO: 133211 - DNA, 19 bp, Homo sapiens
  siRNA target sequence for KNTC1 (NM_014708.2,5725-5743).
gtctcgtccaattgattat

SEQ ID NO: 133212 - DNA, 19 bp, Homo sapiens
  siRNA target sequence for KNTC1 (NM_014708.2,5745-5763).
gttcaagaatgctgtttgt

SEQ ID NO: 133213 - DNA, 19 bp, Homo sapiens
  siRNA target sequence for KNTC1 (NM_014708.2,5851-5869).
ggctgacaaggaaactata

SEQ ID NO: 133214 - DNA, 19 bp, Homo sapiens
  siRNA target sequence for KNTC1 (NM_014708.2,5857-5875).
caaggaaactatagaatct

SEQ ID NO: 133215 - DNA, 19 bp, Homo sapiens
  siRNA target sequence for KNTC1 (NM_014708.2,5950-5968).
gaatatccccatcacatat

SEQ ID NO: 133216 - DNA, 19 bp, Homo sapiens
  siRNA target sequence for KNTC1 (NM_014708.2,5982-6000).
gcagtcctaaagaaggaat

SEQ ID NO: 133217 - DNA, 19 bp, Homo sapiens
  siRNA target sequence for KNTC1 (NM_014708.2,6031-6049).
cgagtccatggcagtaaga

SEQ ID NO: 133218 - DNA, 19 bp, Homo sapiens
  siRNA target sequence for KNTC1 (NM_014708.2,6032-6050).
gagtccatggcagtaagat

SEQ ID NO: 133219 - DNA, 19 bp, Homo sapiens
  siRNA target sequence for KNTC1 (NM_014708.2,6125-6143).
ggcttcaatatgattcctt

SEQ ID NO: 133220 - DNA, 19 bp, Homo sapiens
  siRNA target sequence for KNTC1 (NM_014708.2,6126-6144).
gcttcaatatgattcctta

SEQ ID NO: 133221 - DNA, 19 bp, Homo sapiens
  siRNA target sequence for KNTC1 (NM_014708.2,6140-6158).
ccttatctaaggaaagttt

SEQ ID NO: 133222 - DNA, 19 bp, Homo sapiens
  siRNA target sequence for KNTC1 (NM_014708.2,6141-6159).
cttatctaaggaaagtttt

SEQ ID NO: 133223 - DNA, 19 bp, Homo sapiens
  siRNA target sequence for KNTC1 (NM_014708.2,6164-6182).
gccatctccagtatccatt

SEQ ID NO: 133224 - DNA, 19 bp, Homo sapiens
  siRNA target sequence for KNTC1 (NM_014708.2,6213-6231).
cgtggcagcgtgtgataca

SEQ ID NO: 133225 - DNA, 19 bp, Homo sapiens
  siRNA target sequence for KNTC1 (NM_014708.2,6216-6234).
ggcagcgtgtgatacagat

SEQ ID NO: 133226 - DNA, 19 bp, Homo sapiens
  siRNA target sequence for KNTC1 (NM_014708.2,6217-6235).
gcagcgtgtgatacagata

SEQ ID NO: 133227 - DNA, 19 bp, Homo sapiens
  siRNA target sequence for KNTC1 (NM_014708.2,6266-6284).
cctgatcagctgtcagatt

SEQ ID NO: 133228 - DNA, 19 bp, Homo sapiens
  siRNA target sequence for KNTC1 (NM_014708.2,6269-6287).
gatcagctgtcagattgtt

SEQ ID NO: 133229 - DNA, 19 bp, Homo sapiens
  siRNA target sequence for KNTC1 (NM_014708.2,6344-6362).
ggagtcgccaggcagtata

SEQ ID NO: 133230 - DNA, 19 bp, Homo sapiens
  siRNA target sequence for KNTC1 (NM_014708.2,6345-6363).
gagtcgccaggcagtatat

SEQ ID NO: 133231 - DNA, 19 bp, Homo sapiens
  siRNA target sequence for KNTC1 (NM_014708.2,6354-6372).
ggcagtatatccagttaga

SEQ ID NO: 133232 - DNA, 19 bp, Homo sapiens
  siRNA target sequence for KNTC1 (NM_014708.2,6355-6373).
gcagtatatccagttagaa

SEQ ID NO: 133233 - DNA, 19 bp, Homo sapiens
  siRNA target sequence for KNTC1 (NM_014708.2,6377-6395).
ccggcttttgcattagctt

SEQ ID NO: 133234 - DNA, 19 bp, Homo sapiens
  siRNA target sequence for KNTC1 (NM_014708.2,6505-6523).
gggccagctagcaggattt

SEQ ID NO: 133235 - DNA, 19 bp, Homo sapiens
  siRNA target sequence for KNTC1 (NM_014708.2,6506-6524).
ggccagctagcaggatttt

SEQ ID NO: 133236 - DNA, 19 bp, Homo sapiens
  siRNA target sequence for KNTC1 (NM_014708.2,6511-6529).
gctagcaggattttcacat

SEQ ID NO: 133237 - DNA, 19 bp, Homo sapiens
  siRNA target sequence for KNTC1 (NM_014708.2,6518-6536).
ggattttcacatcaaatta

SEQ ID NO: 133238 - DNA, 19 bp, Homo sapiens
  siRNA target sequence for KNTC1 (NM_014708.2,6588-6606).
caaagaccaaatactttca

SEQ ID NO: 133239 - DNA, 19 bp, Homo sapiens
  siRNA target sequence for KNTC1 (NM_014708.2,6613-6631).
gaagatgcatgcgatgaat

SEQ ID NO: 133240 - DNA, 19 bp, Homo sapiens
  siRNA target sequence for KNTC1 (NM_014708.2,6623-6641).
gcgatgaataccaacaata

SEQ ID NO: 133241 - DNA, 19 bp, Homo sapiens
  siRNA target sequence for KNTC1 (NM_014708.2,6628-6646).
gaataccaacaatatcact

SEQ ID NO: 133242 - DNA, 19 bp, Homo sapiens
  siRNA target sequence for KNTC1 (NM_014708.2,6645-6663).
ctgagctagtgaactattt

SEQ ID NO: 133243 - DNA, 19 bp, Homo sapiens
  siRNA target sequence for KNTC1 (NM_014708.2,6658-6676).
ctatttggcaaatgactta

SEQ ID NO: 133244 - DNA, 19 bp, Homo sapiens
  siRNA target sequence for KNTC1 (NM_014708.2,6686-6704).
gaagcttcagtcttgataa

SEQ ID NO: 133245 - DNA, 19 bp, Homo sapiens
  siRNA target sequence for KNTC1 (NM_014708.2,6747-6765).
ctgctccctgtgaaattct

SEQ ID NO: 133246 - DNA, 19 bp, Homo sapiens
  siRNA target sequence for KPNA1 (NM_002264.1,65-83).
gagaactttcgcctgaaaa

SEQ ID NO: 133247 - DNA, 19 bp, Homo sapiens
  siRNA target sequence for KPNA1 (NM_002264.1,67-85).
gaactttcgcctgaaaagt

SEQ ID NO: 133248 - DNA, 19 bp, Homo sapiens
  siRNA target sequence for KPNA1 (NM_002264.1,88-106).
caagaacaaatctctgaat

SEQ ID NO: 133249 - DNA, 19 bp, Homo sapiens
  siRNA target sequence for KPNA1 (NM_002264.1,137-155).
gaaggactgcagttacgaa

SEQ ID NO: 133250 - DNA, 19 bp, Homo sapiens
  siRNA target sequence for KPNA1 (NM_002264.1,175-193).
gttattcaagcggagaaat

SEQ ID NO: 133251 - DNA, 19 bp, Homo sapiens
  siRNA target sequence for KPNA1 (NM_002264.1,248-266).
catgaggctcagattagta

SEQ ID NO: 133252 - DNA, 19 bp, Homo sapiens
  siRNA target sequence for KPNA1 (NM_002264.1,281-299).
ccaggtggtgtcatcactt

SEQ ID NO: 133253 - DNA, 19 bp, Homo sapiens
  siRNA target sequence for KPNA1 (NM_002264.1,391-409).
ccctcctattgatgaagtt

SEQ ID NO: 133254 - DNA, 19 bp, Homo sapiens
  siRNA target sequence for KPNA1 (NM_002264.1,440-458).
gtggagttcctcaaacgaa

SEQ ID NO: 133255 - DNA, 19 bp, Homo sapiens
  siRNA target sequence for KPNA1 (NM_002264.1,442-460).
ggagttcctcaaacgaaaa

SEQ ID NO: 133256 - DNA, 19 bp, Homo sapiens
  siRNA target sequence for KPNA1 (NM_002264.1,486-504).
cagcttgggtactgacaaa

SEQ ID NO: 133257 - DNA, 19 bp, Homo sapiens
  siRNA target sequence for KPNA1 (NM_002264.1,488-506).
gcttgggtactgacaaata

SEQ ID NO: 133258 - DNA, 19 bp, Homo sapiens
  siRNA target sequence for KPNA1 (NM_002264.1,489-507).
cttgggtactgacaaatat

SEQ ID NO: 133259 - DNA, 19 bp, Homo sapiens
  siRNA target sequence for KPNA1 (NM_002264.1,493-511).
ggtactgacaaatattgct

SEQ ID NO: 133260 - DNA, 19 bp, Homo sapiens
  siRNA target sequence for KPNA1 (NM_002264.1,494-512).
gtactgacaaatattgctt

SEQ ID NO: 133261 - DNA, 19 bp, Homo sapiens
  siRNA target sequence for KPNA1 (NM_002264.1,522-540).
ctcttcagacccgaattgt

SEQ ID NO: 133262 - DNA, 19 bp, Homo sapiens
  siRNA target sequence for KPNA1 (NM_002264.1,574-592).
gttgctcagctcagagttt

SEQ ID NO: 133263 - DNA, 19 bp, Homo sapiens
  siRNA target sequence for KPNA1 (NM_002264.1,582-600).
gctcagagtttgaagatgt

SEQ ID NO: 133264 - DNA, 19 bp, Homo sapiens
  siRNA target sequence for KPNA1 (NM_002264.1,667-685).
cttagactgcaatatcctt

SEQ ID NO: 133265 - DNA, 19 bp, Homo sapiens
  siRNA target sequence for KPNA1 (NM_002264.1,740-758).
gcagtatgggctttgtcta

SEQ ID NO: 133266 - DNA, 19 bp, Homo sapiens
  siRNA target sequence for KPNA1 (NM_002264.1,741-759).
cagtatgggctttgtctaa

SEQ ID NO: 133267 - DNA, 19 bp, Homo sapiens
  siRNA target sequence for KPNA1 (NM_002264.1,874-892).
ggccctctcatatctatca

SEQ ID NO: 133268 - DNA, 19 bp, Homo sapiens
  siRNA target sequence for KPNA1 (NM_002264.1,876-894).
ccctctcatatctatcaga

SEQ ID NO: 133269 - DNA, 19 bp, Homo sapiens
  siRNA target sequence for KPNA1 (NM_002264.1,922-940).
catcgatgcgggagtatgt

SEQ ID NO: 133270 - DNA, 19 bp, Homo sapiens
  siRNA target sequence for KPNA1 (NM_002264.1,952-970).
ggaactgctgatgcataat

SEQ ID NO: 133271 - DNA, 19 bp, Homo sapiens
  siRNA target sequence for KPNA1 (NM_002264.1,997-1015).
gcgagctgtgggaaacatt

SEQ ID NO: 133272 - DNA, 19 bp, Homo sapiens
  siRNA target sequence for KPNA1 (NM_002264.1,1064-1082).
ctgcagagtttattgcatt

SEQ ID NO: 133273 - DNA, 19 bp, Homo sapiens
  siRNA target sequence for KPNA1 (NM_002264.1,1084-1102).
gctgagtagcccaaaggaa

SEQ ID NO: 133274 - DNA, 19 bp, Homo sapiens
  siRNA target sequence for KPNA1 (NM_002264.1,1092-1110).
gcccaaaggaatctatcaa

SEQ ID NO: 133275 - DNA, 19 bp, Homo sapiens
  siRNA target sequence for KPNA1 (NM_002264.1,1115-1133).
gaagcatgttggacgatat

SEQ ID NO: 133276 - DNA, 19 bp, Homo sapiens
  siRNA target sequence for KPNA1 (NM_002264.1,1118-1136).
gcatgttggacgatatcta

SEQ ID NO: 133277 - DNA, 19 bp, Homo sapiens
  siRNA target sequence for KPNA1 (NM_002264.1,1119-1137).
catgttggacgatatctaa

SEQ ID NO: 133278 - DNA, 19 bp, Homo sapiens
  siRNA target sequence for KPNA1 (NM_002264.1,1122-1140).
gttggacgatatctaatat

SEQ ID NO: 133279 - DNA, 19 bp, Homo sapiens
  siRNA target sequence for KPNA1 (NM_002264.1,1162-1180).
gatccagactgtgatagat

SEQ ID NO: 133280 - DNA, 19 bp, Homo sapiens
  siRNA target sequence for KPNA1 (NM_002264.1,1172-1190).
gtgatagatgccaacattt

SEQ ID NO: 133281 - DNA, 19 bp, Homo sapiens
  siRNA target sequence for KPNA1 (NM_002264.1,1194-1212).
cagccctcattagtatttt

SEQ ID NO: 133282 - DNA, 19 bp, Homo sapiens
  siRNA target sequence for KPNA1 (NM_002264.1,1281-1299).
cagctgaacagatcaagta

SEQ ID NO: 133283 - DNA, 19 bp, Homo sapiens
  siRNA target sequence for KPNA1 (NM_002264.1,1304-1322).
gtagaactgggttgtatca

SEQ ID NO: 133284 - DNA, 19 bp, Homo sapiens
  siRNA target sequence for KPNA1 (NM_002264.1,1344-1362).
cggtcatggactctaagat

SEQ ID NO: 133285 - DNA, 19 bp, Homo sapiens
  siRNA target sequence for KPNA1 (NM_002264.1,1345-1363).
ggtcatggactctaagatt

SEQ ID NO: 133286 - DNA, 19 bp, Homo sapiens
  siRNA target sequence for KPNA1 (NM_002264.1,1348-1366).
catggactctaagattgta

SEQ ID NO: 133287 - DNA, 19 bp, Homo sapiens
  siRNA target sequence for KPNA1 (NM_002264.1,1455-1473).
ctttgattgaagaagctta

SEQ ID NO: 133288 - DNA, 19 bp, Homo sapiens
  siRNA target sequence for KPNA1 (NM_002264.1,1555-1573).
cttcgggaccgaagatgaa

SEQ ID NO: 133289 - DNA, 19 bp, Homo sapiens
  siRNA target sequence for KPNA1 (NM_002264.1,1630-1648).
gtgtgaggctcctatggaa

SEQ ID NO: 133290 - DNA, 19 bp, Homo sapiens
  siRNA target sequence for LCP2 (NM_005565.2,263-281).
gccttgctgactatttcaa

SEQ ID NO: 133291 - DNA, 19 bp, Homo sapiens
  siRNA target sequence for LCP2 (NM_005565.2,331-349).
gatggggctcgcttcttga

SEQ ID NO: 133292 - DNA, 19 bp, Homo sapiens
  siRNA target sequence for LCP2 (NM_005565.2,345-363).
cttgaacctgacagaaaat

SEQ ID NO: 133293 - DNA, 19 bp, Homo sapiens
  siRNA target sequence for LCP2 (NM_005565.2,385-403).
ctccgggtgccgattctca

SEQ ID NO: 133294 - DNA, 19 bp, Homo sapiens
  siRNA target sequence for LCP2 (NM_005565.2,389-407).
gggtgccgattctcagtaa

SEQ ID NO: 133295 - DNA, 19 bp, Homo sapiens
  siRNA target sequence for LCP2 (NM_005565.2,391-409).
gtgccgattctcagtaagt

SEQ ID NO: 133296 - DNA, 19 bp, Homo sapiens
  siRNA target sequence for LCP2 (NM_005565.2,393-411).
gccgattctcagtaagtta

SEQ ID NO: 133297 - DNA, 19 bp, Homo sapiens
  siRNA target sequence for LCP2 (NM_005565.2,394-412).
ccgattctcagtaagttaa

SEQ ID NO: 133298 - DNA, 19 bp, Homo sapiens
  siRNA target sequence for LCP2 (NM_005565.2,898-916).
cctgctccttcaatagaca

SEQ ID NO: 133299 - DNA, 19 bp, Homo sapiens
  siRNA target sequence for LCP2 (NM_005565.2,933-951).
cctagatcgttcattagct

SEQ ID NO: 133300 - DNA, 19 bp, Homo sapiens
  siRNA target sequence for LCP2 (NM_005565.2,1035-1053).
ggagcatttacccaagatt

SEQ ID NO: 133301 - DNA, 19 bp, Homo sapiens
  siRNA target sequence for LCP2 (NM_005565.2,1050-1068).
gattcaaaagcctccttta

SEQ ID NO: 133302 - DNA, 19 bp, Homo sapiens
  siRNA target sequence for LCP2 (NM_005565.2,1070-1088).
caccgaccacggaaagaca

SEQ ID NO: 133303 - DNA, 19 bp, Homo sapiens
  siRNA target sequence for LCP2 (NM_005565.2,1194-1212).
gccccagccagcactactt

SEQ ID NO: 133304 - DNA, 19 bp, Homo sapiens
  siRNA target sequence for LCP2 (NM_005565.2,1213-1231).
cctatgagctccaacactt

SEQ ID NO: 133305 - DNA, 19 bp, Homo sapiens
  siRNA target sequence for LCP2 (NM_005565.2,1292-1310).
gagcattctcagaaagtaa

SEQ ID NO: 133306 - DNA, 19 bp, Homo sapiens
  siRNA target sequence for LCP2 (NM_005565.2,1294-1312).
gcattctcagaaagtaaca

SEQ ID NO: 133307 - DNA, 19 bp, Homo sapiens
  siRNA target sequence for LCP2 (NM_005565.2,1365-1383).
caacagaccacctatcaga

SEQ ID NO: 133308 - DNA, 19 bp, Homo sapiens
  siRNA target sequence for LCP2 (NM_005565.2,1465-1483).
gaagagtggtacgtttctt

SEQ ID NO: 133309 - DNA, 19 bp, Homo sapiens
  siRNA target sequence for LCP2 (NM_005565.2,1507-1525).
gctgctcttagaaagataa

SEQ ID NO: 133310 - DNA, 19 bp, Homo sapiens
  siRNA target sequence for LCP2 (NM_005565.2,1631-1649).
gttatcagaaggaaagtca

SEQ ID NO: 133311 - DNA, 19 bp, Homo sapiens
  siRNA target sequence for LCP2 (NM_005565.2,1636-1654).
cagaaggaaagtcaagttt

SEQ ID NO: 133312 - DNA, 19 bp, Homo sapiens
  siRNA target sequence for LCP2 (NM_005565.2,1703-1721).
cagatattattgactactt

SEQ ID NO: 133313 - DNA, 19 bp, Homo sapiens
  siRNA target sequence for LCP2 (NM_005565.2,1705-1723).
gatattattgactacttca

SEQ ID NO: 133314 - DNA, 19 bp, Homo sapiens
  siRNA target sequence for LCP2 (NM_005565.2,1767-1785).
cagataccagtgcacatta

SEQ ID NO: 133315 - DNA, 19 bp, Homo sapiens
  siRNA target sequence for LGALS3BP (NM_005567.2,540-558).
gtggtctgcaccaatgaaa

SEQ ID NO: 133316 - DNA, 19 bp, Homo sapiens
  siRNA target sequence for LGALS3BP (NM_005567.2,606-624).
cttggccagatctttgaca

SEQ ID NO: 133317 - DNA, 19 bp, Homo sapiens
  siRNA target sequence for LGALS3BP (NM_005567.2,798-816).
gaccttctcaggtacttct

SEQ ID NO: 133318 - DNA, 19 bp, Homo sapiens
  siRNA target sequence for LGALS3BP (NM_005567.2,812-830).
cttctactcccgaaggatt

SEQ ID NO: 133319 - DNA, 19 bp, Homo sapiens
  siRNA target sequence for LGALS3BP (NM_005567.2,1527-1545).
ccctctgactacagatact

SEQ ID NO: 133320 - DNA, 19 bp, Homo sapiens
  siRNA target sequence for LGALS3BP (NM_005567.2,1719-1737).
cgcaccattgcctacgaaa

SEQ ID NO: 133321 - DNA, 19 bp, Homo sapiens
  siRNA target sequence for LGALS3BP (NM_005567.2,1720-1738).
gcaccattgcctacgaaaa

SEQ ID NO: 133322 - DNA, 19 bp, Homo sapiens
  siRNA target sequence for LGALS3BP (NM_005567.2,1723-1741).
ccattgcctacgaaaacaa

SEQ ID NO: 133323 - DNA, 19 bp, Homo sapiens
  siRNA target sequence for LIMD1 (NM_014240.1,43-61).
ggcctggaggccagtaaat

SEQ ID NO: 133324 - DNA, 19 bp, Homo sapiens
  siRNA target sequence for LIMD1 (NM_014240.1,66-84).
cgaggacctgaacatgtat

SEQ ID NO: 133325 - DNA, 19 bp, Homo sapiens
  siRNA target sequence for LIMD1 (NM_014240.1,240-258).
gagtagaggccctgtcaat

SEQ ID NO: 133326 - DNA, 19 bp, Homo sapiens
  siRNA target sequence for LIMD1 (NM_014240.1,545-563).
ctcatggagactattatga

SEQ ID NO: 133327 - DNA, 19 bp, Homo sapiens
  siRNA target sequence for LIMD1 (NM_014240.1,547-565).
catggagactattatgaca

SEQ ID NO: 133328 - DNA, 19 bp, Homo sapiens
  siRNA target sequence for LIMD1 (NM_014240.1,582-600).
cccaaagtggggtgacaaa

SEQ ID NO: 133329 - DNA, 19 bp, Homo sapiens
  siRNA target sequence for LIMD1 (NM_014240.1,687-705).
cggggaccatcccctaaat

SEQ ID NO: 133330 - DNA, 19 bp, Homo sapiens
  siRNA target sequence for LIMD1 (NM_014240.1,689-707).
gggaccatcccctaaatca

SEQ ID NO: 133331 - DNA, 19 bp, Homo sapiens
  siRNA target sequence for LIMD1 (NM_014240.1,949-967).
ggtcttccaagatcaaact

SEQ ID NO: 133332 - DNA, 19 bp, Homo sapiens
  siRNA target sequence for LIMD1 (NM_014240.1,1039-1057).
gggcccaaatcttaccttt

SEQ ID NO: 133333 - DNA, 19 bp, Homo sapiens
  siRNA target sequence for LIMD1 (NM_014240.1,1206-1224).
cctgcctgagttatcttgt

SEQ ID NO: 133334 - DNA, 19 bp, Homo sapiens
  siRNA target sequence for LIMD1 (NM_014240.1,1408-1426).
cacccgaaggctgattact

SEQ ID NO: 133335 - DNA, 19 bp, Homo sapiens
  siRNA target sequence for LIMD1 (NM_014240.1,1410-1428).
cccgaaggctgattacttt

SEQ ID NO: 133336 - DNA, 19 bp, Homo sapiens
  siRNA target sequence for LIMD1 (NM_014240.1,1425-1443).
ctttggagcctgtgtgaaa

SEQ ID NO: 133337 - DNA, 19 bp, Homo sapiens
  siRNA target sequence for LIMD1 (NM_014240.1,1617-1635).
gtcggctgacaggtgtttt

SEQ ID NO: 133338 - DNA, 19 bp, Homo sapiens
  siRNA target sequence for LIMD1 (NM_014240.1,1619-1637).
cggctgacaggtgttttct

SEQ ID NO: 133339 - DNA, 19 bp, Homo sapiens
  siRNA target sequence for LIMD1 (NM_014240.1,1620-1638).
ggctgacaggtgttttctt

SEQ ID NO: 133340 - DNA, 19 bp, Homo sapiens
  siRNA target sequence for LIMD1 (NM_014240.1,1704-1722).
ccgctgtgtcatctgtaat

SEQ ID NO: 133341 - DNA, 19 bp, Homo sapiens
  siRNA target sequence for LIMD1 (NM_014240.1,1706-1724).
gctgtgtcatctgtaatga

SEQ ID NO: 133342 - DNA, 19 bp, Homo sapiens
  siRNA target sequence for LIMD1 (NM_014240.1,1919-1937).
gtggtctggagctcaatga

SEQ ID NO: 133343 - DNA, 19 bp, Homo sapiens
  siRNA target sequence for LIN7A (NM_004664.1,196-214).
gcagacatggcgacattga

SEQ ID NO: 133344 - DNA, 19 bp, Homo sapiens
  siRNA target sequence for LIN7A (NM_004664.1,298-316).
ccagtgcacaagctacaat

SEQ ID NO: 133345 - DNA, 19 bp, Homo sapiens
  siRNA target sequence for LIN7A (NM_004664.1,330-348).
gcttcagagtgagttttgt

SEQ ID NO: 133346 - DNA, 19 bp, Homo sapiens
  siRNA target sequence for LIN7A (NM_004664.1,331-349).
cttcagagtgagttttgta

SEQ ID NO: 133347 - DNA, 19 bp, Homo sapiens
  siRNA target sequence for LIN7A (NM_004664.1,342-360).
gttttgtacagctattcga

SEQ ID NO: 133348 - DNA, 19 bp, Homo sapiens
  siRNA target sequence for LIN7A (NM_004664.1,358-376).
cgagaggtgtatcaatata

SEQ ID NO: 133349 - DNA, 19 bp, Homo sapiens
  siRNA target sequence for LIN7A (NM_004664.1,359-377).
gagaggtgtatcaatatat

SEQ ID NO: 133350 - DNA, 19 bp, Homo sapiens
  siRNA target sequence for LIN7A (NM_004664.1,363-381).
ggtgtatcaatatatgcat

SEQ ID NO: 133351 - DNA, 19 bp, Homo sapiens
  siRNA target sequence for LIN7A (NM_004664.1,378-396).
gcatgaaacgataactgtt

SEQ ID NO: 133352 - DNA, 19 bp, Homo sapiens
  siRNA target sequence for LIN7A (NM_004664.1,435-453).
ggcaacagttgcagctttt

SEQ ID NO: 133353 - DNA, 19 bp, Homo sapiens
  siRNA target sequence for LIN7A (NM_004664.1,473-491).
cccaccctcgagtagttga

SEQ ID NO: 133354 - DNA, 19 bp, Homo sapiens
  siRNA target sequence for LIN7A (NM_004664.1,474-492).
ccaccctcgagtagttgaa

SEQ ID NO: 133355 - DNA, 19 bp, Homo sapiens
  siRNA target sequence for LIN7A (NM_004664.1,544-562).
caaaattcccccatttata

SEQ ID NO: 133356 - DNA, 19 bp, Homo sapiens
  siRNA target sequence for LIN7A (NM_004664.1,720-738).
gcgatacaccccaaaagtt

SEQ ID NO: 133357 - DNA, 19 bp, Homo sapiens
  siRNA target sequence for LIN7A (NM_004664.1,753-771).
ggctcgctttgaaaagcta

SEQ ID NO: 133358 - DNA, 19 bp, Homo sapiens
  siRNA target sequence for LIN7A (NM_004664.1,844-862).
caacaaaaccacatgtcat

SEQ ID NO: 133359 - DNA, 19 bp, Homo sapiens
  siRNA target sequence for LMNA (NM_005572.2,558-576).
ctgaaagcgcgcaatacca

SEQ ID NO: 133360 - DNA, 19 bp, Homo sapiens
  siRNA target sequence for LMNA (NM_005572.2,1446-1464).
gggggcagcgtcaccaaaa

SEQ ID NO: 133361 - DNA, 19 bp, Homo sapiens
  siRNA target sequence for LMNA (NM_005572.2,1547-1565).
ggatgaggagggcaagttt

SEQ ID NO: 133362 - DNA, 19 bp, Homo sapiens
  siRNA target sequence for LMNA (NM_005572.2,1566-1584).
gtccggctgcgcaacaagt

SEQ ID NO: 133363 - DNA, 19 bp, Homo sapiens
  siRNA target sequence for LMNA (NM_005572.2,1622-1640).
gcgccagaatggagatgat

SEQ ID NO: 133364 - DNA, 19 bp, Homo sapiens
  siRNA target sequence for LMNA (NM_170707.1,1933-1951).
gggaccccgctgagtacaa

SEQ ID NO: 133365 - DNA, 19 bp, Homo sapiens
  siRNA target sequence for LOC92799 (NM_138392.1,175-193).
gcatctcgacgctgaaaga

SEQ ID NO: 133366 - DNA, 19 bp, Homo sapiens
  siRNA target sequence for LOC92799 (NM_138392.1,176-194).
catctcgacgctgaaagat

SEQ ID NO: 133367 - DNA, 19 bp, Homo sapiens
  siRNA target sequence for LOC92799 (NM_138392.1,195-213).
gagaccggagcaatcttca

SEQ ID NO: 133368 - DNA, 19 bp, Homo sapiens
  siRNA target sequence for LOC92799 (NM_138392.1,362-380).
ggagttggatcgatcttct

SEQ ID NO: 133369 - DNA, 19 bp, Homo sapiens
  siRNA target sequence for LOC92799 (NM_138392.1,363-381).
gagttggatcgatcttctt

SEQ ID NO: 133370 - DNA, 19 bp, Homo sapiens
  siRNA target sequence for LOC92799 (NM_138392.1,365-383).
gttggatcgatcttcttgt

SEQ ID NO: 133371 - DNA, 19 bp, Homo sapiens
  siRNA target sequence for LOC92799 (NM_138392.1,382-400).
gtggaaacgtcctcttcaa

SEQ ID NO: 133372 - DNA, 19 bp, Homo sapiens
  siRNA target sequence for LOC92799 (NM_138392.1,544-562).
gccgaatgctggatgagaa

SEQ ID NO: 133373 - DNA, 19 bp, Homo sapiens
  siRNA target sequence for LOC92799 (NM_138392.1,619-637).
gtggacaccataattggat

SEQ ID NO: 133374 - DNA, 19 bp, Homo sapiens
  siRNA target sequence for LOC92799 (NM_138392.1,1042-1060).
gcaacaacggctccattta

SEQ ID NO: 133375 - DNA, 19 bp, Homo sapiens
  siRNA target sequence for LOC92799 (NM_138392.1,1312-1330).
gccctgtcaccaagatcat

SEQ ID NO: 133376 - DNA, 19 bp, Homo sapiens
  siRNA target sequence for LOC92799 (NM_138392.1,1354-1372).
cagtctgtgccgacaacaa

SEQ ID NO: 133377 - DNA, 19 bp, Homo sapiens
  siRNA target sequence for LOC92799 (NM_138392.1,1435-1453).
ccccactcgcttcctttaa

SEQ ID NO: 133378 - DNA, 19 bp, Homo sapiens
  siRNA target sequence for LOC92799 (NM_138392.1,1437-1455).
ccactcgcttcctttaaga

SEQ ID NO: 133379 - DNA, 19 bp, Homo sapiens
  siRNA target sequence for LOC92799 (NM_138392.1,1438-1456).
cactcgcttcctttaagat

SEQ ID NO: 133380 - DNA, 19 bp, Homo sapiens
  siRNA target sequence for LOC92799 (NM_138392.1,1583-1601).
cgtgcgtctctcatctact

SEQ ID NO: 133381 - DNA, 19 bp, Homo sapiens
  siRNA target sequence for LOC92799 (NM_138392.1,2124-2142).
ctcaatgaaacttcctttt

SEQ ID NO: 133382 - DNA, 19 bp, Homo sapiens
  siRNA target sequence for LRP6 (NM_002336.1,172-190).
gattggttgatgctacaaa

SEQ ID NO: 133383 - DNA, 19 bp, Homo sapiens
  siRNA target sequence for LRP6 (NM_002336.1,194-212).
caaagagaatgctacgatt

SEQ ID NO: 133384 - DNA, 19 bp, Homo sapiens
  siRNA target sequence for LRP6 (NM_002336.1,238-256).
ctgcggtggactttgtgtt

SEQ ID NO: 133385 - DNA, 19 bp, Homo sapiens
  siRNA target sequence for LRP6 (NM_002336.1,240-258).
gcggtggactttgtgttta

SEQ ID NO: 133386 - DNA, 19 bp, Homo sapiens
  siRNA target sequence for LRP6 (NM_002336.1,290-308).
cgaagaagccattaaacga

SEQ ID NO: 133387 - DNA, 19 bp, Homo sapiens
  siRNA target sequence for LRP6 (NM_002336.1,291-309).
gaagaagccattaaacgaa

SEQ ID NO: 133388 - DNA, 19 bp, Homo sapiens
  siRNA target sequence for LRP6 (NM_002336.1,335-353).
gcagaatgttgttgtttct

SEQ ID NO: 133389 - DNA, 19 bp, Homo sapiens
  siRNA target sequence for LRP6 (NM_002336.1,345-363).
gttgtttctggattattgt

SEQ ID NO: 133390 - DNA, 19 bp, Homo sapiens
  siRNA target sequence for LRP6 (NM_002336.1,368-386).
cgatgggctggcatgtgat

SEQ ID NO: 133391 - DNA, 19 bp, Homo sapiens
  siRNA target sequence for LRP6 (NM_002336.1,382-400).
gtgattggcttggagaaaa

SEQ ID NO: 133392 - DNA, 19 bp, Homo sapiens
  siRNA target sequence for LRP6 (NM_002336.1,384-402).
gattggcttggagaaaaat

SEQ ID NO: 133393 - DNA, 19 bp, Homo sapiens
  siRNA target sequence for LRP6 (NM_002336.1,390-408).
cttggagaaaaattgtact

SEQ ID NO: 133394 - DNA, 19 bp, Homo sapiens
  siRNA target sequence for LRP6 (NM_002336.1,404-422).
gtactggacagattctgaa

SEQ ID NO: 133395 - DNA, 19 bp, Homo sapiens
  siRNA target sequence for LRP6 (NM_002336.1,453-471).
ggatctttacgaaaagttt

SEQ ID NO: 133396 - DNA, 19 bp, Homo sapiens
  siRNA target sequence for LRP6 (NM_002336.1,488-506).
ggatcaacccagagctatt

SEQ ID NO: 133397 - DNA, 19 bp, Homo sapiens
  siRNA target sequence for LRP6 (NM_002336.1,497-515).
cagagctattgccttagat

SEQ ID NO: 133398 - DNA, 19 bp, Homo sapiens
  siRNA target sequence for LRP6 (NM_002336.1,516-534).
ccttcaagtgggttcatgt

SEQ ID NO: 133399 - DNA, 19 bp, Homo sapiens
  siRNA target sequence for LRP6 (NM_002336.1,517-535).
cttcaagtgggttcatgta

SEQ ID NO: 133400 - DNA, 19 bp, Homo sapiens
  siRNA target sequence for LRP6 (NM_002336.1,548-566).
gggagaagtgccaaagata

SEQ ID NO: 133401 - DNA, 19 bp, Homo sapiens
  siRNA target sequence for LRP6 (NM_002336.1,585-603).
ggttcaagtcgcttcatta

SEQ ID NO: 133402 - DNA, 19 bp, Homo sapiens
  siRNA target sequence for LRP6 (NM_002336.1,586-604).
gttcaagtcgcttcattat

SEQ ID NO: 133403 - DNA, 19 bp, Homo sapiens
  siRNA target sequence for LRP6 (NM_002336.1,725-743).
gcaggcagtggttaaaggt

SEQ ID NO: 133404 - DNA, 19 bp, Homo sapiens
  siRNA target sequence for LRP6 (NM_002336.1,726-744).
caggcagtggttaaaggtt

SEQ ID NO: 133405 - DNA, 19 bp, Homo sapiens
  siRNA target sequence for LRP6 (NM_002336.1,756-774).
ccttttgccttgacgttat

SEQ ID NO: 133406 - DNA, 19 bp, Homo sapiens
  siRNA target sequence for LRP6 (NM_002336.1,757-775).
cttttgccttgacgttatt

SEQ ID NO: 133407 - DNA, 19 bp, Homo sapiens
  siRNA target sequence for LRP6 (NM_002336.1,841-859).
gtgagggtctgcgtgaaat

SEQ ID NO: 133408 - DNA, 19 bp, Homo sapiens
  siRNA target sequence for LRP6 (NM_002336.1,845-863).
gggtctgcgtgaaatccat

SEQ ID NO: 133409 - DNA, 19 bp, Homo sapiens
  siRNA target sequence for LRP6 (NM_002336.1,846-864).
ggtctgcgtgaaatccatt

SEQ ID NO: 133410 - DNA, 19 bp, Homo sapiens
  siRNA target sequence for LRP6 (NM_002336.1,915-933).
ccaaatgccacaaatccat

SEQ ID NO: 133411 - DNA, 19 bp, Homo sapiens
  siRNA target sequence for LRP6 (NM_002336.1,951-969).
ggttgttcccatttgtgtt

SEQ ID NO: 133412 - DNA, 19 bp, Homo sapiens
  siRNA target sequence for LRP6 (NM_002336.1,979-997).
cagtcaagcctttttatca

SEQ ID NO: 133413 - DNA, 19 bp, Homo sapiens
  siRNA target sequence for LRP6 (NM_002336.1,981-999).
gtcaagcctttttatcagt

SEQ ID NO: 133414 - DNA, 19 bp, Homo sapiens
  siRNA target sequence for LRP6 (NM_002336.1,1006-1024).
gccccactggggtcaaact

SEQ ID NO: 133415 - DNA, 19 bp, Homo sapiens
  siRNA target sequence for LRP6 (NM_002336.1,1050-1068).
gatggtgccacagaattat

SEQ ID NO: 133416 - DNA, 19 bp, Homo sapiens
  siRNA target sequence for LRP6 (NM_002336.1,1057-1075).
ccacagaattattgctttt

SEQ ID NO: 133417 - DNA, 19 bp, Homo sapiens
  siRNA target sequence for LRP6 (NM_002336.1,1058-1076).
cacagaattattgctttta

SEQ ID NO: 133418 - DNA, 19 bp, Homo sapiens
  siRNA target sequence for LRP6 (NM_002336.1,1105-1123).
ctttggatacaccagattt

SEQ ID NO: 133419 - DNA, 19 bp, Homo sapiens
  siRNA target sequence for LRP6 (NM_002336.1,1158-1176).
catgccattgccatagatt

SEQ ID NO: 133420 - DNA, 19 bp, Homo sapiens
  siRNA target sequence for LRP6 (NM_002336.1,1163-1181).
cattgccatagattacgat

SEQ ID NO: 133421 - DNA, 19 bp, Homo sapiens
  siRNA target sequence for LRP6 (NM_002336.1,1222-1240).
gggccatacgccgttcatt

SEQ ID NO: 133422 - DNA, 19 bp, Homo sapiens
  siRNA target sequence for LRP6 (NM_002336.1,1223-1241).
ggccatacgccgttcattt

SEQ ID NO: 133423 - DNA, 19 bp, Homo sapiens
  siRNA target sequence for LRP6 (NM_002336.1,1224-1242).
gccatacgccgttcattta

SEQ ID NO: 133424 - DNA, 19 bp, Homo sapiens
  siRNA target sequence for LRP6 (NM_002336.1,1225-1243).
ccatacgccgttcatttat

SEQ ID NO: 133425 - DNA, 19 bp, Homo sapiens
  siRNA target sequence for LRP6 (NM_002336.1,1249-1267).
gatctggcagtcagtttgt

SEQ ID NO: 133426 - DNA, 19 bp, Homo sapiens
  siRNA target sequence for LRP6 (NM_002336.1,1307-1325).
ggactgggttgcacgaaat

SEQ ID NO: 133427 - DNA, 19 bp, Homo sapiens
  siRNA target sequence for LRP6 (NM_002336.1,1310-1328).
ctgggttgcacgaaatctt

SEQ ID NO: 133428 - DNA, 19 bp, Homo sapiens
  siRNA target sequence for LRP6 (NM_002336.1,1317-1335).
gcacgaaatctttattgga

SEQ ID NO: 133429 - DNA, 19 bp, Homo sapiens
  siRNA target sequence for LRP6 (NM_002336.1,1340-1358).
cactggcactgatcgaata

SEQ ID NO: 133430 - DNA, 19 bp, Homo sapiens
  siRNA target sequence for LRP6 (NM_002336.1,1342-1360).
ctggcactgatcgaataga

SEQ ID NO: 133431 - DNA, 19 bp, Homo sapiens
  siRNA target sequence for LRP6 (NM_002336.1,1345-1363).
gcactgatcgaatagaagt

SEQ ID NO: 133432 - DNA, 19 bp, Homo sapiens
  siRNA target sequence for LRP6 (NM_002336.1,1509-1527).
ggttctgaccgtgtagtat

SEQ ID NO: 133433 - DNA, 19 bp, Homo sapiens
  siRNA target sequence for LRP6 (NM_002336.1,1510-1528).
gttctgaccgtgtagtatt

SEQ ID NO: 133434 - DNA, 19 bp, Homo sapiens
  siRNA target sequence for LRP6 (NM_002336.1,1513-1531).
ctgaccgtgtagtattggt

SEQ ID NO: 133435 - DNA, 19 bp, Homo sapiens
  siRNA target sequence for LRP6 (NM_002336.1,1515-1533).
gaccgtgtagtattggtta

SEQ ID NO: 133436 - DNA, 19 bp, Homo sapiens
  siRNA target sequence for LRP6 (NM_002336.1,1518-1536).
cgtgtagtattggttaaca

SEQ ID NO: 133437 - DNA, 19 bp, Homo sapiens
  siRNA target sequence for LRP6 (NM_002336.1,1521-1539).
gtagtattggttaacactt

SEQ ID NO: 133438 - DNA, 19 bp, Homo sapiens
  siRNA target sequence for LRP6 (NM_002336.1,1542-1560).
cttggttggccaaatggtt

SEQ ID NO: 133439 - DNA, 19 bp, Homo sapiens
  siRNA target sequence for LRP6 (NM_002336.1,1558-1576).
gtttagccttggattatga

SEQ ID NO: 133440 - DNA, 19 bp, Homo sapiens
  siRNA target sequence for LRP6 (NM_002336.1,1611-1629).
gacaagattgaggttatga

SEQ ID NO: 133441 - DNA, 19 bp, Homo sapiens
  siRNA target sequence for LRP6 (NM_002336.1,1616-1634).
gattgaggttatgaatact

SEQ ID NO: 133442 - DNA, 19 bp, Homo sapiens
  siRNA target sequence for LRP6 (NM_002336.1,1642-1660).
ctgggagacgagtactagt

SEQ ID NO: 133443 - DNA, 19 bp, Homo sapiens
  siRNA target sequence for LRP6 (NM_002336.1,1651-1669).
gagtactagtggaagacaa

SEQ ID NO: 133444 - DNA, 19 bp, Homo sapiens
  siRNA target sequence for LRP6 (NM_002336.1,1653-1671).
gtactagtggaagacaaaa

SEQ ID NO: 133445 - DNA, 19 bp, Homo sapiens
  siRNA target sequence for LRP6 (NM_002336.1,1665-1683).
gacaaaattcctcacatat

SEQ ID NO: 133446 - DNA, 19 bp, Homo sapiens
  siRNA target sequence for LRP6 (NM_002336.1,1724-1742).
ctggcagaggcgtagcatt

SEQ ID NO: 133447 - DNA, 19 bp, Homo sapiens
  siRNA target sequence for LRP6 (NM_002336.1,1727-1745).
gcagaggcgtagcattgaa

SEQ ID NO: 133448 - DNA, 19 bp, Homo sapiens
  siRNA target sequence for LRP6 (NM_002336.1,1728-1746).
cagaggcgtagcattgaaa

SEQ ID NO: 133449 - DNA, 19 bp, Homo sapiens
  siRNA target sequence for LRP6 (NM_002336.1,1730-1748).
gaggcgtagcattgaaaga

SEQ ID NO: 133450 - DNA, 19 bp, Homo sapiens
  siRNA target sequence for LRP6 (NM_002336.1,1732-1750).
ggcgtagcattgaaagagt

SEQ ID NO: 133451 - DNA, 19 bp, Homo sapiens
  siRNA target sequence for LRP6 (NM_002336.1,1733-1751).
gcgtagcattgaaagagtt

SEQ ID NO: 133452 - DNA, 19 bp, Homo sapiens
  siRNA target sequence for LRP6 (NM_002336.1,1807-1825).
gcctaaaggctacaaatgt

SEQ ID NO: 133453 - DNA, 19 bp, Homo sapiens
  siRNA target sequence for LRP6 (NM_002336.1,1808-1826).
cctaaaggctacaaatgtt

SEQ ID NO: 133454 - DNA, 19 bp, Homo sapiens
  siRNA target sequence for LRP6 (NM_002336.1,1824-1842).
gttcatcgagtgattggtt

SEQ ID NO: 133455 - DNA, 19 bp, Homo sapiens
  siRNA target sequence for LRP6 (NM_002336.1,1921-1939).
ctattggctttgaactcat

SEQ ID NO: 133456 - DNA, 19 bp, Homo sapiens
  siRNA target sequence for LRP6 (NM_002336.1,1995-2013).
gcagatatcagacgaattt

SEQ ID NO: 133457 - DNA, 19 bp, Homo sapiens
  siRNA target sequence for LRP6 (NM_002336.1,2094-2112).
gacaaccgaatttattgga

SEQ ID NO: 133458 - DNA, 19 bp, Homo sapiens
  siRNA target sequence for LRP6 (NM_002336.1,2100-2118).
cgaatttattggactgata

SEQ ID NO: 133459 - DNA, 19 bp, Homo sapiens
  siRNA target sequence for LRP6 (NM_002336.1,2163-2181).
ctggaacatgtggtagaat

SEQ ID NO: 133460 - DNA, 19 bp, Homo sapiens
  siRNA target sequence for LRP6 (NM_002336.1,2174-2192).
ggtagaattcggcttagat

SEQ ID NO: 133461 - DNA, 19 bp, Homo sapiens
  siRNA target sequence for LRP6 (NM_002336.1,2175-2193).
gtagaattcggcttagatt

SEQ ID NO: 133462 - DNA, 19 bp, Homo sapiens
  siRNA target sequence for LRP6 (NM_002336.1,2220-2238).
cttgggaagaacttgtact

SEQ ID NO: 133463 - DNA, 19 bp, Homo sapiens
  siRNA target sequence for LRP6 (NM_002336.1,2244-2262).
gacacaggaacgaatcgaa

SEQ ID NO: 133464 - DNA, 19 bp, Homo sapiens
  siRNA target sequence for LRP6 (NM_002336.1,2246-2264).
cacaggaacgaatcgaatt

SEQ ID NO: 133465 - DNA, 19 bp, Homo sapiens
  siRNA target sequence for LRP6 (NM_002336.1,2259-2277).
cgaattgaggtgtcaaagt

SEQ ID NO: 133466 - DNA, 19 bp, Homo sapiens
  siRNA target sequence for LRP6 (NM_002336.1,2260-2278).
gaattgaggtgtcaaagtt

SEQ ID NO: 133467 - DNA, 19 bp, Homo sapiens
  siRNA target sequence for LRP6 (NM_002336.1,2283-2301).
gggcagcaccgacaagttt

SEQ ID NO: 133468 - DNA, 19 bp, Homo sapiens
  siRNA target sequence for LRP6 (NM_002336.1,2284-2302).
ggcagcaccgacaagtttt

SEQ ID NO: 133469 - DNA, 19 bp, Homo sapiens
  siRNA target sequence for LRP6 (NM_002336.1,2304-2322).
gtgtggaaagacctagata

SEQ ID NO: 133470 - DNA, 19 bp, Homo sapiens
  siRNA target sequence for LRP6 (NM_002336.1,2306-2324).
gtggaaagacctagatagt

SEQ ID NO: 133471 - DNA, 19 bp, Homo sapiens
  siRNA target sequence for LRP6 (NM_002336.1,2342-2360).
ggaccctgccgaaggattt

SEQ ID NO: 133472 - DNA, 19 bp, Homo sapiens
  siRNA target sequence for LRP6 (NM_002336.1,2343-2361).
gaccctgccgaaggattta

SEQ ID NO: 133473 - DNA, 19 bp, Homo sapiens
  siRNA target sequence for LRP6 (NM_002336.1,2349-2367).
gccgaaggatttatgtatt

SEQ ID NO: 133474 - DNA, 19 bp, Homo sapiens
  siRNA target sequence for LRP6 (NM_002336.1,2377-2395).
ggggtggaaaacctaagat

SEQ ID NO: 133475 - DNA, 19 bp, Homo sapiens
  siRNA target sequence for LRP6 (NM_002336.1,2453-2471).
ggcaaacggcctaactatt

SEQ ID NO: 133476 - DNA, 19 bp, Homo sapiens
  siRNA target sequence for LRP6 (NM_002336.1,2455-2473).
caaacggcctaactattga

SEQ ID NO: 133477 - DNA, 19 bp, Homo sapiens
  siRNA target sequence for LRP6 (NM_002336.1,2459-2477).
cggcctaactattgattat

SEQ ID NO: 133478 - DNA, 19 bp, Homo sapiens
  siRNA target sequence for LRP6 (NM_002336.1,2462-2480).
cctaactattgattatgct

SEQ ID NO: 133479 - DNA, 19 bp, Homo sapiens
  siRNA target sequence for LRP6 (NM_002336.1,2463-2481).
ctaactattgattatgcta

SEQ ID NO: 133480 - DNA, 19 bp, Homo sapiens
  siRNA target sequence for LRP6 (NM_002336.1,2478-2496).
gctaaaaggaggctttatt

SEQ ID NO: 133481 - DNA, 19 bp, Homo sapiens
  siRNA target sequence for LRP6 (NM_002336.1,2513-2531).
caacttaatagaatcttca

SEQ ID NO: 133482 - DNA, 19 bp, Homo sapiens
  siRNA target sequence for LRP6 (NM_002336.1,2541-2559).
gggctcaaccgtgaagtta

SEQ ID NO: 133483 - DNA, 19 bp, Homo sapiens
  siRNA target sequence for LRP6 (NM_002336.1,2542-2560).
ggctcaaccgtgaagttat

SEQ ID NO: 133484 - DNA, 19 bp, Homo sapiens
  siRNA target sequence for LRP6 (NM_002336.1,2543-2561).
gctcaaccgtgaagttata

SEQ ID NO: 133485 - DNA, 19 bp, Homo sapiens
  siRNA target sequence for LRP6 (NM_002336.1,2546-2564).
caaccgtgaagttatagca

SEQ ID NO: 133486 - DNA, 19 bp, Homo sapiens
  siRNA target sequence for LRP6 (NM_002336.1,2593-2611).
ctcagtaccaagattatat

SEQ ID NO: 133487 - DNA, 19 bp, Homo sapiens
  siRNA target sequence for LRP6 (NM_002336.1,2595-2613).
cagtaccaagattatatct

SEQ ID NO: 133488 - DNA, 19 bp, Homo sapiens
  siRNA target sequence for LRP6 (NM_002336.1,2643-2661).
gagcgtgccaacaaaacca

SEQ ID NO: 133489 - DNA, 19 bp, Homo sapiens
  siRNA target sequence for LRP6 (NM_002336.1,2798-2816).
gccagttgggggttttgtt

SEQ ID NO: 133490 - DNA, 19 bp, Homo sapiens
  siRNA target sequence for LRP6 (NM_002336.1,2826-2844).
cctgcccactactctctta

SEQ ID NO: 133491 - DNA, 19 bp, Homo sapiens
  siRNA target sequence for LRP6 (NM_002336.1,2827-2845).
ctgcccactactctcttaa

SEQ ID NO: 133492 - DNA, 19 bp, Homo sapiens
  siRNA target sequence for LRP6 (NM_002336.1,2831-2849).
ccactactctcttaatgct

SEQ ID NO: 133493 - DNA, 19 bp, Homo sapiens
  siRNA target sequence for LRP6 (NM_002336.1,2909-2927).
caaccgcatggtgattgat

SEQ ID NO: 133494 - DNA, 19 bp, Homo sapiens
  siRNA target sequence for LRP6 (NM_002336.1,2998-3016).
cactggacaagcaactcta

SEQ ID NO: 133495 - DNA, 19 bp, Homo sapiens
  siRNA target sequence for LRP6 (NM_002336.1,3009-3027).
caactctattggattgact

SEQ ID NO: 133496 - DNA, 19 bp, Homo sapiens
  siRNA target sequence for LRP6 (NM_002336.1,3019-3037).
ggattgactcacgacaaaa

SEQ ID NO: 133497 - DNA, 19 bp, Homo sapiens
  siRNA target sequence for LRP6 (NM_002336.1,3103-3121).
gtcagaacctggaaataca

SEQ ID NO: 133498 - DNA, 19 bp, Homo sapiens
  siRNA target sequence for LRP6 (NM_002336.1,3125-3143).
ctatgacctcagcattgat

SEQ ID NO: 133499 - DNA, 19 bp, Homo sapiens
  siRNA target sequence for LRP6 (NM_002336.1,3172-3190).
gtgaggctaccaatgtcat

SEQ ID NO: 133500 - DNA, 19 bp, Homo sapiens
  siRNA target sequence for LRP6 (NM_002336.1,3274-3292).
cagagaaagggtatatgta

SEQ ID NO: 133501 - DNA, 19 bp, Homo sapiens
  siRNA target sequence for LRP6 (NM_002336.1,3276-3294).
gagaaagggtatatgtatt

SEQ ID NO: 133502 - DNA, 19 bp, Homo sapiens
  siRNA target sequence for LRP6 (NM_002336.1,3283-3301).
ggtatatgtattttaccaa

SEQ ID NO: 133503 - DNA, 19 bp, Homo sapiens
  siRNA target sequence for LRP6 (NM_002336.1,3351-3369).
gaacgggaggtcctctttt

SEQ ID NO: 133504 - DNA, 19 bp, Homo sapiens
  siRNA target sequence for LRP6 (NM_002336.1,3354-3372).
cgggaggtcctctttttca

SEQ ID NO: 133505 - DNA, 19 bp, Homo sapiens
  siRNA target sequence for LRP6 (NM_002336.1,3371-3389).
cagtggcttaagtaaacca

SEQ ID NO: 133506 - DNA, 19 bp, Homo sapiens
  siRNA target sequence for LRP6 (NM_002336.1,3422-3440).
gctcttttgggctgattca

SEQ ID NO: 133507 - DNA, 19 bp, Homo sapiens
  siRNA target sequence for LRP6 (NM_002336.1,3425-3443).
cttttgggctgattcagat

SEQ ID NO: 133508 - DNA, 19 bp, Homo sapiens
  siRNA target sequence for LRP6 (NM_002336.1,3439-3457).
cagatctccggcgaattga

SEQ ID NO: 133509 - DNA, 19 bp, Homo sapiens
  siRNA target sequence for LRP6 (NM_002336.1,3441-3459).
gatctccggcgaattgaaa

SEQ ID NO: 133510 - DNA, 19 bp, Homo sapiens
  siRNA target sequence for LRP6 (NM_002336.1,3474-3492).
ggtgctaaccggatagtat

SEQ ID NO: 133511 - DNA, 19 bp, Homo sapiens
  siRNA target sequence for LRP6 (NM_002336.1,3475-3493).
gtgctaaccggatagtatt

SEQ ID NO: 133512 - DNA, 19 bp, Homo sapiens
  siRNA target sequence for LRP6 (NM_002336.1,3478-3496).
ctaaccggatagtattaga

SEQ ID NO: 133513 - DNA, 19 bp, Homo sapiens
  siRNA target sequence for LRP6 (NM_002336.1,3545-3563).
gctctattggattgataaa

SEQ ID NO: 133514 - DNA, 19 bp, Homo sapiens
  siRNA target sequence for LRP6 (NM_002336.1,3558-3576).
gataaacagcagcaaatga

SEQ ID NO: 133515 - DNA, 19 bp, Homo sapiens
  siRNA target sequence for LRP6 (NM_002336.1,3614-3632).
caaagtccaagctcgaatt

SEQ ID NO: 133516 - DNA, 19 bp, Homo sapiens
  siRNA target sequence for LRP6 (NM_002336.1,3643-3661).
gtgacattcatgcagtaaa

SEQ ID NO: 133517 - DNA, 19 bp, Homo sapiens
  siRNA target sequence for LRP6 (NM_002336.1,3773-3791).
gcacctggttctacttcaa

SEQ ID NO: 133518 - DNA, 19 bp, Homo sapiens
  siRNA target sequence for LRP6 (NM_002336.1,3786-3804).
cttcaagatgagctatcat

SEQ ID NO: 133519 - DNA, 19 bp, Homo sapiens
  siRNA target sequence for LRP6 (NM_002336.1,3844-3862).
gtttcacgggggaaattga

SEQ ID NO: 133520 - DNA, 19 bp, Homo sapiens
  siRNA target sequence for LRP6 (NM_002336.1,3881-3899).
gcggtgcgatgggtttact

SEQ ID NO: 133521 - DNA, 19 bp, Homo sapiens
  siRNA target sequence for LRP6 (NM_002336.1,3883-3901).
ggtgcgatgggtttactga

SEQ ID NO: 133522 - DNA, 19 bp, Homo sapiens
  siRNA target sequence for LRP6 (NM_002336.1,3884-3902).
gtgcgatgggtttactgaa

SEQ ID NO: 133523 - DNA, 19 bp, Homo sapiens
  siRNA target sequence for LRP6 (NM_002336.1,3887-3905).
cgatgggtttactgaatgt

SEQ ID NO: 133524 - DNA, 19 bp, Homo sapiens
  siRNA target sequence for LRP6 (NM_002336.1,3964-3982).
ccagtgggcagtgtattga

SEQ ID NO: 133525 - DNA, 19 bp, Homo sapiens
  siRNA target sequence for LRP6 (NM_002336.1,4180-4198).
cacaggccaccaatacagt

SEQ ID NO: 133526 - DNA, 19 bp, Homo sapiens
  siRNA target sequence for LRP6 (NM_002336.1,4190-4208).
caatacagttggttctgtt

SEQ ID NO: 133527 - DNA, 19 bp, Homo sapiens
  siRNA target sequence for LRP6 (NM_002336.1,4204-4222).
ctgttattggcgtaattgt

SEQ ID NO: 133528 - DNA, 19 bp, Homo sapiens
  siRNA target sequence for LRP6 (NM_002336.1,4206-4224).
gttattggcgtaattgtca

SEQ ID NO: 133529 - DNA, 19 bp, Homo sapiens
  siRNA target sequence for LRP6 (NM_002336.1,4214-4232).
cgtaattgtcaccattttt

SEQ ID NO: 133530 - DNA, 19 bp, Homo sapiens
  siRNA target sequence for LRP6 (NM_002336.1,4233-4251).
gtgtctggaactgtatact

SEQ ID NO: 133531 - DNA, 19 bp, Homo sapiens
  siRNA target sequence for LRP6 (NM_002336.1,4235-4253).
gtctggaactgtatacttt

SEQ ID NO: 133532 - DNA, 19 bp, Homo sapiens
  siRNA target sequence for LRP6 (NM_002336.1,4237-4255).
ctggaactgtatactttat

SEQ ID NO: 133533 - DNA, 19 bp, Homo sapiens
  siRNA target sequence for LRP6 (NM_002336.1,4287-4305).
ggagatggggaaactatga

SEQ ID NO: 133534 - DNA, 19 bp, Homo sapiens
  siRNA target sequence for LRP6 (NM_002336.1,4290-4308).
gatggggaaactatgacta

SEQ ID NO: 133535 - DNA, 19 bp, Homo sapiens
  siRNA target sequence for LRP6 (NM_002336.1,4294-4312).
gggaaactatgactaatga

SEQ ID NO: 133536 - DNA, 19 bp, Homo sapiens
  siRNA target sequence for LRP6 (NM_002336.1,4300-4318).
ctatgactaatgactatgt

SEQ ID NO: 133537 - DNA, 19 bp, Homo sapiens
  siRNA target sequence for LRP6 (NM_002336.1,4304-4322).
gactaatgactatgtagtt

SEQ ID NO: 133538 - DNA, 19 bp, Homo sapiens
  siRNA target sequence for LRP6 (NM_002336.1,4306-4324).
ctaatgactatgtagttca

SEQ ID NO: 133539 - DNA, 19 bp, Homo sapiens
  siRNA target sequence for LRP6 (NM_002336.1,4336-4354).
ctgtgcctcttggttatgt

SEQ ID NO: 133540 - DNA, 19 bp, Homo sapiens
  siRNA target sequence for LRP6 (NM_002336.1,4389-4407).
ggaatgtctcgaggtaaat

SEQ ID NO: 133541 - DNA, 19 bp, Homo sapiens
  siRNA target sequence for LRP6 (NM_002336.1,4398-4416).
cgaggtaaatcaatgatca

SEQ ID NO: 133542 - DNA, 19 bp, Homo sapiens
  siRNA target sequence for LRP6 (NM_002336.1,4476-4494).
ggagcatcatcaagtagtt

SEQ ID NO: 133543 - DNA, 19 bp, Homo sapiens
  siRNA target sequence for LRP6 (NM_002336.1,4501-4519).
gcaccaaaggcacttactt

SEQ ID NO: 133544 - DNA, 19 bp, Homo sapiens
  siRNA target sequence for LRP6 (NM_002336.1,4513-4531).
cttacttccctgcaatttt

SEQ ID NO: 133545 - DNA, 19 bp, Homo sapiens
  siRNA target sequence for LRP6 (NM_002336.1,4551-4569).
gccacagagcgatcacatt

SEQ ID NO: 133546 - DNA, 19 bp, Homo sapiens
  siRNA target sequence for LRP6 (NM_002336.1,4557-4575).
gagcgatcacattacacta

SEQ ID NO: 133547 - DNA, 19 bp, Homo sapiens
  siRNA target sequence for LRP6 (NM_002336.1,4624-4642).
gctacaggccatatagcta

SEQ ID NO: 133548 - DNA, 19 bp, Homo sapiens
  siRNA target sequence for LRP6 (NM_002336.1,4741-4759).
gctataccagtgacttgaa

SEQ ID NO: 133549 - DNA, 19 bp, Homo sapiens
  siRNA target sequence for LRP6 (NM_002336.1,4747-4765).
ccagtgacttgaactatga

SEQ ID NO: 133550 - DNA, 19 bp, Homo sapiens
  siRNA target sequence for LRP6 (NM_002336.1,4792-4810).
caccccgaagccaatactt

SEQ ID NO: 133551 - DNA, 19 bp, Homo sapiens
  siRNA target sequence for LRP6 (NM_002336.1,4794-4812).
ccccgaagccaatacttgt

SEQ ID NO: 133552 - DNA, 19 bp, Homo sapiens
  siRNA target sequence for LRP6 (NM_002336.1,4853-4871).
cacagagaggagctattct

SEQ ID NO: 133553 - DNA, 19 bp, Homo sapiens
  siRNA target sequence for LRP6 (NM_002336.1,4855-4873).
cagagaggagctattctca

SEQ ID NO: 133554 - DNA, 19 bp, Homo sapiens
  siRNA target sequence for LRPAP1 (NM_002337.1,250-268).
ccacgctgatctgaagata

SEQ ID NO: 133555 - DNA, 19 bp, Homo sapiens
  siRNA target sequence for LRPAP1 (NM_002337.1,280-298).
cgaactcgcctggaagaaa

SEQ ID NO: 133556 - DNA, 19 bp, Homo sapiens
  siRNA target sequence for LRPAP1 (NM_002337.1,331-349).
gaaggaagcgagactcata

SEQ ID NO: 133557 - DNA, 19 bp, Homo sapiens
  siRNA target sequence for LRPAP1 (NM_002337.1,486-504).
cgaagacctctgggaaatt

SEQ ID NO: 133558 - DNA, 19 bp, Homo sapiens
  siRNA target sequence for LRPAP1 (NM_002337.1,534-552).
gggagttcctgcatcacaa

SEQ ID NO: 133559 - DNA, 19 bp, Homo sapiens
  siRNA target sequence for LTBP2 (NM_000428.1,1565-1583).
ctggcttccgcatctattt

SEQ ID NO: 133560 - DNA, 19 bp, Homo sapiens
  siRNA target sequence for LTBP2 (NM_000428.1,1567-1585).
ggcttccgcatctatttct

SEQ ID NO: 133561 - DNA, 19 bp, Homo sapiens
  siRNA target sequence for LTBP2 (NM_000428.1,2174-2192).
cagcctccccggtgattga

SEQ ID NO: 133562 - DNA, 19 bp, Homo sapiens
  siRNA target sequence for LTBP2 (NM_000428.1,2176-2194).
gcctccccggtgattgaga

SEQ ID NO: 133563 - DNA, 19 bp, Homo sapiens
  siRNA target sequence for LTBP2 (NM_000428.1,2177-2195).
cctccccggtgattgagaa

SEQ ID NO: 133564 - DNA, 19 bp, Homo sapiens
  siRNA target sequence for LTBP2 (NM_000428.1,2178-2196).
ctccccggtgattgagaat

SEQ ID NO: 133565 - DNA, 19 bp, Homo sapiens
  siRNA target sequence for LTBP2 (NM_000428.1,2287-2305).
gacgcggagtgtgtgaata

SEQ ID NO: 133566 - DNA, 19 bp, Homo sapiens
  siRNA target sequence for LTBP2 (NM_000428.1,2290-2308).
gcggagtgtgtgaatacca

SEQ ID NO: 133567 - DNA, 19 bp, Homo sapiens
  siRNA target sequence for LTBP2 (NM_000428.1,2455-2473).
cggatcaccaagcagatat

SEQ ID NO: 133568 - DNA, 19 bp, Homo sapiens
  siRNA target sequence for LTBP2 (NM_000428.1,3161-3179).
cacaggagtgtcaagatat

SEQ ID NO: 133569 - DNA, 19 bp, Homo sapiens
  siRNA target sequence for LTBP2 (NM_000428.1,3165-3183).
ggagtgtcaagatatcaat

SEQ ID NO: 133570 - DNA, 19 bp, Homo sapiens
  siRNA target sequence for LTBP2 (NM_000428.1,3331-3349).
gatgggagatgcgtcaatt

SEQ ID NO: 133571 - DNA, 19 bp, Homo sapiens
  siRNA target sequence for LTBP2 (NM_000428.1,3399-3417).
gagtgggagctgtgtagat

SEQ ID NO: 133572 - DNA, 19 bp, Homo sapiens
  siRNA target sequence for LTBP2 (NM_000428.1,3401-3419).
gtgggagctgtgtagatgt

SEQ ID NO: 133573 - DNA, 19 bp, Homo sapiens
  siRNA target sequence for LTBP2 (NM_000428.1,3469-3487).
ctagaaggctccttcagat

SEQ ID NO: 133574 - DNA, 19 bp, Homo sapiens
  siRNA target sequence for LTBP2 (NM_000428.1,3627-3645).
cgggtactgggtgaatgaa

SEQ ID NO: 133575 - DNA, 19 bp, Homo sapiens
  siRNA target sequence for LTBP2 (NM_000428.1,3902-3920).
ccgtgtgtgaggatgtgaa

SEQ ID NO: 133576 - DNA, 19 bp, Homo sapiens
  siRNA target sequence for LTBP2 (NM_000428.1,4103-4121).
ccttcaactgtctatgtga

SEQ ID NO: 133577 - DNA, 19 bp, Homo sapiens
  siRNA target sequence for LTBP2 (NM_000428.1,4148-4166).
gtggagagtgtgtggatat

SEQ ID NO: 133578 - DNA, 19 bp, Homo sapiens
  siRNA target sequence for LTBP2 (NM_000428.1,4201-4219).
ggcacctggaagtgtgaaa

SEQ ID NO: 133579 - DNA, 19 bp, Homo sapiens
  siRNA target sequence for LTBP2 (NM_000428.1,4283-4301).
gagactgcattgacataga

SEQ ID NO: 133580 - DNA, 19 bp, Homo sapiens
  siRNA target sequence for LTBP2 (NM_000428.1,4409-4427).
gggactgtgtggatgtgaa

SEQ ID NO: 133581 - DNA, 19 bp, Homo sapiens
  siRNA target sequence for LTBP2 (NM_000428.1,4558-4576).
gctggaggtcagagtatgt

SEQ ID NO: 133582 - DNA, 19 bp, Homo sapiens
  siRNA target sequence for LTBP2 (NM_000428.1,4745-4763).
ctgaggactcagctgaatt

SEQ ID NO: 133583 - DNA, 19 bp, Homo sapiens
  siRNA target sequence for LTBP2 (NM_000428.1,4770-4788).
gatctgccctagtggaaaa

SEQ ID NO: 133584 - DNA, 19 bp, Homo sapiens
  siRNA target sequence for LTBP2 (NM_000428.1,4844-4862).
cggatgagtgtgtgatatt

SEQ ID NO: 133585 - DNA, 19 bp, Homo sapiens
  siRNA target sequence for LTBP2 (NM_000428.1,4896-4914).
caacaccgtgcctggttat

SEQ ID NO: 133586 - DNA, 19 bp, Homo sapiens
  siRNA target sequence for LTBP2 (NM_000428.1,4986-5004).
ggacctggcctgtgagaat

SEQ ID NO: 133587 - DNA, 19 bp, Homo sapiens
  siRNA target sequence for LTBP2 (NM_000428.1,5376-5394).
cctgcactacagcatctat

SEQ ID NO: 133588 - DNA, 19 bp, Homo sapiens
  siRNA target sequence for LTBP4 (NM_003573.1,114-132).
ctgccagcccaaaaagtgt

SEQ ID NO: 133589 - DNA, 19 bp, Homo sapiens
  siRNA target sequence for LTBP4 (NM_003573.1,409-427).
gacttcgctggcaagttct

SEQ ID NO: 133590 - DNA, 19 bp, Homo sapiens
  siRNA target sequence for LTBP4 (NM_003573.1,482-500).
cccgctccgtgtacactat

SEQ ID NO: 133591 - DNA, 19 bp, Homo sapiens
  siRNA target sequence for LTBP4 (NM_003573.1,923-941).
caaccggctttgaaagagt

SEQ ID NO: 133592 - DNA, 19 bp, Homo sapiens
  siRNA target sequence for LTBP4 (NM_003573.1,1632-1650).
gggcacccgatgcattgat

SEQ ID NO: 133593 - DNA, 19 bp, Homo sapiens
  siRNA target sequence for LTBP4 (NM_003573.1,1634-1652).
gcacccgatgcattgatgt

SEQ ID NO: 133594 - DNA, 19 bp, Homo sapiens
  siRNA target sequence for LTBP4 (NM_003573.1,1963-1981).
ggctctttccgctgtgttt

SEQ ID NO: 133595 - DNA, 19 bp, Homo sapiens
  siRNA target sequence for LTBP4 (NM_003573.1,2255-2273).
gctccgagtgcgaagatgt

SEQ ID NO: 133596 - DNA, 19 bp, Homo sapiens
  siRNA target sequence for LTBP4 (NM_003573.1,2586-2604).
ctcctttgcctgtacttgt

SEQ ID NO: 133597 - DNA, 19 bp, Homo sapiens
  siRNA target sequence for LTBP4 (NM_003573.1,2905-2923).
gtggatgagtgccaagaat

SEQ ID NO: 133598 - DNA, 19 bp, Homo sapiens
  siRNA target sequence for LTBP4 (NM_003573.1,2920-2938).
gaatatggtcccgagattt

SEQ ID NO: 133599 - DNA, 19 bp, Homo sapiens
  siRNA target sequence for LTBP4 (NM_003573.1,3165-3183).
gaacgagtgtgaaacacta

SEQ ID NO: 133600 - DNA, 19 bp, Homo sapiens
  siRNA target sequence for LTBP4 (NM_003573.1,3245-3263).
ccaacagcccggaagagtt

SEQ ID NO: 133601 - DNA, 19 bp, Homo sapiens
  siRNA target sequence for LTBP4 (NM_003573.1,3715-3733).
ggctactcatgctattgca

SEQ ID NO: 133602 - DNA, 19 bp, Homo sapiens
  siRNA target sequence for LTBP4 (NM_003573.1,3911-3929).
gccagagcctcgatgacaa

SEQ ID NO: 133603 - DNA, 19 bp, Homo sapiens
  siRNA target sequence for LTBP4 (NM_003573.1,3912-3930).
ccagagcctcgatgacaat

SEQ ID NO: 133604 - DNA, 19 bp, Homo sapiens
  siRNA target sequence for LTBP4 (NM_003573.1,4155-4173).
cgagtacggcccagactta

SEQ ID NO: 133605 - DNA, 19 bp, Homo sapiens
  siRNA target sequence for LTBP4 (NM_003573.1,4196-4214).
catatgggcctgagttgta

SEQ ID NO: 133606 - DNA, 19 bp, Homo sapiens
  siRNA target sequence for LTBP4 (NM_003573.1,4331-4349).
gcccctatggcgaatctga

SEQ ID NO: 133607 - DNA, 19 bp, Homo sapiens
  siRNA target sequence for LY64 (NM_005582.1,181-199).
gttttctgccggctgtaaa

SEQ ID NO: 133608 - DNA, 19 bp, Homo sapiens
  siRNA target sequence for LY64 (NM_005582.1,186-204).
ctgccggctgtaaagtcat

SEQ ID NO: 133609 - DNA, 19 bp, Homo sapiens
  siRNA target sequence for LY64 (NM_005582.1,249-267).
catataactgtgaaaattt

SEQ ID NO: 133610 - DNA, 19 bp, Homo sapiens
  siRNA target sequence for LY64 (NM_005582.1,287-305).
gacactctaccaaacacaa

SEQ ID NO: 133611 - DNA, 19 bp, Homo sapiens
  siRNA target sequence for LY64 (NM_005582.1,337-355).
gcctacaattcacaataga

SEQ ID NO: 133612 - DNA, 19 bp, Homo sapiens
  siRNA target sequence for LY64 (NM_005582.1,366-384).
gactcatgaatcttacctt

SEQ ID NO: 133613 - DNA, 19 bp, Homo sapiens
  siRNA target sequence for LY64 (NM_005582.1,468-486).
ctggaaatcccctgatatt

SEQ ID NO: 133614 - DNA, 19 bp, Homo sapiens
  siRNA target sequence for LY64 (NM_005582.1,541-559).
ccaaacgggaatatccaat

SEQ ID NO: 133615 - DNA, 19 bp, Homo sapiens
  siRNA target sequence for LY64 (NM_005582.1,556-574).
caatctcgagtttattcca

SEQ ID NO: 133616 - DNA, 19 bp, Homo sapiens
  siRNA target sequence for LY64 (NM_005582.1,654-672).
cagcacggaatctgaaagt

SEQ ID NO: 133617 - DNA, 19 bp, Homo sapiens
  siRNA target sequence for LY64 (NM_005582.1,657-675).
cacggaatctgaaagtact

SEQ ID NO: 133618 - DNA, 19 bp, Homo sapiens
  siRNA target sequence for LY64 (NM_005582.1,677-695).
gattttcagaataatgcta

SEQ ID NO: 133619 - DNA, 19 bp, Homo sapiens
  siRNA target sequence for LY64 (NM_005582.1,683-701).
cagaataatgctatacact

SEQ ID NO: 133620 - DNA, 19 bp, Homo sapiens
  siRNA target sequence for LY64 (NM_005582.1,731-749).
gagcaggccatcaacctaa

SEQ ID NO: 133621 - DNA, 19 bp, Homo sapiens
  siRNA target sequence for LY64 (NM_005582.1,745-763).
cctaagcctgaacttcaat

SEQ ID NO: 133622 - DNA, 19 bp, Homo sapiens
  siRNA target sequence for LY64 (NM_005582.1,765-783).
gcaataatgttaaaggtat

SEQ ID NO: 133623 - DNA, 19 bp, Homo sapiens
  siRNA target sequence for LY64 (NM_005582.1,826-844).
ctttggaggaactccaaat

SEQ ID NO: 133624 - DNA, 19 bp, Homo sapiens
  siRNA target sequence for LY64 (NM_005582.1,863-881).
ggtctgcagaactctacta

SEQ ID NO: 133625 - DNA, 19 bp, Homo sapiens
  siRNA target sequence for LY64 (NM_005582.1,917-935).
gatgacgaagatattagtt

SEQ ID NO: 133626 - DNA, 19 bp, Homo sapiens
  siRNA target sequence for LY64 (NM_005582.1,1057-1075).
gacagcaactcacttgaaa

SEQ ID NO: 133627 - DNA, 19 bp, Homo sapiens
  siRNA target sequence for LY64 (NM_005582.1,1121-1139).
gttctcagtgtaaatcatt

SEQ ID NO: 133628 - DNA, 19 bp, Homo sapiens
  siRNA target sequence for LY64 (NM_005582.1,1126-1144).
cagtgtaaatcatttcgat

SEQ ID NO: 133629 - DNA, 19 bp, Homo sapiens
  siRNA target sequence for LY64 (NM_005582.1,1130-1148).
gtaaatcatttcgatcaat

SEQ ID NO: 133630 - DNA, 19 bp, Homo sapiens
  siRNA target sequence for LY64 (NM_005582.1,1142-1160).
gatcaattgtgtcaaatca

SEQ ID NO: 133631 - DNA, 19 bp, Homo sapiens
  siRNA target sequence for LY64 (NM_005582.1,1179-1197).
cccttacacacctctacat

SEQ ID NO: 133632 - DNA, 19 bp, Homo sapiens
  siRNA target sequence for LY64 (NM_005582.1,1181-1199).
cttacacacctctacatca

SEQ ID NO: 133633 - DNA, 19 bp, Homo sapiens
  siRNA target sequence for LY64 (NM_005582.1,1200-1218).
gaggcaacgtgaagaaact

SEQ ID NO: 133634 - DNA, 19 bp, Homo sapiens
  siRNA target sequence for LY64 (NM_005582.1,1255-1273).
ccttcagacacttgattta

SEQ ID NO: 133635 - DNA, 19 bp, Homo sapiens
  siRNA target sequence for LY64 (NM_005582.1,1302-1320).
gctgcagtctgcaactcaa

SEQ ID NO: 133636 - DNA, 19 bp, Homo sapiens
  siRNA target sequence for LY64 (NM_005582.1,1305-1323).
gcagtctgcaactcaaaaa

SEQ ID NO: 133637 - DNA, 19 bp, Homo sapiens
  siRNA target sequence for LY64 (NM_005582.1,1308-1326).
gtctgcaactcaaaaacct

SEQ ID NO: 133638 - DNA, 19 bp, Homo sapiens
  siRNA target sequence for LY64 (NM_005582.1,1378-1396).
gagtcaggcattcaaagaa

SEQ ID NO: 133639 - DNA, 19 bp, Homo sapiens
  siRNA target sequence for LY64 (NM_005582.1,1412-1430).
ctcctcgatttggcattta

SEQ ID NO: 133640 - DNA, 19 bp, Homo sapiens
  siRNA target sequence for LY64 (NM_005582.1,1424-1442).
gcatttacccgcttacaca

SEQ ID NO: 133641 - DNA, 19 bp, Homo sapiens
  siRNA target sequence for LY64 (NM_005582.1,1425-1443).
catttacccgcttacacat

SEQ ID NO: 133642 - DNA, 19 bp, Homo sapiens
  siRNA target sequence for LY64 (NM_005582.1,1432-1450).
ccgcttacacattaatgct

SEQ ID NO: 133643 - DNA, 19 bp, Homo sapiens
  siRNA target sequence for LY64 (NM_005582.1,1452-1470).
cacaaagtcccttccaaaa

SEQ ID NO: 133644 - DNA, 19 bp, Homo sapiens
  siRNA target sequence for LY64 (NM_005582.1,1518-1536).
ccagcaatcagcatcttct

SEQ ID NO: 133645 - DNA, 19 bp, Homo sapiens
  siRNA target sequence for LY64 (NM_005582.1,1553-1571).
ctccggcatctcaacttaa

SEQ ID NO: 133646 - DNA, 19 bp, Homo sapiens
  siRNA target sequence for LY64 (NM_005582.1,1602-1620).
cgaagaccaacctacttca

SEQ ID NO: 133647 - DNA, 19 bp, Homo sapiens
  siRNA target sequence for LY64 (NM_005582.1,1630-1648).
cagcttggaggttctgatt

SEQ ID NO: 133648 - DNA, 19 bp, Homo sapiens
  siRNA target sequence for LY64 (NM_005582.1,1738-1756).
gacatgcgacagcattgat

SEQ ID NO: 133649 - DNA, 19 bp, Homo sapiens
  siRNA target sequence for LY64 (NM_005582.1,1743-1761).
gcgacagcattgattctct

SEQ ID NO: 133650 - DNA, 19 bp, Homo sapiens
  siRNA target sequence for LY64 (NM_005582.1,1744-1762).
cgacagcattgattctctt

SEQ ID NO: 133651 - DNA, 19 bp, Homo sapiens
  siRNA target sequence for LY64 (NM_005582.1,1764-1782).
gccatcttaagggaatcta

SEQ ID NO: 133652 - DNA, 19 bp, Homo sapiens
  siRNA target sequence for LY64 (NM_005582.1,1823-1841).
cgtctcctccctatcttgt

SEQ ID NO: 133653 - DNA, 19 bp, Homo sapiens
  siRNA target sequence for LY64 (NM_005582.1,1842-1860).
cccagcagagcaccattaa

SEQ ID NO: 133654 - DNA, 19 bp, Homo sapiens
  siRNA target sequence for LY64 (NM_005582.1,1844-1862).
cagcagagcaccattaatt

SEQ ID NO: 133655 - DNA, 19 bp, Homo sapiens
  siRNA target sequence for LY64 (NM_005582.1,1851-1869).
gcaccattaatttaagtca

SEQ ID NO: 133656 - DNA, 19 bp, Homo sapiens
  siRNA target sequence for LY64 (NM_005582.1,1852-1870).
caccattaatttaagtcat

SEQ ID NO: 133657 - DNA, 19 bp, Homo sapiens
  siRNA target sequence for LY64 (NM_005582.1,1880-1898).
gactgcacttgctcgaata

SEQ ID NO: 133658 - DNA, 19 bp, Homo sapiens
  siRNA target sequence for LY64 (NM_005582.1,1882-1900).
ctgcacttgctcgaatatt

SEQ ID NO: 133659 - DNA, 19 bp, Homo sapiens
  siRNA target sequence for LY64 (NM_005582.1,1906-1924).
cttaacatggtacaaagaa

SEQ ID NO: 133660 - DNA, 19 bp, Homo sapiens
  siRNA target sequence for LY64 (NM_005582.1,1977-1995).
ctctaaggggagttaagct

SEQ ID NO: 133661 - DNA, 19 bp, Homo sapiens
  siRNA target sequence for LY64 (NM_005582.1,1983-2001).
ggggagttaagctatctga

SEQ ID NO: 133662 - DNA, 19 bp, Homo sapiens
  siRNA target sequence for LY64 (NM_005582.1,1984-2002).
gggagttaagctatctgat

SEQ ID NO: 133663 - DNA, 19 bp, Homo sapiens
  siRNA target sequence for LY64 (NM_005582.1,1994-2012).
ctatctgatgtcaagcttt

SEQ ID NO: 133664 - DNA, 19 bp, Homo sapiens
  siRNA target sequence for LY64 (NM_005582.1,2008-2026).
gctttcctgtgggattaca

SEQ ID NO: 133665 - DNA, 19 bp, Homo sapiens
  siRNA target sequence for MADH2 (NM_005901.2,388-406).
gtctggtgaagaagctaaa

SEQ ID NO: 133666 - DNA, 19 bp, Homo sapiens
  siRNA target sequence for MADH2 (NM_005901.2,418-436).
gattagatgagcttgagaa

SEQ ID NO: 133667 - DNA, 19 bp, Homo sapiens
  siRNA target sequence for MADH2 (NM_005901.2,455-473).
ctgtaatactaaatgtgtt

SEQ ID NO: 133668 - DNA, 19 bp, Homo sapiens
  siRNA target sequence for MADH2 (NM_005901.2,481-499).
caagcacttgctctgaaat

SEQ ID NO: 133669 - DNA, 19 bp, Homo sapiens
  siRNA target sequence for MADH2 (NM_005901.2,507-525).
ctgagtacaccaaatacga

SEQ ID NO: 133670 - DNA, 19 bp, Homo sapiens
  siRNA target sequence for MADH2 (NM_005901.2,514-532).
caccaaatacgatagatca

SEQ ID NO: 133671 - DNA, 19 bp, Homo sapiens
  siRNA target sequence for MADH2 (NM_005901.2,537-555).
gatacaacaggcctttaca

SEQ ID NO: 133672 - DNA, 19 bp, Homo sapiens
  siRNA target sequence for MADH2 (NM_005901.2,593-611).
ccaggtatcccatcgaaaa

SEQ ID NO: 133673 - DNA, 19 bp, Homo sapiens
  siRNA target sequence for MADH2 (NM_005901.2,596-614).
ggtatcccatcgaaaagga

SEQ ID NO: 133674 - DNA, 19 bp, Homo sapiens
  siRNA target sequence for MADH2 (NM_005901.2,612-630).
ggattgccacatgttatat

SEQ ID NO: 133675 - DNA, 19 bp, Homo sapiens
  siRNA target sequence for MADH2 (NM_005901.2,613-631).
gattgccacatgttatata

SEQ ID NO: 133676 - DNA, 19 bp, Homo sapiens
  siRNA target sequence for MADH2 (NM_005901.2,624-642).
gttatatattgccgattat

SEQ ID NO: 133677 - DNA, 19 bp, Homo sapiens
  siRNA target sequence for MADH2 (NM_005901.2,687-705).
gaaaactgcgaatatgctt

SEQ ID NO: 133678 - DNA, 19 bp, Homo sapiens
  siRNA target sequence for MADH2 (NM_005901.2,694-712).
gcgaatatgcttttaatct

SEQ ID NO: 133679 - DNA, 19 bp, Homo sapiens
  siRNA target sequence for MADH2 (NM_005901.2,792-810).
cgacacaccgagatcctaa

SEQ ID NO: 133680 - DNA, 19 bp, Homo sapiens
  siRNA target sequence for MADH2 (NM_005901.2,821-839).
gcctctggatgactatact

SEQ ID NO: 133681 - DNA, 19 bp, Homo sapiens
  siRNA target sequence for MADH2 (NM_005901.2,823-841).
ctctggatgactatactca

SEQ ID NO: 133682 - DNA, 19 bp, Homo sapiens
  siRNA target sequence for MADH2 (NM_005901.2,943-961).
caagtgaccaacagttgaa

SEQ ID NO: 133683 - DNA, 19 bp, Homo sapiens
  siRNA target sequence for MADH2 (NM_005901.2,946-964).
gtgaccaacagttgaatca

SEQ ID NO: 133684 - DNA, 19 bp, Homo sapiens
  siRNA target sequence for MADH2 (NM_005901.2,993-1011).
ctatctcctactactcttt

SEQ ID NO: 133685 - DNA, 19 bp, Homo sapiens
  siRNA target sequence for MADH2 (NM_005901.2,1003-1021).
ctactctttcccctgttaa

SEQ ID NO: 133686 - DNA, 19 bp, Homo sapiens
  siRNA target sequence for MADH2 (NM_005901.2,1006-1024).
ctctttcccctgttaatca

SEQ ID NO: 133687 - DNA, 19 bp, Homo sapiens
  siRNA target sequence for MADH2 (NM_005901.2,1012-1030).
cccctgttaatcatagctt

SEQ ID NO: 133688 - DNA, 19 bp, Homo sapiens
  siRNA target sequence for MADH2 (NM_005901.2,1017-1035).
gttaatcatagcttggatt

SEQ ID NO: 133689 - DNA, 19 bp, Homo sapiens
  siRNA target sequence for MADH2 (NM_005901.2,1031-1049).
ggatttacagccagttact

SEQ ID NO: 133690 - DNA, 19 bp, Homo sapiens
  siRNA target sequence for MADH2 (NM_005901.2,1069-1087).
ggtgttcgatagcatatta

SEQ ID NO: 133691 - DNA, 19 bp, Homo sapiens
  siRNA target sequence for MADH2 (NM_005901.2,1070-1088).
gtgttcgatagcatattat

SEQ ID NO: 133692 - DNA, 19 bp, Homo sapiens
  siRNA target sequence for MADH2 (NM_005901.2,1075-1093).
cgatagcatattatgaatt

SEQ ID NO: 133693 - DNA, 19 bp, Homo sapiens
  siRNA target sequence for MADH2 (NM_005901.2,1130-1148).
gccctcactcactgtagat

SEQ ID NO: 133694 - DNA, 19 bp, Homo sapiens
  siRNA target sequence for MADH2 (NM_005901.2,1156-1174).
cagacccatcaaattcaga

SEQ ID NO: 133695 - DNA, 19 bp, Homo sapiens
  siRNA target sequence for MADH2 (NM_005901.2,1175-1193).
gaggttctgcttaggttta

SEQ ID NO: 133696 - DNA, 19 bp, Homo sapiens
  siRNA target sequence for MADH2 (NM_005901.2,1177-1195).
ggttctgcttaggtttact

SEQ ID NO: 133697 - DNA, 19 bp, Homo sapiens
  siRNA target sequence for MADH2 (NM_005901.2,1188-1206).
ggtttactctccaatgtta

SEQ ID NO: 133698 - DNA, 19 bp, Homo sapiens
  siRNA target sequence for MADH2 (NM_005901.2,1189-1207).
gtttactctccaatgttaa

SEQ ID NO: 133699 - DNA, 19 bp, Homo sapiens
  siRNA target sequence for MADH2 (NM_005901.2,1246-1264).
gaagaggagtgcgcttata

SEQ ID NO: 133700 - DNA, 19 bp, Homo sapiens
  siRNA target sequence for MADH2 (NM_005901.2,1249-1267).
gaggagtgcgcttatacta

SEQ ID NO: 133701 - DNA, 19 bp, Homo sapiens
  siRNA target sequence for MADH2 (NM_005901.2,1251-1269).
ggagtgcgcttatactaca

SEQ ID NO: 133702 - DNA, 19 bp, Homo sapiens
  siRNA target sequence for MADH2 (NM_005901.2,1252-1270).
gagtgcgcttatactacat

SEQ ID NO: 133703 - DNA, 19 bp, Homo sapiens
  siRNA target sequence for MADH2 (NM_005901.2,1287-1305).
gctgagtgcctaagtgata

SEQ ID NO: 133704 - DNA, 19 bp, Homo sapiens
  siRNA target sequence for MADH2 (NM_005901.2,1381-1399).
caggctgtaatctgaagat

SEQ ID NO: 133705 - DNA, 19 bp, Homo sapiens
  siRNA target sequence for MADH2 (NM_005901.2,1383-1401).
ggctgtaatctgaagatct

SEQ ID NO: 133706 - DNA, 19 bp, Homo sapiens
  siRNA target sequence for MADH2 (NM_005901.2,1384-1402).
gctgtaatctgaagatctt

SEQ ID NO: 133707 - DNA, 19 bp, Homo sapiens
  siRNA target sequence for MADH2 (NM_005901.2,1438-1456).
ctgttaatcagggttttga

SEQ ID NO: 133708 - DNA, 19 bp, Homo sapiens
  siRNA target sequence for MADH2 (NM_005901.2,1458-1476).
gccgtctatcagctaacta

SEQ ID NO: 133709 - DNA, 19 bp, Homo sapiens
  siRNA target sequence for MADH2 (NM_005901.2,1460-1478).
cgtctatcagctaactaga

SEQ ID NO: 133710 - DNA, 19 bp, Homo sapiens
  siRNA target sequence for MADH2 (NM_005901.2,1483-1501).
gcaccataagaatgagttt

SEQ ID NO: 133711 - DNA, 19 bp, Homo sapiens
  siRNA target sequence for MADH2 (NM_005901.2,1484-1502).
caccataagaatgagtttt

SEQ ID NO: 133712 - DNA, 19 bp, Homo sapiens
  siRNA target sequence for MADH2 (NM_005901.2,1486-1504).
ccataagaatgagttttgt

SEQ ID NO: 133713 - DNA, 19 bp, Homo sapiens
  siRNA target sequence for MADH2 (NM_005901.2,1527-1545).
cgaaggcagacggtaacaa

SEQ ID NO: 133714 - DNA, 19 bp, Homo sapiens
  siRNA target sequence for MADH2 (NM_005901.2,1532-1550).
gcagacggtaacaagtact

SEQ ID NO: 133715 - DNA, 19 bp, Homo sapiens
  siRNA target sequence for MADH2 (NM_005901.2,1632-1650).
cgttgctcaagcatgtcat

SEQ ID NO: 133716 - DNA, 19 bp, Homo sapiens
  siRNA target sequence for MADH6 (NM_005585.2,1306-1324).
gtgacctgctgtctctttt

SEQ ID NO: 133717 - DNA, 19 bp, Homo sapiens
  siRNA target sequence for MADH6 (NM_005585.2,1784-1802).
ctcctcgcgacgagtacaa

SEQ ID NO: 133718 - DNA, 19 bp, Homo sapiens
  siRNA target sequence for MADH6 (NM_005585.2,1813-1831).
ctgtccgattccacattgt

SEQ ID NO: 133719 - DNA, 19 bp, Homo sapiens
  siRNA target sequence for MADH6 (NM_005585.2,1815-1833).
gtccgattccacattgtct

SEQ ID NO: 133720 - DNA, 19 bp, Homo sapiens
  siRNA target sequence for MADH6 (NM_005585.2,1817-1835).
ccgattccacattgtctta

SEQ ID NO: 133721 - DNA, 19 bp, Homo sapiens
  siRNA target sequence for MADH6 (NM_005585.2,1819-1837).
gattccacattgtcttaca

SEQ ID NO: 133722 - DNA, 19 bp, Homo sapiens
  siRNA target sequence for MADH7 (NM_005904.1,582-600).
cgcactcggtgctcaagaa

SEQ ID NO: 133723 - DNA, 19 bp, Homo sapiens
  siRNA target sequence for MADH7 (NM_005904.1,583-601).
gcactcggtgctcaagaaa

SEQ ID NO: 133724 - DNA, 19 bp, Homo sapiens
  siRNA target sequence for MADH7 (NM_005904.1,764-782).
ctcctgctgtgcaaagtgt

SEQ ID NO: 133725 - DNA, 19 bp, Homo sapiens
  siRNA target sequence for MADH7 (NM_005904.1,801-819).
ggcattcctcggaagtcaa

SEQ ID NO: 133726 - DNA, 19 bp, Homo sapiens
  siRNA target sequence for MADH7 (NM_005904.1,891-909).
gccgactctgcgaactaga

SEQ ID NO: 133727 - DNA, 19 bp, Homo sapiens
  siRNA target sequence for MADH7 (NM_005904.1,930-948).
ccagatacccgatggattt

SEQ ID NO: 133728 - DNA, 19 bp, Homo sapiens
  siRNA target sequence for MADH7 (NM_005904.1,931-949).
cagatacccgatggatttt

SEQ ID NO: 133729 - DNA, 19 bp, Homo sapiens
  siRNA target sequence for MADH7 (NM_005904.1,933-951).
gatacccgatggattttct

SEQ ID NO: 133730 - DNA, 19 bp, Homo sapiens
  siRNA target sequence for MADH7 (NM_005904.1,982-1000).
gccttcctccgctgaaaca

SEQ ID NO: 133731 - DNA, 19 bp, Homo sapiens
  siRNA target sequence for MADH7 (NM_005904.1,995-1013).
gaaacagggggaacgaatt

SEQ ID NO: 133732 - DNA, 19 bp, Homo sapiens
  siRNA target sequence for MADH7 (NM_005904.1,1035-1053).
cagattcccaacttcttct

SEQ ID NO: 133733 - DNA, 19 bp, Homo sapiens
  siRNA target sequence for MADH7 (NM_005904.1,1136-1154).
gagccctctctggatatct

SEQ ID NO: 133734 - DNA, 19 bp, Homo sapiens
  siRNA target sequence for MADH7 (NM_005904.1,1143-1161).
ctctggatatcttctatga

SEQ ID NO: 133735 - DNA, 19 bp, Homo sapiens
  siRNA target sequence for MADH7 (NM_005904.1,1147-1165).
ggatatcttctatgatcta

SEQ ID NO: 133736 - DNA, 19 bp, Homo sapiens
  siRNA target sequence for MADH7 (NM_005904.1,1196-1214).
ctcaattcggacaacaaga

SEQ ID NO: 133737 - DNA, 19 bp, Homo sapiens
  siRNA target sequence for MADH7 (NM_005904.1,1353-1371).
ggacgctgttggtacacaa

SEQ ID NO: 133738 - DNA, 19 bp, Homo sapiens
  siRNA target sequence for MADH7 (NM_005904.1,1433-1451).
cccaatgaccacgagttta

SEQ ID NO: 133739 - DNA, 19 bp, Homo sapiens
  siRNA target sequence for MADH7 (NM_005904.1,1478-1496).
gtgcagatcagctttgtga

SEQ ID NO: 133740 - DNA, 19 bp, Homo sapiens
  siRNA target sequence for MADH7 (NM_005904.1,1545-1563).
gctggctagaggtcatctt

SEQ ID NO: 133741 - DNA, 19 bp, Homo sapiens
  siRNA target sequence for MADH7 (NM_005904.1,1548-1566).
ggctagaggtcatcttcaa

SEQ ID NO: 133742 - DNA, 19 bp, Homo sapiens
  siRNA target sequence for MALT1 (NM_006785.2,526-544).
ctgtgtctgctgaagttaa

SEQ ID NO: 133743 - DNA, 19 bp, Homo sapiens
  siRNA target sequence for MALT1 (NM_006785.2,647-665).
ctgtaaacccagagtcaaa

SEQ ID NO: 133744 - DNA, 19 bp, Homo sapiens
  siRNA target sequence for MALT1 (NM_006785.2,675-693).
ggctggacagtttgtgaaa

SEQ ID NO: 133745 - DNA, 19 bp, Homo sapiens
  siRNA target sequence for MALT1 (NM_006785.2,679-697).
ggacagtttgtgaaactgt

SEQ ID NO: 133746 - DNA, 19 bp, Homo sapiens
  siRNA target sequence for MALT1 (NM_006785.2,704-722).
gggcaactggacatccttt

SEQ ID NO: 133747 - DNA, 19 bp, Homo sapiens
  siRNA target sequence for MALT1 (NM_006785.2,705-723).
ggcaactggacatcctttt

SEQ ID NO: 133748 - DNA, 19 bp, Homo sapiens
  siRNA target sequence for MALT1 (NM_006785.2,707-725).
caactggacatccttttgt

SEQ ID NO: 133749 - DNA, 19 bp, Homo sapiens
  siRNA target sequence for MALT1 (NM_006785.2,808-826).
gatgcaggcttttatgtct

SEQ ID NO: 133750 - DNA, 19 bp, Homo sapiens
  siRNA target sequence for MALT1 (NM_006785.2,829-847).
cgagttaataacaatttca

SEQ ID NO: 133751 - DNA, 19 bp, Homo sapiens
  siRNA target sequence for MALT1 (NM_006785.2,913-931).
gttgatggcgtctctgaat

SEQ ID NO: 133752 - DNA, 19 bp, Homo sapiens
  siRNA target sequence for MALT1 (NM_006785.2,926-944).
ctgaatccaagttgcaaat

SEQ ID NO: 133753 - DNA, 19 bp, Homo sapiens
  siRNA target sequence for MALT1 (NM_006785.2,928-946).
gaatccaagttgcaaatct

SEQ ID NO: 133754 - DNA, 19 bp, Homo sapiens
  siRNA target sequence for MALT1 (NM_006785.2,936-954).
gttgcaaatctgtgttgaa

SEQ ID NO: 133755 - DNA, 19 bp, Homo sapiens
  siRNA target sequence for MALT1 (NM_006785.2,1122-1140).
ctggtgtcatgtatataat

SEQ ID NO: 133756 - DNA, 19 bp, Homo sapiens
  siRNA target sequence for MALT1 (NM_006785.2,1125-1143).
gtgtcatgtatataatgat

SEQ ID NO: 133757 - DNA, 19 bp, Homo sapiens
  siRNA target sequence for MALT1 (NM_006785.2,1156-1174).
gatagcaagaaggtagaaa

SEQ ID NO: 133758 - DNA, 19 bp, Homo sapiens
  siRNA target sequence for MALT1 (NM_006785.2,1168-1186).
gtagaaatcatcataggaa

SEQ ID NO: 133759 - DNA, 19 bp, Homo sapiens
  siRNA target sequence for MALT1 (NM_006785.2,1206-1224).
gtgcactgaagatgaatta

SEQ ID NO: 133760 - DNA, 19 bp, Homo sapiens
  siRNA target sequence for MALT1 (NM_006785.2,1231-1249).
cttggtcatcctgataata

SEQ ID NO: 133761 - DNA, 19 bp, Homo sapiens
  siRNA target sequence for MALT1 (NM_006785.2,1291-1309).
gcccttttgataggaaata

SEQ ID NO: 133762 - DNA, 19 bp, Homo sapiens
  siRNA target sequence for MALT1 (NM_006785.2,1351-1369).
gatgtgtacgaattgacta

SEQ ID NO: 133763 - DNA, 19 bp, Homo sapiens
  siRNA target sequence for MALT1 (NM_006785.2,1354-1372).
gtgtacgaattgactaact

SEQ ID NO: 133764 - DNA, 19 bp, Homo sapiens
  siRNA target sequence for MALT1 (NM_006785.2,1356-1374).
gtacgaattgactaactta

SEQ ID NO: 133765 - DNA, 19 bp, Homo sapiens
  siRNA target sequence for MALT1 (NM_006785.2,1379-1397).
gacagctggacttcaaagt

SEQ ID NO: 133766 - DNA, 19 bp, Homo sapiens
  siRNA target sequence for MALT1 (NM_006785.2,1403-1421).
cactgttggatcttactga

SEQ ID NO: 133767 - DNA, 19 bp, Homo sapiens
  siRNA target sequence for MALT1 (NM_006785.2,1407-1425).
gttggatcttactgaatat

SEQ ID NO: 133768 - DNA, 19 bp, Homo sapiens
  siRNA target sequence for MALT1 (NM_006785.2,1470-1488).
gggagtatatgggttatta

SEQ ID NO: 133769 - DNA, 19 bp, Homo sapiens
  siRNA target sequence for MALT1 (NM_006785.2,1495-1513).
gcaggacatggttatgaaa

SEQ ID NO: 133770 - DNA, 19 bp, Homo sapiens
  siRNA target sequence for MALT1 (NM_006785.2,1536-1554).
ccccgttgatgctccaaat

SEQ ID NO: 133771 - DNA, 19 bp, Homo sapiens
  siRNA target sequence for MALT1 (NM_006785.2,1540-1558).
gttgatgctccaaatccat

SEQ ID NO: 133772 - DNA, 19 bp, Homo sapiens
  siRNA target sequence for MALT1 (NM_006785.2,1543-1561).
gatgctccaaatccatata

SEQ ID NO: 133773 - DNA, 19 bp, Homo sapiens
  siRNA target sequence for MALT1 (NM_006785.2,1546-1564).
gctccaaatccatataggt

SEQ ID NO: 133774 - DNA, 19 bp, Homo sapiens
  siRNA target sequence for MALT1 (NM_006785.2,1632-1650).
gttcttattggatatgtgt

SEQ ID NO: 133775 - DNA, 19 bp, Homo sapiens
  siRNA target sequence for MALT1 (NM_006785.2,1641-1659).
ggatatgtgtaggaaaaga

SEQ ID NO: 133776 - DNA, 19 bp, Homo sapiens
  siRNA target sequence for MALT1 (NM_006785.2,1682-1700).
caatcttggatgcactaaa

SEQ ID NO: 133777 - DNA, 19 bp, Homo sapiens
  siRNA target sequence for MALT1 (NM_006785.2,1702-1720).
gtcaccgccaatattgtgt

SEQ ID NO: 133778 - DNA, 19 bp, Homo sapiens
  siRNA target sequence for MALT1 (NM_006785.2,1835-1853).
ctgtgttactggatgaagt

SEQ ID NO: 133779 - DNA, 19 bp, Homo sapiens
  siRNA target sequence for MALT1 (NM_006785.2,1868-1886).
gtaagtgtcaccttaccaa

SEQ ID NO: 133780 - DNA, 19 bp, Homo sapiens
  siRNA target sequence for MALT1 (NM_006785.2,1905-1923).
gattcgaagtagtttatct

SEQ ID NO: 133781 - DNA, 19 bp, Homo sapiens
  siRNA target sequence for MALT1 (NM_006785.2,1997-2015).
gggccaaggctcatgaact

SEQ ID NO: 133782 - DNA, 19 bp, Homo sapiens
  siRNA target sequence for MALT1 (NM_006785.2,2011-2029).
gaacttccagaaagtatgt

SEQ ID NO: 133783 - DNA, 19 bp, Homo sapiens
  siRNA target sequence for MALT1 (NM_006785.2,2020-2038).
gaaagtatgtgtcttaagt

SEQ ID NO: 133784 - DNA, 19 bp, Homo sapiens
  siRNA target sequence for MALT1 (NM_006785.2,2045-2063).
gtggtgttcagattcaatt

SEQ ID NO: 133785 - DNA, 19 bp, Homo sapiens
  siRNA target sequence for MALT1 (NM_006785.2,2055-2073).
gattcaattaggatttgca

SEQ ID NO: 133786 - DNA, 19 bp, Homo sapiens
  siRNA target sequence for MALT1 (NM_006785.2,2084-2102).
ccaatgtcatgatcatcta

SEQ ID NO: 133787 - DNA, 19 bp, Homo sapiens
  siRNA target sequence for MALT1 (NM_006785.2,2089-2107).
gtcatgatcatctatacaa

SEQ ID NO: 133788 - DNA, 19 bp, Homo sapiens
  siRNA target sequence for MALT1 (NM_006785.2,2097-2115).
catctatacaagtatagtt

SEQ ID NO: 133789 - DNA, 19 bp, Homo sapiens
  siRNA target sequence for MALT1 (NM_006785.2,2118-2136).
caaaccaccggagataata

SEQ ID NO: 133790 - DNA, 19 bp, Homo sapiens
  siRNA target sequence for MALT1 (NM_006785.2,2122-2140).
ccaccggagataataatgt

SEQ ID NO: 133791 - DNA, 19 bp, Homo sapiens
  siRNA target sequence for MALT1 (NM_006785.2,2156-2174).
ctgattttccacttgatct

SEQ ID NO: 133792 - DNA, 19 bp, Homo sapiens
  siRNA target sequence for MALT1 (NM_006785.2,2222-2240).
gcagctacttggtatcaaa

SEQ ID NO: 133793 - DNA, 19 bp, Homo sapiens
  siRNA target sequence for MALT1 (NM_006785.2,2226-2244).
ctacttggtatcaaaggat

SEQ ID NO: 133794 - DNA, 19 bp, Homo sapiens
  siRNA target sequence for MALT1 (NM_006785.2,2276-2294).
gttcactgcaaaaattaaa

SEQ ID NO: 133795 - DNA, 19 bp, Homo sapiens
  siRNA target sequence for MALT1 (NM_006785.2,2299-2317).
catctagtcttcacagtat

SEQ ID NO: 133796 - DNA, 19 bp, Homo sapiens
  siRNA target sequence for MALT1 (NM_006785.2,2305-2323).
gtcttcacagtatgtttat

SEQ ID NO: 133797 - DNA, 19 bp, Homo sapiens
  siRNA target sequence for MALT1 (NM_006785.2,2307-2325).
cttcacagtatgtttatca

SEQ ID NO: 133798 - DNA, 19 bp, Homo sapiens
  siRNA target sequence for MALT1 (NM_006785.2,2361-2379).
caagcaggaagtgaatgtt

SEQ ID NO: 133799 - DNA, 19 bp, Homo sapiens
  siRNA target sequence for MALT1 (NM_006785.2,2430-2448).
gacttgctttcaaacttgt

SEQ ID NO: 133800 - DNA, 19 bp, Homo sapiens
  siRNA target sequence for MALT1 (NM_006785.2,2435-2453).
gctttcaaacttgtcttat

SEQ ID NO: 133801 - DNA, 19 bp, Homo sapiens
  siRNA target sequence for MALT1 (NM_006785.2,2494-2512).
ggagcagggcattatcact

SEQ ID NO: 133802 - DNA, 19 bp, Homo sapiens
  siRNA target sequence for MALT1 (NM_006785.2,2502-2520).
gcattatcactcattgcaa

SEQ ID NO: 133803 - DNA, 19 bp, Homo sapiens
  siRNA target sequence for MALT1 (NM_006785.2,2552-2570).
ctggtaatccaagtaatgt

SEQ ID NO: 133804 - DNA, 19 bp, Homo sapiens
  siRNA target sequence for MALT1 (NM_006785.2,2554-2572).
ggtaatccaagtaatgtta

SEQ ID NO: 133805 - DNA, 19 bp, Homo sapiens
  siRNA target sequence for MALT1 (NM_006785.2,2597-2615).
gccggactccagatgcatt

SEQ ID NO: 133806 - DNA, 19 bp, Homo sapiens
  siRNA target sequence for MALT1 (NM_006785.2,2599-2617).
cggactccagatgcattta

SEQ ID NO: 133807 - DNA, 19 bp, Homo sapiens
  siRNA target sequence for MALT1 (NM_006785.2,2600-2618).
ggactccagatgcatttat

SEQ ID NO: 133808 - DNA, 19 bp, Homo sapiens
  siRNA target sequence for MALT1 (NM_006785.2,2601-2619).
gactccagatgcatttatt

SEQ ID NO: 133809 - DNA, 19 bp, Homo sapiens
  siRNA target sequence for MALT1 (NM_006785.2,2628-2646).
cgctcaccatgcttcatgt

SEQ ID NO: 133810 - DNA, 19 bp, Homo sapiens
  siRNA target sequence for MALT1 (NM_006785.2,2667-2685).
gccagtagagacaactgat

SEQ ID NO: 133811 - DNA, 19 bp, Homo sapiens
  siRNA target sequence for MAP3K7IP1 (NM_006116.1,218-236).
ggtcttcaacggctatgat

SEQ ID NO: 133812 - DNA, 19 bp, Homo sapiens
  siRNA target sequence for MAP3K7IP1 (NM_006116.1,454-472).
ctcctcagtatcagaagat

SEQ ID NO: 133813 - DNA, 19 bp, Homo sapiens
  siRNA target sequence for MAP3K7IP1 (NM_006116.1,488-506).
gacgttagagagggaaatt

SEQ ID NO: 133814 - DNA, 19 bp, Homo sapiens
  siRNA target sequence for MAP3K7IP1 (NM_006116.1,571-589).
gtacaaaccgtgcactttt

SEQ ID NO: 133815 - DNA, 19 bp, Homo sapiens
  siRNA target sequence for MAP3K7IP1 (NM_006116.1,578-596).
ccgtgcacttttatgcaaa

SEQ ID NO: 133816 - DNA, 19 bp, Homo sapiens
  siRNA target sequence for MAP3K7IP1 (NM_006116.1,579-597).
cgtgcacttttatgcaaat

SEQ ID NO: 133817 - DNA, 19 bp, Homo sapiens
  siRNA target sequence for MAP3K7IP1 (NM_006116.1,582-600).
gcacttttatgcaaatcga

SEQ ID NO: 133818 - DNA, 19 bp, Homo sapiens
  siRNA target sequence for MAP3K7IP1 (NM_006116.1,750-768).
ggggattacaaggttaaat

SEQ ID NO: 133819 - DNA, 19 bp, Homo sapiens
  siRNA target sequence for MAP3K7IP1 (NM_006116.1,799-817).
ctgccaagtccaaaccaat

SEQ ID NO: 133820 - DNA, 19 bp, Homo sapiens
  siRNA target sequence for MAP3K7IP1 (NM_006116.1,821-839).
cgcagagccagaaatccat

SEQ ID NO: 133821 - DNA, 19 bp, Homo sapiens
  siRNA target sequence for MAP3K7IP1 (NM_006116.1,1097-1115).
cctgctagtgaggaacttt

SEQ ID NO: 133822 - DNA, 19 bp, Homo sapiens
  siRNA target sequence for MAP3K7IP1 (NM_006116.1,1464-1482).
gtggactttgctgagtttt

SEQ ID NO: 133823 - DNA, 19 bp, Homo sapiens
  siRNA target sequence for MEN1 (NM_000244.2,467-485).
gaaggtctccgatgtcata

SEQ ID NO: 133824 - DNA, 19 bp, Homo sapiens
  siRNA target sequence for MEN1 (NM_000244.2,471-489).
gtctccgatgtcatatgga

SEQ ID NO: 133825 - DNA, 19 bp, Homo sapiens
  siRNA target sequence for MEN1 (NM_000244.2,565-583).
cagtaggcaccaaattgga

SEQ ID NO: 133826 - DNA, 19 bp, Homo sapiens
  siRNA target sequence for MEN1 (NM_000244.2,743-761).
caggggccagacagtcaat

SEQ ID NO: 133827 - DNA, 19 bp, Homo sapiens
  siRNA target sequence for MEN1 (NM_000244.2,1046-1064).
ctcagccaagacctactat

SEQ ID NO: 133828 - DNA, 19 bp, Homo sapiens
  siRNA target sequence for MEN1 (NM_000244.2,1057-1075).
cctactatcgggatgaaca

SEQ ID NO: 133829 - DNA, 19 bp, Homo sapiens
  siRNA target sequence for MEN1 (NM_000244.2,1189-1207).
gggaagacgaggagatcta

SEQ ID NO: 133830 - DNA, 19 bp, Homo sapiens
  siRNA target sequence for MEN1 (NM_000244.2,1357-1375).
cccacctgctgcgattcta

SEQ ID NO: 133831 - DNA, 19 bp, Homo sapiens
  siRNA target sequence for MEN1 (NM_000244.2,1429-1447).
gctgggccacctttcttgt

SEQ ID NO: 133832 - DNA, 19 bp, Homo sapiens
  siRNA target sequence for MEN1 (NM_000244.2,1482-1500).
cagaaggtgcgcatagtga

SEQ ID NO: 133833 - DNA, 19 bp, Homo sapiens
  siRNA target sequence for MGC10485 (NM_052875.2,469-487).
gcgtggaggtggaaatcct

SEQ ID NO: 133834 - DNA, 19 bp, Homo sapiens
  siRNA target sequence for MGC10485 (NM_052875.2,470-488).
cgtggaggtggaaatcctt

SEQ ID NO: 133835 - DNA, 19 bp, Homo sapiens
  siRNA target sequence for MGC10485 (NM_052875.2,637-655).
gcatcaagatcgagttcat

SEQ ID NO: 133836 - DNA, 19 bp, Homo sapiens
  siRNA target sequence for MGC10485 (NM_052875.2,658-676).
ggcagatcgaactctacta

SEQ ID NO: 133837 - DNA, 19 bp, Homo sapiens
  siRNA target sequence for MGC10485 (NM_052875.2,752-770).
ggccttcgactttgagttt

SEQ ID NO: 133838 - DNA, 19 bp, Homo sapiens
  siRNA target sequence for MGC10485 (NM_052875.2,815-833).
gaagctacgctatttcctt

SEQ ID NO: 133839 - DNA, 19 bp, Homo sapiens
  siRNA target sequence for MGC10485 (NM_052875.2,854-872).
cctcaatgatgttgtcaaa

SEQ ID NO: 133840 - DNA, 19 bp, Homo sapiens
  siRNA target sequence for MGC10485 (NM_052875.2,869-887).
caaagagatggacattgta

SEQ ID NO: 133841 - DNA, 19 bp, Homo sapiens
  siRNA target sequence for MGC10485 (NM_052875.2,950-968).
ggactgtctgcacattgaa

SEQ ID NO: 133842 - DNA, 19 bp, Homo sapiens
  siRNA target sequence for MGC10485 (NM_052875.2,951-969).
gactgtctgcacattgaat

SEQ ID NO: 133843 - DNA, 19 bp, Homo sapiens
  siRNA target sequence for MGC10485 (NM_052875.2,953-971).
ctgtctgcacattgaattt

SEQ ID NO: 133844 - DNA, 19 bp, Homo sapiens
  siRNA target sequence for MGC10485 (NM_052875.2,972-990).
gagtacaataaatccaaat

SEQ ID NO: 133845 - DNA, 19 bp, Homo sapiens
  siRNA target sequence for MGC10485 (NM_052875.2,985-1003).
ccaaataccacttgaaaga

SEQ ID NO: 133846 - DNA, 19 bp, Homo sapiens
  siRNA target sequence for MGC10485 (NM_052875.2,1005-1023).
gtcattgtagggaagatat

SEQ ID NO: 133847 - DNA, 19 bp, Homo sapiens
  siRNA target sequence for MGC10485 (NM_052875.2,1221-1239).
cgggacatcaacaagaagt

SEQ ID NO: 133848 - DNA, 19 bp, Homo sapiens
  siRNA target sequence for MGC23166 (NM_152735.2,350-368).
cgtcgctgctggaatctct

SEQ ID NO: 133849 - DNA, 19 bp, Homo sapiens
  siRNA target sequence for MGC23166 (NM_152735.2,425-443).
gggaacttagggctcataa

SEQ ID NO: 133850 - DNA, 19 bp, Homo sapiens
  siRNA target sequence for MGC23166 (NM_152735.2,510-528).
cactctaccgagtgtcatt

SEQ ID NO: 133851 - DNA, 19 bp, Homo sapiens
  siRNA target sequence for MGC23166 (NM_152735.2,547-565).
gggctgctccagctcattt

SEQ ID NO: 133852 - DNA, 19 bp, Homo sapiens
  siRNA target sequence for MGC23166 (NM_152735.2,548-566).
ggctgctccagctcattta

SEQ ID NO: 133853 - DNA, 19 bp, Homo sapiens
  siRNA target sequence for MGC23166 (NM_152735.2,550-568).
ctgctccagctcatttatt

SEQ ID NO: 133854 - DNA, 19 bp, Homo sapiens
  siRNA target sequence for MGC23166 (NM_152735.2,866-884).
gagaagtgctgcaaattca

SEQ ID NO: 133855 - DNA, 19 bp, Homo sapiens
  siRNA target sequence for MGC23166 (NM_152735.2,1126-1144).
gagcctaaggaggagatat

SEQ ID NO: 133856 - DNA, 19 bp, Homo sapiens
  siRNA target sequence for MGC23166 (NM_152735.2,1128-1146).
gcctaaggaggagatatca

SEQ ID NO: 133857 - DNA, 19 bp, Homo sapiens
  siRNA target sequence for MGC23166 (NM_152735.2,1219-1237).
ggggagctagggttcttgt

SEQ ID NO: 133858 - DNA, 19 bp, Homo sapiens
  siRNA target sequence for MGC23166 (NM_152735.2,1220-1238).
gggagctagggttcttgtt

SEQ ID NO: 133859 - DNA, 19 bp, Homo sapiens
  siRNA target sequence for MGC23166 (NM_152735.2,1294-1312).
gatcttcatgggaatgaaa

SEQ ID NO: 133860 - DNA, 19 bp, Homo sapiens
  siRNA target sequence for MGC23166 (NM_152735.2,1619-1637).
gccaccgggacctatgcaa

SEQ ID NO: 133861 - DNA, 19 bp, Homo sapiens
  siRNA target sequence for MGC23166 (NM_152735.2,1655-1673).
ctgcccactggacttacaa

SEQ ID NO: 133862 - DNA, 19 bp, Homo sapiens
  siRNA target sequence for MGC23166 (NM_152735.2,1657-1675).
gcccactggacttacaagt

SEQ ID NO: 133863 - DNA, 19 bp, Homo sapiens
  siRNA target sequence for MGC2629 (NM_032522.2,320-338).
gccgtctctgtgatattgt

SEQ ID NO: 133864 - DNA, 19 bp, Homo sapiens
  siRNA target sequence for MGC2629 (NM_032522.2,329-347).
gtgatattgtggtcaatgt

SEQ ID NO: 133865 - DNA, 19 bp, Homo sapiens
  siRNA target sequence for MGC2629 (NM_032522.2,398-416).
cctatttccgggatcacat

SEQ ID NO: 133866 - DNA, 19 bp, Homo sapiens
  siRNA target sequence for MGC2629 (NM_032522.2,412-430).
cacatgtccttgaatgaga

SEQ ID NO: 133867 - DNA, 19 bp, Homo sapiens
  siRNA target sequence for MGC2629 (NM_032522.2,434-452).
gtacagtctccatttcagt

SEQ ID NO: 133868 - DNA, 19 bp, Homo sapiens
  siRNA target sequence for MGC2629 (NM_032522.2,453-471).
catcaagaaccctactgtt

SEQ ID NO: 133869 - DNA, 19 bp, Homo sapiens
  siRNA target sequence for MGC2629 (NM_032522.2,526-544).
gatatcatcagctacctaa

SEQ ID NO: 133870 - DNA, 19 bp, Homo sapiens
  siRNA target sequence for MGC2629 (NM_032522.2,561-579).
gcaaatgcagcatattata

SEQ ID NO: 133871 - DNA, 19 bp, Homo sapiens
  siRNA target sequence for MGC2629 (NM_032522.2,567-585).
gcagcatattatagacaaa

SEQ ID NO: 133872 - DNA, 19 bp, Homo sapiens
  siRNA target sequence for MGC2629 (NM_032522.2,695-713).
gggttacaccaaatctcaa

SEQ ID NO: 133873 - DNA, 19 bp, Homo sapiens
  siRNA target sequence for MGC2629 (NM_032522.2,719-737).
cccttagcccacgacataa

SEQ ID NO: 133874 - DNA, 19 bp, Homo sapiens
  siRNA target sequence for MGC2629 (NM_032522.2,720-738).
ccttagcccacgacataat

SEQ ID NO: 133875 - DNA, 19 bp, Homo sapiens
  siRNA target sequence for MGC2629 (NM_032522.2,721-739).
cttagcccacgacataata

SEQ ID NO: 133876 - DNA, 19 bp, Homo sapiens
  siRNA target sequence for MGC2629 (NM_032522.2,828-846).
cattgaaccaagttctgat

SEQ ID NO: 133877 - DNA, 19 bp, Homo sapiens
  siRNA target sequence for MGC2629 (NM_032522.2,926-944).
gtcggagtgatgatgaagt

SEQ ID NO: 133878 - DNA, 19 bp, Homo sapiens
  siRNA target sequence for MGC2629 (NM_032522.2,928-946).
cggagtgatgatgaagtta

SEQ ID NO: 133879 - DNA, 19 bp, Homo sapiens
  siRNA target sequence for MGC2629 (NM_032522.2,932-950).
gtgatgatgaagttagagt

SEQ ID NO: 133880 - DNA, 19 bp, Homo sapiens
  siRNA target sequence for MGC2629 (NM_032522.2,961-979).
gtacacatcaaaactgaaa

SEQ ID NO: 133881 - DNA, 19 bp, Homo sapiens
  siRNA target sequence for MGC2629 (NM_032522.2,1082-1100).
ctgtaggacaggaaaatta

SEQ ID NO: 133882 - DNA, 19 bp, Homo sapiens
  siRNA target sequence for MGC2629 (NM_032522.2,1084-1102).
gtaggacaggaaaattata

SEQ ID NO: 133883 - DNA, 19 bp, Homo sapiens
  siRNA target sequence for MGC2629 (NM_032522.2,1143-1161).
cagtgaagttgacagattt

SEQ ID NO: 133884 - DNA, 19 bp, Homo sapiens
  siRNA target sequence for MGC2629 (NM_032522.2,1164-1182).
cccctccggcagtgttgtt

SEQ ID NO: 133885 - DNA, 19 bp, Homo sapiens
  siRNA target sequence for MGC2629 (NM_032522.2,1258-1276).
gtatggagttgtggattta

SEQ ID NO: 133886 - DNA, 19 bp, Homo sapiens
  siRNA target sequence for MGC2629 (NM_032522.2,1263-1281).
gagttgtggatttagaact

SEQ ID NO: 133887 - DNA, 19 bp, Homo sapiens
  siRNA target sequence for MGEA6 (NM_005930.1,2436-2454).
gcaagaggcccattcttga

SEQ ID NO: 133888 - DNA, 19 bp, Homo sapiens
  siRNA target sequence for MICB (NM_005931.2,38-56).
cgtcgccttcccttttgca

SEQ ID NO: 133889 - DNA, 19 bp, Homo sapiens
  siRNA target sequence for MICB (NM_005931.2,488-506).
ggctatgaacgtcacaaat

SEQ ID NO: 133890 - DNA, 19 bp, Homo sapiens
  siRNA target sequence for MICB (NM_005931.2,490-508).
ctatgaacgtcacaaattt

SEQ ID NO: 133891 - DNA, 19 bp, Homo sapiens
  siRNA target sequence for MICB (NM_005931.2,917-935).
gagtcaacggacagacttt

SEQ ID NO: 133892 - DNA, 19 bp, Homo sapiens
  siRNA target sequence for MICB (NM_005931.2,921-939).
caacggacagactttccat

SEQ ID NO: 133893 - DNA, 19 bp, Homo sapiens
  siRNA target sequence for MICB (NM_005931.2,949-967).
ctgctatgccatgttttgt

SEQ ID NO: 133894 - DNA, 19 bp, Homo sapiens
  siRNA target sequence for MID1 (NM_000381.1,205-223).
gaactgacctgccctattt

SEQ ID NO: 133895 - DNA, 19 bp, Homo sapiens
  siRNA target sequence for MID1 (NM_000381.1,234-252).
ctttgaggaccctcttcta

SEQ ID NO: 133896 - DNA, 19 bp, Homo sapiens
  siRNA target sequence for MID1 (NM_000381.1,286-304).
gcccaccgcatcctagtat

SEQ ID NO: 133897 - DNA, 19 bp, Homo sapiens
  siRNA target sequence for MID1 (NM_000381.1,288-306).
ccaccgcatcctagtatca

SEQ ID NO: 133898 - DNA, 19 bp, Homo sapiens
  siRNA target sequence for MID1 (NM_000381.1,356-374).
ccacctgccggcatgtcat

SEQ ID NO: 133899 - DNA, 19 bp, Homo sapiens
  siRNA target sequence for MID1 (NM_000381.1,410-428).
gcaacgtcaccctacagaa

SEQ ID NO: 133900 - DNA, 19 bp, Homo sapiens
  siRNA target sequence for MID1 (NM_000381.1,534-552).
ggtcctctgccagttttgt

SEQ ID NO: 133901 - DNA, 19 bp, Homo sapiens
  siRNA target sequence for MID1 (NM_000381.1,628-646).
gccactcacccgaataaga

SEQ ID NO: 133902 - DNA, 19 bp, Homo sapiens
  siRNA target sequence for MID1 (NM_000381.1,629-647).
ccactcacccgaataagaa

SEQ ID NO: 133903 - DNA, 19 bp, Homo sapiens
  siRNA target sequence for MID1 (NM_000381.1,656-674).
caggccatcgtctgattga

SEQ ID NO: 133904 - DNA, 19 bp, Homo sapiens
  siRNA target sequence for MID1 (NM_000381.1,822-840).
gagtgagcgctatgacaaa

SEQ ID NO: 133905 - DNA, 19 bp, Homo sapiens
  siRNA target sequence for MID1 (NM_000381.1,824-842).
gtgagcgctatgacaaatt

SEQ ID NO: 133906 - DNA, 19 bp, Homo sapiens
  siRNA target sequence for MID1 (NM_000381.1,826-844).
gagcgctatgacaaattga

SEQ ID NO: 133907 - DNA, 19 bp, Homo sapiens
  siRNA target sequence for MID1 (NM_000381.1,860-878).
gtaacctcaccaaccttat

SEQ ID NO: 133908 - DNA, 19 bp, Homo sapiens
  siRNA target sequence for MID1 (NM_000381.1,865-883).
ctcaccaaccttattaaga

SEQ ID NO: 133909 - DNA, 19 bp, Homo sapiens
  siRNA target sequence for MID1 (NM_000381.1,929-947).
gtcaacatgttgaagtcaa

SEQ ID NO: 133910 - DNA, 19 bp, Homo sapiens
  siRNA target sequence for MID1 (NM_000381.1,945-963).
caatgcatcacgtcaagaa

SEQ ID NO: 133911 - DNA, 19 bp, Homo sapiens
  siRNA target sequence for MID1 (NM_000381.1,953-971).
cacgtcaagaagccaaatt

SEQ ID NO: 133912 - DNA, 19 bp, Homo sapiens
  siRNA target sequence for MID1 (NM_000381.1,955-973).
cgtcaagaagccaaattga

SEQ ID NO: 133913 - DNA, 19 bp, Homo sapiens
  siRNA target sequence for MID1 (NM_000381.1,972-990).
gacagaggagtgtgatctt

SEQ ID NO: 133914 - DNA, 19 bp, Homo sapiens
  siRNA target sequence for MID1 (NM_000381.1,1006-1024).
cagcaaagacgacagatta

SEQ ID NO: 133915 - DNA, 19 bp, Homo sapiens
  siRNA target sequence for MID1 (NM_000381.1,1008-1026).
gcaaagacgacagattatt

SEQ ID NO: 133916 - DNA, 19 bp, Homo sapiens
  siRNA target sequence for MID1 (NM_000381.1,1228-1246).
gttctaattcctgaaatca

SEQ ID NO: 133917 - DNA, 19 bp, Homo sapiens
  siRNA target sequence for MID1 (NM_000381.1,1264-1282).
gacacctttgccttagatt

SEQ ID NO: 133918 - DNA, 19 bp, Homo sapiens
  siRNA target sequence for MID1 (NM_000381.1,1306-1324).
gaatgtctggattacctta

SEQ ID NO: 133919 - DNA, 19 bp, Homo sapiens
  siRNA target sequence for MID1 (NM_000381.1,1330-1348).
cccaaccctcccacaatta

SEQ ID NO: 133920 - DNA, 19 bp, Homo sapiens
  siRNA target sequence for MID1 (NM_000381.1,1464-1482).
cgtcgttagtctgtgtaat

SEQ ID NO: 133921 - DNA, 19 bp, Homo sapiens
  siRNA target sequence for MID1 (NM_000381.1,1465-1483).
gtcgttagtctgtgtaatt

SEQ ID NO: 133922 - DNA, 19 bp, Homo sapiens
  siRNA target sequence for MID1 (NM_000381.1,1485-1503).
ggctgatagctggatgata

SEQ ID NO: 133923 - DNA, 19 bp, Homo sapiens
  siRNA target sequence for MID1 (NM_000381.1,1487-1505).
ctgatagctggatgatagt

SEQ ID NO: 133924 - DNA, 19 bp, Homo sapiens
  siRNA target sequence for MID1 (NM_000381.1,1656-1674).
caaatctgctcatcgaaaa

SEQ ID NO: 133925 - DNA, 19 bp, Homo sapiens
  siRNA target sequence for MID1 (NM_000381.1,1661-1679).
ctgctcatcgaaaactgaa

SEQ ID NO: 133926 - DNA, 19 bp, Homo sapiens
  siRNA target sequence for MID1 (NM_000381.1,1681-1699).
gtgtcccatgataacttga

SEQ ID NO: 133927 - DNA, 19 bp, Homo sapiens
  siRNA target sequence for MID1 (NM_000381.1,1871-1889).
ccccgaagcatgaatggat

SEQ ID NO: 133928 - DNA, 19 bp, Homo sapiens
  siRNA target sequence for MID1 (NM_000381.1,1935-1953).
ctgggtggtgagacacaat

SEQ ID NO: 133929 - DNA, 19 bp, Homo sapiens
  siRNA target sequence for MID1 (NM_000381.1,2022-2040).
cggctctatcgccttttat

SEQ ID NO: 133930 - DNA, 19 bp, Homo sapiens
  siRNA target sequence for MID1 (NM_000381.1,2150-2168).
ctatcccagaccatttgga

SEQ ID NO: 133931 - DNA, 19 bp, Homo sapiens
  siRNA target sequence for MPDZ (NM_003829.1,83-101).
gcagcagagcgcttgcaaa

SEQ ID NO: 133932 - DNA, 19 bp, Homo sapiens
  siRNA target sequence for MPDZ (NM_003829.1,87-105).
cagagcgcttgcaaaccaa

SEQ ID NO: 133933 - DNA, 19 bp, Homo sapiens
  siRNA target sequence for MPDZ (NM_003829.1,120-138).
gggatgtagcaaatgaaga

SEQ ID NO: 133934 - DNA, 19 bp, Homo sapiens
  siRNA target sequence for MPDZ (NM_003829.1,224-242).
gaccaggtaaatattgcaa

SEQ ID NO: 133935 - DNA, 19 bp, Homo sapiens
  siRNA target sequence for MPDZ (NM_003829.1,229-247).
ggtaaatattgcaacttca

SEQ ID NO: 133936 - DNA, 19 bp, Homo sapiens
  siRNA target sequence for MPDZ (NM_003829.1,306-324).
ctctgcaaaatgaatcgtt

SEQ ID NO: 133937 - DNA, 19 bp, Homo sapiens
  siRNA target sequence for MPDZ (NM_003829.1,368-386).
cctggtattccacacatta

SEQ ID NO: 133938 - DNA, 19 bp, Homo sapiens
  siRNA target sequence for MPDZ (NM_003829.1,369-387).
ctggtattccacacattaa

SEQ ID NO: 133939 - DNA, 19 bp, Homo sapiens
  siRNA target sequence for MPDZ (NM_003829.1,435-453).
cccagggtcgccatgtaga

SEQ ID NO: 133940 - DNA, 19 bp, Homo sapiens
  siRNA target sequence for MPDZ (NM_003829.1,436-454).
ccagggtcgccatgtagaa

SEQ ID NO: 133941 - DNA, 19 bp, Homo sapiens
  siRNA target sequence for MPDZ (NM_003829.1,439-457).
gggtcgccatgtagaagtt

SEQ ID NO: 133942 - DNA, 19 bp, Homo sapiens
  siRNA target sequence for MPDZ (NM_003829.1,440-458).
ggtcgccatgtagaagttt

SEQ ID NO: 133943 - DNA, 19 bp, Homo sapiens
  siRNA target sequence for MPDZ (NM_003829.1,441-459).
gtcgccatgtagaagtttt

SEQ ID NO: 133944 - DNA, 19 bp, Homo sapiens
  siRNA target sequence for MPDZ (NM_003829.1,503-521).
gtgggactaagaagtgaaa

SEQ ID NO: 133945 - DNA, 19 bp, Homo sapiens
  siRNA target sequence for MPDZ (NM_003829.1,564-582).
gcagtgtggcccatagaga

SEQ ID NO: 133946 - DNA, 19 bp, Homo sapiens
  siRNA target sequence for MPDZ (NM_003829.1,579-597).
gagatggaagattgaaaga

SEQ ID NO: 133947 - DNA, 19 bp, Homo sapiens
  siRNA target sequence for MPDZ (NM_003829.1,728-746).
cttgtcagccccatagttt

SEQ ID NO: 133948 - DNA, 19 bp, Homo sapiens
  siRNA target sequence for MPDZ (NM_003829.1,792-810).
cggttcactggcaacacat

SEQ ID NO: 133949 - DNA, 19 bp, Homo sapiens
  siRNA target sequence for MPDZ (NM_003829.1,801-819).
ggcaacacatggaaacgat

SEQ ID NO: 133950 - DNA, 19 bp, Homo sapiens
  siRNA target sequence for MPDZ (NM_003829.1,802-820).
gcaacacatggaaacgatt

SEQ ID NO: 133951 - DNA, 19 bp, Homo sapiens
  siRNA target sequence for MPDZ (NM_003829.1,806-824).
cacatggaaacgattgaat

SEQ ID NO: 133952 - DNA, 19 bp, Homo sapiens
  siRNA target sequence for MPDZ (NM_003829.1,816-834).
cgattgaattggtgaatga

SEQ ID NO: 133953 - DNA, 19 bp, Homo sapiens
  siRNA target sequence for MPDZ (NM_003829.1,872-890).
gcaactggtgtgatagtaa

SEQ ID NO: 133954 - DNA, 19 bp, Homo sapiens
  siRNA target sequence for MPDZ (NM_003829.1,873-891).
caactggtgtgatagtaaa

SEQ ID NO: 133955 - DNA, 19 bp, Homo sapiens
  siRNA target sequence for MPDZ (NM_003829.1,917-935).
gatcagcatgggcgtttat

SEQ ID NO: 133956 - DNA, 19 bp, Homo sapiens
  siRNA target sequence for MPDZ (NM_003829.1,920-938).
cagcatgggcgtttatgca

SEQ ID NO: 133957 - DNA, 19 bp, Homo sapiens
  siRNA target sequence for MPDZ (NM_003829.1,942-960).
gagaccacattctaaagat

SEQ ID NO: 133958 - DNA, 19 bp, Homo sapiens
  siRNA target sequence for MPDZ (NM_003829.1,958-976).
gattggtgacacagatcta

SEQ ID NO: 133959 - DNA, 19 bp, Homo sapiens
  siRNA target sequence for MPDZ (NM_003829.1,1009-1027).
ccttaggcaatgtggaaat

SEQ ID NO: 133960 - DNA, 19 bp, Homo sapiens
  siRNA target sequence for MPDZ (NM_003829.1,1010-1028).
cttaggcaatgtggaaata

SEQ ID NO: 133961 - DNA, 19 bp, Homo sapiens
  siRNA target sequence for MPDZ (NM_003829.1,1129-1147).
gcgggttgatgcttctact

SEQ ID NO: 133962 - DNA, 19 bp, Homo sapiens
  siRNA target sequence for MPDZ (NM_003829.1,1196-1214).
gtccaaggattaggaatta

SEQ ID NO: 133963 - DNA, 19 bp, Homo sapiens
  siRNA target sequence for MPDZ (NM_003829.1,1199-1217).
caaggattaggaattacca

SEQ ID NO: 133964 - DNA, 19 bp, Homo sapiens
  siRNA target sequence for MPDZ (NM_003829.1,1351-1369).
ccttcagggttttactaat

SEQ ID NO: 133965 - DNA, 19 bp, Homo sapiens
  siRNA target sequence for MPDZ (NM_003829.1,1390-1408).
gcgacatacaggacaaact

SEQ ID NO: 133966 - DNA, 19 bp, Homo sapiens
  siRNA target sequence for MPDZ (NM_003829.1,1407-1425).
ctgtgctcctgacactaat

SEQ ID NO: 133967 - DNA, 19 bp, Homo sapiens
  siRNA target sequence for MPDZ (NM_003829.1,1445-1463).
gaagccgagctcatgtcaa

SEQ ID NO: 133968 - DNA, 19 bp, Homo sapiens
  siRNA target sequence for MPDZ (NM_003829.1,1461-1479).
caagggaagacgtcacaaa

SEQ ID NO: 133969 - DNA, 19 bp, Homo sapiens
  siRNA target sequence for MPDZ (NM_003829.1,1497-1515).
ctgttaatgccagcataat

SEQ ID NO: 133970 - DNA, 19 bp, Homo sapiens
  siRNA target sequence for MPDZ (NM_003829.1,1567-1585).
caacatattaccaactgaa

SEQ ID NO: 133971 - DNA, 19 bp, Homo sapiens
  siRNA target sequence for MPDZ (NM_003829.1,1583-1601).
gaagaagaagggtatccat

SEQ ID NO: 133972 - DNA, 19 bp, Homo sapiens
  siRNA target sequence for MPDZ (NM_003829.1,1649-1667).
gctgctctgctgacaaaat

SEQ ID NO: 133973 - DNA, 19 bp, Homo sapiens
  siRNA target sequence for MPDZ (NM_003829.1,1674-1692).
ggattatgggaattaacta

SEQ ID NO: 133974 - DNA, 19 bp, Homo sapiens
  siRNA target sequence for MPDZ (NM_003829.1,1675-1693).
gattatgggaattaactat

SEQ ID NO: 133975 - DNA, 19 bp, Homo sapiens
  siRNA target sequence for MPDZ (NM_003829.1,1705-1723).
ggcccatgtgagcaagttt

SEQ ID NO: 133976 - DNA, 19 bp, Homo sapiens
  siRNA target sequence for MPDZ (NM_003829.1,1706-1724).
gcccatgtgagcaagttta

SEQ ID NO: 133977 - DNA, 19 bp, Homo sapiens
  siRNA target sequence for MPDZ (NM_003829.1,1757-1775).
gcgacagtgggacatcatt

SEQ ID NO: 133978 - DNA, 19 bp, Homo sapiens
  siRNA target sequence for MPDZ (NM_003829.1,1830-1848).
gtggagacgagctattgga

SEQ ID NO: 133979 - DNA, 19 bp, Homo sapiens
  siRNA target sequence for MPDZ (NM_003829.1,1835-1853).
gacgagctattggaagtaa

SEQ ID NO: 133980 - DNA, 19 bp, Homo sapiens
  siRNA target sequence for MPDZ (NM_003829.1,1846-1864).
ggaagtaaatggcataact

SEQ ID NO: 133981 - DNA, 19 bp, Homo sapiens
  siRNA target sequence for MPDZ (NM_003829.1,1872-1890).
gggaaaatcaccaagatgt

SEQ ID NO: 133982 - DNA, 19 bp, Homo sapiens
  siRNA target sequence for MPDZ (NM_003829.1,1886-1904).
gatgtggtgaatatcttaa

SEQ ID NO: 133983 - DNA, 19 bp, Homo sapiens
  siRNA target sequence for MPDZ (NM_003829.1,1891-1909).
ggtgaatatcttaaaagaa

SEQ ID NO: 133984 - DNA, 19 bp, Homo sapiens
  siRNA target sequence for MPDZ (NM_003829.1,1955-1973).
cccaccacccaatcagaat

SEQ ID NO: 133985 - DNA, 19 bp, Homo sapiens
  siRNA target sequence for MPDZ (NM_003829.1,1959-1977).
ccacccaatcagaattgga

SEQ ID NO: 133986 - DNA, 19 bp, Homo sapiens
  siRNA target sequence for MPDZ (NM_003829.1,1975-1993).
ggatagcctggacttatgt

SEQ ID NO: 133987 - DNA, 19 bp, Homo sapiens
  siRNA target sequence for MPDZ (NM_003829.1,1994-2012).
gatattgagctaacagaaa

SEQ ID NO: 133988 - DNA, 19 bp, Homo sapiens
  siRNA target sequence for MPDZ (NM_003829.1,2213-2231).
ccagcaagcactgtgatta

SEQ ID NO: 133989 - DNA, 19 bp, Homo sapiens
  siRNA target sequence for MPDZ (NM_003829.1,2214-2232).
cagcaagcactgtgattat

SEQ ID NO: 133990 - DNA, 19 bp, Homo sapiens
  siRNA target sequence for MPDZ (NM_003829.1,2216-2234).
gcaagcactgtgattataa

SEQ ID NO: 133991 - DNA, 19 bp, Homo sapiens
  siRNA target sequence for MPDZ (NM_003829.1,2250-2268).
ctggcggcattgctgaaaa

SEQ ID NO: 133992 - DNA, 19 bp, Homo sapiens
  siRNA target sequence for MPDZ (NM_003829.1,2286-2304).
ctggtgaccgactcatgtt

SEQ ID NO: 133993 - DNA, 19 bp, Homo sapiens
  siRNA target sequence for MPDZ (NM_003829.1,2289-2307).
gtgaccgactcatgtttgt

SEQ ID NO: 133994 - DNA, 19 bp, Homo sapiens
  siRNA target sequence for MPDZ (NM_003829.1,2291-2309).
gaccgactcatgtttgtaa

SEQ ID NO: 133995 - DNA, 19 bp, Homo sapiens
  siRNA target sequence for MPDZ (NM_003829.1,2295-2313).
gactcatgtttgtaaacga

SEQ ID NO: 133996 - DNA, 19 bp, Homo sapiens
  siRNA target sequence for MPDZ (NM_003829.1,2415-2433).
caccagaagaaggttatgt

SEQ ID NO: 133997 - DNA, 19 bp, Homo sapiens
  siRNA target sequence for MPDZ (NM_003829.1,2574-2592).
ctccatactctcctgaaaa

SEQ ID NO: 133998 - DNA, 19 bp, Homo sapiens
  siRNA target sequence for MPDZ (NM_003829.1,2596-2614).
cagcatctactctactcaa

SEQ ID NO: 133999 - DNA, 19 bp, Homo sapiens
  siRNA target sequence for MPDZ (NM_003829.1,2605-2623).
ctctactcaagcctctatt

SEQ ID NO: 134000 - DNA, 19 bp, Homo sapiens
  siRNA target sequence for MPDZ (NM_003829.1,2651-2669).
gatggcctgaactatggtt

SEQ ID NO: 134001 - DNA, 19 bp, Homo sapiens
  siRNA target sequence for MPDZ (NM_003829.1,2721-2739).
cagtacttgatctgcatat

SEQ ID NO: 134002 - DNA, 19 bp, Homo sapiens
  siRNA target sequence for MPDZ (NM_003829.1,2723-2741).
gtacttgatctgcatatgt

SEQ ID NO: 134003 - DNA, 19 bp, Homo sapiens
  siRNA target sequence for MPDZ (NM_003829.1,2740-2758).
gtctctggaggaactatat

SEQ ID NO: 134004 - DNA, 19 bp, Homo sapiens
  siRNA target sequence for MPDZ (NM_003829.1,2795-2813).
ccttcggtggacataagta

SEQ ID NO: 134005 - DNA, 19 bp, Homo sapiens
  siRNA target sequence for MPDZ (NM_003829.1,2796-2814).
cttcggtggacataagtat

SEQ ID NO: 134006 - DNA, 19 bp, Homo sapiens
  siRNA target sequence for MPDZ (NM_003829.1,2822-2840).
gcttctggctttactataa

SEQ ID NO: 134007 - DNA, 19 bp, Homo sapiens
  siRNA target sequence for MPDZ (NM_003829.1,2826-2844).
ctggctttactataaatga

SEQ ID NO: 134008 - DNA, 19 bp, Homo sapiens
  siRNA target sequence for MPDZ (NM_003829.1,2828-2846).
ggctttactataaatgact

SEQ ID NO: 134009 - DNA, 19 bp, Homo sapiens
  siRNA target sequence for MPDZ (NM_003829.1,2845-2863).
ctacacacctgcaaatgct

SEQ ID NO: 134010 - DNA, 19 bp, Homo sapiens
  siRNA target sequence for MPDZ (NM_003829.1,2850-2868).
cacctgcaaatgctattga

SEQ ID NO: 134011 - DNA, 19 bp, Homo sapiens
  siRNA target sequence for MPDZ (NM_003829.1,2897-2915).
gtgtggactgaatctcatt

SEQ ID NO: 134012 - DNA, 19 bp, Homo sapiens
  siRNA target sequence for MPDZ (NM_003829.1,2899-2917).
gtggactgaatctcattta

SEQ ID NO: 134013 - DNA, 19 bp, Homo sapiens
  siRNA target sequence for MPDZ (NM_003829.1,3001-3019).
gagctccctggcctgtaat

SEQ ID NO: 134014 - DNA, 19 bp, Homo sapiens
  siRNA target sequence for MPDZ (NM_003829.1,3025-3043).
gtgtgtcatgcttcaaaat

SEQ ID NO: 134015 - DNA, 19 bp, Homo sapiens
  siRNA target sequence for MPDZ (NM_003829.1,3066-3084).
ggactattaatatagcaaa

SEQ ID NO: 134016 - DNA, 19 bp, Homo sapiens
  siRNA target sequence for MPDZ (NM_003829.1,3087-3105).
gcaattctagcctaggaat

SEQ ID NO: 134017 - DNA, 19 bp, Homo sapiens
  siRNA target sequence for MPDZ (NM_003829.1,3097-3115).
cctaggaatgacagttagt

SEQ ID NO: 134018 - DNA, 19 bp, Homo sapiens
  siRNA target sequence for MPDZ (NM_003829.1,3136-3154).
gatgatcgttcgaagcatt

SEQ ID NO: 134019 - DNA, 19 bp, Homo sapiens
  siRNA target sequence for MPDZ (NM_003829.1,3139-3157).
gatcgttcgaagcattatt

SEQ ID NO: 134020 - DNA, 19 bp, Homo sapiens
  siRNA target sequence for MPDZ (NM_003829.1,3142-3160).
cgttcgaagcattattcat

SEQ ID NO: 134021 - DNA, 19 bp, Homo sapiens
  siRNA target sequence for MPDZ (NM_003829.1,3228-3246).
ctaccatcagtgtaaccaa

SEQ ID NO: 134022 - DNA, 19 bp, Homo sapiens
  siRNA target sequence for MPDZ (NM_003829.1,3249-3267).
cccaggcacgagctatgtt

SEQ ID NO: 134023 - DNA, 19 bp, Homo sapiens
  siRNA target sequence for MPDZ (NM_003829.1,3251-3269).
caggcacgagctatgttga

SEQ ID NO: 134024 - DNA, 19 bp, Homo sapiens
  siRNA target sequence for MPDZ (NM_003829.1,3254-3272).
gcacgagctatgttgagaa

SEQ ID NO: 134025 - DNA, 19 bp, Homo sapiens
  siRNA target sequence for MPDZ (NM_003829.1,3281-3299).
ctcattggccctgacataa

SEQ ID NO: 134026 - DNA, 19 bp, Homo sapiens
  siRNA target sequence for MPDZ (NM_003829.1,3366-3384).
gagtaatggcactggatat

SEQ ID NO: 134027 - DNA, 19 bp, Homo sapiens
  siRNA target sequence for MPDZ (NM_003829.1,3368-3386).
gtaatggcactggatattt

SEQ ID NO: 134028 - DNA, 19 bp, Homo sapiens
  siRNA target sequence for MPDZ (NM_003829.1,3461-3479).
caaaacacagcatatagca

SEQ ID NO: 134029 - DNA, 19 bp, Homo sapiens
  siRNA target sequence for MPDZ (NM_003829.1,3592-3610).
gaggggcattttcatcaaa

SEQ ID NO: 134030 - DNA, 19 bp, Homo sapiens
  siRNA target sequence for MPDZ (NM_003829.1,3594-3612).
ggggcattttcatcaaaca

SEQ ID NO: 134031 - DNA, 19 bp, Homo sapiens
  siRNA target sequence for MPDZ (NM_003829.1,3595-3613).
gggcattttcatcaaacat

SEQ ID NO: 134032 - DNA, 19 bp, Homo sapiens
  siRNA target sequence for MPDZ (NM_003829.1,3740-3758).
ggcaaccctgtagtcttta

SEQ ID NO: 134033 - DNA, 19 bp, Homo sapiens
  siRNA target sequence for MPDZ (NM_003829.1,3818-3836).
ctttaccctaagtacaact

SEQ ID NO: 134034 - DNA, 19 bp, Homo sapiens
  siRNA target sequence for MPDZ (NM_003829.1,3841-3859).
cagcactaacccatttgct

SEQ ID NO: 134035 - DNA, 19 bp, Homo sapiens
  siRNA target sequence for MPDZ (NM_003829.1,3857-3875).
gctgactctctacaaatca

SEQ ID NO: 134036 - DNA, 19 bp, Homo sapiens
  siRNA target sequence for MPDZ (NM_003829.1,4080-4098).
caggcgagctgcatatgat

SEQ ID NO: 134037 - DNA, 19 bp, Homo sapiens
  siRNA target sequence for MPDZ (NM_003829.1,4084-4102).
cgagctgcatatgattgaa

SEQ ID NO: 134038 - DNA, 19 bp, Homo sapiens
  siRNA target sequence for MPDZ (NM_003829.1,4119-4137).
gtggtttgggcctaagtct

SEQ ID NO: 134039 - DNA, 19 bp, Homo sapiens
  siRNA target sequence for MPDZ (NM_003829.1,4158-4176).
ccaggatgagtgtcttcat

SEQ ID NO: 134040 - DNA, 19 bp, Homo sapiens
  siRNA target sequence for MPDZ (NM_003829.1,4159-4177).
caggatgagtgtcttcata

SEQ ID NO: 134041 - DNA, 19 bp, Homo sapiens
  siRNA target sequence for MPDZ (NM_003829.1,4161-4179).
ggatgagtgtcttcatagt

SEQ ID NO: 134042 - DNA, 19 bp, Homo sapiens
  siRNA target sequence for MPDZ (NM_003829.1,4180-4198).
ggggattgatccaaatgga

SEQ ID NO: 134043 - DNA, 19 bp, Homo sapiens
  siRNA target sequence for MPDZ (NM_003829.1,4253-4271).
ggtcagattttatatggaa

SEQ ID NO: 134044 - DNA, 19 bp, Homo sapiens
  siRNA target sequence for MPDZ (NM_003829.1,4277-4295).
catcagaatgcctcatcaa

SEQ ID NO: 134045 - DNA, 19 bp, Homo sapiens
  siRNA target sequence for MPDZ (NM_003829.1,4282-4300).
gaatgcctcatcaatcatt

SEQ ID NO: 134046 - DNA, 19 bp, Homo sapiens
  siRNA target sequence for MPDZ (NM_003829.1,4363-4381).
ggccgtatgtcctggaaat

SEQ ID NO: 134047 - DNA, 19 bp, Homo sapiens
  siRNA target sequence for MPDZ (NM_003829.1,4366-4384).
cgtatgtcctggaaatgca

SEQ ID NO: 134048 - DNA, 19 bp, Homo sapiens
  siRNA target sequence for MPDZ (NM_003829.1,4377-4395).
gaaatgcagtagaaccttt

SEQ ID NO: 134049 - DNA, 19 bp, Homo sapiens
  siRNA target sequence for MPDZ (NM_003829.1,4388-4406).
gaacctttgccttctaact

SEQ ID NO: 134050 - DNA, 19 bp, Homo sapiens
  siRNA target sequence for MPDZ (NM_003829.1,4429-4447).
gacagagccaactgttact

SEQ ID NO: 134051 - DNA, 19 bp, Homo sapiens
  siRNA target sequence for MPDZ (NM_003829.1,4433-4451).
gagccaactgttactactt

SEQ ID NO: 134052 - DNA, 19 bp, Homo sapiens
  siRNA target sequence for MPDZ (NM_003829.1,4460-4478).
gctgtggacctcagttcat

SEQ ID NO: 134053 - DNA, 19 bp, Homo sapiens
  siRNA target sequence for MPDZ (NM_003829.1,4461-4479).
ctgtggacctcagttcatt

SEQ ID NO: 134054 - DNA, 19 bp, Homo sapiens
  siRNA target sequence for MPDZ (NM_003829.1,4463-4481).
gtggacctcagttcattta

SEQ ID NO: 134055 - DNA, 19 bp, Homo sapiens
  siRNA target sequence for MPDZ (NM_003829.1,4465-4483).
ggacctcagttcatttaaa

SEQ ID NO: 134056 - DNA, 19 bp, Homo sapiens
  siRNA target sequence for MPDZ (NM_003829.1,4466-4484).
gacctcagttcatttaaaa

SEQ ID NO: 134057 - DNA, 19 bp, Homo sapiens
  siRNA target sequence for MPDZ (NM_003829.1,4516-4534).
ggggggtttgggtattgct

SEQ ID NO: 134058 - DNA, 19 bp, Homo sapiens
  siRNA target sequence for MPDZ (NM_003829.1,4551-4569).
cactcagtggagtcatcat

SEQ ID NO: 134059 - DNA, 19 bp, Homo sapiens
  siRNA target sequence for MPDZ (NM_003829.1,4553-4571).
ctcagtggagtcatcataa

SEQ ID NO: 134060 - DNA, 19 bp, Homo sapiens
  siRNA target sequence for MPDZ (NM_003829.1,4564-4582).
catcataaagagcttaaca

SEQ ID NO: 134061 - DNA, 19 bp, Homo sapiens
  siRNA target sequence for MPDZ (NM_003829.1,4600-4618).
cacggatggacgactcaaa

SEQ ID NO: 134062 - DNA, 19 bp, Homo sapiens
  siRNA target sequence for MPDZ (NM_003829.1,4602-4620).
cggatggacgactcaaagt

SEQ ID NO: 134063 - DNA, 19 bp, Homo sapiens
  siRNA target sequence for MPDZ (NM_003829.1,4615-4633).
caaagtcggagatcagata

SEQ ID NO: 134064 - DNA, 19 bp, Homo sapiens
  siRNA target sequence for MPDZ (NM_003829.1,4661-4679).
ggttaccctattgaaaagt

SEQ ID NO: 134065 - DNA, 19 bp, Homo sapiens
  siRNA target sequence for MPDZ (NM_003829.1,4662-4680).
gttaccctattgaaaagtt

SEQ ID NO: 134066 - DNA, 19 bp, Homo sapiens
  siRNA target sequence for MPDZ (NM_003829.1,4838-4856).
ccggagtccatccgaaata

SEQ ID NO: 134067 - DNA, 19 bp, Homo sapiens
  siRNA target sequence for MPDZ (NM_003829.1,4840-4858).
ggagtccatccgaaataca

SEQ ID NO: 134068 - DNA, 19 bp, Homo sapiens
  siRNA target sequence for MPDZ (NM_003829.1,4841-4859).
gagtccatccgaaatacaa

SEQ ID NO: 134069 - DNA, 19 bp, Homo sapiens
  siRNA target sequence for MPDZ (NM_003829.1,4850-4868).
cgaaatacaagcagatcat

SEQ ID NO: 134070 - DNA, 19 bp, Homo sapiens
  siRNA target sequence for MPDZ (NM_003829.1,4929-4947).
caaccatcgagatttccaa

SEQ ID NO: 134071 - DNA, 19 bp, Homo sapiens
  siRNA target sequence for MPDZ (NM_003829.1,4992-5010).
cgctgctgggtgccattat

SEQ ID NO: 134072 - DNA, 19 bp, Homo sapiens
  siRNA target sequence for MPDZ (NM_003829.1,4999-5017).
gggtgccattattatccat

SEQ ID NO: 134073 - DNA, 19 bp, Homo sapiens
  siRNA target sequence for MPDZ (NM_003829.1,5101-5119).
gagaaaggccacacatgat

SEQ ID NO: 134074 - DNA, 19 bp, Homo sapiens
  siRNA target sequence for MPDZ (NM_003829.1,5103-5121).
gaaaggccacacatgatga

SEQ ID NO: 134075 - DNA, 19 bp, Homo sapiens
  siRNA target sequence for MPDZ (NM_003829.1,5241-5259).
cgggaaaaggcctaggatt

SEQ ID NO: 134076 - DNA, 19 bp, Homo sapiens
  siRNA target sequence for MPDZ (NM_003829.1,5250-5268).
gcctaggattaagtattgt

SEQ ID NO: 134077 - DNA, 19 bp, Homo sapiens
  siRNA target sequence for MPDZ (NM_003829.1,5251-5269).
cctaggattaagtattgtt

SEQ ID NO: 134078 - DNA, 19 bp, Homo sapiens
  siRNA target sequence for MPDZ (NM_003829.1,5277-5295).
gaaacgatactggagtatt

SEQ ID NO: 134079 - DNA, 19 bp, Homo sapiens
  siRNA target sequence for MPDZ (NM_003829.1,5408-5426).
gttgccgctttgctaaagt

SEQ ID NO: 134080 - DNA, 19 bp, Homo sapiens
  siRNA target sequence for MPDZ (NM_003829.1,5411-5429).
gccgctttgctaaagtgtt

SEQ ID NO: 134081 - DNA, 19 bp, Homo sapiens
  siRNA target sequence for MPDZ (NM_003829.1,5430-5448).
ccctaggcacagtaacctt

SEQ ID NO: 134082 - DNA, 19 bp, Homo sapiens
  siRNA target sequence for MPDZ (NM_003829.1,5445-5463).
ccttggaagttggaagaat

SEQ ID NO: 134083 - DNA, 19 bp, Homo sapiens
  siRNA target sequence for MPDZ (NM_003829.1,5512-5530).
gaatgcattggcatctgaa

SEQ ID NO: 134084 - DNA, 19 bp, Homo sapiens
  siRNA target sequence for MPDZ (NM_003829.1,5538-5556).
gattaagaacagtcgaaat

SEQ ID NO: 134085 - DNA, 19 bp, Homo sapiens
  siRNA target sequence for MPDZ (NM_003829.1,5615-5633).
cttggtgatgtgcctatat

SEQ ID NO: 134086 - DNA, 19 bp, Homo sapiens
  siRNA target sequence for MPDZ (NM_003829.1,5628-5646).
ctatatttattgcaatgat

SEQ ID NO: 134087 - DNA, 19 bp, Homo sapiens
  siRNA target sequence for MPDZ (NM_003829.1,5740-5758).
cacccaagcagttaaccta

SEQ ID NO: 134088 - DNA, 19 bp, Homo sapiens
  siRNA target sequence for MPDZ (NM_003829.1,5768-5786).
gcatctggctccattgaaa

SEQ ID NO: 134089 - DNA, 19 bp, Homo sapiens
  siRNA target sequence for MPDZ (NM_003829.1,5769-5787).
catctggctccattgaaat

SEQ ID NO: 134090 - DNA, 19 bp, Homo sapiens
  siRNA target sequence for MPDZ (NM_003829.1,5903-5921).
ggacctcctcaatgtaagt

SEQ ID NO: 134091 - DNA, 19 bp, Homo sapiens
  siRNA target sequence for MPDZ (NM_003829.1,5906-5924).
cctcctcaatgtaagtcta

SEQ ID NO: 134092 - DNA, 19 bp, Homo sapiens
  siRNA target sequence for MPDZ (NM_003829.1,5907-5925).
ctcctcaatgtaagtctat

SEQ ID NO: 134093 - DNA, 19 bp, Homo sapiens
  siRNA target sequence for MPDZ (NM_003829.1,5909-5927).
cctcaatgtaagtctatta

SEQ ID NO: 134094 - DNA, 19 bp, Homo sapiens
  siRNA target sequence for MPDZ (NM_003829.1,5980-5998).
cagccctcatggagactta

SEQ ID NO: 134095 - DNA, 19 bp, Homo sapiens
  siRNA target sequence for MPDZ (NM_003829.1,5991-6009).
gagacttacccatttatgt

SEQ ID NO: 134096 - DNA, 19 bp, Homo sapiens
  siRNA target sequence for MPDZ (NM_003829.1,5993-6011).
gacttacccatttatgtta

SEQ ID NO: 134097 - DNA, 19 bp, Homo sapiens
  siRNA target sequence for MPDZ (NM_003829.1,5995-6013).
cttacccatttatgttaaa

SEQ ID NO: 134098 - DNA, 19 bp, Homo sapiens
  siRNA target sequence for MPDZ (NM_003829.1,6041-6059).
gaagacggacgtctgaaaa

SEQ ID NO: 134099 - DNA, 19 bp, Homo sapiens
  siRNA target sequence for MPDZ (NM_003829.1,6127-6145).
catccttaaacggacaaaa

SEQ ID NO: 134100 - DNA, 19 bp, Homo sapiens
  siRNA target sequence for MPP2 (NM_005374.2,91-109).
gccgccaccaactctgaaa

SEQ ID NO: 134101 - DNA, 19 bp, Homo sapiens
  siRNA target sequence for MPP2 (NM_005374.2,93-111).
cgccaccaactctgaaact

SEQ ID NO: 134102 - DNA, 19 bp, Homo sapiens
  siRNA target sequence for MPP2 (NM_005374.2,186-204).
ccttcgaggcattatggaa

SEQ ID NO: 134103 - DNA, 19 bp, Homo sapiens
  siRNA target sequence for MPP2 (NM_005374.2,187-205).
cttcgaggcattatggaaa

SEQ ID NO: 134104 - DNA, 19 bp, Homo sapiens
  siRNA target sequence for MPP2 (NM_005374.2,201-219).
ggaaagtcccatagtaaga

SEQ ID NO: 134105 - DNA, 19 bp, Homo sapiens
  siRNA target sequence for MPP2 (NM_005374.2,771-789).
gaaatgtcactttgactat

SEQ ID NO: 134106 - DNA, 19 bp, Homo sapiens
  siRNA target sequence for MPP2 (NM_005374.2,981-999).
ggagctgacaccaaactca

SEQ ID NO: 134107 - DNA, 19 bp, Homo sapiens
  siRNA target sequence for MPP2 (NM_005374.2,1047-1065).
gtatttgaccaccaagaat

SEQ ID NO: 134108 - DNA, 19 bp, Homo sapiens
  siRNA target sequence for MPP2 (NM_005374.2,1078-1096).
cgtcatgagctgctcattt

SEQ ID NO: 134109 - DNA, 19 bp, Homo sapiens
  siRNA target sequence for MPP2 (NM_005374.2,1079-1097).
gtcatgagctgctcattta

SEQ ID NO: 134110 - DNA, 19 bp, Homo sapiens
  siRNA target sequence for MPP2 (NM_005374.2,1168-1186).
cggcgcagcctgaagaaca

SEQ ID NO: 134111 - DNA, 19 bp, Homo sapiens
  siRNA target sequence for MPP2 (NM_005374.2,1169-1187).
ggcgcagcctgaagaacaa

SEQ ID NO: 134112 - DNA, 19 bp, Homo sapiens
  siRNA target sequence for MPP2 (NM_005374.2,1356-1374).
cctgtatggcacacgtatt

SEQ ID NO: 134113 - DNA, 19 bp, Homo sapiens
  siRNA target sequence for MPP2 (NM_005374.2,1611-1629).
gggctacgggcactacttt

SEQ ID NO: 134114 - DNA, 19 bp, Homo sapiens
  siRNA target sequence for MPP2 (NM_005374.2,1613-1631).
gctacgggcactactttga

SEQ ID NO: 134115 - DNA, 19 bp, Homo sapiens
  siRNA target sequence for MPP6 (NM_016447.2,378-396).
ggaattatggagaatccta

SEQ ID NO: 134116 - DNA, 19 bp, Homo sapiens
  siRNA target sequence for MPP6 (NM_016447.2,420-438).
catgagaggctagaagatt

SEQ ID NO: 134117 - DNA, 19 bp, Homo sapiens
  siRNA target sequence for MPP6 (NM_016447.2,428-446).
gctagaagattccaaacta

SEQ ID NO: 134118 - DNA, 19 bp, Homo sapiens
  siRNA target sequence for MPP6 (NM_016447.2,467-485).
cttggaattagtcaatgaa

SEQ ID NO: 134119 - DNA, 19 bp, Homo sapiens
  siRNA target sequence for MPP6 (NM_016447.2,495-513).
gacatcactcctctaataa

SEQ ID NO: 134120 - DNA, 19 bp, Homo sapiens
  siRNA target sequence for MPP6 (NM_016447.2,530-548).
ggcagaattggttggtata

SEQ ID NO: 134121 - DNA, 19 bp, Homo sapiens
  siRNA target sequence for MPP6 (NM_016447.2,539-557).
ggttggtatactcaaagaa

SEQ ID NO: 134122 - DNA, 19 bp, Homo sapiens
  siRNA target sequence for MPP6 (NM_016447.2,573-591).
ctgttggaggcccatgata

SEQ ID NO: 134123 - DNA, 19 bp, Homo sapiens
  siRNA target sequence for MPP6 (NM_016447.2,575-593).
gttggaggcccatgatatt

SEQ ID NO: 134124 - DNA, 19 bp, Homo sapiens
  siRNA target sequence for MPP6 (NM_016447.2,649-667).
ctatcaataatcagttatt

SEQ ID NO: 134125 - DNA, 19 bp, Homo sapiens
  siRNA target sequence for MPP6 (NM_016447.2,653-671).
caataatcagttattacca

SEQ ID NO: 134126 - DNA, 19 bp, Homo sapiens
  siRNA target sequence for MPP6 (NM_016447.2,670-688).
cagtagatgccattcgtat

SEQ ID NO: 134127 - DNA, 19 bp, Homo sapiens
  siRNA target sequence for MPP6 (NM_016447.2,773-791).
ccatgggggaatgatagat

SEQ ID NO: 134128 - DNA, 19 bp, Homo sapiens
  siRNA target sequence for MPP6 (NM_016447.2,839-857).
ccatgaggttggaaataat

SEQ ID NO: 134129 - DNA, 19 bp, Homo sapiens
  siRNA target sequence for MPP6 (NM_016447.2,898-916).
gtgtcaccctaaaaatctt

SEQ ID NO: 134130 - DNA, 19 bp, Homo sapiens
  siRNA target sequence for MPP6 (NM_016447.2,959-977).
gaagtgtcattttgattat

SEQ ID NO: 134131 - DNA, 19 bp, Homo sapiens
  siRNA target sequence for MPP6 (NM_016447.2,981-999).
ccatacaatgacaacctaa

SEQ ID NO: 134132 - DNA, 19 bp, Homo sapiens
  siRNA target sequence for MPP6 (NM_016447.2,982-1000).
catacaatgacaacctaat

SEQ ID NO: 134133 - DNA, 19 bp, Homo sapiens
  siRNA target sequence for MPP6 (NM_016447.2,995-1013).
cctaataccttgcaaagaa

SEQ ID NO: 134134 - DNA, 19 bp, Homo sapiens
  siRNA target sequence for MPP6 (NM_016447.2,1014-1032).
gcaggattgaagttttcca

SEQ ID NO: 134135 - DNA, 19 bp, Homo sapiens
  siRNA target sequence for MPP6 (NM_016447.2,1015-1033).
caggattgaagttttccaa

SEQ ID NO: 134136 - DNA, 19 bp, Homo sapiens
  siRNA target sequence for MPP6 (NM_016447.2,1185-1203).
cctttttgtggaactataa

SEQ ID NO: 134137 - DNA, 19 bp, Homo sapiens
  siRNA target sequence for MPP6 (NM_016447.2,1229-1247).
gtatctcacaaccagaaat

SEQ ID NO: 134138 - DNA, 19 bp, Homo sapiens
  siRNA target sequence for MPP6 (NM_016447.2,1251-1269).
gaatttgatcgtcatgaaa

SEQ ID NO: 134139 - DNA, 19 bp, Homo sapiens
  siRNA target sequence for MPP6 (NM_016447.2,1312-1330).
gaaaaacattagtattgat

SEQ ID NO: 134140 - DNA, 19 bp, Homo sapiens
  siRNA target sequence for MPP6 (NM_016447.2,1367-1385).
caggttcatagtattgaat

SEQ ID NO: 134141 - DNA, 19 bp, Homo sapiens
  siRNA target sequence for MPP6 (NM_016447.2,1377-1395).
gtattgaatcccactagat

SEQ ID NO: 134142 - DNA, 19 bp, Homo sapiens
  siRNA target sequence for MPP6 (NM_016447.2,1382-1400).
gaatcccactagatttgga

SEQ ID NO: 134143 - DNA, 19 bp, Homo sapiens
  siRNA target sequence for MPP6 (NM_016447.2,1398-1416).
ggaactacggtgccattta

SEQ ID NO: 134144 - DNA, 19 bp, Homo sapiens
  siRNA target sequence for MPP6 (NM_016447.2,1446-1464).
gatggccaggcatataagt

SEQ ID NO: 134145 - DNA, 19 bp, Homo sapiens
  siRNA target sequence for MPP6 (NM_016447.2,1450-1468).
gccaggcatataagtttgt

SEQ ID NO: 134146 - DNA, 19 bp, Homo sapiens
  siRNA target sequence for MPP6 (NM_016447.2,1514-1532).
ggaacatggggaatatgaa

SEQ ID NO: 134147 - DNA, 19 bp, Homo sapiens
  siRNA target sequence for MPP6 (NM_016447.2,1546-1564).
gaaccaaaattgattctat

SEQ ID NO: 134148 - DNA, 19 bp, Homo sapiens
  siRNA target sequence for MPP6 (NM_016447.2,1712-1730).
ggtggatgcaggaatcact

SEQ ID NO: 134149 - DNA, 19 bp, Homo sapiens
  siRNA target sequence for MPP6 (NM_016447.2,1713-1731).
gtggatgcaggaatcacta

SEQ ID NO: 134150 - DNA, 19 bp, Homo sapiens
  siRNA target sequence for MPP6 (NM_016447.2,1773-1791).
gaaagtgcacggattcaga

SEQ ID NO: 134151 - DNA, 19 bp, Homo sapiens
  siRNA target sequence for MPP6 (NM_016447.2,1792-1810).
gagcatacaaccactattt

SEQ ID NO: 134152 - DNA, 19 bp, Homo sapiens
  siRNA target sequence for MPP6 (NM_016447.2,1795-1813).
catacaaccactattttga

SEQ ID NO: 134153 - DNA, 19 bp, Homo sapiens
  siRNA target sequence for MPP6 (NM_016447.2,1803-1821).
cactattttgatttgatca

SEQ ID NO: 134154 - DNA, 19 bp, Homo sapiens
  siRNA target sequence for MPP6 (NM_016447.2,1902-1920).
ccaatcagctgggtttact

SEQ ID NO: 134155 - DNA, 19 bp, Homo sapiens
  siRNA target sequence for MPZL1 (NM_003953.3,398-416).
ctactgtgtcgtttttcca

SEQ ID NO: 134156 - DNA, 19 bp, Homo sapiens
  siRNA target sequence for MPZL1 (NM_003953.3,773-791).
gtttgtcaccagttaagca

SEQ ID NO: 134157 - DNA, 19 bp, Homo sapiens
  siRNA target sequence for MPZL1 (NM_003953.3,813-831).
cgacactgagggtcttgta

SEQ ID NO: 134158 - DNA, 19 bp, Homo sapiens
  siRNA target sequence for MPZL1 (NM_003953.3,940-958).
gcggatatccgaaagaatt

SEQ ID NO: 134159 - DNA, 19 bp, Homo sapiens
  siRNA target sequence for MTPN (NM_145808.1,336-354).
gaaacctcttcattatgca

SEQ ID NO: 134160 - DNA, 19 bp, Homo sapiens
  siRNA target sequence for MTPN (NM_145808.1,358-376).
gattgtgggcagcttgaaa

SEQ ID NO: 134161 - DNA, 19 bp, Homo sapiens
  siRNA target sequence for NMNAT1 (NM_022787.2,209-227).
catgcacctcaggttgttt

SEQ ID NO: 134162 - DNA, 19 bp, Homo sapiens
  siRNA target sequence for NMNAT1 (NM_022787.2,259-277).
gaaggtacacagttgtcaa

SEQ ID NO: 134163 - DNA, 19 bp, Homo sapiens
  siRNA target sequence for NMNAT1 (NM_022787.2,331-349).
cctatcaccgggtcatcat

SEQ ID NO: 134164 - DNA, 19 bp, Homo sapiens
  siRNA target sequence for NMNAT1 (NM_022787.2,360-378).
gctaccaagaattctaaat

SEQ ID NO: 134165 - DNA, 19 bp, Homo sapiens
  siRNA target sequence for NMNAT1 (NM_022787.2,602-620).
gctgtgtggggcagattta

SEQ ID NO: 134166 - DNA, 19 bp, Homo sapiens
  siRNA target sequence for NMNAT1 (NM_022787.2,607-625).
gtggggcagatttattgga

SEQ ID NO: 134167 - DNA, 19 bp, Homo sapiens
  siRNA target sequence for NMNAT1 (NM_022787.2,628-646).
cctttgctgttcccaattt

SEQ ID NO: 134168 - DNA, 19 bp, Homo sapiens
  siRNA target sequence for NMNAT1 (NM_022787.2,678-696).
gccaactatgggctcatat

SEQ ID NO: 134169 - DNA, 19 bp, Homo sapiens
  siRNA target sequence for NMNAT1 (NM_022787.2,680-698).
caactatgggctcatatgt

SEQ ID NO: 134170 - DNA, 19 bp, Homo sapiens
  siRNA target sequence for NMNAT1 (NM_022787.2,683-701).
ctatgggctcatatgtgtt

SEQ ID NO: 134171 - DNA, 19 bp, Homo sapiens
  siRNA target sequence for NMNAT1 (NM_022787.2,755-773).
gaaacaccggagcaacatt

SEQ ID NO: 134172 - DNA, 19 bp, Homo sapiens
  siRNA target sequence for NMNAT1 (NM_022787.2,854-872).
ctacttggtaccagatctt

SEQ ID NO: 134173 - DNA, 19 bp, Homo sapiens
  siRNA target sequence for NPHP1 (NM_000272.1,91-109).
ctgaagcaacaggttgata

SEQ ID NO: 134174 - DNA, 19 bp, Homo sapiens
  siRNA target sequence for NPHP1 (NM_000272.1,119-137).
ctgagagccaactgaaaga

SEQ ID NO: 134175 - DNA, 19 bp, Homo sapiens
  siRNA target sequence for NPHP1 (NM_000272.1,176-194).
gatgtatccagttaaagca

SEQ ID NO: 134176 - DNA, 19 bp, Homo sapiens
  siRNA target sequence for NPHP1 (NM_000272.1,250-268).
gcacctgttgcaaactata

SEQ ID NO: 134177 - DNA, 19 bp, Homo sapiens
  siRNA target sequence for NPHP1 (NM_000272.1,251-269).
cacctgttgcaaactataa

SEQ ID NO: 134178 - DNA, 19 bp, Homo sapiens
  siRNA target sequence for NPHP1 (NM_000272.1,280-298).
gaagaggagcatactcttt

SEQ ID NO: 134179 - DNA, 19 bp, Homo sapiens
  siRNA target sequence for NPHP1 (NM_000272.1,328-346).
cttgctgtgacaataagca

SEQ ID NO: 134180 - DNA, 19 bp, Homo sapiens
  siRNA target sequence for NPHP1 (NM_000272.1,485-503).
ggtcaaccggtgaagaata

SEQ ID NO: 134181 - DNA, 19 bp, Homo sapiens
  siRNA target sequence for NPHP1 (NM_000272.1,488-506).
caaccggtgaagaatacat

SEQ ID NO: 134182 - DNA, 19 bp, Homo sapiens
  siRNA target sequence for NPHP1 (NM_000272.1,531-549).
gcaagttggagatcttaca

SEQ ID NO: 134183 - DNA, 19 bp, Homo sapiens
  siRNA target sequence for NPHP1 (NM_000272.1,532-550).
caagttggagatcttacat

SEQ ID NO: 134184 - DNA, 19 bp, Homo sapiens
  siRNA target sequence for NPHP1 (NM_000272.1,592-610).
gatggttggtggatagcta

SEQ ID NO: 134185 - DNA, 19 bp, Homo sapiens
  siRNA target sequence for NPHP1 (NM_000272.1,648-666).
ctacctagagccttatagt

SEQ ID NO: 134186 - DNA, 19 bp, Homo sapiens
  siRNA target sequence for NPHP1 (NM_000272.1,651-669).
cctagagccttatagtgaa

SEQ ID NO: 134187 - DNA, 19 bp, Homo sapiens
  siRNA target sequence for NPHP1 (NM_000272.1,774-792).
ctggagtgctgttcagaaa

SEQ ID NO: 134188 - DNA, 19 bp, Homo sapiens
  siRNA target sequence for NPHP1 (NM_000272.1,809-827).
gcatcttctgtcttgttaa

SEQ ID NO: 134189 - DNA, 19 bp, Homo sapiens
  siRNA target sequence for NPHP1 (NM_000272.1,823-841).
gttaatcatgtctcgtttt

SEQ ID NO: 134190 - DNA, 19 bp, Homo sapiens
  siRNA target sequence for NPHP1 (NM_000272.1,832-850).
gtctcgttttgctacctaa

SEQ ID NO: 134191 - DNA, 19 bp, Homo sapiens
  siRNA target sequence for NPHP1 (NM_000272.1,842-860).
gctacctaatagttctgat

SEQ ID NO: 134192 - DNA, 19 bp, Homo sapiens
  siRNA target sequence for NPHP1 (NM_000272.1,853-871).
gttctgatgcgaaatagga

SEQ ID NO: 134193 - DNA, 19 bp, Homo sapiens
  siRNA target sequence for NPHP1 (NM_000272.1,928-946).
cagagcagaggacgtatat

SEQ ID NO: 134194 - DNA, 19 bp, Homo sapiens
  siRNA target sequence for NPHP1 (NM_000272.1,930-948).
gagcagaggacgtatattt

SEQ ID NO: 134195 - DNA, 19 bp, Homo sapiens
  siRNA target sequence for NPHP1 (NM_000272.1,932-950).
gcagaggacgtatatttct

SEQ ID NO: 134196 - DNA, 19 bp, Homo sapiens
  siRNA target sequence for NPHP1 (NM_000272.1,978-996).
cactgttgatgtgttaact

SEQ ID NO: 134197 - DNA, 19 bp, Homo sapiens
  siRNA target sequence for NPHP1 (NM_000272.1,1053-1071).
ggaagggaatcaatttcga

SEQ ID NO: 134198 - DNA, 19 bp, Homo sapiens
  siRNA target sequence for NPHP1 (NM_000272.1,1158-1176).
gtcgagaccaagtcgtatt

SEQ ID NO: 134199 - DNA, 19 bp, Homo sapiens
  siRNA target sequence for NPHP1 (NM_000272.1,1161-1179).
gagaccaagtcgtatttca

SEQ ID NO: 134200 - DNA, 19 bp, Homo sapiens
  siRNA target sequence for NPHP1 (NM_000272.1,1166-1184).
caagtcgtatttcattgat

SEQ ID NO: 134201 - DNA, 19 bp, Homo sapiens
  siRNA target sequence for NPHP1 (NM_000272.1,1236-1254).
ggttctcagcagacatgta

SEQ ID NO: 134202 - DNA, 19 bp, Homo sapiens
  siRNA target sequence for NPHP1 (NM_000272.1,1249-1267).
catgtacgcctctgtctat

SEQ ID NO: 134203 - DNA, 19 bp, Homo sapiens
  siRNA target sequence for NPHP1 (NM_000272.1,1307-1325).
gagccacatggcaacctaa

SEQ ID NO: 134204 - DNA, 19 bp, Homo sapiens
  siRNA target sequence for NPHP1 (NM_000272.1,1353-1371).
ccaggttactcgcatctta

SEQ ID NO: 134205 - DNA, 19 bp, Homo sapiens
  siRNA target sequence for NPHP1 (NM_000272.1,1357-1375).
gttactcgcatcttaccat

SEQ ID NO: 134206 - DNA, 19 bp, Homo sapiens
  siRNA target sequence for NPHP1 (NM_000272.1,1361-1379).
ctcgcatcttaccatgttt

SEQ ID NO: 134207 - DNA, 19 bp, Homo sapiens
  siRNA target sequence for NPHP1 (NM_000272.1,1418-1436).
ctccagatcttggaatatt

SEQ ID NO: 134208 - DNA, 19 bp, Homo sapiens
  siRNA target sequence for NPHP1 (NM_000272.1,1496-1514).
gtggctgggtgtttcttaa

SEQ ID NO: 134209 - DNA, 19 bp, Homo sapiens
  siRNA target sequence for NPHP1 (NM_000272.1,1537-1555).
cctattccagcaaaaactt

SEQ ID NO: 134210 - DNA, 19 bp, Homo sapiens
  siRNA target sequence for NPHP1 (NM_000272.1,1573-1591).
ggtggtactccttatgaaa

SEQ ID NO: 134211 - DNA, 19 bp, Homo sapiens
  siRNA target sequence for NPHP1 (NM_000272.1,1625-1643).
gagcacacggcagtgtttt

SEQ ID NO: 134212 - DNA, 19 bp, Homo sapiens
  siRNA target sequence for NPHP1 (NM_000272.1,1628-1646).
cacacggcagtgttttcta

SEQ ID NO: 134213 - DNA, 19 bp, Homo sapiens
  siRNA target sequence for NPHP1 (NM_000272.1,1770-1788).
cttgttgatattttatcga

SEQ ID NO: 134214 - DNA, 19 bp, Homo sapiens
  siRNA target sequence for NPHP1 (NM_000272.1,1776-1794).
gatattttatcgacaaatt

SEQ ID NO: 134215 - DNA, 19 bp, Homo sapiens
  siRNA target sequence for NPHP1 (NM_000272.1,1821-1839).
gatgagcttgcaaagtact

SEQ ID NO: 134216 - DNA, 19 bp, Homo sapiens
  siRNA target sequence for NPHP1 (NM_000272.1,1824-1842).
gagcttgcaaagtactgat

SEQ ID NO: 134217 - DNA, 19 bp, Homo sapiens
  siRNA target sequence for NPHP1 (NM_000272.1,1985-2003).
cgtttctcctggtttacca

SEQ ID NO: 134218 - DNA, 19 bp, Homo sapiens
  siRNA target sequence for NPHP1 (NM_000272.1,2075-2093).
ctgcacggtggaaagttat

SEQ ID NO: 134219 - DNA, 19 bp, Homo sapiens
  siRNA target sequence for NPHP1 (NM_000272.1,2077-2095).
gcacggtggaaagttatca

SEQ ID NO: 134220 - DNA, 19 bp, Homo sapiens
  siRNA target sequence for NPHP1 (NM_000272.1,2148-2166).
gtcaccagacggagttcat

SEQ ID NO: 134221 - DNA, 19 bp, Homo sapiens
  siRNA target sequence for NPHP1 (NM_000272.1,2150-2168).
caccagacggagttcatga

SEQ ID NO: 134222 - DNA, 19 bp, Homo sapiens
  siRNA target sequence for NPHP1 (NM_000272.1,2157-2175).
cggagttcatgaacctttt

SEQ ID NO: 134223 - DNA, 19 bp, Homo sapiens
  siRNA target sequence for NPHP4 (NM_015102.2,283-301).
ggatcttcacccaaaacgt

SEQ ID NO: 134224 - DNA, 19 bp, Homo sapiens
  siRNA target sequence for NPHP4 (NM_015102.2,330-348).
cgccagccttggaaggaat

SEQ ID NO: 134225 - DNA, 19 bp, Homo sapiens
  siRNA target sequence for NPHP4 (NM_015102.2,433-451).
gccatctgcgagtgtcttt

SEQ ID NO: 134226 - DNA, 19 bp, Homo sapiens
  siRNA target sequence for NPHP4 (NM_015102.2,442-460).
gagtgtctttctttgatgt

SEQ ID NO: 134227 - DNA, 19 bp, Homo sapiens
  siRNA target sequence for NPHP4 (NM_015102.2,461-479).
cacctaccggcacttcttt

SEQ ID NO: 134228 - DNA, 19 bp, Homo sapiens
  siRNA target sequence for NPHP4 (NM_015102.2,480-498).
gggaggacgtggaaaacca

SEQ ID NO: 134229 - DNA, 19 bp, Homo sapiens
  siRNA target sequence for NPHP4 (NM_015102.2,522-540).
ccgtccaggatcgtcttta

SEQ ID NO: 134230 - DNA, 19 bp, Homo sapiens
  siRNA target sequence for NPHP4 (NM_015102.2,523-541).
cgtccaggatcgtctttaa

SEQ ID NO: 134231 - DNA, 19 bp, Homo sapiens
  siRNA target sequence for NPHP4 (NM_015102.2,524-542).
gtccaggatcgtctttaat

SEQ ID NO: 134232 - DNA, 19 bp, Homo sapiens
  siRNA target sequence for NPHP4 (NM_015102.2,565-583).
ccctaaaccaccctcatat

SEQ ID NO: 134233 - DNA, 19 bp, Homo sapiens
  siRNA target sequence for NPHP4 (NM_015102.2,657-675).
ggaattcttcggatcttca

SEQ ID NO: 134234 - DNA, 19 bp, Homo sapiens
  siRNA target sequence for NPHP4 (NM_015102.2,683-701).
gccggactctcctatctct

SEQ ID NO: 134235 - DNA, 19 bp, Homo sapiens
  siRNA target sequence for NPHP4 (NM_015102.2,771-789).
gaccccgcagagcaaaaca

SEQ ID NO: 134236 - DNA, 19 bp, Homo sapiens
  siRNA target sequence for NPHP4 (NM_015102.2,790-808).
gacacatgaccctcattga

SEQ ID NO: 134237 - DNA, 19 bp, Homo sapiens
  siRNA target sequence for NPHP4 (NM_015102.2,792-810).
cacatgaccctcattgaga

SEQ ID NO: 134238 - DNA, 19 bp, Homo sapiens
  siRNA target sequence for NPHP4 (NM_015102.2,980-998).
ggggcacttggatgactta

SEQ ID NO: 134239 - DNA, 19 bp, Homo sapiens
  siRNA target sequence for NPHP4 (NM_015102.2,981-999).
gggcacttggatgacttat

SEQ ID NO: 134240 - DNA, 19 bp, Homo sapiens
  siRNA target sequence for NPHP4 (NM_015102.2,982-1000).
ggcacttggatgacttatt

SEQ ID NO: 134241 - DNA, 19 bp, Homo sapiens
  siRNA target sequence for NPHP4 (NM_015102.2,1165-1183).
ggccgcaggtcgttgtact

SEQ ID NO: 134242 - DNA, 19 bp, Homo sapiens
  siRNA target sequence for NPHP4 (NM_015102.2,1310-1328).
ggtcggccaccctgcattt

SEQ ID NO: 134243 - DNA, 19 bp, Homo sapiens
  siRNA target sequence for NPHP4 (NM_015102.2,1519-1537).
cgcactgtctggtctacaa

SEQ ID NO: 134244 - DNA, 19 bp, Homo sapiens
  siRNA target sequence for NPHP4 (NM_015102.2,1607-1625).
ctcgctgggctcagaagaa

SEQ ID NO: 134245 - DNA, 19 bp, Homo sapiens
  siRNA target sequence for NPHP4 (NM_015102.2,1758-1776).
gtgggaccagggttgtcaa

SEQ ID NO: 134246 - DNA, 19 bp, Homo sapiens
  siRNA target sequence for NPHP4 (NM_015102.2,1760-1778).
gggaccagggttgtcaatt

SEQ ID NO: 134247 - DNA, 19 bp, Homo sapiens
  siRNA target sequence for NPHP4 (NM_015102.2,1761-1779).
ggaccagggttgtcaattt

SEQ ID NO: 134248 - DNA, 19 bp, Homo sapiens
  siRNA target sequence for NPHP4 (NM_015102.2,1940-1958).
ggtcctggaaacatccatt

SEQ ID NO: 134249 - DNA, 19 bp, Homo sapiens
  siRNA target sequence for NPHP4 (NM_015102.2,1951-1969).
catccattgccgaacagtt

SEQ ID NO: 134250 - DNA, 19 bp, Homo sapiens
  siRNA target sequence for NPHP4 (NM_015102.2,1954-1972).
ccattgccgaacagttaca

SEQ ID NO: 134251 - DNA, 19 bp, Homo sapiens
  siRNA target sequence for NPHP4 (NM_015102.2,1979-1997).
gccgttcacgcctttgcat

SEQ ID NO: 134252 - DNA, 19 bp, Homo sapiens
  siRNA target sequence for NPHP4 (NM_015102.2,1990-2008).
ctttgcatgcccctattgt

SEQ ID NO: 134253 - DNA, 19 bp, Homo sapiens
  siRNA target sequence for NPHP4 (NM_015102.2,2134-2152).
cagaacctgtgacgtttaa

SEQ ID NO: 134254 - DNA, 19 bp, Homo sapiens
  siRNA target sequence for NPHP4 (NM_015102.2,2162-2180).
ggaagaatcagattgtcta

SEQ ID NO: 134255 - DNA, 19 bp, Homo sapiens
  siRNA target sequence for NPHP4 (NM_015102.2,2170-2188).
cagattgtctacaaagcaa

SEQ ID NO: 134256 - DNA, 19 bp, Homo sapiens
  siRNA target sequence for NPHP4 (NM_015102.2,2202-2220).
cagtttcttgcctttagca

SEQ ID NO: 134257 - DNA, 19 bp, Homo sapiens
  siRNA target sequence for NPHP4 (NM_015102.2,2251-2269).
ggccaaagactgtgtattt

SEQ ID NO: 134258 - DNA, 19 bp, Homo sapiens
  siRNA target sequence for NPHP4 (NM_015102.2,2551-2569).
ctgctgccgtccagatgaa

SEQ ID NO: 134259 - DNA, 19 bp, Homo sapiens
  siRNA target sequence for NPHP4 (NM_015102.2,2619-2637).
gaggtcgtggcaactgaat

SEQ ID NO: 134260 - DNA, 19 bp, Homo sapiens
  siRNA target sequence for NPHP4 (NM_015102.2,2757-2775).
ccgtgtgaacagaaagtga

SEQ ID NO: 134261 - DNA, 19 bp, Homo sapiens
  siRNA target sequence for NPHP4 (NM_015102.2,2803-2821).
gatctcgggtcatctcaaa

SEQ ID NO: 134262 - DNA, 19 bp, Homo sapiens
  siRNA target sequence for NPHP4 (NM_015102.2,3221-3239).
gggggtcgccgagttcttt

SEQ ID NO: 134263 - DNA, 19 bp, Homo sapiens
  siRNA target sequence for NPHP4 (NM_015102.2,3223-3241).
gggtcgccgagttctttga

SEQ ID NO: 134264 - DNA, 19 bp, Homo sapiens
  siRNA target sequence for NPHP4 (NM_015102.2,3225-3243).
gtcgccgagttctttgagt

SEQ ID NO: 134265 - DNA, 19 bp, Homo sapiens
  siRNA target sequence for NPHP4 (NM_015102.2,3554-3572).
cagcgcagtgcccactaaa

SEQ ID NO: 134266 - DNA, 19 bp, Homo sapiens
  siRNA target sequence for NPHP4 (NM_015102.2,3833-3851).
ggaaccacgggacatattt

SEQ ID NO: 134267 - DNA, 19 bp, Homo sapiens
  siRNA target sequence for NPHP4 (NM_015102.2,3837-3855).
ccacgggacatatttctga

SEQ ID NO: 134268 - DNA, 19 bp, Homo sapiens
  siRNA target sequence for NPHP4 (NM_015102.2,3838-3856).
cacgggacatatttctgaa

SEQ ID NO: 134269 - DNA, 19 bp, Homo sapiens
  siRNA target sequence for NPHP4 (NM_015102.2,3868-3886).
gtccaagcccggagatcaa

SEQ ID NO: 134270 - DNA, 19 bp, Homo sapiens
  siRNA target sequence for NPHP4 (NM_015102.2,3871-3889).
caagcccggagatcaaaga

SEQ ID NO: 134271 - DNA, 19 bp, Homo sapiens
  siRNA target sequence for NPHP4 (NM_015102.2,4165-4183).
gccgctttgtccatctcaa

SEQ ID NO: 134272 - DNA, 19 bp, Homo sapiens
  siRNA target sequence for NPHP4 (NM_015102.2,4293-4311).
gggaagggtgtcaacaaga

SEQ ID NO: 134273 - DNA, 19 bp, Homo sapiens
  siRNA target sequence for NPHP4 (NM_015102.2,4475-4493).
gatcctgatctacatcaat

SEQ ID NO: 134274 - DNA, 19 bp, Homo sapiens
  siRNA target sequence for NUDT5 (NM_014142.2,426-444).
caagaaccaacggaatctt

SEQ ID NO: 134275 - DNA, 19 bp, Homo sapiens
  siRNA target sequence for NUDT5 (NM_014142.2,453-471).
ggcaaacagtatatcattt

SEQ ID NO: 134276 - DNA, 19 bp, Homo sapiens
  siRNA target sequence for NUDT5 (NM_014142.2,472-490).
cagaggagttaatttcaga

SEQ ID NO: 134277 - DNA, 19 bp, Homo sapiens
  siRNA target sequence for NUDT5 (NM_014142.2,524-542).
catggatcctactggtaaa

SEQ ID NO: 134278 - DNA, 19 bp, Homo sapiens
  siRNA target sequence for NUDT5 (NM_014142.2,527-545).
ggatcctactggtaaaact

SEQ ID NO: 134279 - DNA, 19 bp, Homo sapiens
  siRNA target sequence for NUDT5 (NM_014142.2,528-546).
gatcctactggtaaaacta

SEQ ID NO: 134280 - DNA, 19 bp, Homo sapiens
  siRNA target sequence for NUDT5 (NM_014142.2,620-638).
gcagagaacacttcactat

SEQ ID NO: 134281 - DNA, 19 bp, Homo sapiens
  siRNA target sequence for NUDT5 (NM_014142.2,643-661).
gtatcgttctggtgaaaca

SEQ ID NO: 134282 - DNA, 19 bp, Homo sapiens
  siRNA target sequence for NUDT5 (NM_014142.2,698-716).
ccctgcaggtctcatagat

SEQ ID NO: 134283 - DNA, 19 bp, Homo sapiens
  siRNA target sequence for NUDT5 (NM_014142.2,777-795).
ggggacattgccgaatgtt

SEQ ID NO: 134284 - DNA, 19 bp, Homo sapiens
  siRNA target sequence for NUDT5 (NM_014142.2,779-797).
ggacattgccgaatgttct

SEQ ID NO: 134285 - DNA, 19 bp, Homo sapiens
  siRNA target sequence for NUDT5 (NM_014142.2,793-811).
gttctccagcggtctgtat

SEQ ID NO: 134286 - DNA, 19 bp, Homo sapiens
  siRNA target sequence for NUDT5 (NM_014142.2,816-834).
ccaggcttgtcaaactgta

SEQ ID NO: 134287 - DNA, 19 bp, Homo sapiens
  siRNA target sequence for NUDT5 (NM_014142.2,819-837).
ggcttgtcaaactgtacta

SEQ ID NO: 134288 - DNA, 19 bp, Homo sapiens
  siRNA target sequence for NUDT5 (NM_014142.2,820-838).
gcttgtcaaactgtactat

SEQ ID NO: 134289 - DNA, 19 bp, Homo sapiens
  siRNA target sequence for NUDT5 (NM_014142.2,821-839).
cttgtcaaactgtactata

SEQ ID NO: 134290 - DNA, 19 bp, Homo sapiens
  siRNA target sequence for NUDT5 (NM_014142.2,996-1014).
gacgccagggtctattcct

SEQ ID NO: 134291 - DNA, 19 bp, Homo sapiens
  siRNA target sequence for NUDT5 (NM_014142.2,1013-1031).
ctacgctctagcactgaaa

SEQ ID NO: 134292 - DNA, 19 bp, Homo sapiens
  siRNA target sequence for NUDT5 (NM_014142.2,1016-1034).
cgctctagcactgaaacat

SEQ ID NO: 134293 - DNA, 19 bp, Homo sapiens
  siRNA target sequence for OGT (NM_003605.3,265-283).
gttggcacatcgagaatat

SEQ ID NO: 134294 - DNA, 19 bp, Homo sapiens
  siRNA target sequence for OGT (NM_003605.3,331-349).
gagacaagagccagacaat

SEQ ID NO: 134295 - DNA, 19 bp, Homo sapiens
  siRNA target sequence for OGT (NM_003605.3,346-364).
caatactggtgtgctttta

SEQ ID NO: 134296 - DNA, 19 bp, Homo sapiens
  siRNA target sequence for OGT (NM_003605.3,451-469).
ggcagaagcttattcgaat

SEQ ID NO: 134297 - DNA, 19 bp, Homo sapiens
  siRNA target sequence for OGT (NM_003605.3,452-470).
gcagaagcttattcgaatt

SEQ ID NO: 134298 - DNA, 19 bp, Homo sapiens
  siRNA target sequence for OGT (NM_003605.3,465-483).
cgaatttggggaatgtgta

SEQ ID NO: 134299 - DNA, 19 bp, Homo sapiens
  siRNA target sequence for OGT (NM_003605.3,508-526).
ggcaattgagcattatcga

SEQ ID NO: 134300 - DNA, 19 bp, Homo sapiens
  siRNA target sequence for OGT (NM_003605.3,546-564).
ctgatttcatcgatggtta

SEQ ID NO: 134301 - DNA, 19 bp, Homo sapiens
  siRNA target sequence for OGT (NM_003605.3,601-619).
catggaaggggcagtacaa

SEQ ID NO: 134302 - DNA, 19 bp, Homo sapiens
  siRNA target sequence for OGT (NM_181672.1,247-265).
cagcacagaaccaacgaaa

SEQ ID NO: 134303 - DNA, 19 bp, Homo sapiens
  siRNA target sequence for OGT (NM_181672.1,252-270).
cagaaccaacgaaacgtat

SEQ ID NO: 134304 - DNA, 19 bp, Homo sapiens
  siRNA target sequence for OGT (NM_181672.1,257-275).
ccaacgaaacgtatgcttt

SEQ ID NO: 134305 - DNA, 19 bp, Homo sapiens
  siRNA target sequence for OGT (NM_181672.1,261-279).
cgaaacgtatgctttcctt

SEQ ID NO: 134306 - DNA, 19 bp, Homo sapiens
  siRNA target sequence for OGT (NM_181672.1,749-767).
gcatgttatttgaaagcaa

SEQ ID NO: 134307 - DNA, 19 bp, Homo sapiens
  siRNA target sequence for OGT (NM_181672.1,789-807).
cagtagcttggagtaatct

SEQ ID NO: 134308 - DNA, 19 bp, Homo sapiens
  siRNA target sequence for OGT (NM_181672.1,820-838).
caatgcacaaggggaaatt

SEQ ID NO: 134309 - DNA, 19 bp, Homo sapiens
  siRNA target sequence for OGT (NM_181672.1,840-858).
ggcttgcaattcatcactt

SEQ ID NO: 134310 - DNA, 19 bp, Homo sapiens
  siRNA target sequence for OGT (NM_181672.1,841-859).
gcttgcaattcatcacttt

SEQ ID NO: 134311 - DNA, 19 bp, Homo sapiens
  siRNA target sequence for OGT (NM_181672.1,896-914).
gcttatatcaatttaggaa

SEQ ID NO: 134312 - DNA, 19 bp, Homo sapiens
  siRNA target sequence for OGT (NM_181672.1,897-915).
cttatatcaatttaggaaa

SEQ ID NO: 134313 - DNA, 19 bp, Homo sapiens
  siRNA target sequence for OGT (NM_181672.1,922-940).
gaaagaggcacgcattttt

SEQ ID NO: 134314 - DNA, 19 bp, Homo sapiens
  siRNA target sequence for OGT (NM_181672.1,926-944).
gaggcacgcatttttgaca

SEQ ID NO: 134315 - DNA, 19 bp, Homo sapiens
  siRNA target sequence for OGT (NM_181672.1,943-961).
cagagctgtggcagcttat

SEQ ID NO: 134316 - DNA, 19 bp, Homo sapiens
  siRNA target sequence for OGT (NM_181672.1,945-963).
gagctgtggcagcttatct

SEQ ID NO: 134317 - DNA, 19 bp, Homo sapiens
  siRNA target sequence for OGT (NM_181672.1,962-980).
cttcgtgccctaagtttga

SEQ ID NO: 134318 - DNA, 19 bp, Homo sapiens
  siRNA target sequence for OGT (NM_181672.1,970-988).
cctaagtttgagtccaaat

SEQ ID NO: 134319 - DNA, 19 bp, Homo sapiens
  siRNA target sequence for OGT (NM_181672.1,1003-1021).
cggcaacctggcttgtgta

SEQ ID NO: 134320 - DNA, 19 bp, Homo sapiens
  siRNA target sequence for OGT (NM_181672.1,1004-1022).
ggcaacctggcttgtgtat

SEQ ID NO: 134321 - DNA, 19 bp, Homo sapiens
  siRNA target sequence for OGT (NM_181672.1,1005-1023).
gcaacctggcttgtgtata

SEQ ID NO: 134322 - DNA, 19 bp, Homo sapiens
  siRNA target sequence for OGT (NM_181672.1,1009-1027).
cctggcttgtgtatactat

SEQ ID NO: 134323 - DNA, 19 bp, Homo sapiens
  siRNA target sequence for OGT (NM_181672.1,1116-1134).
ccaatgctctcaaagagaa

SEQ ID NO: 134324 - DNA, 19 bp, Homo sapiens
  siRNA target sequence for OGT (NM_181672.1,1151-1169).
gcagaagattgttataata

SEQ ID NO: 134325 - DNA, 19 bp, Homo sapiens
  siRNA target sequence for OGT (NM_181672.1,1193-1211).
catgcagactctctgaata

SEQ ID NO: 134326 - DNA, 19 bp, Homo sapiens
  siRNA target sequence for OGT (NM_181672.1,1253-1271).
gcagttcgcttgtatcgta

SEQ ID NO: 134327 - DNA, 19 bp, Homo sapiens
  siRNA target sequence for OGT (NM_181672.1,1254-1272).
cagttcgcttgtatcgtaa

SEQ ID NO: 134328 - DNA, 19 bp, Homo sapiens
  siRNA target sequence for OGT (NM_181672.1,1260-1278).
gcttgtatcgtaaagcatt

SEQ ID NO: 134329 - DNA, 19 bp, Homo sapiens
  siRNA target sequence for OGT (NM_181672.1,1261-1279).
cttgtatcgtaaagcatta

SEQ ID NO: 134330 - DNA, 19 bp, Homo sapiens
  siRNA target sequence for OGT (NM_181672.1,1264-1282).
gtatcgtaaagcattagaa

SEQ ID NO: 134331 - DNA, 19 bp, Homo sapiens
  siRNA target sequence for OGT (NM_181672.1,1298-1316).
gctgctgcccattcaaatt

SEQ ID NO: 134332 - DNA, 19 bp, Homo sapiens
  siRNA target sequence for OGT (NM_181672.1,1304-1322).
gcccattcaaatttagcaa

SEQ ID NO: 134333 - DNA, 19 bp, Homo sapiens
  siRNA target sequence for OGT (NM_181672.1,1352-1370).
gaagctctgatgcattata

SEQ ID NO: 134334 - DNA, 19 bp, Homo sapiens
  siRNA target sequence for OGT (NM_181672.1,1400-1418).
gctgatgcctactctaata

SEQ ID NO: 134335 - DNA, 19 bp, Homo sapiens
  siRNA target sequence for OGT (NM_181672.1,1401-1419).
ctgatgcctactctaatat

SEQ ID NO: 134336 - DNA, 19 bp, Homo sapiens
  siRNA target sequence for OGT (NM_181672.1,1454-1472).
ggagccttgcagtgttata

SEQ ID NO: 134337 - DNA, 19 bp, Homo sapiens
  siRNA target sequence for OGT (NM_181672.1,1473-1491).
cgcgtgccatccaaattaa

SEQ ID NO: 134338 - DNA, 19 bp, Homo sapiens
  siRNA target sequence for OGT (NM_181672.1,1474-1492).
gcgtgccatccaaattaat

SEQ ID NO: 134339 - DNA, 19 bp, Homo sapiens
  siRNA target sequence for OGT (NM_181672.1,1554-1572).
cagaagccatagcttctta

SEQ ID NO: 134340 - DNA, 19 bp, Homo sapiens
  siRNA target sequence for OGT (NM_181672.1,1574-1592).
cgcacggctctgaaactta

SEQ ID NO: 134341 - DNA, 19 bp, Homo sapiens
  siRNA target sequence for OGT (NM_181672.1,1596-1614).
ctgattttcctgatgctta

SEQ ID NO: 134342 - DNA, 19 bp, Homo sapiens
  siRNA target sequence for OGT (NM_181672.1,1598-1616).
gattttcctgatgcttatt

SEQ ID NO: 134343 - DNA, 19 bp, Homo sapiens
  siRNA target sequence for OGT (NM_181672.1,1626-1644).
ctcattgcctgcagattgt

SEQ ID NO: 134344 - DNA, 19 bp, Homo sapiens
  siRNA target sequence for OGT (NM_181672.1,1664-1682).
gatgagcgaatgaagaagt

SEQ ID NO: 134345 - DNA, 19 bp, Homo sapiens
  siRNA target sequence for OGT (NM_181672.1,1736-1754).
cctcatcatagtatgctat

SEQ ID NO: 134346 - DNA, 19 bp, Homo sapiens
  siRNA target sequence for OGT (NM_181672.1,1737-1755).
ctcatcatagtatgctata

SEQ ID NO: 134347 - DNA, 19 bp, Homo sapiens
  siRNA target sequence for OGT (NM_181672.1,1771-1789).
cttcaggaaggctattgct

SEQ ID NO: 134348 - DNA, 19 bp, Homo sapiens
  siRNA target sequence for OGT (NM_181672.1,1799-1817).
ggcaacctgtgcttagata

SEQ ID NO: 134349 - DNA, 19 bp, Homo sapiens
  siRNA target sequence for OGT (NM_181672.1,1807-1825).
gtgcttagataagattaat

SEQ ID NO: 134350 - DNA, 19 bp, Homo sapiens
  siRNA target sequence for OGT (NM_181672.1,1809-1827).
gcttagataagattaatgt

SEQ ID NO: 134351 - DNA, 19 bp, Homo sapiens
  siRNA target sequence for OGT (NM_181672.1,1810-1828).
cttagataagattaatgtt

SEQ ID NO: 134352 - DNA, 19 bp, Homo sapiens
  siRNA target sequence for OGT (NM_181672.1,1881-1899).
ggctgcgtgtaggatatgt

SEQ ID NO: 134353 - DNA, 19 bp, Homo sapiens
  siRNA target sequence for OGT (NM_181672.1,1883-1901).
ctgcgtgtaggatatgtga

SEQ ID NO: 134354 - DNA, 19 bp, Homo sapiens
  siRNA target sequence for OGT (NM_181672.1,1929-1947).
ctcaccttatgcagtctat

SEQ ID NO: 134355 - DNA, 19 bp, Homo sapiens
  siRNA target sequence for OGT (NM_181672.1,1933-1951).
ccttatgcagtctattcca

SEQ ID NO: 134356 - DNA, 19 bp, Homo sapiens
  siRNA target sequence for OGT (NM_181672.1,1954-1972).
catgcacaatcctgataaa

SEQ ID NO: 134357 - DNA, 19 bp, Homo sapiens
  siRNA target sequence for OGT (NM_181672.1,2000-2018).
ccagacgatggcacaaact

SEQ ID NO: 134358 - DNA, 19 bp, Homo sapiens
  siRNA target sequence for OGT (NM_181672.1,2001-2019).
cagacgatggcacaaactt

SEQ ID NO: 134359 - DNA, 19 bp, Homo sapiens
  siRNA target sequence for OGT (NM_181672.1,2097-2115).
gcatccatcaggatggaat

SEQ ID NO: 134360 - DNA, 19 bp, Homo sapiens
  siRNA target sequence for OGT (NM_181672.1,2101-2119).
ccatcaggatggaattcat

SEQ ID NO: 134361 - DNA, 19 bp, Homo sapiens
  siRNA target sequence for OGT (NM_181672.1,2151-2169).
gcgctcgaaatgagctttt

SEQ ID NO: 134362 - DNA, 19 bp, Homo sapiens
  siRNA target sequence for OGT (NM_181672.1,2220-2238).
cgagtggtgcgcttttcat

SEQ ID NO: 134363 - DNA, 19 bp, Homo sapiens
  siRNA target sequence for OGT (NM_181672.1,2228-2246).
gcgcttttcatggattata

SEQ ID NO: 134364 - DNA, 19 bp, Homo sapiens
  siRNA target sequence for OGT (NM_181672.1,2229-2247).
cgcttttcatggattatat

SEQ ID NO: 134365 - DNA, 19 bp, Homo sapiens
  siRNA target sequence for OGT (NM_181672.1,2285-2303).
gagcagtattccgagaaat

SEQ ID NO: 134366 - DNA, 19 bp, Homo sapiens
  siRNA target sequence for OGT (NM_181672.1,2295-2313).
ccgagaaattggcttatat

SEQ ID NO: 134367 - DNA, 19 bp, Homo sapiens
  siRNA target sequence for OGT (NM_181672.1,2307-2325).
cttatatgccccacacttt

SEQ ID NO: 134368 - DNA, 19 bp, Homo sapiens
  siRNA target sequence for OGT (NM_181672.1,2372-2390).
gcagtcatcgattttaagt

SEQ ID NO: 134369 - DNA, 19 bp, Homo sapiens
  siRNA target sequence for OGT (NM_181672.1,2410-2428).
caatcggatagttctgaat

SEQ ID NO: 134370 - DNA, 19 bp, Homo sapiens
  siRNA target sequence for OGT (NM_181672.1,2429-2447).
ggcatcgacctcaaagcat

SEQ ID NO: 134371 - DNA, 19 bp, Homo sapiens
  siRNA target sequence for OGT (NM_181672.1,2431-2449).
catcgacctcaaagcattt

SEQ ID NO: 134372 - DNA, 19 bp, Homo sapiens
  siRNA target sequence for OGT (NM_181672.1,2440-2458).
caaagcatttcttgatagt

SEQ ID NO: 134373 - DNA, 19 bp, Homo sapiens
  siRNA target sequence for OGT (NM_181672.1,2518-2536).
cagtaacacagctcttaat

SEQ ID NO: 134374 - DNA, 19 bp, Homo sapiens
  siRNA target sequence for OGT (NM_181672.1,2543-2561).
gttattcctatgaatacta

SEQ ID NO: 134375 - DNA, 19 bp, Homo sapiens
  siRNA target sequence for OGT (NM_181672.1,2584-2602).
gattaaccgaggacagatt

SEQ ID NO: 134376 - DNA, 19 bp, Homo sapiens
  siRNA target sequence for OGT (NM_181672.1,2590-2608).
ccgaggacagattcaaata

SEQ ID NO: 134377 - DNA, 19 bp, Homo sapiens
  siRNA target sequence for OGT (NM_181672.1,2591-2609).
cgaggacagattcaaataa

SEQ ID NO: 134378 - DNA, 19 bp, Homo sapiens
  siRNA target sequence for OGT (NM_181672.1,2594-2612).
ggacagattcaaataacaa

SEQ ID NO: 134379 - DNA, 19 bp, Homo sapiens
  siRNA target sequence for OGT (NM_181672.1,2632-2650).
caatggactggcaactact

SEQ ID NO: 134380 - DNA, 19 bp, Homo sapiens
  siRNA target sequence for OGT (NM_181672.1,2680-2698).
ggaggttccccgtaccatt

SEQ ID NO: 134381 - DNA, 19 bp, Homo sapiens
  siRNA target sequence for OGT (NM_181672.1,2681-2699).
gaggttccccgtaccatta

SEQ ID NO: 134382 - DNA, 19 bp, Homo sapiens
  siRNA target sequence for OGT (NM_181672.1,2683-2701).
ggttccccgtaccattatt

SEQ ID NO: 134383 - DNA, 19 bp, Homo sapiens
  siRNA target sequence for OGT (NM_181672.1,2719-2737).
gtacgggttaccagaagat

SEQ ID NO: 134384 - DNA, 19 bp, Homo sapiens
  siRNA target sequence for OGT (NM_181672.1,2732-2750).
gaagatgccatcgtatact

SEQ ID NO: 134385 - DNA, 19 bp, Homo sapiens
  siRNA target sequence for OGT (NM_181672.1,2743-2761).
cgtatactgtaactttaat

SEQ ID NO: 134386 - DNA, 19 bp, Homo sapiens
  siRNA target sequence for OGT (NM_181672.1,2751-2769).
gtaactttaatcagttgta

SEQ ID NO: 134387 - DNA, 19 bp, Homo sapiens
  siRNA target sequence for OGT (NM_181672.1,2812-2830).
gaagcgtgttcccaatagt

SEQ ID NO: 134388 - DNA, 19 bp, Homo sapiens
  siRNA target sequence for OGT (NM_181672.1,2815-2833).
gcgtgttcccaatagtgta

SEQ ID NO: 134389 - DNA, 19 bp, Homo sapiens
  siRNA target sequence for OGT (NM_181672.1,2836-2854).
ctggctgttgcgttttcca

SEQ ID NO: 134390 - DNA, 19 bp, Homo sapiens
  siRNA target sequence for OGT (NM_181672.1,2856-2874).
cagtaggagaacctaatat

SEQ ID NO: 134391 - DNA, 19 bp, Homo sapiens
  siRNA target sequence for OGT (NM_181672.1,2862-2880).
gagaacctaatattcaaca

SEQ ID NO: 134392 - DNA, 19 bp, Homo sapiens
  siRNA target sequence for OGT (NM_181672.1,2903-2921).
ccccagaaccgtatcattt

SEQ ID NO: 134393 - DNA, 19 bp, Homo sapiens
  siRNA target sequence for OGT (NM_181672.1,2904-2922).
cccagaaccgtatcatttt

SEQ ID NO: 134394 - DNA, 19 bp, Homo sapiens
  siRNA target sequence for OGT (NM_181672.1,2925-2943).
cacctgttgctcctaaaga

SEQ ID NO: 134395 - DNA, 19 bp, Homo sapiens
  siRNA target sequence for OGT (NM_181672.1,2983-3001).
ggacactccactctgtaat

SEQ ID NO: 134396 - DNA, 19 bp, Homo sapiens
  siRNA target sequence for OGT (NM_181672.1,3036-3054).
ggacccccatggtgactat

SEQ ID NO: 134397 - DNA, 19 bp, Homo sapiens
  siRNA target sequence for OGT (NM_181672.1,3097-3115).
cacttgcttaggttgtctt

SEQ ID NO: 134398 - DNA, 19 bp, Homo sapiens
  siRNA target sequence for OGT (NM_181672.1,3111-3129).
gtcttgagcttattgctaa

SEQ ID NO: 134399 - DNA, 19 bp, Homo sapiens
  siRNA target sequence for OGT (NM_181672.1,3160-3178).
gaagctgggaactgatcta

SEQ ID NO: 134400 - DNA, 19 bp, Homo sapiens
  siRNA target sequence for OGT (NM_181672.1,3163-3181).
gctgggaactgatctagaa

SEQ ID NO: 134401 - DNA, 19 bp, Homo sapiens
  siRNA target sequence for OGT (NM_181672.1,3283-3301).
gatgtgggagcattatgca

SEQ ID NO: 134402 - DNA, 19 bp, Homo sapiens
  siRNA target sequence for OGT (NM_181672.1,3322-3340).
catgattaagcctgttgaa

SEQ ID NO: 134403 - DNA, 19 bp, Homo sapiens
  siRNA target sequence for OIP106 (NM_014965.1,361-379).
gagcagctgccccattata

SEQ ID NO: 134404 - DNA, 19 bp, Homo sapiens
  siRNA target sequence for OIP106 (NM_014965.1,364-382).
cagctgccccattataagt

SEQ ID NO: 134405 - DNA, 19 bp, Homo sapiens
  siRNA target sequence for OIP106 (NM_014965.1,366-384).
gctgccccattataagtta

SEQ ID NO: 134406 - DNA, 19 bp, Homo sapiens
  siRNA target sequence for OIP106 (NM_014965.1,367-385).
ctgccccattataagttaa

SEQ ID NO: 134407 - DNA, 19 bp, Homo sapiens
  siRNA target sequence for OIP106 (NM_014965.1,369-387).
gccccattataagttaaga

SEQ ID NO: 134408 - DNA, 19 bp, Homo sapiens
  siRNA target sequence for OIP106 (NM_014965.1,426-444).
ccatacacctctcatttct

SEQ ID NO: 134409 - DNA, 19 bp, Homo sapiens
  siRNA target sequence for OIP106 (NM_014965.1,465-483).
cacaaccgagcaaattgaa

SEQ ID NO: 134410 - DNA, 19 bp, Homo sapiens
  siRNA target sequence for OIP106 (NM_014965.1,467-485).
caaccgagcaaattgaaga

SEQ ID NO: 134411 - DNA, 19 bp, Homo sapiens
  siRNA target sequence for OIP106 (NM_014965.1,475-493).
caaattgaagagacgttaa

SEQ ID NO: 134412 - DNA, 19 bp, Homo sapiens
  siRNA target sequence for OIP106 (NM_014965.1,481-499).
gaagagacgttaaaatact

SEQ ID NO: 134413 - DNA, 19 bp, Homo sapiens
  siRNA target sequence for OIP106 (NM_014965.1,488-506).
cgttaaaatacttcctttt

SEQ ID NO: 134414 - DNA, 19 bp, Homo sapiens
  siRNA target sequence for OIP106 (NM_014965.1,518-536).
gagttggccagatgactaa

SEQ ID NO: 134415 - DNA, 19 bp, Homo sapiens
  siRNA target sequence for OIP106 (NM_014965.1,523-541).
ggccagatgactaagacat

SEQ ID NO: 134416 - DNA, 19 bp, Homo sapiens
  siRNA target sequence for OIP106 (NM_014965.1,524-542).
gccagatgactaagacata

SEQ ID NO: 134417 - DNA, 19 bp, Homo sapiens
  siRNA target sequence for OIP106 (NM_014965.1,557-575).
ctgtcactcggcttcttga

SEQ ID NO: 134418 - DNA, 19 bp, Homo sapiens
  siRNA target sequence for OIP106 (NM_014965.1,613-631).
ggccagtcgttgttgaaga

SEQ ID NO: 134419 - DNA, 19 bp, Homo sapiens
  siRNA target sequence for OIP106 (NM_014965.1,620-638).
cgttgttgaagaagaacaa

SEQ ID NO: 134420 - DNA, 19 bp, Homo sapiens
  siRNA target sequence for OIP106 (NM_014965.1,818-836).
cctcctcagtccagaatta

SEQ ID NO: 134421 - DNA, 19 bp, Homo sapiens
  siRNA target sequence for OIP106 (NM_014965.1,991-1009).
gccaatgtccagattgcta

SEQ ID NO: 134422 - DNA, 19 bp, Homo sapiens
  siRNA target sequence for OIP106 (NM_014965.1,997-1015).
gtccagattgctagtatct

SEQ ID NO: 134423 - DNA, 19 bp, Homo sapiens
  siRNA target sequence for OIP106 (NM_014965.1,1074-1092).
cctgctatcgcaaatagtt

SEQ ID NO: 134424 - DNA, 19 bp, Homo sapiens
  siRNA target sequence for OIP106 (NM_014965.1,1077-1095).
gctatcgcaaatagttgat

SEQ ID NO: 134425 - DNA, 19 bp, Homo sapiens
  siRNA target sequence for OIP106 (NM_014965.1,1078-1096).
ctatcgcaaatagttgatt

SEQ ID NO: 134426 - DNA, 19 bp, Homo sapiens
  siRNA target sequence for OIP106 (NM_014965.1,1082-1100).
cgcaaatagttgatttgca

SEQ ID NO: 134427 - DNA, 19 bp, Homo sapiens
  siRNA target sequence for OIP106 (NM_014965.1,1257-1275).
gaagaacctccggaacaaa

SEQ ID NO: 134428 - DNA, 19 bp, Homo sapiens
  siRNA target sequence for OIP106 (NM_014965.1,1420-1438).
gtctttgagacagtaagaa

SEQ ID NO: 134429 - DNA, 19 bp, Homo sapiens
  siRNA target sequence for OIP106 (NM_014965.1,1504-1522).
cagtcctcggccatgaact

SEQ ID NO: 134430 - DNA, 19 bp, Homo sapiens
  siRNA target sequence for OIP106 (NM_014965.1,1599-1617).
caagaccaacagcatcatt

SEQ ID NO: 134431 - DNA, 19 bp, Homo sapiens
  siRNA target sequence for OIP106 (NM_014965.1,1748-1766).
cggagaggaggttctttga

SEQ ID NO: 134432 - DNA, 19 bp, Homo sapiens
  siRNA target sequence for OIP106 (NM_014965.1,1834-1852).
cccactgagagcatcatgt

SEQ ID NO: 134433 - DNA, 19 bp, Homo sapiens
  siRNA target sequence for OIP106 (NM_014965.1,2085-2103).
ctgccttaacgactttgaa

SEQ ID NO: 134434 - DNA, 19 bp, Homo sapiens
  siRNA target sequence for OIP106 (NM_014965.1,2087-2105).
gccttaacgactttgaaga

SEQ ID NO: 134435 - DNA, 19 bp, Homo sapiens
  siRNA target sequence for OIP106 (NM_014965.1,2114-2132).
caggtgaccacatttctct

SEQ ID NO: 134436 - DNA, 19 bp, Homo sapiens
  siRNA target sequence for OIP106 (NM_014965.1,2272-2290).
gtcacaccaagccttaact

SEQ ID NO: 134437 - DNA, 19 bp, Homo sapiens
  siRNA target sequence for OIP106 (NM_014965.1,2374-2392).
ctggctgagtccttcacta

SEQ ID NO: 134438 - DNA, 19 bp, Homo sapiens
  siRNA target sequence for OIP106 (NM_014965.1,2377-2395).
gctgagtccttcactaaca

SEQ ID NO: 134439 - DNA, 19 bp, Homo sapiens
  siRNA target sequence for OIP106 (NM_014965.1,2599-2617).
ccctcctttgagttcaagt

SEQ ID NO: 134440 - DNA, 19 bp, Homo sapiens
  siRNA target sequence for OIP106 (NM_014965.1,2932-2950).
ggtgggctgcagctcaata

SEQ ID NO: 134441 - DNA, 19 bp, Homo sapiens
  siRNA target sequence for OIP106 (NM_014965.1,2990-3008).
gatctagcatgcagatgaa

SEQ ID NO: 134442 - DNA, 19 bp, Homo sapiens
  siRNA target sequence for OIP5 (NM_007280.1,141-159).
gattgaccaagcttctttt

SEQ ID NO: 134443 - DNA, 19 bp, Homo sapiens
  siRNA target sequence for OIP5 (NM_007280.1,145-163).
gaccaagcttcttttacga

SEQ ID NO: 134444 - DNA, 19 bp, Homo sapiens
  siRNA target sequence for OIP5 (NM_007280.1,372-390).
ggtcttctccagagttaca

SEQ ID NO: 134445 - DNA, 19 bp, Homo sapiens
  siRNA target sequence for OIP5 (NM_007280.1,373-391).
gtcttctccagagttacaa

SEQ ID NO: 134446 - DNA, 19 bp, Homo sapiens
  siRNA target sequence for OIP5 (NM_007280.1,380-398).
ccagagttacaaataacgt

SEQ ID NO: 134447 - DNA, 19 bp, Homo sapiens
  siRNA target sequence for OIP5 (NM_007280.1,414-432).
cttcctagttggcattgaa

SEQ ID NO: 134448 - DNA, 19 bp, Homo sapiens
  siRNA target sequence for OIP5 (NM_007280.1,426-444).
cattgaaggttcactcaaa

SEQ ID NO: 134449 - DNA, 19 bp, Homo sapiens
  siRNA target sequence for OIP5 (NM_007280.1,437-455).
cactcaaaggcagtactta

SEQ ID NO: 134450 - DNA, 19 bp, Homo sapiens
  siRNA target sequence for OIP5 (NM_007280.1,439-457).
ctcaaaggcagtacttaca

SEQ ID NO: 134451 - DNA, 19 bp, Homo sapiens
  siRNA target sequence for OIP5 (NM_007280.1,446-464).
gcagtacttacaacctttt

SEQ ID NO: 134452 - DNA, 19 bp, Homo sapiens
  siRNA target sequence for OIP5 (NM_007280.1,449-467).
gtacttacaaccttttatt

SEQ ID NO: 134453 - DNA, 19 bp, Homo sapiens
  siRNA target sequence for OIP5 (NM_007280.1,479-497).
gtgggattcccgttggttt

SEQ ID NO: 134454 - DNA, 19 bp, Homo sapiens
  siRNA target sequence for OIP5 (NM_007280.1,483-501).
gattcccgttggtttccat

SEQ ID NO: 134455 - DNA, 19 bp, Homo sapiens
  siRNA target sequence for OIP5 (NM_007280.1,488-506).
ccgttggtttccatctgta

SEQ ID NO: 134456 - DNA, 19 bp, Homo sapiens
  siRNA target sequence for OIP5 (NM_007280.1,489-507).
cgttggtttccatctgtat

SEQ ID NO: 134457 - DNA, 19 bp, Homo sapiens
  siRNA target sequence for OIP5 (NM_007280.1,567-585).
ggtgtgctatctcttaaaa

SEQ ID NO: 134458 - DNA, 19 bp, Homo sapiens
  siRNA target sequence for OIP5 (NM_007280.1,605-623).
catcagagatggatattca

SEQ ID NO: 134459 - DNA, 19 bp, Homo sapiens
  siRNA target sequence for OIP5 (NM_007280.1,612-630).
gatggatattcaaaatgtt

SEQ ID NO: 134460 - DNA, 19 bp, Homo sapiens
  siRNA target sequence for OIP5 (NM_007280.1,678-696).
gcacaatcgcttaaaatca

SEQ ID NO: 134461 - DNA, 19 bp, Homo sapiens
  siRNA target sequence for OIP5 (NM_007280.1,681-699).
caatcgcttaaaatcacta

SEQ ID NO: 134462 - DNA, 19 bp, Homo sapiens
  siRNA target sequence for OSTF1 (NM_012383.3,174-192).
gtcaaaccagggcaagtta

SEQ ID NO: 134463 - DNA, 19 bp, Homo sapiens
  siRNA target sequence for OSTF1 (NM_012383.3,180-198).
ccagggcaagttaaagtct

SEQ ID NO: 134464 - DNA, 19 bp, Homo sapiens
  siRNA target sequence for OSTF1 (NM_012383.3,181-199).
cagggcaagttaaagtctt

SEQ ID NO: 134465 - DNA, 19 bp, Homo sapiens
  siRNA target sequence for OSTF1 (NM_012383.3,200-218).
cagagccctgtatacgttt

SEQ ID NO: 134466 - DNA, 19 bp, Homo sapiens
  siRNA target sequence for OSTF1 (NM_012383.3,222-240).
cccagaactccagatgaat

SEQ ID NO: 134467 - DNA, 19 bp, Homo sapiens
  siRNA target sequence for OSTF1 (NM_012383.3,223-241).
ccagaactccagatgaatt

SEQ ID NO: 134468 - DNA, 19 bp, Homo sapiens
  siRNA target sequence for OSTF1 (NM_012383.3,252-270).
gaaggtgatattatctaca

SEQ ID NO: 134469 - DNA, 19 bp, Homo sapiens
  siRNA target sequence for OSTF1 (NM_012383.3,274-292).
ctgacatgagcgataccaa

SEQ ID NO: 134470 - DNA, 19 bp, Homo sapiens
  siRNA target sequence for OSTF1 (NM_012383.3,442-460).
gtgttaatggcttagacaa

SEQ ID NO: 134471 - DNA, 19 bp, Homo sapiens
  siRNA target sequence for OSTF1 (NM_012383.3,522-540).
ctatttactcaaccaaata

SEQ ID NO: 134472 - DNA, 19 bp, Homo sapiens
  siRNA target sequence for OSTF1 (NM_012383.3,529-547).
ctcaaccaaatattgaact

SEQ ID NO: 134473 - DNA, 19 bp, Homo sapiens
  siRNA target sequence for OSTF1 (NM_012383.3,595-613).
ggaagggttatgcagatat

SEQ ID NO: 134474 - DNA, 19 bp, Homo sapiens
  siRNA target sequence for OSTF1 (NM_012383.3,639-657).
gctagaacagacttaagaa

SEQ ID NO: 134475 - DNA, 19 bp, Homo sapiens
  siRNA target sequence for OSTF1 (NM_012383.3,640-658).
ctagaacagacttaagaaa

SEQ ID NO: 134476 - DNA, 19 bp, Homo sapiens
  siRNA target sequence for OSTF1 (NM_012383.3,677-695).
cttcgacatggctaccaat

SEQ ID NO: 134477 - DNA, 19 bp, Homo sapiens
  siRNA target sequence for OSTF1 (NM_012383.3,733-751).
cagatgcagttcgaacatt

SEQ ID NO: 134478 - DNA, 19 bp, Homo sapiens
  siRNA target sequence for OSTF1 (NM_012383.3,738-756).
gcagttcgaacattaagca

SEQ ID NO: 134479 - DNA, 19 bp, Homo sapiens
  siRNA target sequence for OSTF1 (NM_012383.3,764-782).
ggactatctcgatgatgaa

SEQ ID NO: 134480 - DNA, 19 bp, Homo sapiens
  siRNA target sequence for P29 (NM_015484.1,136-154).
gcacctgatgcggaatgaa

SEQ ID NO: 134481 - DNA, 19 bp, Homo sapiens
  siRNA target sequence for P29 (NM_015484.1,145-163).
gcggaatgaagctcgtaaa

SEQ ID NO: 134482 - DNA, 19 bp, Homo sapiens
  siRNA target sequence for P29 (NM_015484.1,146-164).
cggaatgaagctcgtaaat

SEQ ID NO: 134483 - DNA, 19 bp, Homo sapiens
  siRNA target sequence for P29 (NM_015484.1,148-166).
gaatgaagctcgtaaatta

SEQ ID NO: 134484 - DNA, 19 bp, Homo sapiens
  siRNA target sequence for P29 (NM_015484.1,213-231).
caaattgggaagccaaaaa

SEQ ID NO: 134485 - DNA, 19 bp, Homo sapiens
  siRNA target sequence for P29 (NM_015484.1,236-254).
cgtttggagtgggaactaa

SEQ ID NO: 134486 - DNA, 19 bp, Homo sapiens
  siRNA target sequence for P29 (NM_015484.1,375-393).
ctgatctgggattttcaga

SEQ ID NO: 134487 - DNA, 19 bp, Homo sapiens
  siRNA target sequence for P29 (NM_015484.1,405-423).
cccagttacgccagtatca

SEQ ID NO: 134488 - DNA, 19 bp, Homo sapiens
  siRNA target sequence for P29 (NM_015484.1,406-424).
ccagttacgccagtatcat

SEQ ID NO: 134489 - DNA, 19 bp, Homo sapiens
  siRNA target sequence for P29 (NM_015484.1,426-444).
ggttgaccaagcagatcaa

SEQ ID NO: 134490 - DNA, 19 bp, Homo sapiens
  siRNA target sequence for P29 (NM_015484.1,447-465).
ctgacatggaaacatatga

SEQ ID NO: 134491 - DNA, 19 bp, Homo sapiens
  siRNA target sequence for P29 (NM_015484.1,562-580).
ggtcatagatctggaaaaa

SEQ ID NO: 134492 - DNA, 19 bp, Homo sapiens
  siRNA target sequence for P29 (NM_015484.1,606-624).
gccggagacgtccttataa

SEQ ID NO: 134493 - DNA, 19 bp, Homo sapiens
  siRNA target sequence for P29 (NM_015484.1,607-625).
ccggagacgtccttataat

SEQ ID NO: 134494 - DNA, 19 bp, Homo sapiens
  siRNA target sequence for P29 (NM_015484.1,609-627).
ggagacgtccttataatga

SEQ ID NO: 134495 - DNA, 19 bp, Homo sapiens
  siRNA target sequence for P29 (NM_015484.1,610-628).
gagacgtccttataatgat

SEQ ID NO: 134496 - DNA, 19 bp, Homo sapiens
  siRNA target sequence for P29 (NM_015484.1,612-630).
gacgtccttataatgatga

SEQ ID NO: 134497 - DNA, 19 bp, Homo sapiens
  siRNA target sequence for P29 (NM_015484.1,632-650).
gcagatatcgactacatta

SEQ ID NO: 134498 - DNA, 19 bp, Homo sapiens
  siRNA target sequence for P29 (NM_015484.1,633-651).
cagatatcgactacattaa

SEQ ID NO: 134499 - DNA, 19 bp, Homo sapiens
  siRNA target sequence for P29 (NM_015484.1,657-675).
ggaatgccaaattcaacaa

SEQ ID NO: 134500 - DNA, 19 bp, Homo sapiens
  siRNA target sequence for PACSIN1 (NM_020804.1,419-437).
cgagaaaggcccacagtat

SEQ ID NO: 134501 - DNA, 19 bp, Homo sapiens
  siRNA target sequence for PACSIN1 (NM_020804.1,455-473).
ctggggtgccataatgaca

SEQ ID NO: 134502 - DNA, 19 bp, Homo sapiens
  siRNA target sequence for PACSIN1 (NM_020804.1,683-701).
ctaccatttggcttgcaaa

SEQ ID NO: 134503 - DNA, 19 bp, Homo sapiens
  siRNA target sequence for PACSIN1 (NM_020804.1,820-838).
cacaggagaagtatgagaa

SEQ ID NO: 134504 - DNA, 19 bp, Homo sapiens
  siRNA target sequence for PDHX (NM_003477.1,195-213).
cggggtgatcccattaaga

SEQ ID NO: 134505 - DNA, 19 bp, Homo sapiens
  siRNA target sequence for PDHX (NM_003477.1,196-214).
ggggtgatcccattaagat

SEQ ID NO: 134506 - DNA, 19 bp, Homo sapiens
  siRNA target sequence for PDHX (NM_003477.1,197-215).
gggtgatcccattaagata

SEQ ID NO: 134507 - DNA, 19 bp, Homo sapiens
  siRNA target sequence for PDHX (NM_003477.1,297-315).
ggagatgcattatgtgaaa

SEQ ID NO: 134508 - DNA, 19 bp, Homo sapiens
  siRNA target sequence for PDHX (NM_003477.1,326-344).
caaagctgtggttacctta

SEQ ID NO: 134509 - DNA, 19 bp, Homo sapiens
  siRNA target sequence for PDHX (NM_003477.1,361-379).
gaatcttggccaaaatcgt

SEQ ID NO: 134510 - DNA, 19 bp, Homo sapiens
  siRNA target sequence for PDHX (NM_003477.1,407-425).
gctaggttcactaattggt

SEQ ID NO: 134511 - DNA, 19 bp, Homo sapiens
  siRNA target sequence for PDHX (NM_003477.1,412-430).
gttcactaattggtttgat

SEQ ID NO: 134512 - DNA, 19 bp, Homo sapiens
  siRNA target sequence for PDHX (NM_003477.1,415-433).
cactaattggtttgatagt

SEQ ID NO: 134513 - DNA, 19 bp, Homo sapiens
  siRNA target sequence for PDHX (NM_003477.1,447-465).
gattggaaacatgttgaaa

SEQ ID NO: 134514 - DNA, 19 bp, Homo sapiens
  siRNA target sequence for PDHX (NM_003477.1,483-501).
cctccaccaccagtttcaa

SEQ ID NO: 134515 - DNA, 19 bp, Homo sapiens
  siRNA target sequence for PDHX (NM_003477.1,547-565).
ctgtcaagaaggaacacat

SEQ ID NO: 134516 - DNA, 19 bp, Homo sapiens
  siRNA target sequence for PDHX (NM_003477.1,592-610).
gtccagctgcccgcaatat

SEQ ID NO: 134517 - DNA, 19 bp, Homo sapiens
  siRNA target sequence for PDHX (NM_003477.1,595-613).
cagctgcccgcaatattct

SEQ ID NO: 134518 - DNA, 19 bp, Homo sapiens
  siRNA target sequence for PDHX (NM_003477.1,602-620).
ccgcaatattctggaaaaa

SEQ ID NO: 134519 - DNA, 19 bp, Homo sapiens
  siRNA target sequence for PDHX (NM_003477.1,689-707).
caaacttgtccagttgaaa

SEQ ID NO: 134520 - DNA, 19 bp, Homo sapiens
  siRNA target sequence for PDHX (NM_003477.1,693-711).
cttgtccagttgaaacaaa

SEQ ID NO: 134521 - DNA, 19 bp, Homo sapiens
  siRNA target sequence for PDHX (NM_003477.1,813-831).
gtgatcccaccagtatcaa

SEQ ID NO: 134522 - DNA, 19 bp, Homo sapiens
  siRNA target sequence for PDHX (NM_003477.1,815-833).
gatcccaccagtatcaact

SEQ ID NO: 134523 - DNA, 19 bp, Homo sapiens
  siRNA target sequence for PDHX (NM_003477.1,900-918).
gccaagagattaactgaat

SEQ ID NO: 134524 - DNA, 19 bp, Homo sapiens
  siRNA target sequence for PDHX (NM_003477.1,902-920).
caagagattaactgaatct

SEQ ID NO: 134525 - DNA, 19 bp, Homo sapiens
  siRNA target sequence for PDHX (NM_003477.1,930-948).
gtacctcatgcatatgcta

SEQ ID NO: 134526 - DNA, 19 bp, Homo sapiens
  siRNA target sequence for PDHX (NM_003477.1,958-976).
gtgaccttggagctgtttt

SEQ ID NO: 134527 - DNA, 19 bp, Homo sapiens
  siRNA target sequence for PDHX (NM_003477.1,960-978).
gaccttggagctgttttaa

SEQ ID NO: 134528 - DNA, 19 bp, Homo sapiens
  siRNA target sequence for PDHX (NM_003477.1,985-1003).
ggcaagatctggtcaaaga

SEQ ID NO: 134529 - DNA, 19 bp, Homo sapiens
  siRNA target sequence for PDHX (NM_003477.1,1018-1036).
cagtaaatgattttatcat

SEQ ID NO: 134530 - DNA, 19 bp, Homo sapiens
  siRNA target sequence for PDHX (NM_003477.1,1045-1063).
cagctgttacccttaaaca

SEQ ID NO: 134531 - DNA, 19 bp, Homo sapiens
  siRNA target sequence for PDHX (NM_003477.1,1047-1065).
gctgttacccttaaacaaa

SEQ ID NO: 134532 - DNA, 19 bp, Homo sapiens
  siRNA target sequence for PDHX (NM_003477.1,1048-1066).
ctgttacccttaaacaaat

SEQ ID NO: 134533 - DNA, 19 bp, Homo sapiens
  siRNA target sequence for PDHX (NM_003477.1,1153-1171).
gcttacttactccaatcat

SEQ ID NO: 134534 - DNA, 19 bp, Homo sapiens
  siRNA target sequence for PDHX (NM_003477.1,1154-1172).
cttacttactccaatcata

SEQ ID NO: 134535 - DNA, 19 bp, Homo sapiens
  siRNA target sequence for PDHX (NM_003477.1,1200-1218).
gaaattgctgactctgtaa

SEQ ID NO: 134536 - DNA, 19 bp, Homo sapiens
  siRNA target sequence for PDHX (NM_003477.1,1211-1229).
ctctgtaaaggctctatca

SEQ ID NO: 134537 - DNA, 19 bp, Homo sapiens
  siRNA target sequence for PDHX (NM_003477.1,1269-1287).
caaggaggatcttttagta

SEQ ID NO: 134538 - DNA, 19 bp, Homo sapiens
  siRNA target sequence for PDHX (NM_003477.1,1304-1322).
gtttggcatcgacgaattt

SEQ ID NO: 134539 - DNA, 19 bp, Homo sapiens
  siRNA target sequence for PDHX (NM_003477.1,1316-1334).
cgaatttactgcagtgatt

SEQ ID NO: 134540 - DNA, 19 bp, Homo sapiens
  siRNA target sequence for PDHX (NM_003477.1,1422-1440).
cagcagcgccagctcataa

SEQ ID NO: 134541 - DNA, 19 bp, Homo sapiens
  siRNA target sequence for PDHX (NM_003477.1,1424-1442).
gcagcgccagctcataaca

SEQ ID NO: 134542 - DNA, 19 bp, Homo sapiens
  siRNA target sequence for PDHX (NM_003477.1,1436-1454).
cataacagtcacaatgtca

SEQ ID NO: 134543 - DNA, 19 bp, Homo sapiens
  siRNA target sequence for PDHX (NM_003477.1,1484-1502).
ggcaaccaggtttcttaaa

SEQ ID NO: 134544 - DNA, 19 bp, Homo sapiens
  siRNA target sequence for PDHX (NM_003477.1,1485-1503).
gcaaccaggtttcttaaaa

SEQ ID NO: 134545 - DNA, 19 bp, Homo sapiens
  siRNA target sequence for PEA15 (NM_003768.2,218-236).
caagacctgaccaacaaca

SEQ ID NO: 134546 - DNA, 19 bp, Homo sapiens
  siRNA target sequence for PEA15 (NM_003768.2,235-253).
catcacccttgaagatcta

SEQ ID NO: 134547 - DNA, 19 bp, Homo sapiens
  siRNA target sequence for PEA15 (NM_003768.2,238-256).
cacccttgaagatctagaa

SEQ ID NO: 134548 - DNA, 19 bp, Homo sapiens
  siRNA target sequence for PEA15 (NM_003768.2,240-258).
cccttgaagatctagaaca

SEQ ID NO: 134549 - DNA, 19 bp, Homo sapiens
  siRNA target sequence for PEA15 (NM_003768.2,317-335).
ggcagtgcctggtttagct

SEQ ID NO: 134550 - DNA, 19 bp, Homo sapiens
  siRNA target sequence for PEA15 (NM_003768.2,318-336).
gcagtgcctggtttagctt

SEQ ID NO: 134551 - DNA, 19 bp, Homo sapiens
  siRNA target sequence for PEA15 (NM_003768.2,408-426).
gtcctgacctactcactat

SEQ ID NO: 134552 - DNA, 19 bp, Homo sapiens
  siRNA target sequence for PEX12 (NM_000286.1,616-634).
ggtagcacaggacagttta

SEQ ID NO: 134553 - DNA, 19 bp, Homo sapiens
  siRNA target sequence for PEX12 (NM_000286.1,617-635).
gtagcacaggacagtttaa

SEQ ID NO: 134554 - DNA, 19 bp, Homo sapiens
  siRNA target sequence for PEX12 (NM_000286.1,620-638).
gcacaggacagtttaatga

SEQ ID NO: 134555 - DNA, 19 bp, Homo sapiens
  siRNA target sequence for PEX12 (NM_000286.1,712-730).
gtggaggtggtttgatgaa

SEQ ID NO: 134556 - DNA, 19 bp, Homo sapiens
  siRNA target sequence for PEX12 (NM_000286.1,733-751).
ctttactctgctagatctt

SEQ ID NO: 134557 - DNA, 19 bp, Homo sapiens
  siRNA target sequence for PEX12 (NM_000286.1,780-798).
ccagtgcctcattttctga

SEQ ID NO: 134558 - DNA, 19 bp, Homo sapiens
  siRNA target sequence for PEX12 (NM_000286.1,808-826).
cggcttaaagagaattgta

SEQ ID NO: 134559 - DNA, 19 bp, Homo sapiens
  siRNA target sequence for PEX12 (NM_000286.1,914-932).
cttccctatctgaaagtga

SEQ ID NO: 134560 - DNA, 19 bp, Homo sapiens
  siRNA target sequence for PEX12 (NM_000286.1,967-985).
ggatgaatattctattcat

SEQ ID NO: 134561 - DNA, 19 bp, Homo sapiens
  siRNA target sequence for PEX12 (NM_000286.1,993-1011).
cttcccgctggaaacgatt

SEQ ID NO: 134562 - DNA, 19 bp, Homo sapiens
  siRNA target sequence for PEX12 (NM_000286.1,996-1014).
cccgctggaaacgatttta

SEQ ID NO: 134563 - DNA, 19 bp, Homo sapiens
  siRNA target sequence for PEX12 (NM_000286.1,998-1016).
cgctggaaacgattttaca

SEQ ID NO: 134564 - DNA, 19 bp, Homo sapiens
  siRNA target sequence for PEX12 (NM_000286.1,1028-1046).
gcagcctacccatttgtga

SEQ ID NO: 134565 - DNA, 19 bp, Homo sapiens
  siRNA target sequence for PEX12 (NM_000286.1,1065-1083).
ggtttcttgtacaacaact

SEQ ID NO: 134566 - DNA, 19 bp, Homo sapiens
  siRNA target sequence for PEX12 (NM_000286.1,1066-1084).
gtttcttgtacaacaactt

SEQ ID NO: 134567 - DNA, 19 bp, Homo sapiens
  siRNA target sequence for PEX12 (NM_000286.1,1152-1170).
gactgacagttcaggatat

SEQ ID NO: 134568 - DNA, 19 bp, Homo sapiens
  siRNA target sequence for PEX12 (NM_000286.1,1156-1174).
gacagttcaggatatacaa

SEQ ID NO: 134569 - DNA, 19 bp, Homo sapiens
  siRNA target sequence for PEX12 (NM_000286.1,1218-1236).
cagccaggagtgttagtga

SEQ ID NO: 134570 - DNA, 19 bp, Homo sapiens
  siRNA target sequence for PEX12 (NM_000286.1,1224-1242).
ggagtgttagtgagaagat

SEQ ID NO: 134571 - DNA, 19 bp, Homo sapiens
  siRNA target sequence for PEX12 (NM_000286.1,1225-1243).
gagtgttagtgagaagata

SEQ ID NO: 134572 - DNA, 19 bp, Homo sapiens
  siRNA target sequence for PEX12 (NM_000286.1,1227-1245).
gtgttagtgagaagataaa

SEQ ID NO: 134573 - DNA, 19 bp, Homo sapiens
  siRNA target sequence for PEX12 (NM_000286.1,1229-1247).
gttagtgagaagataaact

SEQ ID NO: 134574 - DNA, 19 bp, Homo sapiens
  siRNA target sequence for PEX12 (NM_000286.1,1355-1373).
caagaaaccatcaagtcat

SEQ ID NO: 134575 - DNA, 19 bp, Homo sapiens
  siRNA target sequence for PEX12 (NM_000286.1,1398-1416).
cacctgtacacctagacta

SEQ ID NO: 134576 - DNA, 19 bp, Homo sapiens
  siRNA target sequence for PEX12 (NM_000286.1,1403-1421).
gtacacctagactataact

SEQ ID NO: 134577 - DNA, 19 bp, Homo sapiens
  siRNA target sequence for PEX12 (NM_000286.1,1430-1448).
cccctcttacccaaaatga

SEQ ID NO: 134578 - DNA, 19 bp, Homo sapiens
  siRNA target sequence for PEX12 (NM_000286.1,1470-1488).
gtaaaacccgggtgaatga

SEQ ID NO: 134579 - DNA, 19 bp, Homo sapiens
  siRNA target sequence for PEX12 (NM_000286.1,1476-1494).
cccgggtgaatgatactgt

SEQ ID NO: 134580 - DNA, 19 bp, Homo sapiens
  siRNA target sequence for PEX12 (NM_000286.1,1501-1519).
cacctctggctatgtgttt

SEQ ID NO: 134581 - DNA, 19 bp, Homo sapiens
  siRNA target sequence for PEX12 (NM_000286.1,1575-1593).
gttatccaacagaagtaca

SEQ ID NO: 134582 - DNA, 19 bp, Homo sapiens
  siRNA target sequence for PEX12 (NM_000286.1,1586-1604).
gaagtacaacatctgatta

SEQ ID NO: 134583 - DNA, 19 bp, Homo sapiens
  siRNA target sequence for PFDN4 (NM_002623.2,47-65).
ctttcgaagatcaacaaaa

SEQ ID NO: 134584 - DNA, 19 bp, Homo sapiens
  siRNA target sequence for PFDN4 (NM_002623.2,51-69).
cgaagatcaacaaaagata

SEQ ID NO: 134585 - DNA, 19 bp, Homo sapiens
  siRNA target sequence for PFDN4 (NM_002623.2,72-90).
caaatttgcacggaataca

SEQ ID NO: 134586 - DNA, 19 bp, Homo sapiens
  siRNA target sequence for PFDN4 (NM_002623.2,79-97).
gcacggaatacaagtagaa

SEQ ID NO: 134587 - DNA, 19 bp, Homo sapiens
  siRNA target sequence for PFDN4 (NM_002623.2,82-100).
cggaatacaagtagaatca

SEQ ID NO: 134588 - DNA, 19 bp, Homo sapiens
  siRNA target sequence for PFDN4 (NM_002623.2,84-102).
gaatacaagtagaatcaca

SEQ ID NO: 134589 - DNA, 19 bp, Homo sapiens
  siRNA target sequence for PFDN4 (NM_002623.2,187-205).
gattgcttaatgatacctt

SEQ ID NO: 134590 - DNA, 19 bp, Homo sapiens
  siRNA target sequence for PFDN4 (NM_002623.2,191-209).
gcttaatgataccttatca

SEQ ID NO: 134591 - DNA, 19 bp, Homo sapiens
  siRNA target sequence for PFDN4 (NM_002623.2,198-216).
gataccttatcaaattggt

SEQ ID NO: 134592 - DNA, 19 bp, Homo sapiens
  siRNA target sequence for PFDN4 (NM_002623.2,225-243).
cattagccattctcaagaa

SEQ ID NO: 134593 - DNA, 19 bp, Homo sapiens
  siRNA target sequence for PFDN4 (NM_002623.2,289-307).
gaaattgacgccttagaat

SEQ ID NO: 134594 - DNA, 19 bp, Homo sapiens
  siRNA target sequence for PFDN4 (NM_002623.2,369-387).
cgggagcaacataaacctt

SEQ ID NO: 134595 - DNA, 19 bp, Homo sapiens
  siRNA target sequence for PGLYRPIalpha (NM_052891.1,498-516).
cacctgtcgcccaggtata

SEQ ID NO: 134596 - DNA, 19 bp, Homo sapiens
  siRNA target sequence for PGLYRPIalpha (NM_052891.1,500-518).
cctgtcgcccaggtatatt

SEQ ID NO: 134597 - DNA, 19 bp, Homo sapiens
  siRNA target sequence for PGLYRPIalpha (NM_052891.1,582-600).
gtttgccccaacatcatca

SEQ ID NO: 134598 - DNA, 19 bp, Homo sapiens
  siRNA target sequence for PGLYRPIalpha (NM_052891.1,624-642).
gagacacactgccctaaaa

SEQ ID NO: 134599 - DNA, 19 bp, Homo sapiens
  siRNA target sequence for PGLYRPIalpha (NM_052891.1,644-662).
gaacctcccagccaaatat

SEQ ID NO: 134600 - DNA, 19 bp, Homo sapiens
  siRNA target sequence for PGLYRPIalpha (NM_052891.1,684-702).
ggcacaagctgcactgtat

SEQ ID NO: 134601 - DNA, 19 bp, Homo sapiens
  siRNA target sequence for PGLYRPIalpha (NM_052891.1,716-734).
gactgtcgtccgaaacata

SEQ ID NO: 134602 - DNA, 19 bp, Homo sapiens
  siRNA target sequence for PGLYRPIalpha (NM_052891.1,718-736).
ctgtcgtccgaaacataca

SEQ ID NO: 134603 - DNA, 19 bp, Homo sapiens
  siRNA target sequence for PGLYRPIalpha (NM_052891.1,720-738).
gtcgtccgaaacatacagt

SEQ ID NO: 134604 - DNA, 19 bp, Homo sapiens
  siRNA target sequence for PGLYRPIalpha (NM_052891.1,746-764).
catggacacacggaacttt

SEQ ID NO: 134605 - DNA, 19 bp, Homo sapiens
  siRNA target sequence for PGLYRPIalpha (NM_052891.1,749-767).
ggacacacggaacttttgt

SEQ ID NO: 134606 - DNA, 19 bp, Homo sapiens
  siRNA target sequence for PGLYRPIalpha (NM_052891.1,797-815).
ggatggtggcgtgtatgaa

SEQ ID NO: 134607 - DNA, 19 bp, Homo sapiens
  siRNA target sequence for PGLYRPIalpha (NM_052891.1,833-851).
ccaaggctctcacacttat

SEQ ID NO: 134608 - DNA, 19 bp, Homo sapiens
  siRNA target sequence for PGLYRPIalpha (NM_052891.1,837-855).
ggctctcacacttatggat

SEQ ID NO: 134609 - DNA, 19 bp, Homo sapiens
  siRNA target sequence for PGLYRPIalpha (NM_052891.1,860-878).
cgatattgccctaggaatt

SEQ ID NO: 134610 - DNA, 19 bp, Homo sapiens
  siRNA target sequence for PGLYRPIbeta (NM_020393.1,179-197).
gaggggctccagtacctat

SEQ ID NO: 134611 - DNA, 19 bp, Homo sapiens
  siRNA target sequence for PGLYRPIbeta (NM_020393.1,181-199).
ggggctccagtacctattt

SEQ ID NO: 134612 - DNA, 19 bp, Homo sapiens
  siRNA target sequence for PGLYRPIbeta (NM_020393.1,183-201).
ggctccagtacctatttga

SEQ ID NO: 134613 - DNA, 19 bp, Homo sapiens
  siRNA target sequence for PGLYRPIbeta (NM_020393.1,185-203).
ctccagtacctatttgaga

SEQ ID NO: 134614 - DNA, 19 bp, Homo sapiens
  siRNA target sequence for PGLYRPIbeta (NM_020393.1,289-307).
gctgaccacgccagtgaat

SEQ ID NO: 134615 - DNA, 19 bp, Homo sapiens
  siRNA target sequence for PGLYRPIbeta (NM_020393.1,574-592).
gtcggccatggaaaaccta

SEQ ID NO: 134616 - DNA, 19 bp, Homo sapiens
  siRNA target sequence for PGLYRPIbeta (NM_020393.1,576-594).
cggccatggaaaacctaat

SEQ ID NO: 134617 - DNA, 19 bp, Homo sapiens
  siRNA target sequence for PGLYRPIbeta (NM_020393.1,616-634).
ccacctgtcatccagttat

SEQ ID NO: 134618 - DNA, 19 bp, Homo sapiens
  siRNA target sequence for PGLYRPIbeta (NM_020393.1,760-778).
gactctcccagcgaagtat

SEQ ID NO: 134619 - DNA, 19 bp, Homo sapiens
  siRNA target sequence for PGLYRPIbeta (NM_020393.1,847-865).
catccagtctttctacata

SEQ ID NO: 134620 - DNA, 19 bp, Homo sapiens
  siRNA target sequence for PGLYRPIbeta (NM_020393.1,877-895).
gtcatgcgacattggttat

SEQ ID NO: 134621 - DNA, 19 bp, Homo sapiens
  siRNA target sequence for PGLYRPIbeta (NM_020393.1,879-897).
catgcgacattggttataa

SEQ ID NO: 134622 - DNA, 19 bp, Homo sapiens
  siRNA target sequence for PGLYRPIbeta (NM_020393.1,882-900).
gcgacattggttataactt

SEQ ID NO: 134623 - DNA, 19 bp, Homo sapiens
  siRNA target sequence for PGLYRPIbeta (NM_020393.1,909-927).
gccaggatggcgccattta

SEQ ID NO: 134624 - DNA, 19 bp, Homo sapiens
  siRNA target sequence for PGLYRPIbeta (NM_020393.1,964-982).
ccctggctacgatgacatt

SEQ ID NO: 134625 - DNA, 19 bp, Homo sapiens
  siRNA target sequence for PGLYRPIbeta (NM_020393.1,1003-1021).
gggcaccttcacaggtata

SEQ ID NO: 134626 - DNA, 19 bp, Homo sapiens
  siRNA target sequence for PGRP-L (NM_052890.2,151-169).
gatcctactcggattgcta

SEQ ID NO: 134627 - DNA, 19 bp, Homo sapiens
  siRNA target sequence for PGRP-L (NM_052890.2,607-625).
ggccattgctccagatgta

SEQ ID NO: 134628 - DNA, 19 bp, Homo sapiens
  siRNA target sequence for PGRP-L (NM_052890.2,670-688).
caccactgcagatattgga

SEQ ID NO: 134629 - DNA, 19 bp, Homo sapiens
  siRNA target sequence for PGRP-L (NM_052890.2,897-915).
ggacctttacgcttttgga

SEQ ID NO: 134630 - DNA, 19 bp, Homo sapiens
  siRNA target sequence for PGRP-L (NM_052890.2,1226-1244).
gccaatgctaccaaggaat

SEQ ID NO: 134631 - DNA, 19 bp, Homo sapiens
  siRNA target sequence for PGRP-L (NM_052890.2,1334-1352).
ctgccgctgggattcttgt

SEQ ID NO: 134632 - DNA, 19 bp, Homo sapiens
  siRNA target sequence for PGRP-L (NM_052890.2,1571-1589).
gccatagtgggcaactaca

SEQ ID NO: 134633 - DNA, 19 bp, Homo sapiens
  siRNA target sequence for PGRP-L (NM_052890.2,1903-1921).
cgtctattcaggaaaccta

SEQ ID NO: 134634 - DNA, 19 bp, Homo sapiens
  siRNA target sequence for PHC2 (NM_004427.2,377-395).
ctcagggaacggaaactct

SEQ ID NO: 134635 - DNA, 19 bp, Homo sapiens
  siRNA target sequence for PHC2 (NM_004427.2,420-438).
ccccagaatggtgagaata

SEQ ID NO: 134636 - DNA, 19 bp, Homo sapiens
  siRNA target sequence for PHC2 (NM_004427.2,425-443).
gaatggtgagaataaacca

SEQ ID NO: 134637 - DNA, 19 bp, Homo sapiens
  siRNA target sequence for PHC2 (NM_004427.2,465-483).
caaatcctgacgcatgtta

SEQ ID NO: 134638 - DNA, 19 bp, Homo sapiens
  siRNA target sequence for PHC2 (NM_004427.2,470-488).
cctgacgcatgttatcgaa

SEQ ID NO: 134639 - DNA, 19 bp, Homo sapiens
  siRNA target sequence for PHC2 (NM_004427.2,643-661).
cctatctgcaagaatccaa

SEQ ID NO: 134640 - DNA, 19 bp, Homo sapiens
  siRNA target sequence for PHC2 (NM_004427.2,670-688).
gtgctcccctcaaactcaa

SEQ ID NO: 134641 - DNA, 19 bp, Homo sapiens
  siRNA target sequence for PHC2 (NM_004427.2,706-724).
gggtggactttgcctataa

SEQ ID NO: 134642 - DNA, 19 bp, Homo sapiens
  siRNA target sequence for PHC2 (NM_004427.2,708-726).
gtggactttgcctataagt

SEQ ID NO: 134643 - DNA, 19 bp, Homo sapiens
  siRNA target sequence for PHC2 (NM_004427.2,732-750).
cgttccaagcgcttctgtt

SEQ ID NO: 134644 - DNA, 19 bp, Homo sapiens
  siRNA target sequence for PHC2 (NM_004427.2,877-895).
gtctgccaccacttaccaa

SEQ ID NO: 134645 - DNA, 19 bp, Homo sapiens
  siRNA target sequence for PHC2 (NM_004427.2,943-961).
ctgctttgcagctaacaca

SEQ ID NO: 134646 - DNA, 19 bp, Homo sapiens
  siRNA target sequence for PHC2 (NM_004427.2,980-998).
ccgttgctcagataactca

SEQ ID NO: 134647 - DNA, 19 bp, Homo sapiens
  siRNA target sequence for PHC2 (NM_004427.2,1025-1043).
ctcagccagctcatctact

SEQ ID NO: 134648 - DNA, 19 bp, Homo sapiens
  siRNA target sequence for PHC2 (NM_004427.2,1138-1156).
ccaccaagtggaatgtaga

SEQ ID NO: 134649 - DNA, 19 bp, Homo sapiens
  siRNA target sequence for PHC2 (NM_004427.2,1155-1173).
gaagacgtctacgaattca

SEQ ID NO: 134650 - DNA, 19 bp, Homo sapiens
  siRNA target sequence for PHC2 (NM_198040.1,70-88).
ccagtcccacatacatcta

SEQ ID NO: 134651 - DNA, 19 bp, Homo sapiens
  siRNA target sequence for PHC2 (NM_198040.1,387-405).
ggcaagcctggtatccaat

SEQ ID NO: 134652 - DNA, 19 bp, Homo sapiens
  siRNA target sequence for PHC2 (NM_198040.1,392-410).
gcctggtatccaatagaca

SEQ ID NO: 134653 - DNA, 19 bp, Homo sapiens
  siRNA target sequence for PHC2 (NM_198040.1,393-411).
cctggtatccaatagacaa

SEQ ID NO: 134654 - DNA, 19 bp, Homo sapiens
  siRNA target sequence for PHC2 (NM_198040.1,1084-1102).
ctgcagccccaatttgtga

SEQ ID NO: 134655 - DNA, 19 bp, Homo sapiens
  siRNA target sequence for PHC2 (NM_198040.1,1526-1544).
cacatcagcaggctattgt

SEQ ID NO: 134656 - DNA, 19 bp, Homo sapiens
  siRNA target sequence for PHIP (NM_017934.4,419-437).
ctgatcacttgctgcaaat

SEQ ID NO: 134657 - DNA, 19 bp, Homo sapiens
  siRNA target sequence for PHIP (NM_017934.4,426-444).
cttgctgcaaatatgtcat

SEQ ID NO: 134658 - DNA, 19 bp, Homo sapiens
  siRNA target sequence for PHIP (NM_017934.4,484-502).
gttcctggagtacaaactt

SEQ ID NO: 134659 - DNA, 19 bp, Homo sapiens
  siRNA target sequence for PHIP (NM_017934.4,524-542).
ctttactacgcacaaataa

SEQ ID NO: 134660 - DNA, 19 bp, Homo sapiens
  siRNA target sequence for PHIP (NM_017934.4,529-547).
ctacgcacaaataaaagct

SEQ ID NO: 134661 - DNA, 19 bp, Homo sapiens
  siRNA target sequence for PHIP (NM_017934.4,602-620).
cacctgagtcaccagttaa

SEQ ID NO: 134662 - DNA, 19 bp, Homo sapiens
  siRNA target sequence for PHIP (NM_017934.4,604-622).
cctgagtcaccagttaact

SEQ ID NO: 134663 - DNA, 19 bp, Homo sapiens
  siRNA target sequence for PHIP (NM_017934.4,605-623).
ctgagtcaccagttaacta

SEQ ID NO: 134664 - DNA, 19 bp, Homo sapiens
  siRNA target sequence for PHIP (NM_017934.4,635-653).
ccagcattgcggatactct

SEQ ID NO: 134665 - DNA, 19 bp, Homo sapiens
  siRNA target sequence for PHIP (NM_017934.4,643-661).
gcggatactctgttttcaa

SEQ ID NO: 134666 - DNA, 19 bp, Homo sapiens
  siRNA target sequence for PHIP (NM_017934.4,681-699).
cagacttgagcgacttgtt

SEQ ID NO: 134667 - DNA, 19 bp, Homo sapiens
  siRNA target sequence for PHIP (NM_017934.4,782-800).
gaactggcagacggatatt

SEQ ID NO: 134668 - DNA, 19 bp, Homo sapiens
  siRNA target sequence for PHIP (NM_017934.4,795-813).
gatatttactggttctgat

SEQ ID NO: 134669 - DNA, 19 bp, Homo sapiens
  siRNA target sequence for PHIP (NM_017934.4,809-827).
ctgatgactgtcttgtgaa

SEQ ID NO: 134670 - DNA, 19 bp, Homo sapiens
  siRNA target sequence for PHIP (NM_017934.4,825-843).
gaaaatatgggcaacagat

SEQ ID NO: 134671 - DNA, 19 bp, Homo sapiens
  siRNA target sequence for PHIP (NM_017934.4,844-862).
gatgggaggttgttagcta

SEQ ID NO: 134672 - DNA, 19 bp, Homo sapiens
  siRNA target sequence for PHIP (NM_017934.4,925-943).
gcagctggaagttgtgata

SEQ ID NO: 134673 - DNA, 19 bp, Homo sapiens
  siRNA target sequence for PHIP (NM_017934.4,926-944).
cagctggaagttgtgataa

SEQ ID NO: 134674 - DNA, 19 bp, Homo sapiens
  siRNA target sequence for PHIP (NM_017934.4,996-1014).
gggccatagtgcatctatt

SEQ ID NO: 134675 - DNA, 19 bp, Homo sapiens
  siRNA target sequence for PHIP (NM_017934.4,997-1015).
ggccatagtgcatctatta

SEQ ID NO: 134676 - DNA, 19 bp, Homo sapiens
  siRNA target sequence for PHIP (NM_017934.4,1010-1028).
ctattacatcactacagtt

SEQ ID NO: 134677 - DNA, 19 bp, Homo sapiens
  siRNA target sequence for PHIP (NM_017934.4,1045-1063).
ggctcaaagagatatctat

SEQ ID NO: 134678 - DNA, 19 bp, Homo sapiens
  siRNA target sequence for PHIP (NM_017934.4,1047-1065).
ctcaaagagatatctatct

SEQ ID NO: 134679 - DNA, 19 bp, Homo sapiens
  siRNA target sequence for PHIP (NM_017934.4,1053-1071).
gagatatctatcttctact

SEQ ID NO: 134680 - DNA, 19 bp, Homo sapiens
  siRNA target sequence for PHIP (NM_017934.4,1104-1122).
ggatgctggaacccttaaa

SEQ ID NO: 134681 - DNA, 19 bp, Homo sapiens
  siRNA target sequence for PHIP (NM_017934.4,1108-1126).
gctggaacccttaaaataa

SEQ ID NO: 134682 - DNA, 19 bp, Homo sapiens
  siRNA target sequence for PHIP (NM_017934.4,1156-1174).
cctcggcctggagttcaaa

SEQ ID NO: 134683 - DNA, 19 bp, Homo sapiens
  siRNA target sequence for PHIP (NM_017934.4,1157-1175).
ctcggcctggagttcaaat

SEQ ID NO: 134684 - DNA, 19 bp, Homo sapiens
  siRNA target sequence for PHIP (NM_017934.4,1159-1177).
cggcctggagttcaaatga

SEQ ID NO: 134685 - DNA, 19 bp, Homo sapiens
  siRNA target sequence for PHIP (NM_017934.4,1160-1178).
ggcctggagttcaaatgat

SEQ ID NO: 134686 - DNA, 19 bp, Homo sapiens
  siRNA target sequence for PHIP (NM_017934.4,1162-1180).
cctggagttcaaatgatct

SEQ ID NO: 134687 - DNA, 19 bp, Homo sapiens
  siRNA target sequence for PHIP (NM_017934.4,1193-1211).
gtgctggtggaatgtttct

SEQ ID NO: 134688 - DNA, 19 bp, Homo sapiens
  siRNA target sequence for PHIP (NM_017934.4,1231-1249).
catattattcgggtttatt

SEQ ID NO: 134689 - DNA, 19 bp, Homo sapiens
  siRNA target sequence for PHIP (NM_017934.4,1287-1305).
ggagtttcatactgacaaa

SEQ ID NO: 134690 - DNA, 19 bp, Homo sapiens
  siRNA target sequence for PHIP (NM_017934.4,1290-1308).
gtttcatactgacaaagtt

SEQ ID NO: 134691 - DNA, 19 bp, Homo sapiens
  siRNA target sequence for PHIP (NM_017934.4,1329-1347).
cactagtaacaggtttgta

SEQ ID NO: 134692 - DNA, 19 bp, Homo sapiens
  siRNA target sequence for PHIP (NM_017934.4,1369-1387).
gcacgtatttggcaattta

SEQ ID NO: 134693 - DNA, 19 bp, Homo sapiens
  siRNA target sequence for PHIP (NM_017934.4,1370-1388).
cacgtatttggcaatttaa

SEQ ID NO: 134694 - DNA, 19 bp, Homo sapiens
  siRNA target sequence for PHIP (NM_017934.4,1439-1457).
gccaaaaccttcaaggaat

SEQ ID NO: 134695 - DNA, 19 bp, Homo sapiens
  siRNA target sequence for PHIP (NM_017934.4,1496-1514).
cttgggatcgacatgacaa

SEQ ID NO: 134696 - DNA, 19 bp, Homo sapiens
  siRNA target sequence for PHIP (NM_017934.4,1500-1518).
ggatcgacatgacaataca

SEQ ID NO: 134697 - DNA, 19 bp, Homo sapiens
  siRNA target sequence for PHIP (NM_017934.4,1504-1522).
cgacatgacaatacagtta

SEQ ID NO: 134698 - DNA, 19 bp, Homo sapiens
  siRNA target sequence for PHIP (NM_017934.4,1505-1523).
gacatgacaatacagttat

SEQ ID NO: 134699 - DNA, 19 bp, Homo sapiens
  siRNA target sequence for PHIP (NM_017934.4,1507-1525).
catgacaatacagttataa

SEQ ID NO: 134700 - DNA, 19 bp, Homo sapiens
  siRNA target sequence for PHIP (NM_017934.4,1562-1580).
cttacactggtcaactaat

SEQ ID NO: 134701 - DNA, 19 bp, Homo sapiens
  siRNA target sequence for PHIP (NM_017934.4,1566-1584).
cactggtcaactaattcat

SEQ ID NO: 134702 - DNA, 19 bp, Homo sapiens
  siRNA target sequence for PHIP (NM_017934.4,1568-1586).
ctggtcaactaattcatgt

SEQ ID NO: 134703 - DNA, 19 bp, Homo sapiens
  siRNA target sequence for PHIP (NM_017934.4,1629-1647).
cccgttcgatcctagagtt

SEQ ID NO: 134704 - DNA, 19 bp, Homo sapiens
  siRNA target sequence for PHIP (NM_017934.4,1636-1654).
gatcctagagttctctttt

SEQ ID NO: 134705 - DNA, 19 bp, Homo sapiens
  siRNA target sequence for PHIP (NM_017934.4,1666-1684).
gatggaaacgtgatagtgt

SEQ ID NO: 134706 - DNA, 19 bp, Homo sapiens
  siRNA target sequence for PHIP (NM_017934.4,1692-1710).
ggcaagaggagtcaaaata

SEQ ID NO: 134707 - DNA, 19 bp, Homo sapiens
  siRNA target sequence for PHIP (NM_017934.4,1702-1720).
gtcaaaatacgatcttatt

SEQ ID NO: 134708 - DNA, 19 bp, Homo sapiens
  siRNA target sequence for PHIP (NM_017934.4,1711-1729).
cgatcttatttcaatatga

SEQ ID NO: 134709 - DNA, 19 bp, Homo sapiens
  siRNA target sequence for PHIP (NM_017934.4,1742-1760).
gacatggcgcagtatttga

SEQ ID NO: 134710 - DNA, 19 bp, Homo sapiens
  siRNA target sequence for PHIP (NM_017934.4,1744-1762).
catggcgcagtatttgact

SEQ ID NO: 134711 - DNA, 19 bp, Homo sapiens
  siRNA target sequence for PHIP (NM_017934.4,1753-1771).
gtatttgactgcaaatgct

SEQ ID NO: 134712 - DNA, 19 bp, Homo sapiens
  siRNA target sequence for PHIP (NM_017934.4,1872-1890).
gttctttcatagtgattat

SEQ ID NO: 134713 - DNA, 19 bp, Homo sapiens
  siRNA target sequence for PHIP (NM_017934.4,1883-1901).
gtgattatcggccacttat

SEQ ID NO: 134714 - DNA, 19 bp, Homo sapiens
  siRNA target sequence for PHIP (NM_017934.4,1906-1924).
gatgccaacaattttgtat

SEQ ID NO: 134715 - DNA, 19 bp, Homo sapiens
  siRNA target sequence for PHIP (NM_017934.4,1964-1982).
ccccttttttggttgatgt

SEQ ID NO: 134716 - DNA, 19 bp, Homo sapiens
  siRNA target sequence for PHIP (NM_017934.4,1999-2017).
ccatcaagatatcaaagat

SEQ ID NO: 134717 - DNA, 19 bp, Homo sapiens
  siRNA target sequence for PHIP (NM_017934.4,2058-2076).
ccctcagatgggagtaact

SEQ ID NO: 134718 - DNA, 19 bp, Homo sapiens
  siRNA target sequence for PHIP (NM_017934.4,2059-2077).
cctcagatgggagtaactt

SEQ ID NO: 134719 - DNA, 19 bp, Homo sapiens
  siRNA target sequence for PHIP (NM_017934.4,2075-2093).
cttcctcaggactgaatca

SEQ ID NO: 134720 - DNA, 19 bp, Homo sapiens
  siRNA target sequence for PHIP (NM_017934.4,2078-2096).
cctcaggactgaatcaagt

SEQ ID NO: 134721 - DNA, 19 bp, Homo sapiens
  siRNA target sequence for PHIP (NM_017934.4,2079-2097).
ctcaggactgaatcaagtt

SEQ ID NO: 134722 - DNA, 19 bp, Homo sapiens
  siRNA target sequence for PHIP (NM_017934.4,2313-2331).
caacgcaccaagaagtgaa

SEQ ID NO: 134723 - DNA, 19 bp, Homo sapiens
  siRNA target sequence for PHIP (NM_017934.4,2547-2565).
ggatcttggagaatccaaa

SEQ ID NO: 134724 - DNA, 19 bp, Homo sapiens
  siRNA target sequence for PHIP (NM_017934.4,2584-2602).
cacaattatcgtacaagat

SEQ ID NO: 134725 - DNA, 19 bp, Homo sapiens
  siRNA target sequence for PHIP (NM_017934.4,2621-2639).
ctagaccctcagaagagat

SEQ ID NO: 134726 - DNA, 19 bp, Homo sapiens
  siRNA target sequence for PHIP (NM_017934.4,2649-2667).
cagtagttcttcagatgaa

SEQ ID NO: 134727 - DNA, 19 bp, Homo sapiens
  siRNA target sequence for PHIP (NM_017934.4,2722-2740).
cacagtgatggcagttcta

SEQ ID NO: 134728 - DNA, 19 bp, Homo sapiens
  siRNA target sequence for PHIP (NM_017934.4,2741-2759).
gtgactactccagtgatta

SEQ ID NO: 134729 - DNA, 19 bp, Homo sapiens
  siRNA target sequence for PHIP (NM_017934.4,2745-2763).
ctactccagtgattactct

SEQ ID NO: 134730 - DNA, 19 bp, Homo sapiens
  siRNA target sequence for PHIP (NM_017934.4,2981-2999).
ctgtgggagaactaactga

SEQ ID NO: 134731 - DNA, 19 bp, Homo sapiens
  siRNA target sequence for PHIP (NM_017934.4,2996-3014).
ctgaaaatggtttgacatt

SEQ ID NO: 134732 - DNA, 19 bp, Homo sapiens
  siRNA target sequence for PHIP (NM_017934.4,3004-3022).
ggtttgacattagaagaat

SEQ ID NO: 134733 - DNA, 19 bp, Homo sapiens
  siRNA target sequence for PHIP (NM_017934.4,3024-3042).
gttgccatcaacatggatt

SEQ ID NO: 134734 - DNA, 19 bp, Homo sapiens
  siRNA target sequence for PHIP (NM_017934.4,3035-3053).
catggattacagataccat

SEQ ID NO: 134735 - DNA, 19 bp, Homo sapiens
  siRNA target sequence for PHIP (NM_017934.4,3056-3074).
cccgaagatgtccatttgt

SEQ ID NO: 134736 - DNA, 19 bp, Homo sapiens
  siRNA target sequence for PHIP (NM_017934.4,3199-3217).
cgggaacaagaacttatga

SEQ ID NO: 134737 - DNA, 19 bp, Homo sapiens
  siRNA target sequence for PHIP (NM_017934.4,3200-3218).
gggaacaagaacttatgaa

SEQ ID NO: 134738 - DNA, 19 bp, Homo sapiens
  siRNA target sequence for PHIP (NM_017934.4,3234-3252).
gtatgaagtgggattacct

SEQ ID NO: 134739 - DNA, 19 bp, Homo sapiens
  siRNA target sequence for PHIP (NM_017934.4,3260-3278).
gctgccttaaacttgcttt

SEQ ID NO: 134740 - DNA, 19 bp, Homo sapiens
  siRNA target sequence for PHIP (NM_017934.4,3301-3319).
ctgactggcggatcattta

SEQ ID NO: 134741 - DNA, 19 bp, Homo sapiens
  siRNA target sequence for PHIP (NM_017934.4,3305-3323).
ctggcggatcatttaccat

SEQ ID NO: 134742 - DNA, 19 bp, Homo sapiens
  siRNA target sequence for PHIP (NM_017934.4,3309-3327).
cggatcatttaccatgaaa

SEQ ID NO: 134743 - DNA, 19 bp, Homo sapiens
  siRNA target sequence for PHIP (NM_017934.4,3320-3338).
ccatgaaataccatgatat

SEQ ID NO: 134744 - DNA, 19 bp, Homo sapiens
  siRNA target sequence for PHIP (NM_017934.4,3393-3411).
caggcgatggaatataggt

SEQ ID NO: 134745 - DNA, 19 bp, Homo sapiens
  siRNA target sequence for PHIP (NM_017934.4,3417-3435).
cttcaggtctgtcatagat

SEQ ID NO: 134746 - DNA, 19 bp, Homo sapiens
  siRNA target sequence for PHIP (NM_017934.4,3420-3438).
caggtctgtcatagatgat

SEQ ID NO: 134747 - DNA, 19 bp, Homo sapiens
  siRNA target sequence for PHIP (NM_017934.4,3444-3462).
gtggtttggaacaatcgaa

SEQ ID NO: 134748 - DNA, 19 bp, Homo sapiens
  siRNA target sequence for PHIP (NM_017934.4,3489-3507).
ccctgatagtctgtttcaa

SEQ ID NO: 134749 - DNA, 19 bp, Homo sapiens
  siRNA target sequence for PHIP (NM_017934.4,3490-3508).
cctgatagtctgtttcaat

SEQ ID NO: 134750 - DNA, 19 bp, Homo sapiens
  siRNA target sequence for PHIP (NM_017934.4,3522-3540).
ctgggacaatggagataca

SEQ ID NO: 134751 - DNA, 19 bp, Homo sapiens
  siRNA target sequence for PHIP (NM_017934.4,3558-3576).
ggatatggagcttatacct

SEQ ID NO: 134752 - DNA, 19 bp, Homo sapiens
  siRNA target sequence for PHIP (NM_017934.4,3559-3577).
gatatggagcttataccta

SEQ ID NO: 134753 - DNA, 19 bp, Homo sapiens
  siRNA target sequence for PHIP (NM_017934.4,3564-3582).
ggagcttatacctaataat

SEQ ID NO: 134754 - DNA, 19 bp, Homo sapiens
  siRNA target sequence for PHIP (NM_017934.4,3608-3626).
ccagtgttcctttaactga

SEQ ID NO: 134755 - DNA, 19 bp, Homo sapiens
  siRNA target sequence for PHIP (NM_017934.4,3609-3627).
cagtgttcctttaactgat

SEQ ID NO: 134756 - DNA, 19 bp, Homo sapiens
  siRNA target sequence for PHIP (NM_017934.4,3631-3649).
gagtgcagatcactaatct

SEQ ID NO: 134757 - DNA, 19 bp, Homo sapiens
  siRNA target sequence for PHIP (NM_017934.4,3633-3651).
gtgcagatcactaatctat

SEQ ID NO: 134758 - DNA, 19 bp, Homo sapiens
  siRNA target sequence for PHIP (NM_017934.4,3635-3653).
gcagatcactaatctataa

SEQ ID NO: 134759 - DNA, 19 bp, Homo sapiens
  siRNA target sequence for PHIP (NM_017934.4,3724-3742).
cagttgatgacactagata

SEQ ID NO: 134760 - DNA, 19 bp, Homo sapiens
  siRNA target sequence for PHIP (NM_017934.4,3726-3744).
gttgatgacactagatatt

SEQ ID NO: 134761 - DNA, 19 bp, Homo sapiens
  siRNA target sequence for PHIP (NM_017934.4,3795-3813).
cacagtagtggcatatcca

SEQ ID NO: 134762 - DNA, 19 bp, Homo sapiens
  siRNA target sequence for PHIP (NM_017934.4,3805-3823).
gcatatccaacggatctaa

SEQ ID NO: 134763 - DNA, 19 bp, Homo sapiens
  siRNA target sequence for PHIP (NM_017934.4,3811-3829).
ccaacggatctaagtacaa

SEQ ID NO: 134764 - DNA, 19 bp, Homo sapiens
  siRNA target sequence for PHIP (NM_017934.4,3812-3830).
caacggatctaagtacaat

SEQ ID NO: 134765 - DNA, 19 bp, Homo sapiens
  siRNA target sequence for PHIP (NM_017934.4,3862-3880).
cgggtttcttccctaatgt

SEQ ID NO: 134766 - DNA, 19 bp, Homo sapiens
  siRNA target sequence for PHIP (NM_017934.4,3879-3897).
gtgggaagttcgatatata

SEQ ID NO: 134767 - DNA, 19 bp, Homo sapiens
  siRNA target sequence for PHIP (NM_017934.4,3900-3918).
gcataatacacgaacattt

SEQ ID NO: 134768 - DNA, 19 bp, Homo sapiens
  siRNA target sequence for PHIP (NM_017934.4,3901-3919).
cataatacacgaacattta

SEQ ID NO: 134769 - DNA, 19 bp, Homo sapiens
  siRNA target sequence for PHIP (NM_017934.4,3925-3943).
cctggaagccctattgtga

SEQ ID NO: 134770 - DNA, 19 bp, Homo sapiens
  siRNA target sequence for PHIP (NM_017934.4,3957-3975).
cgtgactgatcttcttcta

SEQ ID NO: 134771 - DNA, 19 bp, Homo sapiens
  siRNA target sequence for PHIP (NM_017934.4,3991-4009).
cagacttgttataacataa

SEQ ID NO: 134772 - DNA, 19 bp, Homo sapiens
  siRNA target sequence for PHIP (NM_017934.4,4084-4102).
ggaacttctactcgaaaaa

SEQ ID NO: 134773 - DNA, 19 bp, Homo sapiens
  siRNA target sequence for PHIP (NM_017934.4,4088-4106).
cttctactcgaaaaaggaa

SEQ ID NO: 134774 - DNA, 19 bp, Homo sapiens
  siRNA target sequence for PHIP (NM_017934.4,4116-4134).
gcctagaagaagattacgt

SEQ ID NO: 134775 - DNA, 19 bp, Homo sapiens
  siRNA target sequence for PHIP (NM_017934.4,4117-4135).
cctagaagaagattacgta

SEQ ID NO: 134776 - DNA, 19 bp, Homo sapiens
  siRNA target sequence for PHIP (NM_017934.4,4118-4136).
ctagaagaagattacgtaa

SEQ ID NO: 134777 - DNA, 19 bp, Homo sapiens
  siRNA target sequence for PHIP (NM_017934.4,4133-4151).
gtaatagagcccagtctta

SEQ ID NO: 134778 - DNA, 19 bp, Homo sapiens
  siRNA target sequence for PHIP (NM_017934.4,4139-4157).
gagcccagtcttacgatat

SEQ ID NO: 134779 - DNA, 19 bp, Homo sapiens
  siRNA target sequence for PHIP (NM_017934.4,4143-4161).
ccagtcttacgatattcaa

SEQ ID NO: 134780 - DNA, 19 bp, Homo sapiens
  siRNA target sequence for PHIP (NM_017934.4,4174-4192).
cagtgtgaagaattgttaa

SEQ ID NO: 134781 - DNA, 19 bp, Homo sapiens
  siRNA target sequence for PHIP (NM_017934.4,4234-4252).
ccggtagatctccttgaat

SEQ ID NO: 134782 - DNA, 19 bp, Homo sapiens
  siRNA target sequence for PHIP (NM_017934.4,4235-4253).
cggtagatctccttgaata

SEQ ID NO: 134783 - DNA, 19 bp, Homo sapiens
  siRNA target sequence for PHIP (NM_017934.4,4272-4290).
cattgacactccaatggat

SEQ ID NO: 134784 - DNA, 19 bp, Homo sapiens
  siRNA target sequence for PHIP (NM_017934.4,4294-4312).
gctaccgttagagaaactt

SEQ ID NO: 134785 - DNA, 19 bp, Homo sapiens
  siRNA target sequence for PHIP (NM_017934.4,4295-4313).
ctaccgttagagaaacttt

SEQ ID NO: 134786 - DNA, 19 bp, Homo sapiens
  siRNA target sequence for PHIP (NM_017934.4,4298-4316).
ccgttagagaaactttaga

SEQ ID NO: 134787 - DNA, 19 bp, Homo sapiens
  siRNA target sequence for PHIP (NM_017934.4,4310-4328).
ctttagaggctgggaatta

SEQ ID NO: 134788 - DNA, 19 bp, Homo sapiens
  siRNA target sequence for PHIP (NM_017934.4,4315-4333).
gaggctgggaattatgagt

SEQ ID NO: 134789 - DNA, 19 bp, Homo sapiens
  siRNA target sequence for PHIP (NM_017934.4,4337-4355).
caatggagttatgtaaaga

SEQ ID NO: 134790 - DNA, 19 bp, Homo sapiens
  siRNA target sequence for PHIP (NM_017934.4,4486-4504).
gctcttcgttttcataaaa

SEQ ID NO: 134791 - DNA, 19 bp, Homo sapiens
  siRNA target sequence for PHIP (NM_017934.4,4596-4614).
cttaaaaccccagctaaaa

SEQ ID NO: 134792 - DNA, 19 bp, Homo sapiens
  siRNA target sequence for PHIP (NM_017934.4,4640-4658).
ctacacctacacgatcaat

SEQ ID NO: 134793 - DNA, 19 bp, Homo sapiens
  siRNA target sequence for PHIP (NM_017934.4,4678-4696).
gctcagataaacggtaaaa

SEQ ID NO: 134794 - DNA, 19 bp, Homo sapiens
  siRNA target sequence for PHIP (NM_017934.4,4689-4707).
cggtaaaacagaatctagt

SEQ ID NO: 134795 - DNA, 19 bp, Homo sapiens
  siRNA target sequence for PHIP (NM_017934.4,4727-4745).
gcaaccgagtggttgtaga

SEQ ID NO: 134796 - DNA, 19 bp, Homo sapiens
  siRNA target sequence for PHIP (NM_017934.4,4759-4777).
gagcaaccatctacttctt

SEQ ID NO: 134797 - DNA, 19 bp, Homo sapiens
  siRNA target sequence for PHIP (NM_017934.4,4817-4835).
caataccagggaaaacaat

SEQ ID NO: 134798 - DNA, 19 bp, Homo sapiens
  siRNA target sequence for PHIP (NM_017934.4,4827-4845).
gaaaacaatactagagaat

SEQ ID NO: 134799 - DNA, 19 bp, Homo sapiens
  siRNA target sequence for PHIP (NM_017934.4,4889-4907).
gtcaatccagttttagtca

SEQ ID NO: 134800 - DNA, 19 bp, Homo sapiens
  siRNA target sequence for PHIP (NM_017934.4,4904-4922).
gtcatggcactaggaataa

SEQ ID NO: 134801 - DNA, 19 bp, Homo sapiens
  siRNA target sequence for PHIP (NM_017934.4,4948-4966).
gaaaagccagtcaaacgta

SEQ ID NO: 134802 - DNA, 19 bp, Homo sapiens
  siRNA target sequence for PHIP (NM_017934.4,4954-4972).
ccagtcaaacgtaaaatga

SEQ ID NO: 134803 - DNA, 19 bp, Homo sapiens
  siRNA target sequence for PHIP (NM_017934.4,4987-5005).
ccaaaggcgtccactcttt

SEQ ID NO: 134804 - DNA, 19 bp, Homo sapiens
  siRNA target sequence for PHIP (NM_017934.4,4993-5011).
gcgtccactctttcaaagt

SEQ ID NO: 134805 - DNA, 19 bp, Homo sapiens
  siRNA target sequence for PHIP (NM_017934.4,4995-5013).
gtccactctttcaaagtca

SEQ ID NO: 134806 - DNA, 19 bp, Homo sapiens
  siRNA target sequence for PHIP (NM_017934.4,5137-5155).
gtagaagttaataccaata

SEQ ID NO: 134807 - DNA, 19 bp, Homo sapiens
  siRNA target sequence for PHIP (NM_017934.4,5151-5169).
caatagtggtgaaattata

SEQ ID NO: 134808 - DNA, 19 bp, Homo sapiens
  siRNA target sequence for PHIP (NM_017934.4,5156-5174).
gtggtgaaattatacacaa

SEQ ID NO: 134809 - DNA, 19 bp, Homo sapiens
  siRNA target sequence for PHIP (NM_017934.4,5205-5223).
gtatgcaaagccagaagat

SEQ ID NO: 134810 - DNA, 19 bp, Homo sapiens
  siRNA target sequence for PHIP (NM_017934.4,5423-5441).
gaagtaaccgaaaaaagat

SEQ ID NO: 134811 - DNA, 19 bp, Homo sapiens
  siRNA target sequence for PHIP (NM_017934.4,5439-5457).
gatagatgatcctatagat

SEQ ID NO: 134812 - DNA, 19 bp, Homo sapiens
  siRNA target sequence for PHIP (NM_017934.4,5491-5509).
gaaccccacatgagaacta

SEQ ID NO: 134813 - DNA, 19 bp, Homo sapiens
  siRNA target sequence for PHIP (NM_017934.4,5499-5517).
catgagaactagaaatcaa

SEQ ID NO: 134814 - DNA, 19 bp, Homo sapiens
  siRNA target sequence for PHIP (NM_017934.4,5519-5537).
gtcgaaggacagctttcta

SEQ ID NO: 134815 - DNA, 19 bp, Homo sapiens
  siRNA target sequence for PHIP (NM_017934.4,5521-5539).
cgaaggacagctttctata

SEQ ID NO: 134816 - DNA, 19 bp, Homo sapiens
  siRNA target sequence for PHIP (NM_017934.4,5615-5633).
gaggacgagtccgaaagtt

SEQ ID NO: 134817 - DNA, 19 bp, Homo sapiens
  siRNA target sequence for PHIP (NM_017934.4,5617-5635).
ggacgagtccgaaagttga

SEQ ID NO: 134818 - DNA, 19 bp, Homo sapiens
  siRNA target sequence for PHIP (NM_017934.4,5623-5641).
gtccgaaagttgactgaaa

SEQ ID NO: 134819 - DNA, 19 bp, Homo sapiens
  siRNA target sequence for PI3 (NM_002638.2,110-128).
ctgggacgctggttctaga

SEQ ID NO: 134820 - DNA, 19 bp, Homo sapiens
  siRNA target sequence for PI3 (NM_002638.2,138-156).
cacgggagttcctgttaaa

SEQ ID NO: 134821 - DNA, 19 bp, Homo sapiens
  siRNA target sequence for PI3 (NM_002638.2,141-159).
gggagttcctgttaaaggt

SEQ ID NO: 134822 - DNA, 19 bp, Homo sapiens
  siRNA target sequence for PI3 (NM_002638.2,202-220).
cccgttaaaggacaagttt

SEQ ID NO: 134823 - DNA, 19 bp, Homo sapiens
  siRNA target sequence for PI3 (NM_002638.2,309-327).
ccggtgcgccatgttgaat

SEQ ID NO: 134824 - DNA, 19 bp, Homo sapiens
  siRNA target sequence for PI3 (NM_002638.2,336-354).
ccgctgcttgaaagatact

SEQ ID NO: 134825 - DNA, 19 bp, Homo sapiens
  siRNA target sequence for PI3 (NM_002638.2,393-411).
cgggatggcctgtttcgtt

SEQ ID NO: 134826 - DNA, 19 bp, Homo sapiens
  siRNA target sequence for PMPCA (NM_015160.1,90-108).
gcgtacagacggtttagta

SEQ ID NO: 134827 - DNA, 19 bp, Homo sapiens
  siRNA target sequence for PMPCA (NM_015160.1,92-110).
gtacagacggtttagtagt

SEQ ID NO: 134828 - DNA, 19 bp, Homo sapiens
  siRNA target sequence for PMPCA (NM_015160.1,154-172).
gagtacccaagcctgtttt

SEQ ID NO: 134829 - DNA, 19 bp, Homo sapiens
  siRNA target sequence for PMPCA (NM_015160.1,159-177).
cccaagcctgtttttgcta

SEQ ID NO: 134830 - DNA, 19 bp, Homo sapiens
  siRNA target sequence for PMPCA (NM_015160.1,206-224).
caaagtaaccacattggat

SEQ ID NO: 134831 - DNA, 19 bp, Homo sapiens
  siRNA target sequence for PMPCA (NM_015160.1,239-257).
ggcatctcagaataagttt

SEQ ID NO: 134832 - DNA, 19 bp, Homo sapiens
  siRNA target sequence for PMPCA (NM_015160.1,248-266).
gaataagtttggacagttt

SEQ ID NO: 134833 - DNA, 19 bp, Homo sapiens
  siRNA target sequence for PMPCA (NM_015160.1,263-281).
gttttgtacagtaggaatt

SEQ ID NO: 134834 - DNA, 19 bp, Homo sapiens
  siRNA target sequence for PMPCA (NM_015160.1,271-289).
cagtaggaattcttatcaa

SEQ ID NO: 134835 - DNA, 19 bp, Homo sapiens
  siRNA target sequence for PMPCA (NM_015160.1,287-305).
caattcaggatcgagatat

SEQ ID NO: 134836 - DNA, 19 bp, Homo sapiens
  siRNA target sequence for PMPCA (NM_015160.1,298-316).
cgagatatgaagcgaaata

SEQ ID NO: 134837 - DNA, 19 bp, Homo sapiens
  siRNA target sequence for PMPCA (NM_015160.1,301-319).
gatatgaagcgaaatacct

SEQ ID NO: 134838 - DNA, 19 bp, Homo sapiens
  siRNA target sequence for PMPCA (NM_015160.1,358-376).
cgtctactgctcgatttga

SEQ ID NO: 134839 - DNA, 19 bp, Homo sapiens
  siRNA target sequence for PMPCA (NM_015160.1,613-631).
cacttctcaccgagatgat

SEQ ID NO: 134840 - DNA, 19 bp, Homo sapiens
  siRNA target sequence for PMPCA (NM_015160.1,677-695).
ctgccccacagaaaacgta

SEQ ID NO: 134841 - DNA, 19 bp, Homo sapiens
  siRNA target sequence for PMPCA (NM_015160.1,687-705).
gaaaacgtagcaaagatca

SEQ ID NO: 134842 - DNA, 19 bp, Homo sapiens
  siRNA target sequence for PMPCA (NM_015160.1,724-742).
cctacctgaggaactacta

SEQ ID NO: 134843 - DNA, 19 bp, Homo sapiens
  siRNA target sequence for PMPCA (NM_015160.1,844-862).
gcgcagaggccgtggatat

SEQ ID NO: 134844 - DNA, 19 bp, Homo sapiens
  siRNA target sequence for PMPCA (NM_015160.1,845-863).
cgcagaggccgtggatatt

SEQ ID NO: 134845 - DNA, 19 bp, Homo sapiens
  siRNA target sequence for PMPCA (NM_015160.1,891-909).
gggattgccaagctagaaa

SEQ ID NO: 134846 - DNA, 19 bp, Homo sapiens
  siRNA target sequence for PMPCA (NM_015160.1,893-911).
gattgccaagctagaaaga

SEQ ID NO: 134847 - DNA, 19 bp, Homo sapiens
  siRNA target sequence for PMPCA (NM_015160.1,949-967).
ccgagctcacgcacatcat

SEQ ID NO: 134848 - DNA, 19 bp, Homo sapiens
  siRNA target sequence for PMPCA (NM_015160.1,1011-1029).
ccctttgcagtgttgaaca

SEQ ID NO: 134849 - DNA, 19 bp, Homo sapiens
  siRNA target sequence for PMPCA (NM_015160.1,1012-1030).
cctttgcagtgttgaacat

SEQ ID NO: 134850 - DNA, 19 bp, Homo sapiens
  siRNA target sequence for PMPCA (NM_015160.1,1112-1130).
caggcaccactggatgtat

SEQ ID NO: 134851 - DNA, 19 bp, Homo sapiens
  siRNA target sequence for PMPCA (NM_015160.1,1114-1132).
ggcaccactggatgtataa

SEQ ID NO: 134852 - DNA, 19 bp, Homo sapiens
  siRNA target sequence for PMPCA (NM_015160.1,1198-1216).
caagacaggttcgagaaat

SEQ ID NO: 134853 - DNA, 19 bp, Homo sapiens
  siRNA target sequence for PMPCA (NM_015160.1,1209-1227).
cgagaaatggtagaaatca

SEQ ID NO: 134854 - DNA, 19 bp, Homo sapiens
  siRNA target sequence for PMPCA (NM_015160.1,1212-1230).
gaaatggtagaaatcatca

SEQ ID NO: 134855 - DNA, 19 bp, Homo sapiens
  siRNA target sequence for PNRC1 (NM_006813.1,221-239).
cacggctccgcctccttta

SEQ ID NO: 134856 - DNA, 19 bp, Homo sapiens
  siRNA target sequence for PNRC1 (NM_006813.1,671-689).
gggaaaatcggagaaaatt

SEQ ID NO: 134857 - DNA, 19 bp, Homo sapiens
  siRNA target sequence for PNRC1 (NM_006813.1,697-715).
cccatggccagcttgttca

SEQ ID NO: 134858 - DNA, 19 bp, Homo sapiens
  siRNA target sequence for PNRC1 (NM_006813.1,703-721).
gccagcttgttcatggtat

SEQ ID NO: 134859 - DNA, 19 bp, Homo sapiens
  siRNA target sequence for PNRC1 (NM_006813.1,708-726).
cttgttcatggtatacact

SEQ ID NO: 134860 - DNA, 19 bp, Homo sapiens
  siRNA target sequence for PNRC1 (NM_006813.1,728-746).
gtatgagcaaccaaagata

SEQ ID NO: 134861 - DNA, 19 bp, Homo sapiens
  siRNA target sequence for PNRC1 (NM_006813.1,785-803).
gatcacctctgcaaaaaga

SEQ ID NO: 134862 - DNA, 19 bp, Homo sapiens
  siRNA target sequence for PNRC1 (NM_006813.1,829-847).
ctgtttcatctgacagaat

SEQ ID NO: 134863 - DNA, 19 bp, Homo sapiens
  siRNA target sequence for PNRC1 (NM_006813.1,1021-1039).
gcactgttgaaaattccaa

SEQ ID NO: 134864 - DNA, 19 bp, Homo sapiens
  siRNA target sequence for PNRC1 (NM_006813.1,1053-1071).
ctgatggcagtacacttaa

SEQ ID NO: 134865 - DNA, 19 bp, Homo sapiens
  siRNA target sequence for PNRC1 (NM_006813.1,1055-1073).
gatggcagtacacttaaaa

SEQ ID NO: 134866 - DNA, 19 bp, Homo sapiens
  siRNA target sequence for PROZ (NM_003891.1,62-80).
cgtgtggagccctcagtat

SEQ ID NO: 134867 - DNA, 19 bp, Homo sapiens
  siRNA target sequence for PROZ (NM_003891.1,124-142).
gcgtgcgggctcctatctt

SEQ ID NO: 134868 - DNA, 19 bp, Homo sapiens
  siRNA target sequence for PROZ (NM_003891.1,126-144).
gtgcgggctcctatcttct

SEQ ID NO: 134869 - DNA, 19 bp, Homo sapiens
  siRNA target sequence for PROZ (NM_003891.1,245-263).
gaattctggagacgatata

SEQ ID NO: 134870 - DNA, 19 bp, Homo sapiens
  siRNA target sequence for PROZ (NM_003891.1,372-390).
gcgagctggctaaaaatga

SEQ ID NO: 134871 - DNA, 19 bp, Homo sapiens
  siRNA target sequence for PROZ (NM_003891.1,376-394).
gctggctaaaaatgaatgt

SEQ ID NO: 134872 - DNA, 19 bp, Homo sapiens
  siRNA target sequence for PROZ (NM_003891.1,408-426).
ctgatgggtgtcaacactt

SEQ ID NO: 134873 - DNA, 19 bp, Homo sapiens
  siRNA target sequence for PROZ (NM_003891.1,569-587).
ctcccgtggcaggtaaagt

SEQ ID NO: 134874 - DNA, 19 bp, Homo sapiens
  siRNA target sequence for PROZ (NM_003891.1,572-590).
ccgtggcaggtaaagttaa

SEQ ID NO: 134875 - DNA, 19 bp, Homo sapiens
  siRNA target sequence for PROZ (NM_003891.1,574-592).
gtggcaggtaaagttaaca

SEQ ID NO: 134876 - DNA, 19 bp, Homo sapiens
  siRNA target sequence for PROZ (NM_003891.1,577-595).
gcaggtaaagttaacaaat

SEQ ID NO: 134877 - DNA, 19 bp, Homo sapiens
  siRNA target sequence for PROZ (NM_003891.1,613-631).
ctgtggtggtgttataata

SEQ ID NO: 134878 - DNA, 19 bp, Homo sapiens
  siRNA target sequence for PROZ (NM_003891.1,623-641).
gttataatacgggaaaatt

SEQ ID NO: 134879 - DNA, 19 bp, Homo sapiens
  siRNA target sequence for PROZ (NM_003891.1,666-684).
cactgttacacaggaatat

SEQ ID NO: 134880 - DNA, 19 bp, Homo sapiens
  siRNA target sequence for PROZ (NM_003891.1,674-692).
cacaggaatattactgtaa

SEQ ID NO: 134881 - DNA, 19 bp, Homo sapiens
  siRNA target sequence for PROZ (NM_003891.1,714-732).
gccaagacccgctgatgat

SEQ ID NO: 134882 - DNA, 19 bp, Homo sapiens
  siRNA target sequence for PROZ (NM_003891.1,721-739).
cccgctgatgatcaagata

SEQ ID NO: 134883 - DNA, 19 bp, Homo sapiens
  siRNA target sequence for PROZ (NM_003891.1,722-740).
ccgctgatgatcaagataa

SEQ ID NO: 134884 - DNA, 19 bp, Homo sapiens
  siRNA target sequence for PROZ (NM_003891.1,1176-1194).
ggtactcactctggtttaa

SEQ ID NO: 134885 - DNA, 19 bp, Homo sapiens
  siRNA target sequence for PROZ (NM_003891.1,1177-1195).
gtactcactctggtttaaa

SEQ ID NO: 134886 - DNA, 19 bp, Homo sapiens
  siRNA target sequence for PROZ (NM_003891.1,1188-1206).
ggtttaaacagatcatgaa

SEQ ID NO: 134887 - DNA, 19 bp, Homo sapiens
  siRNA target sequence for RAD21 (NM_006265.1,187-205).
gttctacgcacattttgtt

SEQ ID NO: 134888 - DNA, 19 bp, Homo sapiens
  siRNA target sequence for RAD21 (NM_006265.1,218-236).
gggcctctggccaaaattt

SEQ ID NO: 134889 - DNA, 19 bp, Homo sapiens
  siRNA target sequence for RAD21 (NM_006265.1,252-270).
gggataagaagctaaccaa

SEQ ID NO: 134890 - DNA, 19 bp, Homo sapiens
  siRNA target sequence for RAD21 (NM_006265.1,274-292).
ccatgtgttcgagtgtaat

SEQ ID NO: 134891 - DNA, 19 bp, Homo sapiens
  siRNA target sequence for RAD21 (NM_006265.1,300-318).
gcagcgtggagagtatcat

SEQ ID NO: 134892 - DNA, 19 bp, Homo sapiens
  siRNA target sequence for RAD21 (NM_006265.1,345-363).
ggacatcaggacatctctt

SEQ ID NO: 134893 - DNA, 19 bp, Homo sapiens
  siRNA target sequence for RAD21 (NM_006265.1,367-385).
gggagtagttcgaatctat

SEQ ID NO: 134894 - DNA, 19 bp, Homo sapiens
  siRNA target sequence for RAD21 (NM_006265.1,369-387).
gagtagttcgaatctatca

SEQ ID NO: 134895 - DNA, 19 bp, Homo sapiens
  siRNA target sequence for RAD21 (NM_006265.1,371-389).
gtagttcgaatctatcaca

SEQ ID NO: 134896 - DNA, 19 bp, Homo sapiens
  siRNA target sequence for RAD21 (NM_006265.1,411-429).
cagactgtaatgaagcatt

SEQ ID NO: 134897 - DNA, 19 bp, Homo sapiens
  siRNA target sequence for RAD21 (NM_006265.1,541-559).
gccactgcctgacttagat

SEQ ID NO: 134898 - DNA, 19 bp, Homo sapiens
  siRNA target sequence for RAD21 (NM_006265.1,718-736).
ggatgacgacatgttagta

SEQ ID NO: 134899 - DNA, 19 bp, Homo sapiens
  siRNA target sequence for RAD21 (NM_006265.1,719-737).
gatgacgacatgttagtaa

SEQ ID NO: 134900 - DNA, 19 bp, Homo sapiens
  siRNA target sequence for RAD21 (NM_006265.1,730-748).
gttagtaagcactactact

SEQ ID NO: 134901 - DNA, 19 bp, Homo sapiens
  siRNA target sequence for RAD21 (NM_006265.1,734-752).
gtaagcactactacttcta

SEQ ID NO: 134902 - DNA, 19 bp, Homo sapiens
  siRNA target sequence for RAD21 (NM_006265.1,747-765).
cttctaacctcctattaga

SEQ ID NO: 134903 - DNA, 19 bp, Homo sapiens
  siRNA target sequence for RAD21 (NM_006265.1,773-791).
cagagcaccagcaatctga

SEQ ID NO: 134904 - DNA, 19 bp, Homo sapiens
  siRNA target sequence for RAD21 (NM_006265.1,775-793).
gagcaccagcaatctgaat

SEQ ID NO: 134905 - DNA, 19 bp, Homo sapiens
  siRNA target sequence for RAD21 (NM_006265.1,864-882).
gaatattagatgacaaact

SEQ ID NO: 134906 - DNA, 19 bp, Homo sapiens
  siRNA target sequence for RAD21 (NM_006265.1,960-978).
ctgcacatgacgatatgga

SEQ ID NO: 134907 - DNA, 19 bp, Homo sapiens
  siRNA target sequence for RAD21 (NM_006265.1,1008-1026).
ctgatagtcctgattcagt

SEQ ID NO: 134908 - DNA, 19 bp, Homo sapiens
  siRNA target sequence for RAD21 (NM_006265.1,1045-1063).
gccaaccatgactgatcaa

SEQ ID NO: 134909 - DNA, 19 bp, Homo sapiens
  siRNA target sequence for RAD21 (NM_006265.1,1054-1072).
gactgatcaaacaacactt

SEQ ID NO: 134910 - DNA, 19 bp, Homo sapiens
  siRNA target sequence for RAD21 (NM_006265.1,1097-1115).
gcattggagcctattgata

SEQ ID NO: 134911 - DNA, 19 bp, Homo sapiens
  siRNA target sequence for RAD21 (NM_006265.1,1098-1116).
cattggagcctattgatat

SEQ ID NO: 134912 - DNA, 19 bp, Homo sapiens
  siRNA target sequence for RAD21 (NM_006265.1,1102-1120).
ggagcctattgatataact

SEQ ID NO: 134913 - DNA, 19 bp, Homo sapiens
  siRNA target sequence for RAD21 (NM_006265.1,1106-1124).
cctattgatataactgtta

SEQ ID NO: 134914 - DNA, 19 bp, Homo sapiens
  siRNA target sequence for RAD21 (NM_006265.1,1175-1193).
gagttggatagcaagacaa

SEQ ID NO: 134915 - DNA, 19 bp, Homo sapiens
  siRNA target sequence for RAD21 (NM_006265.1,1177-1195).
gttggatagcaagacaatt

SEQ ID NO: 134916 - DNA, 19 bp, Homo sapiens
  siRNA target sequence for RAD21 (NM_006265.1,1197-1215).
gagcccaacttagtgatta

SEQ ID NO: 134917 - DNA, 19 bp, Homo sapiens
  siRNA target sequence for RAD21 (NM_006265.1,1244-1262).
gcaccgcccaccaagaaat

SEQ ID NO: 134918 - DNA, 19 bp, Homo sapiens
  siRNA target sequence for RAD21 (NM_006265.1,1245-1263).
caccgcccaccaagaaatt

SEQ ID NO: 134919 - DNA, 19 bp, Homo sapiens
  siRNA target sequence for RAD21 (NM_006265.1,1248-1266).
cgcccaccaagaaattgat

SEQ ID NO: 134920 - DNA, 19 bp, Homo sapiens
  siRNA target sequence for RAD21 (NM_006265.1,1313-1331).
gctcagcctttgtggaata

SEQ ID NO: 134921 - DNA, 19 bp, Homo sapiens
  siRNA target sequence for RAD21 (NM_006265.1,1346-1364).
ctctttacacgctgtctta

SEQ ID NO: 134922 - DNA, 19 bp, Homo sapiens
  siRNA target sequence for RAD21 (NM_006265.1,1348-1366).
ctttacacgctgtcttaca

SEQ ID NO: 134923 - DNA, 19 bp, Homo sapiens
  siRNA target sequence for RAD21 (NM_006265.1,1373-1391).
gtaccagaagaccttagaa

SEQ ID NO: 134924 - DNA, 19 bp, Homo sapiens
  siRNA target sequence for RAD21 (NM_006265.1,1489-1507).
gcagcgtgatgttatcgat

SEQ ID NO: 134925 - DNA, 19 bp, Homo sapiens
  siRNA target sequence for RAD21 (NM_006265.1,1504-1522).
cgatgagcccattattgaa

SEQ ID NO: 134926 - DNA, 19 bp, Homo sapiens
  siRNA target sequence for RAD21 (NM_006265.1,1606-1624).
gggagttaagcgaaaagct

SEQ ID NO: 134927 - DNA, 19 bp, Homo sapiens
  siRNA target sequence for RAD21 (NM_006265.1,1886-1904).
cagcgtgctcttgctaaaa

SEQ ID NO: 134928 - DNA, 19 bp, Homo sapiens
  siRNA target sequence for RAD21 (NM_006265.1,1888-1906).
gcgtgctcttgctaaaact

SEQ ID NO: 134929 - DNA, 19 bp, Homo sapiens
  siRNA target sequence for RAD21 (NM_006265.1,1908-1926).
gagctgaatctatcagttt

SEQ ID NO: 134930 - DNA, 19 bp, Homo sapiens
  siRNA target sequence for RAD21 (NM_006265.1,1917-1935).
ctatcagtttgcttgagtt

SEQ ID NO: 134931 - DNA, 19 bp, Homo sapiens
  siRNA target sequence for RAD21 (NM_006265.1,1928-1946).
cttgagttatgtcgaaata

SEQ ID NO: 134932 - DNA, 19 bp, Homo sapiens
  siRNA target sequence for RAD21 (NM_006265.1,1931-1949).
gagttatgtcgaaatacga

SEQ ID NO: 134933 - DNA, 19 bp, Homo sapiens
  siRNA target sequence for RAD21 (NM_006265.1,1958-1976).
caagctgccgcaaagttct

SEQ ID NO: 134934 - DNA, 19 bp, Homo sapiens
  siRNA target sequence for RAD21 (NM_006265.1,1961-1979).
gctgccgcaaagttctaca

SEQ ID NO: 134935 - DNA, 19 bp, Homo sapiens
  siRNA target sequence for RAD21 (NM_006265.1,2054-2072).
cctggaccaaggttccata

SEQ ID NO: 134936 - DNA, 19 bp, Homo sapiens
  siRNA target sequence for RAD21 (NM_006265.1,2055-2073).
ctggaccaaggttccatat

SEQ ID NO: 134937 - DNA, 19 bp, Homo sapiens
  siRNA target sequence for RAD21 (NM_006265.1,2057-2075).
ggaccaaggttccatatta

SEQ ID NO: 134938 - DNA, 19 bp, Homo sapiens
  siRNA target sequence for RAD21 (NM_006265.1,2058-2076).
gaccaaggttccatattat

SEQ ID NO: 134939 - DNA, 19 bp, Homo sapiens
  siRNA target sequence for RAD21 (NM_006265.1,2060-2078).
ccaaggttccatattatat

SEQ ID NO: 134940 - DNA, 19 bp, Homo sapiens
  siRNA target sequence for RBBP6 (NM_006910.4,1043-1061).
gtcctgtgtgcattataaa

SEQ ID NO: 134941 - DNA, 19 bp, Homo sapiens
  siRNA target sequence for RBBP6 (NM_006910.4,1067-1085).
ctctaaactcaactatgat

SEQ ID NO: 134942 - DNA, 19 bp, Homo sapiens
  siRNA target sequence for RBBP6 (NM_006910.4,1114-1132).
ccctctgcgacttaaagaa

SEQ ID NO: 134943 - DNA, 19 bp, Homo sapiens
  siRNA target sequence for RBBP6 (NM_006910.4,1191-1209).
gcgcagacgaaagaagaat

SEQ ID NO: 134944 - DNA, 19 bp, Homo sapiens
  siRNA target sequence for RBBP6 (NM_006910.4,1198-1216).
cgaaagaagaatatactga

SEQ ID NO: 134945 - DNA, 19 bp, Homo sapiens
  siRNA target sequence for RBBP6 (NM_006910.4,1229-1247).
gattcctaagaattcttct

SEQ ID NO: 134946 - DNA, 19 bp, Homo sapiens
  siRNA target sequence for RBBP6 (NM_006910.4,1266-1284).
cctattggaggtgttaaat

SEQ ID NO: 134947 - DNA, 19 bp, Homo sapiens
  siRNA target sequence for RBBP6 (NM_006910.4,1285-1303).
ctacaagcaagacatatgt

SEQ ID NO: 134948 - DNA, 19 bp, Homo sapiens
  siRNA target sequence for RBBP6 (NM_006910.4,1292-1310).
caagacatatgttataagt

SEQ ID NO: 134949 - DNA, 19 bp, Homo sapiens
  siRNA target sequence for RBBP6 (NM_006910.4,1321-1339).
cagcgatggcaactacaaa

SEQ ID NO: 134950 - DNA, 19 bp, Homo sapiens
  siRNA target sequence for RBBP6 (NM_006910.4,1350-1368).
gactcttccgcgtctattt

SEQ ID NO: 134951 - DNA, 19 bp, Homo sapiens
  siRNA target sequence for RBBP6 (NM_006910.4,1352-1370).
ctcttccgcgtctatttct

SEQ ID NO: 134952 - DNA, 19 bp, Homo sapiens
  siRNA target sequence for RBBP6 (NM_006910.4,1354-1372).
cttccgcgtctatttctct

SEQ ID NO: 134953 - DNA, 19 bp, Homo sapiens
  siRNA target sequence for RBBP6 (NM_006910.4,1369-1387).
ctctggcccagcttacaaa

SEQ ID NO: 134954 - DNA, 19 bp, Homo sapiens
  siRNA target sequence for RBBP6 (NM_006910.4,1373-1391).
ggcccagcttacaaagact

SEQ ID NO: 134955 - DNA, 19 bp, Homo sapiens
  siRNA target sequence for RBBP6 (NM_006910.4,1531-1549).
gtggtaaacctggacatta

SEQ ID NO: 134956 - DNA, 19 bp, Homo sapiens
  siRNA target sequence for RBBP6 (NM_006910.4,1533-1551).
ggtaaacctggacattata

SEQ ID NO: 134957 - DNA, 19 bp, Homo sapiens
  siRNA target sequence for RBBP6 (NM_006910.4,1587-1605).
gaatctggtcctaggatta

SEQ ID NO: 134958 - DNA, 19 bp, Homo sapiens
  siRNA target sequence for RBBP6 (NM_006910.4,1591-1609).
ctggtcctaggattaaaaa

SEQ ID NO: 134959 - DNA, 19 bp, Homo sapiens
  siRNA target sequence for RBBP6 (NM_006910.4,1644-1662).
gtgaaagatcctaatatga

SEQ ID NO: 134960 - DNA, 19 bp, Homo sapiens
  siRNA target sequence for RBBP6 (NM_006910.4,1646-1664).
gaaagatcctaatatgaaa

SEQ ID NO: 134961 - DNA, 19 bp, Homo sapiens
  siRNA target sequence for RBBP6 (NM_006910.4,1705-1723).
ctatagatgcagaagcata

SEQ ID NO: 134962 - DNA, 19 bp, Homo sapiens
  siRNA target sequence for RBBP6 (NM_006910.4,1758-1776).
ccagaggagccatcttctt

SEQ ID NO: 134963 - DNA, 19 bp, Homo sapiens
  siRNA target sequence for RBBP6 (NM_006910.4,1794-1812).
cctatcccagatgaattgt

SEQ ID NO: 134964 - DNA, 19 bp, Homo sapiens
  siRNA target sequence for RBBP6 (NM_006910.4,1795-1813).
ctatcccagatgaattgtt

SEQ ID NO: 134965 - DNA, 19 bp, Homo sapiens
  siRNA target sequence for RBBP6 (NM_006910.4,1818-1836).
ctcatctgcaaggatatta

SEQ ID NO: 134966 - DNA, 19 bp, Homo sapiens
  siRNA target sequence for RBBP6 (NM_006910.4,1927-1945).
gtccgacgtgtcatcaaaa

SEQ ID NO: 134967 - DNA, 19 bp, Homo sapiens
  siRNA target sequence for RBBP6 (NM_006910.4,1930-1948).
cgacgtgtcatcaaaatga

SEQ ID NO: 134968 - DNA, 19 bp, Homo sapiens
  siRNA target sequence for RBBP6 (NM_006910.4,1931-1949).
gacgtgtcatcaaaatgat

SEQ ID NO: 134969 - DNA, 19 bp, Homo sapiens
  siRNA target sequence for RBBP6 (NM_006910.4,1950-1968).
gtttctcctgatgctttaa

SEQ ID NO: 134970 - DNA, 19 bp, Homo sapiens
  siRNA target sequence for RBBP6 (NM_006910.4,1987-2005).
gacaggctgtaaataactt

SEQ ID NO: 134971 - DNA, 19 bp, Homo sapiens
  siRNA target sequence for RBBP6 (NM_006910.4,1989-2007).
caggctgtaaataacttca

SEQ ID NO: 134972 - DNA, 19 bp, Homo sapiens
  siRNA target sequence for RBBP6 (NM_006910.4,2076-2094).
ccgagaccactgattcaga

SEQ ID NO: 134973 - DNA, 19 bp, Homo sapiens
  siRNA target sequence for RBBP6 (NM_006910.4,2114-2132).
gagatctccgatatcaaga

SEQ ID NO: 134974 - DNA, 19 bp, Homo sapiens
  siRNA target sequence for RBBP6 (NM_006910.4,2122-2140).
cgatatcaagacaacaaga

SEQ ID NO: 134975 - DNA, 19 bp, Homo sapiens
  siRNA target sequence for RBBP6 (NM_006910.4,2123-2141).
gatatcaagacaacaagat

SEQ ID NO: 134976 - DNA, 19 bp, Homo sapiens
  siRNA target sequence for RBBP6 (NM_006910.4,2131-2149).
gacaacaagatcctcttat

SEQ ID NO: 134977 - DNA, 19 bp, Homo sapiens
  siRNA target sequence for RBBP6 (NM_006910.4,2133-2151).
caacaagatcctcttatga

SEQ ID NO: 134978 - DNA, 19 bp, Homo sapiens
  siRNA target sequence for RBBP6 (NM_006910.4,2175-2193).
cacccagctccgtctatat

SEQ ID NO: 134979 - DNA, 19 bp, Homo sapiens
  siRNA target sequence for RBBP6 (NM_006910.4,2182-2200).
ctccgtctatatcttcatt

SEQ ID NO: 134980 - DNA, 19 bp, Homo sapiens
  siRNA target sequence for RBBP6 (NM_006910.4,2184-2202).
ccgtctatatcttcattaa

SEQ ID NO: 134981 - DNA, 19 bp, Homo sapiens
  siRNA target sequence for RBBP6 (NM_006910.4,2186-2204).
gtctatatcttcattaact

SEQ ID NO: 134982 - DNA, 19 bp, Homo sapiens
  siRNA target sequence for RBBP6 (NM_006910.4,2271-2289).
gatataactgcaacagtat

SEQ ID NO: 134983 - DNA, 19 bp, Homo sapiens
  siRNA target sequence for RBBP6 (NM_006910.4,2281-2299).
caacagtatccatatcagt

SEQ ID NO: 134984 - DNA, 19 bp, Homo sapiens
  siRNA target sequence for RBBP6 (NM_006910.4,2290-2308).
ccatatcagttcattcaga

SEQ ID NO: 134985 - DNA, 19 bp, Homo sapiens
  siRNA target sequence for RBBP6 (NM_006910.4,2323-2341).
cttttcgggattctgataa

SEQ ID NO: 134986 - DNA, 19 bp, Homo sapiens
  siRNA target sequence for RBBP6 (NM_006910.4,2329-2347).
gggattctgataataaaat

SEQ ID NO: 134987 - DNA, 19 bp, Homo sapiens
  siRNA target sequence for RBBP6 (NM_006910.4,2384-2402).
gggaacctcctcaattgca

SEQ ID NO: 134988 - DNA, 19 bp, Homo sapiens
  siRNA target sequence for RBBP6 (NM_006910.4,2401-2419).
caattaccgctcttatgga

SEQ ID NO: 134989 - DNA, 19 bp, Homo sapiens
  siRNA target sequence for RBBP6 (NM_006910.4,2500-2518).
caactggtccagtaagaat

SEQ ID NO: 134990 - DNA, 19 bp, Homo sapiens
  siRNA target sequence for RBBP6 (NM_006910.4,2503-2521).
ctggtccagtaagaataaa

SEQ ID NO: 134991 - DNA, 19 bp, Homo sapiens
  siRNA target sequence for RBBP6 (NM_006910.4,2505-2523).
ggtccagtaagaataaata

SEQ ID NO: 134992 - DNA, 19 bp, Homo sapiens
  siRNA target sequence for RBBP6 (NM_006910.4,2548-2566).
caggctgggaacattccaa

SEQ ID NO: 134993 - DNA, 19 bp, Homo sapiens
  siRNA target sequence for RBBP6 (NM_006910.4,2554-2572).
gggaacattccaacaaact

SEQ ID NO: 134994 - DNA, 19 bp, Homo sapiens
  siRNA target sequence for RBBP6 (NM_006910.4,2737-2755).
cgcctcctccccatacact

SEQ ID NO: 134995 - DNA, 19 bp, Homo sapiens
  siRNA target sequence for RBBP6 (NM_006910.4,2818-2836).
cacccgctgggtatagtgt

SEQ ID NO: 134996 - DNA, 19 bp, Homo sapiens
  siRNA target sequence for RBBP6 (NM_006910.4,2859-2877).
gctcctgccaatttatcaa

SEQ ID NO: 134997 - DNA, 19 bp, Homo sapiens
  siRNA target sequence for RBBP6 (NM_006910.4,2900-2918).
gcagacagctcattcaaat

SEQ ID NO: 134998 - DNA, 19 bp, Homo sapiens
  siRNA target sequence for RBBP6 (NM_006910.4,2905-2923).
cagctcattcaaataccat

SEQ ID NO: 134999 - DNA, 19 bp, Homo sapiens
  siRNA target sequence for RBBP6 (NM_006910.4,2968-2986).
gagagcagcgacgactaaa

SEQ ID NO: 135000 - DNA, 19 bp, Homo sapiens
  siRNA target sequence for RBBP6 (NM_006910.4,3005-3023).
gtccaagctagatgagttt

SEQ ID NO: 135001 - DNA, 19 bp, Homo sapiens
  siRNA target sequence for RBBP6 (NM_006910.4,3008-3026).
caagctagatgagtttaca

SEQ ID NO: 135002 - DNA, 19 bp, Homo sapiens
  siRNA target sequence for RBBP6 (NM_006910.4,3030-3048).
gattttgctaaggaattga

SEQ ID NO: 135003 - DNA, 19 bp, Homo sapiens
  siRNA target sequence for RBBP6 (NM_006910.4,3071-3089).
ggagcgtaggcgctcattt

SEQ ID NO: 135004 - DNA, 19 bp, Homo sapiens
  siRNA target sequence for RBBP6 (NM_006910.4,3072-3090).
gagcgtaggcgctcatttt

SEQ ID NO: 135005 - DNA, 19 bp, Homo sapiens
  siRNA target sequence for RBBP6 (NM_006910.4,3075-3093).
cgtaggcgctcattttcca

SEQ ID NO: 135006 - DNA, 19 bp, Homo sapiens
  siRNA target sequence for RBBP6 (NM_006910.4,3095-3113).
gtctaaatctccctatagt

SEQ ID NO: 135007 - DNA, 19 bp, Homo sapiens
  siRNA target sequence for RBBP6 (NM_006910.4,3107-3125).
ctatagtggttcttcgtat

SEQ ID NO: 135008 - DNA, 19 bp, Homo sapiens
  siRNA target sequence for RBBP6 (NM_006910.4,3121-3139).
cgtattcaagaagttcata

SEQ ID NO: 135009 - DNA, 19 bp, Homo sapiens
  siRNA target sequence for RBBP6 (NM_006910.4,3122-3140).
gtattcaagaagttcatat

SEQ ID NO: 135010 - DNA, 19 bp, Homo sapiens
  siRNA target sequence for RBBP6 (NM_006910.4,3127-3145).
caagaagttcatatactta

SEQ ID NO: 135011 - DNA, 19 bp, Homo sapiens
  siRNA target sequence for RBBP6 (NM_006910.4,3203-3221).
ctcacattctcgttcctat

SEQ ID NO: 135012 - DNA, 19 bp, Homo sapiens
  siRNA target sequence for RBBP6 (NM_006910.4,3253-3271).
gaggcaagagccgcaatta

SEQ ID NO: 135013 - DNA, 19 bp, Homo sapiens
  siRNA target sequence for RBBP6 (NM_006910.4,3280-3298).
ggtctagatctcatggata

SEQ ID NO: 135014 - DNA, 19 bp, Homo sapiens
  siRNA target sequence for RBBP6 (NM_006910.4,3281-3299).
gtctagatctcatggatat

SEQ ID NO: 135015 - DNA, 19 bp, Homo sapiens
  siRNA target sequence for RBBP6 (NM_006910.4,3323-3341).
cccttacagacgctatcat

SEQ ID NO: 135016 - DNA, 19 bp, Homo sapiens
  siRNA target sequence for RBBP6 (NM_006910.4,3324-3342).
ccttacagacgctatcatt

SEQ ID NO: 135017 - DNA, 19 bp, Homo sapiens
  siRNA target sequence for RBBP6 (NM_006910.4,3335-3353).
ctatcattcacgatcaaga

SEQ ID NO: 135018 - DNA, 19 bp, Homo sapiens
  siRNA target sequence for RBBP6 (NM_006910.4,3371-3389).
gggacagtctcctaataaa

SEQ ID NO: 135019 - DNA, 19 bp, Homo sapiens
  siRNA target sequence for RBBP6 (NM_006910.4,3379-3397).
ctcctaataaacgtaatgt

SEQ ID NO: 135020 - DNA, 19 bp, Homo sapiens
  siRNA target sequence for RBBP6 (NM_006910.4,3406-3424).
gggaaacagaacgtgaata

SEQ ID NO: 135021 - DNA, 19 bp, Homo sapiens
  siRNA target sequence for RBBP6 (NM_006910.4,3453-3471).
ccatatgacatgaaagcat

SEQ ID NO: 135022 - DNA, 19 bp, Homo sapiens
  siRNA target sequence for RBBP6 (NM_006910.4,3590-3608).
gcctagaccctcagcaaat

SEQ ID NO: 135023 - DNA, 19 bp, Homo sapiens
  siRNA target sequence for RBBP6 (NM_006910.4,3595-3613).
gaccctcagcaaatagaga

SEQ ID NO: 135024 - DNA, 19 bp, Homo sapiens
  siRNA target sequence for RBBP6 (NM_006910.4,3631-3649).
gatttttgccacttaacat

SEQ ID NO: 135025 - DNA, 19 bp, Homo sapiens
  siRNA target sequence for RBBP6 (NM_006910.4,3670-3688).
gaggccgcagagaagacta

SEQ ID NO: 135026 - DNA, 19 bp, Homo sapiens
  siRNA target sequence for RBBP6 (NM_006910.4,3673-3691).
gccgcagagaagactatgt

SEQ ID NO: 135027 - DNA, 19 bp, Homo sapiens
  siRNA target sequence for RBBP6 (NM_006910.4,3674-3692).
ccgcagagaagactatgtt

SEQ ID NO: 135028 - DNA, 19 bp, Homo sapiens
  siRNA target sequence for RBBP6 (NM_006910.4,3693-3711).
ggtgggcaaagtcatagaa

SEQ ID NO: 135029 - DNA, 19 bp, Homo sapiens
  siRNA target sequence for RBBP6 (NM_006910.4,3703-3721).
gtcatagaagtcgaaacat

SEQ ID NO: 135030 - DNA, 19 bp, Homo sapiens
  siRNA target sequence for RBBP6 (NM_006910.4,3751-3769).
caagagatggtcacaatca

SEQ ID NO: 135031 - DNA, 19 bp, Homo sapiens
  siRNA target sequence for RBBP6 (NM_006910.4,3759-3777).
ggtcacaatcagaaggata

SEQ ID NO: 135032 - DNA, 19 bp, Homo sapiens
  siRNA target sequence for RBBP6 (NM_006910.4,3760-3778).
gtcacaatcagaaggataa

SEQ ID NO: 135033 - DNA, 19 bp, Homo sapiens
  siRNA target sequence for RBBP6 (NM_006910.4,3762-3780).
cacaatcagaaggataata

SEQ ID NO: 135034 - DNA, 19 bp, Homo sapiens
  siRNA target sequence for RBBP6 (NM_006910.4,3809-3827).
cgctccaggagatggtaaa

SEQ ID NO: 135035 - DNA, 19 bp, Homo sapiens
  siRNA target sequence for RBBP6 (NM_006910.4,3903-3921).
gagacttctaggaaatcaa

SEQ ID NO: 135036 - DNA, 19 bp, Homo sapiens
  siRNA target sequence for RBBP6 (NM_006910.4,4009-4027).
caatggatgcagaatcaat

SEQ ID NO: 135037 - DNA, 19 bp, Homo sapiens
  siRNA target sequence for RBBP6 (NM_006910.4,4013-4031).
ggatgcagaatcaatcact

SEQ ID NO: 135038 - DNA, 19 bp, Homo sapiens
  siRNA target sequence for RBBP6 (NM_006910.4,4017-4035).
gcagaatcaatcactttta

SEQ ID NO: 135039 - DNA, 19 bp, Homo sapiens
  siRNA target sequence for RBBP6 (NM_006910.4,4200-4218).
cgatctgaacctccaatta

SEQ ID NO: 135040 - DNA, 19 bp, Homo sapiens
  siRNA target sequence for RBBP6 (NM_006910.4,4201-4219).
gatctgaacctccaattaa

SEQ ID NO: 135041 - DNA, 19 bp, Homo sapiens
  siRNA target sequence for RBBP6 (NM_006910.4,4239-4257).
ccgaagactgacaatacta

SEQ ID NO: 135042 - DNA, 19 bp, Homo sapiens
  siRNA target sequence for RBBP6 (NM_006910.4,4244-4262).
gactgacaatactaaatca

SEQ ID NO: 135043 - DNA, 19 bp, Homo sapiens
  siRNA target sequence for RBBP6 (NM_006910.4,4248-4266).
gacaatactaaatcatcat

SEQ ID NO: 135044 - DNA, 19 bp, Homo sapiens
  siRNA target sequence for RBBP6 (NM_006910.4,4399-4417).
cagaaaagctaacaactaa

SEQ ID NO: 135045 - DNA, 19 bp, Homo sapiens
  siRNA target sequence for RBBP6 (NM_006910.4,4504-4522).
gcgtagataaagattttga

SEQ ID NO: 135046 - DNA, 19 bp, Homo sapiens
  siRNA target sequence for RBBP6 (NM_006910.4,4506-4524).
gtagataaagattttgagt

SEQ ID NO: 135047 - DNA, 19 bp, Homo sapiens
  siRNA target sequence for RBBP6 (NM_006910.4,4515-4533).
gattttgagtcttcttcaa

SEQ ID NO: 135048 - DNA, 19 bp, Homo sapiens
  siRNA target sequence for RBBP6 (NM_006910.4,4573-4591).
catcaccaaagcgcaaaat

SEQ ID NO: 135049 - DNA, 19 bp, Homo sapiens
  siRNA target sequence for RBBP6 (NM_006910.4,4621-4639).
cccctgaaaaggacaaaat

SEQ ID NO: 135050 - DNA, 19 bp, Homo sapiens
  siRNA target sequence for RBBP6 (NM_006910.4,4650-4668).
gcgccagccaaaaaaatca

SEQ ID NO: 135051 - DNA, 19 bp, Homo sapiens
  siRNA target sequence for RBBP6 (NM_006910.4,4651-4669).
cgccagccaaaaaaatcaa

SEQ ID NO: 135052 - DNA, 19 bp, Homo sapiens
  siRNA target sequence for RBBP6 (NM_006910.4,4745-4763).
ggagtcaacatctagcaaa

SEQ ID NO: 135053 - DNA, 19 bp, Homo sapiens
  siRNA target sequence for RBBP6 (NM_006910.4,4748-4766).
gtcaacatctagcaaagtt

SEQ ID NO: 135054 - DNA, 19 bp, Homo sapiens
  siRNA target sequence for RBBP6 (NM_006910.4,4868-4886).
cagtcctgtgcggaaatct

SEQ ID NO: 135055 - DNA, 19 bp, Homo sapiens
  siRNA target sequence for RBBP6 (NM_006910.4,4903-4921).
caaagcgaactgtgattaa

SEQ ID NO: 135056 - DNA, 19 bp, Homo sapiens
  siRNA target sequence for RBBP6 (NM_006910.4,4908-4926).
cgaactgtgattaaaacga

SEQ ID NO: 135057 - DNA, 19 bp, Homo sapiens
  siRNA target sequence for RBBP6 (NM_006910.4,4924-4942).
cgatggaagaatataataa

SEQ ID NO: 135058 - DNA, 19 bp, Homo sapiens
  siRNA target sequence for RBBP6 (NM_006910.4,4954-4972).
cgccagctgaagatgttat

SEQ ID NO: 135059 - DNA, 19 bp, Homo sapiens
  siRNA target sequence for RBBP6 (NM_006910.4,4983-5001).
caggttcctcaatccaaat

SEQ ID NO: 135060 - DNA, 19 bp, Homo sapiens
  siRNA target sequence for RBBP6 (NM_006910.4,5068-5086).
gaaaacctgctagtgttat

SEQ ID NO: 135061 - DNA, 19 bp, Homo sapiens
  siRNA target sequence for RBBP6 (NM_006910.4,5123-5141).
gtatcctgagaaagaaagt

SEQ ID NO: 135062 - DNA, 19 bp, Homo sapiens
  siRNA target sequence for RBBP6 (NM_006910.4,5140-5158).
gtgagccatccgagaaaat

SEQ ID NO: 135063 - DNA, 19 bp, Homo sapiens
  siRNA target sequence for RBBP6 (NM_006910.4,5177-5195).
cgtgagccatgaaatcata

SEQ ID NO: 135064 - DNA, 19 bp, Homo sapiens
  siRNA target sequence for RBBP6 (NM_006910.4,5180-5198).
gagccatgaaatcatacaa

SEQ ID NO: 135065 - DNA, 19 bp, Homo sapiens
  siRNA target sequence for RBBP6 (NM_006910.4,5182-5200).
gccatgaaatcatacaaca

SEQ ID NO: 135066 - DNA, 19 bp, Homo sapiens
  siRNA target sequence for RBBP6 (NM_006910.4,5249-5267).
caaagatcgagattattca

SEQ ID NO: 135067 - DNA, 19 bp, Homo sapiens
  siRNA target sequence for RBBP6 (NM_006910.4,5340-5358).
ctgaatgaacaaggaaatt

SEQ ID NO: 135068 - DNA, 19 bp, Homo sapiens
  siRNA target sequence for RBBP6 (NM_006910.4,5385-5403).
gaggctagaacgtcagata

SEQ ID NO: 135069 - DNA, 19 bp, Homo sapiens
  siRNA target sequence for RBBP6 (NM_006910.4,5387-5405).
ggctagaacgtcagataaa

SEQ ID NO: 135070 - DNA, 19 bp, Homo sapiens
  siRNA target sequence for RBBP6 (NM_006910.4,5414-5432).
cactcgtgcttcctcaaat

SEQ ID NO: 135071 - DNA, 19 bp, Homo sapiens
  siRNA target sequence for RBBP6 (NM_006910.4,5416-5434).
ctcgtgcttcctcaaataa

SEQ ID NO: 135072 - DNA, 19 bp, Homo sapiens
  siRNA target sequence for RBBP6 (NM_006910.4,5443-5461).
ctcccaatagagacaaaaa

SEQ ID NO: 135073 - DNA, 19 bp, Homo sapiens
  siRNA target sequence for RBBP6 (NM_006910.4,5494-5512).
ccaaacgtagagatgaaaa

SEQ ID NO: 135074 - DNA, 19 bp, Homo sapiens
  siRNA target sequence for RBBP6 (NM_006910.4,5537-5555).
ctctccttctcggaataaa

SEQ ID NO: 135075 - DNA, 19 bp, Homo sapiens
  siRNA target sequence for RBBP6 (NM_006910.4,5539-5557).
ctccttctcggaataaaga

SEQ ID NO: 135076 - DNA, 19 bp, Homo sapiens
  siRNA target sequence for RBBP6 (NM_006910.4,5614-5632).
gaacaggagattccaaaaa

SEQ ID NO: 135077 - DNA, 19 bp, Homo sapiens
  siRNA target sequence for RBBP6 (NM_006910.4,5619-5637).
ggagattccaaaaaaagta

SEQ ID NO: 135078 - DNA, 19 bp, Homo sapiens
  siRNA target sequence for RBBP6 (NM_006910.4,5675-5693).
caaagccacttatgatact

SEQ ID NO: 135079 - DNA, 19 bp, Homo sapiens
  siRNA target sequence for RBBP6 (NM_006910.4,5746-5764).
gtgagaagcatgtattaga

SEQ ID NO: 135080 - DNA, 19 bp, Homo sapiens
  siRNA target sequence for RBBP6 (NM_006910.4,5783-5801).
gtcaagtggcaataaacta

SEQ ID NO: 135081 - DNA, 19 bp, Homo sapiens
  siRNA target sequence for RBBP6 (NM_006910.4,5785-5803).
caagtggcaataaactact

SEQ ID NO: 135082 - DNA, 19 bp, Homo sapiens
  siRNA target sequence for RBBP6 (NM_006910.4,5853-5871).
gggcaaattgacaagagta

SEQ ID NO: 135083 - DNA, 19 bp, Homo sapiens
  siRNA target sequence for RBBP6 (NM_006910.4,5946-5964).
gcttttgaaccagactata

SEQ ID NO: 135084 - DNA, 19 bp, Homo sapiens
  siRNA target sequence for RBBP6 (NM_006910.4,5994-6012).
gtaaaagaagaggaatctt

SEQ ID NO: 135085 - DNA, 19 bp, Homo sapiens
  siRNA target sequence for RBBP6 (NM_032626.5,1333-1351).
ctacaaaagcagtatgtaa

SEQ ID NO: 135086 - DNA, 19 bp, Homo sapiens
  siRNA target sequence for RBBP6 (NM_032626.5,1342-1360).
cagtatgtaaaaacacaat

SEQ ID NO: 135087 - DNA, 19 bp, Homo sapiens
  siRNA target sequence for RCBTB1 (NM_018191.2,248-266).
ggaaagtggcccatcttca

SEQ ID NO: 135088 - DNA, 19 bp, Homo sapiens
  siRNA target sequence for RCBTB1 (NM_018191.2,340-358).
gtacgttactgacaatgat

SEQ ID NO: 135089 - DNA, 19 bp, Homo sapiens
  siRNA target sequence for RCBTB1 (NM_018191.2,368-386).
gtatttggactgaactata

SEQ ID NO: 135090 - DNA, 19 bp, Homo sapiens
  siRNA target sequence for RCBTB1 (NM_018191.2,374-392).
ggactgaactatagtaact

SEQ ID NO: 135091 - DNA, 19 bp, Homo sapiens
  siRNA target sequence for RCBTB1 (NM_018191.2,507-525).
ccgaagatggagtggttta

SEQ ID NO: 135092 - DNA, 19 bp, Homo sapiens
  siRNA target sequence for RCBTB1 (NM_018191.2,508-526).
cgaagatggagtggtttat

SEQ ID NO: 135093 - DNA, 19 bp, Homo sapiens
  siRNA target sequence for RCBTB1 (NM_018191.2,589-607).
cgtccaggtctgtaccaat

SEQ ID NO: 135094 - DNA, 19 bp, Homo sapiens
  siRNA target sequence for RCBTB1 (NM_018191.2,600-618).
gtaccaatctcttgatcaa

SEQ ID NO: 135095 - DNA, 19 bp, Homo sapiens
  siRNA target sequence for RCBTB1 (NM_018191.2,639-657).
gtggctcacatcattcaat

SEQ ID NO: 135096 - DNA, 19 bp, Homo sapiens
  siRNA target sequence for RCBTB1 (NM_018191.2,740-758).
ccaactcctcgaaaagtta

SEQ ID NO: 135097 - DNA, 19 bp, Homo sapiens
  siRNA target sequence for RCBTB1 (NM_018191.2,744-762).
ctcctcgaaaagttacaaa

SEQ ID NO: 135098 - DNA, 19 bp, Homo sapiens
  siRNA target sequence for RCBTB1 (NM_018191.2,749-767).
cgaaaagttacaaactgtt

SEQ ID NO: 135099 - DNA, 19 bp, Homo sapiens
  siRNA target sequence for RCBTB1 (NM_018191.2,794-812).
gcctgtggtcagacttcat

SEQ ID NO: 135100 - DNA, 19 bp, Homo sapiens
  siRNA target sequence for RCBTB1 (NM_018191.2,826-844).
ggacaatggcgaggtatat

SEQ ID NO: 135101 - DNA, 19 bp, Homo sapiens
  siRNA target sequence for RCBTB1 (NM_018191.2,952-970).
ctgcggttacgcacatact

SEQ ID NO: 135102 - DNA, 19 bp, Homo sapiens
  siRNA target sequence for RCBTB1 (NM_018191.2,954-972).
gcggttacgcacatactct

SEQ ID NO: 135103 - DNA, 19 bp, Homo sapiens
  siRNA target sequence for RCBTB1 (NM_018191.2,955-973).
cggttacgcacatactcta

SEQ ID NO: 135104 - DNA, 19 bp, Homo sapiens
  siRNA target sequence for RCBTB1 (NM_018191.2,1003-1021).
ctggggagctaacacatat

SEQ ID NO: 135105 - DNA, 19 bp, Homo sapiens
  siRNA target sequence for RCBTB1 (NM_018191.2,1344-1362).
ctgatctgaagtttcgaat

SEQ ID NO: 135106 - DNA, 19 bp, Homo sapiens
  siRNA target sequence for RCBTB1 (NM_018191.2,1354-1372).
gtttcgaattgatggaaaa

SEQ ID NO: 135107 - DNA, 19 bp, Homo sapiens
  siRNA target sequence for RCBTB1 (NM_018191.2,1405-1423).
caggtgtgagcattttcga

SEQ ID NO: 135108 - DNA, 19 bp, Homo sapiens
  siRNA target sequence for RCBTB1 (NM_018191.2,1437-1455).
cgtattggaatgaagacat

SEQ ID NO: 135109 - DNA, 19 bp, Homo sapiens
  siRNA target sequence for RCBTB1 (NM_018191.2,1534-1552).
cgacctgccgccagaagat

SEQ ID NO: 135110 - DNA, 19 bp, Homo sapiens
  siRNA target sequence for RCBTB1 (NM_018191.2,1543-1561).
gccagaagatgctataggt

SEQ ID NO: 135111 - DNA, 19 bp, Homo sapiens
  siRNA target sequence for RCBTB1 (NM_018191.2,1565-1583).
ctggatttggcgacatctt

SEQ ID NO: 135112 - DNA, 19 bp, Homo sapiens
  siRNA target sequence for RCBTB1 (NM_018191.2,1574-1592).
gcgacatcttactgtgaaa

SEQ ID NO: 135113 - DNA, 19 bp, Homo sapiens
  siRNA target sequence for RCBTB1 (NM_018191.2,1575-1593).
cgacatcttactgtgaaaa

SEQ ID NO: 135114 - DNA, 19 bp, Homo sapiens
  siRNA target sequence for RCBTB1 (NM_018191.2,1772-1790).
ggccctctgctaaaggaat

SEQ ID NO: 135115 - DNA, 19 bp, Homo sapiens
  siRNA target sequence for RCBTB1 (NM_018191.2,1773-1791).
gccctctgctaaaggaatt

SEQ ID NO: 135116 - DNA, 19 bp, Homo sapiens
  siRNA target sequence for RCN2 (NM_002902.1,260-278).
gactgcaggcgatcataaa

SEQ ID NO: 135117 - DNA, 19 bp, Homo sapiens
  siRNA target sequence for RCN2 (NM_002902.1,264-282).
gcaggcgatcataaagaaa

SEQ ID NO: 135118 - DNA, 19 bp, Homo sapiens
  siRNA target sequence for RCN2 (NM_002902.1,269-287).
cgatcataaagaaaatcga

SEQ ID NO: 135119 - DNA, 19 bp, Homo sapiens
  siRNA target sequence for RCN2 (NM_002902.1,303-321).
ctttctcactgaaagtgaa

SEQ ID NO: 135120 - DNA, 19 bp, Homo sapiens
  siRNA target sequence for RCN2 (NM_002902.1,413-431).
ctgtgacttgggatgaata

SEQ ID NO: 135121 - DNA, 19 bp, Homo sapiens
  siRNA target sequence for RCN2 (NM_002902.1,441-459).
gatgtatgatcgtgtgatt

SEQ ID NO: 135122 - DNA, 19 bp, Homo sapiens
  siRNA target sequence for RCN2 (NM_002902.1,493-511).
gaagaggagtcctttagga

SEQ ID NO: 135123 - DNA, 19 bp, Homo sapiens
  siRNA target sequence for RCN2 (NM_002902.1,509-527).
ggaagcttcacttaaagga

SEQ ID NO: 135124 - DNA, 19 bp, Homo sapiens
  siRNA target sequence for RCN2 (NM_002902.1,566-584).
ccggtttgagtcttgaaga

SEQ ID NO: 135125 - DNA, 19 bp, Homo sapiens
  siRNA target sequence for RCN2 (NM_002902.1,624-642).
gacggaatttgtcattcaa

SEQ ID NO: 135126 - DNA, 19 bp, Homo sapiens
  siRNA target sequence for RCN2 (NM_002902.1,740-758).
cagaatggatacttgttga

SEQ ID NO: 135127 - DNA, 19 bp, Homo sapiens
  siRNA target sequence for RCN2 (NM_002902.1,763-781).
gacagattcgtgaatgatt

SEQ ID NO: 135128 - DNA, 19 bp, Homo sapiens
  siRNA target sequence for RCN2 (NM_002902.1,765-783).
cagattcgtgaatgattat

SEQ ID NO: 135129 - DNA, 19 bp, Homo sapiens
  siRNA target sequence for RCN2 (NM_002902.1,767-785).
gattcgtgaatgattatga

SEQ ID NO: 135130 - DNA, 19 bp, Homo sapiens
  siRNA target sequence for RCN2 (NM_002902.1,771-789).
cgtgaatgattatgacaaa

SEQ ID NO: 135131 - DNA, 19 bp, Homo sapiens
  siRNA target sequence for RCN2 (NM_002902.1,811-829).
ccccaagagctgttacctt

SEQ ID NO: 135132 - DNA, 19 bp, Homo sapiens
  siRNA target sequence for RCN2 (NM_002902.1,826-844).
ccttgggtagtacctaata

SEQ ID NO: 135133 - DNA, 19 bp, Homo sapiens
  siRNA target sequence for RCN2 (NM_002902.1,827-845).
cttgggtagtacctaataa

SEQ ID NO: 135134 - DNA, 19 bp, Homo sapiens
  siRNA target sequence for RCN2 (NM_002902.1,862-880).
gaggaggcgcttcatctaa

SEQ ID NO: 135135 - DNA, 19 bp, Homo sapiens
  siRNA target sequence for RCN2 (NM_002902.1,933-951).
ggaaaacccggacttgttt

SEQ ID NO: 135136 - DNA, 19 bp, Homo sapiens
  siRNA target sequence for RCN2 (NM_002902.1,982-1000).
cagctccatgatgactatt

SEQ ID NO: 135137 - DNA, 19 bp, Homo sapiens
  siRNA target sequence for RGS19 (NM_005873.1,545-563).
gctgggcgcagtcttttga

SEQ ID NO: 135138 - DNA, 19 bp, Homo sapiens
  siRNA target sequence for RGS19IP1 (NM_005716.1,731-749).
gcaaggccttcgacatgat

SEQ ID NO: 135139 - DNA, 19 bp, Homo sapiens
  siRNA target sequence for RGS19IP1 (NM_005716.1,1002-1020).
cgaacggctgggtgacttt

SEQ ID NO: 135140 - DNA, 19 bp, Homo sapiens
  siRNA target sequence for RGS20 (NM_003702.2,224-242).
ctcgtgtctcactgttaga

SEQ ID NO: 135141 - DNA, 19 bp, Homo sapiens
  siRNA target sequence for RGS20 (NM_003702.2,226-244).
cgtgtctcactgttagaaa

SEQ ID NO: 135142 - DNA, 19 bp, Homo sapiens
  siRNA target sequence for RGS20 (NM_003702.2,505-523).
ggataatctatgaagacta

SEQ ID NO: 135143 - DNA, 19 bp, Homo sapiens
  siRNA target sequence for RGS20 (NM_003702.2,596-614).
ggagccatcccaacacata

SEQ ID NO: 135144 - DNA, 19 bp, Homo sapiens
  siRNA target sequence for RGS20 (NM_003702.2,597-615).
gagccatcccaacacatat

SEQ ID NO: 135145 - DNA, 19 bp, Homo sapiens
  siRNA target sequence for RGS20 (NM_003702.2,601-619).
catcccaacacatattcga

SEQ ID NO: 135146 - DNA, 19 bp, Homo sapiens
  siRNA target sequence for RGS20 (NM_003702.2,624-642).
gctcaacttcagatttaca

SEQ ID NO: 135147 - DNA, 19 bp, Homo sapiens
  siRNA target sequence for RGS20 (NM_003702.2,650-668).
gcacagagactcatatcct

SEQ ID NO: 135148 - DNA, 19 bp, Homo sapiens
  siRNA target sequence for RGS20 (NM_003702.2,661-679).
catatcctcgattcatgaa

SEQ ID NO: 135149 - DNA, 19 bp, Homo sapiens
  siRNA target sequence for RGS20 (NM_003702.2,705-723).
cagtccttatcggagaaat

SEQ ID NO: 135150 - DNA, 19 bp, Homo sapiens
  siRNA target sequence for RGS20 (NM_003702.2,707-725).
gtccttatcggagaaatct

SEQ ID NO: 135151 - DNA, 19 bp, Homo sapiens
  siRNA target sequence for RGS20 (NM_003702.2,709-727).
ccttatcggagaaatctat

SEQ ID NO: 135152 - DNA, 19 bp, Homo sapiens
  siRNA target sequence for RGS20 (NM_003702.2,710-728).
cttatcggagaaatctatt

SEQ ID NO: 135153 - DNA, 19 bp, Homo sapiens
  siRNA target sequence for RHOBTB3 (NM_014899.1,361-379).
ggaacgagggggacacatt

SEQ ID NO: 135154 - DNA, 19 bp, Homo sapiens
  siRNA target sequence for RHOBTB3 (NM_014899.1,517-535).
gtgcgtttgggaatgtcaa

SEQ ID NO: 135155 - DNA, 19 bp, Homo sapiens
  siRNA target sequence for RHOBTB3 (NM_014899.1,556-574).
ccgtctgggacatatttga

SEQ ID NO: 135156 - DNA, 19 bp, Homo sapiens
  siRNA target sequence for RHOBTB3 (NM_014899.1,558-576).
gtctgggacatatttgaca

SEQ ID NO: 135157 - DNA, 19 bp, Homo sapiens
  siRNA target sequence for RHOBTB3 (NM_014899.1,583-601).
ggtacacttctcgaaatct

SEQ ID NO: 135158 - DNA, 19 bp, Homo sapiens
  siRNA target sequence for RHOBTB3 (NM_014899.1,584-602).
gtacacttctcgaaatcta

SEQ ID NO: 135159 - DNA, 19 bp, Homo sapiens
  siRNA target sequence for RHOBTB3 (NM_014899.1,587-605).
cacttctcgaaatctaatt

SEQ ID NO: 135160 - DNA, 19 bp, Homo sapiens
  siRNA target sequence for RHOBTB3 (NM_014899.1,635-653).
caacgttaatgacaagttt

SEQ ID NO: 135161 - DNA, 19 bp, Homo sapiens
  siRNA target sequence for RHOBTB3 (NM_014899.1,638-656).
cgttaatgacaagttttca

SEQ ID NO: 135162 - DNA, 19 bp, Homo sapiens
  siRNA target sequence for RHOBTB3 (NM_014899.1,639-657).
gttaatgacaagttttcat

SEQ ID NO: 135163 - DNA, 19 bp, Homo sapiens
  siRNA target sequence for RHOBTB3 (NM_014899.1,729-747).
gctgttggtaccagacaaa

SEQ ID NO: 135164 - DNA, 19 bp, Homo sapiens
  siRNA target sequence for RHOBTB3 (NM_014899.1,736-754).
gtaccagacaaaatgaaga

SEQ ID NO: 135165 - DNA, 19 bp, Homo sapiens
  siRNA target sequence for RHOBTB3 (NM_014899.1,744-762).
caaaatgaagagttacctt

SEQ ID NO: 135166 - DNA, 19 bp, Homo sapiens
  siRNA target sequence for RHOBTB3 (NM_014899.1,750-768).
gaagagttaccttgtacat

SEQ ID NO: 135167 - DNA, 19 bp, Homo sapiens
  siRNA target sequence for RHOBTB3 (NM_014899.1,817-835).
ggatccaacttgcaaaaga

SEQ ID NO: 135168 - DNA, 19 bp, Homo sapiens
  siRNA target sequence for RHOBTB3 (NM_014899.1,865-883).
gccttgatgacttctacat

SEQ ID NO: 135169 - DNA, 19 bp, Homo sapiens
  siRNA target sequence for RHOBTB3 (NM_014899.1,897-915).
ggaggagtgttggagtatt

SEQ ID NO: 135170 - DNA, 19 bp, Homo sapiens
  siRNA target sequence for RHOBTB3 (NM_014899.1,898-916).
gaggagtgttggagtattt

SEQ ID NO: 135171 - DNA, 19 bp, Homo sapiens
  siRNA target sequence for RHOBTB3 (NM_014899.1,900-918).
ggagtgttggagtatttta

SEQ ID NO: 135172 - DNA, 19 bp, Homo sapiens
  siRNA target sequence for RHOBTB3 (NM_014899.1,994-1012).
gaccacctcaacttgaaca

SEQ ID NO: 135173 - DNA, 19 bp, Homo sapiens
  siRNA target sequence for RHOBTB3 (NM_014899.1,1037-1055).
ggctgaagcgtcacattat

SEQ ID NO: 135174 - DNA, 19 bp, Homo sapiens
  siRNA target sequence for RHOBTB3 (NM_014899.1,1038-1056).
gctgaagcgtcacattata

SEQ ID NO: 135175 - DNA, 19 bp, Homo sapiens
  siRNA target sequence for RHOBTB3 (NM_014899.1,1050-1068).
cattataactctgacttaa

SEQ ID NO: 135176 - DNA, 19 bp, Homo sapiens
  siRNA target sequence for RHOBTB3 (NM_014899.1,1093-1111).
gtgtggacgtggtatttta

SEQ ID NO: 135177 - DNA, 19 bp, Homo sapiens
  siRNA target sequence for RHOBTB3 (NM_014899.1,1159-1177).
gcgctgtaagccatgtttt

SEQ ID NO: 135178 - DNA, 19 bp, Homo sapiens
  siRNA target sequence for RHOBTB3 (NM_014899.1,1196-1214).
gaagagtcccactgacatt

SEQ ID NO: 135179 - DNA, 19 bp, Homo sapiens
  siRNA target sequence for RHOBTB3 (NM_014899.1,1233-1251).
cgaactacccaggatcttt

SEQ ID NO: 135180 - DNA, 19 bp, Homo sapiens
  siRNA target sequence for RHOBTB3 (NM_014899.1,1234-1252).
gaactacccaggatctttt

SEQ ID NO: 135181 - DNA, 19 bp, Homo sapiens
  siRNA target sequence for RHOBTB3 (NM_014899.1,1281-1299).
ggtgctagccatgaatctt

SEQ ID NO: 135182 - DNA, 19 bp, Homo sapiens
  siRNA target sequence for RHOBTB3 (NM_014899.1,1309-1327).
caccattacgagtcattgt

SEQ ID NO: 135183 - DNA, 19 bp, Homo sapiens
  siRNA target sequence for RHOBTB3 (NM_014899.1,1311-1329).
ccattacgagtcattgtta

SEQ ID NO: 135184 - DNA, 19 bp, Homo sapiens
  siRNA target sequence for RHOBTB3 (NM_014899.1,1312-1330).
cattacgagtcattgttaa

SEQ ID NO: 135185 - DNA, 19 bp, Homo sapiens
  siRNA target sequence for RHOBTB3 (NM_014899.1,1334-1352).
cgccctcttctgttcttgt

SEQ ID NO: 135186 - DNA, 19 bp, Homo sapiens
  siRNA target sequence for RHOBTB3 (NM_014899.1,1359-1377).
gacatccttcgcttcattt

SEQ ID NO: 135187 - DNA, 19 bp, Homo sapiens
  siRNA target sequence for RHOBTB3 (NM_014899.1,1361-1379).
catccttcgcttcatttat

SEQ ID NO: 135188 - DNA, 19 bp, Homo sapiens
  siRNA target sequence for RHOBTB3 (NM_014899.1,1440-1458).
ggggatgtttcaaatgtaa

SEQ ID NO: 135189 - DNA, 19 bp, Homo sapiens
  siRNA target sequence for RHOBTB3 (NM_014899.1,1441-1459).
gggatgtttcaaatgtaat

SEQ ID NO: 135190 - DNA, 19 bp, Homo sapiens
  siRNA target sequence for RHOBTB3 (NM_014899.1,1460-1478).
cgagaaagttaaatgcatt

SEQ ID NO: 135191 - DNA, 19 bp, Homo sapiens
  siRNA target sequence for RHOBTB3 (NM_014899.1,1496-1514).
gattaattgcctaaggaat

SEQ ID NO: 135192 - DNA, 19 bp, Homo sapiens
  siRNA target sequence for RHOBTB3 (NM_014899.1,1585-1603).
cgatgcttgccgatgttgt

SEQ ID NO: 135193 - DNA, 19 bp, Homo sapiens
  siRNA target sequence for RHOBTB3 (NM_014899.1,1593-1611).
gccgatgttgtcttcgaaa

SEQ ID NO: 135194 - DNA, 19 bp, Homo sapiens
  siRNA target sequence for RHOBTB3 (NM_014899.1,1594-1612).
ccgatgttgtcttcgaaat

SEQ ID NO: 135195 - DNA, 19 bp, Homo sapiens
  siRNA target sequence for RHOBTB3 (NM_014899.1,1595-1613).
cgatgttgtcttcgaaatt

SEQ ID NO: 135196 - DNA, 19 bp, Homo sapiens
  siRNA target sequence for RHOBTB3 (NM_014899.1,1646-1664).
cctggtggcccgttgtgaa

SEQ ID NO: 135197 - DNA, 19 bp, Homo sapiens
  siRNA target sequence for RHOBTB3 (NM_014899.1,1712-1730).
cctgattcccgtttatggt

SEQ ID NO: 135198 - DNA, 19 bp, Homo sapiens
  siRNA target sequence for RHOBTB3 (NM_014899.1,1720-1738).
ccgtttatggtgtttccaa

SEQ ID NO: 135199 - DNA, 19 bp, Homo sapiens
  siRNA target sequence for RHOBTB3 (NM_014899.1,1914-1932).
gcatccatgaaccttgata

SEQ ID NO: 135200 - DNA, 19 bp, Homo sapiens
  siRNA target sequence for RHOBTB3 (NM_014899.1,1919-1937).
catgaaccttgatatagtt

SEQ ID NO: 135201 - DNA, 19 bp, Homo sapiens
  siRNA target sequence for RHOBTB3 (NM_014899.1,1981-1999).
caacctggctacttcattt

SEQ ID NO: 135202 - DNA, 19 bp, Homo sapiens
  siRNA target sequence for RHOBTB3 (NM_014899.1,2024-2042).
cagtcaaaagcctgaattt

SEQ ID NO: 135203 - DNA, 19 bp, Homo sapiens
  siRNA target sequence for RHOBTB3 (NM_014899.1,2057-2075).
ggaagaacgcagttttgtt

SEQ ID NO: 135204 - DNA, 19 bp, Homo sapiens
  siRNA target sequence for RHOBTB3 (NM_014899.1,2082-2100).
cacagatggccgtcgaata

SEQ ID NO: 135205 - DNA, 19 bp, Homo sapiens
  siRNA target sequence for RHOBTB3 (NM_014899.1,2086-2104).
gatggccgtcgaatatgta

SEQ ID NO: 135206 - DNA, 19 bp, Homo sapiens
  siRNA target sequence for RHOBTB3 (NM_014899.1,2089-2107).
ggccgtcgaatatgtactt

SEQ ID NO: 135207 - DNA, 19 bp, Homo sapiens
  siRNA target sequence for RHOBTB3 (NM_014899.1,2091-2109).
ccgtcgaatatgtacttga

SEQ ID NO: 135208 - DNA, 19 bp, Homo sapiens
  siRNA target sequence for RHOBTB3 (NM_014899.1,2092-2110).
cgtcgaatatgtacttgaa

SEQ ID NO: 135209 - DNA, 19 bp, Homo sapiens
  siRNA target sequence for RHOBTB3 (NM_014899.1,2118-2136).
gcggaatacaggaagtata

SEQ ID NO: 135210 - DNA, 19 bp, Homo sapiens
  siRNA target sequence for RHOBTB3 (NM_014899.1,2119-2137).
cggaatacaggaagtatat

SEQ ID NO: 135211 - DNA, 19 bp, Homo sapiens
  siRNA target sequence for RHOBTB3 (NM_014899.1,2144-2162).
ccggaaatgtcgttgctta

SEQ ID NO: 135212 - DNA, 19 bp, Homo sapiens
  siRNA target sequence for RIN1 (NM_004292.1,194-212).
gggcacctggcgagagaaa

SEQ ID NO: 135213 - DNA, 19 bp, Homo sapiens
  siRNA target sequence for RIN1 (NM_004292.1,195-213).
ggcacctggcgagagaaaa

SEQ ID NO: 135214 - DNA, 19 bp, Homo sapiens
  siRNA target sequence for RIN1 (NM_004292.1,397-415).
gttcctcgtgcggaaatct

SEQ ID NO: 135215 - DNA, 19 bp, Homo sapiens
  siRNA target sequence for RIN1 (NM_004292.1,401-419).
ctcgtgcggaaatctaaca

SEQ ID NO: 135216 - DNA, 19 bp, Homo sapiens
  siRNA target sequence for RIN1 (NM_004292.1,785-803).
gccgccttgtgcttcttca

SEQ ID NO: 135217 - DNA, 19 bp, Homo sapiens
  siRNA target sequence for RIN1 (NM_004292.1,786-804).
ccgccttgtgcttcttcaa

SEQ ID NO: 135218 - DNA, 19 bp, Homo sapiens
  siRNA target sequence for RIN1 (NM_004292.1,830-848).
cccaccaagcgggagaaat

SEQ ID NO: 135219 - DNA, 19 bp, Homo sapiens
  siRNA target sequence for RINZF (NM_023929.2,936-954).
ccctgctagcggaaaggaa

SEQ ID NO: 135220 - DNA, 19 bp, Homo sapiens
  siRNA target sequence for RINZF (NM_023929.2,1379-1397).
ctgcgctattccaaggata

SEQ ID NO: 135221 - DNA, 19 bp, Homo sapiens
  siRNA target sequence for RINZF (NM_023929.2,1487-1505).
cgagggacccgcaactaca

SEQ ID NO: 135222 - DNA, 19 bp, Homo sapiens
  siRNA target sequence for RINZF (NM_023929.2,1488-1506).
gagggacccgcaactacaa

SEQ ID NO: 135223 - DNA, 19 bp, Homo sapiens
  siRNA target sequence for RINZF (NM_023929.2,1490-1508).
gggacccgcaactacaaga

SEQ ID NO: 135224 - DNA, 19 bp, Homo sapiens
  siRNA target sequence for RINZF (NM_023929.2,1491-1509).
ggacccgcaactacaagaa

SEQ ID NO: 135225 - DNA, 19 bp, Homo sapiens
  siRNA target sequence for RINZF (NM_023929.2,1618-1636).
gccaaatgagaactcttat

SEQ ID NO: 135226 - DNA, 19 bp, Homo sapiens
  siRNA target sequence for RINZF (NM_023929.2,1630-1648).
ctcttattgctatcaactt

SEQ ID NO: 135227 - DNA, 19 bp, Homo sapiens
  siRNA target sequence for RINZF (NM_023929.2,1643-1661).
caacttctgcgacaactaa

SEQ ID NO: 135228 - DNA, 19 bp, Homo sapiens
  siRNA target sequence for RINZF (NM_023929.2,1703-1721).
gtggtaagcggaaaaatct

SEQ ID NO: 135229 - DNA, 19 bp, Homo sapiens
  siRNA target sequence for RINZF (NM_023929.2,1748-1766).
gcaggcagccgtttcttta

SEQ ID NO: 135230 - DNA, 19 bp, Homo sapiens
  siRNA target sequence for RINZF (NM_023929.2,1753-1771).
cagccgtttctttaagact

SEQ ID NO: 135231 - DNA, 19 bp, Homo sapiens
  siRNA target sequence for RINZF (NM_023929.2,1793-1811).
gaaagccctaaccaaaaca

SEQ ID NO: 135232 - DNA, 19 bp, Homo sapiens
  siRNA target sequence for RINZF (NM_023929.2,1798-1816).
ccctaaccaaaacaatact

SEQ ID NO: 135233 - DNA, 19 bp, Homo sapiens
  siRNA target sequence for RINZF (NM_023929.2,1810-1828).
caatactacccacttagat

SEQ ID NO: 135234 - DNA, 19 bp, Homo sapiens
  siRNA target sequence for RINZF (NM_023929.2,1855-1873).
catcttggacttcttgtat

SEQ ID NO: 135235 - DNA, 19 bp, Homo sapiens
  siRNA target sequence for RINZF (NM_023929.2,1918-1936).
gaccgtggccagctatctt

SEQ ID NO: 135236 - DNA, 19 bp, Homo sapiens
  siRNA target sequence for RINZF (NM_023929.2,1952-1970).
gttcaaacttgccgaaatt

SEQ ID NO: 135237 - DNA, 19 bp, Homo sapiens
  siRNA target sequence for RINZF (NM_023929.2,2019-2037).
ctgtagttgtggactataa

SEQ ID NO: 135238 - DNA, 19 bp, Homo sapiens
  siRNA target sequence for RINZF (NM_023929.2,2021-2039).
gtagttgtggactataata

SEQ ID NO: 135239 - DNA, 19 bp, Homo sapiens
  siRNA target sequence for RINZF (NM_023929.2,2024-2042).
gttgtggactataataata

SEQ ID NO: 135240 - DNA, 19 bp, Homo sapiens
  siRNA target sequence for RINZF (NM_023929.2,2029-2047).
ggactataataatagaaaa

SEQ ID NO: 135241 - DNA, 19 bp, Homo sapiens
  siRNA target sequence for RINZF (NM_023929.2,2043-2061).
gaaaaccagttaatagaga

SEQ ID NO: 135242 - DNA, 19 bp, Homo sapiens
  siRNA target sequence for RINZF (NM_023929.2,2106-2124).
caacacggaatcttaccaa

SEQ ID NO: 135243 - DNA, 19 bp, Homo sapiens
  siRNA target sequence for RINZF (NM_023929.2,2109-2127).
cacggaatcttaccaattt

SEQ ID NO: 135244 - DNA, 19 bp, Homo sapiens
  siRNA target sequence for RINZF (NM_023929.2,2121-2139).
ccaatttggcaagtaatgt

SEQ ID NO: 135245 - DNA, 19 bp, Homo sapiens
  siRNA target sequence for RINZF (NM_023929.2,2167-2185).
cgacgagggccaaatagaa

SEQ ID NO: 135246 - DNA, 19 bp, Homo sapiens
  siRNA target sequence for RINZF (NM_023929.2,2168-2186).
gacgagggccaaatagaaa

SEQ ID NO: 135247 - DNA, 19 bp, Homo sapiens
  siRNA target sequence for RINZF (NM_023929.2,2171-2189).
gagggccaaatagaaaact

SEQ ID NO: 135248 - DNA, 19 bp, Homo sapiens
  siRNA target sequence for RINZF (NM_023929.2,2287-2305).
gggctcccagggaattcaa

SEQ ID NO: 135249 - DNA, 19 bp, Homo sapiens
  siRNA target sequence for RINZF (NM_023929.2,2323-2341).
gaggaaaaaccaaactaca

SEQ ID NO: 135250 - DNA, 19 bp, Homo sapiens
  siRNA target sequence for RINZF (NM_023929.2,2364-2382).
cacctaataatgaaacgaa

SEQ ID NO: 135251 - DNA, 19 bp, Homo sapiens
  siRNA target sequence for RINZF (NM_023929.2,2367-2385).
ctaataatgaaacgaattt

SEQ ID NO: 135252 - DNA, 19 bp, Homo sapiens
  siRNA target sequence for RINZF (NM_023929.2,2484-2502).
ggccagatggtgataggaa

SEQ ID NO: 135253 - DNA, 19 bp, Homo sapiens
  siRNA target sequence for RINZF (NM_023929.2,2485-2503).
gccagatggtgataggaat

SEQ ID NO: 135254 - DNA, 19 bp, Homo sapiens
  siRNA target sequence for RINZF (NM_023929.2,2664-2682).
gtgaatcatctctaatcat

SEQ ID NO: 135255 - DNA, 19 bp, Homo sapiens
  siRNA target sequence for RINZF (NM_023929.2,2666-2684).
gaatcatctctaatcatga

SEQ ID NO: 135256 - DNA, 19 bp, Homo sapiens
  siRNA target sequence for RINZF (NM_023929.2,2673-2691).
ctctaatcatgaacaagtt

SEQ ID NO: 135257 - DNA, 19 bp, Homo sapiens
  siRNA target sequence for RINZF (NM_023929.2,2698-2716).
ccctcattgtagctatgta

SEQ ID NO: 135258 - DNA, 19 bp, Homo sapiens
  siRNA target sequence for RINZF (NM_023929.2,2706-2724).
gtagctatgtagccaaata

SEQ ID NO: 135259 - DNA, 19 bp, Homo sapiens
  siRNA target sequence for RINZF (NM_023929.2,2719-2737).
caaatacagacgaacacta

SEQ ID NO: 135260 - DNA, 19 bp, Homo sapiens
  siRNA target sequence for RINZF (NM_023929.2,2769-2787).
gatcatttagctgtgatat

SEQ ID NO: 135261 - DNA, 19 bp, Homo sapiens
  siRNA target sequence for RINZF (NM_023929.2,2800-2818).
gtttactcgaagagaacat

SEQ ID NO: 135262 - DNA, 19 bp, Homo sapiens
  siRNA target sequence for RINZF (NM_023929.2,2832-2850).
ccctggtgcataaaaagga

SEQ ID NO: 135263 - DNA, 19 bp, Homo sapiens
  siRNA target sequence for RINZF (NM_023929.2,2834-2852).
ctggtgcataaaaaggata

SEQ ID NO: 135264 - DNA, 19 bp, Homo sapiens
  siRNA target sequence for RINZF (NM_023929.2,2836-2854).
ggtgcataaaaaggataaa

SEQ ID NO: 135265 - DNA, 19 bp, Homo sapiens
  siRNA target sequence for RINZF (NM_023929.2,2925-2943).
gacgttatggtgtttgtgt

SEQ ID NO: 135266 - DNA, 19 bp, Homo sapiens
  siRNA target sequence for RINZF (NM_023929.2,3094-3112).
ctctcgatgggatgaatca

SEQ ID NO: 135267 - DNA, 19 bp, Homo sapiens
  siRNA target sequence for RPC8 (NM_138338.1,281-299).
gcgtggtgtttcatccatt

SEQ ID NO: 135268 - DNA, 19 bp, Homo sapiens
  siRNA target sequence for RPC8 (NM_138338.1,516-534).
ggtggacgagagctttgtt

SEQ ID NO: 135269 - DNA, 19 bp, Homo sapiens
  siRNA target sequence for RPE65 (NM_000329.1,127-145).
ccgctcacagctcatgtaa

SEQ ID NO: 135270 - DNA, 19 bp, Homo sapiens
  siRNA target sequence for RPE65 (NM_000329.1,212-230).
gatctgagccattttacca

SEQ ID NO: 135271 - DNA, 19 bp, Homo sapiens
  siRNA target sequence for RPE65 (NM_000329.1,306-324).
ccgcactgatgcttacgta

SEQ ID NO: 135272 - DNA, 19 bp, Homo sapiens
  siRNA target sequence for RPE65 (NM_000329.1,337-355).
gagaaaaggatcgtcataa

SEQ ID NO: 135273 - DNA, 19 bp, Homo sapiens
  siRNA target sequence for RPE65 (NM_000329.1,339-357).
gaaaaggatcgtcataaca

SEQ ID NO: 135274 - DNA, 19 bp, Homo sapiens
  siRNA target sequence for RPE65 (NM_000329.1,344-362).
ggatcgtcataacagaatt

SEQ ID NO: 135275 - DNA, 19 bp, Homo sapiens
  siRNA target sequence for RPE65 (NM_000329.1,379-397).
ccagatccctgcaagaata

SEQ ID NO: 135276 - DNA, 19 bp, Homo sapiens
  siRNA target sequence for RPE65 (NM_000329.1,380-398).
cagatccctgcaagaatat

SEQ ID NO: 135277 - DNA, 19 bp, Homo sapiens
  siRNA target sequence for RPE65 (NM_000329.1,382-400).
gatccctgcaagaatatat

SEQ ID NO: 135278 - DNA, 19 bp, Homo sapiens
  siRNA target sequence for RPE65 (NM_000329.1,496-514).
gagaccaactttattacaa

SEQ ID NO: 135279 - DNA, 19 bp, Homo sapiens
  siRNA target sequence for RPE65 (NM_000329.1,526-544).
gagaccttggagacaatta

SEQ ID NO: 135280 - DNA, 19 bp, Homo sapiens
  siRNA target sequence for RPE65 (NM_000329.1,549-567).
ggttgatctttgcaactat

SEQ ID NO: 135281 - DNA, 19 bp, Homo sapiens
  siRNA target sequence for RPE65 (NM_000329.1,561-579).
caactatgtctctgtcaat

SEQ ID NO: 135282 - DNA, 19 bp, Homo sapiens
  siRNA target sequence for RPE65 (NM_000329.1,590-608).
ctcacccccacattgaaaa

SEQ ID NO: 135283 - DNA, 19 bp, Homo sapiens
  siRNA target sequence for RPE65 (NM_000329.1,594-612).
cccccacattgaaaatgat

SEQ ID NO: 135284 - DNA, 19 bp, Homo sapiens
  siRNA target sequence for RPE65 (NM_000329.1,610-628).
gatggaaccgtttacaata

SEQ ID NO: 135285 - DNA, 19 bp, Homo sapiens
  siRNA target sequence for RPE65 (NM_000329.1,617-635).
ccgtttacaatattggtaa

SEQ ID NO: 135286 - DNA, 19 bp, Homo sapiens
  siRNA target sequence for RPE65 (NM_000329.1,618-636).
cgtttacaatattggtaat

SEQ ID NO: 135287 - DNA, 19 bp, Homo sapiens
  siRNA target sequence for RPE65 (NM_000329.1,619-637).
gtttacaatattggtaatt

SEQ ID NO: 135288 - DNA, 19 bp, Homo sapiens
  siRNA target sequence for RPE65 (NM_000329.1,661-679).
gcctacaacattgtaaaga

SEQ ID NO: 135289 - DNA, 19 bp, Homo sapiens
  siRNA target sequence for RPE65 (NM_000329.1,763-781).
ccatcttacgttcatagtt

SEQ ID NO: 135290 - DNA, 19 bp, Homo sapiens
  siRNA target sequence for RPE65 (NM_000329.1,764-782).
catcttacgttcatagttt

SEQ ID NO: 135291 - DNA, 19 bp, Homo sapiens
  siRNA target sequence for RPE65 (NM_000329.1,784-802).
ggtctgactcccaactata

SEQ ID NO: 135292 - DNA, 19 bp, Homo sapiens
  siRNA target sequence for RPE65 (NM_000329.1,785-803).
gtctgactcccaactatat

SEQ ID NO: 135293 - DNA, 19 bp, Homo sapiens
  siRNA target sequence for RPE65 (NM_000329.1,789-807).
gactcccaactatatcgtt

SEQ ID NO: 135294 - DNA, 19 bp, Homo sapiens
  siRNA target sequence for RPE65 (NM_000329.1,794-812).
ccaactatatcgtttttgt

SEQ ID NO: 135295 - DNA, 19 bp, Homo sapiens
  siRNA target sequence for RPE65 (NM_000329.1,813-831).
ggagacaccagtcaaaatt

SEQ ID NO: 135296 - DNA, 19 bp, Homo sapiens
  siRNA target sequence for RPE65 (NM_000329.1,814-832).
gagacaccagtcaaaatta

SEQ ID NO: 135297 - DNA, 19 bp, Homo sapiens
  siRNA target sequence for RPE65 (NM_000329.1,818-836).
caccagtcaaaattaacct

SEQ ID NO: 135298 - DNA, 19 bp, Homo sapiens
  siRNA target sequence for RPE65 (NM_000329.1,868-886).
ggagccaactacatggatt

SEQ ID NO: 135299 - DNA, 19 bp, Homo sapiens
  siRNA target sequence for RPE65 (NM_000329.1,872-890).
ccaactacatggattgttt

SEQ ID NO: 135300 - DNA, 19 bp, Homo sapiens
  siRNA target sequence for RPE65 (NM_000329.1,999-1017).
caacacctatgaagacaat

SEQ ID NO: 135301 - DNA, 19 bp, Homo sapiens
  siRNA target sequence for RPE65 (NM_000329.1,1040-1058).
gctgctggaaaggatttga

SEQ ID NO: 135302 - DNA, 19 bp, Homo sapiens
  siRNA target sequence for RPE65 (NM_000329.1,1057-1075).
gagtttgtttataattact

SEQ ID NO: 135303 - DNA, 19 bp, Homo sapiens
  siRNA target sequence for RPE65 (NM_000329.1,1151-1169).
ggagatatgtacttccttt

SEQ ID NO: 135304 - DNA, 19 bp, Homo sapiens
  siRNA target sequence for RPE65 (NM_000329.1,1204-1222).
gtcacgctccccaatacaa

SEQ ID NO: 135305 - DNA, 19 bp, Homo sapiens
  siRNA target sequence for RPE65 (NM_000329.1,1206-1224).
cacgctccccaatacaact

SEQ ID NO: 135306 - DNA, 19 bp, Homo sapiens
  siRNA target sequence for RPE65 (NM_000329.1,1283-1301).
cagggcctcgtcaagcatt

SEQ ID NO: 135307 - DNA, 19 bp, Homo sapiens
  siRNA target sequence for RPE65 (NM_000329.1,1289-1307).
ctcgtcaagcatttgagtt

SEQ ID NO: 135308 - DNA, 19 bp, Homo sapiens
  siRNA target sequence for RPE65 (NM_000329.1,1303-1321).
gagtttcctcaaatcaatt

SEQ ID NO: 135309 - DNA, 19 bp, Homo sapiens
  siRNA target sequence for RPE65 (NM_000329.1,1356-1374).
gtatggacttggcttgaat

SEQ ID NO: 135310 - DNA, 19 bp, Homo sapiens
  siRNA target sequence for RPE65 (NM_000329.1,1391-1409).
ggctctgtaagctgaatgt

SEQ ID NO: 135311 - DNA, 19 bp, Homo sapiens
  siRNA target sequence for RPE65 (NM_000329.1,1433-1451).
ggcaagagcctgattcata

SEQ ID NO: 135312 - DNA, 19 bp, Homo sapiens
  siRNA target sequence for RPE65 (NM_000329.1,1552-1570).
gcttatctcctgattctga

SEQ ID NO: 135313 - DNA, 19 bp, Homo sapiens
  siRNA target sequence for RPE65 (NM_000329.1,1553-1571).
cttatctcctgattctgaa

SEQ ID NO: 135314 - DNA, 19 bp, Homo sapiens
  siRNA target sequence for RPE65 (NM_000329.1,1567-1585).
ctgaatgccaaggacttaa

SEQ ID NO: 135315 - DNA, 19 bp, Homo sapiens
  siRNA target sequence for RPE65 (NM_000329.1,1617-1635).
catccctgtcacctttcat

SEQ ID NO: 135316 - DNA, 19 bp, Homo sapiens
  siRNA target sequence for RPE65 (NM_000329.1,1628-1646).
cctttcatggactgttcaa

SEQ ID NO: 135317 - DNA, 19 bp, Homo sapiens
  siRNA target sequence for RPE65 (NM_000329.1,1633-1651).
catggactgttcaaaaaat

SEQ ID NO: 135318 - DNA, 19 bp, Homo sapiens
  siRNA target sequence for RPGR (NM_000328.1,86-104).
cgattcgggtgctgtgttt

SEQ ID NO: 135319 - DNA, 19 bp, Homo sapiens
  siRNA target sequence for RPGR (NM_000328.1,87-105).
gattcgggtgctgtgttta

SEQ ID NO: 135320 - DNA, 19 bp, Homo sapiens
  siRNA target sequence for RPGR (NM_000328.1,138-156).
cccggtaaattctggttta

SEQ ID NO: 135321 - DNA, 19 bp, Homo sapiens
  siRNA target sequence for RPGR (NM_000328.1,139-157).
ccggtaaattctggtttaa

SEQ ID NO: 135322 - DNA, 19 bp, Homo sapiens
  siRNA target sequence for RPGR (NM_000328.1,140-158).
cggtaaattctggtttaaa

SEQ ID NO: 135323 - DNA, 19 bp, Homo sapiens
  siRNA target sequence for RPGR (NM_000328.1,165-183).
gtccctgtacatctttcat

SEQ ID NO: 135324 - DNA, 19 bp, Homo sapiens
  siRNA target sequence for RPGR (NM_000328.1,201-219).
gctgttgttaccggaaata

SEQ ID NO: 135325 - DNA, 19 bp, Homo sapiens
  siRNA target sequence for RPGR (NM_000328.1,204-222).
gttgttaccggaaataata

SEQ ID NO: 135326 - DNA, 19 bp, Homo sapiens
  siRNA target sequence for RPGR (NM_000328.1,248-266).
ctggggtcagttaggatta

SEQ ID NO: 135327 - DNA, 19 bp, Homo sapiens
  siRNA target sequence for RPGR (NM_000328.1,281-299).
catcagcaagccaacatgt

SEQ ID NO: 135328 - DNA, 19 bp, Homo sapiens
  siRNA target sequence for RPGR (NM_000328.1,353-371).
caccctggtgtcaacagaa

SEQ ID NO: 135329 - DNA, 19 bp, Homo sapiens
  siRNA target sequence for RPGR (NM_000328.1,420-438).
cttggtgacaccgaagaaa

SEQ ID NO: 135330 - DNA, 19 bp, Homo sapiens
  siRNA target sequence for RPGR (NM_000328.1,469-487).
catccgagcataagattaa

SEQ ID NO: 135331 - DNA, 19 bp, Homo sapiens
  siRNA target sequence for RPGR (NM_000328.1,472-490).
ccgagcataagattaagca

SEQ ID NO: 135332 - DNA, 19 bp, Homo sapiens
  siRNA target sequence for RPGR (NM_000328.1,491-509).
gctgtctgctggatctaat

SEQ ID NO: 135333 - DNA, 19 bp, Homo sapiens
  siRNA target sequence for RPGR (NM_000328.1,492-510).
ctgtctgctggatctaata

SEQ ID NO: 135334 - DNA, 19 bp, Homo sapiens
  siRNA target sequence for RPGR (NM_000328.1,494-512).
gtctgctggatctaatact

SEQ ID NO: 135335 - DNA, 19 bp, Homo sapiens
  siRNA target sequence for RPGR (NM_000328.1,557-575).
caattccgaagggcaaatt

SEQ ID NO: 135336 - DNA, 19 bp, Homo sapiens
  siRNA target sequence for RPGR (NM_000328.1,563-581).
cgaagggcaaattggttta

SEQ ID NO: 135337 - DNA, 19 bp, Homo sapiens
  siRNA target sequence for RPGR (NM_000328.1,564-582).
gaagggcaaattggtttaa

SEQ ID NO: 135338 - DNA, 19 bp, Homo sapiens
  siRNA target sequence for RPGR (NM_000328.1,638-656).
ctggatctcttgtggatat

SEQ ID NO: 135339 - DNA, 19 bp, Homo sapiens
  siRNA target sequence for RPGR (NM_000328.1,676-694).
caacagatggtgagctata

SEQ ID NO: 135340 - DNA, 19 bp, Homo sapiens
  siRNA target sequence for RPGR (NM_000328.1,679-697).
cagatggtgagctatatgt

SEQ ID NO: 135341 - DNA, 19 bp, Homo sapiens
  siRNA target sequence for RPGR (NM_000328.1,833-851).
cacggagaatgctgtgtat

SEQ ID NO: 135342 - DNA, 19 bp, Homo sapiens
  siRNA target sequence for RPGR (NM_000328.1,853-871).
cctttgggctgggacaatt

SEQ ID NO: 135343 - DNA, 19 bp, Homo sapiens
  siRNA target sequence for RPGR (NM_000328.1,929-947).
gaatattagggatcaaaca

SEQ ID NO: 135344 - DNA, 19 bp, Homo sapiens
  siRNA target sequence for RPGR (NM_000328.1,979-997).
cagctttgataacagatat

SEQ ID NO: 135345 - DNA, 19 bp, Homo sapiens
  siRNA target sequence for RPGR (NM_000328.1,991-1009).
cagatatcggccttatgta

SEQ ID NO: 135346 - DNA, 19 bp, Homo sapiens
  siRNA target sequence for RPGR (NM_000328.1,993-1011).
gatatcggccttatgtata

SEQ ID NO: 135347 - DNA, 19 bp, Homo sapiens
  siRNA target sequence for RPGR (NM_000328.1,1020-1038).
gatggtcgccacggaaaat

SEQ ID NO: 135348 - DNA, 19 bp, Homo sapiens
  siRNA target sequence for RPGR (NM_000328.1,1042-1060).
gacttggactggagaattt

SEQ ID NO: 135349 - DNA, 19 bp, Homo sapiens
  siRNA target sequence for RPGR (NM_000328.1,1047-1065).
ggactggagaattttacca

SEQ ID NO: 135350 - DNA, 19 bp, Homo sapiens
  siRNA target sequence for RPGR (NM_000328.1,1190-1208).
cgatgaaataaatgatact

SEQ ID NO: 135351 - DNA, 19 bp, Homo sapiens
  siRNA target sequence for RPGR (NM_000328.1,1211-1229).
cttatctgtggcgactttt

SEQ ID NO: 135352 - DNA, 19 bp, Homo sapiens
  siRNA target sequence for RPGR (NM_000328.1,1230-1248).
ctgccgtatagcagtttaa

SEQ ID NO: 135353 - DNA, 19 bp, Homo sapiens
  siRNA target sequence for RPGR (NM_000328.1,1233-1251).
ccgtatagcagtttaacct

SEQ ID NO: 135354 - DNA, 19 bp, Homo sapiens
  siRNA target sequence for RPGR (NM_000328.1,1305-1323).
gagaggtctccagattctt

SEQ ID NO: 135355 - DNA, 19 bp, Homo sapiens
  siRNA target sequence for RPGR (NM_000328.1,1307-1325).
gaggtctccagattctttt

SEQ ID NO: 135356 - DNA, 19 bp, Homo sapiens
  siRNA target sequence for RPGR (NM_000328.1,1334-1352).
gagaacactacctccaata

SEQ ID NO: 135357 - DNA, 19 bp, Homo sapiens
  siRNA target sequence for RPGR (NM_000328.1,1402-1420).
cacgatgttctgagagaaa

SEQ ID NO: 135358 - DNA, 19 bp, Homo sapiens
  siRNA target sequence for RPGR (NM_000328.1,1546-1564).
ctactgatatcttaaacat

SEQ ID NO: 135359 - DNA, 19 bp, Homo sapiens
  siRNA target sequence for RPGR (NM_000328.1,1577-1595).
gagcctgaattccaatgaa

SEQ ID NO: 135360 - DNA, 19 bp, Homo sapiens
  siRNA target sequence for RPGR (NM_000328.1,1661-1679).
ggatacagctcttactgaa

SEQ ID NO: 135361 - DNA, 19 bp, Homo sapiens
  siRNA target sequence for RPGR (NM_000328.1,1662-1680).
gatacagctcttactgaaa

SEQ ID NO: 135362 - DNA, 19 bp, Homo sapiens
  siRNA target sequence for RPGR (NM_000328.1,1666-1684).
cagctcttactgaaaacga

SEQ ID NO: 135363 - DNA, 19 bp, Homo sapiens
  siRNA target sequence for RPGR (NM_000328.1,1675-1693).
ctgaaaacgatgatagtga

SEQ ID NO: 135364 - DNA, 19 bp, Homo sapiens
  siRNA target sequence for RPGR (NM_000328.1,1746-1764).
gtgtcacaagggattttca

SEQ ID NO: 135365 - DNA, 19 bp, Homo sapiens
  siRNA target sequence for RPGR (NM_000328.1,1772-1790).
gccagctacgactatcgaa

SEQ ID NO: 135366 - DNA, 19 bp, Homo sapiens
  siRNA target sequence for RPGR (NM_000328.1,1777-1795).
ctacgactatcgaagcatt

SEQ ID NO: 135367 - DNA, 19 bp, Homo sapiens
  siRNA target sequence for RPGR (NM_000328.1,1781-1799).
gactatcgaagcattttca

SEQ ID NO: 135368 - DNA, 19 bp, Homo sapiens
  siRNA target sequence for RPGR (NM_000328.1,1830-1848).
gaaggagcagaggattcaa

SEQ ID NO: 135369 - DNA, 19 bp, Homo sapiens
  siRNA target sequence for RPGR (NM_000328.1,1988-2006).
ggaactaaaactagaagat

SEQ ID NO: 135370 - DNA, 19 bp, Homo sapiens
  siRNA target sequence for RPGR (NM_000328.1,2071-2089).
gtgttcctacaggttatca

SEQ ID NO: 135371 - DNA, 19 bp, Homo sapiens
  siRNA target sequence for RPGR (NM_000328.1,2073-2091).
gttcctacaggttatcaca

SEQ ID NO: 135372 - DNA, 19 bp, Homo sapiens
  siRNA target sequence for RPGR (NM_000328.1,2077-2095).
ctacaggttatcacagtaa

SEQ ID NO: 135373 - DNA, 19 bp, Homo sapiens
  siRNA target sequence for RPGR (NM_000328.1,2124-2142).
gatagctcagctgaaacta

SEQ ID NO: 135374 - DNA, 19 bp, Homo sapiens
  siRNA target sequence for RPGR (NM_000328.1,2128-2146).
gctcagctgaaactattga

SEQ ID NO: 135375 - DNA, 19 bp, Homo sapiens
  siRNA target sequence for RPGR (NM_000328.1,2177-2195).
ggccatttgtgagtacaat

SEQ ID NO: 135376 - DNA, 19 bp, Homo sapiens
  siRNA target sequence for RPGR (NM_000328.1,2229-2247).
gatagcagttcattagaaa

SEQ ID NO: 135377 - DNA, 19 bp, Homo sapiens
  siRNA target sequence for RPGR (NM_000328.1,2233-2251).
gcagttcattagaaatcct

SEQ ID NO: 135378 - DNA, 19 bp, Homo sapiens
  siRNA target sequence for RPGR (NM_000328.1,2234-2252).
cagttcattagaaatccta

SEQ ID NO: 135379 - DNA, 19 bp, Homo sapiens
  siRNA target sequence for RPGR (NM_000328.1,2269-2287).
caccaagcaaagacatgaa

SEQ ID NO: 135380 - DNA, 19 bp, Homo sapiens
  siRNA target sequence for RPGR (NM_000328.1,2317-2335).
gagtcccctcaataaatca

SEQ ID NO: 135381 - DNA, 19 bp, Homo sapiens
  siRNA target sequence for RPGR (NM_000328.1,2381-2399).
cataggagaccagatcatt

SEQ ID NO: 135382 - DNA, 19 bp, Homo sapiens
  siRNA target sequence for RTKN (NM_033046.1,1166-1184).
gcacaaacctcttctgtta

SEQ ID NO: 135383 - DNA, 19 bp, Homo sapiens
  siRNA target sequence for RTKN (NM_033046.1,1213-1231).
gaagagccgctgcttacta

SEQ ID NO: 135384 - DNA, 19 bp, Homo sapiens
  siRNA target sequence for RTKN (NM_033046.1,1218-1236).
gccgctgcttactattgct

SEQ ID NO: 135385 - DNA, 19 bp, Homo sapiens
  siRNA target sequence for RTKN (NM_033046.1,1426-1444).
cagtgctgtgatgaaatca

SEQ ID NO: 135386 - DNA, 19 bp, Homo sapiens
  siRNA target sequence for RTKN (NM_033046.1,1600-1618).
ccctggctggcaatgttta

SEQ ID NO: 135387 - DNA, 19 bp, Homo sapiens
  siRNA target sequence for RTN4 (NM_007008.1,216-234).
ggacggtcagaagaaaaat

SEQ ID NO: 135388 - DNA, 19 bp, Homo sapiens
  siRNA target sequence for RTN4 (NM_007008.1,217-235).
gacggtcagaagaaaaatt

SEQ ID NO: 135389 - DNA, 19 bp, Homo sapiens
  siRNA target sequence for RTN4 (NM_007008.1,259-277).
ctgtactggagagacatta

SEQ ID NO: 135390 - DNA, 19 bp, Homo sapiens
  siRNA target sequence for RTN4 (NM_007008.1,307-325).
ctattcctgctgctttcat

SEQ ID NO: 135391 - DNA, 19 bp, Homo sapiens
  siRNA target sequence for RTN4 (NM_007008.1,316-334).
ctgctttcattgacagtat

SEQ ID NO: 135392 - DNA, 19 bp, Homo sapiens
  siRNA target sequence for RTN4 (NM_007008.1,319-337).
ctttcattgacagtattca

SEQ ID NO: 135393 - DNA, 19 bp, Homo sapiens
  siRNA target sequence for RTN4 (NM_007008.1,345-363).
gagcgtaacagcctacatt

SEQ ID NO: 135394 - DNA, 19 bp, Homo sapiens
  siRNA target sequence for RTN4 (NM_007008.1,466-484).
gaatctgaagttgctatat

SEQ ID NO: 135395 - DNA, 19 bp, Homo sapiens
  siRNA target sequence for RTN4 (NM_007008.1,470-488).
ctgaagttgctatatctga

SEQ ID NO: 135396 - DNA, 19 bp, Homo sapiens
  siRNA target sequence for RTN4 (NM_007008.1,485-503).
ctgaggagttggttcagaa

SEQ ID NO: 135397 - DNA, 19 bp, Homo sapiens
  siRNA target sequence for RTN4 (NM_007008.1,552-570).
caggcgcctcttcttagtt

SEQ ID NO: 135398 - DNA, 19 bp, Homo sapiens
  siRNA target sequence for RTN4 (NM_007008.1,554-572).
ggcgcctcttcttagttga

SEQ ID NO: 135399 - DNA, 19 bp, Homo sapiens
  siRNA target sequence for RTN4 (NM_007008.1,555-573).
gcgcctcttcttagttgat

SEQ ID NO: 135400 - DNA, 19 bp, Homo sapiens
  siRNA target sequence for RTN4 (NM_007008.1,643-661).
ggtctgacactactgattt

SEQ ID NO: 135401 - DNA, 19 bp, Homo sapiens
  siRNA target sequence for RTN4 (NM_007008.1,711-729).
ggcacagatagatcattat

SEQ ID NO: 135402 - DNA, 19 bp, Homo sapiens
  siRNA target sequence for RTN4 (NM_007008.1,730-748).
ctaggacttgcaaataaga

SEQ ID NO: 135403 - DNA, 19 bp, Homo sapiens
  siRNA target sequence for RTN4 (NM_007008.1,767-785).
ctaaaatccaagcaaaaat

SEQ ID NO: 135404 - DNA, 19 bp, Homo sapiens
  siRNA target sequence for RTN4 (NM_020532.3,799-817).
ggatgagaccctttttgct

SEQ ID NO: 135405 - DNA, 19 bp, Homo sapiens
  siRNA target sequence for RTN4 (NM_020532.3,845-863).
cgctcctctgcagaaaata

SEQ ID NO: 135406 - DNA, 19 bp, Homo sapiens
  siRNA target sequence for RTN4 (NM_020532.3,874-892).
ggagcagccaggtaacact

SEQ ID NO: 135407 - DNA, 19 bp, Homo sapiens
  siRNA target sequence for RTN4 (NM_020532.3,877-895).
gcagccaggtaacactatt

SEQ ID NO: 135408 - DNA, 19 bp, Homo sapiens
  siRNA target sequence for RTN4 (NM_020532.3,878-896).
cagccaggtaacactattt

SEQ ID NO: 135409 - DNA, 19 bp, Homo sapiens
  siRNA target sequence for RTN4 (NM_020532.3,963-981).
ctctctcagccgcttcttt

SEQ ID NO: 135410 - DNA, 19 bp, Homo sapiens
  siRNA target sequence for RTN4 (NM_020532.3,972-990).
ccgcttctttcaaagaaca

SEQ ID NO: 135411 - DNA, 19 bp, Homo sapiens
  siRNA target sequence for RTN4 (NM_020532.3,982-1000).
caaagaacatgaatacctt

SEQ ID NO: 135412 - DNA, 19 bp, Homo sapiens
  siRNA target sequence for RTN4 (NM_020532.3,1002-1020).
gtaatttgtcaacagtatt

SEQ ID NO: 135413 - DNA, 19 bp, Homo sapiens
  siRNA target sequence for RTN4 (NM_020532.3,1083-1101).
caaaaactctactcataga

SEQ ID NO: 135414 - DNA, 19 bp, Homo sapiens
  siRNA target sequence for RTN4 (NM_020532.3,1091-1109).
ctactcatagatagagatt

SEQ ID NO: 135415 - DNA, 19 bp, Homo sapiens
  siRNA target sequence for RTN4 (NM_020532.3,1173-1191).
cagaatctgccgtaatagt

SEQ ID NO: 135416 - DNA, 19 bp, Homo sapiens
  siRNA target sequence for RTN4 (NM_020532.3,1183-1201).
cgtaatagtagcaaatcct

SEQ ID NO: 135417 - DNA, 19 bp, Homo sapiens
  siRNA target sequence for RTN4 (NM_020532.3,1258-1276).
catccttcataatcaacaa

SEQ ID NO: 135418 - DNA, 19 bp, Homo sapiens
  siRNA target sequence for RTN4 (NM_020532.3,1283-1301).
cctacagctcttactaaat

SEQ ID NO: 135419 - DNA, 19 bp, Homo sapiens
  siRNA target sequence for RTN4 (NM_020532.3,1377-1395).
ctcctatgagggaggaata

SEQ ID NO: 135420 - DNA, 19 bp, Homo sapiens
  siRNA target sequence for RTN4 (NM_020532.3,1417-1435).
gcgagtatgggaagtgaaa

SEQ ID NO: 135421 - DNA, 19 bp, Homo sapiens
  siRNA target sequence for RTN4 (NM_020532.3,1421-1439).
gtatgggaagtgaaagata

SEQ ID NO: 135422 - DNA, 19 bp, Homo sapiens
  siRNA target sequence for RTN4 (NM_020532.3,1464-1482).
ctgctggaggtaaaatcga

SEQ ID NO: 135423 - DNA, 19 bp, Homo sapiens
  siRNA target sequence for RTN4 (NM_020532.3,1523-1541).
gatagccttgagcaaacta

SEQ ID NO: 135424 - DNA, 19 bp, Homo sapiens
  siRNA target sequence for RTN4 (NM_020532.3,1527-1545).
gccttgagcaaactaatca

SEQ ID NO: 135425 - DNA, 19 bp, Homo sapiens
  siRNA target sequence for RTN4 (NM_020532.3,1534-1552).
gcaaactaatcacgaaaaa

SEQ ID NO: 135426 - DNA, 19 bp, Homo sapiens
  siRNA target sequence for RTN4 (NM_020532.3,1557-1575).
gtgagagtagtaatgatga

SEQ ID NO: 135427 - DNA, 19 bp, Homo sapiens
  siRNA target sequence for RTN4 (NM_020532.3,1587-1605).
ccagtacgccagaaggtat

SEQ ID NO: 135428 - DNA, 19 bp, Homo sapiens
  siRNA target sequence for RTN4 (NM_020532.3,1588-1606).
cagtacgccagaaggtata

SEQ ID NO: 135429 - DNA, 19 bp, Homo sapiens
  siRNA target sequence for RTN4 (NM_020532.3,1590-1608).
gtacgccagaaggtataaa

SEQ ID NO: 135430 - DNA, 19 bp, Homo sapiens
  siRNA target sequence for RTN4 (NM_020532.3,1593-1611).
cgccagaaggtataaagga

SEQ ID NO: 135431 - DNA, 19 bp, Homo sapiens
  siRNA target sequence for RTN4 (NM_020532.3,1609-1627).
ggatcgttcaggagcatat

SEQ ID NO: 135432 - DNA, 19 bp, Homo sapiens
  siRNA target sequence for RTN4 (NM_020532.3,1610-1628).
gatcgttcaggagcatata

SEQ ID NO: 135433 - DNA, 19 bp, Homo sapiens
  siRNA target sequence for RTN4 (NM_020532.3,1613-1631).
cgttcaggagcatatatca

SEQ ID NO: 135434 - DNA, 19 bp, Homo sapiens
  siRNA target sequence for RTN4 (NM_020532.3,1659-1677).
ctgagagcattgcaacaaa

SEQ ID NO: 135435 - DNA, 19 bp, Homo sapiens
  siRNA target sequence for RTN4 (NM_020532.3,1744-1762).
gaaggcccaaatagtaaca

SEQ ID NO: 135436 - DNA, 19 bp, Homo sapiens
  siRNA target sequence for RTN4 (NM_020532.3,1773-1791).
ctagcaccaaaacatcaaa

SEQ ID NO: 135437 - DNA, 19 bp, Homo sapiens
  siRNA target sequence for RTN4 (NM_020532.3,1826-1844).
gattatgtcacaacagata

SEQ ID NO: 135438 - DNA, 19 bp, Homo sapiens
  siRNA target sequence for RTN4 (NM_020532.3,1890-1908).
gcctgactccagatttagt

SEQ ID NO: 135439 - DNA, 19 bp, Homo sapiens
  siRNA target sequence for RTN4 (NM_020532.3,1916-1934).
gcatgtgaaagtgaattga

SEQ ID NO: 135440 - DNA, 19 bp, Homo sapiens
  siRNA target sequence for RTN4 (NM_020532.3,1947-1965).
gtacaaagattgcttatga

SEQ ID NO: 135441 - DNA, 19 bp, Homo sapiens
  siRNA target sequence for RTN4 (NM_020532.3,1981-1999).
ggttcaaacatcagaagtt

SEQ ID NO: 135442 - DNA, 19 bp, Homo sapiens
  siRNA target sequence for RTN4 (NM_020532.3,1982-2000).
gttcaaacatcagaagtta

SEQ ID NO: 135443 - DNA, 19 bp, Homo sapiens
  siRNA target sequence for RTN4 (NM_020532.3,2058-2076).
ctactccttcaccagtttt

SEQ ID NO: 135444 - DNA, 19 bp, Homo sapiens
  siRNA target sequence for RTN4 (NM_020532.3,2072-2090).
gttttgcctgacattgtta

SEQ ID NO: 135445 - DNA, 19 bp, Homo sapiens
  siRNA target sequence for RTN4 (NM_020532.3,2077-2095).
gcctgacattgttatggaa

SEQ ID NO: 135446 - DNA, 19 bp, Homo sapiens
  siRNA target sequence for RTN4 (NM_020532.3,2092-2110).
ggaagcaccattgaattct

SEQ ID NO: 135447 - DNA, 19 bp, Homo sapiens
  siRNA target sequence for RTN4 (NM_020532.3,2124-2142).
ctggtgcttccgtgataca

SEQ ID NO: 135448 - DNA, 19 bp, Homo sapiens
  siRNA target sequence for RTN4 (NM_020532.3,2222-2240).
gaagaggccatgagtgtat

SEQ ID NO: 135449 - DNA, 19 bp, Homo sapiens
  siRNA target sequence for RTN4 (NM_020532.3,2227-2245).
ggccatgagtgtatcacta

SEQ ID NO: 135450 - DNA, 19 bp, Homo sapiens
  siRNA target sequence for RTN4 (NM_020532.3,2228-2246).
gccatgagtgtatcactaa

SEQ ID NO: 135451 - DNA, 19 bp, Homo sapiens
  siRNA target sequence for RTN4 (NM_020532.3,2309-2327).
gaaacagaagctccttata

SEQ ID NO: 135452 - DNA, 19 bp, Homo sapiens
  siRNA target sequence for RTN4 (NM_020532.3,2315-2333).
gaagctccttatatatcta

SEQ ID NO: 135453 - DNA, 19 bp, Homo sapiens
  siRNA target sequence for RTN4 (NM_020532.3,2321-2339).
ccttatatatctattgcat

SEQ ID NO: 135454 - DNA, 19 bp, Homo sapiens
  siRNA target sequence for RTN4 (NM_020532.3,2372-2390).
gaaccagctccggatttct

SEQ ID NO: 135455 - DNA, 19 bp, Homo sapiens
  siRNA target sequence for RTN4 (NM_020532.3,2379-2397).
ctccggatttctctgatta

SEQ ID NO: 135456 - DNA, 19 bp, Homo sapiens
  siRNA target sequence for RTN4 (NM_020532.3,2381-2399).
ccggatttctctgattatt

SEQ ID NO: 135457 - DNA, 19 bp, Homo sapiens
  siRNA target sequence for RTN4 (NM_020532.3,2553-2571).
gtctcactgagacttcatt

SEQ ID NO: 135458 - DNA, 19 bp, Homo sapiens
  siRNA target sequence for RTN4 (NM_020532.3,2565-2583).
cttcatttgagtcaatgat

SEQ ID NO: 135459 - DNA, 19 bp, Homo sapiens
  siRNA target sequence for RTN4 (NM_020532.3,2656-2674).
gctcagtttagataacaca

SEQ ID NO: 135460 - DNA, 19 bp, Homo sapiens
  siRNA target sequence for RTN4 (NM_020532.3,2682-2700).
ccctgttacctgatgaagt

SEQ ID NO: 135461 - DNA, 19 bp, Homo sapiens
  siRNA target sequence for RTN4 (NM_020532.3,2746-2764).
gctcagtactgcagtttat

SEQ ID NO: 135462 - DNA, 19 bp, Homo sapiens
  siRNA target sequence for RTN4 (NM_020532.3,2749-2767).
cagtactgcagtttattca

SEQ ID NO: 135463 - DNA, 19 bp, Homo sapiens
  siRNA target sequence for RTN4 (NM_020532.3,2751-2769).
gtactgcagtttattcaaa

SEQ ID NO: 135464 - DNA, 19 bp, Homo sapiens
  siRNA target sequence for RTN4 (NM_020532.3,2849-2867).
gatgagttccctacattga

SEQ ID NO: 135465 - DNA, 19 bp, Homo sapiens
  siRNA target sequence for RTN4 (NM_020532.3,2852-2870).
gagttccctacattgatca

SEQ ID NO: 135466 - DNA, 19 bp, Homo sapiens
  siRNA target sequence for RTN4 (NM_020532.3,2858-2876).
cctacattgatcagttcta

SEQ ID NO: 135467 - DNA, 19 bp, Homo sapiens
  siRNA target sequence for RTN4 (NM_020532.3,2859-2877).
ctacattgatcagttctaa

SEQ ID NO: 135468 - DNA, 19 bp, Homo sapiens
  siRNA target sequence for RTN4 (NM_020532.3,2866-2884).
gatcagttctaaaactgat

SEQ ID NO: 135469 - DNA, 19 bp, Homo sapiens
  siRNA target sequence for RTN4 (NM_020532.3,2871-2889).
gttctaaaactgattcatt

SEQ ID NO: 135470 - DNA, 19 bp, Homo sapiens
  siRNA target sequence for RTN4 (NM_020532.3,2918-2936).
ctagaagtatcccacaaaa

SEQ ID NO: 135471 - DNA, 19 bp, Homo sapiens
  siRNA target sequence for RTN4 (NM_020532.3,2924-2942).
gtatcccacaaaagtgaaa

SEQ ID NO: 135472 - DNA, 19 bp, Homo sapiens
  siRNA target sequence for RTN4 (NM_020532.3,2990-3008).
ccccatgacctttctttga

SEQ ID NO: 135473 - DNA, 19 bp, Homo sapiens
  siRNA target sequence for RTN4 (NM_020532.3,2991-3009).
cccatgacctttctttgaa

SEQ ID NO: 135474 - DNA, 19 bp, Homo sapiens
  siRNA target sequence for RTN4 (NM_020532.3,2993-3011).
catgacctttctttgaaga

SEQ ID NO: 135475 - DNA, 19 bp, Homo sapiens
  siRNA target sequence for RTN4 (NM_020532.3,3013-3031).
catacaacccaaagttgaa

SEQ ID NO: 135476 - DNA, 19 bp, Homo sapiens
  siRNA target sequence for RTN4 (NM_020532.3,3078-3096).
catcaaaggtgctcttatt

SEQ ID NO: 135477 - DNA, 19 bp, Homo sapiens
  siRNA target sequence for RTN4 (NM_020532.3,3120-3138).
ccactcaagcagagataga

SEQ ID NO: 135478 - DNA, 19 bp, Homo sapiens
  siRNA target sequence for RTN4 (NM_020532.3,3131-3149).
gagatagagagcatagtta

SEQ ID NO: 135479 - DNA, 19 bp, Homo sapiens
  siRNA target sequence for RTN4 (NM_020532.3,3185-3203).
cttccttccgatacagaaa

SEQ ID NO: 135480 - DNA, 19 bp, Homo sapiens
  siRNA target sequence for RTN4 (NM_020532.3,3213-3231).
gatcaccatctgctatatt

SEQ ID NO: 135481 - DNA, 19 bp, Homo sapiens
  siRNA target sequence for RTN4 (NM_153828.1,724-742).
cgggctcagtggttgttga

SEQ ID NO: 135482 - DNA, 19 bp, Homo sapiens
  siRNA target sequence for S100P (NM_005980.1,41-59).
ccatgggcatgatcataga

SEQ ID NO: 135483 - DNA, 19 bp, Homo sapiens
  siRNA target sequence for S100P (NM_005980.1,58-76).
gacgtcttttcccgatatt

SEQ ID NO: 135484 - DNA, 19 bp, Homo sapiens
  siRNA target sequence for S100P (NM_005980.1,171-189).
caaggatgccgtggataaa

SEQ ID NO: 135485 - DNA, 19 bp, Homo sapiens
  siRNA target sequence for S100P (NM_005980.1,266-284).
cgtctgcctgtcacaagta

SEQ ID NO: 135486 - DNA, 19 bp, Homo sapiens
  siRNA target sequence for SAG (NM_000541.2,232-250).
ccgaaccgaaccatgttat

SEQ ID NO: 135487 - DNA, 19 bp, Homo sapiens
  siRNA target sequence for SAG (NM_000541.2,234-252).
gaaccgaaccatgttatct

SEQ ID NO: 135488 - DNA, 19 bp, Homo sapiens
  siRNA target sequence for SAG (NM_000541.2,237-255).
ccgaaccatgttatcttca

SEQ ID NO: 135489 - DNA, 19 bp, Homo sapiens
  siRNA target sequence for SAG (NM_000541.2,238-256).
cgaaccatgttatcttcaa

SEQ ID NO: 135490 - DNA, 19 bp, Homo sapiens
  siRNA target sequence for SAG (NM_000541.2,293-311).
ggggaacagagactacata

SEQ ID NO: 135491 - DNA, 19 bp, Homo sapiens
  siRNA target sequence for SAG (NM_000541.2,503-521).
cgcgagcacccccacaaaa

SEQ ID NO: 135492 - DNA, 19 bp, Homo sapiens
  siRNA target sequence for SAG (NM_000541.2,524-542).
gcaagagagcctgcttaaa

SEQ ID NO: 135493 - DNA, 19 bp, Homo sapiens
  siRNA target sequence for SAG (NM_000541.2,525-543).
caagagagcctgcttaaaa

SEQ ID NO: 135494 - DNA, 19 bp, Homo sapiens
  siRNA target sequence for SAG (NM_000541.2,614-632).
gccagctccacaagattca

SEQ ID NO: 135495 - DNA, 19 bp, Homo sapiens
  siRNA target sequence for SAG (NM_000541.2,651-669).
gactttgaggtcaaagcat

SEQ ID NO: 135496 - DNA, 19 bp, Homo sapiens
  siRNA target sequence for SAG (NM_000541.2,718-736).
gctccgtgcgattactgat

SEQ ID NO: 135497 - DNA, 19 bp, Homo sapiens
  siRNA target sequence for SAG (NM_000541.2,792-810).
gcctggcagttcttcatgt

SEQ ID NO: 135498 - DNA, 19 bp, Homo sapiens
  siRNA target sequence for SAG (NM_000541.2,887-905).
gactgtcaccaataacaca

SEQ ID NO: 135499 - DNA, 19 bp, Homo sapiens
  siRNA target sequence for SAG (NM_000541.2,957-975).
gttctctactcgagtgatt

SEQ ID NO: 135500 - DNA, 19 bp, Homo sapiens
  siRNA target sequence for SAG (NM_000541.2,1135-1153).
cctccagcaccatcattaa

SEQ ID NO: 135501 - DNA, 19 bp, Homo sapiens
  siRNA target sequence for SAG (NM_000541.2,1315-1333).
gttatcaggatgcaaattt

SEQ ID NO: 135502 - DNA, 19 bp, Homo sapiens
  siRNA target sequence for SAG (NM_000541.2,1343-1361).
ggagtttgctcgccataat

SEQ ID NO: 135503 - DNA, 19 bp, Homo sapiens
  siRNA target sequence for SAG (NM_000541.2,1351-1369).
ctcgccataatctgaaaga

SEQ ID NO: 135504 - DNA, 19 bp, Homo sapiens
  siRNA target sequence for SARCOSIN (NM_006063.1,143-161).
catcgattgcaccctaaaa

SEQ ID NO: 135505 - DNA, 19 bp, Homo sapiens
  siRNA target sequence for SARCOSIN (NM_006063.1,146-164).
cgattgcaccctaaaagca

SEQ ID NO: 135506 - DNA, 19 bp, Homo sapiens
  siRNA target sequence for SARCOSIN (NM_006063.1,180-198).
ccttgccacagattgattt

SEQ ID NO: 135507 - DNA, 19 bp, Homo sapiens
  siRNA target sequence for SARCOSIN (NM_006063.1,185-203).
ccacagattgattttgtca

SEQ ID NO: 135508 - DNA, 19 bp, Homo sapiens
  siRNA target sequence for SARCOSIN (NM_006063.1,214-232).
cttacttccgtgagtactt

SEQ ID NO: 135509 - DNA, 19 bp, Homo sapiens
  siRNA target sequence for SARCOSIN (NM_006063.1,218-236).
cttccgtgagtacttttta

SEQ ID NO: 135510 - DNA, 19 bp, Homo sapiens
  siRNA target sequence for SARCOSIN (NM_006063.1,263-281).
ggaggtagtgctagacaat

SEQ ID NO: 135511 - DNA, 19 bp, Homo sapiens
  siRNA target sequence for SARCOSIN (NM_006063.1,278-296).
caatgtggatcctgctata

SEQ ID NO: 135512 - DNA, 19 bp, Homo sapiens
  siRNA target sequence for SARCOSIN (NM_006063.1,284-302).
ggatcctgctatacttgat

SEQ ID NO: 135513 - DNA, 19 bp, Homo sapiens
  siRNA target sequence for SARCOSIN (NM_006063.1,285-303).
gatcctgctatacttgatt

SEQ ID NO: 135514 - DNA, 19 bp, Homo sapiens
  siRNA target sequence for SARCOSIN (NM_006063.1,291-309).
gctatacttgatttaatca

SEQ ID NO: 135515 - DNA, 19 bp, Homo sapiens
  siRNA target sequence for SARCOSIN (NM_006063.1,345-363).
gacggaaatgtgcaagata

SEQ ID NO: 135516 - DNA, 19 bp, Homo sapiens
  siRNA target sequence for SARCOSIN (NM_006063.1,354-372).
gtgcaagatatttttgcat

SEQ ID NO: 135517 - DNA, 19 bp, Homo sapiens
  siRNA target sequence for SARCOSIN (NM_006063.1,387-405).
cagatcccctcagtgttta

SEQ ID NO: 135518 - DNA, 19 bp, Homo sapiens
  siRNA target sequence for SARCOSIN (NM_006063.1,389-407).
gatcccctcagtgtttact

SEQ ID NO: 135519 - DNA, 19 bp, Homo sapiens
  siRNA target sequence for SARCOSIN (NM_006063.1,406-424).
ctgtctgcgtttcttatct

SEQ ID NO: 135520 - DNA, 19 bp, Homo sapiens
  siRNA target sequence for SARCOSIN (NM_006063.1,451-469).
gtctagccatcctaagatt

SEQ ID NO: 135521 - DNA, 19 bp, Homo sapiens
  siRNA target sequence for SARCOSIN (NM_006063.1,461-479).
cctaagattaggacttctt

SEQ ID NO: 135522 - DNA, 19 bp, Homo sapiens
  siRNA target sequence for SARCOSIN (NM_006063.1,488-506).
cccgagactcgccatttct

SEQ ID NO: 135523 - DNA, 19 bp, Homo sapiens
  siRNA target sequence for SARCOSIN (NM_006063.1,525-543).
gatcgctttgtacagattt

SEQ ID NO: 135524 - DNA, 19 bp, Homo sapiens
  siRNA target sequence for SARCOSIN (NM_006063.1,578-596).
ggaactgatctcagtcatt

SEQ ID NO: 135525 - DNA, 19 bp, Homo sapiens
  siRNA target sequence for SARCOSIN (NM_006063.1,598-616).
caaatgacagcctaaatgt

SEQ ID NO: 135526 - DNA, 19 bp, Homo sapiens
  siRNA target sequence for SARCOSIN (NM_006063.1,713-731).
ccgttttcgccttatgaca

SEQ ID NO: 135527 - DNA, 19 bp, Homo sapiens
  siRNA target sequence for SARCOSIN (NM_006063.1,746-764).
ggatcatgttgagaaagat

SEQ ID NO: 135528 - DNA, 19 bp, Homo sapiens
  siRNA target sequence for SARCOSIN (NM_006063.1,912-930).
cctggttacctgaatgaca

SEQ ID NO: 135529 - DNA, 19 bp, Homo sapiens
  siRNA target sequence for SARCOSIN (NM_006063.1,913-931).
ctggttacctgaatgacat

SEQ ID NO: 135530 - DNA, 19 bp, Homo sapiens
  siRNA target sequence for SARCOSIN (NM_006063.1,935-953).
caggcatggaatgtttgta

SEQ ID NO: 135531 - DNA, 19 bp, Homo sapiens
  siRNA target sequence for SARCOSIN (NM_006063.1,959-977).
cctcatcctcttggttaat

SEQ ID NO: 135532 - DNA, 19 bp, Homo sapiens
  siRNA target sequence for SARCOSIN (NM_006063.1,999-1017).
gaccccacggaaaatgaat

SEQ ID NO: 135533 - DNA, 19 bp, Homo sapiens
  siRNA target sequence for SARCOSIN (NM_006063.1,1063-1081).
gcattgttacccagcaaaa

SEQ ID NO: 135534 - DNA, 19 bp, Homo sapiens
  siRNA target sequence for SARCOSIN (NM_006063.1,1064-1082).
cattgttacccagcaaaat

SEQ ID NO: 135535 - DNA, 19 bp, Homo sapiens
  siRNA target sequence for SARCOSIN (NM_006063.1,1068-1086).
gttacccagcaaaatcaga

SEQ ID NO: 135536 - DNA, 19 bp, Homo sapiens
  siRNA target sequence for SARCOSIN (NM_006063.1,1131-1149).
caacctctacagtcatact

SEQ ID NO: 135537 - DNA, 19 bp, Homo sapiens
  siRNA target sequence for SARCOSIN (NM_006063.1,1155-1173).
cagctcgatagcatagcat

SEQ ID NO: 135538 - DNA, 19 bp, Homo sapiens
  siRNA target sequence for SARCOSIN (NM_006063.1,1160-1178).
cgatagcatagcatctgaa

SEQ ID NO: 135539 - DNA, 19 bp, Homo sapiens
  siRNA target sequence for SARCOSIN (NM_006063.1,1161-1179).
gatagcatagcatctgaat

SEQ ID NO: 135540 - DNA, 19 bp, Homo sapiens
  siRNA target sequence for SARCOSIN (NM_006063.1,1232-1250).
ggtggatgataaaatctat

SEQ ID NO: 135541 - DNA, 19 bp, Homo sapiens
  siRNA target sequence for SARCOSIN (NM_006063.1,1280-1298).
ggcttcgctggattcagta

SEQ ID NO: 135542 - DNA, 19 bp, Homo sapiens
  siRNA target sequence for SARCOSIN (NM_006063.1,1287-1305).
ctggattcagtattatgct

SEQ ID NO: 135543 - DNA, 19 bp, Homo sapiens
  siRNA target sequence for SARCOSIN (NM_006063.1,1289-1307).
ggattcagtattatgctat

SEQ ID NO: 135544 - DNA, 19 bp, Homo sapiens
  siRNA target sequence for SARCOSIN (NM_006063.1,1356-1374).
gtctatggccataatgtga

SEQ ID NO: 135545 - DNA, 19 bp, Homo sapiens
  siRNA target sequence for SARCOSIN (NM_006063.1,1364-1382).
ccataatgtgatttcacat

SEQ ID NO: 135546 - DNA, 19 bp, Homo sapiens
  siRNA target sequence for SARCOSIN (NM_006063.1,1476-1494).
gatctggctccaatgaaaa

SEQ ID NO: 135547 - DNA, 19 bp, Homo sapiens
  siRNA target sequence for SARCOSIN (NM_006063.1,1481-1499).
ggctccaatgaaaattcct

SEQ ID NO: 135548 - DNA, 19 bp, Homo sapiens
  siRNA target sequence for SARCOSIN (NM_006063.1,1524-1542).
cataaaggcaaaattgtga

SEQ ID NO: 135549 - DNA, 19 bp, Homo sapiens
  siRNA target sequence for SARCOSIN (NM_006063.1,1573-1591).
cagcttcagttgaagcttt

SEQ ID NO: 135550 - DNA, 19 bp, Homo sapiens
  siRNA target sequence for SARCOSIN (NM_006063.1,1584-1602).
gaagcttttgaccttacaa

SEQ ID NO: 135551 - DNA, 19 bp, Homo sapiens
  siRNA target sequence for SARCOSIN (NM_006063.1,1587-1605).
gcttttgaccttacaacaa

SEQ ID NO: 135552 - DNA, 19 bp, Homo sapiens
  siRNA target sequence for SARCOSIN (NM_006063.1,1588-1606).
cttttgaccttacaacaaa

SEQ ID NO: 135553 - DNA, 19 bp, Homo sapiens
  siRNA target sequence for SARCOSIN (NM_006063.1,1603-1621).
caaataaatgggatgtaat

SEQ ID NO: 135554 - DNA, 19 bp, Homo sapiens
  siRNA target sequence for SARCOSIN (NM_006063.1,1625-1643).
cgaatttccccaagaaaga

SEQ ID NO: 135555 - DNA, 19 bp, Homo sapiens
  siRNA target sequence for SARCOSIN (NM_006063.1,1683-1701).
gcaattggtggttttgcta

SEQ ID NO: 135556 - DNA, 19 bp, Homo sapiens
  siRNA target sequence for SARCOSIN (NM_006063.1,1684-1702).
caattggtggttttgctat

SEQ ID NO: 135557 - DNA, 19 bp, Homo sapiens
  siRNA target sequence for SARCOSIN (NM_006063.1,1748-1766).
catatggaagtatgaagat

SEQ ID NO: 135558 - DNA, 19 bp, Homo sapiens
  siRNA target sequence for SARCOSIN (NM_006063.1,1793-1811).
gaaggaaatacgttatgct

SEQ ID NO: 135559 - DNA, 19 bp, Homo sapiens
  siRNA target sequence for SARCOSIN (NM_006063.1,1826-1844).
cctagcaacacgtttaaat

SEQ ID NO: 135560 - DNA, 19 bp, Homo sapiens
  siRNA target sequence for SARCOSIN (NM_006063.1,1830-1848).
gcaacacgtttaaatctct

SEQ ID NO: 135561 - DNA, 19 bp, Homo sapiens
  siRNA target sequence for SARCOSIN (NM_006063.1,1831-1849).
caacacgtttaaatctctt

SEQ ID NO: 135562 - DNA, 19 bp, Homo sapiens
  siRNA target sequence for SBBI26 (NM_018846.2,471-489).
cttgacaagccacataaat

SEQ ID NO: 135563 - DNA, 19 bp, Homo sapiens
  siRNA target sequence for SBBI26 (NM_018846.2,542-560).
ctgctcatcgtgttgttct

SEQ ID NO: 135564 - DNA, 19 bp, Homo sapiens
  siRNA target sequence for SBBI26 (NM_018846.2,563-581).
ctgcagccagtcatttttt

SEQ ID NO: 135565 - DNA, 19 bp, Homo sapiens
  siRNA target sequence for SBBI26 (NM_018846.2,568-586).
gccagtcatttttttaact

SEQ ID NO: 135566 - DNA, 19 bp, Homo sapiens
  siRNA target sequence for SBBI26 (NM_018846.2,640-658).
gatgctgaacctgatatta

SEQ ID NO: 135567 - DNA, 19 bp, Homo sapiens
  siRNA target sequence for SBBI26 (NM_018846.2,644-662).
ctgaacctgatattattga

SEQ ID NO: 135568 - DNA, 19 bp, Homo sapiens
  siRNA target sequence for SBBI26 (NM_018846.2,669-687).
ggtggaatttgcttatact

SEQ ID NO: 135569 - DNA, 19 bp, Homo sapiens
  siRNA target sequence for SBBI26 (NM_018846.2,679-697).
gcttatactgctagaattt

SEQ ID NO: 135570 - DNA, 19 bp, Homo sapiens
  siRNA target sequence for SBBI26 (NM_018846.2,698-716).
ccgtgaatagcaacaatgt

SEQ ID NO: 135571 - DNA, 19 bp, Homo sapiens
  siRNA target sequence for SBBI26 (NM_018846.2,699-717).
cgtgaatagcaacaatgtt

SEQ ID NO: 135572 - DNA, 19 bp, Homo sapiens
  siRNA target sequence for SBBI26 (NM_018846.2,839-857).
gtctagattgtcctgaatt

SEQ ID NO: 135573 - DNA, 19 bp, Homo sapiens
  siRNA target sequence for SBBI26 (NM_018846.2,862-880).
gcaactgcagatgacttta

SEQ ID NO: 135574 - DNA, 19 bp, Homo sapiens
  siRNA target sequence for SBBI26 (NM_018846.2,936-954).
caagcgagtaacacatctt

SEQ ID NO: 135575 - DNA, 19 bp, Homo sapiens
  siRNA target sequence for SBBI26 (NM_018846.2,941-959).
gagtaacacatcttctcaa

SEQ ID NO: 135576 - DNA, 19 bp, Homo sapiens
  siRNA target sequence for SBBI26 (NM_018846.2,1006-1024).
gcagtcaggtggttgaaat

SEQ ID NO: 135577 - DNA, 19 bp, Homo sapiens
  siRNA target sequence for SBBI26 (NM_018846.2,1007-1025).
cagtcaggtggttgaaata

SEQ ID NO: 135578 - DNA, 19 bp, Homo sapiens
  siRNA target sequence for SBBI26 (NM_018846.2,1020-1038).
gaaatacgatgaacctaat

SEQ ID NO: 135579 - DNA, 19 bp, Homo sapiens
  siRNA target sequence for SBBI26 (NM_018846.2,1033-1051).
cctaatcgccagccattta

SEQ ID NO: 135580 - DNA, 19 bp, Homo sapiens
  siRNA target sequence for SBBI26 (NM_018846.2,1034-1052).
ctaatcgccagccatttat

SEQ ID NO: 135581 - DNA, 19 bp, Homo sapiens
  siRNA target sequence for SBBI26 (NM_018846.2,1152-1170).
ccttaagatggtgataagt

SEQ ID NO: 135582 - DNA, 19 bp, Homo sapiens
  siRNA target sequence for SBBI26 (NM_018846.2,1172-1190).
gaatgaggtaccatctact

SEQ ID NO: 135583 - DNA, 19 bp, Homo sapiens
  siRNA target sequence for SBBI26 (NM_018846.2,1196-1214).
cagaggaccgagaagaact

SEQ ID NO: 135584 - DNA, 19 bp, Homo sapiens
  siRNA target sequence for SBBI26 (NM_018846.2,1200-1218).
ggaccgagaagaacttgta

SEQ ID NO: 135585 - DNA, 19 bp, Homo sapiens
  siRNA target sequence for SBBI26 (NM_018846.2,1251-1269).
ctaccgcatagccctattt

SEQ ID NO: 135586 - DNA, 19 bp, Homo sapiens
  siRNA target sequence for SBBI26 (NM_018846.2,1254-1272).
ccgcatagccctatttgga

SEQ ID NO: 135587 - DNA, 19 bp, Homo sapiens
  siRNA target sequence for SBBI26 (NM_018846.2,1283-1301).
cacagtcttgtagatattt

SEQ ID NO: 135588 - DNA, 19 bp, Homo sapiens
  siRNA target sequence for SBBI26 (NM_018846.2,1329-1347).
catccgctgcccctttgaa

SEQ ID NO: 135589 - DNA, 19 bp, Homo sapiens
  siRNA target sequence for SBBI26 (NM_018846.2,1357-1375).
gatgcagcatgcgtgtttt

SEQ ID NO: 135590 - DNA, 19 bp, Homo sapiens
  siRNA target sequence for SBBI26 (NM_018846.2,1368-1386).
cgtgttttgggacaatgta

SEQ ID NO: 135591 - DNA, 19 bp, Homo sapiens
  siRNA target sequence for SBBI26 (NM_018846.2,1371-1389).
gttttgggacaatgtagta

SEQ ID NO: 135592 - DNA, 19 bp, Homo sapiens
  siRNA target sequence for SBBI26 (NM_018846.2,1376-1394).
gggacaatgtagtatacat

SEQ ID NO: 135593 - DNA, 19 bp, Homo sapiens
  siRNA target sequence for SBBI26 (NM_018846.2,1377-1395).
ggacaatgtagtatacatt

SEQ ID NO: 135594 - DNA, 19 bp, Homo sapiens
  siRNA target sequence for SBBI26 (NM_018846.2,1425-1443).
gcgaatggactgctataat

SEQ ID NO: 135595 - DNA, 19 bp, Homo sapiens
  siRNA target sequence for SBBI26 (NM_018846.2,1427-1445).
gaatggactgctataatgt

SEQ ID NO: 135596 - DNA, 19 bp, Homo sapiens
  siRNA target sequence for SBBI26 (NM_018846.2,1447-1465).
gtgaaggatagctggtatt

SEQ ID NO: 135597 - DNA, 19 bp, Homo sapiens
  siRNA target sequence for SBBI26 (NM_018846.2,1452-1470).
ggatagctggtattcgaaa

SEQ ID NO: 135598 - DNA, 19 bp, Homo sapiens
  siRNA target sequence for SBBI26 (NM_018846.2,1581-1599).
ctatgatacgagaactgaa

SEQ ID NO: 135599 - DNA, 19 bp, Homo sapiens
  siRNA target sequence for SBBI26 (NM_018846.2,1654-1672).
gaagccaatggcctaatct

SEQ ID NO: 135600 - DNA, 19 bp, Homo sapiens
  siRNA target sequence for SBBI26 (NM_018846.2,1658-1676).
ccaatggcctaatctatgt

SEQ ID NO: 135601 - DNA, 19 bp, Homo sapiens
  siRNA target sequence for SBBI26 (NM_018846.2,1659-1677).
caatggcctaatctatgtt

SEQ ID NO: 135602 - DNA, 19 bp, Homo sapiens
  siRNA target sequence for SBBI26 (NM_018846.2,1685-1703).
gaagtttaggaaacaatgt

SEQ ID NO: 135603 - DNA, 19 bp, Homo sapiens
  siRNA target sequence for SBBI26 (NM_018846.2,1760-1778).
ctgagctgtgtccaatgat

SEQ ID NO: 135604 - DNA, 19 bp, Homo sapiens
  siRNA target sequence for SBBI26 (NM_018846.2,1764-1782).
gctgtgtccaatgattgaa

SEQ ID NO: 135605 - DNA, 19 bp, Homo sapiens
  siRNA target sequence for SBBI26 (NM_018846.2,1867-1885).
gtggaatattacgatatta

SEQ ID NO: 135606 - DNA, 19 bp, Homo sapiens
  siRNA target sequence for SBBI26 (NM_018846.2,1879-1897).
gatattaagttgaacgaat

SEQ ID NO: 135607 - DNA, 19 bp, Homo sapiens
  siRNA target sequence for SBBI26 (NM_018846.2,1919-1937).
catggaagggtgtaacagt

SEQ ID NO: 135608 - DNA, 19 bp, Homo sapiens
  siRNA target sequence for SBBI26 (NM_018846.2,1946-1964).
cagcagttggctctatagt

SEQ ID NO: 135609 - DNA, 19 bp, Homo sapiens
  siRNA target sequence for SBBI26 (NM_018846.2,1948-1966).
gcagttggctctatagttt

SEQ ID NO: 135610 - DNA, 19 bp, Homo sapiens
  siRNA target sequence for SBBI26 (NM_018846.2,1949-1967).
cagttggctctatagttta

SEQ ID NO: 135611 - DNA, 19 bp, Homo sapiens
  siRNA target sequence for SBBI26 (NM_018846.2,1954-1972).
ggctctatagtttatgtct

SEQ ID NO: 135612 - DNA, 19 bp, Homo sapiens
  siRNA target sequence for SBBI26 (NM_018846.2,1955-1973).
gctctatagtttatgtctt

SEQ ID NO: 135613 - DNA, 19 bp, Homo sapiens
  siRNA target sequence for SBBI26 (NM_018846.2,1986-2004).
gggtgttggtcgattagga

SEQ ID NO: 135614 - DNA, 19 bp, Homo sapiens
  siRNA target sequence for SBBI26 (NM_018846.2,1994-2012).
gtcgattaggacacattct

SEQ ID NO: 135615 - DNA, 19 bp, Homo sapiens
  siRNA target sequence for SBBI26 (NM_018846.2,2003-2021).
gacacattctcgaatataa

SEQ ID NO: 135616 - DNA, 19 bp, Homo sapiens
  siRNA target sequence for SBBI26 (NM_018846.2,2005-2023).
cacattctcgaatataata

SEQ ID NO: 135617 - DNA, 19 bp, Homo sapiens
  siRNA target sequence for SBBI26 (NM_018846.2,2068-2086).
ccagtcacaagttgtttaa

SEQ ID NO: 135618 - DNA, 19 bp, Homo sapiens
  siRNA target sequence for SBBI26 (NM_018846.2,2097-2115).
cgatacttgtggagcaaat

SEQ ID NO: 135619 - DNA, 19 bp, Homo sapiens
  siRNA target sequence for SCAP1 (NM_003726.2,174-192).
gggatcacagagaccatat

SEQ ID NO: 135620 - DNA, 19 bp, Homo sapiens
  siRNA target sequence for SCAP1 (NM_003726.2,175-193).
ggatcacagagaccatatt

SEQ ID NO: 135621 - DNA, 19 bp, Homo sapiens
  siRNA target sequence for SCAP1 (NM_003726.2,199-217).
gggctttcagcaaatcaaa

SEQ ID NO: 135622 - DNA, 19 bp, Homo sapiens
  siRNA target sequence for SCAP1 (NM_003726.2,222-240).
ggtactattgggattttca

SEQ ID NO: 135623 - DNA, 19 bp, Homo sapiens
  siRNA target sequence for SCAP1 (NM_003726.2,241-259).
gccccaagggggagacatt

SEQ ID NO: 135624 - DNA, 19 bp, Homo sapiens
  siRNA target sequence for SCAP1 (NM_003726.2,312-330).
catccgatgcacccttttt

SEQ ID NO: 135625 - DNA, 19 bp, Homo sapiens
  siRNA target sequence for SCAP1 (NM_003726.2,316-334).
cgatgcaccctttttgtca

SEQ ID NO: 135626 - DNA, 19 bp, Homo sapiens
  siRNA target sequence for SCAP1 (NM_003726.2,321-339).
caccctttttgtcagatta

SEQ ID NO: 135627 - DNA, 19 bp, Homo sapiens
  siRNA target sequence for SCAP1 (NM_003726.2,371-389).
ggagctcaagaacttgata

SEQ ID NO: 135628 - DNA, 19 bp, Homo sapiens
  siRNA target sequence for SCAP1 (NM_003726.2,380-398).
gaacttgataacgtaatca

SEQ ID NO: 135629 - DNA, 19 bp, Homo sapiens
  siRNA target sequence for SCAP1 (NM_003726.2,423-441).
gcaaagatcatagtttctt

SEQ ID NO: 135630 - DNA, 19 bp, Homo sapiens
  siRNA target sequence for SCAP1 (NM_003726.2,480-498).
gaggtctcttctactacta

SEQ ID NO: 135631 - DNA, 19 bp, Homo sapiens
  siRNA target sequence for SCAP1 (NM_003726.2,485-503).
ctcttctactactatgcta

SEQ ID NO: 135632 - DNA, 19 bp, Homo sapiens
  siRNA target sequence for SCAP1 (NM_003726.2,574-592).
gcgaagagattccaagaaa

SEQ ID NO: 135633 - DNA, 19 bp, Homo sapiens
  siRNA target sequence for SCAP1 (NM_003726.2,620-638).
gataggcgcagctatgagt

SEQ ID NO: 135634 - DNA, 19 bp, Homo sapiens
  siRNA target sequence for SCAP1 (NM_003726.2,625-643).
gcgcagctatgagtttaca

SEQ ID NO: 135635 - DNA, 19 bp, Homo sapiens
  siRNA target sequence for SCAP1 (NM_003726.2,666-684).
gagactgggtggatcaaat

SEQ ID NO: 135636 - DNA, 19 bp, Homo sapiens
  siRNA target sequence for SCAP1 (NM_003726.2,670-688).
ctgggtggatcaaataagt

SEQ ID NO: 135637 - DNA, 19 bp, Homo sapiens
  siRNA target sequence for SCAP1 (NM_003726.2,672-690).
gggtggatcaaataagttt

SEQ ID NO: 135638 - DNA, 19 bp, Homo sapiens
  siRNA target sequence for SCAP1 (NM_003726.2,674-692).
gtggatcaaataagtttct

SEQ ID NO: 135639 - DNA, 19 bp, Homo sapiens
  siRNA target sequence for SCAP1 (NM_003726.2,701-719).
gatctgagctccttaacca

SEQ ID NO: 135640 - DNA, 19 bp, Homo sapiens
  siRNA target sequence for SCAP1 (NM_003726.2,708-726).
gctccttaaccattccata

SEQ ID NO: 135641 - DNA, 19 bp, Homo sapiens
  siRNA target sequence for SCAP1 (NM_003726.2,709-727).
ctccttaaccattccatat

SEQ ID NO: 135642 - DNA, 19 bp, Homo sapiens
  siRNA target sequence for SCAP1 (NM_003726.2,806-824).
cagtgcagacccactatct

SEQ ID NO: 135643 - DNA, 19 bp, Homo sapiens
  siRNA target sequence for SCAP1 (NM_003726.2,831-849).
ggagtgtggggataaaaga

SEQ ID NO: 135644 - DNA, 19 bp, Homo sapiens
  siRNA target sequence for SCAP1 (NM_003726.2,925-943).
gagtggcactcgacgaaaa

SEQ ID NO: 135645 - DNA, 19 bp, Homo sapiens
  siRNA target sequence for SCAP1 (NM_003726.2,947-965).
gtagactatgccagttact

SEQ ID NO: 135646 - DNA, 19 bp, Homo sapiens
  siRNA target sequence for SCAP1 (NM_003726.2,1040-1058).
ctgagcaaggagtataaca

SEQ ID NO: 135647 - DNA, 19 bp, Homo sapiens
  siRNA target sequence for SCAP1 (NM_003726.2,1103-1121).
gttccaaaggagtatctca

SEQ ID NO: 135648 - DNA, 19 bp, Homo sapiens
  siRNA target sequence for SEC23IP (NM_007190.2,119-137).
cctcatcgggcactaactt

SEQ ID NO: 135649 - DNA, 19 bp, Homo sapiens
  siRNA target sequence for SEC23IP (NM_007190.2,122-140).
catcgggcactaacttact

SEQ ID NO: 135650 - DNA, 19 bp, Homo sapiens
  siRNA target sequence for SEC23IP (NM_007190.2,557-575).
gtctccctccttcatattt

SEQ ID NO: 135651 - DNA, 19 bp, Homo sapiens
  siRNA target sequence for SEC23IP (NM_007190.2,578-596).
ggaaccaaccccaaggaat

SEQ ID NO: 135652 - DNA, 19 bp, Homo sapiens
  siRNA target sequence for SEC23IP (NM_007190.2,722-740).
gaccccctgttcagatgta

SEQ ID NO: 135653 - DNA, 19 bp, Homo sapiens
  siRNA target sequence for SEC23IP (NM_007190.2,821-839).
gggctccctctgttcaagt

SEQ ID NO: 135654 - DNA, 19 bp, Homo sapiens
  siRNA target sequence for SEC23IP (NM_007190.2,880-898).
cagccccactggttttact

SEQ ID NO: 135655 - DNA, 19 bp, Homo sapiens
  siRNA target sequence for SEC23IP (NM_007190.2,899-917).
gcaaggaggtagaatacaa

SEQ ID NO: 135656 - DNA, 19 bp, Homo sapiens
  siRNA target sequence for SEC23IP (NM_007190.2,900-918).
caaggaggtagaatacaaa

SEQ ID NO: 135657 - DNA, 19 bp, Homo sapiens
  siRNA target sequence for SEC23IP (NM_007190.2,938-956).
gtgtgttcgactctttgaa

SEQ ID NO: 135658 - DNA, 19 bp, Homo sapiens
  siRNA target sequence for SEC23IP (NM_007190.2,942-960).
gttcgactctttgaatctt

SEQ ID NO: 135659 - DNA, 19 bp, Homo sapiens
  siRNA target sequence for SEC23IP (NM_007190.2,945-963).
cgactctttgaatcttgaa

SEQ ID NO: 135660 - DNA, 19 bp, Homo sapiens
  siRNA target sequence for SEC23IP (NM_007190.2,1019-1037).
gagggcgctacgatgttta

SEQ ID NO: 135661 - DNA, 19 bp, Homo sapiens
  siRNA target sequence for SEC23IP (NM_007190.2,1022-1040).
ggcgctacgatgtttacct

SEQ ID NO: 135662 - DNA, 19 bp, Homo sapiens
  siRNA target sequence for SEC23IP (NM_007190.2,1039-1057).
ctctatgaccgaataagga

SEQ ID NO: 135663 - DNA, 19 bp, Homo sapiens
  siRNA target sequence for SEC23IP (NM_007190.2,1189-1207).
gctgtaaccactaatcagt

SEQ ID NO: 135664 - DNA, 19 bp, Homo sapiens
  siRNA target sequence for SEC23IP (NM_007190.2,1209-1227).
gcaccgaagattagagttt

SEQ ID NO: 135665 - DNA, 19 bp, Homo sapiens
  siRNA target sequence for SEC23IP (NM_007190.2,1213-1231).
cgaagattagagtttccaa

SEQ ID NO: 135666 - DNA, 19 bp, Homo sapiens
  siRNA target sequence for SEC23IP (NM_007190.2,1229-1247).
caagtggagagacaattgt

SEQ ID NO: 135667 - DNA, 19 bp, Homo sapiens
  siRNA target sequence for SEC23IP (NM_007190.2,1251-1269).
gcacaatccaaaggttatt

SEQ ID NO: 135668 - DNA, 19 bp, Homo sapiens
  siRNA target sequence for SEC23IP (NM_007190.2,1328-1346).
caaggcccagggttgtaaa

SEQ ID NO: 135669 - DNA, 19 bp, Homo sapiens
  siRNA target sequence for SEC23IP (NM_007190.2,1338-1356).
ggttgtaaagcgtggaatt

SEQ ID NO: 135670 - DNA, 19 bp, Homo sapiens
  siRNA target sequence for SEC23IP (NM_007190.2,1383-1401).
cggggagatgcctcaagtt

SEQ ID NO: 135671 - DNA, 19 bp, Homo sapiens
  siRNA target sequence for SEC23IP (NM_007190.2,1385-1403).
gggagatgcctcaagttga

SEQ ID NO: 135672 - DNA, 19 bp, Homo sapiens
  siRNA target sequence for SEC23IP (NM_007190.2,1451-1469).
gctttaggagcattattga

SEQ ID NO: 135673 - DNA, 19 bp, Homo sapiens
  siRNA target sequence for SEC23IP (NM_007190.2,1487-1505).
gggtggtttctctcaaatt

SEQ ID NO: 135674 - DNA, 19 bp, Homo sapiens
  siRNA target sequence for SEC23IP (NM_007190.2,1509-1527).
gcggacacatttcaagaaa

SEQ ID NO: 135675 - DNA, 19 bp, Homo sapiens
  siRNA target sequence for SEC23IP (NM_007190.2,1558-1576).
gagttccttccagttcatt

SEQ ID NO: 135676 - DNA, 19 bp, Homo sapiens
  siRNA target sequence for SEC23IP (NM_007190.2,1567-1585).
ccagttcattggcatagtt

SEQ ID NO: 135677 - DNA, 19 bp, Homo sapiens
  siRNA target sequence for SEC23IP (NM_007190.2,1570-1588).
gttcattggcatagttctt

SEQ ID NO: 135678 - DNA, 19 bp, Homo sapiens
  siRNA target sequence for SEC23IP (NM_007190.2,1638-1656).
gccaagtattggtcgattt

SEQ ID NO: 135679 - DNA, 19 bp, Homo sapiens
  siRNA target sequence for SEC23IP (NM_007190.2,1648-1666).
ggtcgatttcgtcacttta

SEQ ID NO: 135680 - DNA, 19 bp, Homo sapiens
  siRNA target sequence for SEC23IP (NM_007190.2,1651-1669).
cgatttcgtcactttacca

SEQ ID NO: 135681 - DNA, 19 bp, Homo sapiens
  siRNA target sequence for SEC23IP (NM_007190.2,1652-1670).
gatttcgtcactttaccaa

SEQ ID NO: 135682 - DNA, 19 bp, Homo sapiens
  siRNA target sequence for SEC23IP (NM_007190.2,1660-1678).
cactttaccaatgaaactt

SEQ ID NO: 135683 - DNA, 19 bp, Homo sapiens
  siRNA target sequence for SEC23IP (NM_007190.2,1753-1771).
catctgcatgcactcttta

SEQ ID NO: 135684 - DNA, 19 bp, Homo sapiens
  siRNA target sequence for SEC23IP (NM_007190.2,1756-1774).
ctgcatgcactctttatga

SEQ ID NO: 135685 - DNA, 19 bp, Homo sapiens
  siRNA target sequence for SEC23IP (NM_007190.2,1758-1776).
gcatgcactctttatgagt

SEQ ID NO: 135686 - DNA, 19 bp, Homo sapiens
  siRNA target sequence for SEC23IP (NM_007190.2,1775-1793).
gtcggaacccagacttcaa

SEQ ID NO: 135687 - DNA, 19 bp, Homo sapiens
  siRNA target sequence for SEC23IP (NM_007190.2,1816-1834).
cacagtttaggttctttaa

SEQ ID NO: 135688 - DNA, 19 bp, Homo sapiens
  siRNA target sequence for SEC23IP (NM_007190.2,1818-1836).
cagtttaggttctttaata

SEQ ID NO: 135689 - DNA, 19 bp, Homo sapiens
  siRNA target sequence for SEC23IP (NM_007190.2,1843-1861).
gacatcctgtctaatcaaa

SEQ ID NO: 135690 - DNA, 19 bp, Homo sapiens
  siRNA target sequence for SEC23IP (NM_007190.2,1889-1907).
gacctcttgctgttgctaa

SEQ ID NO: 135691 - DNA, 19 bp, Homo sapiens
  siRNA target sequence for SEC23IP (NM_007190.2,1912-1930).
gttgtgaagcagctacatt

SEQ ID NO: 135692 - DNA, 19 bp, Homo sapiens
  siRNA target sequence for SEC23IP (NM_007190.2,1956-1974).
gccaaagctgactttggat

SEQ ID NO: 135693 - DNA, 19 bp, Homo sapiens
  siRNA target sequence for SEC23IP (NM_007190.2,1977-1995).
gtcgtatgaccttgttgtt

SEQ ID NO: 135694 - DNA, 19 bp, Homo sapiens
  siRNA target sequence for SEC23IP (NM_007190.2,1979-1997).
cgtatgaccttgttgttga

SEQ ID NO: 135695 - DNA, 19 bp, Homo sapiens
  siRNA target sequence for SEC23IP (NM_007190.2,1980-1998).
gtatgaccttgttgttgaa

SEQ ID NO: 135696 - DNA, 19 bp, Homo sapiens
  siRNA target sequence for SEC23IP (NM_007190.2,2010-2028).
cctaactttgcaagaaact

SEQ ID NO: 135697 - DNA, 19 bp, Homo sapiens
  siRNA target sequence for SEC23IP (NM_007190.2,2035-2053).
gcacttagcctctctgaat

SEQ ID NO: 135698 - DNA, 19 bp, Homo sapiens
  siRNA target sequence for SEC23IP (NM_007190.2,2044-2062).
ctctctgaatattttagca

SEQ ID NO: 135699 - DNA, 19 bp, Homo sapiens
  siRNA target sequence for SEC23IP (NM_007190.2,2157-2175).
gatagctaactttgtagaa

SEQ ID NO: 135700 - DNA, 19 bp, Homo sapiens
  siRNA target sequence for SEC23IP (NM_007190.2,2161-2179).
gctaactttgtagaacata

SEQ ID NO: 135701 - DNA, 19 bp, Homo sapiens
  siRNA target sequence for SEC23IP (NM_007190.2,2166-2184).
ctttgtagaacataaagca

SEQ ID NO: 135702 - DNA, 19 bp, Homo sapiens
  siRNA target sequence for SEC23IP (NM_007190.2,2226-2244).
ggccacttctacaaaagga

SEQ ID NO: 135703 - DNA, 19 bp, Homo sapiens
  siRNA target sequence for SEC23IP (NM_007190.2,2283-2301).
cctcccctcagaatccaat

SEQ ID NO: 135704 - DNA, 19 bp, Homo sapiens
  siRNA target sequence for SEC23IP (NM_007190.2,2390-2408).
ctgttgcttacaactcatt

SEQ ID NO: 135705 - DNA, 19 bp, Homo sapiens
  siRNA target sequence for SEC23IP (NM_007190.2,2395-2413).
gcttacaactcattagatt

SEQ ID NO: 135706 - DNA, 19 bp, Homo sapiens
  siRNA target sequence for SEC23IP (NM_007190.2,2441-2459).
ggtctccaattgctatgtt

SEQ ID NO: 135707 - DNA, 19 bp, Homo sapiens
  siRNA target sequence for SEC23IP (NM_007190.2,2442-2460).
gtctccaattgctatgttt

SEQ ID NO: 135708 - DNA, 19 bp, Homo sapiens
  siRNA target sequence for SEC23IP (NM_007190.2,2444-2462).
ctccaattgctatgtttct

SEQ ID NO: 135709 - DNA, 19 bp, Homo sapiens
  siRNA target sequence for SEC23IP (NM_007190.2,2446-2464).
ccaattgctatgtttctca

SEQ ID NO: 135710 - DNA, 19 bp, Homo sapiens
  siRNA target sequence for SEC23IP (NM_007190.2,2463-2481).
cactattcgaggagttgat

SEQ ID NO: 135711 - DNA, 19 bp, Homo sapiens
  siRNA target sequence for SEC23IP (NM_007190.2,2561-2579).
gattagaacctatgattgt

SEQ ID NO: 135712 - DNA, 19 bp, Homo sapiens
  siRNA target sequence for SEC23IP (NM_007190.2,2638-2656).
catttagaattgaaagaga

SEQ ID NO: 135713 - DNA, 19 bp, Homo sapiens
  siRNA target sequence for SEC23IP (NM_007190.2,2661-2679).
ctctcgtatgggatctgat

SEQ ID NO: 135714 - DNA, 19 bp, Homo sapiens
  siRNA target sequence for SEC23IP (NM_007190.2,2663-2681).
ctcgtatgggatctgattt

SEQ ID NO: 135715 - DNA, 19 bp, Homo sapiens
  siRNA target sequence for SEC23IP (NM_007190.2,2665-2683).
cgtatgggatctgatttga

SEQ ID NO: 135716 - DNA, 19 bp, Homo sapiens
  siRNA target sequence for SEC23IP (NM_007190.2,2717-2735).
ggcagacattaaatgagtt

SEQ ID NO: 135717 - DNA, 19 bp, Homo sapiens
  siRNA target sequence for SEC23IP (NM_007190.2,2740-2758).
cgtgctcatacgtcttcaa

SEQ ID NO: 135718 - DNA, 19 bp, Homo sapiens
  siRNA target sequence for SEC23IP (NM_007190.2,2862-2880).
caaggatgaggactactta

SEQ ID NO: 135719 - DNA, 19 bp, Homo sapiens
  siRNA target sequence for SEC23IP (NM_007190.2,2917-2935).
gactacgttctccaagaaa

SEQ ID NO: 135720 - DNA, 19 bp, Homo sapiens
  siRNA target sequence for SEC23IP (NM_007190.2,2922-2940).
cgttctccaagaaaaacca

SEQ ID NO: 135721 - DNA, 19 bp, Homo sapiens
  siRNA target sequence for SEC23IP (NM_007190.2,2967-2985).
cgctcttcagagtcactta

SEQ ID NO: 135722 - DNA, 19 bp, Homo sapiens
  siRNA target sequence for SEC23IP (NM_007190.2,2971-2989).
cttcagagtcacttatgct

SEQ ID NO: 135723 - DNA, 19 bp, Homo sapiens
  siRNA target sequence for SEC23IP (NM_007190.2,2974-2992).
cagagtcacttatgctatt

SEQ ID NO: 135724 - DNA, 19 bp, Homo sapiens
  siRNA target sequence for SEMA6A (NM_020796.1,665-683).
cagaagccttgctgctata

SEQ ID NO: 135725 - DNA, 19 bp, Homo sapiens
  siRNA target sequence for SEMA6A (NM_020796.1,667-685).
gaagccttgctgctatatt

SEQ ID NO: 135726 - DNA, 19 bp, Homo sapiens
  siRNA target sequence for SEMA6A (NM_020796.1,670-688).
gccttgctgctatatttca

SEQ ID NO: 135727 - DNA, 19 bp, Homo sapiens
  siRNA target sequence for SEMA6A (NM_020796.1,672-690).
cttgctgctatatttcaca

SEQ ID NO: 135728 - DNA, 19 bp, Homo sapiens
  siRNA target sequence for SEMA6A (NM_020796.1,746-764).
cgcatggcaactatacaaa

SEQ ID NO: 135729 - DNA, 19 bp, Homo sapiens
  siRNA target sequence for SEMA6A (NM_020796.1,751-769).
ggcaactatacaaaacagt

SEQ ID NO: 135730 - DNA, 19 bp, Homo sapiens
  siRNA target sequence for SEMA6A (NM_020796.1,849-867).
gaacggaaccctctacatt

SEQ ID NO: 135731 - DNA, 19 bp, Homo sapiens
  siRNA target sequence for SEMA6A (NM_020796.1,868-886).
gctgctagggaccatattt

SEQ ID NO: 135732 - DNA, 19 bp, Homo sapiens
  siRNA target sequence for SEMA6A (NM_020796.1,869-887).
ctgctagggaccatattta

SEQ ID NO: 135733 - DNA, 19 bp, Homo sapiens
  siRNA target sequence for SEMA6A (NM_020796.1,875-893).
gggaccatatttatactgt

SEQ ID NO: 135734 - DNA, 19 bp, Homo sapiens
  siRNA target sequence for SEMA6A (NM_020796.1,905-923).
catcacacacggaagaaat

SEQ ID NO: 135735 - DNA, 19 bp, Homo sapiens
  siRNA target sequence for SEMA6A (NM_020796.1,953-971).
ctagacaggccgatgtaga

SEQ ID NO: 135736 - DNA, 19 bp, Homo sapiens
  siRNA target sequence for SEMA6A (NM_020796.1,1081-1099).
ccttcctgcagaaactata

SEQ ID NO: 135737 - DNA, 19 bp, Homo sapiens
  siRNA target sequence for SEMA6A (NM_020796.1,1082-1100).
cttcctgcagaaactataa

SEQ ID NO: 135738 - DNA, 19 bp, Homo sapiens
  siRNA target sequence for SEMA6A (NM_020796.1,1114-1132).
gaaccattcggggatgaat

SEQ ID NO: 135739 - DNA, 19 bp, Homo sapiens
  siRNA target sequence for SEMA6A (NM_020796.1,1117-1135).
ccattcggggatgaattca

SEQ ID NO: 135740 - DNA, 19 bp, Homo sapiens
  siRNA target sequence for SEMA6A (NM_020796.1,1231-1249).
gccattgacgcagtcattt

SEQ ID NO: 135741 - DNA, 19 bp, Homo sapiens
  siRNA target sequence for SEMA6A (NM_020796.1,1232-1250).
ccattgacgcagtcattta

SEQ ID NO: 135742 - DNA, 19 bp, Homo sapiens
  siRNA target sequence for SEMA6A (NM_020796.1,1283-1301).
ccgtcaagcacgattcaaa

SEQ ID NO: 135743 - DNA, 19 bp, Homo sapiens
  siRNA target sequence for SEMA6A (NM_020796.1,1284-1302).
cgtcaagcacgattcaaaa

SEQ ID NO: 135744 - DNA, 19 bp, Homo sapiens
  siRNA target sequence for SEMA6A (NM_020796.1,1285-1303).
gtcaagcacgattcaaaat

SEQ ID NO: 135745 - DNA, 19 bp, Homo sapiens
  siRNA target sequence for SEMA6A (NM_020796.1,1304-1322).
ggttgaaagaaccatactt

SEQ ID NO: 135746 - DNA, 19 bp, Homo sapiens
  siRNA target sequence for SEMA6A (NM_020796.1,1308-1326).
gaaagaaccatactttgtt

SEQ ID NO: 135747 - DNA, 19 bp, Homo sapiens
  siRNA target sequence for SEMA6A (NM_020796.1,1332-1350).
cgtggattacggagattat

SEQ ID NO: 135748 - DNA, 19 bp, Homo sapiens
  siRNA target sequence for SEMA6A (NM_020796.1,1336-1354).
gattacggagattatatct

SEQ ID NO: 135749 - DNA, 19 bp, Homo sapiens
  siRNA target sequence for SEMA6A (NM_020796.1,1342-1360).
ggagattatatctacttct

SEQ ID NO: 135750 - DNA, 19 bp, Homo sapiens
  siRNA target sequence for SEMA6A (NM_020796.1,1343-1361).
gagattatatctacttctt

SEQ ID NO: 135751 - DNA, 19 bp, Homo sapiens
  siRNA target sequence for SEMA6A (NM_020796.1,1345-1363).
gattatatctacttcttct

SEQ ID NO: 135752 - DNA, 19 bp, Homo sapiens
  siRNA target sequence for SEMA6A (NM_020796.1,1423-1441).
caggtttgtaagaatgata

SEQ ID NO: 135753 - DNA, 19 bp, Homo sapiens
  siRNA target sequence for SEMA6A (NM_020796.1,1552-1570).
gttacagatgtgattcgta

SEQ ID NO: 135754 - DNA, 19 bp, Homo sapiens
  siRNA target sequence for SEMA6A (NM_020796.1,1556-1574).
cagatgtgattcgtatcaa

SEQ ID NO: 135755 - DNA, 19 bp, Homo sapiens
  siRNA target sequence for SEMA6A (NM_020796.1,1585-1603).
gttgtcctggcaacgtttt

SEQ ID NO: 135756 - DNA, 19 bp, Homo sapiens
  siRNA target sequence for SEMA6A (NM_020796.1,1598-1616).
cgttttctacaccttataa

SEQ ID NO: 135757 - DNA, 19 bp, Homo sapiens
  siRNA target sequence for SEMA6A (NM_020796.1,1633-1651).
gcagtctgtgcctatgaca

SEQ ID NO: 135758 - DNA, 19 bp, Homo sapiens
  siRNA target sequence for SEMA6A (NM_020796.1,1679-1697).
ggagattcaaggaacagaa

SEQ ID NO: 135759 - DNA, 19 bp, Homo sapiens
  siRNA target sequence for SEMA6A (NM_020796.1,1727-1745).
ctgatgaacgagttcctaa

SEQ ID NO: 135760 - DNA, 19 bp, Homo sapiens
  siRNA target sequence for SEMA6A (NM_020796.1,1768-1786).
ggctcatcctccttagaaa

SEQ ID NO: 135761 - DNA, 19 bp, Homo sapiens
  siRNA target sequence for SEMA6A (NM_020796.1,1883-1901).
catggttcctgagaacaat

SEQ ID NO: 135762 - DNA, 19 bp, Homo sapiens
  siRNA target sequence for SEMA6A (NM_020796.1,1905-1923).
cagataccgccttaccaaa

SEQ ID NO: 135763 - DNA, 19 bp, Homo sapiens
  siRNA target sequence for SEMA6A (NM_020796.1,1907-1925).
gataccgccttaccaaaat

SEQ ID NO: 135764 - DNA, 19 bp, Homo sapiens
  siRNA target sequence for SEMA6A (NM_020796.1,1911-1929).
ccgccttaccaaaattgca

SEQ ID NO: 135765 - DNA, 19 bp, Homo sapiens
  siRNA target sequence for SEMA6A (NM_020796.1,1939-1957).
gctgctgggccatatcaga

SEQ ID NO: 135766 - DNA, 19 bp, Homo sapiens
  siRNA target sequence for SEMA6A (NM_020796.1,1940-1958).
ctgctgggccatatcagaa

SEQ ID NO: 135767 - DNA, 19 bp, Homo sapiens
  siRNA target sequence for SEMA6A (NM_020796.1,2001-2019).
gaagtttttggccagaata

SEQ ID NO: 135768 - DNA, 19 bp, Homo sapiens
  siRNA target sequence for SEMA6A (NM_020796.1,2059-2077).
gagatgagtgtttacaact

SEQ ID NO: 135769 - DNA, 19 bp, Homo sapiens
  siRNA target sequence for SEMA6A (NM_020796.1,2152-2170).
ctgtatgttgcgttctcta

SEQ ID NO: 135770 - DNA, 19 bp, Homo sapiens
  siRNA target sequence for SEMA6A (NM_020796.1,2236-2254).
gcctccagagacccatatt

SEQ ID NO: 135771 - DNA, 19 bp, Homo sapiens
  siRNA target sequence for SEMA6A (NM_020796.1,2238-2256).
ctccagagacccatattgt

SEQ ID NO: 135772 - DNA, 19 bp, Homo sapiens
  siRNA target sequence for SEMA6A (NM_020796.1,2275-2293).
ggtgcctgcagccatttat

SEQ ID NO: 135773 - DNA, 19 bp, Homo sapiens
  siRNA target sequence for SEMA6A (NM_020796.1,2325-2343).
catagagcgtggcaataca

SEQ ID NO: 135774 - DNA, 19 bp, Homo sapiens
  siRNA target sequence for SEMA6A (NM_020796.1,2353-2371).
ggggactgtcacaattcct

SEQ ID NO: 135775 - DNA, 19 bp, Homo sapiens
  siRNA target sequence for SEMA6A (NM_020796.1,2354-2372).
gggactgtcacaattcctt

SEQ ID NO: 135776 - DNA, 19 bp, Homo sapiens
  siRNA target sequence for SEMA6A (NM_020796.1,2355-2373).
ggactgtcacaattccttt

SEQ ID NO: 135777 - DNA, 19 bp, Homo sapiens
  siRNA target sequence for SEMA6A (NM_020796.1,2409-2427).
cagcacaaccacatcagat

SEQ ID NO: 135778 - DNA, 19 bp, Homo sapiens
  siRNA target sequence for SEMA6A (NM_020796.1,2528-2546).
cccataatcaccaagacaa

SEQ ID NO: 135779 - DNA, 19 bp, Homo sapiens
  siRNA target sequence for SEMA6A (NM_020796.1,2551-2569).
ggagtgattcgggaaagtt

SEQ ID NO: 135780 - DNA, 19 bp, Homo sapiens
  siRNA target sequence for SEMA6A (NM_020796.1,2552-2570).
gagtgattcgggaaagtta

SEQ ID NO: 135781 - DNA, 19 bp, Homo sapiens
  siRNA target sequence for SEMA6A (NM_020796.1,3036-3054).
catgggctcccctgtgatt

SEQ ID NO: 135782 - DNA, 19 bp, Homo sapiens
  siRNA target sequence for SEMA6A (NM_020796.1,3199-3217).
gccacactggagtataaga

SEQ ID NO: 135783 - DNA, 19 bp, Homo sapiens
  siRNA target sequence for SEMA6A (NM_020796.1,3449-3467).
ccaccactctcaaaagaaa

SEQ ID NO: 135784 - DNA, 19 bp, Homo sapiens
  siRNA target sequence for SEMA6A (NM_020796.1,3682-3700).
gacgtaccccccaaaccat

SEQ ID NO: 135785 - DNA, 19 bp, Homo sapiens
  siRNA target sequence for SEMA6A (NM_020796.1,3730-3748).
cccaatgatgcgtgtacat

SEQ ID NO: 135786 - DNA, 19 bp, Homo sapiens
  siRNA target sequence for SENP2 (NM_021627.1,314-332).
ccaaaagaccaagattaga

SEQ ID NO: 135787 - DNA, 19 bp, Homo sapiens
  siRNA target sequence for SENP2 (NM_021627.1,322-340).
ccaagattagattgcttta

SEQ ID NO: 135788 - DNA, 19 bp, Homo sapiens
  siRNA target sequence for SENP2 (NM_021627.1,326-344).
gattagattgctttattca

SEQ ID NO: 135789 - DNA, 19 bp, Homo sapiens
  siRNA target sequence for SENP2 (NM_021627.1,335-353).
gctttattcaccaagtgaa

SEQ ID NO: 135790 - DNA, 19 bp, Homo sapiens
  siRNA target sequence for SENP2 (NM_021627.1,351-369).
gaaaaacagtctctacaat

SEQ ID NO: 135791 - DNA, 19 bp, Homo sapiens
  siRNA target sequence for SENP2 (NM_021627.1,525-543).
gaaactgggtaataaatct

SEQ ID NO: 135792 - DNA, 19 bp, Homo sapiens
  siRNA target sequence for SENP2 (NM_021627.1,531-549).
gggtaataaatctcctaat

SEQ ID NO: 135793 - DNA, 19 bp, Homo sapiens
  siRNA target sequence for SENP2 (NM_021627.1,550-568).
ggaataagtgactatccaa

SEQ ID NO: 135794 - DNA, 19 bp, Homo sapiens
  siRNA target sequence for SENP2 (NM_021627.1,633-651).
gaactcagaaggctgtaat

SEQ ID NO: 135795 - DNA, 19 bp, Homo sapiens
  siRNA target sequence for SENP2 (NM_021627.1,662-680).
gtggccgtcgccatagcaa

SEQ ID NO: 135796 - DNA, 19 bp, Homo sapiens
  siRNA target sequence for SENP2 (NM_021627.1,667-685).
cgtcgccatagcaaaggta

SEQ ID NO: 135797 - DNA, 19 bp, Homo sapiens
  siRNA target sequence for SENP2 (NM_021627.1,668-686).
gtcgccatagcaaaggtaa

SEQ ID NO: 135798 - DNA, 19 bp, Homo sapiens
  siRNA target sequence for SENP2 (NM_021627.1,672-690).
ccatagcaaaggtaatcca

SEQ ID NO: 135799 - DNA, 19 bp, Homo sapiens
  siRNA target sequence for SENP2 (NM_021627.1,683-701).
gtaatccagagagttcttt

SEQ ID NO: 135800 - DNA, 19 bp, Homo sapiens
  siRNA target sequence for SENP2 (NM_021627.1,688-706).
ccagagagttctttaatgt

SEQ ID NO: 135801 - DNA, 19 bp, Homo sapiens
  siRNA target sequence for SENP2 (NM_021627.1,723-741).
ggctgtaacagagatgatt

SEQ ID NO: 135802 - DNA, 19 bp, Homo sapiens
  siRNA target sequence for SENP2 (NM_021627.1,724-742).
gctgtaacagagatgattt

SEQ ID NO: 135803 - DNA, 19 bp, Homo sapiens
  siRNA target sequence for SENP2 (NM_021627.1,763-781).
ctgaggcgtccccattgta

SEQ ID NO: 135804 - DNA, 19 bp, Homo sapiens
  siRNA target sequence for SENP2 (NM_021627.1,765-783).
gaggcgtccccattgtact

SEQ ID NO: 135805 - DNA, 19 bp, Homo sapiens
  siRNA target sequence for SENP2 (NM_021627.1,814-832).
gagaagtaccgaaagttat

SEQ ID NO: 135806 - DNA, 19 bp, Homo sapiens
  siRNA target sequence for SENP2 (NM_021627.1,819-837).
gtaccgaaagttattggaa

SEQ ID NO: 135807 - DNA, 19 bp, Homo sapiens
  siRNA target sequence for SENP2 (NM_021627.1,949-967).
caaaatcacggagtcaaaa

SEQ ID NO: 135808 - DNA, 19 bp, Homo sapiens
  siRNA target sequence for SENP2 (NM_021627.1,973-991).
cagtttgttccaaaacaat

SEQ ID NO: 135809 - DNA, 19 bp, Homo sapiens
  siRNA target sequence for SENP2 (NM_021627.1,1010-1028).
ggggacctctatgttcatt

SEQ ID NO: 135810 - DNA, 19 bp, Homo sapiens
  siRNA target sequence for SENP2 (NM_021627.1,1015-1033).
cctctatgttcattgagaa

SEQ ID NO: 135811 - DNA, 19 bp, Homo sapiens
  siRNA target sequence for SENP2 (NM_021627.1,1080-1098).
ggtcggaatcagatttgaa

SEQ ID NO: 135812 - DNA, 19 bp, Homo sapiens
  siRNA target sequence for SENP2 (NM_021627.1,1125-1143).
ggagcctgacctatcagaa

SEQ ID NO: 135813 - DNA, 19 bp, Homo sapiens
  siRNA target sequence for SENP2 (NM_021627.1,1174-1192).
ggaagcaatggcttactca

SEQ ID NO: 135814 - DNA, 19 bp, Homo sapiens
  siRNA target sequence for SENP2 (NM_021627.1,1259-1277).
cggacgatctccttgaact

SEQ ID NO: 135815 - DNA, 19 bp, Homo sapiens
  siRNA target sequence for SENP2 (NM_021627.1,1260-1278).
ggacgatctccttgaactt

SEQ ID NO: 135816 - DNA, 19 bp, Homo sapiens
  siRNA target sequence for SENP2 (NM_021627.1,1261-1279).
gacgatctccttgaactta

SEQ ID NO: 135817 - DNA, 19 bp, Homo sapiens
  siRNA target sequence for SENP2 (NM_021627.1,1263-1281).
cgatctccttgaacttaca

SEQ ID NO: 135818 - DNA, 19 bp, Homo sapiens
  siRNA target sequence for SENP2 (NM_021627.1,1290-1308).
ggaaaaggaaatcagtaat

SEQ ID NO: 135819 - DNA, 19 bp, Homo sapiens
  siRNA target sequence for SENP2 (NM_021627.1,1323-1341).
cccacaggatgaaatccta

SEQ ID NO: 135820 - DNA, 19 bp, Homo sapiens
  siRNA target sequence for SENP2 (NM_021627.1,1338-1356).
cctaagtagtgctttcaaa

SEQ ID NO: 135821 - DNA, 19 bp, Homo sapiens
  siRNA target sequence for SENP2 (NM_021627.1,1372-1390).
ggagatattcagacattaa

SEQ ID NO: 135822 - DNA, 19 bp, Homo sapiens
  siRNA target sequence for SENP2 (NM_021627.1,1404-1422).
gctcaatgatgaagtcatt

SEQ ID NO: 135823 - DNA, 19 bp, Homo sapiens
  siRNA target sequence for SENP2 (NM_021627.1,1405-1423).
ctcaatgatgaagtcatta

SEQ ID NO: 135824 - DNA, 19 bp, Homo sapiens
  siRNA target sequence for SENP2 (NM_021627.1,1466-1484).
gctatccagcacttcatgt

SEQ ID NO: 135825 - DNA, 19 bp, Homo sapiens
  siRNA target sequence for SENP2 (NM_021627.1,1467-1485).
ctatccagcacttcatgta

SEQ ID NO: 135826 - DNA, 19 bp, Homo sapiens
  siRNA target sequence for SENP2 (NM_021627.1,1490-1508).
gtactttcttctatcctaa

SEQ ID NO: 135827 - DNA, 19 bp, Homo sapiens
  siRNA target sequence for SENP2 (NM_021627.1,1493-1511).
ctttcttctatcctaaatt

SEQ ID NO: 135828 - DNA, 19 bp, Homo sapiens
  siRNA target sequence for SENP2 (NM_021627.1,1554-1572).
ggtaaatctctttgaacaa

SEQ ID NO: 135829 - DNA, 19 bp, Homo sapiens
  siRNA target sequence for SENP2 (NM_021627.1,1610-1628).
ggagcctggtggtgattga

SEQ ID NO: 135830 - DNA, 19 bp, Homo sapiens
  siRNA target sequence for SENP2 (NM_021627.1,1618-1636).
gtggtgattgacctaagaa

SEQ ID NO: 135831 - DNA, 19 bp, Homo sapiens
  siRNA target sequence for SENP2 (NM_021627.1,1621-1639).
gtgattgacctaagaaaaa

SEQ ID NO: 135832 - DNA, 19 bp, Homo sapiens
  siRNA target sequence for SENP2 (NM_021627.1,1645-1663).
cttaaatatctggattcta

SEQ ID NO: 135833 - DNA, 19 bp, Homo sapiens
  siRNA target sequence for SENP2 (NM_021627.1,1725-1743).
gaccaaaagaaatagtgat

SEQ ID NO: 135834 - DNA, 19 bp, Homo sapiens
  siRNA target sequence for SENP2 (NM_021627.1,1741-1759).
gatctgaatcttttagagt

SEQ ID NO: 135835 - DNA, 19 bp, Homo sapiens
  siRNA target sequence for SENP2 (NM_021627.1,1808-1826).
ggagtgattgtggaatgtt

SEQ ID NO: 135836 - DNA, 19 bp, Homo sapiens
  siRNA target sequence for SENP2 (NM_021627.1,1813-1831).
gattgtggaatgtttactt

SEQ ID NO: 135837 - DNA, 19 bp, Homo sapiens
  siRNA target sequence for SENP2 (NM_021627.1,1819-1837).
ggaatgtttacttgtaaat

SEQ ID NO: 135838 - DNA, 19 bp, Homo sapiens
  siRNA target sequence for SENP2 (NM_021627.1,1856-1874).
gggacaaacctatcacatt

SEQ ID NO: 135839 - DNA, 19 bp, Homo sapiens
  siRNA target sequence for SENP2 (NM_021627.1,1857-1875).
ggacaaacctatcacattt

SEQ ID NO: 135840 - DNA, 19 bp, Homo sapiens
  siRNA target sequence for SENP2 (NM_021627.1,1858-1876).
gacaaacctatcacattta

SEQ ID NO: 135841 - DNA, 19 bp, Homo sapiens
  siRNA target sequence for SERPINA4 (NM_006215.2,148-166).
ggtgagagttgcagtaaca

SEQ ID NO: 135842 - DNA, 19 bp, Homo sapiens
  siRNA target sequence for SERPINA4 (NM_006215.2,548-566).
ccgtctatgaggctaaact

SEQ ID NO: 135843 - DNA, 19 bp, Homo sapiens
  siRNA target sequence for SERPINA4 (NM_006215.2,595-613).
ggcacaatccagcttatca

SEQ ID NO: 135844 - DNA, 19 bp, Homo sapiens
  siRNA target sequence for SERPINA4 (NM_006215.2,616-634).
gaccacgtcaagaaggaaa

SEQ ID NO: 135845 - DNA, 19 bp, Homo sapiens
  siRNA target sequence for SERPINA4 (NM_006215.2,746-764).
ggaccactcccaaagactt

SEQ ID NO: 135846 - DNA, 19 bp, Homo sapiens
  siRNA target sequence for SERPINA4 (NM_006215.2,816-834).
ggagcatcactggtatctt

SEQ ID NO: 135847 - DNA, 19 bp, Homo sapiens
  siRNA target sequence for SERPINA4 (NM_006215.2,819-837).
gcatcactggtatcttcat

SEQ ID NO: 135848 - DNA, 19 bp, Homo sapiens
  siRNA target sequence for SERPINA4 (NM_006215.2,827-845).
ggtatcttcatgacagata

SEQ ID NO: 135849 - DNA, 19 bp, Homo sapiens
  siRNA target sequence for SERPINA4 (NM_006215.2,861-879).
gctacggatggattacaaa

SEQ ID NO: 135850 - DNA, 19 bp, Homo sapiens
  siRNA target sequence for SERPINA4 (NM_006215.2,880-898).
ggagacgcaaccgtgtttt

SEQ ID NO: 135851 - DNA, 19 bp, Homo sapiens
  siRNA target sequence for SERPINA4 (NM_006215.2,881-899).
gagacgcaaccgtgttttt

SEQ ID NO: 135852 - DNA, 19 bp, Homo sapiens
  siRNA target sequence for SERPINA4 (NM_006215.2,1032-1050).
catttctggctcctatgta

SEQ ID NO: 135853 - DNA, 19 bp, Homo sapiens
  siRNA target sequence for SERPINA4 (NM_006215.2,1040-1058).
gctcctatgtattagatca

SEQ ID NO: 135854 - DNA, 19 bp, Homo sapiens
  siRNA target sequence for SERPINA4 (NM_006215.2,1043-1061).
cctatgtattagatcagat

SEQ ID NO: 135855 - DNA, 19 bp, Homo sapiens
  siRNA target sequence for SERPINA4 (NM_006215.2,1092-1110).
ctccaagtgggctgactta

SEQ ID NO: 135856 - DNA, 19 bp, Homo sapiens
  siRNA target sequence for SERPINA4 (NM_006215.2,1206-1224).
caccagcttcgcgatcaaa

SEQ ID NO: 135857 - DNA, 19 bp, Homo sapiens
  siRNA target sequence for SERPINA4 (NM_006215.2,1208-1226).
ccagcttcgcgatcaaatt

SEQ ID NO: 135858 - DNA, 19 bp, Homo sapiens
  siRNA target sequence for SERPINA4 (NM_006215.2,1211-1229).
gcttcgcgatcaaattctt

SEQ ID NO: 135859 - DNA, 19 bp, Homo sapiens
  siRNA target sequence for SERPINA4 (NM_006215.2,1271-1289).
ccttccttgtggtgatctt

SEQ ID NO: 135860 - DNA, 19 bp, Homo sapiens
  siRNA target sequence for SERPINA4 (NM_006215.2,1330-1348).
gtcgaccccacgaaaccat

SEQ ID NO: 135861 - DNA, 19 bp, Homo sapiens
  siRNA target sequence for SERPINA7 (NM_000354.2,409-427).
gtaacagcctgccattcat

SEQ ID NO: 135862 - DNA, 19 bp, Homo sapiens
  siRNA target sequence for SERPINA7 (NM_000354.2,439-457).
gccactctctacaagatgt

SEQ ID NO: 135863 - DNA, 19 bp, Homo sapiens
  siRNA target sequence for SERPINA7 (NM_000354.2,514-532).
ccagataagaacatcttct

SEQ ID NO: 135864 - DNA, 19 bp, Homo sapiens
  siRNA target sequence for SERPINA7 (NM_000354.2,590-608).
gcacccaaactgagattgt

SEQ ID NO: 135865 - DNA, 19 bp, Homo sapiens
  siRNA target sequence for SERPINA7 (NM_000354.2,837-855).
caagcaggagattaacagt

SEQ ID NO: 135866 - DNA, 19 bp, Homo sapiens
  siRNA target sequence for SERPINA7 (NM_000354.2,954-972).
ccagtgggcaaatcctttt

SEQ ID NO: 135867 - DNA, 19 bp, Homo sapiens
  siRNA target sequence for SERPINA7 (NM_000354.2,998-1016).
ccagcttcttaatagacaa

SEQ ID NO: 135868 - DNA, 19 bp, Homo sapiens
  siRNA target sequence for SERPINA7 (NM_000354.2,1014-1032).
caagaccaccactgttcaa

SEQ ID NO: 135869 - DNA, 19 bp, Homo sapiens
  siRNA target sequence for SERPINA7 (NM_000354.2,1045-1063).
caccagatggaacaatact

SEQ ID NO: 135870 - DNA, 19 bp, Homo sapiens
  siRNA target sequence for SERPINA7 (NM_000354.2,1047-1065).
ccagatggaacaatactat

SEQ ID NO: 135871 - DNA, 19 bp, Homo sapiens
  siRNA target sequence for SERPINA7 (NM_000354.2,1066-1084).
cacctagtggatatggaat

SEQ ID NO: 135872 - DNA, 19 bp, Homo sapiens
  siRNA target sequence for SERPINA7 (NM_000354.2,1069-1087).
ctagtggatatggaattga

SEQ ID NO: 135873 - DNA, 19 bp, Homo sapiens
  siRNA target sequence for SERPINA7 (NM_000354.2,1072-1090).
gtggatatggaattgaact

SEQ ID NO: 135874 - DNA, 19 bp, Homo sapiens
  siRNA target sequence for SERPINA7 (NM_000354.2,1205-1223).
ggaaccgcttactacagaa

SEQ ID NO: 135875 - DNA, 19 bp, Homo sapiens
  siRNA target sequence for SERPINA7 (NM_000354.2,1226-1244).
gatgggttgacttgtttgt

SEQ ID NO: 135876 - DNA, 19 bp, Homo sapiens
  siRNA target sequence for SERPINA7 (NM_000354.2,1256-1274).
ccatttctgccacatatga

SEQ ID NO: 135877 - DNA, 19 bp, Homo sapiens
  siRNA target sequence for SERPINA7 (NM_000354.2,1280-1298).
gagccacacttttgaagat

SEQ ID NO: 135878 - DNA, 19 bp, Homo sapiens
  siRNA target sequence for SERPINA7 (NM_000354.2,1449-1467).
ggatcagcctgaaaacact

SEQ ID NO: 135879 - DNA, 19 bp, Homo sapiens
  siRNA target sequence for SERPINA7 (NM_000354.2,1450-1468).
gatcagcctgaaaacactt

SEQ ID NO: 135880 - DNA, 19 bp, Homo sapiens
  siRNA target sequence for SERPINA7 (NM_000354.2,1466-1484).
ctttcctacaccctattat

SEQ ID NO: 135881 - DNA, 19 bp, Homo sapiens
  siRNA target sequence for SERPINA7 (NM_000354.2,1470-1488).
cctacaccctattatccaa

SEQ ID NO: 135882 - DNA, 19 bp, Homo sapiens
  siRNA target sequence for SERPINA7 (NM_000354.2,1476-1494).
ccctattatccaaattgat

SEQ ID NO: 135883 - DNA, 19 bp, Homo sapiens
  siRNA target sequence for SERPINA7 (NM_000354.2,1526-1544).
gcacaaggagtattctctt

SEQ ID NO: 135884 - DNA, 19 bp, Homo sapiens
  siRNA target sequence for SERPINA7 (NM_000354.2,1527-1545).
cacaaggagtattctcttt

SEQ ID NO: 135885 - DNA, 19 bp, Homo sapiens
  siRNA target sequence for SERPINA7 (NM_000354.2,1529-1547).
caaggagtattctctttct

SEQ ID NO: 135886 - DNA, 19 bp, Homo sapiens
  siRNA target sequence for SERPINB10 (NM_005024.1,3-21).
ggactctctagcaacatca

SEQ ID NO: 135887 - DNA, 19 bp, Homo sapiens
  siRNA target sequence for SERPINB10 (NM_005024.1,4-22).
gactctctagcaacatcaa

SEQ ID NO: 135888 - DNA, 19 bp, Homo sapiens
  siRNA target sequence for SERPINB10 (NM_005024.1,8-26).
ctctagcaacatcaatcaa

SEQ ID NO: 135889 - DNA, 19 bp, Homo sapiens
  siRNA target sequence for SERPINB10 (NM_005024.1,39-57).
ggagttgagcaaaaagcta

SEQ ID NO: 135890 - DNA, 19 bp, Homo sapiens
  siRNA target sequence for SERPINB10 (NM_005024.1,110-128).
cttccttgaccatagtgta

SEQ ID NO: 135891 - DNA, 19 bp, Homo sapiens
  siRNA target sequence for SERPINB10 (NM_005024.1,113-131).
ccttgaccatagtgtattt

SEQ ID NO: 135892 - DNA, 19 bp, Homo sapiens
  siRNA target sequence for SERPINB10 (NM_005024.1,166-184).
caggtgcttcaatttaaca

SEQ ID NO: 135893 - DNA, 19 bp, Homo sapiens
  siRNA target sequence for SERPINB10 (NM_005024.1,168-186).
ggtgcttcaatttaacaga

SEQ ID NO: 135894 - DNA, 19 bp, Homo sapiens
  siRNA target sequence for SERPINB10 (NM_005024.1,269-287).
ctgatttccaaacacttat

SEQ ID NO: 135895 - DNA, 19 bp, Homo sapiens
  siRNA target sequence for SERPINB10 (NM_005024.1,303-321).
gcccaacgatgactactta

SEQ ID NO: 135896 - DNA, 19 bp, Homo sapiens
  siRNA target sequence for SERPINB10 (NM_005024.1,305-323).
ccaacgatgactacttact

SEQ ID NO: 135897 - DNA, 19 bp, Homo sapiens
  siRNA target sequence for SERPINB10 (NM_005024.1,306-324).
caacgatgactacttactt

SEQ ID NO: 135898 - DNA, 19 bp, Homo sapiens
  siRNA target sequence for SERPINB10 (NM_005024.1,430-448).
gtggaagcttctgatcaaa

SEQ ID NO: 135899 - DNA, 19 bp, Homo sapiens
  siRNA target sequence for SERPINB10 (NM_005024.1,479-497).
gacagaccgagggtaaaat

SEQ ID NO: 135900 - DNA, 19 bp, Homo sapiens
  siRNA target sequence for SERPINB10 (NM_005024.1,549-567).
ggtgaacgccctatacttt

SEQ ID NO: 135901 - DNA, 19 bp, Homo sapiens
  siRNA target sequence for SERPINB10 (NM_005024.1,550-568).
gtgaacgccctatacttta

SEQ ID NO: 135902 - DNA, 19 bp, Homo sapiens
  siRNA target sequence for SERPINB10 (NM_005024.1,552-570).
gaacgccctatactttaaa

SEQ ID NO: 135903 - DNA, 19 bp, Homo sapiens
  siRNA target sequence for SERPINB10 (NM_005024.1,556-574).
gccctatactttaaaggaa

SEQ ID NO: 135904 - DNA, 19 bp, Homo sapiens
  siRNA target sequence for SERPINB10 (NM_005024.1,557-575).
ccctatactttaaaggaat

SEQ ID NO: 135905 - DNA, 19 bp, Homo sapiens
  siRNA target sequence for SERPINB10 (NM_005024.1,572-590).
gaatctgggaacatcaatt

SEQ ID NO: 135906 - DNA, 19 bp, Homo sapiens
  siRNA target sequence for SERPINB10 (NM_005024.1,638-656).
caagcaaaccagtgcaaat

SEQ ID NO: 135907 - DNA, 19 bp, Homo sapiens
  siRNA target sequence for SERPINB10 (NM_005024.1,675-693).
gcttcacatttttcacata

SEQ ID NO: 135908 - DNA, 19 bp, Homo sapiens
  siRNA target sequence for SERPINB10 (NM_005024.1,741-759).
cctcagcctgcttatacta

SEQ ID NO: 135909 - DNA, 19 bp, Homo sapiens
  siRNA target sequence for SERPINB10 (NM_005024.1,840-858).
catgatggagttgtatgaa

SEQ ID NO: 135910 - DNA, 19 bp, Homo sapiens
  siRNA target sequence for SERPINB10 (NM_005024.1,991-1009).
ctatttttgtccaatgttt

SEQ ID NO: 135911 - DNA, 19 bp, Homo sapiens
  siRNA target sequence for SERPINB10 (NM_005024.1,1062-1080).
cagtgggagtgagatagat

SEQ ID NO: 135912 - DNA, 19 bp, Homo sapiens
  siRNA target sequence for SERPINB10 (NM_005024.1,1068-1086).
gagtgagatagatatacga

SEQ ID NO: 135913 - DNA, 19 bp, Homo sapiens
  siRNA target sequence for SERPINB10 (NM_005024.1,1072-1090).
gagatagatatacgaatta

SEQ ID NO: 135914 - DNA, 19 bp, Homo sapiens
  siRNA target sequence for SERPINB10 (NM_005024.1,1074-1092).
gatagatatacgaattaga

SEQ ID NO: 135915 - DNA, 19 bp, Homo sapiens
  siRNA target sequence for SERPINB10 (NM_005024.1,1093-1111).
gtcccatccattgaattca

SEQ ID NO: 135916 - DNA, 19 bp, Homo sapiens
  siRNA target sequence for SERPINB10 (NM_005024.1,1095-1113).
cccatccattgaattcaat

SEQ ID NO: 135917 - DNA, 19 bp, Homo sapiens
  siRNA target sequence for SERPINB10 (NM_005024.1,1101-1119).
cattgaattcaatgcaaat

SEQ ID NO: 135918 - DNA, 19 bp, Homo sapiens
  siRNA target sequence for SERPINB6 (NM_004568.3,230-248).
gatggcccagatactttct

SEQ ID NO: 135919 - DNA, 19 bp, Homo sapiens
  siRNA target sequence for SERPINB6 (NM_004568.3,529-547).
cgggctcagtggatccatt

SEQ ID NO: 135920 - DNA, 19 bp, Homo sapiens
  siRNA target sequence for SERPINB6 (NM_004568.3,533-551).
ctcagtggatccattgaca

SEQ ID NO: 135921 - DNA, 19 bp, Homo sapiens
  siRNA target sequence for SERPINB6 (NM_004568.3,620-638).
cgaggagagactgtttaaa

SEQ ID NO: 135922 - DNA, 19 bp, Homo sapiens
  siRNA target sequence for SERPINB6 (NM_004568.3,728-746).
cttggtgcttccatatgtt

SEQ ID NO: 135923 - DNA, 19 bp, Homo sapiens
  siRNA target sequence for SERPINB6 (NM_004568.3,744-762).
gttggcaaggaactgaata

SEQ ID NO: 135924 - DNA, 19 bp, Homo sapiens
  siRNA target sequence for SERPINB8 (NM_002640.3,213-231).
gaagaggacaactcaagaa

SEQ ID NO: 135925 - DNA, 19 bp, Homo sapiens
  siRNA target sequence for SERPINB8 (NM_002640.3,219-237).
gacaactcaagaaacgtat

SEQ ID NO: 135926 - DNA, 19 bp, Homo sapiens
  siRNA target sequence for SERPINB8 (NM_002640.3,322-340).
cactttgtttatacaaaga

SEQ ID NO: 135927 - DNA, 19 bp, Homo sapiens
  siRNA target sequence for SERPINB8 (NM_002640.3,365-383).
gtcacttctcagtgaagtt

SEQ ID NO: 135928 - DNA, 19 bp, Homo sapiens
  siRNA target sequence for SERPINB8 (NM_002640.3,468-486).
gaatactgtcagaagttct

SEQ ID NO: 135929 - DNA, 19 bp, Homo sapiens
  siRNA target sequence for SERPINB8 (NM_002640.3,531-549).
gagtgcaggaagcatataa

SEQ ID NO: 135930 - DNA, 19 bp, Homo sapiens
  siRNA target sequence for SERPINB8 (NM_002640.3,533-551).
gtgcaggaagcatataaat

SEQ ID NO: 135931 - DNA, 19 bp, Homo sapiens
  siRNA target sequence for SERPINB8 (NM_002640.3,535-553).
gcaggaagcatataaatga

SEQ ID NO: 135932 - DNA, 19 bp, Homo sapiens
  siRNA target sequence for SERPINB8 (NM_002640.3,569-587).
gactgaaggtaagatttca

SEQ ID NO: 135933 - DNA, 19 bp, Homo sapiens
  siRNA target sequence for SERPINB8 (NM_002640.3,607-625).
cagtcgatcccctgacaaa

SEQ ID NO: 135934 - DNA, 19 bp, Homo sapiens
  siRNA target sequence for SERPINB8 (NM_002640.3,863-881).
cctcgccgtggtggaaaaa

SEQ ID NO: 135935 - DNA, 19 bp, Homo sapiens
  siRNA target sequence for SERPINB8 (NM_002640.3,882-900).
gcacttacatatgagaaat

SEQ ID NO: 135936 - DNA, 19 bp, Homo sapiens
  siRNA target sequence for SERPINB8 (NM_002640.3,902-920).
caaagcctggacaaattca

SEQ ID NO: 135937 - DNA, 19 bp, Homo sapiens
  siRNA target sequence for SERPINB8 (NM_002640.3,910-928).
ggacaaattcagaaaagtt

SEQ ID NO: 135938 - DNA, 19 bp, Homo sapiens
  siRNA target sequence for SERPINB8 (NM_002640.3,937-955).
gtaaggttcaagttttcct

SEQ ID NO: 135939 - DNA, 19 bp, Homo sapiens
  siRNA target sequence for SERPINB8 (NM_002640.3,1012-1030).
gaatgatcgatgcttttga

SEQ ID NO: 135940 - DNA, 19 bp, Homo sapiens
  siRNA target sequence for SERPINB8 (NM_002640.3,1102-1120).
gcttcgtggaggtcaatga

SEQ ID NO: 135941 - DNA, 19 bp, Homo sapiens
  siRNA target sequence for SERPINB9 (NM_004155.3,97-115).
ctaatgcaagtggtacttt

SEQ ID NO: 135942 - DNA, 19 bp, Homo sapiens
  siRNA target sequence for SERPINB9 (NM_004155.3,117-135).
gccatacgccttttaaaga

SEQ ID NO: 135943 - DNA, 19 bp, Homo sapiens
  siRNA target sequence for SERPINB9 (NM_004155.3,118-136).
ccatacgccttttaaagat

SEQ ID NO: 135944 - DNA, 19 bp, Homo sapiens
  siRNA target sequence for SERPINB9 (NM_004155.3,119-137).
catacgccttttaaagata

SEQ ID NO: 135945 - DNA, 19 bp, Homo sapiens
  siRNA target sequence for SERPINB9 (NM_004155.3,249-267).
caggcactgtctttaaaca

SEQ ID NO: 135946 - DNA, 19 bp, Homo sapiens
  siRNA target sequence for SERPINB9 (NM_004155.3,378-396).
cagttcctctcaacgttta

SEQ ID NO: 135947 - DNA, 19 bp, Homo sapiens
  siRNA target sequence for SERPINB9 (NM_004155.3,493-511).
caaaaaagaccgaaggtaa

SEQ ID NO: 135948 - DNA, 19 bp, Homo sapiens
  siRNA target sequence for SERPINB9 (NM_004155.3,524-542).
gttgccgggtagctcaatt

SEQ ID NO: 135949 - DNA, 19 bp, Homo sapiens
  siRNA target sequence for SERPINB9 (NM_004155.3,527-545).
gccgggtagctcaattgat

SEQ ID NO: 135950 - DNA, 19 bp, Homo sapiens
  siRNA target sequence for SERPINB9 (NM_004155.3,553-571).
ccaggctggttcttgtcaa

SEQ ID NO: 135951 - DNA, 19 bp, Homo sapiens
  siRNA target sequence for SERPINB9 (NM_004155.3,600-618).
gaaccgtttgacgaaacat

SEQ ID NO: 135952 - DNA, 19 bp, Homo sapiens
  siRNA target sequence for SERPINB9 (NM_004155.3,603-621).
ccgtttgacgaaacataca

SEQ ID NO: 135953 - DNA, 19 bp, Homo sapiens
  siRNA target sequence for SERPINB9 (NM_004155.3,605-623).
gtttgacgaaacatacaca

SEQ ID NO: 135954 - DNA, 19 bp, Homo sapiens
  siRNA target sequence for SERPINB9 (NM_004155.3,802-820).
gcacggtggaaaaaagtct

SEQ ID NO: 135955 - DNA, 19 bp, Homo sapiens
  siRNA target sequence for SERPINB9 (NM_004155.3,852-870).
ccagactgtatgaagagta

SEQ ID NO: 135956 - DNA, 19 bp, Homo sapiens
  siRNA target sequence for SERPINB9 (NM_004155.3,909-927).
gaggattatgacatggaat

SEQ ID NO: 135957 - DNA, 19 bp, Homo sapiens
  siRNA target sequence for SERPINB9 (NM_004155.3,1022-1040).
gttcgtgcacaagagtttt

SEQ ID NO: 135958 - DNA, 19 bp, Homo sapiens
  siRNA target sequence for SERPINB9 (NM_004155.3,1078-1096).
cgtcgagctgctttgtagt

SEQ ID NO: 135959 - DNA, 19 bp, Homo sapiens
  siRNA target sequence for SGTA (NM_003021.3,313-331).
cagactctgccggagatat

SEQ ID NO: 135960 - DNA, 19 bp, Homo sapiens
  siRNA target sequence for SGTA (NM_003021.3,317-335).
ctctgccggagatatttga

SEQ ID NO: 135961 - DNA, 19 bp, Homo sapiens
  siRNA target sequence for SGTA (NM_003021.3,415-433).
gaggcagagcgcctcaaaa

SEQ ID NO: 135962 - DNA, 19 bp, Homo sapiens
  siRNA target sequence for SGTA (NM_003021.3,676-694).
gaggccgtggcttactaca

SEQ ID NO: 135963 - DNA, 19 bp, Homo sapiens
  siRNA target sequence for SGTA (NM_003021.3,679-697).
gccgtggcttactacaaga

SEQ ID NO: 135964 - DNA, 19 bp, Homo sapiens
  siRNA target sequence for SGTA (NM_003021.3,680-698).
ccgtggcttactacaagaa

SEQ ID NO: 135965 - DNA, 19 bp, Homo sapiens
  siRNA target sequence for SGTA (NM_003021.3,715-733).
cccgacaacgagacataca

SEQ ID NO: 135966 - DNA, 19 bp, Homo sapiens
  siRNA target sequence for SGTA (NM_003021.3,716-734).
ccgacaacgagacatacaa

SEQ ID NO: 135967 - DNA, 19 bp, Homo sapiens
  siRNA target sequence for SGTA (NM_003021.3,718-736).
gacaacgagacatacaagt

SEQ ID NO: 135968 - DNA, 19 bp, Homo sapiens
  siRNA target sequence for SGTA (NM_003021.3,732-750).
caagtccaacctcaagata

SEQ ID NO: 135969 - DNA, 19 bp, Homo sapiens
  siRNA target sequence for SGTA (NM_003021.3,842-860).
gcatggcttcgaacctaat

SEQ ID NO: 135970 - DNA, 19 bp, Homo sapiens
  siRNA target sequence for SGTA (NM_003021.3,847-865).
gcttcgaacctaatgaaca

SEQ ID NO: 135971 - DNA, 19 bp, Homo sapiens
  siRNA target sequence for SGTA (NM_003021.3,883-901).
ctcatgtccggcatgattt

SEQ ID NO: 135972 - DNA, 19 bp, Homo sapiens
  siRNA target sequence for SHANK2 (NM_012309.1,39-57).
gatgatgacgggctacaat

SEQ ID NO: 135973 - DNA, 19 bp, Homo sapiens
  siRNA target sequence for SHANK2 (NM_012309.1,42-60).
gatgacgggctacaataat

SEQ ID NO: 135974 - DNA, 19 bp, Homo sapiens
  siRNA target sequence for SHANK2 (NM_012309.1,82-100).
ctctacagtgactgcatta

SEQ ID NO: 135975 - DNA, 19 bp, Homo sapiens
  siRNA target sequence for SHANK2 (NM_012309.1,113-131).
cggtggtcctgcagaaaaa

SEQ ID NO: 135976 - DNA, 19 bp, Homo sapiens
  siRNA target sequence for SHANK2 (NM_012309.1,173-191).
ctgacacacccattgaaga

SEQ ID NO: 135977 - DNA, 19 bp, Homo sapiens
  siRNA target sequence for SHANK2 (NM_012309.1,175-193).
gacacacccattgaagaat

SEQ ID NO: 135978 - DNA, 19 bp, Homo sapiens
  siRNA target sequence for SHANK2 (NM_012309.1,209-227).
ctttcccagccctacagta

SEQ ID NO: 135979 - DNA, 19 bp, Homo sapiens
  siRNA target sequence for SHANK2 (NM_012309.1,275-293).
ggaccggggacttcttgat

SEQ ID NO: 135980 - DNA, 19 bp, Homo sapiens
  siRNA target sequence for SHANK2 (NM_012309.1,278-296).
ccggggacttcttgattga

SEQ ID NO: 135981 - DNA, 19 bp, Homo sapiens
  siRNA target sequence for SHANK2 (NM_012309.1,288-306).
cttgattgaggttaacaat

SEQ ID NO: 135982 - DNA, 19 bp, Homo sapiens
  siRNA target sequence for SHANK2 (NM_012309.1,362-380).
ggaatcacctggtccttaa

SEQ ID NO: 135983 - DNA, 19 bp, Homo sapiens
  siRNA target sequence for SHANK2 (NM_012309.1,747-765).
gcgaaggcagaaatcaata

SEQ ID NO: 135984 - DNA, 19 bp, Homo sapiens
  siRNA target sequence for SHANK2 (NM_012309.1,818-836).
ctcctccaatgctgaagtt

SEQ ID NO: 135985 - DNA, 19 bp, Homo sapiens
  siRNA target sequence for SHANK2 (NM_012309.1,959-977).
gagtctacgggacgattaa

SEQ ID NO: 135986 - DNA, 19 bp, Homo sapiens
  siRNA target sequence for SHANK2 (NM_012309.1,978-996).
gcctgcgttcaatcagaat

SEQ ID NO: 135987 - DNA, 19 bp, Homo sapiens
  siRNA target sequence for SHANK2 (NM_012309.1,979-997).
cctgcgttcaatcagaatt

SEQ ID NO: 135988 - DNA, 19 bp, Homo sapiens
  siRNA target sequence for SHANK2 (NM_012309.1,1138-1156).
gccaacttccgcaacaaga

SEQ ID NO: 135989 - DNA, 19 bp, Homo sapiens
  siRNA target sequence for SHANK2 (NM_012309.1,1593-1611).
ccccgaggagggggatttt

SEQ ID NO: 135990 - DNA, 19 bp, Homo sapiens
  siRNA target sequence for SHANK2 (NM_012309.1,1667-1685).
gggagcccgaaaaccattt

SEQ ID NO: 135991 - DNA, 19 bp, Homo sapiens
  siRNA target sequence for SHANK2 (NM_012309.1,1947-1965).
caaacctctttacattgat

SEQ ID NO: 135992 - DNA, 19 bp, Homo sapiens
  siRNA target sequence for SHANK2 (NM_012309.1,2274-2292).
cgaaaccgaaggtgcttta

SEQ ID NO: 135993 - DNA, 19 bp, Homo sapiens
  siRNA target sequence for SHANK2 (NM_012309.1,2279-2297).
ccgaaggtgctttacagat

SEQ ID NO: 135994 - DNA, 19 bp, Homo sapiens
  siRNA target sequence for SHANK2 (NM_012309.1,2413-2431).
gacttggatgaggatttta

SEQ ID NO: 135995 - DNA, 19 bp, Homo sapiens
  siRNA target sequence for SHANK2 (NM_012309.1,2453-2471).
ctcccctggaatttgcaaa

SEQ ID NO: 135996 - DNA, 19 bp, Homo sapiens
  siRNA target sequence for SHANK2 (NM_012309.1,2510-2528).
cggctctctcagacttagt

SEQ ID NO: 135997 - DNA, 19 bp, Homo sapiens
  siRNA target sequence for SHANK2 (NM_012309.1,2512-2530).
gctctctcagacttagtga

SEQ ID NO: 135998 - DNA, 19 bp, Homo sapiens
  siRNA target sequence for SHANK2 (NM_012309.1,2554-2572).
cagtccccttcgttgaact

SEQ ID NO: 135999 - DNA, 19 bp, Homo sapiens
  siRNA target sequence for SHANK2 (NM_012309.1,2796-2814).
ggacacctgcacagtctat

SEQ ID NO: 136000 - DNA, 19 bp, Homo sapiens
  siRNA target sequence for SHANK2 (NM_012309.1,2815-2833).
gcagatgggcaagcattta

SEQ ID NO: 136001 - DNA, 19 bp, Homo sapiens
  siRNA target sequence for SHANK2 (NM_012309.1,2875-2893).
cccatcattcacaaaagca

SEQ ID NO: 136002 - DNA, 19 bp, Homo sapiens
  siRNA target sequence for SHANK2 (NM_012309.1,2876-2894).
ccatcattcacaaaagcaa

SEQ ID NO: 136003 - DNA, 19 bp, Homo sapiens
  siRNA target sequence for SHANK2 (NM_012309.1,2912-2930).
cgctcgtggaagaagatgt

SEQ ID NO: 136004 - DNA, 19 bp, Homo sapiens
  siRNA target sequence for SHANK2 (NM_012309.1,2926-2944).
gatgtagatagctttgtta

SEQ ID NO: 136005 - DNA, 19 bp, Homo sapiens
  siRNA target sequence for SHANK2 (NM_012309.1,3034-3052).
gacgtcacagagatcaaaa

SEQ ID NO: 136006 - DNA, 19 bp, Homo sapiens
  siRNA target sequence for SHANK2 (NM_012309.1,3067-3085).
ggcccaaaggcaaacgtta

SEQ ID NO: 136007 - DNA, 19 bp, Homo sapiens
  siRNA target sequence for SHANK2 (NM_012309.1,3068-3086).
gcccaaaggcaaacgttat

SEQ ID NO: 136008 - DNA, 19 bp, Homo sapiens
  siRNA target sequence for SHANK2 (NM_012309.1,3070-3088).
ccaaaggcaaacgttatta

SEQ ID NO: 136009 - DNA, 19 bp, Homo sapiens
  siRNA target sequence for SHANK2 (NM_012309.1,3076-3094).
gcaaacgttattagtgaat

SEQ ID NO: 136010 - DNA, 19 bp, Homo sapiens
  siRNA target sequence for SHANK2 (NM_012309.1,3077-3095).
caaacgttattagtgaatt

SEQ ID NO: 136011 - DNA, 19 bp, Homo sapiens
  siRNA target sequence for SHANK2 (NM_012309.1,3082-3100).
gttattagtgaattgaact

SEQ ID NO: 136012 - DNA, 19 bp, Homo sapiens
  siRNA target sequence for SHANK2 (NM_012309.1,3353-3371).
cgccaacagagatgaacaa

SEQ ID NO: 136013 - DNA, 19 bp, Homo sapiens
  siRNA target sequence for SHANK2 (NM_012309.1,3520-3538).
ctgcaacagccaatctcaa

SEQ ID NO: 136014 - DNA, 19 bp, Homo sapiens
  siRNA target sequence for SHANK2 (NM_012309.1,3592-3610).
gattggctggaaagtctaa

SEQ ID NO: 136015 - DNA, 19 bp, Homo sapiens
  siRNA target sequence for SHANK2 (NM_012309.1,3607-3625).
ctaaacttgggtgaacata

SEQ ID NO: 136016 - DNA, 19 bp, Homo sapiens
  siRNA target sequence for SHANK2 (NM_012309.1,3652-3670).
gatggcagtcacttaccaa

SEQ ID NO: 136017 - DNA, 19 bp, Homo sapiens
  siRNA target sequence for SHANK2 (NM_012309.1,3707-3725).
ctcgagtcgggcacagaat

SEQ ID NO: 136018 - DNA, 19 bp, Homo sapiens
  siRNA target sequence for SHANK2 (NM_012309.1,3709-3727).
cgagtcgggcacagaatga

SEQ ID NO: 136019 - DNA, 19 bp, Homo sapiens
  siRNA target sequence for SHANK2 (NM_012309.1,3710-3728).
gagtcgggcacagaatgaa

SEQ ID NO: 136020 - DNA, 19 bp, Homo sapiens
  siRNA target sequence for SHANK2 (NM_012309.1,3714-3732).
cgggcacagaatgaacata

SEQ ID NO: 136021 - DNA, 19 bp, Homo sapiens
  siRNA target sequence for SHANK2 (NM_012309.1,3716-3734).
ggcacagaatgaacataga

SEQ ID NO: 136022 - DNA, 19 bp, Homo sapiens
  siRNA target sequence for SHANK2 (NM_133266.1,523-541).
gcctcggtccggaagaaga

SEQ ID NO: 136023 - DNA, 19 bp, Homo sapiens
  siRNA target sequence for SHANK2 (NM_133266.1,524-542).
cctcggtccggaagaagaa

SEQ ID NO: 136024 - DNA, 19 bp, Homo sapiens
  siRNA target sequence for SLC12A9 (NM_020246.2,291-309).
ccatgttcagcatagttgt

SEQ ID NO: 136025 - DNA, 19 bp, Homo sapiens
  siRNA target sequence for SLC12A9 (NM_020246.2,447-465).
gcggagcctacttcatgat

SEQ ID NO: 136026 - DNA, 19 bp, Homo sapiens
  siRNA target sequence for SLC12A9 (NM_020246.2,495-513).
gcagcattgggctcatgtt

SEQ ID NO: 136027 - DNA, 19 bp, Homo sapiens
  siRNA target sequence for SLC12A9 (NM_020246.2,1323-1341).
cctgggcagctgtacttta

SEQ ID NO: 136028 - DNA, 19 bp, Homo sapiens
  siRNA target sequence for SLC12A9 (NM_020246.2,1327-1345).
ggcagctgtactttattct

SEQ ID NO: 136029 - DNA, 19 bp, Homo sapiens
  siRNA target sequence for SLC12A9 (NM_020246.2,1672-1690).
ccaccaggtgcgtaagtat

SEQ ID NO: 136030 - DNA, 19 bp, Homo sapiens
  siRNA target sequence for SLC12A9 (NM_020246.2,1788-1806).
ggttggccaaccagcttaa

SEQ ID NO: 136031 - DNA, 19 bp, Homo sapiens
  siRNA target sequence for SLC12A9 (NM_020246.2,2046-2064).
ctccaccgcaggaccattt

SEQ ID NO: 136032 - DNA, 19 bp, Homo sapiens
  siRNA target sequence for SLC12A9 (NM_020246.2,2068-2086).
gacggacccggctttctct

SEQ ID NO: 136033 - DNA, 19 bp, Homo sapiens
  siRNA target sequence for SLC12A9 (NM_020246.2,2204-2222).
gccgacgccctcaagatga

SEQ ID NO: 136034 - DNA, 19 bp, Homo sapiens
  siRNA target sequence for SLC12A9 (NM_020246.2,2207-2225).
gacgccctcaagatgaaca

SEQ ID NO: 136035 - DNA, 19 bp, Homo sapiens
  siRNA target sequence for SLC12A9 (NM_020246.2,2804-2822).
gcgctactggagactctaa

SEQ ID NO: 136036 - DNA, 19 bp, Homo sapiens
  siRNA target sequence for SLC9A3R2 (NM_004785.1,578-596).
ggttcaacctgcatagtga

SEQ ID NO: 136037 - DNA, 19 bp, Homo sapiens
  siRNA target sequence for SLC9A3R2 (NM_004785.1,668-686).
cccaggaccggctcattga

SEQ ID NO: 136038 - DNA, 19 bp, Homo sapiens
  siRNA target sequence for SLC9A3R2 (NM_004785.1,782-800).
ccgagacagatgaacactt

SEQ ID NO: 136039 - DNA, 19 bp, Homo sapiens
  siRNA target sequence for SLIT1 (NM_003061.1,421-439).
cgagcgcctggaactcaat

SEQ ID NO: 136040 - DNA, 19 bp, Homo sapiens
  siRNA target sequence for SLIT1 (NM_003061.1,453-471).
ctcggatccataagaatga

SEQ ID NO: 136041 - DNA, 19 bp, Homo sapiens
  siRNA target sequence for SLIT1 (NM_003061.1,455-473).
cggatccataagaatgact

SEQ ID NO: 136042 - DNA, 19 bp, Homo sapiens
  siRNA target sequence for SLIT1 (NM_003061.1,537-555).
gtggtgcttttgatgacat

SEQ ID NO: 136043 - DNA, 19 bp, Homo sapiens
  siRNA target sequence for SLIT1 (NM_003061.1,540-558).
gtgcttttgatgacatgaa

SEQ ID NO: 136044 - DNA, 19 bp, Homo sapiens
  siRNA target sequence for SLIT1 (NM_003061.1,693-711).
ggggagctacggaccttaa

SEQ ID NO: 136045 - DNA, 19 bp, Homo sapiens
  siRNA target sequence for SLIT1 (NM_003061.1,694-712).
gggagctacggaccttaaa

SEQ ID NO: 136046 - DNA, 19 bp, Homo sapiens
  siRNA target sequence for SLIT1 (NM_003061.1,1181-1199).
gagctgaacggcatcaagt

SEQ ID NO: 136047 - DNA, 19 bp, Homo sapiens
  siRNA target sequence for SLIT1 (NM_003061.1,1219-1237).
ctcaccctacagaaagcta

SEQ ID NO: 136048 - DNA, 19 bp, Homo sapiens
  siRNA target sequence for SLIT1 (NM_003061.1,1243-1261).
gatagacctgagcaacaat

SEQ ID NO: 136049 - DNA, 19 bp, Homo sapiens
  siRNA target sequence for SLIT1 (NM_003061.1,1258-1276).
caatcagatcgctgagatt

SEQ ID NO: 136050 - DNA, 19 bp, Homo sapiens
  siRNA target sequence for SLIT1 (NM_003061.1,1345-1363).
cctcccccgtggtgtgttt

SEQ ID NO: 136051 - DNA, 19 bp, Homo sapiens
  siRNA target sequence for SLIT1 (NM_003061.1,1358-1376).
gtgtttggaggcctataca

SEQ ID NO: 136052 - DNA, 19 bp, Homo sapiens
  siRNA target sequence for SLIT1 (NM_003061.1,1697-1715).
gccaaagagcagtacttca

SEQ ID NO: 136053 - DNA, 19 bp, Homo sapiens
  siRNA target sequence for SLIT1 (NM_003061.1,1857-1875).
cggcagaactgcgattgaa

SEQ ID NO: 136054 - DNA, 19 bp, Homo sapiens
  siRNA target sequence for SLIT1 (NM_003061.1,1858-1876).
ggcagaactgcgattgaat

SEQ ID NO: 136055 - DNA, 19 bp, Homo sapiens
  siRNA target sequence for SLIT1 (NM_003061.1,1859-1877).
gcagaactgcgattgaata

SEQ ID NO: 136056 - DNA, 19 bp, Homo sapiens
  siRNA target sequence for SLIT1 (NM_003061.1,1860-1878).
cagaactgcgattgaataa

SEQ ID NO: 136057 - DNA, 19 bp, Homo sapiens
  siRNA target sequence for SLIT1 (NM_003061.1,1957-1975).
caaggtgtcagaaattgaa

SEQ ID NO: 136058 - DNA, 19 bp, Homo sapiens
  siRNA target sequence for SLIT1 (NM_003061.1,2611-2629).
caacaagatcagttcctta

SEQ ID NO: 136059 - DNA, 19 bp, Homo sapiens
  siRNA target sequence for SLIT1 (NM_003061.1,2617-2635).
gatcagttccttaagcaat

SEQ ID NO: 136060 - DNA, 19 bp, Homo sapiens
  siRNA target sequence for SLIT1 (NM_003061.1,2822-2840).
ggtgccaaccccctatact

SEQ ID NO: 136061 - DNA, 19 bp, Homo sapiens
  siRNA target sequence for SLIT1 (NM_003061.1,2949-2967).
ccacgcctgccaagaagtt

SEQ ID NO: 136062 - DNA, 19 bp, Homo sapiens
  siRNA target sequence for SLIT1 (NM_003061.1,2950-2968).
cacgcctgccaagaagttt

SEQ ID NO: 136063 - DNA, 19 bp, Homo sapiens
  siRNA target sequence for SLIT1 (NM_003061.1,3138-3156).
ccagtggcccctgtgaaaa

SEQ ID NO: 136064 - DNA, 19 bp, Homo sapiens
  siRNA target sequence for SLIT1 (NM_003061.1,3139-3157).
cagtggcccctgtgaaaat

SEQ ID NO: 136065 - DNA, 19 bp, Homo sapiens
  siRNA target sequence for SLIT1 (NM_003061.1,3379-3397).
ggatctgaacccatgtcaa

SEQ ID NO: 136066 - DNA, 19 bp, Homo sapiens
  siRNA target sequence for SLIT1 (NM_003061.1,3442-3460).
gtgcatgccaggttatgca

SEQ ID NO: 136067 - DNA, 19 bp, Homo sapiens
  siRNA target sequence for SLIT1 (NM_003061.1,3708-3726).
gccctgagtgtgagaagtt

SEQ ID NO: 136068 - DNA, 19 bp, Homo sapiens
  siRNA target sequence for SLIT1 (NM_003061.1,3724-3742).
gttgctcagtgtcaacttt

SEQ ID NO: 136069 - DNA, 19 bp, Homo sapiens
  siRNA target sequence for SLIT1 (NM_003061.1,4003-4021).
ggtgaatctctccattgat

SEQ ID NO: 136070 - DNA, 19 bp, Homo sapiens
  siRNA target sequence for SLIT1 (NM_003061.1,4072-4090).
cagcgaggcgccactctat

SEQ ID NO: 136071 - DNA, 19 bp, Homo sapiens
  siRNA target sequence for SLIT1 (NM_003061.1,4074-4092).
gcgaggcgccactctatgt

SEQ ID NO: 136072 - DNA, 19 bp, Homo sapiens
  siRNA target sequence for SLIT1 (NM_003061.1,4098-4116).
ggatgcccgtggatgtcaa

SEQ ID NO: 136073 - DNA, 19 bp, Homo sapiens
  siRNA target sequence for SLIT1 (NM_003061.1,4410-4428).
ccctcgacgctctttccta

SEQ ID NO: 136074 - DNA, 19 bp, Homo sapiens
  siRNA target sequence for SLIT2 (NM_004787.1,343-361).
cgcagcgtgcccaggaata

SEQ ID NO: 136075 - DNA, 19 bp, Homo sapiens
  siRNA target sequence for SLIT2 (NM_004787.1,344-362).
gcagcgtgcccaggaatat

SEQ ID NO: 136076 - DNA, 19 bp, Homo sapiens
  siRNA target sequence for SLIT2 (NM_004787.1,372-390).
caccgagagactggattta

SEQ ID NO: 136077 - DNA, 19 bp, Homo sapiens
  siRNA target sequence for SLIT2 (NM_004787.1,374-392).
ccgagagactggatttaaa

SEQ ID NO: 136078 - DNA, 19 bp, Homo sapiens
  siRNA target sequence for SLIT2 (NM_004787.1,430-448).
gctggtcttagacatctaa

SEQ ID NO: 136079 - DNA, 19 bp, Homo sapiens
  siRNA target sequence for SLIT2 (NM_004787.1,459-477).
gcttatggagaataagatt

SEQ ID NO: 136080 - DNA, 19 bp, Homo sapiens
  siRNA target sequence for SLIT2 (NM_004787.1,493-511).
ggagcattccaggatctta

SEQ ID NO: 136081 - DNA, 19 bp, Homo sapiens
  siRNA target sequence for SLIT2 (NM_004787.1,494-512).
gagcattccaggatcttaa

SEQ ID NO: 136082 - DNA, 19 bp, Homo sapiens
  siRNA target sequence for SLIT2 (NM_004787.1,501-519).
ccaggatcttaaagaacta

SEQ ID NO: 136083 - DNA, 19 bp, Homo sapiens
  siRNA target sequence for SLIT2 (NM_004787.1,517-535).
ctagagagactgcgtttaa

SEQ ID NO: 136084 - DNA, 19 bp, Homo sapiens
  siRNA target sequence for SLIT2 (NM_004787.1,522-540).
gagactgcgtttaaacaga

SEQ ID NO: 136085 - DNA, 19 bp, Homo sapiens
  siRNA target sequence for SLIT2 (NM_004787.1,574-592).
cttgggactgcgaagctat

SEQ ID NO: 136086 - DNA, 19 bp, Homo sapiens
  siRNA target sequence for SLIT2 (NM_004787.1,577-595).
gggactgcgaagctataca

SEQ ID NO: 136087 - DNA, 19 bp, Homo sapiens
  siRNA target sequence for SLIT2 (NM_004787.1,645-663).
ccgtggggcagttgacata

SEQ ID NO: 136088 - DNA, 19 bp, Homo sapiens
  siRNA target sequence for SLIT2 (NM_004787.1,646-664).
cgtggggcagttgacataa

SEQ ID NO: 136089 - DNA, 19 bp, Homo sapiens
  siRNA target sequence for SLIT2 (NM_004787.1,652-670).
gcagttgacataaaaaatt

SEQ ID NO: 136090 - DNA, 19 bp, Homo sapiens
  siRNA target sequence for SLIT2 (NM_004787.1,770-788).
gactttctgtggcaagttt

SEQ ID NO: 136091 - DNA, 19 bp, Homo sapiens
  siRNA target sequence for SLIT2 (NM_004787.1,778-796).
gtggcaagtttcaaccata

SEQ ID NO: 136092 - DNA, 19 bp, Homo sapiens
  siRNA target sequence for SLIT2 (NM_004787.1,789-807).
caaccatatgcctaaactt

SEQ ID NO: 136093 - DNA, 19 bp, Homo sapiens
  siRNA target sequence for SLIT2 (NM_004787.1,812-830).
cttttcgactgcattcaaa

SEQ ID NO: 136094 - DNA, 19 bp, Homo sapiens
  siRNA target sequence for SLIT2 (NM_004787.1,827-845).
caaacaacctgtattgtga

SEQ ID NO: 136095 - DNA, 19 bp, Homo sapiens
  siRNA target sequence for SLIT2 (NM_004787.1,896-914).
gtctgtacactcagtgtat

SEQ ID NO: 136096 - DNA, 19 bp, Homo sapiens
  siRNA target sequence for SLIT2 (NM_004787.1,924-942).
ccacctgagaggccataat

SEQ ID NO: 136097 - DNA, 19 bp, Homo sapiens
  siRNA target sequence for SLIT2 (NM_004787.1,927-945).
cctgagaggccataatgta

SEQ ID NO: 136098 - DNA, 19 bp, Homo sapiens
  siRNA target sequence for SLIT2 (NM_004787.1,951-969).
ggttcaaaaacgagaattt

SEQ ID NO: 136099 - DNA, 19 bp, Homo sapiens
  siRNA target sequence for SLIT2 (NM_004787.1,996-1014).
ggctccttcttgtagtgtt

SEQ ID NO: 136100 - DNA, 19 bp, Homo sapiens
  siRNA target sequence for SLIT2 (NM_004787.1,997-1015).
gctccttcttgtagtgttt

SEQ ID NO: 136101 - DNA, 19 bp, Homo sapiens
  siRNA target sequence for SLIT2 (NM_004787.1,998-1016).
ctccttcttgtagtgtttt

SEQ ID NO: 136102 - DNA, 19 bp, Homo sapiens
  siRNA target sequence for SLIT2 (NM_004787.1,1032-1050).
ctgtacctgtagcaacaat

SEQ ID NO: 136103 - DNA, 19 bp, Homo sapiens
  siRNA target sequence for SLIT2 (NM_004787.1,1037-1055).
cctgtagcaacaatatcgt

SEQ ID NO: 136104 - DNA, 19 bp, Homo sapiens
  siRNA target sequence for SLIT2 (NM_004787.1,1038-1056).
ctgtagcaacaatatcgta

SEQ ID NO: 136105 - DNA, 19 bp, Homo sapiens
  siRNA target sequence for SLIT2 (NM_004787.1,1104-1122).
gaccatcacagaaatacgt

SEQ ID NO: 136106 - DNA, 19 bp, Homo sapiens
  siRNA target sequence for SLIT2 (NM_004787.1,1110-1128).
cacagaaatacgtttggaa

SEQ ID NO: 136107 - DNA, 19 bp, Homo sapiens
  siRNA target sequence for SLIT2 (NM_004787.1,1121-1139).
gtttggaacagaacacaat

SEQ ID NO: 136108 - DNA, 19 bp, Homo sapiens
  siRNA target sequence for SLIT2 (NM_004787.1,1156-1174).
ggagctttctcaccatata

SEQ ID NO: 136109 - DNA, 19 bp, Homo sapiens
  siRNA target sequence for SLIT2 (NM_004787.1,1157-1175).
gagctttctcaccatataa

SEQ ID NO: 136110 - DNA, 19 bp, Homo sapiens
  siRNA target sequence for SLIT2 (NM_004787.1,1164-1182).
ctcaccatataaaaagctt

SEQ ID NO: 136111 - DNA, 19 bp, Homo sapiens
  siRNA target sequence for SLIT2 (NM_004787.1,1186-1204).
cgaattgacctgagcaata

SEQ ID NO: 136112 - DNA, 19 bp, Homo sapiens
  siRNA target sequence for SLIT2 (NM_004787.1,1187-1205).
gaattgacctgagcaataa

SEQ ID NO: 136113 - DNA, 19 bp, Homo sapiens
  siRNA target sequence for SLIT2 (NM_004787.1,1240-1258).
ggactacgctctctgaatt

SEQ ID NO: 136114 - DNA, 19 bp, Homo sapiens
  siRNA target sequence for SLIT2 (NM_004787.1,1284-1302).
cacagaactccccaaaagt

SEQ ID NO: 136115 - DNA, 19 bp, Homo sapiens
  siRNA target sequence for SLIT2 (NM_004787.1,1322-1340).
ccttacagctcctattatt

SEQ ID NO: 136116 - DNA, 19 bp, Homo sapiens
  siRNA target sequence for SLIT2 (NM_004787.1,1361-1379).
gccttcgggtagatgcttt

SEQ ID NO: 136117 - DNA, 19 bp, Homo sapiens
  siRNA target sequence for SLIT2 (NM_004787.1,1362-1380).
ccttcgggtagatgctttt

SEQ ID NO: 136118 - DNA, 19 bp, Homo sapiens
  siRNA target sequence for SLIT2 (NM_004787.1,1381-1399).
caggatctccacaacttga

SEQ ID NO: 136119 - DNA, 19 bp, Homo sapiens
  siRNA target sequence for SLIT2 (NM_004787.1,1398-1416).
gaaccttctctccctatat

SEQ ID NO: 136120 - DNA, 19 bp, Homo sapiens
  siRNA target sequence for SLIT2 (NM_004787.1,1437-1455).
cgccaaggggaccttttca

SEQ ID NO: 136121 - DNA, 19 bp, Homo sapiens
  siRNA target sequence for SLIT2 (NM_004787.1,1456-1474).
cctcttcgggccattcaaa

SEQ ID NO: 136122 - DNA, 19 bp, Homo sapiens
  siRNA target sequence for SLIT2 (NM_004787.1,1464-1482).
ggccattcaaactatgcat

SEQ ID NO: 136123 - DNA, 19 bp, Homo sapiens
  siRNA target sequence for SLIT2 (NM_004787.1,1465-1483).
gccattcaaactatgcatt

SEQ ID NO: 136124 - DNA, 19 bp, Homo sapiens
  siRNA target sequence for SLIT2 (NM_004787.1,1466-1484).
ccattcaaactatgcattt

SEQ ID NO: 136125 - DNA, 19 bp, Homo sapiens
  siRNA target sequence for SLIT2 (NM_004787.1,1488-1506).
ccagaacccctttatttgt

SEQ ID NO: 136126 - DNA, 19 bp, Homo sapiens
  siRNA target sequence for SLIT2 (NM_004787.1,1540-1558).
cataccaacccgattgaga

SEQ ID NO: 136127 - DNA, 19 bp, Homo sapiens
  siRNA target sequence for SLIT2 (NM_004787.1,1666-1684).
ggtacagaagattatcgat

SEQ ID NO: 136128 - DNA, 19 bp, Homo sapiens
  siRNA target sequence for SLIT2 (NM_004787.1,1670-1688).
cagaagattatcgatcaaa

SEQ ID NO: 136129 - DNA, 19 bp, Homo sapiens
  siRNA target sequence for SLIT2 (NM_004787.1,1741-1759).
gaaggaaccacagtagatt

SEQ ID NO: 136130 - DNA, 19 bp, Homo sapiens
  siRNA target sequence for SLIT2 (NM_004787.1,1753-1771).
gtagattgctctaatcaaa

SEQ ID NO: 136131 - DNA, 19 bp, Homo sapiens
  siRNA target sequence for SLIT2 (NM_004787.1,1813-1831).
gagttgcgtctcaataata

SEQ ID NO: 136132 - DNA, 19 bp, Homo sapiens
  siRNA target sequence for SLIT2 (NM_004787.1,1873-1891).
cttcctcaattacgtaaaa

SEQ ID NO: 136133 - DNA, 19 bp, Homo sapiens
  siRNA target sequence for SLIT2 (NM_004787.1,1876-1894).
cctcaattacgtaaaataa

SEQ ID NO: 136134 - DNA, 19 bp, Homo sapiens
  siRNA target sequence for SLIT2 (NM_004787.1,1885-1903).
cgtaaaataaactttagca

SEQ ID NO: 136135 - DNA, 19 bp, Homo sapiens
  siRNA target sequence for SLIT2 (NM_004787.1,1943-1961).
gagcatctggtgtaaatga

SEQ ID NO: 136136 - DNA, 19 bp, Homo sapiens
  siRNA target sequence for SLIT2 (NM_004787.1,1946-1964).
catctggtgtaaatgaaat

SEQ ID NO: 136137 - DNA, 19 bp, Homo sapiens
  siRNA target sequence for SLIT2 (NM_004787.1,1966-1984).
cttcttacgagtaatcgtt

SEQ ID NO: 136138 - DNA, 19 bp, Homo sapiens
  siRNA target sequence for SLIT2 (NM_004787.1,1973-1991).
cgagtaatcgtttggaaaa

SEQ ID NO: 136139 - DNA, 19 bp, Homo sapiens
  siRNA target sequence for SLIT2 (NM_004787.1,1974-1992).
gagtaatcgtttggaaaat

SEQ ID NO: 136140 - DNA, 19 bp, Homo sapiens
  siRNA target sequence for SLIT2 (NM_004787.1,1976-1994).
gtaatcgtttggaaaatgt

SEQ ID NO: 136141 - DNA, 19 bp, Homo sapiens
  siRNA target sequence for SLIT2 (NM_004787.1,2014-2032).
ggattggaaagcctcaaaa

SEQ ID NO: 136142 - DNA, 19 bp, Homo sapiens
  siRNA target sequence for SLIT2 (NM_004787.1,2040-2058).
gttgagaagcaatcgaata

SEQ ID NO: 136143 - DNA, 19 bp, Homo sapiens
  siRNA target sequence for SLIT2 (NM_004787.1,2063-2081).
gtgtggggaatgacagttt

SEQ ID NO: 136144 - DNA, 19 bp, Homo sapiens
  siRNA target sequence for SLIT2 (NM_004787.1,2091-2109).
cagttctgtgcgtttgctt

SEQ ID NO: 136145 - DNA, 19 bp, Homo sapiens
  siRNA target sequence for SLIT2 (NM_004787.1,2190-2208).
ggccaatccttttaactgt

SEQ ID NO: 136146 - DNA, 19 bp, Homo sapiens
  siRNA target sequence for SLIT2 (NM_004787.1,2192-2210).
ccaatccttttaactgtaa

SEQ ID NO: 136147 - DNA, 19 bp, Homo sapiens
  siRNA target sequence for SLIT2 (NM_004787.1,2270-2288).
ctagatgtcaaaaaccata

SEQ ID NO: 136148 - DNA, 19 bp, Homo sapiens
  siRNA target sequence for SLIT2 (NM_004787.1,2273-2291).
gatgtcaaaaaccatactt

SEQ ID NO: 136149 - DNA, 19 bp, Homo sapiens
  siRNA target sequence for SLIT2 (NM_004787.1,2336-2354).
cttgtgatgacggaaatga

SEQ ID NO: 136150 - DNA, 19 bp, Homo sapiens
  siRNA target sequence for SLIT2 (NM_004787.1,2380-2398).
cgctgtcctactgaatgta

SEQ ID NO: 136151 - DNA, 19 bp, Homo sapiens
  siRNA target sequence for SLIT2 (NM_004787.1,2396-2414).
gtacttgcttggatacagt

SEQ ID NO: 136152 - DNA, 19 bp, Homo sapiens
  siRNA target sequence for SLIT2 (NM_004787.1,2442-2460).
ggtcttgccgaaaggtatt

SEQ ID NO: 136153 - DNA, 19 bp, Homo sapiens
  siRNA target sequence for SLIT2 (NM_004787.1,2445-2463).
cttgccgaaaggtattcca

SEQ ID NO: 136154 - DNA, 19 bp, Homo sapiens
  siRNA target sequence for SLIT2 (NM_004787.1,2481-2499).
gtatctggatggaaaccaa

SEQ ID NO: 136155 - DNA, 19 bp, Homo sapiens
  siRNA target sequence for SLIT2 (NM_004787.1,2529-2547).
ctacaaacatttaacactt

SEQ ID NO: 136156 - DNA, 19 bp, Homo sapiens
  siRNA target sequence for SLIT2 (NM_004787.1,2532-2550).
caaacatttaacacttata

SEQ ID NO: 136157 - DNA, 19 bp, Homo sapiens
  siRNA target sequence for SLIT2 (NM_004787.1,2536-2554).
catttaacacttatagact

SEQ ID NO: 136158 - DNA, 19 bp, Homo sapiens
  siRNA target sequence for SLIT2 (NM_004787.1,2543-2561).
cacttatagacttaagtaa

SEQ ID NO: 136159 - DNA, 19 bp, Homo sapiens
  siRNA target sequence for SLIT2 (NM_004787.1,2545-2563).
cttatagacttaagtaaca

SEQ ID NO: 136160 - DNA, 19 bp, Homo sapiens
  siRNA target sequence for SLIT2 (NM_004787.1,2567-2585).
gaataagcacgctttctaa

SEQ ID NO: 136161 - DNA, 19 bp, Homo sapiens
  siRNA target sequence for SLIT2 (NM_004787.1,2618-2636).
ccttaattcttagttacaa

SEQ ID NO: 136162 - DNA, 19 bp, Homo sapiens
  siRNA target sequence for SLIT2 (NM_004787.1,2634-2652).
caaccgtctgagatgtatt

SEQ ID NO: 136163 - DNA, 19 bp, Homo sapiens
  siRNA target sequence for SLIT2 (NM_004787.1,2657-2675).
ctcgcacctttgatggatt

SEQ ID NO: 136164 - DNA, 19 bp, Homo sapiens
  siRNA target sequence for SLIT2 (NM_004787.1,2659-2677).
cgcacctttgatggattaa

SEQ ID NO: 136165 - DNA, 19 bp, Homo sapiens
  siRNA target sequence for SLIT2 (NM_004787.1,2672-2690).
gattaaagtctcttcgatt

SEQ ID NO: 136166 - DNA, 19 bp, Homo sapiens
  siRNA target sequence for SLIT2 (NM_004787.1,2731-2749).
ggtgctttcaatgatcttt

SEQ ID NO: 136167 - DNA, 19 bp, Homo sapiens
  siRNA target sequence for SLIT2 (NM_004787.1,2773-2791).
ggagccaaccctctttact

SEQ ID NO: 136168 - DNA, 19 bp, Homo sapiens
  siRNA target sequence for SLIT2 (NM_004787.1,2820-2838).
ctgggtgaagtcggaatat

SEQ ID NO: 136169 - DNA, 19 bp, Homo sapiens
  siRNA target sequence for SLIT2 (NM_004787.1,2881-2899).
gcagataaacttttactca

SEQ ID NO: 136170 - DNA, 19 bp, Homo sapiens
  siRNA target sequence for SLIT2 (NM_004787.1,2896-2914).
ctcacaactccctccaaaa

SEQ ID NO: 136171 - DNA, 19 bp, Homo sapiens
  siRNA target sequence for SLIT2 (NM_004787.1,2930-2948).
gtcctgtggatgtcaatat

SEQ ID NO: 136172 - DNA, 19 bp, Homo sapiens
  siRNA target sequence for SLIT2 (NM_004787.1,2943-2961).
caatattctagctaagtgt

SEQ ID NO: 136173 - DNA, 19 bp, Homo sapiens
  siRNA target sequence for SLIT2 (NM_004787.1,2960-2978).
gtaacccctgcctatcaaa

SEQ ID NO: 136174 - DNA, 19 bp, Homo sapiens
  siRNA target sequence for SLIT2 (NM_004787.1,2975-2993).
caaatccgtgtaaaaatga

SEQ ID NO: 136175 - DNA, 19 bp, Homo sapiens
  siRNA target sequence for SLIT2 (NM_004787.1,3090-3108).
cagtaacccatgtaaacat

SEQ ID NO: 136176 - DNA, 19 bp, Homo sapiens
  siRNA target sequence for SLIT2 (NM_004787.1,3109-3127).
ggaggaacttgccacttaa

SEQ ID NO: 136177 - DNA, 19 bp, Homo sapiens
  siRNA target sequence for SLIT2 (NM_004787.1,3110-3128).
gaggaacttgccacttaaa

SEQ ID NO: 136178 - DNA, 19 bp, Homo sapiens
  siRNA target sequence for SLIT2 (NM_004787.1,3195-3213).
caacgttgatgattgtgaa

SEQ ID NO: 136179 - DNA, 19 bp, Homo sapiens
  siRNA target sequence for SLIT2 (NM_004787.1,3242-3260).
gtgtcgatggcattaataa

SEQ ID NO: 136180 - DNA, 19 bp, Homo sapiens
  siRNA target sequence for SLIT2 (NM_004787.1,3244-3262).
gtcgatggcattaataact

SEQ ID NO: 136181 - DNA, 19 bp, Homo sapiens
  siRNA target sequence for SLIT2 (NM_004787.1,3340-3358).
ccctgccagcacgattcaa

SEQ ID NO: 136182 - DNA, 19 bp, Homo sapiens
  siRNA target sequence for SLIT2 (NM_004787.1,3341-3359).
cctgccagcacgattcaaa

SEQ ID NO: 136183 - DNA, 19 bp, Homo sapiens
  siRNA target sequence for SLIT2 (NM_004787.1,3415-3433).
gaacactgcgacatcgatt

SEQ ID NO: 136184 - DNA, 19 bp, Homo sapiens
  siRNA target sequence for SLIT2 (NM_004787.1,3439-3457).
gactgccaagacaacaagt

SEQ ID NO: 136185 - DNA, 19 bp, Homo sapiens
  siRNA target sequence for SLIT2 (NM_004787.1,3484-3502).
gcagtgaacggctatacgt

SEQ ID NO: 136186 - DNA, 19 bp, Homo sapiens
  siRNA target sequence for SLIT2 (NM_004787.1,3503-3521).
gcatatgccccgaaggtta

SEQ ID NO: 136187 - DNA, 19 bp, Homo sapiens
  siRNA target sequence for SLIT2 (NM_004787.1,3565-3583).
cgtaccagcccctgtgata

SEQ ID NO: 136188 - DNA, 19 bp, Homo sapiens
  siRNA target sequence for SLIT2 (NM_004787.1,3611-3629).
gtatcgtcagaataaatga

SEQ ID NO: 136189 - DNA, 19 bp, Homo sapiens
  siRNA target sequence for SLIT2 (NM_004787.1,3739-3757).
cggcctcagacgaacataa

SEQ ID NO: 136190 - DNA, 19 bp, Homo sapiens
  siRNA target sequence for SLIT2 (NM_004787.1,3741-3759).
gcctcagacgaacataaca

SEQ ID NO: 136191 - DNA, 19 bp, Homo sapiens
  siRNA target sequence for SLIT2 (NM_004787.1,3743-3761).
ctcagacgaacataacact

SEQ ID NO: 136192 - DNA, 19 bp, Homo sapiens
  siRNA target sequence for SLIT2 (NM_004787.1,3750-3768).
gaacataacacttcagatt

SEQ ID NO: 136193 - DNA, 19 bp, Homo sapiens
  siRNA target sequence for SLIT2 (NM_004787.1,3924-3942).
ccacattgtggaactactt

SEQ ID NO: 136194 - DNA, 19 bp, Homo sapiens
  siRNA target sequence for SLIT2 (NM_004787.1,3949-3967).
gatcagagtctctctttgt

SEQ ID NO: 136195 - DNA, 19 bp, Homo sapiens
  siRNA target sequence for SLIT2 (NM_004787.1,4165-4183).
cagaaggtgccgatgcaaa

SEQ ID NO: 136196 - DNA, 19 bp, Homo sapiens
  siRNA target sequence for SLIT2 (NM_004787.1,4321-4339).
gacccttgccttggaaata

SEQ ID NO: 136197 - DNA, 19 bp, Homo sapiens
  siRNA target sequence for SLIT2 (NM_004787.1,4353-4371).
cacctgcttgcccatcaat

SEQ ID NO: 136198 - DNA, 19 bp, Homo sapiens
  siRNA target sequence for SLIT2 (NM_004787.1,4559-4577).
cttgtcgaggggaaaggat

SEQ ID NO: 136199 - DNA, 19 bp, Homo sapiens
  siRNA target sequence for SLIT2 (NM_004787.1,4567-4585).
ggggaaaggataagagatt

SEQ ID NO: 136200 - DNA, 19 bp, Homo sapiens
  siRNA target sequence for SLIT2 (NM_004787.1,4701-4719).
gcggaaatactctttcgaa

SEQ ID NO: 136201 - DNA, 19 bp, Homo sapiens
  siRNA target sequence for SLIT2 (NM_004787.1,4702-4720).
cggaaatactctttcgaat

SEQ ID NO: 136202 - DNA, 19 bp, Homo sapiens
  siRNA target sequence for SLIT3 (NM_003062.1,603-621).
ctgcgcctgaacaagaata

SEQ ID NO: 136203 - DNA, 19 bp, Homo sapiens
  siRNA target sequence for SLIT3 (NM_003062.1,662-680).
gaagctcaccagactagat

SEQ ID NO: 136204 - DNA, 19 bp, Homo sapiens
  siRNA target sequence for SLIT3 (NM_003062.1,666-684).
ctcaccagactagatttga

SEQ ID NO: 136205 - DNA, 19 bp, Homo sapiens
  siRNA target sequence for SLIT3 (NM_003062.1,668-686).
caccagactagatttgagt

SEQ ID NO: 136206 - DNA, 19 bp, Homo sapiens
  siRNA target sequence for SLIT3 (NM_003062.1,673-691).
gactagatttgagtgaaaa

SEQ ID NO: 136207 - DNA, 19 bp, Homo sapiens
  siRNA target sequence for SLIT3 (NM_003062.1,804-822).
cgcgatttggagatcctta

SEQ ID NO: 136208 - DNA, 19 bp, Homo sapiens
  siRNA target sequence for SLIT3 (NM_003062.1,1110-1128).
ccctgcacgtgcagcaata

SEQ ID NO: 136209 - DNA, 19 bp, Homo sapiens
  siRNA target sequence for SLIT3 (NM_003062.1,1114-1132).
gcacgtgcagcaataacat

SEQ ID NO: 136210 - DNA, 19 bp, Homo sapiens
  siRNA target sequence for SLIT3 (NM_003062.1,1180-1198).
cggagggcatcgtcgaaat

SEQ ID NO: 136211 - DNA, 19 bp, Homo sapiens
  siRNA target sequence for SLIT3 (NM_003062.1,1181-1199).
ggagggcatcgtcgaaata

SEQ ID NO: 136212 - DNA, 19 bp, Homo sapiens
  siRNA target sequence for SLIT3 (NM_003062.1,1237-1255).
gagccttcacccagtacaa

SEQ ID NO: 136213 - DNA, 19 bp, Homo sapiens
  siRNA target sequence for SLIT3 (NM_003062.1,1239-1257).
gccttcacccagtacaaga

SEQ ID NO: 136214 - DNA, 19 bp, Homo sapiens
  siRNA target sequence for SLIT3 (NM_003062.1,1283-1301).
gaatcagatatcggatatt

SEQ ID NO: 136215 - DNA, 19 bp, Homo sapiens
  siRNA target sequence for SLIT3 (NM_003062.1,1313-1331).
cttccagggcctgaaatca

SEQ ID NO: 136216 - DNA, 19 bp, Homo sapiens
  siRNA target sequence for SLIT3 (NM_003062.1,1865-1883).
caccgacctgcgactgaat

SEQ ID NO: 136217 - DNA, 19 bp, Homo sapiens
  siRNA target sequence for SLIT3 (NM_003062.1,1867-1885).
ccgacctgcgactgaatga

SEQ ID NO: 136218 - DNA, 19 bp, Homo sapiens
  siRNA target sequence for SLIT3 (NM_003062.1,1869-1887).
gacctgcgactgaatgaca

SEQ ID NO: 136219 - DNA, 19 bp, Homo sapiens
  siRNA target sequence for SLIT3 (NM_003062.1,1908-1926).
gccactggcatcttcaaga

SEQ ID NO: 136220 - DNA, 19 bp, Homo sapiens
  siRNA target sequence for SLIT3 (NM_003062.1,1931-1949).
gcccaacctgcggaaaata

SEQ ID NO: 136221 - DNA, 19 bp, Homo sapiens
  siRNA target sequence for SLIT3 (NM_003062.1,1934-1952).
caacctgcggaaaataaat

SEQ ID NO: 136222 - DNA, 19 bp, Homo sapiens
  siRNA target sequence for SLIT3 (NM_003062.1,1979-1997).
gcgagagggagctttcgat

SEQ ID NO: 136223 - DNA, 19 bp, Homo sapiens
  siRNA target sequence for SLIT3 (NM_003062.1,2111-2129).
gatcggctgtgtgagtaat

SEQ ID NO: 136224 - DNA, 19 bp, Homo sapiens
  siRNA target sequence for SLIT3 (NM_003062.1,2115-2133).
ggctgtgtgagtaatgaca

SEQ ID NO: 136225 - DNA, 19 bp, Homo sapiens
  siRNA target sequence for SLIT3 (NM_003062.1,2158-2176).
gactgctgtccctctatga

SEQ ID NO: 136226 - DNA, 19 bp, Homo sapiens
  siRNA target sequence for SLIT3 (NM_003062.1,2220-2238).
gtctccctgtccaccataa

SEQ ID NO: 136227 - DNA, 19 bp, Homo sapiens
  siRNA target sequence for SLIT3 (NM_003062.1,2224-2242).
ccctgtccaccataaacct

SEQ ID NO: 136228 - DNA, 19 bp, Homo sapiens
  siRNA target sequence for SLIT3 (NM_003062.1,2329-2347).
ggtgccagaagccattttt

SEQ ID NO: 136229 - DNA, 19 bp, Homo sapiens
  siRNA target sequence for SLIT3 (NM_003062.1,2585-2603).
ccgacacctgacgcttatt

SEQ ID NO: 136230 - DNA, 19 bp, Homo sapiens
  siRNA target sequence for SLIT3 (NM_003062.1,2587-2605).
gacacctgacgcttattga

SEQ ID NO: 136231 - DNA, 19 bp, Homo sapiens
  siRNA target sequence for SLIT3 (NM_003062.1,2792-2810).
caacgacctcacatctctt

SEQ ID NO: 136232 - DNA, 19 bp, Homo sapiens
  siRNA target sequence for SLIT3 (NM_003062.1,2983-3001).
ggccagtggacatcaacat

SEQ ID NO: 136233 - DNA, 19 bp, Homo sapiens
  siRNA target sequence for SLIT3 (NM_003062.1,3026-3044).
ctccagcccgtgcaagaat

SEQ ID NO: 136234 - DNA, 19 bp, Homo sapiens
  siRNA target sequence for SLIT3 (NM_003062.1,3028-3046).
ccagcccgtgcaagaataa

SEQ ID NO: 136235 - DNA, 19 bp, Homo sapiens
  siRNA target sequence for SLIT3 (NM_003062.1,3267-3285).
gacaacgactgcgaaaaca

SEQ ID NO: 136236 - DNA, 19 bp, Homo sapiens
  siRNA target sequence for SLIT3 (NM_003062.1,3269-3287).
caacgactgcgaaaacaat

SEQ ID NO: 136237 - DNA, 19 bp, Homo sapiens
  siRNA target sequence for SLIT3 (NM_003062.1,3297-3315).
gtggacgggatcaacaact

SEQ ID NO: 136238 - DNA, 19 bp, Homo sapiens
  siRNA target sequence for SLIT3 (NM_003062.1,3311-3329).
caactacgtgtgtatctgt

SEQ ID NO: 136239 - DNA, 19 bp, Homo sapiens
  siRNA target sequence for SLIT3 (NM_003062.1,3322-3340).
gtatctgtccgcctaacta

SEQ ID NO: 136240 - DNA, 19 bp, Homo sapiens
  siRNA target sequence for SLIT3 (NM_003062.1,3523-3541).
cccagtgcgtggacacaat

SEQ ID NO: 136241 - DNA, 19 bp, Homo sapiens
  siRNA target sequence for SLIT3 (NM_003062.1,3527-3545).
gtgcgtggacacaatcaat

SEQ ID NO: 136242 - DNA, 19 bp, Homo sapiens
  siRNA target sequence for SLIT3 (NM_003062.1,3839-3857).
cggcatccttctctacaaa

SEQ ID NO: 136243 - DNA, 19 bp, Homo sapiens
  siRNA target sequence for SLIT3 (NM_003062.1,4017-4035).
ctagtagtggacaaaggaa

SEQ ID NO: 136244 - DNA, 19 bp, Homo sapiens
  siRNA target sequence for SLIT3 (NM_003062.1,4413-4431).
gcaactgggacctcataca

SEQ ID NO: 136245 - DNA, 19 bp, Homo sapiens
  siRNA target sequence for SLIT3 (NM_003062.1,4414-4432).
caactgggacctcatacat

SEQ ID NO: 136246 - DNA, 19 bp, Homo sapiens
  siRNA target sequence for SLIT3 (NM_003062.1,4463-4481).
cttgtgtgacaacaagaat

SEQ ID NO: 136247 - DNA, 19 bp, Homo sapiens
  siRNA target sequence for SLIT3 (NM_003062.1,4586-4604).
gcactgccaacaagagaat

SEQ ID NO: 136248 - DNA, 19 bp, Homo sapiens
  siRNA target sequence for SLIT3 (NM_003062.1,4641-4659).
cgccagaaaggttatgcat

SEQ ID NO: 136249 - DNA, 19 bp, Homo sapiens
  siRNA target sequence for SLIT3 (NM_003062.1,4646-4664).
gaaaggttatgcatcatgt

SEQ ID NO: 136250 - DNA, 19 bp, Homo sapiens
  siRNA target sequence for SLIT3 (NM_003062.1,4769-4787).
ggacggctcctcgtttgta

SEQ ID NO: 136251 - DNA, 19 bp, Homo sapiens
  siRNA target sequence for SLIT3 (NM_003062.1,4772-4790).
cggctcctcgtttgtagaa

SEQ ID NO: 136252 - DNA, 19 bp, Homo sapiens
  siRNA target sequence for SLIT3 (NM_003062.1,4774-4792).
gctcctcgtttgtagaaga

SEQ ID NO: 136253 - DNA, 19 bp, Homo sapiens
  siRNA target sequence for SMO (NM_005631.3,1212-1230).
ctctgtcctgcgtcatcat

SEQ ID NO: 136254 - DNA, 19 bp, Homo sapiens
  siRNA target sequence for SMO (NM_005631.3,1216-1234).
gtcctgcgtcatcatcttt

SEQ ID NO: 136255 - DNA, 19 bp, Homo sapiens
  siRNA target sequence for SMO (NM_005631.3,1221-1239).
gcgtcatcatctttgtcat

SEQ ID NO: 136256 - DNA, 19 bp, Homo sapiens
  siRNA target sequence for SMO (NM_005631.3,1294-1312).
ctggcacacttccttcaaa

SEQ ID NO: 136257 - DNA, 19 bp, Homo sapiens
  siRNA target sequence for SMO (NM_005631.3,1627-1645).
gctgcgcctgggcattttt

SEQ ID NO: 136258 - DNA, 19 bp, Homo sapiens
  siRNA target sequence for SMO (NM_005631.3,1661-1679).
ggctttgtgctcattacct

SEQ ID NO: 136259 - DNA, 19 bp, Homo sapiens
  siRNA target sequence for SMO (NM_005631.3,1662-1680).
gctttgtgctcattacctt

SEQ ID NO: 136260 - DNA, 19 bp, Homo sapiens
  siRNA target sequence for SMO (NM_005631.3,1686-1704).
gccacttctacgacttctt

SEQ ID NO: 136261 - DNA, 19 bp, Homo sapiens
  siRNA target sequence for SMO (NM_005631.3,1725-1743).
gcagcttccgggactatgt

SEQ ID NO: 136262 - DNA, 19 bp, Homo sapiens
  siRNA target sequence for SMO (NM_005631.3,1734-1752).
gggactatgtgctatgtca

SEQ ID NO: 136263 - DNA, 19 bp, Homo sapiens
  siRNA target sequence for SMO (NM_005631.3,1745-1763).
ctatgtcaggccaatgtga

SEQ ID NO: 136264 - DNA, 19 bp, Homo sapiens
  siRNA target sequence for SNCAIP (NM_005460.1,184-202).
ctgtgccgaagatgtgata

SEQ ID NO: 136265 - DNA, 19 bp, Homo sapiens
  siRNA target sequence for SNCAIP (NM_005460.1,194-212).
gatgtgatacgcaaaacga

SEQ ID NO: 136266 - DNA, 19 bp, Homo sapiens
  siRNA target sequence for SNCAIP (NM_005460.1,293-311).
ctgatgtgtacagtaagtt

SEQ ID NO: 136267 - DNA, 19 bp, Homo sapiens
  siRNA target sequence for SNCAIP (NM_005460.1,324-342).
gcgggtttcgccactgaaa

SEQ ID NO: 136268 - DNA, 19 bp, Homo sapiens
  siRNA target sequence for SNCAIP (NM_005460.1,326-344).
gggtttcgccactgaaaca

SEQ ID NO: 136269 - DNA, 19 bp, Homo sapiens
  siRNA target sequence for SNCAIP (NM_005460.1,327-345).
ggtttcgccactgaaacat

SEQ ID NO: 136270 - DNA, 19 bp, Homo sapiens
  siRNA target sequence for SNCAIP (NM_005460.1,534-552).
cctcgacatggatgagatt

SEQ ID NO: 136271 - DNA, 19 bp, Homo sapiens
  siRNA target sequence for SNCAIP (NM_005460.1,555-573).
ggatgtgccttatattaaa

SEQ ID NO: 136272 - DNA, 19 bp, Homo sapiens
  siRNA target sequence for SNCAIP (NM_005460.1,580-598).
cagcagcttgcctctttta

SEQ ID NO: 136273 - DNA, 19 bp, Homo sapiens
  siRNA target sequence for SNCAIP (NM_005460.1,666-684).
ctgctctacaggaagttct

SEQ ID NO: 136274 - DNA, 19 bp, Homo sapiens
  siRNA target sequence for SNCAIP (NM_005460.1,843-861).
gcctgaaaaccagagtaaa

SEQ ID NO: 136275 - DNA, 19 bp, Homo sapiens
  siRNA target sequence for SNCAIP (NM_005460.1,853-871).
cagagtaaagacttcctaa

SEQ ID NO: 136276 - DNA, 19 bp, Homo sapiens
  siRNA target sequence for SNCAIP (NM_005460.1,867-885).
cctaaacaagacatttagt

SEQ ID NO: 136277 - DNA, 19 bp, Homo sapiens
  siRNA target sequence for SNCAIP (NM_005460.1,890-908).
ctcatggtcgaaaagttga

SEQ ID NO: 136278 - DNA, 19 bp, Homo sapiens
  siRNA target sequence for SNCAIP (NM_005460.1,954-972).
ctcagcagcagaatccaaa

SEQ ID NO: 136279 - DNA, 19 bp, Homo sapiens
  siRNA target sequence for SNCAIP (NM_005460.1,1031-1049).
gtgagtatctgaaaaaagt

SEQ ID NO: 136280 - DNA, 19 bp, Homo sapiens
  siRNA target sequence for SNCAIP (NM_005460.1,1050-1068).
gaaaagcatcttgaacatt

SEQ ID NO: 136281 - DNA, 19 bp, Homo sapiens
  siRNA target sequence for SNCAIP (NM_005460.1,1101-1119).
cctagctgcagacaatcta

SEQ ID NO: 136282 - DNA, 19 bp, Homo sapiens
  siRNA target sequence for SNCAIP (NM_005460.1,1106-1124).
ctgcagacaatctagacaa

SEQ ID NO: 136283 - DNA, 19 bp, Homo sapiens
  siRNA target sequence for SNCAIP (NM_005460.1,1134-1152).
cgaaaatggaaacaatcta

SEQ ID NO: 136284 - DNA, 19 bp, Homo sapiens
  siRNA target sequence for SNCAIP (NM_005460.1,1234-1252).
cgcaacactgagaagttga

SEQ ID NO: 136285 - DNA, 19 bp, Homo sapiens
  siRNA target sequence for SNCAIP (NM_005460.1,1301-1319).
ggatggtgagcgaaacaga

SEQ ID NO: 136286 - DNA, 19 bp, Homo sapiens
  siRNA target sequence for SNCAIP (NM_005460.1,1327-1345).
gcagaactgagttgttcta

SEQ ID NO: 136287 - DNA, 19 bp, Homo sapiens
  siRNA target sequence for SNCAIP (NM_005460.1,1328-1346).
cagaactgagttgttctaa

SEQ ID NO: 136288 - DNA, 19 bp, Homo sapiens
  siRNA target sequence for SNCAIP (NM_005460.1,1347-1365).
ggattttccaagccttatt

SEQ ID NO: 136289 - DNA, 19 bp, Homo sapiens
  siRNA target sequence for SNCAIP (NM_005460.1,1433-1451).
gcatctcgttggatgaagt

SEQ ID NO: 136290 - DNA, 19 bp, Homo sapiens
  siRNA target sequence for SNCAIP (NM_005460.1,1434-1452).
catctcgttggatgaagta

SEQ ID NO: 136291 - DNA, 19 bp, Homo sapiens
  siRNA target sequence for SNCAIP (NM_005460.1,1515-1533).
gaccttggttgaatatgga

SEQ ID NO: 136292 - DNA, 19 bp, Homo sapiens
  siRNA target sequence for SNCAIP (NM_005460.1,1649-1667).
cctctcaagtggtgaagtt

SEQ ID NO: 136293 - DNA, 19 bp, Homo sapiens
  siRNA target sequence for SNCAIP (NM_005460.1,1713-1731).
gaaccaactccaacaattt

SEQ ID NO: 136294 - DNA, 19 bp, Homo sapiens
  siRNA target sequence for SNCAIP (NM_005460.1,2032-2050).
gcttcctctagaaattcta

SEQ ID NO: 136295 - DNA, 19 bp, Homo sapiens
  siRNA target sequence for SNCAIP (NM_005460.1,2192-2210).
ggccgcagcccattgtaga

SEQ ID NO: 136296 - DNA, 19 bp, Homo sapiens
  siRNA target sequence for SNCAIP (NM_005460.1,2193-2211).
gccgcagcccattgtagaa

SEQ ID NO: 136297 - DNA, 19 bp, Homo sapiens
  siRNA target sequence for SNCAIP (NM_005460.1,2194-2212).
ccgcagcccattgtagaaa

SEQ ID NO: 136298 - DNA, 19 bp, Homo sapiens
  siRNA target sequence for SNCAIP (NM_005460.1,2240-2258).
gcctgcacctgatgattaa

SEQ ID NO: 136299 - DNA, 19 bp, Homo sapiens
  siRNA target sequence for SNCAIP (NM_005460.1,2278-2296).
gggggacgcaggtttcctt

SEQ ID NO: 136300 - DNA, 19 bp, Homo sapiens
  siRNA target sequence for SNCAIP (NM_005460.1,2279-2297).
ggggacgcaggtttccttt

SEQ ID NO: 136301 - DNA, 19 bp, Homo sapiens
  siRNA target sequence for SNCAIP (NM_005460.1,2352-2370).
gagcagcgaaccagactta

SEQ ID NO: 136302 - DNA, 19 bp, Homo sapiens
  siRNA target sequence for SNCAIP (NM_005460.1,2354-2372).
gcagcgaaccagacttaga

SEQ ID NO: 136303 - DNA, 19 bp, Homo sapiens
  siRNA target sequence for SNCAIP (NM_005460.1,2355-2373).
cagcgaaccagacttagaa

SEQ ID NO: 136304 - DNA, 19 bp, Homo sapiens
  siRNA target sequence for SNCAIP (NM_005460.1,2447-2465).
gtactgctgcccagaaagt

SEQ ID NO: 136305 - DNA, 19 bp, Homo sapiens
  siRNA target sequence for SNCAIP (NM_005460.1,2510-2528).
gtaggacatctcagaactt

SEQ ID NO: 136306 - DNA, 19 bp, Homo sapiens
  siRNA target sequence for SNCAIP (NM_005460.1,2626-2644).
cagcggacctccacaagta

SEQ ID NO: 136307 - DNA, 19 bp, Homo sapiens
  siRNA target sequence for SNCAIP (NM_005460.1,2631-2649).
gacctccacaagtaacgaa

SEQ ID NO: 136308 - DNA, 19 bp, Homo sapiens
  siRNA target sequence for SNCAIP (NM_005460.1,2702-2720).
cactaagtggcaaccaaaa

SEQ ID NO: 136309 - DNA, 19 bp, Homo sapiens
  siRNA target sequence for SNCAIP (NM_005460.1,2823-2841).
cgctagcaaaggaaagaat

SEQ ID NO: 136310 - DNA, 19 bp, Homo sapiens
  siRNA target sequence for SNX6 (NM_021249.2,500-518).
gacgaaggaagaattcaca

SEQ ID NO: 136311 - DNA, 19 bp, Homo sapiens
  siRNA target sequence for SNX6 (NM_021249.2,502-520).
cgaaggaagaattcacaaa

SEQ ID NO: 136312 - DNA, 19 bp, Homo sapiens
  siRNA target sequence for SNX6 (NM_021249.2,603-621).
gcagcacatcctattttga

SEQ ID NO: 136313 - DNA, 19 bp, Homo sapiens
  siRNA target sequence for SNX6 (NM_021249.2,668-686).
gagtgtgcgaggaaaaaat

SEQ ID NO: 136314 - DNA, 19 bp, Homo sapiens
  siRNA target sequence for SNX6 (NM_021249.2,670-688).
gtgtgcgaggaaaaaataa

SEQ ID NO: 136315 - DNA, 19 bp, Homo sapiens
  siRNA target sequence for SNX6 (NM_021249.2,746-764).
cgtttcaggagtaaaggat

SEQ ID NO: 136316 - DNA, 19 bp, Homo sapiens
  siRNA target sequence for SNX6 (NM_021249.2,751-769).
caggagtaaaggatgtaga

SEQ ID NO: 136317 - DNA, 19 bp, Homo sapiens
  siRNA target sequence for SNX6 (NM_021249.2,782-800).
gcacgaacgaacatttctt

SEQ ID NO: 136318 - DNA, 19 bp, Homo sapiens
  siRNA target sequence for SNX6 (NM_021249.2,828-846).
gcatctgctaaatctgata

SEQ ID NO: 136319 - DNA, 19 bp, Homo sapiens
  siRNA target sequence for SNX6 (NM_021249.2,889-907).
gaattggttcttcattata

SEQ ID NO: 136320 - DNA, 19 bp, Homo sapiens
  siRNA target sequence for SNX6 (NM_021249.2,919-937).
ctcaggattctacagatat

SEQ ID NO: 136321 - DNA, 19 bp, Homo sapiens
  siRNA target sequence for SNX6 (NM_021249.2,924-942).
gattctacagatatatgca

SEQ ID NO: 136322 - DNA, 19 bp, Homo sapiens
  siRNA target sequence for SNX6 (NM_021249.2,963-981).
gaactgttcgataaaacaa

SEQ ID NO: 136323 - DNA, 19 bp, Homo sapiens
  siRNA target sequence for SNX6 (NM_021249.2,966-984).
ctgttcgataaaacaagaa

SEQ ID NO: 136324 - DNA, 19 bp, Homo sapiens
  siRNA target sequence for SNX6 (NM_021249.2,1006-1024).
ctgatgaagacctcaaact

SEQ ID NO: 136325 - DNA, 19 bp, Homo sapiens
  siRNA target sequence for SNX6 (NM_021249.2,1016-1034).
cctcaaactttctgatctt

SEQ ID NO: 136326 - DNA, 19 bp, Homo sapiens
  siRNA target sequence for SNX6 (NM_021249.2,1017-1035).
ctcaaactttctgatcttt

SEQ ID NO: 136327 - DNA, 19 bp, Homo sapiens
  siRNA target sequence for SNX6 (NM_021249.2,1158-1176).
gttctacaggccgaaactt

SEQ ID NO: 136328 - DNA, 19 bp, Homo sapiens
  siRNA target sequence for SNX6 (NM_021249.2,1168-1186).
ccgaaacttcccaacaatt

SEQ ID NO: 136329 - DNA, 19 bp, Homo sapiens
  siRNA target sequence for SNX6 (NM_021249.2,1169-1187).
cgaaacttcccaacaatta

SEQ ID NO: 136330 - DNA, 19 bp, Homo sapiens
  siRNA target sequence for SNX6 (NM_021249.2,1337-1355).
gaactgcctggcagtgtta

SEQ ID NO: 136331 - DNA, 19 bp, Homo sapiens
  siRNA target sequence for SNX6 (NM_152233.1,149-167).
gagcgggataaagtaaaat

SEQ ID NO: 136332 - DNA, 19 bp, Homo sapiens
  siRNA target sequence for SNX6 (NM_152233.1,152-170).
cgggataaagtaaaattca

SEQ ID NO: 136333 - DNA, 19 bp, Homo sapiens
  siRNA target sequence for SNX6 (NM_152233.1,173-191).
gttcacacaaagagttcat

SEQ ID NO: 136334 - DNA, 19 bp, Homo sapiens
  siRNA target sequence for SNX6 (NM_152233.1,189-207).
cattgccaaattttaaaca

SEQ ID NO: 136335 - DNA, 19 bp, Homo sapiens
  siRNA target sequence for SNX6 (NM_152233.1,219-237).
cagttgttcggcaacatga

SEQ ID NO: 136336 - DNA, 19 bp, Homo sapiens
  siRNA target sequence for SNX6 (NM_152233.1,230-248).
caacatgaggaatttatct

SEQ ID NO: 136337 - DNA, 19 bp, Homo sapiens
  siRNA target sequence for SNX6 (NM_152233.1,250-268).
gcttcatgattcctttgtt

SEQ ID NO: 136338 - DNA, 19 bp, Homo sapiens
  siRNA target sequence for SNX6 (NM_152233.1,280-298).
ctatgcaggttatatcatt

SEQ ID NO: 136339 - DNA, 19 bp, Homo sapiens
  siRNA target sequence for SOCS5 (NM_014011.3,203-221).
gggaggaagccgtagtgaa

SEQ ID NO: 136340 - DNA, 19 bp, Homo sapiens
  siRNA target sequence for SOCS5 (NM_014011.3,204-222).
ggaggaagccgtagtgaaa

SEQ ID NO: 136341 - DNA, 19 bp, Homo sapiens
  siRNA target sequence for SOCS5 (NM_014011.3,228-246).
gacatgaactccaacagat

SEQ ID NO: 136342 - DNA, 19 bp, Homo sapiens
  siRNA target sequence for SOCS5 (NM_014011.3,242-260).
cagatgtttgtctgtcaaa

SEQ ID NO: 136343 - DNA, 19 bp, Homo sapiens
  siRNA target sequence for SOCS5 (NM_014011.3,307-325).
gtcccttaagagaaaatat

SEQ ID NO: 136344 - DNA, 19 bp, Homo sapiens
  siRNA target sequence for SOCS5 (NM_014011.3,327-345).
gccttacaactgggattaa

SEQ ID NO: 136345 - DNA, 19 bp, Homo sapiens
  siRNA target sequence for SOCS5 (NM_014011.3,347-365).
cccttcgaagaattcttca

SEQ ID NO: 136346 - DNA, 19 bp, Homo sapiens
  siRNA target sequence for SOCS5 (NM_014011.3,348-366).
ccttcgaagaattcttcaa

SEQ ID NO: 136347 - DNA, 19 bp, Homo sapiens
  siRNA target sequence for SOCS5 (NM_014011.3,375-393).
caaaattgtgccacagaaa

SEQ ID NO: 136348 - DNA, 19 bp, Homo sapiens
  siRNA target sequence for SOCS5 (NM_014011.3,399-417).
caaattgttgaaataagca

SEQ ID NO: 136349 - DNA, 19 bp, Homo sapiens
  siRNA target sequence for SOCS5 (NM_014011.3,405-423).
gttgaaataagcatcgaaa

SEQ ID NO: 136350 - DNA, 19 bp, Homo sapiens
  siRNA target sequence for SOCS5 (NM_014011.3,415-433).
gcatcgaaaaggataatga

SEQ ID NO: 136351 - DNA, 19 bp, Homo sapiens
  siRNA target sequence for SOCS5 (NM_014011.3,419-437).
cgaaaaggataatgattct

SEQ ID NO: 136352 - DNA, 19 bp, Homo sapiens
  siRNA target sequence for SOCS5 (NM_014011.3,498-516).
ggtgggaagaaaaaacatt

SEQ ID NO: 136353 - DNA, 19 bp, Homo sapiens
  siRNA target sequence for SOCS5 (NM_014011.3,538-556).
gttcattggatgctgataa

SEQ ID NO: 136354 - DNA, 19 bp, Homo sapiens
  siRNA target sequence for SOCS5 (NM_014011.3,549-567).
gctgataaaaagtttggta

SEQ ID NO: 136355 - DNA, 19 bp, Homo sapiens
  siRNA target sequence for SOCS5 (NM_014011.3,599-617).
gcgctacggcgtaagttct

SEQ ID NO: 136356 - DNA, 19 bp, Homo sapiens
  siRNA target sequence for SOCS5 (NM_014011.3,602-620).
ctacggcgtaagttctgta

SEQ ID NO: 136357 - DNA, 19 bp, Homo sapiens
  siRNA target sequence for SOCS5 (NM_014011.3,621-639).
cacgacatggacagtgttt

SEQ ID NO: 136358 - DNA, 19 bp, Homo sapiens
  siRNA target sequence for SOCS5 (NM_014011.3,651-669).
gtaggaagtcgctctctaa

SEQ ID NO: 136359 - DNA, 19 bp, Homo sapiens
  siRNA target sequence for SOCS5 (NM_014011.3,655-673).
gaagtcgctctctaagaca

SEQ ID NO: 136360 - DNA, 19 bp, Homo sapiens
  siRNA target sequence for SOCS5 (NM_014011.3,806-824).
ctcagatttagcccaaaaa

SEQ ID NO: 136361 - DNA, 19 bp, Homo sapiens
  siRNA target sequence for SOCS5 (NM_014011.3,857-875).
gagcccacattcaacattt

SEQ ID NO: 136362 - DNA, 19 bp, Homo sapiens
  siRNA target sequence for SOCS5 (NM_014011.3,935-953).
gagaaggcggcttagtatt

SEQ ID NO: 136363 - DNA, 19 bp, Homo sapiens
  siRNA target sequence for SOCS5 (NM_014011.3,940-958).
ggcggcttagtattgaaga

SEQ ID NO: 136364 - DNA, 19 bp, Homo sapiens
  siRNA target sequence for SOCS5 (NM_014011.3,941-959).
gcggcttagtattgaagaa

SEQ ID NO: 136365 - DNA, 19 bp, Homo sapiens
  siRNA target sequence for SOCS5 (NM_014011.3,982-1000).
cacaaatacatacatttga

SEQ ID NO: 136366 - DNA, 19 bp, Homo sapiens
  siRNA target sequence for SOCS5 (NM_014011.3,1009-1027).
cacaggttaatccattata

SEQ ID NO: 136367 - DNA, 19 bp, Homo sapiens
  siRNA target sequence for SOCS5 (NM_014011.3,1011-1029).
caggttaatccattatata

SEQ ID NO: 136368 - DNA, 19 bp, Homo sapiens
  siRNA target sequence for SOCS5 (NM_014011.3,1073-1091).
ggacagttctgcaattcca

SEQ ID NO: 136369 - DNA, 19 bp, Homo sapiens
  siRNA target sequence for SOCS5 (NM_014011.3,1083-1101).
gcaattccacaagctaatt

SEQ ID NO: 136370 - DNA, 19 bp, Homo sapiens
  siRNA target sequence for SOCS5 (NM_014011.3,1104-1122).
gactcggaagaggatacaa

SEQ ID NO: 136371 - DNA, 19 bp, Homo sapiens
  siRNA target sequence for SOCS5 (NM_014011.3,1149-1167).
cagaagcagcgtcagatat

SEQ ID NO: 136372 - DNA, 19 bp, Homo sapiens
  siRNA target sequence for SOCS5 (NM_014011.3,1173-1191).
gacagccatacccatgtta

SEQ ID NO: 136373 - DNA, 19 bp, Homo sapiens
  siRNA target sequence for SOCS5 (NM_014011.3,1215-1233).
cacacacagattgattaca

SEQ ID NO: 136374 - DNA, 19 bp, Homo sapiens
  siRNA target sequence for SOCS5 (NM_014011.3,1219-1237).
cacagattgattacataca

SEQ ID NO: 136375 - DNA, 19 bp, Homo sapiens
  siRNA target sequence for SOCS5 (NM_014011.3,1288-1306).
gagtgatggaccgttatga

SEQ ID NO: 136376 - DNA, 19 bp, Homo sapiens
  siRNA target sequence for SOCS5 (NM_014011.3,1411-1429).
ccctgcatgcccgaattga

SEQ ID NO: 136377 - DNA, 19 bp, Homo sapiens
  siRNA target sequence for SOCS5 (NM_014011.3,1458-1476).
gcccatgacccgtgtgtat

SEQ ID NO: 136378 - DNA, 19 bp, Homo sapiens
  siRNA target sequence for SOCS5 (NM_014011.3,1459-1477).
cccatgacccgtgtgtatt

SEQ ID NO: 136379 - DNA, 19 bp, Homo sapiens
  siRNA target sequence for SOCS5 (NM_014011.3,1460-1478).
ccatgacccgtgtgtattt

SEQ ID NO: 136380 - DNA, 19 bp, Homo sapiens
  siRNA target sequence for SOCS5 (NM_014011.3,1464-1482).
gacccgtgtgtatttcact

SEQ ID NO: 136381 - DNA, 19 bp, Homo sapiens
  siRNA target sequence for SOCS5 (NM_014011.3,1486-1504).
ccactgtaacgggactttt

SEQ ID NO: 136382 - DNA, 19 bp, Homo sapiens
  siRNA target sequence for SOCS5 (NM_014011.3,1487-1505).
cactgtaacgggactttta

SEQ ID NO: 136383 - DNA, 19 bp, Homo sapiens
  siRNA target sequence for SOCS5 (NM_014011.3,1489-1507).
ctgtaacgggacttttaga

SEQ ID NO: 136384 - DNA, 19 bp, Homo sapiens
  siRNA target sequence for SOCS5 (NM_014011.3,1495-1513).
cgggacttttagaacatta

SEQ ID NO: 136385 - DNA, 19 bp, Homo sapiens
  siRNA target sequence for SOCS5 (NM_014011.3,1496-1514).
gggacttttagaacattat

SEQ ID NO: 136386 - DNA, 19 bp, Homo sapiens
  siRNA target sequence for SOCS5 (NM_014011.3,1521-1539).
cccagttcgtgcatgtttt

SEQ ID NO: 136387 - DNA, 19 bp, Homo sapiens
  siRNA target sequence for SOCS5 (NM_014011.3,1522-1540).
ccagttcgtgcatgttttt

SEQ ID NO: 136388 - DNA, 19 bp, Homo sapiens
  siRNA target sequence for SOCS5 (NM_014011.3,1523-1541).
cagttcgtgcatgtttttt

SEQ ID NO: 136389 - DNA, 19 bp, Homo sapiens
  siRNA target sequence for SOCS5 (NM_014011.3,1525-1543).
gttcgtgcatgttttttga

SEQ ID NO: 136390 - DNA, 19 bp, Homo sapiens
  siRNA target sequence for SOCS5 (NM_014011.3,1542-1560).
gaaccattgcttactatat

SEQ ID NO: 136391 - DNA, 19 bp, Homo sapiens
  siRNA target sequence for SOCS5 (NM_014011.3,1550-1568).
gcttactatatcactaaat

SEQ ID NO: 136392 - DNA, 19 bp, Homo sapiens
  siRNA target sequence for SOCS5 (NM_014011.3,1551-1569).
cttactatatcactaaata

SEQ ID NO: 136393 - DNA, 19 bp, Homo sapiens
  siRNA target sequence for SOCS5 (NM_014011.3,1616-1634).
caggtgcactacgtatgat

SEQ ID NO: 136394 - DNA, 19 bp, Homo sapiens
  siRNA target sequence for SOCS5 (NM_014011.3,1621-1639).
gcactacgtatgatggaat

SEQ ID NO: 136395 - DNA, 19 bp, Homo sapiens
  siRNA target sequence for SOCS5 (NM_014011.3,1622-1640).
cactacgtatgatggaatt

SEQ ID NO: 136396 - DNA, 19 bp, Homo sapiens
  siRNA target sequence for SOCS5 (NM_014011.3,1624-1642).
ctacgtatgatggaattga

SEQ ID NO: 136397 - DNA, 19 bp, Homo sapiens
  siRNA target sequence for SOCS5 (NM_014011.3,1649-1667).
ccctctaccctcaatgtta

SEQ ID NO: 136398 - DNA, 19 bp, Homo sapiens
  siRNA target sequence for SORCS2 (NM_020777.1,504-522).
ccaccgtcatcgacaattt

SEQ ID NO: 136399 - DNA, 19 bp, Homo sapiens
  siRNA target sequence for SORCS2 (NM_020777.1,507-525).
ccgtcatcgacaatttcta

SEQ ID NO: 136400 - DNA, 19 bp, Homo sapiens
  siRNA target sequence for SORCS2 (NM_020777.1,509-527).
gtcatcgacaatttctaca

SEQ ID NO: 136401 - DNA, 19 bp, Homo sapiens
  siRNA target sequence for SORCS2 (NM_020777.1,945-963).
ccgtgcaggacgattacat

SEQ ID NO: 136402 - DNA, 19 bp, Homo sapiens
  siRNA target sequence for SORCS2 (NM_020777.1,981-999).
cagcaaaccagacaaaata

SEQ ID NO: 136403 - DNA, 19 bp, Homo sapiens
  siRNA target sequence for SORCS2 (NM_020777.1,993-1011).
caaaatactacgtctctta

SEQ ID NO: 136404 - DNA, 19 bp, Homo sapiens
  siRNA target sequence for SORCS2 (NM_020777.1,1003-1021).
cgtctcttatcgtcgaaat

SEQ ID NO: 136405 - DNA, 19 bp, Homo sapiens
  siRNA target sequence for SORCS2 (NM_020777.1,1006-1024).
ctcttatcgtcgaaatgaa

SEQ ID NO: 136406 - DNA, 19 bp, Homo sapiens
  siRNA target sequence for SORCS2 (NM_020777.1,1008-1026).
cttatcgtcgaaatgaatt

SEQ ID NO: 136407 - DNA, 19 bp, Homo sapiens
  siRNA target sequence for SORCS2 (NM_020777.1,1033-1051).
gatgaagctgccgaagtat

SEQ ID NO: 136408 - DNA, 19 bp, Homo sapiens
  siRNA target sequence for SORCS2 (NM_020777.1,1048-1066).
gtatgcattgccaaaggat

SEQ ID NO: 136409 - DNA, 19 bp, Homo sapiens
  siRNA target sequence for SORCS2 (NM_020777.1,1270-1288).
ggcaaaccaaaaaattgat

SEQ ID NO: 136410 - DNA, 19 bp, Homo sapiens
  siRNA target sequence for SORCS2 (NM_020777.1,1291-1309).
gaaagtgatgacgcttata

SEQ ID NO: 136411 - DNA, 19 bp, Homo sapiens
  siRNA target sequence for SORCS2 (NM_020777.1,1295-1313).
gtgatgacgcttataacct

SEQ ID NO: 136412 - DNA, 19 bp, Homo sapiens
  siRNA target sequence for SORCS2 (NM_020777.1,1302-1320).
cgcttataacctacaacaa

SEQ ID NO: 136413 - DNA, 19 bp, Homo sapiens
  siRNA target sequence for SORCS2 (NM_020777.1,1424-1442).
gcagacaacccctacgtat

SEQ ID NO: 136414 - DNA, 19 bp, Homo sapiens
  siRNA target sequence for SORCS2 (NM_020777.1,1506-1524).
cacagctggtggaatataa

SEQ ID NO: 136415 - DNA, 19 bp, Homo sapiens
  siRNA target sequence for SORCS2 (NM_020777.1,1615-1633).
cgtgatcgtggccatcaaa

SEQ ID NO: 136416 - DNA, 19 bp, Homo sapiens
  siRNA target sequence for SORCS2 (NM_020777.1,1686-1704).
cctggagcacgcacaactt

SEQ ID NO: 136417 - DNA, 19 bp, Homo sapiens
  siRNA target sequence for SORCS2 (NM_020777.1,2057-2075).
gagtccagcaccaacaagt

SEQ ID NO: 136418 - DNA, 19 bp, Homo sapiens
  siRNA target sequence for SORCS2 (NM_020777.1,2079-2097).
ctgccaacttctggtttaa

SEQ ID NO: 136419 - DNA, 19 bp, Homo sapiens
  siRNA target sequence for SORCS2 (NM_020777.1,2378-2396).
gccatgtacgtgaacctta

SEQ ID NO: 136420 - DNA, 19 bp, Homo sapiens
  siRNA target sequence for SORCS2 (NM_020777.1,2783-2801).
gtcatgcctctgcagtttt

SEQ ID NO: 136421 - DNA, 19 bp, Homo sapiens
  siRNA target sequence for SORCS2 (NM_020777.1,2937-2955).
ccactttggccgatctgta

SEQ ID NO: 136422 - DNA, 19 bp, Homo sapiens
  siRNA target sequence for SORCS2 (NM_020777.1,2991-3009).
ggagcctctcgagtgataa

SEQ ID NO: 136423 - DNA, 19 bp, Homo sapiens
  siRNA target sequence for SORCS2 (NM_020777.1,3035-3053).
ctgaacgcacagaagatca

SEQ ID NO: 136424 - DNA, 19 bp, Homo sapiens
  siRNA target sequence for SORCS2 (NM_020777.1,3147-3165).
cggtagtggtgctgtttgt

SEQ ID NO: 136425 - DNA, 19 bp, Homo sapiens
  siRNA target sequence for SORCS2 (NM_020777.1,3149-3167).
gtagtggtgctgtttgtca

SEQ ID NO: 136426 - DNA, 19 bp, Homo sapiens
  siRNA target sequence for SORCS2 (NM_020777.1,3231-3249).
ccgtgtacgcccaaatgca

SEQ ID NO: 136427 - DNA, 19 bp, Homo sapiens
  siRNA target sequence for SPEC1 (NM_020239.2,431-449).
gattgaccggaccatgatt

SEQ ID NO: 136428 - DNA, 19 bp, Homo sapiens
  siRNA target sequence for SPEC1 (NM_020239.2,442-460).
ccatgattggggaaccaat

SEQ ID NO: 136429 - DNA, 19 bp, Homo sapiens
  siRNA target sequence for SPEC1 (NM_020239.2,446-464).
gattggggaaccaatgaat

SEQ ID NO: 136430 - DNA, 19 bp, Homo sapiens
  siRNA target sequence for SPEC1 (NM_020239.2,451-469).
gggaaccaatgaattttgt

SEQ ID NO: 136431 - DNA, 19 bp, Homo sapiens
  siRNA target sequence for SPEC1 (NM_020239.2,534-552).
gttcaggagcagatgagat

SEQ ID NO: 136432 - DNA, 19 bp, Homo sapiens
  siRNA target sequence for SPEC2 (NM_020240.1,18-36).
gtgtttcaactgctgtatt

SEQ ID NO: 136433 - DNA, 19 bp, Homo sapiens
  siRNA target sequence for SPEC2 (NM_020240.1,64-82).
cggcggattgacagaagta

SEQ ID NO: 136434 - DNA, 19 bp, Homo sapiens
  siRNA target sequence for SPEC2 (NM_020240.1,65-83).
ggcggattgacagaagtat

SEQ ID NO: 136435 - DNA, 19 bp, Homo sapiens
  siRNA target sequence for SPEC2 (NM_020240.1,67-85).
cggattgacagaagtatga

SEQ ID NO: 136436 - DNA, 19 bp, Homo sapiens
  siRNA target sequence for SPEC2 (NM_020240.1,68-86).
ggattgacagaagtatgat

SEQ ID NO: 136437 - DNA, 19 bp, Homo sapiens
  siRNA target sequence for SPEC2 (NM_020240.1,69-87).
gattgacagaagtatgatt

SEQ ID NO: 136438 - DNA, 19 bp, Homo sapiens
  siRNA target sequence for SPEC2 (NM_020240.1,155-173).
cagttagctccattcagaa

SEQ ID NO: 136439 - DNA, 19 bp, Homo sapiens
  siRNA target sequence for SPEC2 (NM_020240.1,183-201).
gtccaagggaggttatgga

SEQ ID NO: 136440 - DNA, 19 bp, Homo sapiens
  siRNA target sequence for SPOP (NM_003563.2,414-432).
catcaataactttagcttt

SEQ ID NO: 136441 - DNA, 19 bp, Homo sapiens
  siRNA target sequence for SPOP (NM_003563.2,655-673).
gagagtcaacgggcatata

SEQ ID NO: 136442 - DNA, 19 bp, Homo sapiens
  siRNA target sequence for SPOP (NM_003563.2,695-713).
ggggattcaagaaattcat

SEQ ID NO: 136443 - DNA, 19 bp, Homo sapiens
  siRNA target sequence for SPOP (NM_003563.2,711-729).
catccgtagagattttctt

SEQ ID NO: 136444 - DNA, 19 bp, Homo sapiens
  siRNA target sequence for SPOP (NM_003563.2,746-764).
ggcttctccctgatgacaa

SEQ ID NO: 136445 - DNA, 19 bp, Homo sapiens
  siRNA target sequence for SPOP (NM_003563.2,751-769).
ctccctgatgacaagctta

SEQ ID NO: 136446 - DNA, 19 bp, Homo sapiens
  siRNA target sequence for SPOP (NM_003563.2,788-806).
gtgttgtgcaagattctgt

SEQ ID NO: 136447 - DNA, 19 bp, Homo sapiens
  siRNA target sequence for SPOP (NM_003563.2,818-836).
gccagaataccatgaacat

SEQ ID NO: 136448 - DNA, 19 bp, Homo sapiens
  siRNA target sequence for SPOP (NM_003563.2,827-845).
ccatgaacatggtaaaggt

SEQ ID NO: 136449 - DNA, 19 bp, Homo sapiens
  siRNA target sequence for SPOP (NM_003563.2,939-957).
ggctcacaaggctatctta

SEQ ID NO: 136450 - DNA, 19 bp, Homo sapiens
  siRNA target sequence for SPOP (NM_003563.2,972-990).
ggtttttagtgccatgttt

SEQ ID NO: 136451 - DNA, 19 bp, Homo sapiens
  siRNA target sequence for SPOP (NM_003563.2,1200-1218).
ggagaacgctgcagaaatt

SEQ ID NO: 136452 - DNA, 19 bp, Homo sapiens
  siRNA target sequence for SPOP (NM_003563.2,1269-1287).
ggatttcatcaactatcat

SEQ ID NO: 136453 - DNA, 19 bp, Homo sapiens
  siRNA target sequence for SPOP (NM_003563.2,1405-1423).
cgcaaacgcctgaagcaat

SEQ ID NO: 136454 - DNA, 19 bp, Homo sapiens
  siRNA target sequence for STATH (NM_003154.1,212-230).
cactatacccacaaccata

SEQ ID NO: 136455 - DNA, 19 bp, Homo sapiens
  siRNA target sequence for STATH (NM_003154.1,227-245).
cataccaaccacaatacca

SEQ ID NO: 136456 - DNA, 19 bp, Homo sapiens
  siRNA target sequence for STIM1 (NM_003156.2,702-720).
gagttttgccgaattgaca

SEQ ID NO: 136457 - DNA, 19 bp, Homo sapiens
  siRNA target sequence for STIM1 (NM_003156.2,842-860).
ggaagacctcaattaccat

SEQ ID NO: 136458 - DNA, 19 bp, Homo sapiens
  siRNA target sequence for STIM1 (NM_003156.2,975-993).
gtacagtggctgatcacat

SEQ ID NO: 136459 - DNA, 19 bp, Homo sapiens
  siRNA target sequence for STIM1 (NM_003156.2,1208-1226).
gctggtggtgtctatcgtt

SEQ ID NO: 136460 - DNA, 19 bp, Homo sapiens
  siRNA target sequence for STIM1 (NM_003156.2,1209-1227).
ctggtggtgtctatcgtta

SEQ ID NO: 136461 - DNA, 19 bp, Homo sapiens
  siRNA target sequence for STIM1 (NM_003156.2,1211-1229).
ggtggtgtctatcgttatt

SEQ ID NO: 136462 - DNA, 19 bp, Homo sapiens
  siRNA target sequence for STIM1 (NM_003156.2,1214-1232).
ggtgtctatcgttattggt

SEQ ID NO: 136463 - DNA, 19 bp, Homo sapiens
  siRNA target sequence for STIM1 (NM_003156.2,1243-1261).
gctggtttgcctatatcca

SEQ ID NO: 136464 - DNA, 19 bp, Homo sapiens
  siRNA target sequence for STIM1 (NM_003156.2,1493-1511).
gcggagccgccaaaaatat

SEQ ID NO: 136465 - DNA, 19 bp, Homo sapiens
  siRNA target sequence for STIM1 (NM_003156.2,1496-1514).
gagccgccaaaaatatgct

SEQ ID NO: 136466 - DNA, 19 bp, Homo sapiens
  siRNA target sequence for STIM1 (NM_003156.2,1629-1647).
gaggtggaggtgcaatatt

SEQ ID NO: 136467 - DNA, 19 bp, Homo sapiens
  siRNA target sequence for STIM1 (NM_003156.2,1635-1653).
gaggtgcaatattacaaca

SEQ ID NO: 136468 - DNA, 19 bp, Homo sapiens
  siRNA target sequence for STIM1 (NM_003156.2,1638-1656).
gtgcaatattacaacatca

SEQ ID NO: 136469 - DNA, 19 bp, Homo sapiens
  siRNA target sequence for STIM1 (NM_003156.2,1873-1891).
gtggcttccagattgtcaa

SEQ ID NO: 136470 - DNA, 19 bp, Homo sapiens
  siRNA target sequence for STIM1 (NM_003156.2,1913-1931).
ggtggctgccctcaacata

SEQ ID NO: 136471 - DNA, 19 bp, Homo sapiens
  siRNA target sequence for STIM1 (NM_003156.2,2207-2225).
caatgccatgacttccaat

SEQ ID NO: 136472 - DNA, 19 bp, Homo sapiens
  siRNA target sequence for STIM1 (NM_003156.2,2377-2395).
ctggtggctctccacattt

SEQ ID NO: 136473 - DNA, 19 bp, Homo sapiens
  siRNA target sequence for STIM1 (NM_003156.2,2380-2398).
gtggctctccacatttgga

SEQ ID NO: 136474 - DNA, 19 bp, Homo sapiens
  siRNA target sequence for STIM1 (NM_003156.2,2471-2489).
gcaagccagccgaaacaca

SEQ ID NO: 136475 - DNA, 19 bp, Homo sapiens
  siRNA target sequence for STIM1 (NM_003156.2,2528-2546).
ggaggataatggctctatt

SEQ ID NO: 136476 - DNA, 19 bp, Homo sapiens
  siRNA target sequence for STIM1 (NM_003156.2,2567-2585).
cccaggccggaagaagttt

SEQ ID NO: 136477 - DNA, 19 bp, Homo sapiens
  siRNA target sequence for STIM2 (NM_020860.1,700-718).
gtccaccatgctttacaga

SEQ ID NO: 136478 - DNA, 19 bp, Homo sapiens
  siRNA target sequence for STIM2 (NM_020860.1,741-759).
gctcttcaaacaatacata

SEQ ID NO: 136479 - DNA, 19 bp, Homo sapiens
  siRNA target sequence for STIM2 (NM_020860.1,801-819).
gaaagtgatgaattcatca

SEQ ID NO: 136480 - DNA, 19 bp, Homo sapiens
  siRNA target sequence for STIM2 (NM_020860.1,873-891).
gaagataaacatataacga

SEQ ID NO: 136481 - DNA, 19 bp, Homo sapiens
  siRNA target sequence for STIM2 (NM_020860.1,889-907).
cgattgaggatttatggaa

SEQ ID NO: 136482 - DNA, 19 bp, Homo sapiens
  siRNA target sequence for STIM2 (NM_020860.1,894-912).
gaggatttatggaaacgat

SEQ ID NO: 136483 - DNA, 19 bp, Homo sapiens
  siRNA target sequence for STIM2 (NM_020860.1,952-970).
ctcttcagtggttgataga

SEQ ID NO: 136484 - DNA, 19 bp, Homo sapiens
  siRNA target sequence for STIM2 (NM_020860.1,954-972).
cttcagtggttgatagagt

SEQ ID NO: 136485 - DNA, 19 bp, Homo sapiens
  siRNA target sequence for STIM2 (NM_020860.1,959-977).
gtggttgatagagtttgtt

SEQ ID NO: 136486 - DNA, 19 bp, Homo sapiens
  siRNA target sequence for STIM2 (NM_020860.1,965-983).
gatagagtttgttgaacta

SEQ ID NO: 136487 - DNA, 19 bp, Homo sapiens
  siRNA target sequence for STIM2 (NM_020860.1,978-996).
gaactaccccaatatgaga

SEQ ID NO: 136488 - DNA, 19 bp, Homo sapiens
  siRNA target sequence for STIM2 (NM_020860.1,985-1003).
cccaatatgagaagaattt

SEQ ID NO: 136489 - DNA, 19 bp, Homo sapiens
  siRNA target sequence for STIM2 (NM_020860.1,1045-1063).
cagtgcacgaaccttcatt

SEQ ID NO: 136490 - DNA, 19 bp, Homo sapiens
  siRNA target sequence for STIM2 (NM_020860.1,1053-1071).
gaaccttcatttatgatct

SEQ ID NO: 136491 - DNA, 19 bp, Homo sapiens
  siRNA target sequence for STIM2 (NM_020860.1,1230-1248).
gcttatacgcagaataaga

SEQ ID NO: 136492 - DNA, 19 bp, Homo sapiens
  siRNA target sequence for STIM2 (NM_020860.1,1281-1299).
gatttagagagcttacaaa

SEQ ID NO: 136493 - DNA, 19 bp, Homo sapiens
  siRNA target sequence for STIM2 (NM_020860.1,1458-1476).
ggagctgaatgtgaattga

SEQ ID NO: 136494 - DNA, 19 bp, Homo sapiens
  siRNA target sequence for STIM2 (NM_020860.1,1461-1479).
gctgaatgtgaattgagta

SEQ ID NO: 136495 - DNA, 19 bp, Homo sapiens
  siRNA target sequence for STIM2 (NM_020860.1,1572-1590).
ccagatgcacttcagaaat

SEQ ID NO: 136496 - DNA, 19 bp, Homo sapiens
  siRNA target sequence for STIM2 (NM_020860.1,1584-1602).
cagaaatggcttcagttaa

SEQ ID NO: 136497 - DNA, 19 bp, Homo sapiens
  siRNA target sequence for STIM2 (NM_020860.1,1608-1626).
gaagtagaagtgcaatact

SEQ ID NO: 136498 - DNA, 19 bp, Homo sapiens
  siRNA target sequence for STIM2 (NM_020860.1,1611-1629).
gtagaagtgcaatactaca

SEQ ID NO: 136499 - DNA, 19 bp, Homo sapiens
  siRNA target sequence for STIM2 (NM_020860.1,1614-1632).
gaagtgcaatactacaata

SEQ ID NO: 136500 - DNA, 19 bp, Homo sapiens
  siRNA target sequence for STIM2 (NM_020860.1,1617-1635).
gtgcaatactacaatatta

SEQ ID NO: 136501 - DNA, 19 bp, Homo sapiens
  siRNA target sequence for STIM2 (NM_020860.1,1639-1657).
gacaaaacgctgaaatgca

SEQ ID NO: 136502 - DNA, 19 bp, Homo sapiens
  siRNA target sequence for STIM2 (NM_020860.1,1655-1673).
gcagctagctattgctaaa

SEQ ID NO: 136503 - DNA, 19 bp, Homo sapiens
  siRNA target sequence for STIM2 (NM_020860.1,1749-1767).
gatgaggtagaccacaaaa

SEQ ID NO: 136504 - DNA, 19 bp, Homo sapiens
  siRNA target sequence for STIM2 (NM_020860.1,1785-1803).
gctctctctgagttgacaa

SEQ ID NO: 136505 - DNA, 19 bp, Homo sapiens
  siRNA target sequence for STIM2 (NM_020860.1,1796-1814).
gttgacaacttgtttacga

SEQ ID NO: 136506 - DNA, 19 bp, Homo sapiens
  siRNA target sequence for STIM2 (NM_020860.1,1807-1825).
gtttacgagaacgactttt

SEQ ID NO: 136507 - DNA, 19 bp, Homo sapiens
  siRNA target sequence for STIM2 (NM_020860.1,1828-1846).
gctggcaacaaattgagaa

SEQ ID NO: 136508 - DNA, 19 bp, Homo sapiens
  siRNA target sequence for STIM2 (NM_020860.1,1995-2013).
cccccaatagtgtcacaat

SEQ ID NO: 136509 - DNA, 19 bp, Homo sapiens
  siRNA target sequence for STIM2 (NM_020860.1,2236-2254).
cgctttatcgaaatgaaga

SEQ ID NO: 136510 - DNA, 19 bp, Homo sapiens
  siRNA target sequence for STIM2 (NM_020860.1,2361-2379).
cctttaagcctcgagatat

SEQ ID NO: 136511 - DNA, 19 bp, Homo sapiens
  siRNA target sequence for STIM2 (NM_020860.1,2362-2380).
ctttaagcctcgagatata

SEQ ID NO: 136512 - DNA, 19 bp, Homo sapiens
  siRNA target sequence for STIM2 (NM_020860.1,2370-2388).
ctcgagatataccaaacat

SEQ ID NO: 136513 - DNA, 19 bp, Homo sapiens
  siRNA target sequence for STIM2 (NM_020860.1,2372-2390).
cgagatataccaaacatta

SEQ ID NO: 136514 - DNA, 19 bp, Homo sapiens
  siRNA target sequence for STIM2 (NM_020860.1,2373-2391).
gagatataccaaacattat

SEQ ID NO: 136515 - DNA, 19 bp, Homo sapiens
  siRNA target sequence for STIM2 (NM_020860.1,2386-2404).
cattatctccgcgaaagat

SEQ ID NO: 136516 - DNA, 19 bp, Homo sapiens
  siRNA target sequence for STIM2 (NM_020860.1,2396-2414).
gcgaaagatatcaagagat

SEQ ID NO: 136517 - DNA, 19 bp, Homo sapiens
  siRNA target sequence for STIM2 (NM_020860.1,2443-2461).
gggattcgcctgtaactgt

SEQ ID NO: 136518 - DNA, 19 bp, Homo sapiens
  siRNA target sequence for STIM2 (NM_020860.1,2591-2609).
catcccggtgcctaaacct

SEQ ID NO: 136519 - DNA, 19 bp, Homo sapiens
  siRNA target sequence for STIM2 (NM_020860.1,2607-2625).
cctcgccacacatcatgtt

SEQ ID NO: 136520 - DNA, 19 bp, Homo sapiens
  siRNA target sequence for STIM2 (NM_020860.1,2629-2647).
cagctggcaacgacagtaa

SEQ ID NO: 136521 - DNA, 19 bp, Homo sapiens
  siRNA target sequence for STIM2 (NM_020860.1,2663-2681).
cccaagtgttgccagaata

SEQ ID NO: 136522 - DNA, 19 bp, Homo sapiens
  siRNA target sequence for STIM2 (NM_020860.1,2722-2740).
gcaaaaagccatcaaaaat

SEQ ID NO: 136523 - DNA, 19 bp, Homo sapiens
  siRNA target sequence for TA-KRP (NM_032505.1,77-95).
catgcttgcagtattctta

SEQ ID NO: 136524 - DNA, 19 bp, Homo sapiens
  siRNA target sequence for TA-KRP (NM_032505.1,81-99).
cttgcagtattcttaagca

SEQ ID NO: 136525 - DNA, 19 bp, Homo sapiens
  siRNA target sequence for TA-KRP (NM_032505.1,92-110).
cttaagcaactcaaaacaa

SEQ ID NO: 136526 - DNA, 19 bp, Homo sapiens
  siRNA target sequence for TA-KRP (NM_032505.1,223-241).
cactagcggccttacagaa

SEQ ID NO: 136527 - DNA, 19 bp, Homo sapiens
  siRNA target sequence for TA-KRP (NM_032505.1,229-247).
cggccttacagaaagtact

SEQ ID NO: 136528 - DNA, 19 bp, Homo sapiens
  siRNA target sequence for TA-KRP (NM_032505.1,233-251).
cttacagaaagtactcaaa

SEQ ID NO: 136529 - DNA, 19 bp, Homo sapiens
  siRNA target sequence for TA-KRP (NM_032505.1,246-264).
ctcaaaaagaagttcgaat

SEQ ID NO: 136530 - DNA, 19 bp, Homo sapiens
  siRNA target sequence for TA-KRP (NM_032505.1,270-288).
gtgttgaagctgaatcgat

SEQ ID NO: 136531 - DNA, 19 bp, Homo sapiens
  siRNA target sequence for TA-KRP (NM_032505.1,275-293).
gaagctgaatcgatggatt

SEQ ID NO: 136532 - DNA, 19 bp, Homo sapiens
  siRNA target sequence for TA-KRP (NM_032505.1,279-297).
ctgaatcgatggatttagt

SEQ ID NO: 136533 - DNA, 19 bp, Homo sapiens
  siRNA target sequence for TA-KRP (NM_032505.1,281-299).
gaatcgatggatttagtgt

SEQ ID NO: 136534 - DNA, 19 bp, Homo sapiens
  siRNA target sequence for TA-KRP (NM_032505.1,285-303).
cgatggatttagtgttgaa

SEQ ID NO: 136535 - DNA, 19 bp, Homo sapiens
  siRNA target sequence for TA-KRP (NM_032505.1,289-307).
ggatttagtgttgaactat

SEQ ID NO: 136536 - DNA, 19 bp, Homo sapiens
  siRNA target sequence for TA-KRP (NM_032505.1,313-331).
cacttccagagttattctt

SEQ ID NO: 136537 - DNA, 19 bp, Homo sapiens
  siRNA target sequence for TA-KRP (NM_032505.1,395-413).
gaccaatgtgctaagtata

SEQ ID NO: 136538 - DNA, 19 bp, Homo sapiens
  siRNA target sequence for TA-KRP (NM_032505.1,427-445).
ggacccacagaattctatt

SEQ ID NO: 136539 - DNA, 19 bp, Homo sapiens
  siRNA target sequence for TA-KRP (NM_032505.1,457-475).
ctttgctgatcattatggt

SEQ ID NO: 136540 - DNA, 19 bp, Homo sapiens
  siRNA target sequence for TA-KRP (NM_032505.1,487-505).
cggagatcgatcaaaagaa

SEQ ID NO: 136541 - DNA, 19 bp, Homo sapiens
  siRNA target sequence for TA-KRP (NM_032505.1,488-506).
ggagatcgatcaaaagaat

SEQ ID NO: 136542 - DNA, 19 bp, Homo sapiens
  siRNA target sequence for TA-KRP (NM_032505.1,489-507).
gagatcgatcaaaagaata

SEQ ID NO: 136543 - DNA, 19 bp, Homo sapiens
  siRNA target sequence for TA-KRP (NM_032505.1,568-586).
ccaactgataagtatacta

SEQ ID NO: 136544 - DNA, 19 bp, Homo sapiens
  siRNA target sequence for TA-KRP (NM_032505.1,584-602).
ctagacagtgacgatttaa

SEQ ID NO: 136545 - DNA, 19 bp, Homo sapiens
  siRNA target sequence for TA-KRP (NM_032505.1,608-626).
gaccgagaagagcatgttt

SEQ ID NO: 136546 - DNA, 19 bp, Homo sapiens
  siRNA target sequence for TA-KRP (NM_032505.1,610-628).
ccgagaagagcatgtttat

SEQ ID NO: 136547 - DNA, 19 bp, Homo sapiens
  siRNA target sequence for TA-KRP (NM_032505.1,612-630).
gagaagagcatgtttatga

SEQ ID NO: 136548 - DNA, 19 bp, Homo sapiens
  siRNA target sequence for TA-KRP (NM_032505.1,614-632).
gaagagcatgtttatgaaa

SEQ ID NO: 136549 - DNA, 19 bp, Homo sapiens
  siRNA target sequence for TA-KRP (NM_032505.1,645-663).
ggtttgagcatgaacagaa

SEQ ID NO: 136550 - DNA, 19 bp, Homo sapiens
  siRNA target sequence for TA-KRP (NM_032505.1,761-779).
caggctatagccaaaagct

SEQ ID NO: 136551 - DNA, 19 bp, Homo sapiens
  siRNA target sequence for TA-KRP (NM_032505.1,770-788).
gccaaaagctgtgtagaaa

SEQ ID NO: 136552 - DNA, 19 bp, Homo sapiens
  siRNA target sequence for TA-KRP (NM_032505.1,834-852).
ctgcttctgaaatgatcat

SEQ ID NO: 136553 - DNA, 19 bp, Homo sapiens
  siRNA target sequence for TA-KRP (NM_032505.1,894-912).
cagtgccttgtctagatat

SEQ ID NO: 136554 - DNA, 19 bp, Homo sapiens
  siRNA target sequence for TA-KRP (NM_032505.1,899-917).
ccttgtctagatatagtca

SEQ ID NO: 136555 - DNA, 19 bp, Homo sapiens
  siRNA target sequence for TA-KRP (NM_032505.1,914-932).
gtcacaggaagggtgttta

SEQ ID NO: 136556 - DNA, 19 bp, Homo sapiens
  siRNA target sequence for TA-KRP (NM_032505.1,916-934).
cacaggaagggtgtttaaa

SEQ ID NO: 136557 - DNA, 19 bp, Homo sapiens
  siRNA target sequence for TA-KRP (NM_032505.1,918-936).
caggaagggtgtttaaact

SEQ ID NO: 136558 - DNA, 19 bp, Homo sapiens
  siRNA target sequence for TA-KRP (NM_032505.1,920-938).
ggaagggtgtttaaactat

SEQ ID NO: 136559 - DNA, 19 bp, Homo sapiens
  siRNA target sequence for TA-KRP (NM_032505.1,958-976).
gagagaagttgggattctt

SEQ ID NO: 136560 - DNA, 19 bp, Homo sapiens
  siRNA target sequence for TA-KRP (NM_032505.1,977-995).
gtatcaccagataatgaca

SEQ ID NO: 136561 - DNA, 19 bp, Homo sapiens
  siRNA target sequence for TA-KRP (NM_032505.1,1086-1104).
ccaatagatggctatccaa

SEQ ID NO: 136562 - DNA, 19 bp, Homo sapiens
  siRNA target sequence for TA-KRP (NM_032505.1,1087-1105).
caatagatggctatccaaa

SEQ ID NO: 136563 - DNA, 19 bp, Homo sapiens
  siRNA target sequence for TA-KRP (NM_032505.1,1111-1129).
cttgcttcgagccagaata

SEQ ID NO: 136564 - DNA, 19 bp, Homo sapiens
  siRNA target sequence for TA-KRP (NM_032505.1,1123-1141).
cagaataggctgcaaactt

SEQ ID NO: 136565 - DNA, 19 bp, Homo sapiens
  siRNA target sequence for TA-KRP (NM_032505.1,1130-1148).
ggctgcaaacttgtctatt

SEQ ID NO: 136566 - DNA, 19 bp, Homo sapiens
  siRNA target sequence for TA-KRP (NM_032505.1,1167-1185).
caatcggaggtcgtgttta

SEQ ID NO: 136567 - DNA, 19 bp, Homo sapiens
  siRNA target sequence for TA-KRP (NM_032505.1,1193-1211).
gatgggagaaactcactaa

SEQ ID NO: 136568 - DNA, 19 bp, Homo sapiens
  siRNA target sequence for TA-KRP (NM_032505.1,1225-1243).
ctacgacagtagagagaat

SEQ ID NO: 136569 - DNA, 19 bp, Homo sapiens
  siRNA target sequence for TA-KRP (NM_032505.1,1228-1246).
cgacagtagagagaattgt

SEQ ID NO: 136570 - DNA, 19 bp, Homo sapiens
  siRNA target sequence for TA-KRP (NM_032505.1,1260-1278).
gcgcgatgccagttgcaat

SEQ ID NO: 136571 - DNA, 19 bp, Homo sapiens
  siRNA target sequence for TA-KRP (NM_032505.1,1269-1287).
cagttgcaatggaatttca

SEQ ID NO: 136572 - DNA, 19 bp, Homo sapiens
  siRNA target sequence for TA-KRP (NM_032505.1,1271-1289).
gttgcaatggaatttcata

SEQ ID NO: 136573 - DNA, 19 bp, Homo sapiens
  siRNA target sequence for TA-KRP (NM_032505.1,1300-1318).
gtacaaagagaagatctat

SEQ ID NO: 136574 - DNA, 19 bp, Homo sapiens
  siRNA target sequence for TA-KRP (NM_032505.1,1383-1401).
ccatgactgtgcctagaat

SEQ ID NO: 136575 - DNA, 19 bp, Homo sapiens
  siRNA target sequence for TA-KRP (NM_032505.1,1406-1424).
ggcttagcagctgtataca

SEQ ID NO: 136576 - DNA, 19 bp, Homo sapiens
  siRNA target sequence for TA-KRP (NM_032505.1,1407-1425).
gcttagcagctgtatacaa

SEQ ID NO: 136577 - DNA, 19 bp, Homo sapiens
  siRNA target sequence for TA-KRP (NM_032505.1,1416-1434).
ctgtatacaaggactctat

SEQ ID NO: 136578 - DNA, 19 bp, Homo sapiens
  siRNA target sequence for TA-KRP (NM_032505.1,1418-1436).
gtatacaaggactctatct

SEQ ID NO: 136579 - DNA, 19 bp, Homo sapiens
  siRNA target sequence for TA-KRP (NM_032505.1,1426-1444).
ggactctatctactacata

SEQ ID NO: 136580 - DNA, 19 bp, Homo sapiens
  siRNA target sequence for TA-KRP (NM_032505.1,1455-1473).
gtggaaatcatcaacgtat

SEQ ID NO: 136581 - DNA, 19 bp, Homo sapiens
  siRNA target sequence for TA-KRP (NM_032505.1,1458-1476).
gaaatcatcaacgtatgtt

SEQ ID NO: 136582 - DNA, 19 bp, Homo sapiens
  siRNA target sequence for TA-KRP (NM_032505.1,1479-1497).
ctgtagaagcctatgatat

SEQ ID NO: 136583 - DNA, 19 bp, Homo sapiens
  siRNA target sequence for TA-KRP (NM_032505.1,1488-1506).
cctatgatattgagctaaa

SEQ ID NO: 136584 - DNA, 19 bp, Homo sapiens
  siRNA target sequence for TA-KRP (NM_032505.1,1489-1507).
ctatgatattgagctaaat

SEQ ID NO: 136585 - DNA, 19 bp, Homo sapiens
  siRNA target sequence for TA-KRP (NM_032505.1,1517-1535).
cgtaagaaagactttccat

SEQ ID NO: 136586 - DNA, 19 bp, Homo sapiens
  siRNA target sequence for TA-KRP (NM_032505.1,1532-1550).
ccatgtgatcagtccataa

SEQ ID NO: 136587 - DNA, 19 bp, Homo sapiens
  siRNA target sequence for TA-KRP (NM_032505.1,1533-1551).
catgtgatcagtccataaa

SEQ ID NO: 136588 - DNA, 19 bp, Homo sapiens
  siRNA target sequence for TA-KRP (NM_032505.1,1538-1556).
gatcagtccataaatccat

SEQ ID NO: 136589 - DNA, 19 bp, Homo sapiens
  siRNA target sequence for TA-KRP (NM_032505.1,1622-1640).
gaagaacacgtcttcagaa

SEQ ID NO: 136590 - DNA, 19 bp, Homo sapiens
  siRNA target sequence for TA-KRP (NM_032505.1,1680-1698).
ctgaccagtggatgaaagt

SEQ ID NO: 136591 - DNA, 19 bp, Homo sapiens
  siRNA target sequence for TA-KRP (NM_032505.1,1746-1764).
gtgctgttgctaaactgta

SEQ ID NO: 136592 - DNA, 19 bp, Homo sapiens
  siRNA target sequence for TANK (NM_004180.2,170-188).
cattggcgagcaactcaat

SEQ ID NO: 136593 - DNA, 19 bp, Homo sapiens
  siRNA target sequence for TANK (NM_004180.2,207-225).
cggcaggcatgcatggata

SEQ ID NO: 136594 - DNA, 19 bp, Homo sapiens
  siRNA target sequence for TANK (NM_004180.2,212-230).
ggcatgcatggatagagat

SEQ ID NO: 136595 - DNA, 19 bp, Homo sapiens
  siRNA target sequence for TANK (NM_004180.2,251-269).
gcaaaagactgagaactat

SEQ ID NO: 136596 - DNA, 19 bp, Homo sapiens
  siRNA target sequence for TANK (NM_004180.2,263-281).
gaactatgagcagagaata

SEQ ID NO: 136597 - DNA, 19 bp, Homo sapiens
  siRNA target sequence for TANK (NM_004180.2,266-284).
ctatgagcagagaatacgt

SEQ ID NO: 136598 - DNA, 19 bp, Homo sapiens
  siRNA target sequence for TANK (NM_004180.2,309-327).
caacagactattattgaca

SEQ ID NO: 136599 - DNA, 19 bp, Homo sapiens
  siRNA target sequence for TANK (NM_004180.2,351-369).
gtgaattccactcaagata

SEQ ID NO: 136600 - DNA, 19 bp, Homo sapiens
  siRNA target sequence for TANK (NM_004180.2,358-376).
ccactcaagataacaatta

SEQ ID NO: 136601 - DNA, 19 bp, Homo sapiens
  siRNA target sequence for TANK (NM_004180.2,416-434).
gaataatttgactcttgat

SEQ ID NO: 136602 - DNA, 19 bp, Homo sapiens
  siRNA target sequence for TANK (NM_004180.2,429-447).
cttgatcagccacaagata

SEQ ID NO: 136603 - DNA, 19 bp, Homo sapiens
  siRNA target sequence for TANK (NM_004180.2,554-572).
ccatgaaaggggtaatata

SEQ ID NO: 136604 - DNA, 19 bp, Homo sapiens
  siRNA target sequence for TANK (NM_004180.2,580-598).
ctttctgggatctgaaaga

SEQ ID NO: 136605 - DNA, 19 bp, Homo sapiens
  siRNA target sequence for TANK (NM_004180.2,639-657).
gaccacttaagcaaactta

SEQ ID NO: 136606 - DNA, 19 bp, Homo sapiens
  siRNA target sequence for TANK (NM_004180.2,641-659).
ccacttaagcaaacttaat

SEQ ID NO: 136607 - DNA, 19 bp, Homo sapiens
  siRNA target sequence for TANK (NM_004180.2,706-724).
gtacggataaaacagataa

SEQ ID NO: 136608 - DNA, 19 bp, Homo sapiens
  siRNA target sequence for TANK (NM_004180.2,743-761).
gcctcaggctaaagatgat

SEQ ID NO: 136609 - DNA, 19 bp, Homo sapiens
  siRNA target sequence for TANK (NM_004180.2,744-762).
cctcaggctaaagatgata

SEQ ID NO: 136610 - DNA, 19 bp, Homo sapiens
  siRNA target sequence for TANK (NM_004180.2,745-763).
ctcaggctaaagatgatat

SEQ ID NO: 136611 - DNA, 19 bp, Homo sapiens
  siRNA target sequence for TANK (NM_004180.2,771-789).
ggtgcaccatccatcacat

SEQ ID NO: 136612 - DNA, 19 bp, Homo sapiens
  siRNA target sequence for TANK (NM_004180.2,821-839).
ggaagacacctcttttgaa

SEQ ID NO: 136613 - DNA, 19 bp, Homo sapiens
  siRNA target sequence for TANK (NM_004180.2,827-845).
cacctcttttgaatcactt

SEQ ID NO: 136614 - DNA, 19 bp, Homo sapiens
  siRNA target sequence for TANK (NM_004180.2,847-865).
ctaaattcaatgtcaagtt

SEQ ID NO: 136615 - DNA, 19 bp, Homo sapiens
  siRNA target sequence for TANK (NM_004180.2,1040-1058).
ccccatagcttcagctata

SEQ ID NO: 136616 - DNA, 19 bp, Homo sapiens
  siRNA target sequence for TANK (NM_004180.2,1042-1060).
ccatagcttcagctataca

SEQ ID NO: 136617 - DNA, 19 bp, Homo sapiens
  siRNA target sequence for TANK (NM_004180.2,1091-1109).
ctcaaatctcgtaaacact

SEQ ID NO: 136618 - DNA, 19 bp, Homo sapiens
  siRNA target sequence for TANK (NM_004180.2,1098-1116).
ctcgtaaacacttgtatca

SEQ ID NO: 136619 - DNA, 19 bp, Homo sapiens
  siRNA target sequence for TANK (NM_004180.2,1145-1163).
gccacctggagaccataat

SEQ ID NO: 136620 - DNA, 19 bp, Homo sapiens
  siRNA target sequence for TANK (NM_004180.2,1150-1168).
ctggagaccataatgcatt

SEQ ID NO: 136621 - DNA, 19 bp, Homo sapiens
  siRNA target sequence for TANK (NM_004180.2,1153-1171).
gagaccataatgcattata

SEQ ID NO: 136622 - DNA, 19 bp, Homo sapiens
  siRNA target sequence for TANK (NM_004180.2,1268-1286).
gaagccctttcctaatcaa

SEQ ID NO: 136623 - DNA, 19 bp, Homo sapiens
  siRNA target sequence for TANK (NM_004180.2,1315-1333).
cagactcagaactgcatat

SEQ ID NO: 136624 - DNA, 19 bp, Homo sapiens
  siRNA target sequence for TANK (NM_004180.2,1328-1346).
gcatatacctcgagtatgt

SEQ ID NO: 136625 - DNA, 19 bp, Homo sapiens
  siRNA target sequence for TANK (NM_004180.2,1335-1353).
cctcgagtatgtgaattct

SEQ ID NO: 136626 - DNA, 19 bp, Homo sapiens
  siRNA target sequence for TANK (NM_004180.2,1392-1410).
gatttccttcggcatctta

SEQ ID NO: 136627 - DNA, 19 bp, Homo sapiens
  siRNA target sequence for TCEB3 (NM_003198.1,88-106).
cgaacccggaccctaagaa

SEQ ID NO: 136628 - DNA, 19 bp, Homo sapiens
  siRNA target sequence for TCEB3 (NM_003198.1,131-149).
ctccaccctgcctattaca

SEQ ID NO: 136629 - DNA, 19 bp, Homo sapiens
  siRNA target sequence for TCEB3 (NM_003198.1,133-151).
ccaccctgcctattacagt

SEQ ID NO: 136630 - DNA, 19 bp, Homo sapiens
  siRNA target sequence for TCEB3 (NM_003198.1,140-158).
gcctattacagtagacatt

SEQ ID NO: 136631 - DNA, 19 bp, Homo sapiens
  siRNA target sequence for TCEB3 (NM_003198.1,142-160).
ctattacagtagacattct

SEQ ID NO: 136632 - DNA, 19 bp, Homo sapiens
  siRNA target sequence for TCEB3 (NM_003198.1,357-375).
gagggggactaccaagaaa

SEQ ID NO: 136633 - DNA, 19 bp, Homo sapiens
  siRNA target sequence for TCEB3 (NM_003198.1,386-404).
cacggggagccgatcctat

SEQ ID NO: 136634 - DNA, 19 bp, Homo sapiens
  siRNA target sequence for TCEB3 (NM_003198.1,446-464).
gctcgagagacctcacaaa

SEQ ID NO: 136635 - DNA, 19 bp, Homo sapiens
  siRNA target sequence for TCEB3 (NM_003198.1,496-514).
gaaagaggtgtcacagaat

SEQ ID NO: 136636 - DNA, 19 bp, Homo sapiens
  siRNA target sequence for TCEB3 (NM_003198.1,500-518).
gaggtgtcacagaatgtca

SEQ ID NO: 136637 - DNA, 19 bp, Homo sapiens
  siRNA target sequence for TCEB3 (NM_003198.1,549-567).
gattatggccatgttcaat

SEQ ID NO: 136638 - DNA, 19 bp, Homo sapiens
  siRNA target sequence for TCEB3 (NM_003198.1,580-598).
gtaccagtcctcatcagat

SEQ ID NO: 136639 - DNA, 19 bp, Homo sapiens
  siRNA target sequence for TCEB3 (NM_003198.1,630-648).
gaccaggagcccattgttt

SEQ ID NO: 136640 - DNA, 19 bp, Homo sapiens
  siRNA target sequence for TCEB3 (NM_003198.1,741-759).
ggggttgtgagtcaaaaca

SEQ ID NO: 136641 - DNA, 19 bp, Homo sapiens
  siRNA target sequence for TCEB3 (NM_003198.1,742-760).
gggttgtgagtcaaaacaa

SEQ ID NO: 136642 - DNA, 19 bp, Homo sapiens
  siRNA target sequence for TCEB3 (NM_003198.1,882-900).
ccctcaggggacaatgcaa

SEQ ID NO: 136643 - DNA, 19 bp, Homo sapiens
  siRNA target sequence for TCEB3 (NM_003198.1,912-930).
ccctctagtggcgtaaaga

SEQ ID NO: 136644 - DNA, 19 bp, Homo sapiens
  siRNA target sequence for TCEB3 (NM_003198.1,913-931).
cctctagtggcgtaaagaa

SEQ ID NO: 136645 - DNA, 19 bp, Homo sapiens
  siRNA target sequence for TCEB3 (NM_003198.1,916-934).
ctagtggcgtaaagaaaga

SEQ ID NO: 136646 - DNA, 19 bp, Homo sapiens
  siRNA target sequence for TCEB3 (NM_003198.1,919-937).
gtggcgtaaagaaagagaa

SEQ ID NO: 136647 - DNA, 19 bp, Homo sapiens
  siRNA target sequence for TCEB3 (NM_003198.1,1038-1056).
gccaaattggacaaaagca

SEQ ID NO: 136648 - DNA, 19 bp, Homo sapiens
  siRNA target sequence for TCEB3 (NM_003198.1,1152-1170).
gggaaagtcaaaactaatt

SEQ ID NO: 136649 - DNA, 19 bp, Homo sapiens
  siRNA target sequence for TCEB3 (NM_003198.1,1189-1207).
gctccctccctaaagttga

SEQ ID NO: 136650 - DNA, 19 bp, Homo sapiens
  siRNA target sequence for TCEB3 (NM_003198.1,1235-1253).
gcagccaaccatgtctttt

SEQ ID NO: 136651 - DNA, 19 bp, Homo sapiens
  siRNA target sequence for TCEB3 (NM_003198.1,1238-1256).
gccaaccatgtcttttgaa

SEQ ID NO: 136652 - DNA, 19 bp, Homo sapiens
  siRNA target sequence for TCEB3 (NM_003198.1,1239-1257).
ccaaccatgtcttttgaat

SEQ ID NO: 136653 - DNA, 19 bp, Homo sapiens
  siRNA target sequence for TCEB3 (NM_003198.1,1352-1370).
ctctaaaagcactggtaaa

SEQ ID NO: 136654 - DNA, 19 bp, Homo sapiens
  siRNA target sequence for TCEB3 (NM_003198.1,1424-1442).
gccggctggagctgattta

SEQ ID NO: 136655 - DNA, 19 bp, Homo sapiens
  siRNA target sequence for TCEB3 (NM_003198.1,1453-1471).
gaaaggtgcctgatgtgtt

SEQ ID NO: 136656 - DNA, 19 bp, Homo sapiens
  siRNA target sequence for TCEB3 (NM_003198.1,1498-1516).
ccgcgatacaggccaatta

SEQ ID NO: 136657 - DNA, 19 bp, Homo sapiens
  siRNA target sequence for TCEB3 (NM_003198.1,1611-1629).
gggcgcagaatgaattcca

SEQ ID NO: 136658 - DNA, 19 bp, Homo sapiens
  siRNA target sequence for TCEB3 (NM_003198.1,1612-1630).
ggcgcagaatgaattccaa

SEQ ID NO: 136659 - DNA, 19 bp, Homo sapiens
  siRNA target sequence for TCEB3 (NM_003198.1,1692-1710).
caatgcatccgagtactta

SEQ ID NO: 136660 - DNA, 19 bp, Homo sapiens
  siRNA target sequence for TCEB3 (NM_003198.1,1696-1714).
gcatccgagtacttaaaaa

SEQ ID NO: 136661 - DNA, 19 bp, Homo sapiens
  siRNA target sequence for TCEB3 (NM_003198.1,1707-1725).
cttaaaaacaacatcgatt

SEQ ID NO: 136662 - DNA, 19 bp, Homo sapiens
  siRNA target sequence for TCEB3 (NM_003198.1,1715-1733).
caacatcgattcaatcttt

SEQ ID NO: 136663 - DNA, 19 bp, Homo sapiens
  siRNA target sequence for TCEB3 (NM_003198.1,1718-1736).
catcgattcaatctttgaa

SEQ ID NO: 136664 - DNA, 19 bp, Homo sapiens
  siRNA target sequence for TCEB3 (NM_003198.1,1739-1757).
gggaggagtcccatactct

SEQ ID NO: 136665 - DNA, 19 bp, Homo sapiens
  siRNA target sequence for TCEB3 (NM_003198.1,1804-1822).
gcatagaggaatacaatca

SEQ ID NO: 136666 - DNA, 19 bp, Homo sapiens
  siRNA target sequence for TCEB3 (NM_003198.1,1845-1863).
caattatggaaagttcatt

SEQ ID NO: 136667 - DNA, 19 bp, Homo sapiens
  siRNA target sequence for TCEB3 (NM_003198.1,1860-1878).
cattgtcaccgagacttta

SEQ ID NO: 136668 - DNA, 19 bp, Homo sapiens
  siRNA target sequence for TCEB3 (NM_003198.1,1864-1882).
gtcaccgagactttaagga

SEQ ID NO: 136669 - DNA, 19 bp, Homo sapiens
  siRNA target sequence for TCEB3 (NM_003198.1,1946-1964).
gcagcggctacgagtacta

SEQ ID NO: 136670 - DNA, 19 bp, Homo sapiens
  siRNA target sequence for TCEB3 (NM_003198.1,1947-1965).
cagcggctacgagtactaa

SEQ ID NO: 136671 - DNA, 19 bp, Homo sapiens
  siRNA target sequence for TCEB3 (NM_003198.1,1949-1967).
gcggctacgagtactaaca

SEQ ID NO: 136672 - DNA, 19 bp, Homo sapiens
  siRNA target sequence for TCEB3 (NM_003198.1,1950-1968).
cggctacgagtactaacaa

SEQ ID NO: 136673 - DNA, 19 bp, Homo sapiens
  siRNA target sequence for TCEB3 (NM_003198.1,1951-1969).
ggctacgagtactaacaaa

SEQ ID NO: 136674 - DNA, 19 bp, Homo sapiens
  siRNA target sequence for TCEB3 (NM_003198.1,1956-1974).
cgagtactaacaaagaata

SEQ ID NO: 136675 - DNA, 19 bp, Homo sapiens
  siRNA target sequence for TCEB3 (NM_003198.1,1957-1975).
gagtactaacaaagaatat

SEQ ID NO: 136676 - DNA, 19 bp, Homo sapiens
  siRNA target sequence for TCEB3 (NM_003198.1,1999-2017).
ccaaaggccgacaagcaaa

SEQ ID NO: 136677 - DNA, 19 bp, Homo sapiens
  siRNA target sequence for TCEB3 (NM_003198.1,2013-2031).
gcaaagatggcctttgtca

SEQ ID NO: 136678 - DNA, 19 bp, Homo sapiens
  siRNA target sequence for TCEB3 (NM_003198.1,2097-2115).
gctgtccctgagaaaatca

SEQ ID NO: 136679 - DNA, 19 bp, Homo sapiens
  siRNA target sequence for TCEB3 (NM_003198.1,2308-2326).
ccaagacaattaaagcttt

SEQ ID NO: 136680 - DNA, 19 bp, Homo sapiens
  siRNA target sequence for TGFA (NM_003236.1,146-164).
gcagtggtgtcccatttta

SEQ ID NO: 136681 - DNA, 19 bp, Homo sapiens
  siRNA target sequence for TGFA (NM_003236.1,200-218).
catggaacctgcaggtttt

SEQ ID NO: 136682 - DNA, 19 bp, Homo sapiens
  siRNA target sequence for TGFA (NM_003236.1,365-383).
gctgtccttatcatcacat

SEQ ID NO: 136683 - DNA, 19 bp, Homo sapiens
  siRNA target sequence for TGFA (NM_003236.1,399-417).
gctgccaggtccgaaaaca

SEQ ID NO: 136684 - DNA, 19 bp, Homo sapiens
  siRNA target sequence for TIP-1 (NM_014604.1,185-203).
ccgccgtggtgcaaagagt

SEQ ID NO: 136685 - DNA, 19 bp, Homo sapiens
  siRNA target sequence for TIP-1 (NM_014604.1,186-204).
cgccgtggtgcaaagagtt

SEQ ID NO: 136686 - DNA, 19 bp, Homo sapiens
  siRNA target sequence for TIP-1 (NM_014604.1,189-207).
cgtggtgcaaagagttgaa

SEQ ID NO: 136687 - DNA, 19 bp, Homo sapiens
  siRNA target sequence for TIP-1 (NM_014604.1,219-237).
gcgtcaaggtgagaactta

SEQ ID NO: 136688 - DNA, 19 bp, Homo sapiens
  siRNA target sequence for TIP-1 (NM_014604.1,221-239).
gtcaaggtgagaacttaat

SEQ ID NO: 136689 - DNA, 19 bp, Homo sapiens
  siRNA target sequence for TIP-1 (NM_014604.1,306-324).
gacggacaagggtatttat

SEQ ID NO: 136690 - DNA, 19 bp, Homo sapiens
  siRNA target sequence for TIP-1 (NM_014604.1,308-326).
cggacaagggtatttatgt

SEQ ID NO: 136691 - DNA, 19 bp, Homo sapiens
  siRNA target sequence for TIP-1 (NM_014604.1,310-328).
gacaagggtatttatgtca

SEQ ID NO: 136692 - DNA, 19 bp, Homo sapiens
  siRNA target sequence for TNFAIP1 (NM_021137.3,397-415).
ggtgctgaccgacaaagaa

SEQ ID NO: 136693 - DNA, 19 bp, Homo sapiens
  siRNA target sequence for TNFAIP1 (NM_021137.3,503-521).
cggcaagaaatcaaggaat

SEQ ID NO: 136694 - DNA, 19 bp, Homo sapiens
  siRNA target sequence for TNFAIP1 (NM_021137.3,647-665).
gaggagcggctcatcgaat

SEQ ID NO: 136695 - DNA, 19 bp, Homo sapiens
  siRNA target sequence for TNFAIP1 (NM_021137.3,934-952).
cccagaggcccgaatctat

SEQ ID NO: 136696 - DNA, 19 bp, Homo sapiens
  siRNA target sequence for TNFAIP1 (NM_021137.3,960-978).
cactcaacgtcctactcta

SEQ ID NO: 136697 - DNA, 19 bp, Homo sapiens
  siRNA target sequence for TNFAIP1 (NM_021137.3,1105-1123).
gcgctacagcacttacgat

SEQ ID NO: 136698 - DNA, 19 bp, Homo sapiens
  siRNA target sequence for TNIP1 (NM_006058.2,328-346).
cttttgagcgcctagtgaa

SEQ ID NO: 136699 - DNA, 19 bp, Homo sapiens
  siRNA target sequence for TNIP1 (NM_006058.2,336-354).
cgcctagtgaaggagaatt

SEQ ID NO: 136700 - DNA, 19 bp, Homo sapiens
  siRNA target sequence for TNIP1 (NM_006058.2,374-392).
gcaagggataaagatgtta

SEQ ID NO: 136701 - DNA, 19 bp, Homo sapiens
  siRNA target sequence for TNIP1 (NM_006058.2,973-991).
ggctgcgggaggaaaattt

SEQ ID NO: 136702 - DNA, 19 bp, Homo sapiens
  siRNA target sequence for TNIP1 (NM_006058.2,1273-1291).
gtcagaagctggctgattt

SEQ ID NO: 136703 - DNA, 19 bp, Homo sapiens
  siRNA target sequence for TNIP1 (NM_006058.2,1620-1638).
ctggtcacgcagaatgagt

SEQ ID NO: 136704 - DNA, 19 bp, Homo sapiens
  siRNA target sequence for TNIP1 (NM_006058.2,1754-1772).
ccaggtcaccctgtcaaat

SEQ ID NO: 136705 - DNA, 19 bp, Homo sapiens
  siRNA target sequence for TNIP1 (NM_006058.2,1847-1865).
ctcaggagagcgttaccat

SEQ ID NO: 136706 - DNA, 19 bp, Homo sapiens
  siRNA target sequence for TNIP1 (NM_006058.2,1868-1886).
ggagccccacccagaacat

SEQ ID NO: 136707 - DNA, 19 bp, Homo sapiens
  siRNA target sequence for TNIP1 (NM_006058.2,2059-2077).
cctgtggaggggttcgaaa

SEQ ID NO: 136708 - DNA, 19 bp, Homo sapiens
  siRNA target sequence for TNIP1 (NM_006058.2,2060-2078).
ctgtggaggggttcgaaat

SEQ ID NO: 136709 - DNA, 19 bp, Homo sapiens
  siRNA target sequence for TNIP1 (NM_006058.2,2064-2082).
ggaggggttcgaaatccaa

SEQ ID NO: 136710 - DNA, 19 bp, Homo sapiens
  siRNA target sequence for TNIP1 (NM_006058.2,2065-2083).
gaggggttcgaaatccaaa

SEQ ID NO: 136711 - DNA, 19 bp, Homo sapiens
  siRNA target sequence for TNIP1 (NM_006058.2,2068-2086).
gggttcgaaatccaaatca

SEQ ID NO: 136712 - DNA, 19 bp, Homo sapiens
  siRNA target sequence for TNIP1 (NM_006058.2,2070-2088).
gttcgaaatccaaatcaga

SEQ ID NO: 136713 - DNA, 19 bp, Homo sapiens
  siRNA target sequence for TNKS (NM_003747.1,317-335).
ggtcccagcggtttctact

SEQ ID NO: 136714 - DNA, 19 bp, Homo sapiens
  siRNA target sequence for TNKS (NM_003747.1,318-336).
gtcccagcggtttctactt

SEQ ID NO: 136715 - DNA, 19 bp, Homo sapiens
  siRNA target sequence for TNKS (NM_003747.1,321-339).
ccagcggtttctacttcat

SEQ ID NO: 136716 - DNA, 19 bp, Homo sapiens
  siRNA target sequence for TNKS (NM_003747.1,608-626).
ggtggacgcggcaaacgta

SEQ ID NO: 136717 - DNA, 19 bp, Homo sapiens
  siRNA target sequence for TNKS (NM_003747.1,609-627).
gtggacgcggcaaacgtaa

SEQ ID NO: 136718 - DNA, 19 bp, Homo sapiens
  siRNA target sequence for TNKS (NM_003747.1,611-629).
ggacgcggcaaacgtaaat

SEQ ID NO: 136719 - DNA, 19 bp, Homo sapiens
  siRNA target sequence for TNKS (NM_003747.1,614-632).
cgcggcaaacgtaaatgca

SEQ ID NO: 136720 - DNA, 19 bp, Homo sapiens
  siRNA target sequence for TNKS (NM_003747.1,615-633).
gcggcaaacgtaaatgcaa

SEQ ID NO: 136721 - DNA, 19 bp, Homo sapiens
  siRNA target sequence for TNKS (NM_003747.1,616-634).
cggcaaacgtaaatgcaaa

SEQ ID NO: 136722 - DNA, 19 bp, Homo sapiens
  siRNA target sequence for TNKS (NM_003747.1,688-706).
ggaaggatgttgtagaaca

SEQ ID NO: 136723 - DNA, 19 bp, Homo sapiens
  siRNA target sequence for TNKS (NM_003747.1,692-710).
ggatgttgtagaacactta

SEQ ID NO: 136724 - DNA, 19 bp, Homo sapiens
  siRNA target sequence for TNKS (NM_003747.1,750-768).
ggtctcatcccgcttcata

SEQ ID NO: 136725 - DNA, 19 bp, Homo sapiens
  siRNA target sequence for TNKS (NM_003747.1,751-769).
gtctcatcccgcttcataa

SEQ ID NO: 136726 - DNA, 19 bp, Homo sapiens
  siRNA target sequence for TNKS (NM_003747.1,792-810).
gaggttgtgagtctgttat

SEQ ID NO: 136727 - DNA, 19 bp, Homo sapiens
  siRNA target sequence for TNKS (NM_003747.1,836-854).
cagggataactggaactat

SEQ ID NO: 136728 - DNA, 19 bp, Homo sapiens
  siRNA target sequence for TNKS (NM_003747.1,839-857).
ggataactggaactataca

SEQ ID NO: 136729 - DNA, 19 bp, Homo sapiens
  siRNA target sequence for TNKS (NM_003747.1,988-1006).
ctgtccttacaggtgaata

SEQ ID NO: 136730 - DNA, 19 bp, Homo sapiens
  siRNA target sequence for TNKS (NM_003747.1,1085-1103).
gaattgccatgcaagtgat

SEQ ID NO: 136731 - DNA, 19 bp, Homo sapiens
  siRNA target sequence for TNKS (NM_003747.1,1106-1124).
gcgaaagtcgactccttta

SEQ ID NO: 136732 - DNA, 19 bp, Homo sapiens
  siRNA target sequence for TNKS (NM_003747.1,1112-1130).
gtcgactcctttacatcta

SEQ ID NO: 136733 - DNA, 19 bp, Homo sapiens
  siRNA target sequence for TNKS (NM_003747.1,1128-1146).
ctagcagcgggctacaaca

SEQ ID NO: 136734 - DNA, 19 bp, Homo sapiens
  siRNA target sequence for TNKS (NM_003747.1,1139-1157).
ctacaacagagttcgaata

SEQ ID NO: 136735 - DNA, 19 bp, Homo sapiens
  siRNA target sequence for TNKS (NM_003747.1,1209-1227).
ggacttgtgcctcttcata

SEQ ID NO: 136736 - DNA, 19 bp, Homo sapiens
  siRNA target sequence for TNKS (NM_003747.1,1210-1228).
gacttgtgcctcttcataa

SEQ ID NO: 136737 - DNA, 19 bp, Homo sapiens
  siRNA target sequence for TNKS (NM_003747.1,1298-1316).
ggatctctggcagtttact

SEQ ID NO: 136738 - DNA, 19 bp, Homo sapiens
  siRNA target sequence for TNKS (NM_003747.1,1336-1354).
ccaagaaccgtgtagaagt

SEQ ID NO: 136739 - DNA, 19 bp, Homo sapiens
  siRNA target sequence for TNKS (NM_003747.1,1353-1371).
gtctgctctttgttactta

SEQ ID NO: 136740 - DNA, 19 bp, Homo sapiens
  siRNA target sequence for TNKS (NM_003747.1,1442-1460).
gcttagggagagattgact

SEQ ID NO: 136741 - DNA, 19 bp, Homo sapiens
  siRNA target sequence for TNKS (NM_003747.1,1443-1461).
cttagggagagattgactt

SEQ ID NO: 136742 - DNA, 19 bp, Homo sapiens
  siRNA target sequence for TNKS (NM_003747.1,1447-1465).
gggagagattgacttatga

SEQ ID NO: 136743 - DNA, 19 bp, Homo sapiens
  siRNA target sequence for TNKS (NM_003747.1,1448-1466).
ggagagattgacttatgaa

SEQ ID NO: 136744 - DNA, 19 bp, Homo sapiens
  siRNA target sequence for TNKS (NM_003747.1,1530-1548).
ctcgctctggaaatcatta

SEQ ID NO: 136745 - DNA, 19 bp, Homo sapiens
  siRNA target sequence for TNKS (NM_003747.1,1532-1550).
cgctctggaaatcattaat

SEQ ID NO: 136746 - DNA, 19 bp, Homo sapiens
  siRNA target sequence for TNKS (NM_003747.1,1557-1575).
caaccgcagtctcatgaaa

SEQ ID NO: 136747 - DNA, 19 bp, Homo sapiens
  siRNA target sequence for TNKS (NM_003747.1,1600-1618).
ctctgcatcccaaacgtaa

SEQ ID NO: 136748 - DNA, 19 bp, Homo sapiens
  siRNA target sequence for TNKS (NM_003747.1,1604-1622).
gcatcccaaacgtaaacaa

SEQ ID NO: 136749 - DNA, 19 bp, Homo sapiens
  siRNA target sequence for TNKS (NM_003747.1,1614-1632).
cgtaaacaagtgacagaat

SEQ ID NO: 136750 - DNA, 19 bp, Homo sapiens
  siRNA target sequence for TNKS (NM_003747.1,1615-1633).
gtaaacaagtgacagaatt

SEQ ID NO: 136751 - DNA, 19 bp, Homo sapiens
  siRNA target sequence for TNKS (NM_003747.1,1625-1643).
gacagaattgttacttaga

SEQ ID NO: 136752 - DNA, 19 bp, Homo sapiens
  siRNA target sequence for TNKS (NM_003747.1,1627-1645).
cagaattgttacttagaaa

SEQ ID NO: 136753 - DNA, 19 bp, Homo sapiens
  siRNA target sequence for TNKS (NM_003747.1,1702-1720).
ccgaaagagcccataatga

SEQ ID NO: 136754 - DNA, 19 bp, Homo sapiens
  siRNA target sequence for TNKS (NM_003747.1,1703-1721).
cgaaagagcccataatgat

SEQ ID NO: 136755 - DNA, 19 bp, Homo sapiens
  siRNA target sequence for TNKS (NM_003747.1,1708-1726).
gagcccataatgatgtcat

SEQ ID NO: 136756 - DNA, 19 bp, Homo sapiens
  siRNA target sequence for TNKS (NM_003747.1,1776-1794).
ggtcagactgctttgcata

SEQ ID NO: 136757 - DNA, 19 bp, Homo sapiens
  siRNA target sequence for TNKS (NM_003747.1,1922-1940).
gagtgagagtacacctata

SEQ ID NO: 136758 - DNA, 19 bp, Homo sapiens
  siRNA target sequence for TNKS (NM_003747.1,1926-1944).
gagagtacacctatacgta

SEQ ID NO: 136759 - DNA, 19 bp, Homo sapiens
  siRNA target sequence for TNKS (NM_003747.1,1942-1960).
gtacttctgatgttgatta

SEQ ID NO: 136760 - DNA, 19 bp, Homo sapiens
  siRNA target sequence for TNKS (NM_003747.1,1963-1981).
gactcttagaggcatctaa

SEQ ID NO: 136761 - DNA, 19 bp, Homo sapiens
  siRNA target sequence for TNKS (NM_003747.1,1967-1985).
cttagaggcatctaaagct

SEQ ID NO: 136762 - DNA, 19 bp, Homo sapiens
  siRNA target sequence for TNKS (NM_003747.1,2055-2073).
cattccacgcccttacact

SEQ ID NO: 136763 - DNA, 19 bp, Homo sapiens
  siRNA target sequence for TNKS (NM_003747.1,2087-2105).
caaccgcgtgtctgttgta

SEQ ID NO: 136764 - DNA, 19 bp, Homo sapiens
  siRNA target sequence for TNKS (NM_003747.1,2154-2172).
ggcttggtgccccttcata

SEQ ID NO: 136765 - DNA, 19 bp, Homo sapiens
  siRNA target sequence for TNKS (NM_003747.1,2232-2250).
gtcaatgtggcggacttat

SEQ ID NO: 136766 - DNA, 19 bp, Homo sapiens
  siRNA target sequence for TNKS (NM_003747.1,2238-2256).
gtggcggacttatggaaat

SEQ ID NO: 136767 - DNA, 19 bp, Homo sapiens
  siRNA target sequence for TNKS (NM_003747.1,2240-2258).
ggcggacttatggaaattt

SEQ ID NO: 136768 - DNA, 19 bp, Homo sapiens
  siRNA target sequence for TNKS (NM_003747.1,2325-2343).
gcagatccaactaaaaaga

SEQ ID NO: 136769 - DNA, 19 bp, Homo sapiens
  siRNA target sequence for TNKS (NM_003747.1,2531-2549).
cctggcagcaggctataat

SEQ ID NO: 136770 - DNA, 19 bp, Homo sapiens
  siRNA target sequence for TNKS (NM_003747.1,2532-2550).
ctggcagcaggctataata

SEQ ID NO: 136771 - DNA, 19 bp, Homo sapiens
  siRNA target sequence for TNKS (NM_003747.1,2555-2573).
ggaagtagctgaatatctt

SEQ ID NO: 136772 - DNA, 19 bp, Homo sapiens
  siRNA target sequence for TNKS (NM_003747.1,2577-2595).
gagcatggagctgatgtta

SEQ ID NO: 136773 - DNA, 19 bp, Homo sapiens
  siRNA target sequence for TNKS (NM_003747.1,2600-2618).
ccaggacaagggtggttta

SEQ ID NO: 136774 - DNA, 19 bp, Homo sapiens
  siRNA target sequence for TNKS (NM_003747.1,2603-2621).
ggacaagggtggtttaatt

SEQ ID NO: 136775 - DNA, 19 bp, Homo sapiens
  siRNA target sequence for TNKS (NM_003747.1,2606-2624).
caagggtggtttaattcct

SEQ ID NO: 136776 - DNA, 19 bp, Homo sapiens
  siRNA target sequence for TNKS (NM_003747.1,2641-2659).
cttatgggcatgttgacat

SEQ ID NO: 136777 - DNA, 19 bp, Homo sapiens
  siRNA target sequence for TNKS (NM_003747.1,2652-2670).
gttgacatagcggctttat

SEQ ID NO: 136778 - DNA, 19 bp, Homo sapiens
  siRNA target sequence for TNKS (NM_003747.1,2655-2673).
gacatagcggctttattga

SEQ ID NO: 136779 - DNA, 19 bp, Homo sapiens
  siRNA target sequence for TNKS (NM_003747.1,2681-2699).
caacacgtgtgtaaatgca

SEQ ID NO: 136780 - DNA, 19 bp, Homo sapiens
  siRNA target sequence for TNKS (NM_003747.1,2689-2707).
gtgtaaatgcaacagataa

SEQ ID NO: 136781 - DNA, 19 bp, Homo sapiens
  siRNA target sequence for TNKS (NM_003747.1,2832-2850).
gcaacagctgacgatatca

SEQ ID NO: 136782 - DNA, 19 bp, Homo sapiens
  siRNA target sequence for TNKS (NM_003747.1,2883-2901).
gccttacctacctgtttta

SEQ ID NO: 136783 - DNA, 19 bp, Homo sapiens
  siRNA target sequence for TNKS (NM_003747.1,3079-3097).
ctggtcttgacatgaatat

SEQ ID NO: 136784 - DNA, 19 bp, Homo sapiens
  siRNA target sequence for TNKS (NM_003747.1,3081-3099).
ggtcttgacatgaatatca

SEQ ID NO: 136785 - DNA, 19 bp, Homo sapiens
  siRNA target sequence for TNKS (NM_003747.1,3092-3110).
gaatatcagccaatttcta

SEQ ID NO: 136786 - DNA, 19 bp, Homo sapiens
  siRNA target sequence for TNKS (NM_003747.1,3131-3149).
ccttcgggatatctttgaa

SEQ ID NO: 136787 - DNA, 19 bp, Homo sapiens
  siRNA target sequence for TNKS (NM_003747.1,3176-3194).
ggctgatatgggtcatgaa

SEQ ID NO: 136788 - DNA, 19 bp, Homo sapiens
  siRNA target sequence for TNKS (NM_003747.1,3225-3243).
gggcaccgccacaaattaa

SEQ ID NO: 136789 - DNA, 19 bp, Homo sapiens
  siRNA target sequence for TNKS (NM_003747.1,3226-3244).
ggcaccgccacaaattaat

SEQ ID NO: 136790 - DNA, 19 bp, Homo sapiens
  siRNA target sequence for TNKS (NM_003747.1,3228-3246).
caccgccacaaattaatca

SEQ ID NO: 136791 - DNA, 19 bp, Homo sapiens
  siRNA target sequence for TNKS (NM_003747.1,3230-3248).
ccgccacaaattaatcaaa

SEQ ID NO: 136792 - DNA, 19 bp, Homo sapiens
  siRNA target sequence for TNKS (NM_003747.1,3273-3291).
caacaaggcaccaatcctt

SEQ ID NO: 136793 - DNA, 19 bp, Homo sapiens
  siRNA target sequence for TNKS (NM_003747.1,3279-3297).
ggcaccaatccttatttga

SEQ ID NO: 136794 - DNA, 19 bp, Homo sapiens
  siRNA target sequence for TNKS (NM_003747.1,3281-3299).
caccaatccttatttgact

SEQ ID NO: 136795 - DNA, 19 bp, Homo sapiens
  siRNA target sequence for TNKS (NM_003747.1,3283-3301).
ccaatccttatttgacttt

SEQ ID NO: 136796 - DNA, 19 bp, Homo sapiens
  siRNA target sequence for TNKS (NM_003747.1,3284-3302).
caatccttatttgactttt

SEQ ID NO: 136797 - DNA, 19 bp, Homo sapiens
  siRNA target sequence for TNKS (NM_003747.1,3309-3327).
gttaatcagggaacgattt

SEQ ID NO: 136798 - DNA, 19 bp, Homo sapiens
  siRNA target sequence for TNKS (NM_003747.1,3339-3357).
gctccagaagataaagaat

SEQ ID NO: 136799 - DNA, 19 bp, Homo sapiens
  siRNA target sequence for TNKS (NM_003747.1,3440-3458).
caatgtcattcgaattcaa

SEQ ID NO: 136800 - DNA, 19 bp, Homo sapiens
  siRNA target sequence for TNKS (NM_003747.1,3555-3573).
catggttctcctttcatta

SEQ ID NO: 136801 - DNA, 19 bp, Homo sapiens
  siRNA target sequence for TNKS (NM_003747.1,3658-3676).
cctcaaaaagcaaccaata

SEQ ID NO: 136802 - DNA, 19 bp, Homo sapiens
  siRNA target sequence for TNKS (NM_003747.1,3716-3734).
caaggacaggtcatgctat

SEQ ID NO: 136803 - DNA, 19 bp, Homo sapiens
  siRNA target sequence for TNKS (NM_003747.1,3719-3737).
ggacaggtcatgctatata

SEQ ID NO: 136804 - DNA, 19 bp, Homo sapiens
  siRNA target sequence for TNKS (NM_003747.1,3720-3738).
gacaggtcatgctatatat

SEQ ID NO: 136805 - DNA, 19 bp, Homo sapiens
  siRNA target sequence for TNKS (NM_003747.1,3724-3742).
ggtcatgctatatatgtca

SEQ ID NO: 136806 - DNA, 19 bp, Homo sapiens
  siRNA target sequence for TNKS (NM_003747.1,3765-3783).
gtgacccttgggaaatcct

SEQ ID NO: 136807 - DNA, 19 bp, Homo sapiens
  siRNA target sequence for TNKS (NM_003747.1,3862-3880).
ggctggcatatgctgaata

SEQ ID NO: 136808 - DNA, 19 bp, Homo sapiens
  siRNA target sequence for TNKS (NM_003747.1,3867-3885).
gcatatgctgaatatgtca

SEQ ID NO: 136809 - DNA, 19 bp, Homo sapiens
  siRNA target sequence for TNKS (NM_003747.1,3910-3928).
cagagtatcttatcactta

SEQ ID NO: 136810 - DNA, 19 bp, Homo sapiens
  siRNA target sequence for TOB1 (NM_005749.2,329-347).
ggtttcttaccaaattggt

SEQ ID NO: 136811 - DNA, 19 bp, Homo sapiens
  siRNA target sequence for TOB1 (NM_005749.2,334-352).
cttaccaaattggtgaaaa

SEQ ID NO: 136812 - DNA, 19 bp, Homo sapiens
  siRNA target sequence for TOB1 (NM_005749.2,358-376).
cagtgaaggtgctttacgt

SEQ ID NO: 136813 - DNA, 19 bp, Homo sapiens
  siRNA target sequence for TOB1 (NM_005749.2,366-384).
gtgctttacgtggatgata

SEQ ID NO: 136814 - DNA, 19 bp, Homo sapiens
  siRNA target sequence for TOB1 (NM_005749.2,397-415).
gatgtgagttggataagga

SEQ ID NO: 136815 - DNA, 19 bp, Homo sapiens
  siRNA target sequence for TOB1 (NM_005749.2,435-453).
ccagaggcccaggttttta

SEQ ID NO: 136816 - DNA, 19 bp, Homo sapiens
  siRNA target sequence for TOB1 (NM_005749.2,488-506).
ctctccatcgcctcctttt

SEQ ID NO: 136817 - DNA, 19 bp, Homo sapiens
  siRNA target sequence for TOB1 (NM_005749.2,543-561).
cggtccactcagcctttaa

SEQ ID NO: 136818 - DNA, 19 bp, Homo sapiens
  siRNA target sequence for TOB1 (NM_005749.2,547-565).
ccactcagcctttaacctt

SEQ ID NO: 136819 - DNA, 19 bp, Homo sapiens
  siRNA target sequence for TOB1 (NM_005749.2,548-566).
cactcagcctttaaccttt

SEQ ID NO: 136820 - DNA, 19 bp, Homo sapiens
  siRNA target sequence for TOB1 (NM_005749.2,590-608).
caagttcggctctaccaaa

SEQ ID NO: 136821 - DNA, 19 bp, Homo sapiens
  siRNA target sequence for TOB1 (NM_005749.2,632-650).
caaggttgcacgtacttct

SEQ ID NO: 136822 - DNA, 19 bp, Homo sapiens
  siRNA target sequence for TOB1 (NM_005749.2,838-856).
ctcctaatgccaaggaatt

SEQ ID NO: 136823 - DNA, 19 bp, Homo sapiens
  siRNA target sequence for TOB1 (NM_005749.2,840-858).
cctaatgccaaggaattta

SEQ ID NO: 136824 - DNA, 19 bp, Homo sapiens
  siRNA target sequence for TOB1 (NM_005749.2,883-901).
gtagtagtaccaatggaat

SEQ ID NO: 136825 - DNA, 19 bp, Homo sapiens
  siRNA target sequence for TOB1 (NM_005749.2,910-928).
gtgacagcccccttaacct

SEQ ID NO: 136826 - DNA, 19 bp, Homo sapiens
  siRNA target sequence for TOB1 (NM_005749.2,931-949).
gtcctctccagtacagtaa

SEQ ID NO: 136827 - DNA, 19 bp, Homo sapiens
  siRNA target sequence for TOB1 (NM_005749.2,941-959).
gtacagtaatgcctttgat

SEQ ID NO: 136828 - DNA, 19 bp, Homo sapiens
  siRNA target sequence for TOB1 (NM_005749.2,999-1017).
gtagatggcttgaatttta

SEQ ID NO: 136829 - DNA, 19 bp, Homo sapiens
  siRNA target sequence for TOB1 (NM_005749.2,1002-1020).
gatggcttgaattttagct

SEQ ID NO: 136830 - DNA, 19 bp, Homo sapiens
  siRNA target sequence for TOLLIP (NM_019009.2,263-281).
ccgtgggccgactgaacat

SEQ ID NO: 136831 - DNA, 19 bp, Homo sapiens
  siRNA target sequence for TOLLIP (NM_019009.2,284-302).
cggtggtacaggcaaagtt

SEQ ID NO: 136832 - DNA, 19 bp, Homo sapiens
  siRNA target sequence for TOLLIP (NM_019009.2,372-390).
gacgcccacggcacacaat

SEQ ID NO: 136833 - DNA, 19 bp, Homo sapiens
  siRNA target sequence for TOLLIP (NM_019009.2,437-455).
ccccaggcgtggactcttt

SEQ ID NO: 136834 - DNA, 19 bp, Homo sapiens
  siRNA target sequence for TOLLIP (NM_019009.2,440-458).
caggcgtggactctttcta

SEQ ID NO: 136835 - DNA, 19 bp, Homo sapiens
  siRNA target sequence for TOLLIP (NM_019009.2,443-461).
gcgtggactctttctatct

SEQ ID NO: 136836 - DNA, 19 bp, Homo sapiens
  siRNA target sequence for TRAPPC4 (NM_016146.1,260-278).
ggcgatttttagtgtgtat

SEQ ID NO: 136837 - DNA, 19 bp, Homo sapiens
  siRNA target sequence for TRAPPC4 (NM_016146.1,262-280).
cgatttttagtgtgtatgt

SEQ ID NO: 136838 - DNA, 19 bp, Homo sapiens
  siRNA target sequence for TRAPPC4 (NM_016146.1,292-310).
ctggcggcttgatttacca

SEQ ID NO: 136839 - DNA, 19 bp, Homo sapiens
  siRNA target sequence for TRAPPC4 (NM_016146.1,533-551).
cccggtgtccattcgattt

SEQ ID NO: 136840 - DNA, 19 bp, Homo sapiens
  siRNA target sequence for TRAPPC4 (NM_016146.1,561-579).
cgcctcacttctaatgaga

SEQ ID NO: 136841 - DNA, 19 bp, Homo sapiens
  siRNA target sequence for TRAPPC4 (NM_016146.1,568-586).
cttctaatgagaagcttat

SEQ ID NO: 136842 - DNA, 19 bp, Homo sapiens
  siRNA target sequence for TRAPPC4 (NM_016146.1,571-589).
ctaatgagaagcttatgct

SEQ ID NO: 136843 - DNA, 19 bp, Homo sapiens
  siRNA target sequence for TRAPPC4 (NM_016146.1,760-778).
ctcttctccgaaagattta

SEQ ID NO: 136844 - DNA, 19 bp, Homo sapiens
  siRNA target sequence for TRAPPC4 (NM_016146.1,765-783).
ctccgaaagatttatgaga

SEQ ID NO: 136845 - DNA, 19 bp, Homo sapiens
  siRNA target sequence for TRAPPC4 (NM_016146.1,767-785).
ccgaaagatttatgagatt

SEQ ID NO: 136846 - DNA, 19 bp, Homo sapiens
  siRNA target sequence for TRAPPC4 (NM_016146.1,799-817).
ccctcaagaatccattcta

SEQ ID NO: 136847 - DNA, 19 bp, Homo sapiens
  siRNA target sequence for TRAPPC4 (NM_016146.1,887-905).
gaaggctggaacttttgga

SEQ ID NO: 136848 - DNA, 19 bp, Homo sapiens
  siRNA target sequence for TRIM14 (NM_014788.2,274-292).
caacataacccagatagaa

SEQ ID NO: 136849 - DNA, 19 bp, Homo sapiens
  siRNA target sequence for TRIM14 (NM_014788.2,355-373).
cactgaactcagattacta

SEQ ID NO: 136850 - DNA, 19 bp, Homo sapiens
  siRNA target sequence for TRIM14 (NM_014788.2,629-647).
cccgtcaagagcttcttta

SEQ ID NO: 136851 - DNA, 19 bp, Homo sapiens
  siRNA target sequence for TRIM14 (NM_014788.2,630-648).
ccgtcaagagcttctttaa

SEQ ID NO: 136852 - DNA, 19 bp, Homo sapiens
  siRNA target sequence for TRIM14 (NM_014788.2,659-677).
gaagccgtggagagtacat

SEQ ID NO: 136853 - DNA, 19 bp, Homo sapiens
  siRNA target sequence for TRIM14 (NM_014788.2,663-681).
ccgtggagagtacattaca

SEQ ID NO: 136854 - DNA, 19 bp, Homo sapiens
  siRNA target sequence for TRIM14 (NM_014788.2,691-709).
ggacattcgccttaaggaa

SEQ ID NO: 136855 - DNA, 19 bp, Homo sapiens
  siRNA target sequence for TRIM14 (NM_014788.2,748-766).
gccaggtaccttgttgaaa

SEQ ID NO: 136856 - DNA, 19 bp, Homo sapiens
  siRNA target sequence for TRIM14 (NM_014788.2,780-798).
cagagcgatcgctattgct

SEQ ID NO: 136857 - DNA, 19 bp, Homo sapiens
  siRNA target sequence for TRIM14 (NM_014788.2,785-803).
cgatcgctattgctgaaat

SEQ ID NO: 136858 - DNA, 19 bp, Homo sapiens
  siRNA target sequence for TRIM14 (NM_014788.2,786-804).
gatcgctattgctgaaata

SEQ ID NO: 136859 - DNA, 19 bp, Homo sapiens
  siRNA target sequence for TRIP10 (NM_004240.1,318-336).
cctcagtgtccgtgtatgt

SEQ ID NO: 136860 - DNA, 19 bp, Homo sapiens
  siRNA target sequence for TRIP10 (NM_004240.1,321-339).
cagtgtccgtgtatgtctt

SEQ ID NO: 136861 - DNA, 19 bp, Homo sapiens
  siRNA target sequence for TRIP10 (NM_004240.1,347-365).
ccaagtactcacaagagat

SEQ ID NO: 136862 - DNA, 19 bp, Homo sapiens
  siRNA target sequence for TRIP10 (NM_004240.1,442-460).
gagaatagtaagcgtaaat

SEQ ID NO: 136863 - DNA, 19 bp, Homo sapiens
  siRNA target sequence for TRIP10 (NM_004240.1,508-526).
cggctagaccaggatatca

SEQ ID NO: 136864 - DNA, 19 bp, Homo sapiens
  siRNA target sequence for TRIP10 (NM_004240.1,509-527).
ggctagaccaggatatcaa

SEQ ID NO: 136865 - DNA, 19 bp, Homo sapiens
  siRNA target sequence for TRIP10 (NM_004240.1,663-681).
gatgccccagatattcgat

SEQ ID NO: 136866 - DNA, 19 bp, Homo sapiens
  siRNA target sequence for TRIP10 (NM_004240.1,668-686).
cccagatattcgataagct

SEQ ID NO: 136867 - DNA, 19 bp, Homo sapiens
  siRNA target sequence for TRIP10 (NM_004240.1,756-774).
ggaggtggtgcccataata

SEQ ID NO: 136868 - DNA, 19 bp, Homo sapiens
  siRNA target sequence for TRIP10 (NM_004240.1,828-846).
cgactcccacgtccttata

SEQ ID NO: 136869 - DNA, 19 bp, Homo sapiens
  siRNA target sequence for TRIP10 (NM_004240.1,1445-1463).
ccatttacacggagtttga

SEQ ID NO: 136870 - DNA, 19 bp, Homo sapiens
  siRNA target sequence for TRIP10 (NM_004240.1,1446-1464).
catttacacggagtttgat

SEQ ID NO: 136871 - DNA, 19 bp, Homo sapiens
  siRNA target sequence for TRIP10 (NM_004240.1,1509-1527).
ggccatctaccactttgaa

SEQ ID NO: 136872 - DNA, 19 bp, Homo sapiens
  siRNA target sequence for TRIP10 (NM_004240.1,1535-1553).
gcgagggcactatctctat

SEQ ID NO: 136873 - DNA, 19 bp, Homo sapiens
  siRNA target sequence for TRIP10 (NM_004240.1,1561-1579).
ggtgaagacctcagtctta

SEQ ID NO: 136874 - DNA, 19 bp, Homo sapiens
  siRNA target sequence for TRIP10 (NM_004240.1,1657-1675).
ctccgagtcacgctcaatt

SEQ ID NO: 136875 - DNA, 19 bp, Homo sapiens
  siRNA target sequence for TRIP15 (NM_004236.1,69-87).
ggaatactctgaagatagt

SEQ ID NO: 136876 - DNA, 19 bp, Homo sapiens
  siRNA target sequence for TRIP15 (NM_004236.1,70-88).
gaatactctgaagatagta

SEQ ID NO: 136877 - DNA, 19 bp, Homo sapiens
  siRNA target sequence for TRIP15 (NM_004236.1,86-104).
gtaactccgagccaaatgt

SEQ ID NO: 136878 - DNA, 19 bp, Homo sapiens
  siRNA target sequence for TRIP15 (NM_004236.1,151-169).
gacccaaaagcggcattaa

SEQ ID NO: 136879 - DNA, 19 bp, Homo sapiens
  siRNA target sequence for TRIP15 (NM_004236.1,163-181).
gcattaagcagtttccaaa

SEQ ID NO: 136880 - DNA, 19 bp, Homo sapiens
  siRNA target sequence for TRIP15 (NM_004236.1,173-191).
gtttccaaaaggttttgga

SEQ ID NO: 136881 - DNA, 19 bp, Homo sapiens
  siRNA target sequence for TRIP15 (NM_004236.1,218-236).
gatttaaagcactgaaaca

SEQ ID NO: 136882 - DNA, 19 bp, Homo sapiens
  siRNA target sequence for TRIP15 (NM_004236.1,226-244).
gcactgaaacaaatgatta

SEQ ID NO: 136883 - DNA, 19 bp, Homo sapiens
  siRNA target sequence for TRIP15 (NM_004236.1,252-270).
cttcaagttgacaaacttt

SEQ ID NO: 136884 - DNA, 19 bp, Homo sapiens
  siRNA target sequence for TRIP15 (NM_004236.1,294-312).
gcagctattgacctatatt

SEQ ID NO: 136885 - DNA, 19 bp, Homo sapiens
  siRNA target sequence for TRIP15 (NM_004236.1,313-331).
cggagtgcagtcacaagaa

SEQ ID NO: 136886 - DNA, 19 bp, Homo sapiens
  siRNA target sequence for TRIP15 (NM_004236.1,315-333).
gagtgcagtcacaagaaat

SEQ ID NO: 136887 - DNA, 19 bp, Homo sapiens
  siRNA target sequence for TRIP15 (NM_004236.1,348-366).
cattaattctattcttgat

SEQ ID NO: 136888 - DNA, 19 bp, Homo sapiens
  siRNA target sequence for TRIP15 (NM_004236.1,377-395).
cttctaaacagatggattt

SEQ ID NO: 136889 - DNA, 19 bp, Homo sapiens
  siRNA target sequence for TRIP15 (NM_004236.1,458-476).
ggtttaagacaaacacaaa

SEQ ID NO: 136890 - DNA, 19 bp, Homo sapiens
  siRNA target sequence for TRIP15 (NM_004236.1,467-485).
caaacacaaagcttggaaa

SEQ ID NO: 136891 - DNA, 19 bp, Homo sapiens
  siRNA target sequence for TRIP15 (NM_004236.1,546-564).
gtcgtgccagactgatgat

SEQ ID NO: 136892 - DNA, 19 bp, Homo sapiens
  siRNA target sequence for TRIP15 (NM_004236.1,586-604).
ggtacacagttattagaaa

SEQ ID NO: 136893 - DNA, 19 bp, Homo sapiens
  siRNA target sequence for TRIP15 (NM_004236.1,587-605).
gtacacagttattagaaat

SEQ ID NO: 136894 - DNA, 19 bp, Homo sapiens
  siRNA target sequence for TRIP15 (NM_004236.1,673-691).
cagtcacttcacatcaagt

SEQ ID NO: 136895 - DNA, 19 bp, Homo sapiens
  siRNA target sequence for TRIP15 (NM_004236.1,709-727).
ctgattatgggagttatca

SEQ ID NO: 136896 - DNA, 19 bp, Homo sapiens
  siRNA target sequence for TRIP15 (NM_004236.1,711-729).
gattatgggagttatcaga

SEQ ID NO: 136897 - DNA, 19 bp, Homo sapiens
  siRNA target sequence for TRIP15 (NM_004236.1,726-744).
cagagaatgtggtggtaaa

SEQ ID NO: 136898 - DNA, 19 bp, Homo sapiens
  siRNA target sequence for TRIP15 (NM_004236.1,801-819).
caagaattatgatgaatct

SEQ ID NO: 136899 - DNA, 19 bp, Homo sapiens
  siRNA target sequence for TRIP15 (NM_004236.1,830-848).
gacgaaccacttgcttaaa

SEQ ID NO: 136900 - DNA, 19 bp, Homo sapiens
  siRNA target sequence for TRIP15 (NM_004236.1,832-850).
cgaaccacttgcttaaaat

SEQ ID NO: 136901 - DNA, 19 bp, Homo sapiens
  siRNA target sequence for TRIP15 (NM_004236.1,833-851).
gaaccacttgcttaaaata

SEQ ID NO: 136902 - DNA, 19 bp, Homo sapiens
  siRNA target sequence for TRIP15 (NM_004236.1,871-889).
cttatgaaatcgggaataa

SEQ ID NO: 136903 - DNA, 19 bp, Homo sapiens
  siRNA target sequence for TRIP15 (NM_004236.1,881-899).
cgggaataaatccatttga

SEQ ID NO: 136904 - DNA, 19 bp, Homo sapiens
  siRNA target sequence for TRIP15 (NM_004236.1,907-925).
gaggccaagccgtacaaaa

SEQ ID NO: 136905 - DNA, 19 bp, Homo sapiens
  siRNA target sequence for TRIP15 (NM_004236.1,911-929).
ccaagccgtacaaaaatga

SEQ ID NO: 136906 - DNA, 19 bp, Homo sapiens
  siRNA target sequence for TRIP15 (NM_004236.1,912-930).
caagccgtacaaaaatgat

SEQ ID NO: 136907 - DNA, 19 bp, Homo sapiens
  siRNA target sequence for TRIP15 (NM_004236.1,943-961).
gcaatgacgaatttagtaa

SEQ ID NO: 136908 - DNA, 19 bp, Homo sapiens
  siRNA target sequence for TRIP15 (NM_004236.1,1029-1047).
ggatgatcctttcataaga

SEQ ID NO: 136909 - DNA, 19 bp, Homo sapiens
  siRNA target sequence for TRIP15 (NM_004236.1,1041-1059).
cataagagaacacattgaa

SEQ ID NO: 136910 - DNA, 19 bp, Homo sapiens
  siRNA target sequence for TRIP15 (NM_004236.1,1060-1078).
gagcttttgcgaaacatca

SEQ ID NO: 136911 - DNA, 19 bp, Homo sapiens
  siRNA target sequence for TRIP15 (NM_004236.1,1063-1081).
cttttgcgaaacatcagaa

SEQ ID NO: 136912 - DNA, 19 bp, Homo sapiens
  siRNA target sequence for TRIP15 (NM_004236.1,1068-1086).
gcgaaacatcagaacacaa

SEQ ID NO: 136913 - DNA, 19 bp, Homo sapiens
  siRNA target sequence for TRIP15 (NM_004236.1,1082-1100).
cacaagtgcttataaaatt

SEQ ID NO: 136914 - DNA, 19 bp, Homo sapiens
  siRNA target sequence for TRIP15 (NM_004236.1,1108-1126).
ccttacacaagaatacata

SEQ ID NO: 136915 - DNA, 19 bp, Homo sapiens
  siRNA target sequence for TRIP15 (NM_004236.1,1139-1157).
ctaaggagttaaacataga

SEQ ID NO: 136916 - DNA, 19 bp, Homo sapiens
  siRNA target sequence for TRIP15 (NM_004236.1,1182-1200).
ggtgcagtgcatattggat

SEQ ID NO: 136917 - DNA, 19 bp, Homo sapiens
  siRNA target sequence for TRIP15 (NM_004236.1,1183-1201).
gtgcagtgcatattggata

SEQ ID NO: 136918 - DNA, 19 bp, Homo sapiens
  siRNA target sequence for TRIP15 (NM_004236.1,1186-1204).
cagtgcatattggataaca

SEQ ID NO: 136919 - DNA, 19 bp, Homo sapiens
  siRNA target sequence for TRIP15 (NM_004236.1,1188-1206).
gtgcatattggataacact

SEQ ID NO: 136920 - DNA, 19 bp, Homo sapiens
  siRNA target sequence for TRIP15 (NM_004236.1,1191-1209).
catattggataacactatt

SEQ ID NO: 136921 - DNA, 19 bp, Homo sapiens
  siRNA target sequence for TRIP15 (NM_004236.1,1260-1278).
gaggggtggtgcacgatat

SEQ ID NO: 136922 - DNA, 19 bp, Homo sapiens
  siRNA target sequence for TRIP15 (NM_004236.1,1263-1281).
gggtggtgcacgatatact

SEQ ID NO: 136923 - DNA, 19 bp, Homo sapiens
  siRNA target sequence for TRIP15 (NM_004236.1,1273-1291).
cgatatactgcactagata

SEQ ID NO: 136924 - DNA, 19 bp, Homo sapiens
  siRNA target sequence for TRIP15 (NM_004236.1,1274-1292).
gatatactgcactagataa

SEQ ID NO: 136925 - DNA, 19 bp, Homo sapiens
  siRNA target sequence for TRIP15 (NM_004236.1,1320-1338).
ccaggctgtagtcagtaaa

SEQ ID NO: 136926 - DNA, 19 bp, Homo sapiens
  siRNA target sequence for TRIP6 (NM_003302.1,531-549).
cactccagcctcttacact

SEQ ID NO: 136927 - DNA, 19 bp, Homo sapiens
  siRNA target sequence for TRIP6 (NM_003302.1,575-593).
ccttccccgtgcaagtgaa

SEQ ID NO: 136928 - DNA, 19 bp, Homo sapiens
  siRNA target sequence for TRIP6 (NM_003302.1,976-994).
cacgtgggctgctttgtat

SEQ ID NO: 136929 - DNA, 19 bp, Homo sapiens
  siRNA target sequence for TRIP6 (NM_003302.1,978-996).
cgtgggctgctttgtatgt

SEQ ID NO: 136930 - DNA, 19 bp, Homo sapiens
  siRNA target sequence for TRIP6 (NM_003302.1,982-1000).
ggctgctttgtatgttcta

SEQ ID NO: 136931 - DNA, 19 bp, Homo sapiens
  siRNA target sequence for TRIP6 (NM_003302.1,1039-1057).
gtggagaggagggcatatt

SEQ ID NO: 136932 - DNA, 19 bp, Homo sapiens
  siRNA target sequence for TRIP6 (NM_003302.1,1242-1260).
ggactttcacaggaagttt

SEQ ID NO: 136933 - DNA, 19 bp, Homo sapiens
  siRNA target sequence for TRIP6 (NM_003302.1,1334-1352).
ctctggatcgaagttttca

SEQ ID NO: 136934 - DNA, 19 bp, Homo sapiens
  siRNA target sequence for TRIP6 (NM_003302.1,1336-1354).
ctggatcgaagttttcaca

SEQ ID NO: 136935 - DNA, 19 bp, Homo sapiens
  siRNA target sequence for TRIP6 (NM_003302.1,1338-1356).
ggatcgaagttttcacatt

SEQ ID NO: 136936 - DNA, 19 bp, Homo sapiens
  siRNA target sequence for TRIP6 (NM_003302.1,1424-1442).
cgctggatgggcacatctt

SEQ ID NO: 136937 - DNA, 19 bp, Homo sapiens
  siRNA target sequence for TTC1 (NM_003314.1,76-94).
gggttccagaggatctgtt

SEQ ID NO: 136938 - DNA, 19 bp, Homo sapiens
  siRNA target sequence for TTC1 (NM_003314.1,84-102).
gaggatctgttaaatggtt

SEQ ID NO: 136939 - DNA, 19 bp, Homo sapiens
  siRNA target sequence for TTC1 (NM_003314.1,99-117).
ggtttgaaggttacagata

SEQ ID NO: 136940 - DNA, 19 bp, Homo sapiens
  siRNA target sequence for TTC1 (NM_003314.1,281-299).
caaggttgagaacaaatct

SEQ ID NO: 136941 - DNA, 19 bp, Homo sapiens
  siRNA target sequence for TTC1 (NM_003314.1,324-342).
ctagatgaagaatacctaa

SEQ ID NO: 136942 - DNA, 19 bp, Homo sapiens
  siRNA target sequence for TTC1 (NM_003314.1,390-408).
gaagagagcactagactaa

SEQ ID NO: 136943 - DNA, 19 bp, Homo sapiens
  siRNA target sequence for TTC1 (NM_003314.1,506-524).
ggagaggtcgattctattt

SEQ ID NO: 136944 - DNA, 19 bp, Homo sapiens
  siRNA target sequence for TTC1 (NM_003314.1,509-527).
gaggtcgattctattttca

SEQ ID NO: 136945 - DNA, 19 bp, Homo sapiens
  siRNA target sequence for TTC1 (NM_003314.1,535-553).
ctgcagcaaggatgaaaca

SEQ ID NO: 136946 - DNA, 19 bp, Homo sapiens
  siRNA target sequence for TTC1 (NM_003314.1,597-615).
caattaaaccccagctata

SEQ ID NO: 136947 - DNA, 19 bp, Homo sapiens
  siRNA target sequence for TTC1 (NM_003314.1,610-628).
gctatatcagggcaatatt

SEQ ID NO: 136948 - DNA, 19 bp, Homo sapiens
  siRNA target sequence for TTC1 (NM_003314.1,629-647).
gaggagagcagagttgtat

SEQ ID NO: 136949 - DNA, 19 bp, Homo sapiens
  siRNA target sequence for TTC1 (NM_003314.1,672-690).
gccctggaagactataaat

SEQ ID NO: 136950 - DNA, 19 bp, Homo sapiens
  siRNA target sequence for TTC1 (NM_003314.1,674-692).
cctggaagactataaatct

SEQ ID NO: 136951 - DNA, 19 bp, Homo sapiens
  siRNA target sequence for TTC1 (NM_003314.1,675-693).
ctggaagactataaatcta

SEQ ID NO: 136952 - DNA, 19 bp, Homo sapiens
  siRNA target sequence for TTC1 (NM_003314.1,723-741).
gcaagagaagcttgtatga

SEQ ID NO: 136953 - DNA, 19 bp, Homo sapiens
  siRNA target sequence for TTC1 (NM_003314.1,727-745).
gagaagcttgtatgagatt

SEQ ID NO: 136954 - DNA, 19 bp, Homo sapiens
  siRNA target sequence for TTC1 (NM_003314.1,732-750).
gcttgtatgagattaccta

SEQ ID NO: 136955 - DNA, 19 bp, Homo sapiens
  siRNA target sequence for TTC1 (NM_003314.1,742-760).
gattacctaagcaaattga

SEQ ID NO: 136956 - DNA, 19 bp, Homo sapiens
  siRNA target sequence for TTC1 (NM_003314.1,818-836).
cttggttctccgacctttt

SEQ ID NO: 136957 - DNA, 19 bp, Homo sapiens
  siRNA target sequence for TTC1 (NM_003314.1,837-855).
gggctctccacggaaaatt

SEQ ID NO: 136958 - DNA, 19 bp, Homo sapiens
  siRNA target sequence for TTC1 (NM_003314.1,838-856).
ggctctccacggaaaattt

SEQ ID NO: 136959 - DNA, 19 bp, Homo sapiens
  siRNA target sequence for TTC1 (NM_003314.1,881-899).
cggctcgtactccatcaat

SEQ ID NO: 136960 - DNA, 19 bp, Homo sapiens
  siRNA target sequence for TTC1 (NM_003314.1,882-900).
ggctcgtactccatcaatt

SEQ ID NO: 136961 - DNA, 19 bp, Homo sapiens
  siRNA target sequence for TTC1 (NM_003314.1,883-901).
gctcgtactccatcaattt

SEQ ID NO: 136962 - DNA, 19 bp, Homo sapiens
  siRNA target sequence for TTC1 (NM_003314.1,886-904).
cgtactccatcaatttcgt

SEQ ID NO: 136963 - DNA, 19 bp, Homo sapiens
  siRNA target sequence for TTC1 (NM_003314.1,887-905).
gtactccatcaatttcgtt

SEQ ID NO: 136964 - DNA, 19 bp, Homo sapiens
  siRNA target sequence for TTC1 (NM_003314.1,892-910).
ccatcaatttcgttcaaaa

SEQ ID NO: 136965 - DNA, 19 bp, Homo sapiens
  siRNA target sequence for TTC1 (NM_003314.1,896-914).
caatttcgttcaaaatcca

SEQ ID NO: 136966 - DNA, 19 bp, Homo sapiens
  siRNA target sequence for TTC1 (NM_003314.1,902-920).
cgttcaaaatccaaataat

SEQ ID NO: 136967 - DNA, 19 bp, Homo sapiens
  siRNA target sequence for TWSG1 (NM_020648.3,134-152).
ctctagccatcctgatgtt

SEQ ID NO: 136968 - DNA, 19 bp, Homo sapiens
  siRNA target sequence for TWSG1 (NM_020648.3,169-187).
gaatcactgagctgtaaca

SEQ ID NO: 136969 - DNA, 19 bp, Homo sapiens
  siRNA target sequence for TWSG1 (NM_020648.3,199-217).
gctagtgatgtgagcaaat

SEQ ID NO: 136970 - DNA, 19 bp, Homo sapiens
  siRNA target sequence for TWSG1 (NM_020648.3,314-332).
gctgtgactgtgttggtat

SEQ ID NO: 136971 - DNA, 19 bp, Homo sapiens
  siRNA target sequence for TWSG1 (NM_020648.3,493-511).
catgagaatctggtttcat

SEQ ID NO: 136972 - DNA, 19 bp, Homo sapiens
  siRNA target sequence for TWSG1 (NM_020648.3,532-550).
ccacaccaccagaatgtgt

SEQ ID NO: 136973 - DNA, 19 bp, Homo sapiens
  siRNA target sequence for TWSG1 (NM_020648.3,549-567).
gtctgtccccagcaataat

SEQ ID NO: 136974 - DNA, 19 bp, Homo sapiens
  siRNA target sequence for TWSG1 (NM_020648.3,551-569).
ctgtccccagcaataatgt

SEQ ID NO: 136975 - DNA, 19 bp, Homo sapiens
  siRNA target sequence for TWSG1 (NM_020648.3,568-586).
gttcacgcgccttattcca

SEQ ID NO: 136976 - DNA, 19 bp, Homo sapiens
  siRNA target sequence for TWSG1 (NM_020648.3,713-731).
gcattggtccagaatgtat

SEQ ID NO: 136977 - DNA, 19 bp, Homo sapiens
  siRNA target sequence for TWSG1 (NM_020648.3,714-732).
cattggtccagaatgtatt

SEQ ID NO: 136978 - DNA, 19 bp, Homo sapiens
  siRNA target sequence for TWSG1 (NM_020648.3,718-736).
ggtccagaatgtattgact

SEQ ID NO: 136979 - DNA, 19 bp, Homo sapiens
  siRNA target sequence for TWSG1 (NM_020648.3,719-737).
gtccagaatgtattgacta

SEQ ID NO: 136980 - DNA, 19 bp, Homo sapiens
  siRNA target sequence for TWSG1 (NM_020648.3,728-746).
gtattgactatggtagtaa

SEQ ID NO: 136981 - DNA, 19 bp, Homo sapiens
  siRNA target sequence for TWSG1 (NM_020648.3,739-757).
ggtagtaaaactgtcaaat

SEQ ID NO: 136982 - DNA, 19 bp, Homo sapiens
  siRNA target sequence for USH1C (NM_005709.1,104-122).
gaaaagtggcccgagaatt

SEQ ID NO: 136983 - DNA, 19 bp, Homo sapiens
  siRNA target sequence for USH1C (NM_005709.1,116-134).
gagaattccggcataaggt

SEQ ID NO: 136984 - DNA, 19 bp, Homo sapiens
  siRNA target sequence for USH1C (NM_005709.1,123-141).
ccggcataaggtggatttt

SEQ ID NO: 136985 - DNA, 19 bp, Homo sapiens
  siRNA target sequence for USH1C (NM_005709.1,162-180).
gaaggactatctctatgat

SEQ ID NO: 136986 - DNA, 19 bp, Homo sapiens
  siRNA target sequence for USH1C (NM_005709.1,258-276).
ccgtctgcctctgtttgat

SEQ ID NO: 136987 - DNA, 19 bp, Homo sapiens
  siRNA target sequence for USH1C (NM_005709.1,492-510).
cgagatcgtccggatcaat

SEQ ID NO: 136988 - DNA, 19 bp, Homo sapiens
  siRNA target sequence for USH1C (NM_005709.1,498-516).
cgtccggatcaatggatat

SEQ ID NO: 136989 - DNA, 19 bp, Homo sapiens
  siRNA target sequence for USH1C (NM_005709.1,499-517).
gtccggatcaatggatatt

SEQ ID NO: 136990 - DNA, 19 bp, Homo sapiens
  siRNA target sequence for USH1C (NM_005709.1,544-562).
gtcatcaacctcattcgaa

SEQ ID NO: 136991 - DNA, 19 bp, Homo sapiens
  siRNA target sequence for USH1C (NM_005709.1,601-619).
ctgatccccgtgaaaagct

SEQ ID NO: 136992 - DNA, 19 bp, Homo sapiens
  siRNA target sequence for USH1C (NM_005709.1,632-650).
ccctcacttggcagtatgt

SEQ ID NO: 136993 - DNA, 19 bp, Homo sapiens
  siRNA target sequence for USH1C (NM_005709.1,700-718).
cctggaaatcgggaaaaca

SEQ ID NO: 136994 - DNA, 19 bp, Homo sapiens
  siRNA target sequence for USH1C (NM_005709.1,760-778).
cttggctgcagcatttcca

SEQ ID NO: 136995 - DNA, 19 bp, Homo sapiens
  siRNA target sequence for USH1C (NM_005709.1,1067-1085).
cgatggagtccaacaagat

SEQ ID NO: 136996 - DNA, 19 bp, Homo sapiens
  siRNA target sequence for USH1C (NM_005709.1,1243-1261).
cagctactcttgcctaaaa

SEQ ID NO: 136997 - DNA, 19 bp, Homo sapiens
  siRNA target sequence for USH1C (NM_005709.1,1246-1264).
ctactcttgcctaaaacca

SEQ ID NO: 136998 - DNA, 19 bp, Homo sapiens
  siRNA target sequence for USH1C (NM_005709.1,1295-1313).
gcaagccaaagtatgatca

SEQ ID NO: 136999 - DNA, 19 bp, Homo sapiens
  siRNA target sequence for USH1C (NM_005709.1,1402-1420).
ggctttgacccctactcta

SEQ ID NO: 137000 - DNA, 19 bp, Homo sapiens
  siRNA target sequence for USH1C (NM_005709.1,1456-1474).
cggctcctacgcatcaaga

SEQ ID NO: 137001 - DNA, 19 bp, Homo sapiens
  siRNA target sequence for USH1C (NM_005709.1,1457-1475).
ggctcctacgcatcaagaa

SEQ ID NO: 137002 - DNA, 19 bp, Homo sapiens
  siRNA target sequence for USH1C (NM_005709.1,1570-1588).
cggcatggtggcattgtga

SEQ ID NO: 137003 - DNA, 19 bp, Homo sapiens
  siRNA target sequence for USH1C (NM_005709.1,1807-1825).
ccccacctcgtgaacacaa

SEQ ID NO: 137004 - DNA, 19 bp, Homo sapiens
  siRNA target sequence for USH1C (NM_005709.1,1808-1826).
cccacctcgtgaacacaaa

SEQ ID NO: 137005 - DNA, 19 bp, Homo sapiens
  siRNA target sequence for USH1C (NM_005709.1,1876-1894).
ccttgggacctgaatctat

SEQ ID NO: 137006 - DNA, 19 bp, Homo sapiens
  siRNA target sequence for USH1C (NM_005709.1,1895-1913).
cacccaggaatctcaaact

SEQ ID NO: 137007 - DNA, 19 bp, Homo sapiens
  siRNA target sequence for VBP1 (NM_003372.3,346-364).
gcagatacagtattaaaga

SEQ ID NO: 137008 - DNA, 19 bp, Homo sapiens
  siRNA target sequence for VBP1 (NM_003372.3,373-391).
gaacagtaccagaagtata

SEQ ID NO: 137009 - DNA, 19 bp, Homo sapiens
  siRNA target sequence for VBP1 (NM_003372.3,403-421).
ctcaaccttgctcaaaaga

SEQ ID NO: 137010 - DNA, 19 bp, Homo sapiens
  siRNA target sequence for VBP1 (NM_003372.3,436-454).
ggtcagattcctgaaatta

SEQ ID NO: 137011 - DNA, 19 bp, Homo sapiens
  siRNA target sequence for VBP1 (NM_003372.3,529-547).
ctggcagataacctgtatt

SEQ ID NO: 137012 - DNA, 19 bp, Homo sapiens
  siRNA target sequence for VBP1 (NM_003372.3,532-550).
gcagataacctgtattgca

SEQ ID NO: 137013 - DNA, 19 bp, Homo sapiens
  siRNA target sequence for VBP1 (NM_003372.3,533-551).
cagataacctgtattgcaa

SEQ ID NO: 137014 - DNA, 19 bp, Homo sapiens
  siRNA target sequence for VBP1 (NM_003372.3,595-613).
gctaatgtaatgcttgaat

SEQ ID NO: 137015 - DNA, 19 bp, Homo sapiens
  siRNA target sequence for VBP1 (NM_003372.3,628-646).
gctcaggcattgttggaaa

SEQ ID NO: 137016 - DNA, 19 bp, Homo sapiens
  siRNA target sequence for VBP1 (NM_003372.3,631-649).
caggcattgttggaaaaga

SEQ ID NO: 137017 - DNA, 19 bp, Homo sapiens
  siRNA target sequence for VBP1 (NM_003372.3,697-715).
gactttcttcgagatcaat

SEQ ID NO: 137018 - DNA, 19 bp, Homo sapiens
  siRNA target sequence for VBP1 (NM_003372.3,699-717).
ctttcttcgagatcaattt

SEQ ID NO: 137019 - DNA, 19 bp, Homo sapiens
  siRNA target sequence for VBP1 (NM_003372.3,703-721).
cttcgagatcaatttacta

SEQ ID NO: 137020 - DNA, 19 bp, Homo sapiens
  siRNA target sequence for VBP1 (NM_003372.3,732-750).
caatatggccagggtttat

SEQ ID NO: 137021 - DNA, 19 bp, Homo sapiens
  siRNA target sequence for VBP1 (NM_003372.3,778-796).
gatgactctaccaagaaca

SEQ ID NO: 137022 - DNA, 19 bp, Homo sapiens
  siRNA target sequence for VPS26 (NM_004896.2,107-125).
ccaatttgtgagatcgata

SEQ ID NO: 137023 - DNA, 19 bp, Homo sapiens
  siRNA target sequence for VPS26 (NM_004896.2,108-126).
caatttgtgagatcgatat

SEQ ID NO: 137024 - DNA, 19 bp, Homo sapiens
  siRNA target sequence for VPS26 (NM_004896.2,114-132).
gtgagatcgatattgttct

SEQ ID NO: 137025 - DNA, 19 bp, Homo sapiens
  siRNA target sequence for VPS26 (NM_004896.2,116-134).
gagatcgatattgttctta

SEQ ID NO: 137026 - DNA, 19 bp, Homo sapiens
  siRNA target sequence for VPS26 (NM_004896.2,121-139).
cgatattgttcttaatgat

SEQ ID NO: 137027 - DNA, 19 bp, Homo sapiens
  siRNA target sequence for VPS26 (NM_004896.2,382-400).
gactcagagcagaagttat

SEQ ID NO: 137028 - DNA, 19 bp, Homo sapiens
  siRNA target sequence for VPS26 (NM_004896.2,457-475).
ccgcttgaggtattttctt

SEQ ID NO: 137029 - DNA, 19 bp, Homo sapiens
  siRNA target sequence for VPS26 (NM_004896.2,458-476).
cgcttgaggtattttctta

SEQ ID NO: 137030 - DNA, 19 bp, Homo sapiens
  siRNA target sequence for VPS26 (NM_004896.2,488-506).
gtgagaagactgacagatt

SEQ ID NO: 137031 - DNA, 19 bp, Homo sapiens
  siRNA target sequence for VPS26 (NM_004896.2,495-513).
gactgacagatttggtaaa

SEQ ID NO: 137032 - DNA, 19 bp, Homo sapiens
  siRNA target sequence for VPS26 (NM_004896.2,557-575).
gttaacaactctattaaga

SEQ ID NO: 137033 - DNA, 19 bp, Homo sapiens
  siRNA target sequence for VPS26 (NM_004896.2,583-601).
gggcattgaagattgtcta

SEQ ID NO: 137034 - DNA, 19 bp, Homo sapiens
  siRNA target sequence for VPS26 (NM_004896.2,593-611).
gattgtctacatatagaat

SEQ ID NO: 137035 - DNA, 19 bp, Homo sapiens
  siRNA target sequence for VPS26 (NM_004896.2,740-758).
cccagtaccacaacagaaa

SEQ ID NO: 137036 - DNA, 19 bp, Homo sapiens
  siRNA target sequence for VPS26 (NM_004896.2,765-783).
caatcgccaaatatgaaat

SEQ ID NO: 137037 - DNA, 19 bp, Homo sapiens
  siRNA target sequence for VPS26 (NM_004896.2,787-805).
ggatggtgcaccagtaaaa

SEQ ID NO: 137038 - DNA, 19 bp, Homo sapiens
  siRNA target sequence for VPS26 (NM_004896.2,797-815).
ccagtaaaaggtgaatcaa

SEQ ID NO: 137039 - DNA, 19 bp, Homo sapiens
  siRNA target sequence for VPS26 (NM_004896.2,806-824).
ggtgaatcaattccaataa

SEQ ID NO: 137040 - DNA, 19 bp, Homo sapiens
  siRNA target sequence for VPS26 (NM_004896.2,847-865).
cccaactccaacaatgaga

SEQ ID NO: 137041 - DNA, 19 bp, Homo sapiens
  siRNA target sequence for VPS26 (NM_004896.2,885-903).
cagtaaggtactttttgaa

SEQ ID NO: 137042 - DNA, 19 bp, Homo sapiens
  siRNA target sequence for VPS26 (NM_004896.2,1043-1061).
gccgaacagcctgaaatgt

SEQ ID NO: 137043 - DNA, 19 bp, Homo sapiens
  siRNA target sequence for VPS35 (NM_018206.2,120-138).
gtccagtcattccaaatga

SEQ ID NO: 137044 - DNA, 19 bp, Homo sapiens
  siRNA target sequence for VPS35 (NM_018206.2,152-170).
caaaaacaagcttatggat

SEQ ID NO: 137045 - DNA, 19 bp, Homo sapiens
  siRNA target sequence for VPS35 (NM_018206.2,161-179).
gcttatggatgctctaaaa

SEQ ID NO: 137046 - DNA, 19 bp, Homo sapiens
  siRNA target sequence for VPS35 (NM_018206.2,198-216).
ggtgaactccggacttcta

SEQ ID NO: 137047 - DNA, 19 bp, Homo sapiens
  siRNA target sequence for VPS35 (NM_018206.2,199-217).
gtgaactccggacttctat

SEQ ID NO: 137048 - DNA, 19 bp, Homo sapiens
  siRNA target sequence for VPS35 (NM_018206.2,204-222).
ctccggacttctatgttat

SEQ ID NO: 137049 - DNA, 19 bp, Homo sapiens
  siRNA target sequence for VPS35 (NM_018206.2,206-224).
ccggacttctatgttatca

SEQ ID NO: 137050 - DNA, 19 bp, Homo sapiens
  siRNA target sequence for VPS35 (NM_018206.2,230-248).
gagttactatgaactttat

SEQ ID NO: 137051 - DNA, 19 bp, Homo sapiens
  siRNA target sequence for VPS35 (NM_018206.2,232-250).
gttactatgaactttatat

SEQ ID NO: 137052 - DNA, 19 bp, Homo sapiens
  siRNA target sequence for VPS35 (NM_018206.2,259-277).
ctgatgaactgcactactt

SEQ ID NO: 137053 - DNA, 19 bp, Homo sapiens
  siRNA target sequence for VPS35 (NM_018206.2,284-302).
ctacctgacagatgagttt

SEQ ID NO: 137054 - DNA, 19 bp, Homo sapiens
  siRNA target sequence for VPS35 (NM_018206.2,313-331).
ggaaagtggcagatctcta

SEQ ID NO: 137055 - DNA, 19 bp, Homo sapiens
  siRNA target sequence for VPS35 (NM_018206.2,329-347).
ctacgaacttgtacagtat

SEQ ID NO: 137056 - DNA, 19 bp, Homo sapiens
  siRNA target sequence for VPS35 (NM_018206.2,342-360).
cagtatgctggaaacatta

SEQ ID NO: 137057 - DNA, 19 bp, Homo sapiens
  siRNA target sequence for VPS35 (NM_018206.2,364-382).
caaggctttaccttttgat

SEQ ID NO: 137058 - DNA, 19 bp, Homo sapiens
  siRNA target sequence for VPS35 (NM_018206.2,387-405).
gttggagttgtatatgtca

SEQ ID NO: 137059 - DNA, 19 bp, Homo sapiens
  siRNA target sequence for VPS35 (NM_018206.2,393-411).
gttgtatatgtcaagtcat

SEQ ID NO: 137060 - DNA, 19 bp, Homo sapiens
  siRNA target sequence for VPS35 (NM_018206.2,415-433).
ctcagtccaggaaggatat

SEQ ID NO: 137061 - DNA, 19 bp, Homo sapiens
  siRNA target sequence for VPS35 (NM_018206.2,481-499).
ggggtctgtttcttcgaaa

SEQ ID NO: 137062 - DNA, 19 bp, Homo sapiens
  siRNA target sequence for VPS35 (NM_018206.2,482-500).
gggtctgtttcttcgaaat

SEQ ID NO: 137063 - DNA, 19 bp, Homo sapiens
  siRNA target sequence for VPS35 (NM_018206.2,484-502).
gtctgtttcttcgaaatta

SEQ ID NO: 137064 - DNA, 19 bp, Homo sapiens
  siRNA target sequence for VPS35 (NM_018206.2,512-530).
gtgtaccagaaatatctta

SEQ ID NO: 137065 - DNA, 19 bp, Homo sapiens
  siRNA target sequence for VPS35 (NM_018206.2,647-665).
gggacatagccgagataga

SEQ ID NO: 137066 - DNA, 19 bp, Homo sapiens
  siRNA target sequence for VPS35 (NM_018206.2,649-667).
gacatagccgagatagaga

SEQ ID NO: 137067 - DNA, 19 bp, Homo sapiens
  siRNA target sequence for VPS35 (NM_018206.2,761-779).
caaacagattgttttgact

SEQ ID NO: 137068 - DNA, 19 bp, Homo sapiens
  siRNA target sequence for WWOX (NM_130792.1,566-584).
caagcatacccgtgtagaa

SEQ ID NO: 137069 - DNA, 19 bp, Homo sapiens
  siRNA target sequence for WWP1 (NM_007013.3,416-434).
gtagatggagaaattacga

SEQ ID NO: 137070 - DNA, 19 bp, Homo sapiens
  siRNA target sequence for WWP1 (NM_007013.3,419-437).
gatggagaaattacgaaaa

SEQ ID NO: 137071 - DNA, 19 bp, Homo sapiens
  siRNA target sequence for WWP1 (NM_007013.3,563-581).
ggaaaagcaacgatagatt

SEQ ID NO: 137072 - DNA, 19 bp, Homo sapiens
  siRNA target sequence for WWP1 (NM_007013.3,564-582).
gaaaagcaacgatagattt

SEQ ID NO: 137073 - DNA, 19 bp, Homo sapiens
  siRNA target sequence for WWP1 (NM_007013.3,1522-1540).
ggaatctgtccgaaatttt

SEQ ID NO: 137074 - DNA, 19 bp, Homo sapiens
  siRNA target sequence for WWP1 (NM_007013.3,1527-1545).
ctgtccgaaattttgaaca

SEQ ID NO: 137075 - DNA, 19 bp, Homo sapiens
  siRNA target sequence for WWP1 (NM_007013.3,1554-1572).
ctcagcggaaccaattgca

SEQ ID NO: 137076 - DNA, 19 bp, Homo sapiens
  siRNA target sequence for XAB2 (NM_020196.1,93-111).
ccctatgaggaggaaatca

SEQ ID NO: 137077 - DNA, 19 bp, Homo sapiens
  siRNA target sequence for XAB2 (NM_020196.1,172-190).
cgaagcccaggctcaatca

SEQ ID NO: 137078 - DNA, 19 bp, Homo sapiens
  siRNA target sequence for XAB2 (NM_020196.1,181-199).
ggctcaatcagctatacga

SEQ ID NO: 137079 - DNA, 19 bp, Homo sapiens
  siRNA target sequence for XAB2 (NM_020196.1,289-307).
ccgaccctgcctatgaaga

SEQ ID NO: 137080 - DNA, 19 bp, Homo sapiens
  siRNA target sequence for XAB2 (NM_020196.1,290-308).
cgaccctgcctatgaagat

SEQ ID NO: 137081 - DNA, 19 bp, Homo sapiens
  siRNA target sequence for XAB2 (NM_020196.1,321-339).
catgagagggcctttgtgt

SEQ ID NO: 137082 - DNA, 19 bp, Homo sapiens
  siRNA target sequence for XAB2 (NM_020196.1,355-373).
ctcgtctgtggctagatta

SEQ ID NO: 137083 - DNA, 19 bp, Homo sapiens
  siRNA target sequence for XAB2 (NM_020196.1,357-375).
cgtctgtggctagattact

SEQ ID NO: 137084 - DNA, 19 bp, Homo sapiens
  siRNA target sequence for XAB2 (NM_020196.1,452-470).
cacgcagcactctcgaatt

SEQ ID NO: 137085 - DNA, 19 bp, Homo sapiens
  siRNA target sequence for XAB2 (NM_020196.1,466-484).
gaatttggcccctgtatct

SEQ ID NO: 137086 - DNA, 19 bp, Homo sapiens
  siRNA target sequence for XAB2 (NM_020196.1,560-578).
gagtgcagaggagtacatt

SEQ ID NO: 137087 - DNA, 19 bp, Homo sapiens
  siRNA target sequence for XAB2 (NM_020196.1,805-823).
gttctctcgccgactacta

SEQ ID NO: 137088 - DNA, 19 bp, Homo sapiens
  siRNA target sequence for XAB2 (NM_020196.1,808-826).
ctctcgccgactactacat

SEQ ID NO: 137089 - DNA, 19 bp, Homo sapiens
  siRNA target sequence for XAB2 (NM_020196.1,940-958).
gcatgatcgctgcaaagat

SEQ ID NO: 137090 - DNA, 19 bp, Homo sapiens
  siRNA target sequence for XAB2 (NM_020196.1,1219-1237).
ggtggcgtttgccaagttt

SEQ ID NO: 137091 - DNA, 19 bp, Homo sapiens
  siRNA target sequence for XAB2 (NM_020196.1,1458-1476).
cagaaccgcgtgtacaagt

SEQ ID NO: 137092 - DNA, 19 bp, Homo sapiens
  siRNA target sequence for XAB2 (NM_020196.1,1659-1677).
ggcatctcgctgttcaagt

SEQ ID NO: 137093 - DNA, 19 bp, Homo sapiens
  siRNA target sequence for XAB2 (NM_020196.1,1705-1723).
cctacctgaccaaattcat

SEQ ID NO: 137094 - DNA, 19 bp, Homo sapiens
  siRNA target sequence for XAB2 (NM_020196.1,1706-1724).
ctacctgaccaaattcatt

SEQ ID NO: 137095 - DNA, 19 bp, Homo sapiens
  siRNA target sequence for XAB2 (NM_020196.1,1753-1771).
gggcacgggacctgtttga

SEQ ID NO: 137096 - DNA, 19 bp, Homo sapiens
  siRNA target sequence for XAB2 (NM_020196.1,1754-1772).
ggcacgggacctgtttgaa

SEQ ID NO: 137097 - DNA, 19 bp, Homo sapiens
  siRNA target sequence for XAB2 (NM_020196.1,1756-1774).
cacgggacctgtttgaaca

SEQ ID NO: 137098 - DNA, 19 bp, Homo sapiens
  siRNA target sequence for YAP1 (NM_006106.2,564-582).
ccgacaggccagtactgat

SEQ ID NO: 137099 - DNA, 19 bp, Homo sapiens
  siRNA target sequence for YAP1 (NM_006106.2,645-663).
gcagttgggagctgtttct

SEQ ID NO: 137100 - DNA, 19 bp, Homo sapiens
  siRNA target sequence for YAP1 (NM_006106.2,724-742).
catcttcgacagtcttctt

SEQ ID NO: 137101 - DNA, 19 bp, Homo sapiens
  siRNA target sequence for YAP1 (NM_006106.2,800-818).
ctggtcagagatacttctt

SEQ ID NO: 137102 - DNA, 19 bp, Homo sapiens
  siRNA target sequence for YAP1 (NM_006106.2,823-841).
cacatcgatcagacaacaa

SEQ ID NO: 137103 - DNA, 19 bp, Homo sapiens
  siRNA target sequence for YAP1 (NM_006106.2,1141-1159).
ctgcgtagccagttaccaa

SEQ ID NO: 137104 - DNA, 19 bp, Homo sapiens
  siRNA target sequence for YAP1 (NM_006106.2,1170-1188).
ggatggtgggactcaaaat

SEQ ID NO: 137105 - DNA, 19 bp, Homo sapiens
  siRNA target sequence for YAP1 (NM_006106.2,1202-1220).
ccgggatgtctcaggaatt

SEQ ID NO: 137106 - DNA, 19 bp, Homo sapiens
  siRNA target sequence for YAP1 (NM_006106.2,1204-1222).
gggatgtctcaggaattga

SEQ ID NO: 137107 - DNA, 19 bp, Homo sapiens
  siRNA target sequence for YAP1 (NM_006106.2,1206-1224).
gatgtctcaggaattgaga

SEQ ID NO: 137108 - DNA, 19 bp, Homo sapiens
  siRNA target sequence for YAP1 (NM_006106.2,1365-1383).
gatggatacaggtgatact

SEQ ID NO: 137109 - DNA, 19 bp, Homo sapiens
  siRNA target sequence for YAP1 (NM_006106.2,1375-1393).
ggtgatactatcaaccaaa

SEQ ID NO: 137110 - DNA, 19 bp, Homo sapiens
  siRNA target sequence for YAP1 (NM_006106.2,1533-1551).
gagttctgacatccttaat

SEQ ID NO: 137111 - DNA, 19 bp, Homo sapiens
  siRNA target sequence for YAP1 (NM_006106.2,1571-1589).
ctgccaccaagctagataa

SEQ ID NO: 137112 - DNA, 19 bp, Homo sapiens
  siRNA target sequence for YAP1 (NM_006106.2,1581-1599).
gctagataaagaaagcttt

SEQ ID NO: 137113 - DNA, 19 bp, Homo sapiens
  siRNA target sequence for ZBTB4 (NM_020899.2,423-441).
gcttcaagtcccttcttca

SEQ ID NO: 137114 - DNA, 19 bp, Homo sapiens
  siRNA target sequence for ZBTB4 (NM_020899.2,1283-1301).
gtacccctgccgctattgt

SEQ ID NO: 137115 - DNA, 19 bp, Homo sapiens
  siRNA target sequence for ZBTB4 (NM_020899.2,1293-1311).
cgctattgtgagaaagtgt

SEQ ID NO: 137116 - DNA, 19 bp, Homo sapiens
  siRNA target sequence for ZBTB4 (NM_020899.2,1294-1312).
gctattgtgagaaagtgtt

SEQ ID NO: 137117 - DNA, 19 bp, Homo sapiens
  siRNA target sequence for ZBTB4 (NM_020899.2,1387-1405).
gggagacctttgtcactta

SEQ ID NO: 137118 - DNA, 19 bp, Homo sapiens
  siRNA target sequence for ZBTB4 (NM_020899.2,1389-1407).
gagacctttgtcacttact

SEQ ID NO: 137119 - DNA, 19 bp, Homo sapiens
  siRNA target sequence for ZBTB4 (NM_020899.2,1782-1800).
caagctgcctcggttatca

SEQ ID NO: 137120 - DNA, 19 bp, Homo sapiens
  siRNA target sequence for ZBTB4 (NM_020899.2,1786-1804).
ctgcctcggttatcactta

SEQ ID NO: 137121 - DNA, 19 bp, Homo sapiens
  siRNA target sequence for ZBTB4 (NM_020899.2,1788-1806).
gcctcggttatcacttaca

SEQ ID NO: 137122 - DNA, 19 bp, Homo sapiens
  siRNA target sequence for ZBTB4 (NM_020899.2,1790-1808).
ctcggttatcacttacact

SEQ ID NO: 137123 - DNA, 19 bp, Homo sapiens
  siRNA target sequence for ZBTB4 (NM_020899.2,1814-1832).
cccgaggccacccaagaaa

SEQ ID NO: 137124 - DNA, 19 bp, Homo sapiens
  siRNA target sequence for ZBTB4 (NM_020899.2,2262-2280).
ctctggaggccctactact

SEQ ID NO: 137125 - DNA, 19 bp, Homo sapiens
  siRNA target sequence for ZBTB4 (NM_020899.2,2476-2494).
ccttcaccaccctgagaaa

SEQ ID NO: 137126 - DNA, 19 bp, Homo sapiens
  siRNA target sequence for ZBTB5 (NM_014872.1,260-278).
gtgattgtgtcattgtagt

SEQ ID NO: 137127 - DNA, 19 bp, Homo sapiens
  siRNA target sequence for ZBTB5 (NM_014872.1,277-295).
gtggggaatagacacttta

SEQ ID NO: 137128 - DNA, 19 bp, Homo sapiens
  siRNA target sequence for ZBTB5 (NM_014872.1,279-297).
ggggaatagacactttaaa

SEQ ID NO: 137129 - DNA, 19 bp, Homo sapiens
  siRNA target sequence for ZBTB5 (NM_014872.1,422-440).
ctgcactgattgacatgat

SEQ ID NO: 137130 - DNA, 19 bp, Homo sapiens
  siRNA target sequence for ZBTB5 (NM_014872.1,424-442).
gcactgattgacatgatgt

SEQ ID NO: 137131 - DNA, 19 bp, Homo sapiens
  siRNA target sequence for ZBTB5 (NM_014872.1,460-478).
ctgggggagagcaatgtaa

SEQ ID NO: 137132 - DNA, 19 bp, Homo sapiens
  siRNA target sequence for ZBTB5 (NM_014872.1,508-526).
catttgaactctgttgtta

SEQ ID NO: 137133 - DNA, 19 bp, Homo sapiens
  siRNA target sequence for ZBTB5 (NM_014872.1,518-536).
ctgttgttaaggcatgtaa

SEQ ID NO: 137134 - DNA, 19 bp, Homo sapiens
  siRNA target sequence for ZBTB5 (NM_014872.1,604-622).
cgcatgcagcgctccttta

SEQ ID NO: 137135 - DNA, 19 bp, Homo sapiens
  siRNA target sequence for ZBTB5 (NM_014872.1,605-623).
gcatgcagcgctcctttat

SEQ ID NO: 137136 - DNA, 19 bp, Homo sapiens
  siRNA target sequence for ZBTB5 (NM_014872.1,609-627).
gcagcgctcctttatgcta

SEQ ID NO: 137137 - DNA, 19 bp, Homo sapiens
  siRNA target sequence for ZBTB5 (NM_014872.1,649-667).
gtgagctcagccctcaatt

SEQ ID NO: 137138 - DNA, 19 bp, Homo sapiens
  siRNA target sequence for ZBTB5 (NM_014872.1,745-763).
cccatgagacgccttcata

SEQ ID NO: 137139 - DNA, 19 bp, Homo sapiens
  siRNA target sequence for ZBTB5 (NM_014872.1,746-764).
ccatgagacgccttcataa

SEQ ID NO: 137140 - DNA, 19 bp, Homo sapiens
  siRNA target sequence for ZBTB5 (NM_014872.1,893-911).
cagattctctgaaaattgt

SEQ ID NO: 137141 - DNA, 19 bp, Homo sapiens
  siRNA target sequence for ZBTB5 (NM_014872.1,949-967).
gaagatagtgcgatcatgt

SEQ ID NO: 137142 - DNA, 19 bp, Homo sapiens
  siRNA target sequence for ZBTB5 (NM_014872.1,956-974).
gtgcgatcatgtttgatca

SEQ ID NO: 137143 - DNA, 19 bp, Homo sapiens
  siRNA target sequence for ZBTB5 (NM_014872.1,1006-1024).
cccagccagtctgataaca

SEQ ID NO: 137144 - DNA, 19 bp, Homo sapiens
  siRNA target sequence for ZBTB5 (NM_014872.1,1071-1089).
ggttgagactagttttgat

SEQ ID NO: 137145 - DNA, 19 bp, Homo sapiens
  siRNA target sequence for ZBTB5 (NM_014872.1,1275-1293).
ggtcagtgccgagaagata

SEQ ID NO: 137146 - DNA, 19 bp, Homo sapiens
  siRNA target sequence for ZBTB5 (NM_014872.1,1346-1364).
cagacagggtaggtgatat

SEQ ID NO: 137147 - DNA, 19 bp, Homo sapiens
  siRNA target sequence for ZBTB5 (NM_014872.1,1374-1392).
ggaagtcacaaataaccta

SEQ ID NO: 137148 - DNA, 19 bp, Homo sapiens
  siRNA target sequence for ZBTB5 (NM_014872.1,1382-1400).
caaataacctagagcataa

SEQ ID NO: 137149 - DNA, 19 bp, Homo sapiens
  siRNA target sequence for ZBTB5 (NM_014872.1,1395-1413).
gcataagtccacttttagt

SEQ ID NO: 137150 - DNA, 19 bp, Homo sapiens
  siRNA target sequence for ZBTB5 (NM_014872.1,1396-1414).
cataagtccacttttagta

SEQ ID NO: 137151 - DNA, 19 bp, Homo sapiens
  siRNA target sequence for ZBTB5 (NM_014872.1,1403-1421).
ccacttttagtatttcgaa

SEQ ID NO: 137152 - DNA, 19 bp, Homo sapiens
  siRNA target sequence for ZBTB5 (NM_014872.1,1766-1784).
ggggaggagccagtaactt

SEQ ID NO: 137153 - DNA, 19 bp, Homo sapiens
  siRNA target sequence for ZBTB5 (NM_014872.1,1859-1877).
ctaccagttctcagctaat

SEQ ID NO: 137154 - DNA, 19 bp, Homo sapiens
  siRNA target sequence for ZBTB5 (NM_014872.1,1971-1989).
gtgcaagaaggccttatca

SEQ ID NO: 137155 - DNA, 19 bp, Homo sapiens
  siRNA target sequence for ZBTB5 (NM_014872.1,1973-1991).
gcaagaaggccttatcaga

SEQ ID NO: 137156 - DNA, 19 bp, Homo sapiens
  siRNA target sequence for ZBTB5 (NM_014872.1,2020-2038).
cgcaagtatgcctgcaaaa

SEQ ID NO: 137157 - DNA, 19 bp, Homo sapiens
  siRNA target sequence for ZBTB5 (NM_014872.1,2021-2039).
gcaagtatgcctgcaaaat

SEQ ID NO: 137158 - DNA, 19 bp, Homo sapiens
  siRNA target sequence for ZBTB5 (NM_014872.1,2143-2161).
cagtccagccacctgtata

SEQ ID NO: 137159 - DNA, 19 bp, Homo sapiens
  siRNA target sequence for ZBTB5 (NM_014872.1,2157-2175).
gtataagcactcaaagact

SEQ ID NO: 137160 - DNA, 19 bp, Homo sapiens
  siRNA target sequence for ZBTB5 (NM_014872.1,2187-2205).
ctggcagagcagcaatctt

SEQ ID NO: 137161 - DNA, 19 bp, Homo sapiens
  siRNA target sequence for ZBTB8 (NM_144621.2,93-111).
ggagatgcaatcctattat

SEQ ID NO: 137162 - DNA, 19 bp, Homo sapiens
  siRNA target sequence for ZBTB8 (NM_144621.2,178-196).
gtggaagggcggatcttca

SEQ ID NO: 137163 - DNA, 19 bp, Homo sapiens
  siRNA target sequence for ZBTB8 (NM_144621.2,200-218).
cccacaggaacattttgtt

SEQ ID NO: 137164 - DNA, 19 bp, Homo sapiens
  siRNA target sequence for ZBTB8 (NM_144621.2,241-259).
gccctgctcattcactata

SEQ ID NO: 137165 - DNA, 19 bp, Homo sapiens
  siRNA target sequence for ZBTB8 (NM_144621.2,426-444).
cttctgcaagacatacatt

SEQ ID NO: 137166 - DNA, 19 bp, Homo sapiens
  siRNA target sequence for ZBTB8 (NM_144621.2,625-643).
ccagccgagggagaaaaga

SEQ ID NO: 137167 - DNA, 19 bp, Homo sapiens
  siRNA target sequence for ZBTB8 (NM_144621.2,973-991).
gatgcagaccatcactttt

SEQ ID NO: 137168 - DNA, 19 bp, Homo sapiens
  siRNA target sequence for ZBTB8 (NM_144621.2,976-994).
gcagaccatcacttttcta

SEQ ID NO: 137169 - DNA, 19 bp, Homo sapiens
  siRNA target sequence for ZBTB8 (NM_144621.2,1021-1039).
gcaggagtagccatgagtt

SEQ ID NO: 137170 - DNA, 19 bp, Homo sapiens
  siRNA target sequence for ZBTB8 (NM_144621.2,1129-1147).
ccttacactgccaaacaga

SEQ ID NO: 137171 - DNA, 19 bp, Homo sapiens
  siRNA target sequence for ZBTB8 (NM_144621.2,1268-1286).
gatccaaccgtccaatcat

SEQ ID NO: 137172 - DNA, 19 bp, Homo sapiens
  siRNA target sequence for ZBTB8 (NM_144621.2,1373-1391).
cagacacacccgatgatga

SEQ ID NO: 137173 - DNA, 19 bp, Homo sapiens
  siRNA target sequence for ZBTB8 (NM_144621.2,1377-1395).
cacacccgatgatgatgat

SEQ ID NO: 137174 - DNA, 19 bp, Homo sapiens
  siRNA target sequence for ZBTB8 (NM_144621.2,1419-1437).
cttggtggaggcttcatct

SEQ ID NO: 137175 - DNA, 19 bp, Homo sapiens
  siRNA target sequence for ZBTB8 (NM_144621.2,1464-1482).
caatgactggccaatctat

SEQ ID NO: 137176 - DNA, 19 bp, Homo sapiens
  siRNA target sequence for ZBTB8 (NM_144621.2,1490-1508).
cggagatcgggtctcatta

SEQ ID NO: 137177 - DNA, 19 bp, Homo sapiens
  siRNA target sequence for ZFP67 (NM_015872.1,231-249).
gacctgattgggattccat

SEQ ID NO: 137178 - DNA, 19 bp, Homo sapiens
  siRNA target sequence for ZNF-kaiso (NM_006777.2,23-41).
ctgctacagacattcagta

SEQ ID NO: 137179 - DNA, 19 bp, Homo sapiens
  siRNA target sequence for ZNF-kaiso (NM_006777.2,93-111).
ctgtgatgttaccgttatt

SEQ ID NO: 137180 - DNA, 19 bp, Homo sapiens
  siRNA target sequence for ZNF-kaiso (NM_006777.2,95-113).
gtgatgttaccgttattgt

SEQ ID NO: 137181 - DNA, 19 bp, Homo sapiens
  siRNA target sequence for ZNF-kaiso (NM_006777.2,129-147).
ccgggctcacaagaatatt

SEQ ID NO: 137182 - DNA, 19 bp, Homo sapiens
  siRNA target sequence for ZNF-kaiso (NM_006777.2,133-151).
gctcacaagaatattcttt

SEQ ID NO: 137183 - DNA, 19 bp, Homo sapiens
  siRNA target sequence for ZNF-kaiso (NM_006777.2,199-217).
gttgttgaactgagcttta

SEQ ID NO: 137184 - DNA, 19 bp, Homo sapiens
  siRNA target sequence for ZNF-kaiso (NM_006777.2,271-289).
gttcgtgttagatcagatt

SEQ ID NO: 137185 - DNA, 19 bp, Homo sapiens
  siRNA target sequence for ZNF-kaiso (NM_006777.2,275-293).
gtgttagatcagatttgct

SEQ ID NO: 137186 - DNA, 19 bp, Homo sapiens
  siRNA target sequence for ZNF-kaiso (NM_006777.2,383-401).
gtacagcgcaggatggtaa

SEQ ID NO: 137187 - DNA, 19 bp, Homo sapiens
  siRNA target sequence for ZNF-kaiso (NM_006777.2,408-426).
gcctttacctcctgattct

SEQ ID NO: 137188 - DNA, 19 bp, Homo sapiens
  siRNA target sequence for ZNF-kaiso (NM_006777.2,427-445).
ggtgacaagaaccttgtaa

SEQ ID NO: 137189 - DNA, 19 bp, Homo sapiens
  siRNA target sequence for ZNF-kaiso (NM_006777.2,428-446).
gtgacaagaaccttgtaat

SEQ ID NO: 137190 - DNA, 19 bp, Homo sapiens
  siRNA target sequence for ZNF-kaiso (NM_006777.2,472-490).
gataatggggctactataa

SEQ ID NO: 137191 - DNA, 19 bp, Homo sapiens
  siRNA target sequence for ZNF-kaiso (NM_006777.2,494-512).
ctattataacagagtcttt

SEQ ID NO: 137192 - DNA, 19 bp, Homo sapiens
  siRNA target sequence for ZNF-kaiso (NM_006777.2,515-533).
cattatctgccgaagatta

SEQ ID NO: 137193 - DNA, 19 bp, Homo sapiens
  siRNA target sequence for ZNF-kaiso (NM_006777.2,523-541).
gccgaagattatgaaatga

SEQ ID NO: 137194 - DNA, 19 bp, Homo sapiens
  siRNA target sequence for ZNF-kaiso (NM_006777.2,524-542).
ccgaagattatgaaatgaa

SEQ ID NO: 137195 - DNA, 19 bp, Homo sapiens
  siRNA target sequence for ZNF-kaiso (NM_006777.2,549-567).
cattgttaccgattctgat

SEQ ID NO: 137196 - DNA, 19 bp, Homo sapiens
  siRNA target sequence for ZNF-kaiso (NM_006777.2,615-633).
ggagactttgccgagtaat

SEQ ID NO: 137197 - DNA, 19 bp, Homo sapiens
  siRNA target sequence for ZNF-kaiso (NM_006777.2,665-683).
gccctgttgctatttcaga

SEQ ID NO: 137198 - DNA, 19 bp, Homo sapiens
  siRNA target sequence for ZNF-kaiso (NM_006777.2,688-706).
gcacctagtgctagcaata

SEQ ID NO: 137199 - DNA, 19 bp, Homo sapiens
  siRNA target sequence for ZNF-kaiso (NM_006777.2,691-709).
cctagtgctagcaataact

SEQ ID NO: 137200 - DNA, 19 bp, Homo sapiens
  siRNA target sequence for ZNF-kaiso (NM_006777.2,823-841).
catctgactcccaatatta

SEQ ID NO: 137201 - DNA, 19 bp, Homo sapiens
  siRNA target sequence for ZNF-kaiso (NM_006777.2,887-905).
cttcacttccaaatcatat

SEQ ID NO: 137202 - DNA, 19 bp, Homo sapiens
  siRNA target sequence for ZNF-kaiso (NM_006777.2,901-919).
catatgccctcttcaatca

SEQ ID NO: 137203 - DNA, 19 bp, Homo sapiens
  siRNA target sequence for ZNF-kaiso (NM_006777.2,906-924).
gccctcttcaatcaattta

SEQ ID NO: 137204 - DNA, 19 bp, Homo sapiens
  siRNA target sequence for ZNF-kaiso (NM_006777.2,908-926).
cctcttcaatcaatttact

SEQ ID NO: 137205 - DNA, 19 bp, Homo sapiens
  siRNA target sequence for ZNF-kaiso (NM_006777.2,942-960).
gacaccaaacagtgctatt

SEQ ID NO: 137206 - DNA, 19 bp, Homo sapiens
  siRNA target sequence for ZNF-kaiso (NM_006777.2,1037-1055).
ctgactcggccgtcagtaa

SEQ ID NO: 137207 - DNA, 19 bp, Homo sapiens
  siRNA target sequence for ZNF-kaiso (NM_006777.2,1039-1057).
gactcggccgtcagtaata

SEQ ID NO: 137208 - DNA, 19 bp, Homo sapiens
  siRNA target sequence for ZNF-kaiso (NM_006777.2,1046-1064).
ccgtcagtaatacatcttt

SEQ ID NO: 137209 - DNA, 19 bp, Homo sapiens
  siRNA target sequence for ZNF-kaiso (NM_006777.2,1075-1093).
gctgatacctcccaaaata

SEQ ID NO: 137210 - DNA, 19 bp, Homo sapiens
  siRNA target sequence for ZNF-kaiso (NM_006777.2,1078-1096).
gatacctcccaaaatacca

SEQ ID NO: 137211 - DNA, 19 bp, Homo sapiens
  siRNA target sequence for ZNF-kaiso (NM_006777.2,1094-1112).
ccagttttgatggatcatt

SEQ ID NO: 137212 - DNA, 19 bp, Homo sapiens
  siRNA target sequence for ZNF-kaiso (NM_006777.2,1095-1113).
cagttttgatggatcatta

SEQ ID NO: 137213 - DNA, 19 bp, Homo sapiens
  siRNA target sequence for ZNF-kaiso (NM_006777.2,1097-1115).
gttttgatggatcattaat

SEQ ID NO: 137214 - DNA, 19 bp, Homo sapiens
  siRNA target sequence for ZNF-kaiso (NM_006777.2,1122-1140).
gatgcagattcctacactt

SEQ ID NO: 137215 - DNA, 19 bp, Homo sapiens
  siRNA target sequence for ZNF-kaiso (NM_006777.2,1150-1168).
ccactttccaattccttaa

SEQ ID NO: 137216 - DNA, 19 bp, Homo sapiens
  siRNA target sequence for ZNF-kaiso (NM_006777.2,1205-1223).
caggcgtaggatcaaaaca

SEQ ID NO: 137217 - DNA, 19 bp, Homo sapiens
  siRNA target sequence for ZNF-kaiso (NM_006777.2,1208-1226).
gcgtaggatcaaaacatct

SEQ ID NO: 137218 - DNA, 19 bp, Homo sapiens
  siRNA target sequence for ZNF-kaiso (NM_006777.2,1209-1227).
cgtaggatcaaaacatcta

SEQ ID NO: 137219 - DNA, 19 bp, Homo sapiens
  siRNA target sequence for ZNF-kaiso (NM_006777.2,1210-1228).
gtaggatcaaaacatctaa

SEQ ID NO: 137220 - DNA, 19 bp, Homo sapiens
  siRNA target sequence for ZNF-kaiso (NM_006777.2,1267-1285).
gaaattgaaggcttatcga

SEQ ID NO: 137221 - DNA, 19 bp, Homo sapiens
  siRNA target sequence for ZNF-kaiso (NM_006777.2,1283-1301).
cgactggttgcaaggttta

SEQ ID NO: 137222 - DNA, 19 bp, Homo sapiens
  siRNA target sequence for ZNF-kaiso (NM_006777.2,1284-1302).
gactggttgcaaggtttat

SEQ ID NO: 137223 - DNA, 19 bp, Homo sapiens
  siRNA target sequence for ZNF-kaiso (NM_006777.2,1288-1306).
ggttgcaaggtttatgcaa

SEQ ID NO: 137224 - DNA, 19 bp, Homo sapiens
  siRNA target sequence for ZNF-kaiso (NM_006777.2,1289-1307).
gttgcaaggtttatgcaaa

SEQ ID NO: 137225 - DNA, 19 bp, Homo sapiens
  siRNA target sequence for ZNF-kaiso (NM_006777.2,1311-1329).
cggtgaagatacttatgat

SEQ ID NO: 137226 - DNA, 19 bp, Homo sapiens
  siRNA target sequence for ZNF-kaiso (NM_006777.2,1318-1336).
gatacttatgatatagtga

SEQ ID NO: 137227 - DNA, 19 bp, Homo sapiens
  siRNA target sequence for ZNF-kaiso (NM_006777.2,1408-1426).
gagatggcaaacaaacgta

SEQ ID NO: 137228 - DNA, 19 bp, Homo sapiens
  siRNA target sequence for ZNF-kaiso (NM_006777.2,1438-1456).
catgatgatcactatgagt

SEQ ID NO: 137229 - DNA, 19 bp, Homo sapiens
  siRNA target sequence for ZNF-kaiso (NM_006777.2,1441-1459).
gatgatcactatgagttaa

SEQ ID NO: 137230 - DNA, 19 bp, Homo sapiens
  siRNA target sequence for ZNF-kaiso (NM_006777.2,1449-1467).
ctatgagttaatagtagat

SEQ ID NO: 137231 - DNA, 19 bp, Homo sapiens
  siRNA target sequence for ZNF-kaiso (NM_006777.2,1472-1490).
gggtctattatatctgtat

SEQ ID NO: 137232 - DNA, 19 bp, Homo sapiens
  siRNA target sequence for ZNF-kaiso (NM_006777.2,1520-1538).
caagcttgcggagacattt

SEQ ID NO: 137233 - DNA, 19 bp, Homo sapiens
  siRNA target sequence for ZNF-kaiso (NM_006777.2,1523-1541).
gcttgcggagacattttaa

SEQ ID NO: 137234 - DNA, 19 bp, Homo sapiens
  siRNA target sequence for ZNF-kaiso (NM_006777.2,1530-1548).
gagacattttaacattcat

SEQ ID NO: 137235 - DNA, 19 bp, Homo sapiens
  siRNA target sequence for ZNF-kaiso (NM_006777.2,1563-1581).
gtatccgtgccgttactgt

SEQ ID NO: 137236 - DNA, 19 bp, Homo sapiens
  siRNA target sequence for ZNF-kaiso (NM_006777.2,1573-1591).
cgttactgtgagaaggtat

SEQ ID NO: 137237 - DNA, 19 bp, Homo sapiens
  siRNA target sequence for ZNF-kaiso (NM_006777.2,1574-1592).
gttactgtgagaaggtatt

SEQ ID NO: 137238 - DNA, 19 bp, Homo sapiens
  siRNA target sequence for ZNF-kaiso (NM_006777.2,1680-1698).
caactatcagtttatgtct

SEQ ID NO: 137239 - DNA, 19 bp, Homo sapiens
  siRNA target sequence for ZNF-kaiso (NM_006777.2,1687-1705).
cagtttatgtcttcacata

SEQ ID NO: 137240 - DNA, 19 bp, Homo sapiens
  siRNA target sequence for ZNF-kaiso (NM_006777.2,1689-1707).
gtttatgtcttcacatata

SEQ ID NO: 137241 - DNA, 19 bp, Homo sapiens
  siRNA target sequence for ZNF-kaiso (NM_006777.2,1710-1728).
gtcagttcatagtcaagat

SEQ ID NO: 137242 - DNA, 19 bp, Homo sapiens
  siRNA target sequence for ZNF-kaiso (NM_006777.2,1733-1751).
ctggggactcaaagcttta

SEQ ID NO: 137243 - DNA, 19 bp, Homo sapiens
  siRNA target sequence for ZNF-kaiso (NM_006777.2,1737-1755).
ggactcaaagctttatcgt

SEQ ID NO: 137244 - DNA, 19 bp, Homo sapiens
  siRNA target sequence for ZNF-kaiso (NM_006777.2,1738-1756).
gactcaaagctttatcgtt

SEQ ID NO: 137245 - DNA, 19 bp, Homo sapiens
  siRNA target sequence for ZNF-kaiso (NM_006777.2,1740-1758).
ctcaaagctttatcgttta

SEQ ID NO: 137246 - DNA, 19 bp, Homo sapiens
  siRNA target sequence for ZNF-kaiso (NM_006777.2,1742-1760).
caaagctttatcgtttaca

SEQ ID NO: 137247 - DNA, 19 bp, Homo sapiens
  siRNA target sequence for ZNF-kaiso (NM_006777.2,1763-1781).
catgcaggtctttacaaat

SEQ ID NO: 137248 - DNA, 19 bp, Homo sapiens
  siRNA target sequence for ZNF-kaiso (NM_006777.2,1772-1790).
ctttacaaatcagacaata

SEQ ID NO: 137249 - DNA, 19 bp, Homo sapiens
  siRNA target sequence for ZNF-kaiso (NM_006777.2,1782-1800).
cagacaatatgcatatctt

SEQ ID NO: 137250 - DNA, 19 bp, Homo sapiens
  siRNA target sequence for ZNF-kaiso (NM_006777.2,1803-1821).
cgatagatcaagcactatt

SEQ ID NO: 137251 - DNA, 19 bp, Homo sapiens
  siRNA target sequence for ZNF-kaiso (NM_006777.2,1814-1832).
gcactattcctgcaatgaa

SEQ ID NO: 137252 - DNA, 19 bp, Homo sapiens
  siRNA target sequence for ZNF-kaiso (NM_006777.2,1889-1907).
ctacatctactcagaacaa

SEQ ID NO: 137253 - DNA, 19 bp, Homo sapiens
  siRNA target sequence for ZNF-kaiso (NM_006777.2,1910-1928).
caatgacctgggaagatat

SEQ ID NO: 137254 - DNA, 19 bp, Homo sapiens
  siRNA target sequence for ZNF-kaiso (NM_006777.2,1979-1997).
gcagtactgagtttgaatt

SEQ ID NO: 137255 - DNA, 19 bp, Homo sapiens
  siRNA target sequence for ZNF-kaiso (NM_006777.2,1989-2007).
gtttgaatttataatacca

SEQ ID NO: 137256 - DNA, 19 bp, Homo sapiens
  siRNA target sequence for ZNF-U69274 (NM_014415.1,232-250).
gcaccgagggcaatgtcaa

SEQ ID NO: 137257 - DNA, 19 bp, Homo sapiens
  siRNA target sequence for ZNF-U69274 (NM_014415.1,240-258).
ggcaatgtcaagcgtaaaa

SEQ ID NO: 137258 - DNA, 19 bp, Homo sapiens
  siRNA target sequence for ZNF-U69274 (NM_014415.1,251-269).
gcgtaaaatccgaaaagct

SEQ ID NO: 137259 - DNA, 19 bp, Homo sapiens
  siRNA target sequence for ZNF-U69274 (NM_014415.1,458-476).
gtactggtggcgaggtata

SEQ ID NO: 137260 - DNA, 19 bp, Homo sapiens
  siRNA target sequence for ZNF-U69274 (NM_014415.1,463-481).
ggtggcgaggtatattgaa

SEQ ID NO: 137261 - DNA, 19 bp, Homo sapiens
  siRNA target sequence for ZNF-U69274 (NM_014415.1,472-490).
gtatattgaagcaagtcaa

SEQ ID NO: 137262 - DNA, 19 bp, Homo sapiens
  siRNA target sequence for ZNF-U69274 (NM_014415.1,497-515).
cattaaacagtgtagcaaa

SEQ ID NO: 137263 - DNA, 19 bp, Homo sapiens
  siRNA target sequence for ZNF-U69274 (NM_014415.1,531-549).
gatcgatcccgtccaatat

SEQ ID NO: 137264 - DNA, 19 bp, Homo sapiens
  siRNA target sequence for ZNF-U69274 (NM_014415.1,535-553).
gatcccgtccaatatcaga

SEQ ID NO: 137265 - DNA, 19 bp, Homo sapiens
  siRNA target sequence for ZNF-U69274 (NM_014415.1,539-557).
ccgtccaatatcagatgtt

SEQ ID NO: 137266 - DNA, 19 bp, Homo sapiens
  siRNA target sequence for ZNF-U69274 (NM_014415.1,540-558).
cgtccaatatcagatgttt

SEQ ID NO: 137267 - DNA, 19 bp, Homo sapiens
  siRNA target sequence for ZNF-U69274 (NM_014415.1,578-596).
gggactagaccttgaatct

SEQ ID NO: 137268 - DNA, 19 bp, Homo sapiens
  siRNA target sequence for ZNF-U69274 (NM_014415.1,607-625).
gtaatgaatcggaagatga

SEQ ID NO: 137269 - DNA, 19 bp, Homo sapiens
  siRNA target sequence for ZNF-U69274 (NM_014415.1,621-639).
gatgacctgagcaacttta

SEQ ID NO: 137270 - DNA, 19 bp, Homo sapiens
  siRNA target sequence for ZNF-U69274 (NM_014415.1,688-706).
ccaaacatgaacttgtgtt

SEQ ID NO: 137271 - DNA, 19 bp, Homo sapiens
  siRNA target sequence for ZNF-U69274 (NM_014415.1,747-765).
cattgtcaggctgtcttaa

SEQ ID NO: 137272 - DNA, 19 bp, Homo sapiens
  siRNA target sequence for ZNF-U69274 (NM_014415.1,751-769).
gtcaggctgtcttaaaaca

SEQ ID NO: 137273 - DNA, 19 bp, Homo sapiens
  siRNA target sequence for ZNF-U69274 (NM_014415.1,771-789).
ctgaacgaacagagacttt

SEQ ID NO: 137274 - DNA, 19 bp, Homo sapiens
  siRNA target sequence for ZNF-U69274 (NM_014415.1,791-809).
caaccagttctgtgatgtt

SEQ ID NO: 137275 - DNA, 19 bp, Homo sapiens
  siRNA target sequence for ZNF-U69274 (NM_014415.1,927-945).
gtggatctttctggttttt

SEQ ID NO: 137276 - DNA, 19 bp, Homo sapiens
  siRNA target sequence for ZNF-U69274 (NM_014415.1,969-987).
ctggaatttgcctatactt

SEQ ID NO: 137277 - DNA, 19 bp, Homo sapiens
  siRNA target sequence for ZNF-U69274 (NM_014415.1,978-996).
gcctatacttctgtactaa

SEQ ID NO: 137278 - DNA, 19 bp, Homo sapiens
  siRNA target sequence for ZNF-U69274 (NM_014415.1,1028-1046).
catcttagctcgtcatctt

SEQ ID NO: 137279 - DNA, 19 bp, Homo sapiens
  siRNA target sequence for ZNF-U69274 (NM_014415.1,1067-1085).
gatttgtgaaagtgtacat

SEQ ID NO: 137280 - DNA, 19 bp, Homo sapiens
  siRNA target sequence for ZNF-U69274 (NM_014415.1,1078-1096).
gtgtacataagctaatgga

SEQ ID NO: 137281 - DNA, 19 bp, Homo sapiens
  siRNA target sequence for ZNF-U69274 (NM_014415.1,1104-1122).
cagctaacagtatataaga

SEQ ID NO: 137282 - DNA, 19 bp, Homo sapiens
  siRNA target sequence for ZNF-U69274 (NM_014415.1,1121-1139).
gaagggcgaagtacaaaca

SEQ ID NO: 137283 - DNA, 19 bp, Homo sapiens
  siRNA target sequence for ZNF-U69274 (NM_014415.1,1154-1172).
ggacttacgagtacagaat

SEQ ID NO: 137284 - DNA, 19 bp, Homo sapiens
  siRNA target sequence for ZNF-U69274 (NM_014415.1,1228-1246).
ctgaacttggggattgtga

SEQ ID NO: 137285 - DNA, 19 bp, Homo sapiens
  siRNA target sequence for ZNF-U69274 (NM_014415.1,1230-1248).
gaacttggggattgtgaaa

SEQ ID NO: 137286 - DNA, 19 bp, Homo sapiens
  siRNA target sequence for ZNF-U69274 (NM_014415.1,1238-1256).
ggattgtgaaattgtacta

SEQ ID NO: 137287 - DNA, 19 bp, Homo sapiens
  siRNA target sequence for ZNF-U69274 (NM_014415.1,1349-1367).
gtcatcagtaggatgtata

SEQ ID NO: 137288 - DNA, 19 bp, Homo sapiens
  siRNA target sequence for ZNF-U69274 (NM_014415.1,1389-1407).
gagtctgttgatttaataa

SEQ ID NO: 137289 - DNA, 19 bp, Homo sapiens
  siRNA target sequence for ZNF-U69274 (NM_014415.1,1586-1604).
gaaagttgaccaaccttta

SEQ ID NO: 137290 - DNA, 19 bp, Homo sapiens
  siRNA target sequence for ZNF-U69274 (NM_014415.1,1652-1670).
ccctgatgatgatacttat

SEQ ID NO: 137291 - DNA, 19 bp, Homo sapiens
  siRNA target sequence for ZNF-U69274 (NM_014415.1,1680-1698).
cttcgacaacgttctgtta

SEQ ID NO: 137292 - DNA, 19 bp, Homo sapiens
  siRNA target sequence for ZNF-U69274 (NM_014415.1,1695-1713).
gttaatgaaggggcatata

SEQ ID NO: 137293 - DNA, 19 bp, Homo sapiens
  siRNA target sequence for ZNF-U69274 (NM_014415.1,1708-1726).
catatattcgactacacaa

SEQ ID NO: 137294 - DNA, 19 bp, Homo sapiens
  siRNA target sequence for ZNF-U69274 (NM_014415.1,1722-1740).
cacaagggaatggagaaaa

SEQ ID NO: 137295 - DNA, 19 bp, Homo sapiens
  siRNA target sequence for ZNF-U69274 (NM_014415.1,1788-1806).
gctcagaagttagttcaaa

SEQ ID NO: 137296 - DNA, 19 bp, Homo sapiens
  siRNA target sequence for ZNF-U69274 (NM_014415.1,1898-1916).
gagacgatacgcccttata

SEQ ID NO: 137297 - DNA, 19 bp, Homo sapiens
  siRNA target sequence for ZNF-U69274 (NM_014415.1,1900-1918).
gacgatacgcccttataat

SEQ ID NO: 137298 - DNA, 19 bp, Homo sapiens
  siRNA target sequence for ZNF-U69274 (NM_014415.1,1903-1921).
gatacgcccttataatgca

SEQ ID NO: 137299 - DNA, 19 bp, Homo sapiens
  siRNA target sequence for ZNF-U69274 (NM_014415.1,1909-1927).
cccttataatgcacaaact

SEQ ID NO: 137300 - DNA, 19 bp, Homo sapiens
  siRNA target sequence for ZNF-U69274 (NM_014415.1,1911-1929).
cttataatgcacaaactga

SEQ ID NO: 137301 - DNA, 19 bp, Homo sapiens
  siRNA target sequence for ZNF-U69274 (NM_014415.1,1935-1953).
gaaagagctagagattaca

SEQ ID NO: 137302 - DNA, 19 bp, Homo sapiens
  siRNA target sequence for ZNF-U69274 (NM_014415.1,1991-2009).
ctctttgcgagcacatctt

SEQ ID NO: 137303 - DNA, 19 bp, Homo sapiens
  siRNA target sequence for ZNF-U69274 (NM_014415.1,2048-2066).
gtccaattccacgtctaat

SEQ ID NO: 137304 - DNA, 19 bp, Homo sapiens
  siRNA target sequence for ZNF-U69274 (NM_014415.1,2050-2068).
ccaattccacgtctaatga

SEQ ID NO: 137305 - DNA, 19 bp, Homo sapiens
  siRNA target sequence for ZNF-U69274 (NM_014415.1,2051-2069).
caattccacgtctaatgaa

SEQ ID NO: 137306 - DNA, 19 bp, Homo sapiens
  siRNA target sequence for ZNF-U69274 (NM_014415.1,2096-2114).
cagaaccaagcgggaattt

SEQ ID NO: 137307 - DNA, 19 bp, Homo sapiens
  siRNA target sequence for ZNF-U69274 (NM_014415.1,2128-2146).
gtggaagaacattacctaa

SEQ ID NO: 137308 - DNA, 19 bp, Homo sapiens
  siRNA target sequence for ZNF-U69274 (NM_014415.1,2130-2148).
ggaagaacattacctaaat

SEQ ID NO: 137309 - DNA, 19 bp, Homo sapiens
  siRNA target sequence for ZNF-U69274 (NM_014415.1,2212-2230).
gtggaaagacttttatcta

SEQ ID NO: 137310 - DNA, 19 bp, Homo sapiens
  siRNA target sequence for ZNF-U69274 (NM_014415.1,2228-2246).
ctataagcatggtctaaaa

SEQ ID NO: 137311 - DNA, 19 bp, Homo sapiens
  siRNA target sequence for ZNF-U69274 (NM_014415.1,2250-2268).
catcagagtcttcatcaat

SEQ ID NO: 137312 - DNA, 19 bp, Homo sapiens
  siRNA target sequence for ZNF-U69274 (NM_014415.1,2314-2332).
ccaaacggagtcttcaaga

SEQ ID NO: 137313 - DNA, 19 bp, Homo sapiens
  siRNA target sequence for ZNF-U69274 (NM_014415.1,2315-2333).
caaacggagtcttcaagaa

SEQ ID NO: 137314 - DNA, 19 bp, Homo sapiens
  siRNA target sequence for ZNF-U69274 (NM_014415.1,2319-2337).
cggagtcttcaagaacata

SEQ ID NO: 137315 - DNA, 19 bp, Homo sapiens
  siRNA target sequence for ZNF-U69274 (NM_014415.1,2372-2390).
ctcagtttgtggaaagtct

SEQ ID NO: 137316 - DNA, 19 bp, Homo sapiens
  siRNA target sequence for ZNF-U69274 (NM_014415.1,2445-2463).
gaggttcgaggctatcatt

SEQ ID NO: 137317 - DNA, 19 bp, Homo sapiens
  siRNA target sequence for ZNF-U69274 (NM_014415.1,2447-2465).
ggttcgaggctatcattgt

SEQ ID NO: 137318 - DNA, 19 bp, Homo sapiens
  siRNA target sequence for ZNF-U69274 (NM_014415.1,2454-2472).
ggctatcattgtactcaat

SEQ ID NO: 137319 - DNA, 19 bp, Homo sapiens
  siRNA target sequence for ZNF-U69274 (NM_014415.1,2506-2524).
gccagcacatgaacaaaca

SEQ ID NO: 137320 - DNA, 19 bp, Homo sapiens
  siRNA target sequence for ZNF-U69274 (NM_014415.1,2564-2582).
gtgctatagttggaagaaa

SEQ ID NO: 137321 - DNA, 19 bp, Homo sapiens
  siRNA target sequence for ZNF-U69274 (NM_014415.1,2613-2631).
gtcactgagccttataggt

SEQ ID NO: 137322 - DNA, 19 bp, Homo sapiens
  siRNA target sequence for ZNF-U69274 (NM_014415.1,2619-2637).
gagccttataggtgtaata

SEQ ID NO: 137323 - DNA, 19 bp, Homo sapiens
  siRNA target sequence for ZNF-U69274 (NM_014415.1,2621-2639).
gccttataggtgtaatata

SEQ ID NO: 137324 - DNA, 19 bp, Homo sapiens
  siRNA target sequence for ZNF-U69274 (NM_014415.1,2813-2831).
gccatttgagtgcttaaca

SEQ ID NO: 137325 - DNA, 19 bp, Homo sapiens
  siRNA target sequence for ZNF-U69274 (NM_014415.1,2814-2832).
ccatttgagtgcttaacat

SEQ ID NO: 137326 - DNA, 19 bp, Homo sapiens
  siRNA target sequence for ZNF-U69274 (NM_014415.1,2846-2864).
ggctgatgcccgatctcta

SEQ ID NO: 137327 - DNA, 19 bp, Homo sapiens
  siRNA target sequence for ZNF-U69274 (NM_014415.1,2847-2865).
gctgatgcccgatctctaa

SEQ ID NO: 137328 - DNA, 19 bp, Homo sapiens
  siRNA target sequence for ZNF-U69274 (NM_014415.1,2848-2866).
ctgatgcccgatctctaaa

SEQ ID NO: 137329 - DNA, 19 bp, Homo sapiens
  siRNA target sequence for ZNF-U69274 (NM_014415.1,2868-2886).
cgccatgtcagaacacata

SEQ ID NO: 137330 - DNA, 19 bp, Homo sapiens
  siRNA target sequence for ZNF-U69274 (NM_014415.1,2917-2935).
gtagcgaagcctacataga

SEQ ID NO: 137331 - DNA, 19 bp, Homo sapiens
  siRNA target sequence for ZNF-U69274 (NM_014415.1,2938-2956).
ctcgaacactccgtaaaca

SEQ ID NO: 137332 - DNA, 19 bp, Homo sapiens
  siRNA target sequence for ZNF-U69274 (NM_014415.1,2940-2958).
cgaacactccgtaaacata

SEQ ID NO: 137333 - DNA, 19 bp, Homo sapiens
  siRNA target sequence for ZNF-U69274 (NM_014415.1,2941-2959).
gaacactccgtaaacatat

SEQ ID NO: 137334 - DNA, 19 bp, Homo sapiens
  siRNA target sequence for ZNF-U69274 (NM_014415.1,2946-2964).
ctccgtaaacatatgacta

SEQ ID NO: 137335 - DNA, 19 bp, Homo sapiens
  siRNA target sequence for ZNF-U69274 (NM_014415.1,2976-2994).
gactatgtgccttgcaaaa

SEQ ID NO: 137336 - DNA, 19 bp, Homo sapiens
  siRNA target sequence for ZNF-U69274 (NM_014415.1,3013-3031).
cccttcagtttcataacca

SEQ ID NO: 137337 - DNA, 19 bp, Homo sapiens
  siRNA target sequence for ZNF-U69274 (NM_014415.1,3048-3066).
catgctgttagcatcttaa

SEQ ID NO: 137338 - DNA, 19 bp, Homo sapiens
  siRNA target sequence for ZNF-U69274 (NM_014415.1,3171-3189).
gagtatccatcggtatcta

SEQ ID NO: 137339 - DNA, 19 bp, Homo sapiens
  siRNA target sequence for ZNF-U69274 (NM_014415.1,3173-3191).
gtatccatcggtatctaca

SEQ ID NO: 137340 - DNA, 19 bp, Homo sapiens
  siRNA target sequence for ZNF-U69274 (NM_014415.1,3177-3195).
ccatcggtatctacacttt

SEQ ID NO: 137341 - DNA, 19 bp, Homo sapiens
  siRNA target sequence for ZNF-U69274 (NM_014415.1,3181-3199).
cggtatctacactttctga

SEQ ID NO: 137342 - DNA, 19 bp, Homo sapiens
  siRNA target sequence for ZNF-U69274 (NM_014415.1,3205-3223).
gtattatgcaagtggttaa

SEQ ID NO: 137343 - DNA, 19 bp, Homo sapiens
  siRNA target sequence for ZNF-U69274 (NM_014415.1,3218-3236).
ggttaattatgtattagca

SEQ ID NO: 137344 - DNA, 19 bp, Homo sapiens
  siRNA target sequence for ZNF-U69274 (NM_014415.1,3270-3288).
gaagctattcaaactgtta

SEQ ID NO: 137345 - DNA, 19 bp, Homo sapiens
  siRNA target sequence for ZNF-U69274 (NM_014415.1,3291-3309).
gtagaggtagcacatattt

SEQ ID NO: 137346 - DNA, 19 bp, Homo sapiens
  siRNA target sequence for ZNF259 (NM_003904.1,170-188).
gagtcgctatgcatgaact

SEQ ID NO: 137347 - DNA, 19 bp, Homo sapiens
  siRNA target sequence for ZNF259 (NM_003904.1,174-192).
cgctatgcatgaactgtta

SEQ ID NO: 137348 - DNA, 19 bp, Homo sapiens
  siRNA target sequence for ZNF259 (NM_003904.1,176-194).
ctatgcatgaactgttact

SEQ ID NO: 137349 - DNA, 19 bp, Homo sapiens
  siRNA target sequence for ZNF259 (NM_003904.1,326-344).
ggagtgcgctacactttgt

SEQ ID NO: 137350 - DNA, 19 bp, Homo sapiens
  siRNA target sequence for ZNF259 (NM_003904.1,410-428).
cctgagctagattttgaaa

SEQ ID NO: 137351 - DNA, 19 bp, Homo sapiens
  siRNA target sequence for ZNF259 (NM_003904.1,459-477).
ccactgttgaaggattgat

SEQ ID NO: 137352 - DNA, 19 bp, Homo sapiens
  siRNA target sequence for ZNF259 (NM_003904.1,475-493).
gatcacccgtgctatctct

SEQ ID NO: 137353 - DNA, 19 bp, Homo sapiens
  siRNA target sequence for ZNF259 (NM_003904.1,513-531).
ctgcacgaagggcaaacaa

SEQ ID NO: 137354 - DNA, 19 bp, Homo sapiens
  siRNA target sequence for ZNF259 (NM_003904.1,533-551).
gatgctacagctgaaagaa

SEQ ID NO: 137355 - DNA, 19 bp, Homo sapiens
  siRNA target sequence for ZNF259 (NM_003904.1,549-567).
gaattgatgagttcattgt

SEQ ID NO: 137356 - DNA, 19 bp, Homo sapiens
  siRNA target sequence for ZNF259 (NM_003904.1,557-575).
gagttcattgtcaaactga

SEQ ID NO: 137357 - DNA, 19 bp, Homo sapiens
  siRNA target sequence for ZNF259 (NM_003904.1,597-615).
cccctttcactctgatcat

SEQ ID NO: 137358 - DNA, 19 bp, Homo sapiens
  siRNA target sequence for ZNF259 (NM_003904.1,822-840).
ccgctcagaccaacatgaa

SEQ ID NO: 137359 - DNA, 19 bp, Homo sapiens
  siRNA target sequence for ZNF259 (NM_003904.1,831-849).
ccaacatgaagctagtaca

SEQ ID NO: 137360 - DNA, 19 bp, Homo sapiens
  siRNA target sequence for ZNF259 (NM_003904.1,832-850).
caacatgaagctagtacaa

SEQ ID NO: 137361 - DNA, 19 bp, Homo sapiens
  siRNA target sequence for ZNF259 (NM_003904.1,845-863).
gtacaaatccctcacttta

SEQ ID NO: 137362 - DNA, 19 bp, Homo sapiens
  siRNA target sequence for ZNF259 (NM_003904.1,1112-1130).
cgggaactggtgaccaaaa

SEQ ID NO: 137363 - DNA, 19 bp, Homo sapiens
  siRNA target sequence for ZNF259 (NM_003904.1,1118-1136).
ctggtgaccaaaaatcctt

SEQ ID NO: 137364 - DNA, 19 bp, Homo sapiens
  siRNA target sequence for ZNF259 (NM_003904.1,1123-1141).
gaccaaaaatcctttcaca

SEQ ID NO: 137365 - DNA, 19 bp, Homo sapiens
  siRNA target sequence for ZNF259 (NM_003904.1,1172-1190).
gagagactacaggagttta

SEQ ID NO: 137366 - DNA, 19 bp, Homo sapiens
  siRNA target sequence for ZNF259 (NM_003904.1,1222-1240).
catgaaggcccactttatt

SEQ ID NO: 137367 - DNA, 19 bp, Homo sapiens
  siRNA target sequence for ZNF259 (NM_003904.1,1228-1246).
ggcccactttattatggat

SEQ ID NO: 137368 - DNA, 19 bp, Homo sapiens
  siRNA target sequence for ZNF259 (NM_003904.1,1263-1281).
gttacttgcagaatgtgta

SEQ ID NO: 137369 - DNA, 19 bp, Homo sapiens
  siRNA target sequence for ZNF259 (NM_003904.1,1279-1297).
gtatgcgcctgaagatgat

SEQ ID NO: 137370 - DNA, 19 bp, Homo sapiens
  siRNA target sequence for ZNF259 (NM_003904.1,1324-1342).
gcgcacctttgaccaaaat

SEQ ID NO: 137371 - DNA, 19 bp, Homo sapiens
  siRNA target sequence for ZNF499 (NM_032792.2,617-635).
cttcgcatacagacagtta

SEQ ID NO: 137372 - DNA, 19 bp, Homo sapiens
  siRNA target sequence for ZNF499 (NM_032792.2,621-639).
gcatacagacagttatcga

SEQ ID NO: 137373 - DNA, 19 bp, Homo sapiens
  siRNA target sequence for ZNF499 (NM_032792.2,638-656).
gacgaatgcacgcagatta

SEQ ID NO: 137374 - DNA, 19 bp, Homo sapiens
  siRNA target sequence for ZNF499 (NM_032792.2,1487-1505).
gagccacctacgtatgagt

SEQ ID NO: 137375 - DNA, 19 bp, Homo sapiens
  siRNA target sequence for ZNF499 (NM_032792.2,1524-1542).
cgttcagctcccggaaaaa

SEQ ID NO: 137376 - DNA, 19 bp, Homo sapiens
  siRNA target sequence for ZNF499 (NM_032792.2,1620-1638).
gcgactacctgctcaaaca

SEQ ID NO: 137377 - DNA, 19 bp, Homo sapiens
  siRNA target sequence for CALR3 (NM_145046.2,195-213).
ccgatttgggcattttaga

SEQ ID NO: 137378 - DNA, 19 bp, Homo sapiens
  siRNA target sequence for CALR3 (NM_145046.2,214-232).
ctttcgtcgggcaagtttt

SEQ ID NO: 137379 - DNA, 19 bp, Homo sapiens
  siRNA target sequence for CALR3 (NM_145046.2,219-237).
gtcgggcaagttttatggt

SEQ ID NO: 137380 - DNA, 19 bp, Homo sapiens
  siRNA target sequence for CALR3 (NM_145046.2,224-242).
gcaagttttatggtcataa

SEQ ID NO: 137381 - DNA, 19 bp, Homo sapiens
  siRNA target sequence for CALR3 (NM_145046.2,269-287).
ctcagaatggccgattcta

SEQ ID NO: 137382 - DNA, 19 bp, Homo sapiens
  siRNA target sequence for CALR3 (NM_145046.2,380-398).
gagggggctacattaaggt

SEQ ID NO: 137383 - DNA, 19 bp, Homo sapiens
  siRNA target sequence for CALR3 (NM_145046.2,456-474).
gtttggacccgatatttgt

SEQ ID NO: 137384 - DNA, 19 bp, Homo sapiens
  siRNA target sequence for CALR3 (NM_145046.2,464-482).
ccgatatttgtggatttga

SEQ ID NO: 137385 - DNA, 19 bp, Homo sapiens
  siRNA target sequence for CALR3 (NM_145046.2,465-483).
cgatatttgtggatttgat

SEQ ID NO: 137386 - DNA, 19 bp, Homo sapiens
  siRNA target sequence for CALR3 (NM_145046.2,596-614).
cagatctttcttatgatgt

SEQ ID NO: 137387 - DNA, 19 bp, Homo sapiens
  siRNA target sequence for CALR3 (NM_145046.2,637-655).
gaatccggcagcatagagt

SEQ ID NO: 137388 - DNA, 19 bp, Homo sapiens
  siRNA target sequence for CALR3 (NM_145046.2,654-672).
gtacgactggaacttaaca

SEQ ID NO: 137389 - DNA, 19 bp, Homo sapiens
  siRNA target sequence for CALR3 (NM_145046.2,657-675).
cgactggaacttaacatca

SEQ ID NO: 137390 - DNA, 19 bp, Homo sapiens
  siRNA target sequence for CALR3 (NM_145046.2,855-873).
cctgaaaccagaaggtatt

SEQ ID NO: 137391 - DNA, 19 bp, Homo sapiens
  siRNA target sequence for CALR3 (NM_145046.2,858-876).
gaaaccagaaggtattcat

SEQ ID NO: 137392 - DNA, 19 bp, Homo sapiens
  siRNA target sequence for CALR3 (NM_145046.2,887-905).
ggctccaccgtaagatgaa

SEQ ID NO: 137393 - DNA, 19 bp, Homo sapiens
  siRNA target sequence for CALR3 (NM_145046.2,891-909).
ccaccgtaagatgaagaat

SEQ ID NO: 137394 - DNA, 19 bp, Homo sapiens
  siRNA target sequence for CALR3 (NM_145046.2,982-1000).
gtgagatctggaaccattt

SEQ ID NO: 137395 - DNA, 19 bp, Homo sapiens
  siRNA target sequence for CALR3 (NM_145046.2,992-1010).
gaaccatttttgataactt

SEQ ID NO: 137396 - DNA, 19 bp, Homo sapiens
  siRNA target sequence for CALR3 (NM_145046.2,1149-1167).
gctgctgtcgggaaaaatt

SEQ ID NO: 137397 - DNA, 19 bp, Homo sapiens
  siRNA target sequence for CALR3 (NM_145046.2,1153-1171).
ctgtcgggaaaaattaaca

SEQ ID NO: 137398 - DNA, 19 bp, Homo sapiens
  siRNA target sequence for CALR3 (NM_145046.2,1172-1190).
ggcacgaacattacttcaa

SEQ ID NO: 137399 - DNA, 19 bp, Homo sapiens
  siRNA target sequence for CALR3 (NM_145046.2,1173-1191).
gcacgaacattacttcaat

SEQ ID NO: 137400 - DNA, 19 bp, Homo sapiens
  siRNA target sequence for CALR3 (NM_145046.2,1176-1194).
cgaacattacttcaatcaa

SEQ ID NO: 137401 - DNA, 19 bp, Homo sapiens
  siRNA target sequence for CANX (NM_001746.2,123-141).
gtggttgctgtgtatgtta

SEQ ID NO: 137402 - DNA, 19 bp, Homo sapiens
  siRNA target sequence for CANX (NM_001746.2,144-162).
ggtgcttggaactgctatt

SEQ ID NO: 137403 - DNA, 19 bp, Homo sapiens
  siRNA target sequence for CANX (NM_001746.2,147-165).
gcttggaactgctattgtt

SEQ ID NO: 137404 - DNA, 19 bp, Homo sapiens
  siRNA target sequence for CANX (NM_001746.2,275-293).
ctcccaaggttacttacaa

SEQ ID NO: 137405 - DNA, 19 bp, Homo sapiens
  siRNA target sequence for CANX (NM_001746.2,382-400).
gacgataccgatgatgaaa

SEQ ID NO: 137406 - DNA, 19 bp, Homo sapiens
  siRNA target sequence for CANX (NM_001746.2,553-571).
gttcagtatgaggttaatt

SEQ ID NO: 137407 - DNA, 19 bp, Homo sapiens
  siRNA target sequence for CANX (NM_001746.2,593-611).
gtggtgcctatgtgaaact

SEQ ID NO: 137408 - DNA, 19 bp, Homo sapiens
  siRNA target sequence for CANX (NM_001746.2,649-667).
catgacaagaccccttata

SEQ ID NO: 137409 - DNA, 19 bp, Homo sapiens
  siRNA target sequence for CANX (NM_001746.2,652-670).
gacaagaccccttatacga

SEQ ID NO: 137410 - DNA, 19 bp, Homo sapiens
  siRNA target sequence for CANX (NM_001746.2,654-672).
caagaccccttatacgatt

SEQ ID NO: 137411 - DNA, 19 bp, Homo sapiens
  siRNA target sequence for CANX (NM_001746.2,659-677).
ccccttatacgattatgtt

SEQ ID NO: 137412 - DNA, 19 bp, Homo sapiens
  siRNA target sequence for CANX (NM_001746.2,660-678).
cccttatacgattatgttt

SEQ ID NO: 137413 - DNA, 19 bp, Homo sapiens
  siRNA target sequence for CANX (NM_001746.2,714-732).
cttcatcttccgacacaaa

SEQ ID NO: 137414 - DNA, 19 bp, Homo sapiens
  siRNA target sequence for CANX (NM_001746.2,735-753).
ccccaaaacgggtatctat

SEQ ID NO: 137415 - DNA, 19 bp, Homo sapiens
  siRNA target sequence for CANX (NM_001746.2,737-755).
ccaaaacgggtatctatga

SEQ ID NO: 137416 - DNA, 19 bp, Homo sapiens
  siRNA target sequence for CANX (NM_001746.2,743-761).
cgggtatctatgaagaaaa

SEQ ID NO: 137417 - DNA, 19 bp, Homo sapiens
  siRNA target sequence for CANX (NM_001746.2,784-802).
gatctgaagacctatttta

SEQ ID NO: 137418 - DNA, 19 bp, Homo sapiens
  siRNA target sequence for CANX (NM_001746.2,789-807).
gaagacctattttactgat

SEQ ID NO: 137419 - DNA, 19 bp, Homo sapiens
  siRNA target sequence for CANX (NM_001746.2,815-833).
cacatctttacacactaat

SEQ ID NO: 137420 - DNA, 19 bp, Homo sapiens
  siRNA target sequence for CANX (NM_001746.2,817-835).
catctttacacactaatct

SEQ ID NO: 137421 - DNA, 19 bp, Homo sapiens
  siRNA target sequence for CANX (NM_001746.2,837-855).
gaatccagataatagtttt

SEQ ID NO: 137422 - DNA, 19 bp, Homo sapiens
  siRNA target sequence for CANX (NM_001746.2,1070-1088).
ccgaaggctggttagatga

SEQ ID NO: 137423 - DNA, 19 bp, Homo sapiens
  siRNA target sequence for CANX (NM_001746.2,1071-1089).
cgaaggctggttagatgat

SEQ ID NO: 137424 - DNA, 19 bp, Homo sapiens
  siRNA target sequence for CANX (NM_001746.2,1173-1191).
gattgccaaccctagatgt

SEQ ID NO: 137425 - DNA, 19 bp, Homo sapiens
  siRNA target sequence for CANX (NM_001746.2,1215-1233).
ctggcagcgacctgtgatt

SEQ ID NO: 137426 - DNA, 19 bp, Homo sapiens
  siRNA target sequence for CANX (NM_001746.2,1217-1235).
ggcagcgacctgtgattga

SEQ ID NO: 137427 - DNA, 19 bp, Homo sapiens
  siRNA target sequence for CANX (NM_001746.2,1259-1277).
ggaagcctcctatgattga

SEQ ID NO: 137428 - DNA, 19 bp, Homo sapiens
  siRNA target sequence for CANX (NM_001746.2,1263-1281).
gcctcctatgattgacaat

SEQ ID NO: 137429 - DNA, 19 bp, Homo sapiens
  siRNA target sequence for CANX (NM_001746.2,1325-1343).
cagatttctttgaagatct

SEQ ID NO: 137430 - DNA, 19 bp, Homo sapiens
  siRNA target sequence for CANX (NM_001746.2,1342-1360).
ctggaacctttcagaatga

SEQ ID NO: 137431 - DNA, 19 bp, Homo sapiens
  siRNA target sequence for CANX (NM_001746.2,1344-1362).
ggaacctttcagaatgact

SEQ ID NO: 137432 - DNA, 19 bp, Homo sapiens
  siRNA target sequence for CANX (NM_001746.2,1395-1413).
catgacctctgacattttt

SEQ ID NO: 137433 - DNA, 19 bp, Homo sapiens
  siRNA target sequence for CANX (NM_001746.2,1433-1451).
gtgctgatcgaagaatagt

SEQ ID NO: 137434 - DNA, 19 bp, Homo sapiens
  siRNA target sequence for CANX (NM_001746.2,1514-1532).
gcgttgtggggcagatgat

SEQ ID NO: 137435 - DNA, 19 bp, Homo sapiens
  siRNA target sequence for CANX (NM_001746.2,1563-1581).
ggtagtctatattctaact

SEQ ID NO: 137436 - DNA, 19 bp, Homo sapiens
  siRNA target sequence for CASQ1 (NM_001231.2,280-298).
gtgtggaccgtgtgatcaa

SEQ ID NO: 137437 - DNA, 19 bp, Homo sapiens
  siRNA target sequence for CASQ1 (NM_001231.2,285-303).
gaccgtgtgatcaatgtca

SEQ ID NO: 137438 - DNA, 19 bp, Homo sapiens
  siRNA target sequence for CASQ1 (NM_001231.2,287-305).
ccgtgtgatcaatgtcaat

SEQ ID NO: 137439 - DNA, 19 bp, Homo sapiens
  siRNA target sequence for CASQ1 (NM_001231.2,300-318).
gtcaatgcaaagaactaca

SEQ ID NO: 137440 - DNA, 19 bp, Homo sapiens
  siRNA target sequence for CASQ1 (NM_001231.2,380-398).
caaggcctcacaaagacaa

SEQ ID NO: 137441 - DNA, 19 bp, Homo sapiens
  siRNA target sequence for CASQ1 (NM_001231.2,433-451).
cccaagtcctagaagacaa

SEQ ID NO: 137442 - DNA, 19 bp, Homo sapiens
  siRNA target sequence for CASQ1 (NM_001231.2,503-521).
gaaactaggcctaactgaa

SEQ ID NO: 137443 - DNA, 19 bp, Homo sapiens
  siRNA target sequence for CASQ1 (NM_001231.2,525-543).
gacagcatgtatgtattca

SEQ ID NO: 137444 - DNA, 19 bp, Homo sapiens
  siRNA target sequence for CASQ1 (NM_001231.2,561-579).
gagtacgatggcgagtttt

SEQ ID NO: 137445 - DNA, 19 bp, Homo sapiens
  siRNA target sequence for CASQ1 (NM_001231.2,563-581).
gtacgatggcgagttttct

SEQ ID NO: 137446 - DNA, 19 bp, Homo sapiens
  siRNA target sequence for CASQ1 (NM_001231.2,654-672).
ctgcaggcgtttgagaata

SEQ ID NO: 137447 - DNA, 19 bp, Homo sapiens
  siRNA target sequence for CASQ1 (NM_001231.2,709-727).
gcaaagactcagagcatta

SEQ ID NO: 137448 - DNA, 19 bp, Homo sapiens
  siRNA target sequence for CASQ1 (NM_001231.2,889-907).
gcgaagaggagattgtcaa

SEQ ID NO: 137449 - DNA, 19 bp, Homo sapiens
  siRNA target sequence for CASQ1 (NM_001231.2,945-963).
ctgaagccggagagtatgt

SEQ ID NO: 137450 - DNA, 19 bp, Homo sapiens
  siRNA target sequence for CASQ1 (NM_001231.2,951-969).
ccggagagtatgtatgaga

SEQ ID NO: 137451 - DNA, 19 bp, Homo sapiens
  siRNA target sequence for CASQ1 (NM_001231.2,1032-1050).
ggtttcgagttcttagaga

SEQ ID NO: 137452 - DNA, 19 bp, Homo sapiens
  siRNA target sequence for CASQ1 (NM_001231.2,1059-1077).
gctgtggcccaagataaca

SEQ ID NO: 137453 - DNA, 19 bp, Homo sapiens
  siRNA target sequence for CASQ1 (NM_001231.2,1065-1083).
gcccaagataacactgaaa

SEQ ID NO: 137454 - DNA, 19 bp, Homo sapiens
  siRNA target sequence for CASQ1 (NM_001231.2,1086-1104).
ccagatcttagcatcatct

SEQ ID NO: 137455 - DNA, 19 bp, Homo sapiens
  siRNA target sequence for CASQ1 (NM_001231.2,1105-1123).
ggattgaccctgatgactt

SEQ ID NO: 137456 - DNA, 19 bp, Homo sapiens
  siRNA target sequence for CASQ1 (NM_001231.2,1169-1187).
gtcagccccacaaatagga

SEQ ID NO: 137457 - DNA, 19 bp, Homo sapiens
  siRNA target sequence for CASQ1 (NM_001231.2,1186-1204).
gagtcgtcaatgttactga

SEQ ID NO: 137458 - DNA, 19 bp, Homo sapiens
  siRNA target sequence for CASQ1 (NM_001231.2,1209-1227).
gatagcgtatggatggaaa

SEQ ID NO: 137459 - DNA, 19 bp, Homo sapiens
  siRNA target sequence for CASQ2 (NM_001232.1,115-133).
gagaactcacttgtttatt

SEQ ID NO: 137460 - DNA, 19 bp, Homo sapiens
  siRNA target sequence for CASQ2 (NM_001232.1,165-183).
cagaagaggggcttaattt

SEQ ID NO: 137461 - DNA, 19 bp, Homo sapiens
  siRNA target sequence for CASQ2 (NM_001232.1,175-193).
gcttaatttccccacatat

SEQ ID NO: 137462 - DNA, 19 bp, Homo sapiens
  siRNA target sequence for CASQ2 (NM_001232.1,202-220).
ggaccgagtggtaagtctt

SEQ ID NO: 137463 - DNA, 19 bp, Homo sapiens
  siRNA target sequence for CASQ2 (NM_001232.1,203-221).
gaccgagtggtaagtcttt

SEQ ID NO: 137464 - DNA, 19 bp, Homo sapiens
  siRNA target sequence for CASQ2 (NM_001232.1,285-303).
cggtgtcttcagataaggt

SEQ ID NO: 137465 - DNA, 19 bp, Homo sapiens
  siRNA target sequence for CASQ2 (NM_001232.1,314-332).
cagttccaactgaaagaaa

SEQ ID NO: 137466 - DNA, 19 bp, Homo sapiens
  siRNA target sequence for CASQ2 (NM_001232.1,349-367).
ggcccaggtccttgaacat

SEQ ID NO: 137467 - DNA, 19 bp, Homo sapiens
  siRNA target sequence for CASQ2 (NM_001232.1,350-368).
gcccaggtccttgaacata

SEQ ID NO: 137468 - DNA, 19 bp, Homo sapiens
  siRNA target sequence for CASQ2 (NM_001232.1,351-369).
cccaggtccttgaacataa

SEQ ID NO: 137469 - DNA, 19 bp, Homo sapiens
  siRNA target sequence for CASQ2 (NM_001232.1,464-482).
ggtgatcgcacaatagagt

SEQ ID NO: 137470 - DNA, 19 bp, Homo sapiens
  siRNA target sequence for CASQ2 (NM_001232.1,465-483).
gtgatcgcacaatagagtt

SEQ ID NO: 137471 - DNA, 19 bp, Homo sapiens
  siRNA target sequence for CASQ2 (NM_001232.1,515-533).
gagttcctcttggatctaa

SEQ ID NO: 137472 - DNA, 19 bp, Homo sapiens
  siRNA target sequence for CASQ2 (NM_001232.1,517-535).
gttcctcttggatctaatt

SEQ ID NO: 137473 - DNA, 19 bp, Homo sapiens
  siRNA target sequence for CASQ2 (NM_001232.1,579-597).
ccttcgaacgcattgaaga

SEQ ID NO: 137474 - DNA, 19 bp, Homo sapiens
  siRNA target sequence for CASQ2 (NM_001232.1,587-605).
cgcattgaagactacatca

SEQ ID NO: 137475 - DNA, 19 bp, Homo sapiens
  siRNA target sequence for CASQ2 (NM_001232.1,593-611).
gaagactacatcaaactca

SEQ ID NO: 137476 - DNA, 19 bp, Homo sapiens
  siRNA target sequence for CASQ2 (NM_001232.1,677-695).
cagccttacatcaaattct

SEQ ID NO: 137477 - DNA, 19 bp, Homo sapiens
  siRNA target sequence for CASQ2 (NM_001232.1,742-760).
gaatgaggttgacttctat

SEQ ID NO: 137478 - DNA, 19 bp, Homo sapiens
  siRNA target sequence for CASQ2 (NM_001232.1,757-775).
ctatgagccatttatggat

SEQ ID NO: 137479 - DNA, 19 bp, Homo sapiens
  siRNA target sequence for CASQ2 (NM_001232.1,865-883).
gcgcccagaagaaatgttt

SEQ ID NO: 137480 - DNA, 19 bp, Homo sapiens
  siRNA target sequence for CASQ2 (NM_001232.1,941-959).
gatccagatggctacgaat

SEQ ID NO: 137481 - DNA, 19 bp, Homo sapiens
  siRNA target sequence for CASQ2 (NM_001232.1,945-963).
cagatggctacgaattcct

SEQ ID NO: 137482 - DNA, 19 bp, Homo sapiens
  siRNA target sequence for CLGN (NM_004362.1,133-151).
gtcttctgttcatctcaat

SEQ ID NO: 137483 - DNA, 19 bp, Homo sapiens
  siRNA target sequence for CLGN (NM_004362.1,135-153).
cttctgttcatctcaatta

SEQ ID NO: 137484 - DNA, 19 bp, Homo sapiens
  siRNA target sequence for CLGN (NM_004362.1,219-237).
gttaatgaaagtgaacttt

SEQ ID NO: 137485 - DNA, 19 bp, Homo sapiens
  siRNA target sequence for CLGN (NM_004362.1,264-282).
caacctataggagaagtat

SEQ ID NO: 137486 - DNA, 19 bp, Homo sapiens
  siRNA target sequence for CLGN (NM_004362.1,314-332).
ggctggatgggtcttatca

SEQ ID NO: 137487 - DNA, 19 bp, Homo sapiens
  siRNA target sequence for CLGN (NM_004362.1,315-333).
gctggatgggtcttatcaa

SEQ ID NO: 137488 - DNA, 19 bp, Homo sapiens
  siRNA target sequence for CLGN (NM_004362.1,316-334).
ctggatgggtcttatcaaa

SEQ ID NO: 137489 - DNA, 19 bp, Homo sapiens
  siRNA target sequence for CLGN (NM_004362.1,353-371).
ggatgaggaaatttcaata

SEQ ID NO: 137490 - DNA, 19 bp, Homo sapiens
  siRNA target sequence for CLGN (NM_004362.1,359-377).
ggaaatttcaatatacgat

SEQ ID NO: 137491 - DNA, 19 bp, Homo sapiens
  siRNA target sequence for CLGN (NM_004362.1,421-439).
gtgacagaggactggtatt

SEQ ID NO: 137492 - DNA, 19 bp, Homo sapiens
  siRNA target sequence for CLGN (NM_004362.1,423-441).
gacagaggactggtattaa

SEQ ID NO: 137493 - DNA, 19 bp, Homo sapiens
  siRNA target sequence for CLGN (NM_004362.1,429-447).
ggactggtattaaaatcta

SEQ ID NO: 137494 - DNA, 19 bp, Homo sapiens
  siRNA target sequence for CLGN (NM_004362.1,448-466).
gagcaaagcatcatgcaat

SEQ ID NO: 137495 - DNA, 19 bp, Homo sapiens
  siRNA target sequence for CLGN (NM_004362.1,499-517).
ctgataaacccttgatagt

SEQ ID NO: 137496 - DNA, 19 bp, Homo sapiens
  siRNA target sequence for CLGN (NM_004362.1,508-526).
ccttgatagttcaatatga

SEQ ID NO: 137497 - DNA, 19 bp, Homo sapiens
  siRNA target sequence for CLGN (NM_004362.1,556-574).
gaggtgcatacattaaact

SEQ ID NO: 137498 - DNA, 19 bp, Homo sapiens
  siRNA target sequence for CLGN (NM_004362.1,576-594).
ctagcagacactgatgatt

SEQ ID NO: 137499 - DNA, 19 bp, Homo sapiens
  siRNA target sequence for CLGN (NM_004362.1,600-618).
ctggaaaacttttatgata

SEQ ID NO: 137500 - DNA, 19 bp, Homo sapiens
  siRNA target sequence for CLGN (NM_004362.1,622-640).
catcctatatcattatgtt

SEQ ID NO: 137501 - DNA, 19 bp, Homo sapiens
  siRNA target sequence for CLGN (NM_004362.1,741-759).
gatgtagaccttaaaaagt

SEQ ID NO: 137502 - DNA, 19 bp, Homo sapiens
  siRNA target sequence for CLGN (NM_004362.1,768-786).
gacaggaagactcatcttt

SEQ ID NO: 137503 - DNA, 19 bp, Homo sapiens
  siRNA target sequence for CLGN (NM_004362.1,814-832).
catttgaggtgttagttga

SEQ ID NO: 137504 - DNA, 19 bp, Homo sapiens
  siRNA target sequence for CLGN (NM_004362.1,819-837).
gaggtgttagttgatcaaa

SEQ ID NO: 137505 - DNA, 19 bp, Homo sapiens
  siRNA target sequence for CLGN (NM_004362.1,821-839).
ggtgttagttgatcaaaca

SEQ ID NO: 137506 - DNA, 19 bp, Homo sapiens
  siRNA target sequence for CLGN (NM_004362.1,824-842).
gttagttgatcaaacagtt

SEQ ID NO: 137507 - DNA, 19 bp, Homo sapiens
  siRNA target sequence for CLGN (NM_004362.1,828-846).
gttgatcaaacagttgtaa

SEQ ID NO: 137508 - DNA, 19 bp, Homo sapiens
  siRNA target sequence for CLGN (NM_004362.1,884-902).
caaacctcccaaagaaatt

SEQ ID NO: 137509 - DNA, 19 bp, Homo sapiens
  siRNA target sequence for CLGN (NM_004362.1,1002-1020).
gcccaaatagaagattcaa

SEQ ID NO: 137510 - DNA, 19 bp, Homo sapiens
  siRNA target sequence for CLGN (NM_004362.1,1004-1022).
ccaaatagaagattcaagt

SEQ ID NO: 137511 - DNA, 19 bp, Homo sapiens
  siRNA target sequence for CLGN (NM_004362.1,1042-1060).
ggcttgatgatgaaccaaa

SEQ ID NO: 137512 - DNA, 19 bp, Homo sapiens
  siRNA target sequence for CLGN (NM_004362.1,1172-1190).
gtggaaacctcccatgata

SEQ ID NO: 137513 - DNA, 19 bp, Homo sapiens
  siRNA target sequence for CLGN (NM_004362.1,1174-1192).
ggaaacctcccatgataga

SEQ ID NO: 137514 - DNA, 19 bp, Homo sapiens
  siRNA target sequence for CLGN (NM_004362.1,1175-1193).
gaaacctcccatgatagat

SEQ ID NO: 137515 - DNA, 19 bp, Homo sapiens
  siRNA target sequence for CLGN (NM_004362.1,1219-1237).
gacctccactggtcgataa

SEQ ID NO: 137516 - DNA, 19 bp, Homo sapiens
  siRNA target sequence for CLGN (NM_004362.1,1224-1242).
ccactggtcgataatccta

SEQ ID NO: 137517 - DNA, 19 bp, Homo sapiens
  siRNA target sequence for CLGN (NM_004362.1,1229-1247).
ggtcgataatcctaactat

SEQ ID NO: 137518 - DNA, 19 bp, Homo sapiens
  siRNA target sequence for CLGN (NM_004362.1,1259-1277).
gagtcctcgaaaaattcct

SEQ ID NO: 137519 - DNA, 19 bp, Homo sapiens
  siRNA target sequence for CLGN (NM_004362.1,1276-1294).
ctaatccagattatttcga

SEQ ID NO: 137520 - DNA, 19 bp, Homo sapiens
  siRNA target sequence for CLGN (NM_004362.1,1292-1310).
cgaagatgatcatccattt

SEQ ID NO: 137521 - DNA, 19 bp, Homo sapiens
  siRNA target sequence for CLGN (NM_004362.1,1357-1375).
cctctgatatctactttga

SEQ ID NO: 137522 - DNA, 19 bp, Homo sapiens
  siRNA target sequence for CLGN (NM_004362.1,1425-1443).
gatggttggagatggaaaa

SEQ ID NO: 137523 - DNA, 19 bp, Homo sapiens
  siRNA target sequence for CLGN (NM_004362.1,1459-1477).
ctaataagcctggtgtatt

SEQ ID NO: 137524 - DNA, 19 bp, Homo sapiens
  siRNA target sequence for CLGN (NM_004362.1,1467-1485).
cctggtgtattaaaacagt

SEQ ID NO: 137525 - DNA, 19 bp, Homo sapiens
  siRNA target sequence for CLGN (NM_004362.1,1468-1486).
ctggtgtattaaaacagtt

SEQ ID NO: 137526 - DNA, 19 bp, Homo sapiens
  siRNA target sequence for CLGN (NM_004362.1,1470-1488).
ggtgtattaaaacagttaa

SEQ ID NO: 137527 - DNA, 19 bp, Homo sapiens
  siRNA target sequence for CLGN (NM_004362.1,1514-1532).
gctttggttgatttatctt

SEQ ID NO: 137528 - DNA, 19 bp, Homo sapiens
  siRNA target sequence for CLGN (NM_004362.1,1539-1557).
gcaggagtgccaatagcat

SEQ ID NO: 137529 - DNA, 19 bp, Homo sapiens
  siRNA target sequence for CLGN (NM_004362.1,1540-1558).
caggagtgccaatagcatt

SEQ ID NO: 137530 - DNA, 19 bp, Homo sapiens
  siRNA target sequence for CLGN (NM_004362.1,1542-1560).
ggagtgccaatagcattaa

SEQ ID NO: 137531 - DNA, 19 bp, Homo sapiens
  siRNA target sequence for CLGN (NM_004362.1,1543-1561).
gagtgccaatagcattaat

SEQ ID NO: 137532 - DNA, 19 bp, Homo sapiens
  siRNA target sequence for CLGN (NM_004362.1,1547-1565).
gccaatagcattaattact

SEQ ID NO: 137533 - DNA, 19 bp, Homo sapiens
  siRNA target sequence for CLGN (NM_004362.1,1882-1900).
ctggagatgggccgataaa

SEQ ID NO: 137534 - DNA, 19 bp, Homo sapiens
  siRNA target sequence for CLGN (NM_004362.1,1884-1902).
ggagatgggccgataaagt

SEQ ID NO: 137535 - DNA, 19 bp, Homo sapiens
  siRNA target sequence for CLGN (NM_004362.1,1901-1919).
gtcagtacgcaaaagaaga

SEQ ID NO: 137536 - DNA, 19 bp, Homo sapiens
  siRNA target sequence for FLJ20793 (NM_019022.3,168-186).
gctctgcgccacagttgtt

SEQ ID NO: 137537 - DNA, 19 bp, Homo sapiens
  siRNA target sequence for FLJ20793 (NM_019022.3,171-189).
ctgcgccacagttgttgta

SEQ ID NO: 137538 - DNA, 19 bp, Homo sapiens
  siRNA target sequence for FLJ20793 (NM_019022.3,173-191).
gcgccacagttgttgtact

SEQ ID NO: 137539 - DNA, 19 bp, Homo sapiens
  siRNA target sequence for FLJ20793 (NM_019022.3,174-192).
cgccacagttgttgtactt

SEQ ID NO: 137540 - DNA, 19 bp, Homo sapiens
  siRNA target sequence for FLJ20793 (NM_019022.3,176-194).
ccacagttgttgtacttga

SEQ ID NO: 137541 - DNA, 19 bp, Homo sapiens
  siRNA target sequence for FLJ20793 (NM_019022.3,177-195).
cacagttgttgtacttgat

SEQ ID NO: 137542 - DNA, 19 bp, Homo sapiens
  siRNA target sequence for FLJ20793 (NM_019022.3,198-216).
ggtcgtctgtaaaggattt

SEQ ID NO: 137543 - DNA, 19 bp, Homo sapiens
  siRNA target sequence for FLJ20793 (NM_019022.3,201-219).
cgtctgtaaaggatttgta

SEQ ID NO: 137544 - DNA, 19 bp, Homo sapiens
  siRNA target sequence for FLJ20793 (NM_019022.3,212-230).
gatttgtagaagatttaga

SEQ ID NO: 137545 - DNA, 19 bp, Homo sapiens
  siRNA target sequence for FLJ20793 (NM_019022.3,223-241).
gatttagatgaatcgttta

SEQ ID NO: 137546 - DNA, 19 bp, Homo sapiens
  siRNA target sequence for FLJ20793 (NM_019022.3,335-353).
gtcttgagatgaaaagcat

SEQ ID NO: 137547 - DNA, 19 bp, Homo sapiens
  siRNA target sequence for FLJ20793 (NM_019022.3,350-368).
gcattggttctccagttaa

SEQ ID NO: 137548 - DNA, 19 bp, Homo sapiens
  siRNA target sequence for FLJ20793 (NM_019022.3,359-377).
ctccagttaaggttggaaa

SEQ ID NO: 137549 - DNA, 19 bp, Homo sapiens
  siRNA target sequence for FLJ20793 (NM_019022.3,378-396).
gatggatgctacttcctat

SEQ ID NO: 137550 - DNA, 19 bp, Homo sapiens
  siRNA target sequence for FLJ20793 (NM_019022.3,418-436).
ggagttcgaggttatccaa

SEQ ID NO: 137551 - DNA, 19 bp, Homo sapiens
  siRNA target sequence for FLJ20793 (NM_019022.3,424-442).
cgaggttatccaacaatta

SEQ ID NO: 137552 - DNA, 19 bp, Homo sapiens
  siRNA target sequence for FLJ20793 (NM_019022.3,425-443).
gaggttatccaacaattaa

SEQ ID NO: 137553 - DNA, 19 bp, Homo sapiens
  siRNA target sequence for FLJ20793 (NM_019022.3,454-472).
ggggacttggcatataatt

SEQ ID NO: 137554 - DNA, 19 bp, Homo sapiens
  siRNA target sequence for FLJ20793 (NM_019022.3,455-473).
gggacttggcatataatta

SEQ ID NO: 137555 - DNA, 19 bp, Homo sapiens
  siRNA target sequence for FLJ20793 (NM_019022.3,457-475).
gacttggcatataattata

SEQ ID NO: 137556 - DNA, 19 bp, Homo sapiens
  siRNA target sequence for FLJ20793 (NM_019022.3,518-536).
gagtatctggggctctaat

SEQ ID NO: 137557 - DNA, 19 bp, Homo sapiens
  siRNA target sequence for FLJ20793 (NM_019022.3,576-594).
gaagagacaccgtgtattt

SEQ ID NO: 137558 - DNA, 19 bp, Homo sapiens
  siRNA target sequence for FLJ20793 (NM_019022.3,581-599).
gacaccgtgtatttttcgt

SEQ ID NO: 137559 - DNA, 19 bp, Homo sapiens
  siRNA target sequence for FLJ20793 (NM_019022.3,583-601).
caccgtgtatttttcgttt

SEQ ID NO: 137560 - DNA, 19 bp, Homo sapiens
  siRNA target sequence for FLJ20793 (NM_019022.3,585-603).
ccgtgtatttttcgtttat

SEQ ID NO: 137561 - DNA, 19 bp, Homo sapiens
  siRNA target sequence for FLJ20793 (NM_019022.3,744-762).
caaagatgaaacttacttt

SEQ ID NO: 137562 - DNA, 19 bp, Homo sapiens
  siRNA target sequence for FLJ20793 (NM_019022.3,781-799).
gatggtgatctgtcatcat

SEQ ID NO: 137563 - DNA, 19 bp, Homo sapiens
  siRNA target sequence for FLJ20793 (NM_019022.3,790-808).
ctgtcatcatggatcaaca

SEQ ID NO: 137564 - DNA, 19 bp, Homo sapiens
  siRNA target sequence for FLJ20793 (NM_019022.3,801-819).
gatcaacagggaaaggttt

SEQ ID NO: 137565 - DNA, 19 bp, Homo sapiens
  siRNA target sequence for FLJ20793 (NM_019022.3,809-827).
gggaaaggtttcagaatta

SEQ ID NO: 137566 - DNA, 19 bp, Homo sapiens
  siRNA target sequence for FLJ20793 (NM_019022.3,822-840).
gaattaccttgctatggat

SEQ ID NO: 137567 - DNA, 19 bp, Homo sapiens
  siRNA target sequence for FLJ20793 (NM_019022.3,922-940).
cataccagattgaagtcaa

SEQ ID NO: 137568 - DNA, 19 bp, Homo sapiens
  siRNA target sequence for FLJ20793 (NM_019022.3,927-945).
cagattgaagtcaattatt

SEQ ID NO: 137569 - DNA, 19 bp, Homo sapiens
  siRNA target sequence for FLJ20793 (NM_019022.3,972-990).
cctcttccatagggatttt

SEQ ID NO: 137570 - DNA, 19 bp, Homo sapiens
  siRNA target sequence for FLJ20793 (NM_019022.3,1000-1018).
cacatggatggaaatgact

SEQ ID NO: 137571 - DNA, 19 bp, Homo sapiens
  siRNA target sequence for FLJ20793 (NM_019022.3,1047-1065).
gacagtcccaactgtagtt

SEQ ID NO: 137572 - DNA, 19 bp, Homo sapiens
  siRNA target sequence for FLJ20793 (NM_019022.3,1049-1067).
cagtcccaactgtagttgt

SEQ ID NO: 137573 - DNA, 19 bp, Homo sapiens
  siRNA target sequence for FLJ20793 (NM_019022.3,1055-1073).
caactgtagttgtactgaa

SEQ ID NO: 137574 - DNA, 19 bp, Homo sapiens
  siRNA target sequence for FLJ20793 (NM_019022.3,1076-1094).
cttcaaaccagcaatattt

SEQ ID NO: 137575 - DNA, 19 bp, Homo sapiens
  siRNA target sequence for FLJ20793 (NM_019022.3,1099-1117).
ctagatagacagattaaga

SEQ ID NO: 137576 - DNA, 19 bp, Homo sapiens
  siRNA target sequence for FLJ20793 (NM_019022.3,1106-1124).
gacagattaagaatgttga

SEQ ID NO: 137577 - DNA, 19 bp, Homo sapiens
  siRNA target sequence for FLJ20793 (NM_019022.3,1126-1144).
gacatggtccagtttatta

SEQ ID NO: 137578 - DNA, 19 bp, Homo sapiens
  siRNA target sequence for FLJ20793 (NM_019022.3,1132-1150).
gtccagtttattaataaca

SEQ ID NO: 137579 - DNA, 19 bp, Homo sapiens
  siRNA target sequence for FLJ20793 (NM_019022.3,1222-1240).
gccaaatctactattgtgt

SEQ ID NO: 137580 - DNA, 19 bp, Homo sapiens
  siRNA target sequence for FLJ20793 (NM_019022.3,1288-1306).
ccactgggtgtcatcagta

SEQ ID NO: 137581 - DNA, 19 bp, Homo sapiens
  siRNA target sequence for FLJ20793 (NM_019022.3,1304-1322).
gtatcatgtgctatggaat

SEQ ID NO: 137582 - DNA, 19 bp, Homo sapiens
  siRNA target sequence for FLJ20793 (NM_019022.3,1332-1350).
cgacacagatggaggttat

SEQ ID NO: 137583 - DNA, 19 bp, Homo sapiens
  siRNA target sequence for FLJ20793 (NM_019022.3,1337-1355).
cagatggaggttatataga

SEQ ID NO: 137584 - DNA, 19 bp, Homo sapiens
  siRNA target sequence for FLJ20793 (NM_019022.3,1346-1364).
gttatatagaagaacgata

SEQ ID NO: 137585 - DNA, 19 bp, Homo sapiens
  siRNA target sequence for FLJ20793 (NM_019022.3,1360-1378).
cgatatgaagtgtctaaaa

SEQ ID NO: 137586 - DNA, 19 bp, Homo sapiens
  siRNA target sequence for FLJ20793 (NM_019022.3,1431-1449).
cagcagtggaggatctgta

SEQ ID NO: 137587 - DNA, 19 bp, Homo sapiens
  siRNA target sequence for FLJ20793 (NM_019022.3,1467-1485).
gcccaaggatgtattagaa

SEQ ID NO: 137588 - DNA, 19 bp, Homo sapiens
  siRNA target sequence for AGPAT2 (NM_006412.2,265-283).
gtgcgaagcttcaagtact

SEQ ID NO: 137589 - DNA, 19 bp, Homo sapiens
  siRNA target sequence for AGPAT2 (NM_006412.2,268-286).
cgaagcttcaagtactttt

SEQ ID NO: 137590 - DNA, 19 bp, Homo sapiens
  siRNA target sequence for AGPAT2 (NM_006412.2,448-466).
cccgtgggcctcatcatgt

SEQ ID NO: 137591 - DNA, 19 bp, Homo sapiens
  siRNA target sequence for AGPAT2 (NM_006412.2,558-576).
cctcaaagtgtggatctat

SEQ ID NO: 137592 - DNA, 19 bp, Homo sapiens
  siRNA target sequence for AGPAT2 (NM_006412.2,664-682).
gtccccgtggtgtactctt

SEQ ID NO: 137593 - DNA, 19 bp, Homo sapiens
  siRNA target sequence for AIF1 (NM_001623.3,77-95).
gagccaaaccagggattta

SEQ ID NO: 137594 - DNA, 19 bp, Homo sapiens
  siRNA target sequence for AIF1 (NM_001623.3,152-170).
gatcaacaagcaattccta

SEQ ID NO: 137595 - DNA, 19 bp, Homo sapiens
  siRNA target sequence for AIF1 (NM_001623.3,167-185).
cctagacgatcccaaatat

SEQ ID NO: 137596 - DNA, 19 bp, Homo sapiens
  siRNA target sequence for AIF1 (NM_001623.3,168-186).
ctagacgatcccaaatata

SEQ ID NO: 137597 - DNA, 19 bp, Homo sapiens
  siRNA target sequence for AIF1 (NM_001623.3,171-189).
gacgatcccaaatatagca

SEQ ID NO: 137598 - DNA, 19 bp, Homo sapiens
  siRNA target sequence for AIF1 (NM_001623.3,239-257).
ggagtttgaccttaatgga

SEQ ID NO: 137599 - DNA, 19 bp, Homo sapiens
  siRNA target sequence for AIF1 (NM_001623.3,261-279).
ggcgatattgatatcatgt

SEQ ID NO: 137600 - DNA, 19 bp, Homo sapiens
  siRNA target sequence for AKAP13 (NM_006738.4,197-215).
cttatatggtgattgtgtt

SEQ ID NO: 137601 - DNA, 19 bp, Homo sapiens
  siRNA target sequence for AKAP13 (NM_006738.4,290-308).
cctccgtcactgtacaagt

SEQ ID NO: 137602 - DNA, 19 bp, Homo sapiens
  siRNA target sequence for AKAP13 (NM_006738.4,291-309).
ctccgtcactgtacaagta

SEQ ID NO: 137603 - DNA, 19 bp, Homo sapiens
  siRNA target sequence for AKAP13 (NM_006738.4,293-311).
ccgtcactgtacaagtact

SEQ ID NO: 137604 - DNA, 19 bp, Homo sapiens
  siRNA target sequence for AKAP13 (NM_006738.4,312-330).
cggaaggtcagttctgata

SEQ ID NO: 137605 - DNA, 19 bp, Homo sapiens
  siRNA target sequence for AKAP13 (NM_006738.4,314-332).
gaaggtcagttctgataca

SEQ ID NO: 137606 - DNA, 19 bp, Homo sapiens
  siRNA target sequence for AKAP13 (NM_006738.4,422-440).
ggctgaagaagactttcat

SEQ ID NO: 137607 - DNA, 19 bp, Homo sapiens
  siRNA target sequence for AKAP13 (NM_006738.4,498-516).
cagcaggctttgaacttta

SEQ ID NO: 137608 - DNA, 19 bp, Homo sapiens
  siRNA target sequence for AKAP13 (NM_006738.4,606-624).
cccacggagtggaatgtat

SEQ ID NO: 137609 - DNA, 19 bp, Homo sapiens
  siRNA target sequence for AKAP13 (NM_006738.4,607-625).
ccacggagtggaatgtatt

SEQ ID NO: 137610 - DNA, 19 bp, Homo sapiens
  siRNA target sequence for AKAP13 (NM_006738.4,629-647).
gacagatcagagtttgcat

SEQ ID NO: 137611 - DNA, 19 bp, Homo sapiens
  siRNA target sequence for AKAP13 (NM_006738.4,857-875).
ctggagcagtttatcctat

SEQ ID NO: 137612 - DNA, 19 bp, Homo sapiens
  siRNA target sequence for AKAP13 (NM_006738.4,860-878).
gagcagtttatcctatgaa

SEQ ID NO: 137613 - DNA, 19 bp, Homo sapiens
  siRNA target sequence for AKAP13 (NM_006738.4,862-880).
gcagtttatcctatgaaat

SEQ ID NO: 137614 - DNA, 19 bp, Homo sapiens
  siRNA target sequence for AKAP13 (NM_006738.4,912-930).
cgagagttggacatctata

SEQ ID NO: 137615 - DNA, 19 bp, Homo sapiens
  siRNA target sequence for AKAP13 (NM_006738.4,915-933).
gagttggacatctatacat

SEQ ID NO: 137616 - DNA, 19 bp, Homo sapiens
  siRNA target sequence for AKAP13 (NM_006738.4,917-935).
gttggacatctatacatta

SEQ ID NO: 137617 - DNA, 19 bp, Homo sapiens
  siRNA target sequence for AKAP13 (NM_006738.4,921-939).
gacatctatacattaacct

SEQ ID NO: 137618 - DNA, 19 bp, Homo sapiens
  siRNA target sequence for AKAP13 (NM_006738.4,944-962).
gtctgattcacatcatgaa

SEQ ID NO: 137619 - DNA, 19 bp, Homo sapiens
  siRNA target sequence for AKAP13 (NM_006738.4,980-998).
cggttgcactggaccaatt

SEQ ID NO: 137620 - DNA, 19 bp, Homo sapiens
  siRNA target sequence for AKAP13 (NM_006738.4,981-999).
ggttgcactggaccaattt

SEQ ID NO: 137621 - DNA, 19 bp, Homo sapiens
  siRNA target sequence for AKAP13 (NM_006738.4,982-1000).
gttgcactggaccaatttt

SEQ ID NO: 137622 - DNA, 19 bp, Homo sapiens
  siRNA target sequence for AKAP13 (NM_006738.4,985-1003).
gcactggaccaatttttaa

SEQ ID NO: 137623 - DNA, 19 bp, Homo sapiens
  siRNA target sequence for AKAP13 (NM_006738.4,1057-1075).
gtcttatgcccttaatgat

SEQ ID NO: 137624 - DNA, 19 bp, Homo sapiens
  siRNA target sequence for AKAP13 (NM_006738.4,1345-1363).
gaactgtatctgatcaaga

SEQ ID NO: 137625 - DNA, 19 bp, Homo sapiens
  siRNA target sequence for AKAP13 (NM_006738.4,1533-1551).
ggcacagcccagtattcct

SEQ ID NO: 137626 - DNA, 19 bp, Homo sapiens
  siRNA target sequence for AKAP13 (NM_006738.4,1601-1619).
cactgcaggggaaatggaa

SEQ ID NO: 137627 - DNA, 19 bp, Homo sapiens
  siRNA target sequence for AKAP13 (NM_006738.4,1662-1680).
cttcagggaggggaaagta

SEQ ID NO: 137628 - DNA, 19 bp, Homo sapiens
  siRNA target sequence for AKAP13 (NM_006738.4,1728-1746).
gacgtgcacgtcacaagta

SEQ ID NO: 137629 - DNA, 19 bp, Homo sapiens
  siRNA target sequence for AKAP13 (NM_006738.4,1741-1759).
caagtaagcctgtggataa

SEQ ID NO: 137630 - DNA, 19 bp, Homo sapiens
  siRNA target sequence for AKAP13 (NM_006738.4,1748-1766).
gcctgtggataaaatcagt

SEQ ID NO: 137631 - DNA, 19 bp, Homo sapiens
  siRNA target sequence for AKAP13 (NM_006738.4,1792-1810).
gttccctggatggtaacaa

SEQ ID NO: 137632 - DNA, 19 bp, Homo sapiens
  siRNA target sequence for AKAP13 (NM_006738.4,1818-1836).
gagtcttcacttgcattta

SEQ ID NO: 137633 - DNA, 19 bp, Homo sapiens
  siRNA target sequence for AKAP13 (NM_006738.4,1820-1838).
gtcttcacttgcatttagt

SEQ ID NO: 137634 - DNA, 19 bp, Homo sapiens
  siRNA target sequence for AKAP13 (NM_006738.4,1908-1926).
gctccagtagatcagaatt

SEQ ID NO: 137635 - DNA, 19 bp, Homo sapiens
  siRNA target sequence for AKAP13 (NM_006738.4,1955-1973).
caagatttcagatggatta

SEQ ID NO: 137636 - DNA, 19 bp, Homo sapiens
  siRNA target sequence for AKAP13 (NM_006738.4,1965-1983).
gatggattagaaccttata

SEQ ID NO: 137637 - DNA, 19 bp, Homo sapiens
  siRNA target sequence for AKAP13 (NM_006738.4,1969-1987).
gattagaaccttatactct

SEQ ID NO: 137638 - DNA, 19 bp, Homo sapiens
  siRNA target sequence for AKAP13 (NM_006738.4,2000-2018).
cataggtgaggcaatgtca

SEQ ID NO: 137639 - DNA, 19 bp, Homo sapiens
  siRNA target sequence for AKAP13 (NM_006738.4,2131-2149).
ctacaactggagacgataa

SEQ ID NO: 137640 - DNA, 19 bp, Homo sapiens
  siRNA target sequence for AKAP13 (NM_006738.4,2194-2212).
gtggcgatttggttgcaaa

SEQ ID NO: 137641 - DNA, 19 bp, Homo sapiens
  siRNA target sequence for AKAP13 (NM_006738.4,2345-2363).
ccaggaacgtgcggatttt

SEQ ID NO: 137642 - DNA, 19 bp, Homo sapiens
  siRNA target sequence for AKAP13 (NM_006738.4,2348-2366).
ggaacgtgcggatttttgt

SEQ ID NO: 137643 - DNA, 19 bp, Homo sapiens
  siRNA target sequence for AKAP13 (NM_006738.4,2387-2405).
caaaggccaacgaaaagat

SEQ ID NO: 137644 - DNA, 19 bp, Homo sapiens
  siRNA target sequence for AKAP13 (NM_006738.4,2408-2426).
gaaactagataaaccttta

SEQ ID NO: 137645 - DNA, 19 bp, Homo sapiens
  siRNA target sequence for AKAP13 (NM_006738.4,2492-2510).
gccagaccaggcagtaata

SEQ ID NO: 137646 - DNA, 19 bp, Homo sapiens
  siRNA target sequence for AKAP13 (NM_006738.4,2493-2511).
ccagaccaggcagtaatat

SEQ ID NO: 137647 - DNA, 19 bp, Homo sapiens
  siRNA target sequence for AKAP13 (NM_006738.4,2505-2523).
gtaatatcagacagtactt

SEQ ID NO: 137648 - DNA, 19 bp, Homo sapiens
  siRNA target sequence for AKAP13 (NM_006738.4,2545-2563).
gcagtgaatcagtaaccaa

SEQ ID NO: 137649 - DNA, 19 bp, Homo sapiens
  siRNA target sequence for AKAP13 (NM_006738.4,2561-2579).
caaggatgacgcactttct

SEQ ID NO: 137650 - DNA, 19 bp, Homo sapiens
  siRNA target sequence for AKAP13 (NM_006738.4,2564-2582).
ggatgacgcactttctttt

SEQ ID NO: 137651 - DNA, 19 bp, Homo sapiens
  siRNA target sequence for AKAP13 (NM_006738.4,2610-2628).
gcaactcctgaactacata

SEQ ID NO: 137652 - DNA, 19 bp, Homo sapiens
  siRNA target sequence for AKAP13 (NM_006738.4,2622-2640).
ctacatacagctacagatt

SEQ ID NO: 137653 - DNA, 19 bp, Homo sapiens
  siRNA target sequence for AKAP13 (NM_006738.4,2625-2643).
catacagctacagattata

SEQ ID NO: 137654 - DNA, 19 bp, Homo sapiens
  siRNA target sequence for AKAP13 (NM_006738.4,2963-2981).
ggtgacctgttcctctatt

SEQ ID NO: 137655 - DNA, 19 bp, Homo sapiens
  siRNA target sequence for AKAP13 (NM_006738.4,2964-2982).
gtgacctgttcctctatta

SEQ ID NO: 137656 - DNA, 19 bp, Homo sapiens
  siRNA target sequence for AKAP13 (NM_006738.4,2968-2986).
cctgttcctctattaagga

SEQ ID NO: 137657 - DNA, 19 bp, Homo sapiens
  siRNA target sequence for AKAP13 (NM_006738.4,2969-2987).
ctgttcctctattaaggaa

SEQ ID NO: 137658 - DNA, 19 bp, Homo sapiens
  siRNA target sequence for AKAP13 (NM_006738.4,2971-2989).
gttcctctattaaggaaaa

SEQ ID NO: 137659 - DNA, 19 bp, Homo sapiens
  siRNA target sequence for AKAP13 (NM_006738.4,3030-3048).
ccacctcctggacaagata

SEQ ID NO: 137660 - DNA, 19 bp, Homo sapiens
  siRNA target sequence for AKAP13 (NM_006738.4,3099-3117).
gcacttcagctaagtaatt

SEQ ID NO: 137661 - DNA, 19 bp, Homo sapiens
  siRNA target sequence for AKAP13 (NM_006738.4,3327-3345).
gggtccgatgctcttaact

SEQ ID NO: 137662 - DNA, 19 bp, Homo sapiens
  siRNA target sequence for AKAP13 (NM_006738.4,3426-3444).
gatgtgacggtggatgtta

SEQ ID NO: 137663 - DNA, 19 bp, Homo sapiens
  siRNA target sequence for AKAP13 (NM_006738.4,3437-3455).
ggatgttacaggggttaat

SEQ ID NO: 137664 - DNA, 19 bp, Homo sapiens
  siRNA target sequence for AKAP13 (NM_006738.4,3507-3525).
caagacatcctgattccaa

SEQ ID NO: 137665 - DNA, 19 bp, Homo sapiens
  siRNA target sequence for AKAP13 (NM_006738.4,3799-3817).
ctggtgtgagggaagtcat

SEQ ID NO: 137666 - DNA, 19 bp, Homo sapiens
  siRNA target sequence for AKAP13 (NM_006738.4,3943-3961).
ctgtcatcgaacaagtcaa

SEQ ID NO: 137667 - DNA, 19 bp, Homo sapiens
  siRNA target sequence for AKAP13 (NM_006738.4,3967-3985).
ctggagcactgcttactga

SEQ ID NO: 137668 - DNA, 19 bp, Homo sapiens
  siRNA target sequence for AKAP13 (NM_006738.4,4022-4040).
gttgggtcctctcactaaa

SEQ ID NO: 137669 - DNA, 19 bp, Homo sapiens
  siRNA target sequence for AKAP13 (NM_006738.4,4025-4043).
gggtcctctcactaaagga

SEQ ID NO: 137670 - DNA, 19 bp, Homo sapiens
  siRNA target sequence for AKAP13 (NM_006738.4,4130-4148).
gagccttgcaggatgtttt

SEQ ID NO: 137671 - DNA, 19 bp, Homo sapiens
  siRNA target sequence for AKAP13 (NM_006738.4,4220-4238).
cgtgaaagctgaagatgaa

SEQ ID NO: 137672 - DNA, 19 bp, Homo sapiens
  siRNA target sequence for AKAP13 (NM_006738.4,4249-4267).
gagcaagttcaatttctga

SEQ ID NO: 137673 - DNA, 19 bp, Homo sapiens
  siRNA target sequence for AKAP13 (NM_006738.4,4318-4336).
caatgacccaggcgataaa

SEQ ID NO: 137674 - DNA, 19 bp, Homo sapiens
  siRNA target sequence for AKAP13 (NM_006738.4,4338-4356).
cgagaaaactggtgtacaa

SEQ ID NO: 137675 - DNA, 19 bp, Homo sapiens
  siRNA target sequence for AKAP13 (NM_006738.4,4339-4357).
gagaaaactggtgtacaat

SEQ ID NO: 137676 - DNA, 19 bp, Homo sapiens
  siRNA target sequence for AKAP13 (NM_006738.4,4402-4420).
gcccagaatgtgagaactt

SEQ ID NO: 137677 - DNA, 19 bp, Homo sapiens
  siRNA target sequence for AKAP13 (NM_006738.4,4441-4459).
gagagtgtacctcaaaaca

SEQ ID NO: 137678 - DNA, 19 bp, Homo sapiens
  siRNA target sequence for AKAP13 (NM_006738.4,4486-4504).
gtgattctgacctctttca

SEQ ID NO: 137679 - DNA, 19 bp, Homo sapiens
  siRNA target sequence for AKAP13 (NM_006738.4,4554-4572).
gagcatttggcctgtgata

SEQ ID NO: 137680 - DNA, 19 bp, Homo sapiens
  siRNA target sequence for AKAP13 (NM_006738.4,4613-4631).
ggaccgacattcttctcat

SEQ ID NO: 137681 - DNA, 19 bp, Homo sapiens
  siRNA target sequence for AKAP13 (NM_006738.4,4778-4796).
ggagatggacagtatcact

SEQ ID NO: 137682 - DNA, 19 bp, Homo sapiens
  siRNA target sequence for AKAP13 (NM_006738.4,4953-4971).
ggcctgagtgctgacttta

SEQ ID NO: 137683 - DNA, 19 bp, Homo sapiens
  siRNA target sequence for AKAP13 (NM_006738.4,4956-4974).
ctgagtgctgactttaatt

SEQ ID NO: 137684 - DNA, 19 bp, Homo sapiens
  siRNA target sequence for AKAP13 (NM_006738.4,4962-4980).
gctgactttaattacagaa

SEQ ID NO: 137685 - DNA, 19 bp, Homo sapiens
  siRNA target sequence for AKAP13 (NM_006738.4,5024-5042).
caagccatcctcatctcta

SEQ ID NO: 137686 - DNA, 19 bp, Homo sapiens
  siRNA target sequence for AKAP13 (NM_006738.4,5069-5087).
gctcagacacccattcagt

SEQ ID NO: 137687 - DNA, 19 bp, Homo sapiens
  siRNA target sequence for AKAP13 (NM_006738.4,5188-5206).
ctaagcagcagggatttaa

SEQ ID NO: 137688 - DNA, 19 bp, Homo sapiens
  siRNA target sequence for AKAP13 (NM_006738.4,5193-5211).
cagcagggatttaattact

SEQ ID NO: 137689 - DNA, 19 bp, Homo sapiens
  siRNA target sequence for AKAP13 (NM_006738.4,5230-5248).
ctccattgacaaaatccat

SEQ ID NO: 137690 - DNA, 19 bp, Homo sapiens
  siRNA target sequence for AKAP13 (NM_006738.4,5309-5327).
ccacaataccagtgctaat

SEQ ID NO: 137691 - DNA, 19 bp, Homo sapiens
  siRNA target sequence for AKAP13 (NM_006738.4,5330-5348).
gactgagagtataacagaa

SEQ ID NO: 137692 - DNA, 19 bp, Homo sapiens
  siRNA target sequence for AKAP13 (NM_006738.4,5338-5356).
gtataacagaagagaacta

SEQ ID NO: 137693 - DNA, 19 bp, Homo sapiens
  siRNA target sequence for AKAP13 (NM_006738.4,5410-5428).
caaaagtcagtcgtacatt

SEQ ID NO: 137694 - DNA, 19 bp, Homo sapiens
  siRNA target sequence for AKAP13 (NM_006738.4,5421-5439).
cgtacattcagctacatca

SEQ ID NO: 137695 - DNA, 19 bp, Homo sapiens
  siRNA target sequence for AKAP13 (NM_006738.4,5422-5440).
gtacattcagctacatcaa

SEQ ID NO: 137696 - DNA, 19 bp, Homo sapiens
  siRNA target sequence for AKAP13 (NM_006738.4,5545-5563).
ctgtcaacgggcacacttt

SEQ ID NO: 137697 - DNA, 19 bp, Homo sapiens
  siRNA target sequence for AKAP13 (NM_006738.4,5593-5611).
gctgtagccagtgtatgaa

SEQ ID NO: 137698 - DNA, 19 bp, Homo sapiens
  siRNA target sequence for AKAP13 (NM_006738.4,5624-5642).
caaagatgcctatacttgt

SEQ ID NO: 137699 - DNA, 19 bp, Homo sapiens
  siRNA target sequence for AKAP13 (NM_006738.4,5631-5649).
gcctatacttgtgcaaatt

SEQ ID NO: 137700 - DNA, 19 bp, Homo sapiens
  siRNA target sequence for AKAP13 (NM_006738.4,5733-5751).
caggcacatgacacatcat

SEQ ID NO: 137701 - DNA, 19 bp, Homo sapiens
  siRNA target sequence for AKAP13 (NM_006738.4,5735-5753).
ggcacatgacacatcatca

SEQ ID NO: 137702 - DNA, 19 bp, Homo sapiens
  siRNA target sequence for AKAP13 (NM_006738.4,5752-5770).
cactgcccacggtcattat

SEQ ID NO: 137703 - DNA, 19 bp, Homo sapiens
  siRNA target sequence for AKAP13 (NM_006738.4,5754-5772).
ctgcccacggtcattatga

SEQ ID NO: 137704 - DNA, 19 bp, Homo sapiens
  siRNA target sequence for AKAP13 (NM_006738.4,5756-5774).
gcccacggtcattatgaga

SEQ ID NO: 137705 - DNA, 19 bp, Homo sapiens
  siRNA target sequence for AKAP13 (NM_006738.4,5757-5775).
cccacggtcattatgagaa

SEQ ID NO: 137706 - DNA, 19 bp, Homo sapiens
  siRNA target sequence for AKAP13 (NM_006738.4,5758-5776).
ccacggtcattatgagaaa

SEQ ID NO: 137707 - DNA, 19 bp, Homo sapiens
  siRNA target sequence for AKAP13 (NM_006738.4,5761-5779).
cggtcattatgagaaacaa

SEQ ID NO: 137708 - DNA, 19 bp, Homo sapiens
  siRNA target sequence for AKAP13 (NM_006738.4,5833-5851).
ccgctaccaccccaatatt

SEQ ID NO: 137709 - DNA, 19 bp, Homo sapiens
  siRNA target sequence for AKAP13 (NM_006738.4,5834-5852).
cgctaccaccccaatattt

SEQ ID NO: 137710 - DNA, 19 bp, Homo sapiens
  siRNA target sequence for AKAP13 (NM_006738.4,5895-5913).
gtctccatacagaacatta

SEQ ID NO: 137711 - DNA, 19 bp, Homo sapiens
  siRNA target sequence for AKAP13 (NM_006738.4,6031-6049).
gagtaggtacagacatgaa

SEQ ID NO: 137712 - DNA, 19 bp, Homo sapiens
  siRNA target sequence for AKAP13 (NM_006738.4,6066-6084).
ggagactttgagattgagt

SEQ ID NO: 137713 - DNA, 19 bp, Homo sapiens
  siRNA target sequence for AKAP13 (NM_006738.4,6104-6122).
gtcttggagtcggataata

SEQ ID NO: 137714 - DNA, 19 bp, Homo sapiens
  siRNA target sequence for AKAP13 (NM_006738.4,6106-6124).
cttggagtcggataataga

SEQ ID NO: 137715 - DNA, 19 bp, Homo sapiens
  siRNA target sequence for AKAP13 (NM_006738.4,6116-6134).
gataatagacagcaagttt

SEQ ID NO: 137716 - DNA, 19 bp, Homo sapiens
  siRNA target sequence for AKAP13 (NM_006738.4,6158-6176).
ggtcaaacggcaagaagta

SEQ ID NO: 137717 - DNA, 19 bp, Homo sapiens
  siRNA target sequence for AKAP13 (NM_006738.4,6159-6177).
gtcaaacggcaagaagtaa

SEQ ID NO: 137718 - DNA, 19 bp, Homo sapiens
  siRNA target sequence for AKAP13 (NM_006738.4,6161-6179).
caaacggcaagaagtaata

SEQ ID NO: 137719 - DNA, 19 bp, Homo sapiens
  siRNA target sequence for AKAP13 (NM_006738.4,6213-6231).
cgcactctcaagatcatga

SEQ ID NO: 137720 - DNA, 19 bp, Homo sapiens
  siRNA target sequence for AKAP13 (NM_006738.4,6254-6272).
gatggcggatctgcttttt

SEQ ID NO: 137721 - DNA, 19 bp, Homo sapiens
  siRNA target sequence for AKAP13 (NM_006738.4,6312-6330).
gagctgatcagtatccata

SEQ ID NO: 137722 - DNA, 19 bp, Homo sapiens
  siRNA target sequence for AKAP13 (NM_006738.4,6322-6340).
gtatccatagccaattctt

SEQ ID NO: 137723 - DNA, 19 bp, Homo sapiens
  siRNA target sequence for AKAP13 (NM_006738.4,6365-6383).
ggagtctctggtggataaa

SEQ ID NO: 137724 - DNA, 19 bp, Homo sapiens
  siRNA target sequence for AKAP13 (NM_006738.4,6366-6384).
gagtctctggtggataaaa

SEQ ID NO: 137725 - DNA, 19 bp, Homo sapiens
  siRNA target sequence for AKAP13 (NM_006738.4,6368-6386).
gtctctggtggataaaagt

SEQ ID NO: 137726 - DNA, 19 bp, Homo sapiens
  siRNA target sequence for AKAP13 (NM_006738.4,6415-6433).
gggatgtgcttgtaaatca

SEQ ID NO: 137727 - DNA, 19 bp, Homo sapiens
  siRNA target sequence for AKAP13 (NM_006738.4,6464-6482).
gaagacatatggcaagttt

SEQ ID NO: 137728 - DNA, 19 bp, Homo sapiens
  siRNA target sequence for AKAP13 (NM_006738.4,6467-6485).
gacatatggcaagttttgt

SEQ ID NO: 137729 - DNA, 19 bp, Homo sapiens
  siRNA target sequence for AKAP13 (NM_006738.4,6509-6527).
ctacttcaaagacctttat

SEQ ID NO: 137730 - DNA, 19 bp, Homo sapiens
  siRNA target sequence for AKAP13 (NM_006738.4,6529-6547).
ccaaggataagcgttttca

SEQ ID NO: 137731 - DNA, 19 bp, Homo sapiens
  siRNA target sequence for AKAP13 (NM_006738.4,6530-6548).
caaggataagcgttttcaa

SEQ ID NO: 137732 - DNA, 19 bp, Homo sapiens
  siRNA target sequence for AKAP13 (NM_006738.4,6546-6564).
caagcctttgtaaagaaga

SEQ ID NO: 137733 - DNA, 19 bp, Homo sapiens
  siRNA target sequence for AKAP13 (NM_006738.4,6594-6612).
ggaattccagagtgcatat

SEQ ID NO: 137734 - DNA, 19 bp, Homo sapiens
  siRNA target sequence for AKAP13 (NM_006738.4,6603-6621).
gagtgcatattgcttgtaa

SEQ ID NO: 137735 - DNA, 19 bp, Homo sapiens
  siRNA target sequence for AKAP13 (NM_006738.4,6605-6623).
gtgcatattgcttgtaact

SEQ ID NO: 137736 - DNA, 19 bp, Homo sapiens
  siRNA target sequence for AKAP13 (NM_006738.4,6607-6625).
gcatattgcttgtaactca

SEQ ID NO: 137737 - DNA, 19 bp, Homo sapiens
  siRNA target sequence for AKAP13 (NM_006738.4,6618-6636).
gtaactcagcggattacca

SEQ ID NO: 137738 - DNA, 19 bp, Homo sapiens
  siRNA target sequence for AKAP13 (NM_006738.4,6634-6652).
ccaagtacccagttttatt

SEQ ID NO: 137739 - DNA, 19 bp, Homo sapiens
  siRNA target sequence for AKAP13 (NM_006738.4,6665-6683).
gcagtgtaccaaagacaat

SEQ ID NO: 137740 - DNA, 19 bp, Homo sapiens
  siRNA target sequence for AKAP13 (NM_006738.4,6668-6686).
gtgtaccaaagacaatgaa

SEQ ID NO: 137741 - DNA, 19 bp, Homo sapiens
  siRNA target sequence for AKAP13 (NM_006738.4,6756-6774).
gtggcaagttatgaaaaga

SEQ ID NO: 137742 - DNA, 19 bp, Homo sapiens
  siRNA target sequence for AKAP13 (NM_006738.4,6777-6795).
gtgcgtctcaatgagattt

SEQ ID NO: 137743 - DNA, 19 bp, Homo sapiens
  siRNA target sequence for AKAP13 (NM_006738.4,6779-6797).
gcgtctcaatgagatttat

SEQ ID NO: 137744 - DNA, 19 bp, Homo sapiens
  siRNA target sequence for AKAP13 (NM_006738.4,6780-6798).
cgtctcaatgagatttata

SEQ ID NO: 137745 - DNA, 19 bp, Homo sapiens
  siRNA target sequence for AKAP13 (NM_006738.4,6783-6801).
ctcaatgagatttatacaa

SEQ ID NO: 137746 - DNA, 19 bp, Homo sapiens
  siRNA target sequence for AKAP13 (NM_006738.4,6805-6823).
cagatagcaagtcaatcat

SEQ ID NO: 137747 - DNA, 19 bp, Homo sapiens
  siRNA target sequence for AKAP13 (NM_006738.4,6807-6825).
gatagcaagtcaatcatga

SEQ ID NO: 137748 - DNA, 19 bp, Homo sapiens
  siRNA target sequence for AKAP13 (NM_006738.4,7129-7147).
gctccaaagaggaacgaaa

SEQ ID NO: 137749 - DNA, 19 bp, Homo sapiens
  siRNA target sequence for AKAP13 (NM_006738.4,7143-7161).
cgaaacagctggattcaga

SEQ ID NO: 137750 - DNA, 19 bp, Homo sapiens
  siRNA target sequence for AKAP13 (NM_006738.4,7144-7162).
gaaacagctggattcagat

SEQ ID NO: 137751 - DNA, 19 bp, Homo sapiens
  siRNA target sequence for AKAP13 (NM_006738.4,7148-7166).
cagctggattcagatcatt

SEQ ID NO: 137752 - DNA, 19 bp, Homo sapiens
  siRNA target sequence for AKAP13 (NM_006738.4,7207-7225).
gaattcctagtgagaatga

SEQ ID NO: 137753 - DNA, 19 bp, Homo sapiens
  siRNA target sequence for AKAP13 (NM_006738.4,7247-7265).
caccagagcccgagaatta

SEQ ID NO: 137754 - DNA, 19 bp, Homo sapiens
  siRNA target sequence for AKAP13 (NM_006738.4,7252-7270).
gagcccgagaattaaaaga

SEQ ID NO: 137755 - DNA, 19 bp, Homo sapiens
  siRNA target sequence for AKAP13 (NM_006738.4,7255-7273).
cccgagaattaaaagaaca

SEQ ID NO: 137756 - DNA, 19 bp, Homo sapiens
  siRNA target sequence for AKAP13 (NM_006738.4,7528-7546).
gccccattgagcaagatgt

SEQ ID NO: 137757 - DNA, 19 bp, Homo sapiens
  siRNA target sequence for AKAP13 (NM_006738.4,7685-7703).
cctaaaaaagggtggaaat

SEQ ID NO: 137758 - DNA, 19 bp, Homo sapiens
  siRNA target sequence for AKAP13 (NM_006738.4,8339-8357).
gtcattggactcagaactt

SEQ ID NO: 137759 - DNA, 19 bp, Homo sapiens
  siRNA target sequence for AKAP13 (NM_006738.4,8386-8404).
ctcggacacacaaagataa

SEQ ID NO: 137760 - DNA, 19 bp, Homo sapiens
  siRNA target sequence for AKAP13 (NM_006738.4,8406-8424).
gggccttttcacatactga

SEQ ID NO: 137761 - DNA, 19 bp, Homo sapiens
  siRNA target sequence for AKAP13 (NM_006738.4,8425-8443).
gttcaaccagccagacaaa

SEQ ID NO: 137762 - DNA, 19 bp, Homo sapiens
  siRNA target sequence for AKAP13 (NM_006738.4,8495-8513).
ccgcctgtttgggttaaca

SEQ ID NO: 137763 - DNA, 19 bp, Homo sapiens
  siRNA target sequence for AKAP13 (NM_006738.4,8496-8514).
cgcctgtttgggttaacaa

SEQ ID NO: 137764 - DNA, 19 bp, Homo sapiens
  siRNA target sequence for AKAP13 (NM_006738.4,8497-8515).
gcctgtttgggttaacaaa

SEQ ID NO: 137765 - DNA, 19 bp, Homo sapiens
  siRNA target sequence for AKAP13 (NM_006738.4,8577-8595).
ggtcccgcgtcagaagtat

SEQ ID NO: 137766 - DNA, 19 bp, Homo sapiens
  siRNA target sequence for AKAP13 (NM_006738.4,8599-8617).
cagagggtgaagagatctt

SEQ ID NO: 137767 - DNA, 19 bp, Homo sapiens
  siRNA target sequence for AKAP13 (NM_007200.3,4924-4942).
gagttcttggggatgttgt

SEQ ID NO: 137768 - DNA, 19 bp, Homo sapiens
  siRNA target sequence for AKAP13 (NM_007200.3,4953-4971).
cccattcataggagaagtt

SEQ ID NO: 137769 - DNA, 19 bp, Homo sapiens
  siRNA target sequence for ANKRD5 (NM_022096.4,396-414).
ggctttagcagataagaga

SEQ ID NO: 137770 - DNA, 19 bp, Homo sapiens
  siRNA target sequence for ANKRD5 (NM_022096.4,404-422).
cagataagagacttgagaa

SEQ ID NO: 137771 - DNA, 19 bp, Homo sapiens
  siRNA target sequence for ANKRD5 (NM_022096.4,413-431).
gacttgagaacttacagat

SEQ ID NO: 137772 - DNA, 19 bp, Homo sapiens
  siRNA target sequence for ANKRD5 (NM_022096.4,423-441).
cttacagatctacaaagtt

SEQ ID NO: 137773 - DNA, 19 bp, Homo sapiens
  siRNA target sequence for ANKRD5 (NM_022096.4,449-467).
gtgtgcggaacaaagacaa

SEQ ID NO: 137774 - DNA, 19 bp, Homo sapiens
  siRNA target sequence for ANKRD5 (NM_022096.4,492-510).
gcttggataccctgaacta

SEQ ID NO: 137775 - DNA, 19 bp, Homo sapiens
  siRNA target sequence for ANKRD5 (NM_022096.4,493-511).
cttggataccctgaactaa

SEQ ID NO: 137776 - DNA, 19 bp, Homo sapiens
  siRNA target sequence for ANKRD5 (NM_022096.4,496-514).
ggataccctgaactaatca

SEQ ID NO: 137777 - DNA, 19 bp, Homo sapiens
  siRNA target sequence for ANKRD5 (NM_022096.4,558-576).
ctcagtttccaatgatatt

SEQ ID NO: 137778 - DNA, 19 bp, Homo sapiens
  siRNA target sequence for ANKRD5 (NM_022096.4,560-578).
cagtttccaatgatattga

SEQ ID NO: 137779 - DNA, 19 bp, Homo sapiens
  siRNA target sequence for ANKRD5 (NM_022096.4,566-584).
ccaatgatattgatatggt

SEQ ID NO: 137780 - DNA, 19 bp, Homo sapiens
  siRNA target sequence for ANKRD5 (NM_022096.4,658-676).
gcagaactgggccatgaat

SEQ ID NO: 137781 - DNA, 19 bp, Homo sapiens
  siRNA target sequence for ANKRD5 (NM_022096.4,659-677).
cagaactgggccatgaatt

SEQ ID NO: 137782 - DNA, 19 bp, Homo sapiens
  siRNA target sequence for ANKRD5 (NM_022096.4,661-679).
gaactgggccatgaattgt

SEQ ID NO: 137783 - DNA, 19 bp, Homo sapiens
  siRNA target sequence for ANKRD5 (NM_022096.4,664-682).
ctgggccatgaattgtcaa

SEQ ID NO: 137784 - DNA, 19 bp, Homo sapiens
  siRNA target sequence for ANKRD5 (NM_022096.4,700-718).
gcaaaggctgatatgacta

SEQ ID NO: 137785 - DNA, 19 bp, Homo sapiens
  siRNA target sequence for ANKRD5 (NM_022096.4,705-723).
ggctgatatgactatagtt

SEQ ID NO: 137786 - DNA, 19 bp, Homo sapiens
  siRNA target sequence for ANKRD5 (NM_022096.4,707-725).
ctgatatgactatagttga

SEQ ID NO: 137787 - DNA, 19 bp, Homo sapiens
  siRNA target sequence for ANKRD5 (NM_022096.4,709-727).
gatatgactatagttgata

SEQ ID NO: 137788 - DNA, 19 bp, Homo sapiens
  siRNA target sequence for ANKRD5 (NM_022096.4,808-826).
ggtgcagatgtcaacaatt

SEQ ID NO: 137789 - DNA, 19 bp, Homo sapiens
  siRNA target sequence for ANKRD5 (NM_022096.4,811-829).
gcagatgtcaacaattcta

SEQ ID NO: 137790 - DNA, 19 bp, Homo sapiens
  siRNA target sequence for ANKRD5 (NM_022096.4,819-837).
caacaattctacctatgaa

SEQ ID NO: 137791 - DNA, 19 bp, Homo sapiens
  siRNA target sequence for ANKRD5 (NM_022096.4,852-870).
ccttagagcttgtgaagat

SEQ ID NO: 137792 - DNA, 19 bp, Homo sapiens
  siRNA target sequence for ANKRD5 (NM_022096.4,942-960).
cacaggccgcacagcttta

SEQ ID NO: 137793 - DNA, 19 bp, Homo sapiens
  siRNA target sequence for ANKRD5 (NM_022096.4,944-962).
caggccgcacagctttaat

SEQ ID NO: 137794 - DNA, 19 bp, Homo sapiens
  siRNA target sequence for ANKRD5 (NM_022096.4,994-1012).
gttcgaggcatattggaaa

SEQ ID NO: 137795 - DNA, 19 bp, Homo sapiens
  siRNA target sequence for ANKRD5 (NM_022096.4,1015-1033).
ggaggtgaagtgaatgcat

SEQ ID NO: 137796 - DNA, 19 bp, Homo sapiens
  siRNA target sequence for ANKRD5 (NM_022096.4,1016-1034).
gaggtgaagtgaatgcatt

SEQ ID NO: 137797 - DNA, 19 bp, Homo sapiens
  siRNA target sequence for ANKRD5 (NM_022096.4,1070-1088).
ctaaaggaggctttttcga

SEQ ID NO: 137798 - DNA, 19 bp, Homo sapiens
  siRNA target sequence for ANKRD5 (NM_022096.4,1076-1094).
gaggctttttcgatatatt

SEQ ID NO: 137799 - DNA, 19 bp, Homo sapiens
  siRNA target sequence for ANKRD5 (NM_022096.4,1120-1138).
gacgtggggctgatttcga

SEQ ID NO: 137800 - DNA, 19 bp, Homo sapiens
  siRNA target sequence for ANKRD5 (NM_022096.4,1122-1140).
cgtggggctgatttcgata

SEQ ID NO: 137801 - DNA, 19 bp, Homo sapiens
  siRNA target sequence for ANKRD5 (NM_022096.4,1125-1143).
ggggctgatttcgataaat

SEQ ID NO: 137802 - DNA, 19 bp, Homo sapiens
  siRNA target sequence for ANKRD5 (NM_022096.4,1183-1201).
gcagactgctgtaaatata

SEQ ID NO: 137803 - DNA, 19 bp, Homo sapiens
  siRNA target sequence for ANKRD5 (NM_022096.4,1278-1296).
cttcaaagcagcaagcaaa

SEQ ID NO: 137804 - DNA, 19 bp, Homo sapiens
  siRNA target sequence for ANKRD5 (NM_022096.4,1309-1327).
gcagagagaatcgctaata

SEQ ID NO: 137805 - DNA, 19 bp, Homo sapiens
  siRNA target sequence for ANKRD5 (NM_022096.4,1310-1328).
cagagagaatcgctaataa

SEQ ID NO: 137806 - DNA, 19 bp, Homo sapiens
  siRNA target sequence for ANKRD5 (NM_022096.4,1314-1332).
gagaatcgctaataaacta

SEQ ID NO: 137807 - DNA, 19 bp, Homo sapiens
  siRNA target sequence for ANKRD5 (NM_022096.4,1416-1434).
ggaagcctttgcggtttta

SEQ ID NO: 137808 - DNA, 19 bp, Homo sapiens
  siRNA target sequence for ANKRD5 (NM_022096.4,1420-1438).
gcctttgcggttttagaca

SEQ ID NO: 137809 - DNA, 19 bp, Homo sapiens
  siRNA target sequence for ANKRD5 (NM_022096.4,1527-1545).
cgctcaccttcatgagaaa

SEQ ID NO: 137810 - DNA, 19 bp, Homo sapiens
  siRNA target sequence for ANKRD5 (NM_022096.4,1550-1568).
ggggaggaggggtcaatat

SEQ ID NO: 137811 - DNA, 19 bp, Homo sapiens
  siRNA target sequence for ANKRD5 (NM_022096.4,1551-1569).
gggaggaggggtcaatatt

SEQ ID NO: 137812 - DNA, 19 bp, Homo sapiens
  siRNA target sequence for ANKRD5 (NM_022096.4,1556-1574).
gaggggtcaatattaatga

SEQ ID NO: 137813 - DNA, 19 bp, Homo sapiens
  siRNA target sequence for ANKRD5 (NM_022096.4,1558-1576).
ggggtcaatattaatgaat

SEQ ID NO: 137814 - DNA, 19 bp, Homo sapiens
  siRNA target sequence for ANKRD5 (NM_022096.4,1619-1637).
gatcgtatggacctaagaa

SEQ ID NO: 137815 - DNA, 19 bp, Homo sapiens
  siRNA target sequence for ANKRD5 (NM_022096.4,1622-1640).
cgtatggacctaagaaaaa

SEQ ID NO: 137816 - DNA, 19 bp, Homo sapiens
  siRNA target sequence for ANKRD5 (NM_022096.4,1738-1756).
ggtgggccaccgtattaca

SEQ ID NO: 137817 - DNA, 19 bp, Homo sapiens
  siRNA target sequence for ANKRD5 (NM_022096.4,1739-1757).
gtgggccaccgtattacat

SEQ ID NO: 137818 - DNA, 19 bp, Homo sapiens
  siRNA target sequence for ANKRD5 (NM_022096.4,1742-1760).
ggccaccgtattacatgat

SEQ ID NO: 137819 - DNA, 19 bp, Homo sapiens
  siRNA target sequence for ANKRD5 (NM_022096.4,1743-1761).
gccaccgtattacatgatt

SEQ ID NO: 137820 - DNA, 19 bp, Homo sapiens
  siRNA target sequence for ANKRD5 (NM_022096.4,1745-1763).
caccgtattacatgattga

SEQ ID NO: 137821 - DNA, 19 bp, Homo sapiens
  siRNA target sequence for ANKRD5 (NM_022096.4,1747-1765).
ccgtattacatgattgaga

SEQ ID NO: 137822 - DNA, 19 bp, Homo sapiens
  siRNA target sequence for ANKRD5 (NM_022096.4,1758-1776).
gattgagacctacaagaat

SEQ ID NO: 137823 - DNA, 19 bp, Homo sapiens
  siRNA target sequence for ANKRD5 (NM_022096.4,1781-1799).
ctgatagcagccggtttaa

SEQ ID NO: 137824 - DNA, 19 bp, Homo sapiens
  siRNA target sequence for ANKRD5 (NM_022096.4,1783-1801).
gatagcagccggtttaata

SEQ ID NO: 137825 - DNA, 19 bp, Homo sapiens
  siRNA target sequence for ANKRD5 (NM_022096.4,1787-1805).
gcagccggtttaatagaga

SEQ ID NO: 137826 - DNA, 19 bp, Homo sapiens
  siRNA target sequence for ANKRD5 (NM_022096.4,1788-1806).
cagccggtttaatagagat

SEQ ID NO: 137827 - DNA, 19 bp, Homo sapiens
  siRNA target sequence for ANKRD5 (NM_022096.4,1791-1809).
ccggtttaatagagatcat

SEQ ID NO: 137828 - DNA, 19 bp, Homo sapiens
  siRNA target sequence for ANKRD5 (NM_022096.4,1836-1854).
ctctgtttggtacattgat

SEQ ID NO: 137829 - DNA, 19 bp, Homo sapiens
  siRNA target sequence for ANKRD5 (NM_022096.4,1838-1856).
ctgtttggtacattgatga

SEQ ID NO: 137830 - DNA, 19 bp, Homo sapiens
  siRNA target sequence for ANKRD5 (NM_022096.4,1840-1858).
gtttggtacattgatgatt

SEQ ID NO: 137831 - DNA, 19 bp, Homo sapiens
  siRNA target sequence for ANKRD5 (NM_022096.4,1915-1933).
ctgaaaaaggcctttgaat

SEQ ID NO: 137832 - DNA, 19 bp, Homo sapiens
  siRNA target sequence for ANKRD5 (NM_022096.4,1923-1941).
ggcctttgaatcaggaata

SEQ ID NO: 137833 - DNA, 19 bp, Homo sapiens
  siRNA target sequence for ANKRD5 (NM_022096.4,1945-1963).
gtggatatgaaggataatt

SEQ ID NO: 137834 - DNA, 19 bp, Homo sapiens
  siRNA target sequence for ANKRD5 (NM_022096.4,1991-2009).
gtgcaagtggaaacataga

SEQ ID NO: 137835 - DNA, 19 bp, Homo sapiens
  siRNA target sequence for ANKRD5 (NM_022096.4,2029-2047).
gaaaaaggagctaacgtta

SEQ ID NO: 137836 - DNA, 19 bp, Homo sapiens
  siRNA target sequence for ANKRD5 (NM_022096.4,2096-2114).
caggccaacaagacattgt

SEQ ID NO: 137837 - DNA, 19 bp, Homo sapiens
  siRNA target sequence for ANKRD5 (NM_022096.4,2152-2170).
gcttcaatcaacaactcaa

SEQ ID NO: 137838 - DNA, 19 bp, Homo sapiens
  siRNA target sequence for ANKRD5 (NM_022096.4,2160-2178).
caacaactcaactccttta

SEQ ID NO: 137839 - DNA, 19 bp, Homo sapiens
  siRNA target sequence for ANKRD5 (NM_022096.4,2285-2303).
caaaggcatatgctgatta

SEQ ID NO: 137840 - DNA, 19 bp, Homo sapiens
  siRNA target sequence for ANKRD5 (NM_022096.4,2289-2307).
ggcatatgctgattataga

SEQ ID NO: 137841 - DNA, 19 bp, Homo sapiens
  siRNA target sequence for ANKRD5 (NM_022096.4,2290-2308).
gcatatgctgattatagaa

SEQ ID NO: 137842 - DNA, 19 bp, Homo sapiens
  siRNA target sequence for ANKRD5 (NM_022096.4,2291-2309).
catatgctgattatagaat

SEQ ID NO: 137843 - DNA, 19 bp, Homo sapiens
  siRNA target sequence for ANKRD5 (NM_022096.4,2306-2324).
gaataattgatctgattaa

SEQ ID NO: 137844 - DNA, 19 bp, Homo sapiens
  siRNA target sequence for ANKRD5 (NM_022096.4,2433-2451).
gctgtcatcaatttatggt

SEQ ID NO: 137845 - DNA, 19 bp, Homo sapiens
  siRNA target sequence for ANKRD5 (NM_022096.4,2494-2512).
gtggttcatctgaattcat

SEQ ID NO: 137846 - DNA, 19 bp, Homo sapiens
  siRNA target sequence for ANKRD5 (NM_022096.4,2497-2515).
gttcatctgaattcattga

SEQ ID NO: 137847 - DNA, 19 bp, Homo sapiens
  siRNA target sequence for ANKRD5 (NM_022096.4,2500-2518).
catctgaattcattgatta

SEQ ID NO: 137848 - DNA, 19 bp, Homo sapiens
  siRNA target sequence for ANKRD5 (NM_022096.4,2514-2532).
gattaccagtggttatact

SEQ ID NO: 137849 - DNA, 19 bp, Homo sapiens
  siRNA target sequence for ANKRD5 (NM_022096.4,2520-2538).
cagtggttatactaagaaa

SEQ ID NO: 137850 - DNA, 19 bp, Homo sapiens
  siRNA target sequence for ANKRD5 (NM_022096.4,2614-2632).
ctacggcgagagaggttta

SEQ ID NO: 137851 - DNA, 19 bp, Homo sapiens
  siRNA target sequence for ANKRD5 (NM_022096.4,2618-2636).
ggcgagagaggtttacaca

SEQ ID NO: 137852 - DNA, 19 bp, Homo sapiens
  siRNA target sequence for ANKRD5 (NM_022096.4,2641-2659).
gtggacttcgacgatttta

SEQ ID NO: 137853 - DNA, 19 bp, Homo sapiens
  siRNA target sequence for ANKRD5 (NM_022096.4,2644-2662).
gacttcgacgattttatga

SEQ ID NO: 137854 - DNA, 19 bp, Homo sapiens
  siRNA target sequence for ANXA1 (NM_000700.1,96-114).
ctcaagcaggcctggttta

SEQ ID NO: 137855 - DNA, 19 bp, Homo sapiens
  siRNA target sequence for ANXA1 (NM_000700.1,177-195).
gcggtgagcccctatccta

SEQ ID NO: 137856 - DNA, 19 bp, Homo sapiens
  siRNA target sequence for ANXA1 (NM_000700.1,185-203).
cccctatcctaccttcaat

SEQ ID NO: 137857 - DNA, 19 bp, Homo sapiens
  siRNA target sequence for ANXA1 (NM_000700.1,213-231).
gatgtcgctgccttgcata

SEQ ID NO: 137858 - DNA, 19 bp, Homo sapiens
  siRNA target sequence for ANXA1 (NM_000700.1,223-241).
ccttgcataaggccataat

SEQ ID NO: 137859 - DNA, 19 bp, Homo sapiens
  siRNA target sequence for ANXA1 (NM_000700.1,227-245).
gcataaggccataatggtt

SEQ ID NO: 137860 - DNA, 19 bp, Homo sapiens
  siRNA target sequence for ANXA1 (NM_000700.1,228-246).
cataaggccataatggtta

SEQ ID NO: 137861 - DNA, 19 bp, Homo sapiens
  siRNA target sequence for ANXA1 (NM_000700.1,298-316).
cacagcgtcaacagatcaa

SEQ ID NO: 137862 - DNA, 19 bp, Homo sapiens
  siRNA target sequence for ANXA1 (NM_000700.1,458-476).
gggccttggaactgatgaa

SEQ ID NO: 137863 - DNA, 19 bp, Homo sapiens
  siRNA target sequence for ANXA1 (NM_000700.1,461-479).
ccttggaactgatgaagat

SEQ ID NO: 137864 - DNA, 19 bp, Homo sapiens
  siRNA target sequence for ANXA1 (NM_000700.1,466-484).
gaactgatgaagatactct

SEQ ID NO: 137865 - DNA, 19 bp, Homo sapiens
  siRNA target sequence for ANXA1 (NM_000700.1,497-515).
ggcatcaagaactaacaaa

SEQ ID NO: 137866 - DNA, 19 bp, Homo sapiens
  siRNA target sequence for ANXA1 (NM_000700.1,499-517).
catcaagaactaacaaaga

SEQ ID NO: 137867 - DNA, 19 bp, Homo sapiens
  siRNA target sequence for ANXA1 (NM_000700.1,712-730).
gaaaggggacagacgtaaa

SEQ ID NO: 137868 - DNA, 19 bp, Homo sapiens
  siRNA target sequence for ANXA1 (NM_000700.1,723-741).
gacgtaaacgtgttcaata

SEQ ID NO: 137869 - DNA, 19 bp, Homo sapiens
  siRNA target sequence for ANXA1 (NM_000700.1,746-764).
ccttaccaccagaagctat

SEQ ID NO: 137870 - DNA, 19 bp, Homo sapiens
  siRNA target sequence for ANXA1 (NM_000700.1,755-773).
cagaagctatccacaactt

SEQ ID NO: 137871 - DNA, 19 bp, Homo sapiens
  siRNA target sequence for ANXA1 (NM_000700.1,809-827).
gcatgacatgaacaaagtt

SEQ ID NO: 137872 - DNA, 19 bp, Homo sapiens
  siRNA target sequence for ANXA1 (NM_000700.1,878-896).
gaagtgcgccacaagcaaa

SEQ ID NO: 137873 - DNA, 19 bp, Homo sapiens
  siRNA target sequence for ANXA1 (NM_000700.1,948-966).
cgccataaggcattgatca

SEQ ID NO: 137874 - DNA, 19 bp, Homo sapiens
  siRNA target sequence for ANXA1 (NM_000700.1,974-992).
ggtttcccgttctgaaatt

SEQ ID NO: 137875 - DNA, 19 bp, Homo sapiens
  siRNA target sequence for ANXA1 (NM_000700.1,1072-1090).
gagattatgagaaaatcct

SEQ ID NO: 137876 - DNA, 19 bp, Homo sapiens
  siRNA target sequence for ANXA10 (NM_007193.2,221-239).
gatttgactgtgacaaaga

SEQ ID NO: 137877 - DNA, 19 bp, Homo sapiens
  siRNA target sequence for ANXA10 (NM_007193.2,297-315).
ggcataccagagcatgtat

SEQ ID NO: 137878 - DNA, 19 bp, Homo sapiens
  siRNA target sequence for ANXA10 (NM_007193.2,453-471).
gaattgcctcattgaaata

SEQ ID NO: 137879 - DNA, 19 bp, Homo sapiens
  siRNA target sequence for ANXA10 (NM_007193.2,792-810).
ggtagatgccattaatgaa

SEQ ID NO: 137880 - DNA, 19 bp, Homo sapiens
  siRNA target sequence for ANXA10 (NM_007193.2,831-849).
ggagctgctggttgcaatt

SEQ ID NO: 137881 - DNA, 19 bp, Homo sapiens
  siRNA target sequence for ANXA10 (NM_007193.2,863-881).
gagacaaaccagcctattt

SEQ ID NO: 137882 - DNA, 19 bp, Homo sapiens
  siRNA target sequence for ANXA10 (NM_007193.2,871-889).
ccagcctattttgcttata

SEQ ID NO: 137883 - DNA, 19 bp, Homo sapiens
  siRNA target sequence for ANXA10 (NM_007193.2,890-908).
gattatatagtgcaattca

SEQ ID NO: 137884 - DNA, 19 bp, Homo sapiens
  siRNA target sequence for ANXA10 (NM_007193.2,907-925).
catgactttggtttccata

SEQ ID NO: 137885 - DNA, 19 bp, Homo sapiens
  siRNA target sequence for ANXA10 (NM_007193.2,922-940).
cataataaaactgtaatca

SEQ ID NO: 137886 - DNA, 19 bp, Homo sapiens
  siRNA target sequence for ANXA10 (NM_007193.2,973-991).
ctgaccataaggaaacgat

SEQ ID NO: 137887 - DNA, 19 bp, Homo sapiens
  siRNA target sequence for ANXA10 (NM_007193.2,977-995).
ccataaggaaacgatacaa

SEQ ID NO: 137888 - DNA, 19 bp, Homo sapiens
  siRNA target sequence for ANXA10 (NM_007193.2,1007-1025).
gaaaatccctatttcatga

SEQ ID NO: 137889 - DNA, 19 bp, Homo sapiens
  siRNA target sequence for ANXA10 (NM_007193.2,1024-1042).
gatatcagaaattttgctt

SEQ ID NO: 137890 - DNA, 19 bp, Homo sapiens
  siRNA target sequence for ANXA10 (NM_007193.2,1039-1057).
gcttcagggcattataaga

SEQ ID NO: 137891 - DNA, 19 bp, Homo sapiens
  siRNA target sequence for ANXA13 (NM_004306.1,82-100).
gggcaatcgtcatgctaaa

SEQ ID NO: 137892 - DNA, 19 bp, Homo sapiens
  siRNA target sequence for ANXA13 (NM_004306.1,105-123).
gcagtcctcagggttttga

SEQ ID NO: 137893 - DNA, 19 bp, Homo sapiens
  siRNA target sequence for ANXA13 (NM_004306.1,108-126).
gtcctcagggttttgatgt

SEQ ID NO: 137894 - DNA, 19 bp, Homo sapiens
  siRNA target sequence for ANXA13 (NM_004306.1,175-193).
caatgaagcagccatcatt

SEQ ID NO: 137895 - DNA, 19 bp, Homo sapiens
  siRNA target sequence for ANXA13 (NM_004306.1,416-434).
ctgtgcacgaggaccaata

SEQ ID NO: 137896 - DNA, 19 bp, Homo sapiens
  siRNA target sequence for ANXA13 (NM_004306.1,421-439).
cacgaggaccaataaggaa

SEQ ID NO: 137897 - DNA, 19 bp, Homo sapiens
  siRNA target sequence for ANXA13 (NM_004306.1,423-441).
cgaggaccaataaggaaat

SEQ ID NO: 137898 - DNA, 19 bp, Homo sapiens
  siRNA target sequence for ANXA13 (NM_004306.1,426-444).
ggaccaataaggaaatcat

SEQ ID NO: 137899 - DNA, 19 bp, Homo sapiens
  siRNA target sequence for ANXA13 (NM_004306.1,483-501).
gcctcgaatcagatgtcaa

SEQ ID NO: 137900 - DNA, 19 bp, Homo sapiens
  siRNA target sequence for ANXA13 (NM_004306.1,547-565).
gcaggctaatcgcaatgaa

SEQ ID NO: 137901 - DNA, 19 bp, Homo sapiens
  siRNA target sequence for ANXA13 (NM_004306.1,567-585).
gagatgacgtggacaaaga

SEQ ID NO: 137902 - DNA, 19 bp, Homo sapiens
  siRNA target sequence for ANXA13 (NM_004306.1,691-709).
gttacgagccacctttcaa

SEQ ID NO: 137903 - DNA, 19 bp, Homo sapiens
  siRNA target sequence for ANXA13 (NM_004306.1,702-720).
cctttcaagcctatcaaat

SEQ ID NO: 137904 - DNA, 19 bp, Homo sapiens
  siRNA target sequence for ANXA13 (NM_004306.1,703-721).
ctttcaagcctatcaaatt

SEQ ID NO: 137905 - DNA, 19 bp, Homo sapiens
  siRNA target sequence for ANXA13 (NM_004306.1,809-827).
caggattgtgaggactatt

SEQ ID NO: 137906 - DNA, 19 bp, Homo sapiens
  siRNA target sequence for ANXA13 (NM_004306.1,830-848).
gctgaacgtctgtacaagt

SEQ ID NO: 137907 - DNA, 19 bp, Homo sapiens
  siRNA target sequence for ANXA13 (NM_004306.1,933-951).
caaagttccaagagaagta

SEQ ID NO: 137908 - DNA, 19 bp, Homo sapiens
  siRNA target sequence for ANXA13 (NM_004306.1,968-986).
gacatggttcgctcagata

SEQ ID NO: 137909 - DNA, 19 bp, Homo sapiens
  siRNA target sequence for ANXA3 (NM_005139.1,70-88).
ccgaggaacagtaagagat

SEQ ID NO: 137910 - DNA, 19 bp, Homo sapiens
  siRNA target sequence for ANXA3 (NM_005139.1,198-216).
cacagcggcagctgattgt

SEQ ID NO: 137911 - DNA, 19 bp, Homo sapiens
  siRNA target sequence for ANXA3 (NM_005139.1,200-218).
cagcggcagctgattgtta

SEQ ID NO: 137912 - DNA, 19 bp, Homo sapiens
  siRNA target sequence for ANXA3 (NM_005139.1,211-229).
gattgttaaggaatatcaa

SEQ ID NO: 137913 - DNA, 19 bp, Homo sapiens
  siRNA target sequence for ANXA3 (NM_005139.1,312-330).
ctccaccagcagtctttga

SEQ ID NO: 137914 - DNA, 19 bp, Homo sapiens
  siRNA target sequence for ANXA3 (NM_005139.1,373-391).
cgaagatgccttgattgaa

SEQ ID NO: 137915 - DNA, 19 bp, Homo sapiens
  siRNA target sequence for ANXA3 (NM_005139.1,374-392).
gaagatgccttgattgaaa

SEQ ID NO: 137916 - DNA, 19 bp, Homo sapiens
  siRNA target sequence for ANXA3 (NM_005139.1,411-429).
gcaggcaaatgaaggatat

SEQ ID NO: 137917 - DNA, 19 bp, Homo sapiens
  siRNA target sequence for ANXA3 (NM_005139.1,430-448).
ctctcaagcctattataca

SEQ ID NO: 137918 - DNA, 19 bp, Homo sapiens
  siRNA target sequence for ANXA3 (NM_005139.1,437-455).
gcctattatacagtataca

SEQ ID NO: 137919 - DNA, 19 bp, Homo sapiens
  siRNA target sequence for ANXA3 (NM_005139.1,464-482).
cttggagatgacattagtt

SEQ ID NO: 137920 - DNA, 19 bp, Homo sapiens
  siRNA target sequence for ANXA3 (NM_005139.1,473-491).
gacattagttccgaaacat

SEQ ID NO: 137921 - DNA, 19 bp, Homo sapiens
  siRNA target sequence for ANXA3 (NM_005139.1,475-493).
cattagttccgaaacatct

SEQ ID NO: 137922 - DNA, 19 bp, Homo sapiens
  siRNA target sequence for ANXA3 (NM_005139.1,578-596).
gatgcccagattctctata

SEQ ID NO: 137923 - DNA, 19 bp, Homo sapiens
  siRNA target sequence for ANXA3 (NM_005139.1,617-635).
ggcacggatgaagacaaat

SEQ ID NO: 137924 - DNA, 19 bp, Homo sapiens
  siRNA target sequence for ANXA3 (NM_005139.1,618-636).
gcacggatgaagacaaatt

SEQ ID NO: 137925 - DNA, 19 bp, Homo sapiens
  siRNA target sequence for ANXA3 (NM_005139.1,622-640).
ggatgaagacaaattcact

SEQ ID NO: 137926 - DNA, 19 bp, Homo sapiens
  siRNA target sequence for ANXA3 (NM_005139.1,665-683).
cctcaattaaaactaacat

SEQ ID NO: 137927 - DNA, 19 bp, Homo sapiens
  siRNA target sequence for ANXA3 (NM_005139.1,666-684).
ctcaattaaaactaacatt

SEQ ID NO: 137928 - DNA, 19 bp, Homo sapiens
  siRNA target sequence for ANXA3 (NM_005139.1,760-778).
cttactgttggccatagtt

SEQ ID NO: 137929 - DNA, 19 bp, Homo sapiens
  siRNA target sequence for ANXA3 (NM_005139.1,764-782).
ctgttggccatagttaatt

SEQ ID NO: 137930 - DNA, 19 bp, Homo sapiens
  siRNA target sequence for ANXA3 (NM_005139.1,801-819).
cctttttagccgaaagact

SEQ ID NO: 137931 - DNA, 19 bp, Homo sapiens
  siRNA target sequence for ANXA3 (NM_005139.1,858-876).
ctctgaaccgaataatggt

SEQ ID NO: 137932 - DNA, 19 bp, Homo sapiens
  siRNA target sequence for ANXA3 (NM_005139.1,893-911).
gaccttttggacattcgaa

SEQ ID NO: 137933 - DNA, 19 bp, Homo sapiens
  siRNA target sequence for ANXA3 (NM_005139.1,950-968).
gcaattaaatcggatactt

SEQ ID NO: 137934 - DNA, 19 bp, Homo sapiens
  siRNA target sequence for ANXA4 (NM_001153.2,165-183).
ggctcggcaccgatgaaga

SEQ ID NO: 137935 - DNA, 19 bp, Homo sapiens
  siRNA target sequence for ANXA4 (NM_001153.2,174-192).
ccgatgaagacgccattat

SEQ ID NO: 137936 - DNA, 19 bp, Homo sapiens
  siRNA target sequence for ANXA4 (NM_001153.2,175-193).
cgatgaagacgccattatt

SEQ ID NO: 137937 - DNA, 19 bp, Homo sapiens
  siRNA target sequence for ANXA4 (NM_001153.2,255-273).
ccatcggcagggacttgat

SEQ ID NO: 137938 - DNA, 19 bp, Homo sapiens
  siRNA target sequence for ANXA4 (NM_001153.2,256-274).
catcggcagggacttgata

SEQ ID NO: 137939 - DNA, 19 bp, Homo sapiens
  siRNA target sequence for ANXA4 (NM_001153.2,558-576).
gggatgaaggaaattatct

SEQ ID NO: 137940 - DNA, 19 bp, Homo sapiens
  siRNA target sequence for ANXA4 (NM_001153.2,640-658).
gacagatgaggtgaaattt

SEQ ID NO: 137941 - DNA, 19 bp, Homo sapiens
  siRNA target sequence for ANXA4 (NM_001153.2,672-690).
gttcccggaaccgaaatca

SEQ ID NO: 137942 - DNA, 19 bp, Homo sapiens
  siRNA target sequence for ANXA4 (NM_001153.2,691-709).
cctgttgcatgtgtttgat

SEQ ID NO: 137943 - DNA, 19 bp, Homo sapiens
  siRNA target sequence for ANXA4 (NM_001153.2,694-712).
gttgcatgtgtttgatgaa

SEQ ID NO: 137944 - DNA, 19 bp, Homo sapiens
  siRNA target sequence for ANXA4 (NM_001153.2,733-751).
ggatattgaacagagtatt

SEQ ID NO: 137945 - DNA, 19 bp, Homo sapiens
  siRNA target sequence for ANXA4 (NM_001153.2,734-752).
gatattgaacagagtatta

SEQ ID NO: 137946 - DNA, 19 bp, Homo sapiens
  siRNA target sequence for ANXA4 (NM_001153.2,762-780).
catctggtagctttgaaga

SEQ ID NO: 137947 - DNA, 19 bp, Homo sapiens
  siRNA target sequence for ANXA4 (NM_001153.2,782-800).
gctctgctggctatagtaa

SEQ ID NO: 137948 - DNA, 19 bp, Homo sapiens
  siRNA target sequence for ANXA4 (NM_001153.2,783-801).
ctctgctggctatagtaaa

SEQ ID NO: 137949 - DNA, 19 bp, Homo sapiens
  siRNA target sequence for ANXA4 (NM_001153.2,785-803).
ctgctggctatagtaaagt

SEQ ID NO: 137950 - DNA, 19 bp, Homo sapiens
  siRNA target sequence for ANXA4 (NM_001153.2,802-820).
gtgcatgaggaacaaatct

SEQ ID NO: 137951 - DNA, 19 bp, Homo sapiens
  siRNA target sequence for ANXA4 (NM_001153.2,857-875).
ggcttgggcaccgatgata

SEQ ID NO: 137952 - DNA, 19 bp, Homo sapiens
  siRNA target sequence for ANXA4 (NM_001153.2,858-876).
gcttgggcaccgatgataa

SEQ ID NO: 137953 - DNA, 19 bp, Homo sapiens
  siRNA target sequence for ANXA4 (NM_001153.2,903-921).
gagcagaaattgacatgtt

SEQ ID NO: 137954 - DNA, 19 bp, Homo sapiens
  siRNA target sequence for ANXA4 (NM_001153.2,908-926).
gaaattgacatgttggata

SEQ ID NO: 137955 - DNA, 19 bp, Homo sapiens
  siRNA target sequence for ANXA5 (NM_001154.2,243-261).
gcgggctgatgcagaaact

SEQ ID NO: 137956 - DNA, 19 bp, Homo sapiens
  siRNA target sequence for ANXA5 (NM_001154.2,260-278).
ctcttcggaaggctatgaa

SEQ ID NO: 137957 - DNA, 19 bp, Homo sapiens
  siRNA target sequence for ANXA5 (NM_001154.2,318-336).
gacatcccgaagtaatgct

SEQ ID NO: 137958 - DNA, 19 bp, Homo sapiens
  siRNA target sequence for ANXA5 (NM_001154.2,396-414).
cctgaaatcagaactaact

SEQ ID NO: 137959 - DNA, 19 bp, Homo sapiens
  siRNA target sequence for ANXA5 (NM_001154.2,447-465).
gaaaccctctcggctttat

SEQ ID NO: 137960 - DNA, 19 bp, Homo sapiens
  siRNA target sequence for ANXA5 (NM_001154.2,455-473).
ctcggctttatgatgctta

SEQ ID NO: 137961 - DNA, 19 bp, Homo sapiens
  siRNA target sequence for ANXA5 (NM_001154.2,558-576).
gagagccatcaaacaagtt

SEQ ID NO: 137962 - DNA, 19 bp, Homo sapiens
  siRNA target sequence for ANXA5 (NM_001154.2,560-578).
gagccatcaaacaagttta

SEQ ID NO: 137963 - DNA, 19 bp, Homo sapiens
  siRNA target sequence for ANXA5 (NM_001154.2,563-581).
ccatcaaacaagtttatga

SEQ ID NO: 137964 - DNA, 19 bp, Homo sapiens
  siRNA target sequence for ANXA5 (NM_001154.2,712-730).
caagatgctcaggctttat

SEQ ID NO: 137965 - DNA, 19 bp, Homo sapiens
  siRNA target sequence for ANXA5 (NM_001154.2,823-841).
gacaagtacatgactatat

SEQ ID NO: 137966 - DNA, 19 bp, Homo sapiens
  siRNA target sequence for ANXA5 (NM_001154.2,836-854).
ctatatcaggatttcaaat

SEQ ID NO: 137967 - DNA, 19 bp, Homo sapiens
  siRNA target sequence for ANXA5 (NM_001154.2,1086-1104).
catgattaagggagataca

SEQ ID NO: 137968 - DNA, 19 bp, Homo sapiens
  siRNA target sequence for ANXA5 (NM_001154.2,1089-1107).
gattaagggagatacatct

SEQ ID NO: 137969 - DNA, 19 bp, Homo sapiens
  siRNA target sequence for ANXA6 (NM_001155.2,294-312).
gccatactggacataatca

SEQ ID NO: 137970 - DNA, 19 bp, Homo sapiens
  siRNA target sequence for ANXA6 (NM_001155.2,342-360).
gtctgccagagctacaagt

SEQ ID NO: 137971 - DNA, 19 bp, Homo sapiens
  siRNA target sequence for ANXA6 (NM_001155.2,374-392).
ggacctcattgctgattta

SEQ ID NO: 137972 - DNA, 19 bp, Homo sapiens
  siRNA target sequence for ANXA6 (NM_001155.2,375-393).
gacctcattgctgatttaa

SEQ ID NO: 137973 - DNA, 19 bp, Homo sapiens
  siRNA target sequence for ANXA6 (NM_001155.2,384-402).
gctgatttaaagtatgaat

SEQ ID NO: 137974 - DNA, 19 bp, Homo sapiens
  siRNA target sequence for ANXA6 (NM_001155.2,385-403).
ctgatttaaagtatgaatt

SEQ ID NO: 137975 - DNA, 19 bp, Homo sapiens
  siRNA target sequence for ANXA6 (NM_001155.2,410-428).
caagtttgaacggttgatt

SEQ ID NO: 137976 - DNA, 19 bp, Homo sapiens
  siRNA target sequence for ANXA6 (NM_001155.2,443-461).
gccacctgcctattgtgat

SEQ ID NO: 137977 - DNA, 19 bp, Homo sapiens
  siRNA target sequence for ANXA6 (NM_001155.2,557-575).
gctggtggcagcatacaaa

SEQ ID NO: 137978 - DNA, 19 bp, Homo sapiens
  siRNA target sequence for ANXA6 (NM_001155.2,560-578).
ggtggcagcatacaaagat

SEQ ID NO: 137979 - DNA, 19 bp, Homo sapiens
  siRNA target sequence for ANXA6 (NM_001155.2,688-706).
gcgaggacctggtacaaca

SEQ ID NO: 137980 - DNA, 19 bp, Homo sapiens
  siRNA target sequence for ANXA6 (NM_001155.2,725-743).
cgaggcaggggaactgaaa

SEQ ID NO: 137981 - DNA, 19 bp, Homo sapiens
  siRNA target sequence for ANXA6 (NM_001155.2,726-744).
gaggcaggggaactgaaat

SEQ ID NO: 137982 - DNA, 19 bp, Homo sapiens
  siRNA target sequence for ANXA6 (NM_001155.2,756-774).
gaagcccagttcatttaca

SEQ ID NO: 137983 - DNA, 19 bp, Homo sapiens
  siRNA target sequence for ANXA6 (NM_001155.2,759-777).
gcccagttcatttacatct

SEQ ID NO: 137984 - DNA, 19 bp, Homo sapiens
  siRNA target sequence for ANXA6 (NM_001155.2,805-823).
ggttggtgttcgatgagta

SEQ ID NO: 137985 - DNA, 19 bp, Homo sapiens
  siRNA target sequence for ANXA6 (NM_001155.2,806-824).
gttggtgttcgatgagtat

SEQ ID NO: 137986 - DNA, 19 bp, Homo sapiens
  siRNA target sequence for ANXA6 (NM_001155.2,897-915).
ctggccgtagtgaagtgta

SEQ ID NO: 137987 - DNA, 19 bp, Homo sapiens
  siRNA target sequence for ANXA6 (NM_001155.2,917-935).
ccggagcaccccggaatat

SEQ ID NO: 137988 - DNA, 19 bp, Homo sapiens
  siRNA target sequence for ANXA6 (NM_001155.2,918-936).
cggagcaccccggaatatt

SEQ ID NO: 137989 - DNA, 19 bp, Homo sapiens
  siRNA target sequence for ANXA6 (NM_001155.2,919-937).
ggagcaccccggaatattt

SEQ ID NO: 137990 - DNA, 19 bp, Homo sapiens
  siRNA target sequence for ANXA6 (NM_001155.2,923-941).
caccccggaatattttgct

SEQ ID NO: 137991 - DNA, 19 bp, Homo sapiens
  siRNA target sequence for ANXA6 (NM_001155.2,946-964).
ggctcttcaaggctatgaa

SEQ ID NO: 137992 - DNA, 19 bp, Homo sapiens
  siRNA target sequence for ANXA6 (NM_001155.2,1043-1061).
gatcttccggaccaagtat

SEQ ID NO: 137993 - DNA, 19 bp, Homo sapiens
  siRNA target sequence for ANXA6 (NM_001155.2,1096-1114).
cctctggcgagtacaagaa

SEQ ID NO: 137994 - DNA, 19 bp, Homo sapiens
  siRNA target sequence for ANXA6 (NM_001155.2,1130-1148).
gtctgggggagatgatgat

SEQ ID NO: 137995 - DNA, 19 bp, Homo sapiens
  siRNA target sequence for ANXA6 (NM_001155.2,1239-1257).
gtgcgcccagccaatgact

SEQ ID NO: 137996 - DNA, 19 bp, Homo sapiens
  siRNA target sequence for ANXA6 (NM_001155.2,1309-1327).
ggactgacgaagacacaat

SEQ ID NO: 137997 - DNA, 19 bp, Homo sapiens
  siRNA target sequence for ANXA6 (NM_001155.2,1312-1330).
ctgacgaagacacaatcat

SEQ ID NO: 137998 - DNA, 19 bp, Homo sapiens
  siRNA target sequence for ANXA6 (NM_001155.2,1317-1335).
gaagacacaatcatcgata

SEQ ID NO: 137999 - DNA, 19 bp, Homo sapiens
  siRNA target sequence for ANXA6 (NM_001155.2,1320-1338).
gacacaatcatcgatatca

SEQ ID NO: 138000 - DNA, 19 bp, Homo sapiens
  siRNA target sequence for ANXA6 (NM_001155.2,1519-1537).
gagccggcacagatgaaaa

SEQ ID NO: 138001 - DNA, 19 bp, Homo sapiens
  siRNA target sequence for ANXA6 (NM_001155.2,1561-1579).
ctcggaccaatgctgaaat

SEQ ID NO: 138002 - DNA, 19 bp, Homo sapiens
  siRNA target sequence for ANXA6 (NM_001155.2,1597-1615).
cctataaggaggactatca

SEQ ID NO: 138003 - DNA, 19 bp, Homo sapiens
  siRNA target sequence for ANXA6 (NM_001155.2,1663-1681).
ggaggatcctcatttctct

SEQ ID NO: 138004 - DNA, 19 bp, Homo sapiens
  siRNA target sequence for ANXA6 (NM_001155.2,1776-1794).
cctagtggagacaaaactt

SEQ ID NO: 138005 - DNA, 19 bp, Homo sapiens
  siRNA target sequence for ANXA6 (NM_001155.2,2034-2052).
ctgaccaggatcatggtat

SEQ ID NO: 138006 - DNA, 19 bp, Homo sapiens
  siRNA target sequence for ANXA6 (NM_001155.2,2078-2096).
catccggagggaattcatt

SEQ ID NO: 138007 - DNA, 19 bp, Homo sapiens
  siRNA target sequence for ANXA6 (NM_001155.2,2082-2100).
cggagggaattcattgaga

SEQ ID NO: 138008 - DNA, 19 bp, Homo sapiens
  siRNA target sequence for ANXA7 (NM_001156.2,119-137).
caggtcaggagtcatcttt

SEQ ID NO: 138009 - DNA, 19 bp, Homo sapiens
  siRNA target sequence for ANXA7 (NM_001156.2,143-161).
cttctggtcagtatcctta

SEQ ID NO: 138010 - DNA, 19 bp, Homo sapiens
  siRNA target sequence for ANXA7 (NM_001156.2,148-166).
ggtcagtatccttatccta

SEQ ID NO: 138011 - DNA, 19 bp, Homo sapiens
  siRNA target sequence for ANXA7 (NM_001156.2,467-485).
ctggaggacaacctactta

SEQ ID NO: 138012 - DNA, 19 bp, Homo sapiens
  siRNA target sequence for ANXA7 (NM_001156.2,539-557).
ctgccaacttcgatgctat

SEQ ID NO: 138013 - DNA, 19 bp, Homo sapiens
  siRNA target sequence for ANXA7 (NM_001156.2,543-561).
caacttcgatgctataaga

SEQ ID NO: 138014 - DNA, 19 bp, Homo sapiens
  siRNA target sequence for ANXA7 (NM_001156.2,546-564).
cttcgatgctataagagat

SEQ ID NO: 138015 - DNA, 19 bp, Homo sapiens
  siRNA target sequence for ANXA7 (NM_001156.2,602-620).
cagatgagcaggcaattgt

SEQ ID NO: 138016 - DNA, 19 bp, Homo sapiens
  siRNA target sequence for ANXA7 (NM_001156.2,627-645).
ggtggccaaccgttccaat

SEQ ID NO: 138017 - DNA, 19 bp, Homo sapiens
  siRNA target sequence for ANXA7 (NM_001156.2,632-650).
ccaaccgttccaatgatca

SEQ ID NO: 138018 - DNA, 19 bp, Homo sapiens
  siRNA target sequence for ANXA7 (NM_001156.2,680-698).
cctcctatggcaaggattt

SEQ ID NO: 138019 - DNA, 19 bp, Homo sapiens
  siRNA target sequence for ANXA7 (NM_001156.2,681-699).
ctcctatggcaaggattta

SEQ ID NO: 138020 - DNA, 19 bp, Homo sapiens
  siRNA target sequence for ANXA7 (NM_001156.2,683-701).
cctatggcaaggatttaat

SEQ ID NO: 138021 - DNA, 19 bp, Homo sapiens
  siRNA target sequence for ANXA7 (NM_001156.2,756-774).
cttcatgcctcctacgtat

SEQ ID NO: 138022 - DNA, 19 bp, Homo sapiens
  siRNA target sequence for ANXA7 (NM_001156.2,762-780).
gcctcctacgtattacgat

SEQ ID NO: 138023 - DNA, 19 bp, Homo sapiens
  siRNA target sequence for ANXA7 (NM_001156.2,785-803).
ggagcttacggaaagcaat

SEQ ID NO: 138024 - DNA, 19 bp, Homo sapiens
  siRNA target sequence for ANXA7 (NM_001156.2,815-833).
gaactcaggaacgtgtatt

SEQ ID NO: 138025 - DNA, 19 bp, Homo sapiens
  siRNA target sequence for ANXA7 (NM_001156.2,826-844).
cgtgtattgattgagattt

SEQ ID NO: 138026 - DNA, 19 bp, Homo sapiens
  siRNA target sequence for ANXA7 (NM_001156.2,829-847).
gtattgattgagattttgt

SEQ ID NO: 138027 - DNA, 19 bp, Homo sapiens
  siRNA target sequence for ANXA7 (NM_001156.2,838-856).
gagattttgtgcacaagaa

SEQ ID NO: 138028 - DNA, 19 bp, Homo sapiens
  siRNA target sequence for ANXA7 (NM_001156.2,871-889).
cgagaaattgtcagatgtt

SEQ ID NO: 138029 - DNA, 19 bp, Homo sapiens
  siRNA target sequence for ANXA7 (NM_001156.2,872-890).
gagaaattgtcagatgtta

SEQ ID NO: 138030 - DNA, 19 bp, Homo sapiens
  siRNA target sequence for ANXA7 (NM_001156.2,905-923).
gacgagaccttgaaaagga

SEQ ID NO: 138031 - DNA, 19 bp, Homo sapiens
  siRNA target sequence for ANXA7 (NM_001156.2,922-940).
gacattaggtcagatacat

SEQ ID NO: 138032 - DNA, 19 bp, Homo sapiens
  siRNA target sequence for ANXA7 (NM_001156.2,932-950).
cagatacatcaggacattt

SEQ ID NO: 138033 - DNA, 19 bp, Homo sapiens
  siRNA target sequence for ANXA7 (NM_001156.2,944-962).
gacattttgaacgtttact

SEQ ID NO: 138034 - DNA, 19 bp, Homo sapiens
  siRNA target sequence for ANXA7 (NM_001156.2,988-1006).
gatgagaaccagagtataa

SEQ ID NO: 138035 - DNA, 19 bp, Homo sapiens
  siRNA target sequence for ANXA7 (NM_001156.2,1063-1081).
ctagggaccgatgaatctt

SEQ ID NO: 138036 - DNA, 19 bp, Homo sapiens
  siRNA target sequence for ANXA7 (NM_001156.2,1068-1086).
gaccgatgaatcttgcttt

SEQ ID NO: 138037 - DNA, 19 bp, Homo sapiens
  siRNA target sequence for ANXA7 (NM_001156.2,1126-1144).
gctaccatggaggcttatt

SEQ ID NO: 138038 - DNA, 19 bp, Homo sapiens
  siRNA target sequence for ANXA7 (NM_001156.2,1152-1170).
ggctaatcgagacttgtta

SEQ ID NO: 138039 - DNA, 19 bp, Homo sapiens
  siRNA target sequence for ANXA7 (NM_001156.2,1153-1171).
gctaatcgagacttgttaa

SEQ ID NO: 138040 - DNA, 19 bp, Homo sapiens
  siRNA target sequence for ANXA7 (NM_001156.2,1173-1191).
cagtgtgagccgtgagttt

SEQ ID NO: 138041 - DNA, 19 bp, Homo sapiens
  siRNA target sequence for ANXA7 (NM_001156.2,1184-1202).
gtgagttttccggatatgt

SEQ ID NO: 138042 - DNA, 19 bp, Homo sapiens
  siRNA target sequence for ANXA7 (NM_001156.2,1188-1206).
gttttccggatatgtagaa

SEQ ID NO: 138043 - DNA, 19 bp, Homo sapiens
  siRNA target sequence for ANXA7 (NM_001156.2,1201-1219).
gtagaaagtggtttgaaga

SEQ ID NO: 138044 - DNA, 19 bp, Homo sapiens
  siRNA target sequence for ANXA7 (NM_001156.2,1323-1341).
ggtcactcgaagtgagatt

SEQ ID NO: 138045 - DNA, 19 bp, Homo sapiens
  siRNA target sequence for ANXA7 (NM_001156.2,1334-1352).
gtgagattgaccttgtaca

SEQ ID NO: 138046 - DNA, 19 bp, Homo sapiens
  siRNA target sequence for ANXA7 (NM_001156.2,1336-1354).
gagattgaccttgtacaaa

SEQ ID NO: 138047 - DNA, 19 bp, Homo sapiens
  siRNA target sequence for ANXA7 (NM_001156.2,1338-1356).
gattgaccttgtacaaata

SEQ ID NO: 138048 - DNA, 19 bp, Homo sapiens
  siRNA target sequence for ANXA7 (NM_001156.2,1362-1380).
gatgttcgctcagatgtat

SEQ ID NO: 138049 - DNA, 19 bp, Homo sapiens
  siRNA target sequence for ANXA7 (NM_004034.1,486-504).
ccctagtcagatcaataca

SEQ ID NO: 138050 - DNA, 19 bp, Homo sapiens
  siRNA target sequence for ANXA7 (NM_004034.1,488-506).
ctagtcagatcaatacaga

SEQ ID NO: 138051 - DNA, 19 bp, Homo sapiens
  siRNA target sequence for ANXA7 (NM_004034.1,495-513).
gatcaatacagattctttt

SEQ ID NO: 138052 - DNA, 19 bp, Homo sapiens
  siRNA target sequence for ANXA8 (NM_001630.1,693-711).
ctgatgagatgaaattcat

SEQ ID NO: 138053 - DNA, 19 bp, Homo sapiens
  siRNA target sequence for ANXA8 (NM_001630.1,839-857).
ctcactgtggtgaaatgca

SEQ ID NO: 138054 - DNA, 19 bp, Homo sapiens
  siRNA target sequence for ANXA8 (NM_001630.1,920-938).
cgtgatgggaccctgataa

SEQ ID NO: 138055 - DNA, 19 bp, Homo sapiens
  siRNA target sequence for ANXA8 (NM_001630.1,923-941).
gatgggaccctgataagaa

SEQ ID NO: 138056 - DNA, 19 bp, Homo sapiens
  siRNA target sequence for ANXA8 (NM_001630.1,954-972).
ggagcgagattgacttaaa

SEQ ID NO: 138057 - DNA, 19 bp, Homo sapiens
  siRNA target sequence for ANXA8 (NM_001630.1,955-973).
gagcgagattgacttaaat

SEQ ID NO: 138058 - DNA, 19 bp, Homo sapiens
  siRNA target sequence for ANXA8 (NM_001630.1,1011-1029).
ccctcagcagcatgatcat

SEQ ID NO: 138059 - DNA, 19 bp, Homo sapiens
  siRNA target sequence for ANXA9 (NM_003568.1,516-534).
ccctcaggaccttcttgaa

SEQ ID NO: 138060 - DNA, 19 bp, Homo sapiens
  siRNA target sequence for ANXA9 (NM_003568.1,518-536).
ctcaggaccttcttgaact

SEQ ID NO: 138061 - DNA, 19 bp, Homo sapiens
  siRNA target sequence for ANXA9 (NM_003568.1,814-832).
ggacgtggccattgaaatt

SEQ ID NO: 138062 - DNA, 19 bp, Homo sapiens
  siRNA target sequence for ANXA9 (NM_003568.1,867-885).
gcctggcagtctacaaaca

SEQ ID NO: 138063 - DNA, 19 bp, Homo sapiens
  siRNA target sequence for ANXA9 (NM_003568.1,871-889).
ggcagtctacaaacacaat

SEQ ID NO: 138064 - DNA, 19 bp, Homo sapiens
  siRNA target sequence for ANXA9 (NM_003568.1,872-890).
gcagtctacaaacacaatt

SEQ ID NO: 138065 - DNA, 19 bp, Homo sapiens
  siRNA target sequence for ANXA9 (NM_003568.1,985-1003).
ctctggaatcattgactat

SEQ ID NO: 138066 - DNA, 19 bp, Homo sapiens
  siRNA target sequence for ANXA9 (NM_003568.1,987-1005).
ctggaatcattgactataa

SEQ ID NO: 138067 - DNA, 19 bp, Homo sapiens
  siRNA target sequence for ANXA9 (NM_003568.1,1000-1018).
ctataatctggcagaacaa

SEQ ID NO: 138068 - DNA, 19 bp, Homo sapiens
  siRNA target sequence for ANXA9 (NM_003568.1,1078-1096).
cttcacccagcgaaatcct

SEQ ID NO: 138069 - DNA, 19 bp, Homo sapiens
  siRNA target sequence for ANXA9 (NM_003568.1,1203-1221).
gcctagcttcggtgatcaa

SEQ ID NO: 138070 - DNA, 19 bp, Homo sapiens
  siRNA target sequence for ANXA9 (NM_003568.1,1205-1223).
ctagcttcggtgatcaaga

SEQ ID NO: 138071 - DNA, 19 bp, Homo sapiens
  siRNA target sequence for ANXA9 (NM_003568.1,1289-1307).
gtcctgattcgcatcctta

SEQ ID NO: 138072 - DNA, 19 bp, Homo sapiens
  siRNA target sequence for ANXA9 (NM_003568.1,1292-1310).
ctgattcgcatccttatct

SEQ ID NO: 138073 - DNA, 19 bp, Homo sapiens
  siRNA target sequence for APBA2BP (NM_031231.2,220-238).
cgctcttccaggacgtttt

SEQ ID NO: 138074 - DNA, 19 bp, Homo sapiens
  siRNA target sequence for APBA2BP (NM_031231.2,354-372).
gggcatctcaccgacaatt

SEQ ID NO: 138075 - DNA, 19 bp, Homo sapiens
  siRNA target sequence for APBA2BP (NM_031231.2,355-373).
ggcatctcaccgacaattt

SEQ ID NO: 138076 - DNA, 19 bp, Homo sapiens
  siRNA target sequence for APBA2BP (NM_031231.2,356-374).
gcatctcaccgacaattta

SEQ ID NO: 138077 - DNA, 19 bp, Homo sapiens
  siRNA target sequence for APBA2BP (NM_031231.2,362-380).
caccgacaatttagaaaca

SEQ ID NO: 138078 - DNA, 19 bp, Homo sapiens
  siRNA target sequence for APBA2BP (NM_031231.2,364-382).
ccgacaatttagaaacaga

SEQ ID NO: 138079 - DNA, 19 bp, Homo sapiens
  siRNA target sequence for ASPH (NM_004318.2,173-191).
ccggagagagacaaagcat

SEQ ID NO: 138080 - DNA, 19 bp, Homo sapiens
  siRNA target sequence for ASPH (NM_004318.2,188-206).
gcatggaggacacaagaat

SEQ ID NO: 138081 - DNA, 19 bp, Homo sapiens
  siRNA target sequence for ASPH (NM_004318.2,220-238).
gactctcaggaacttcatt

SEQ ID NO: 138082 - DNA, 19 bp, Homo sapiens
  siRNA target sequence for ASPH (NM_004318.2,235-253).
cattcttcacgtggtttat

SEQ ID NO: 138083 - DNA, 19 bp, Homo sapiens
  siRNA target sequence for ASPH (NM_004318.2,269-287).
gggcgtctggacatctgta

SEQ ID NO: 138084 - DNA, 19 bp, Homo sapiens
  siRNA target sequence for ASPH (NM_004318.2,283-301).
ctgtagctgtcgtttggtt

SEQ ID NO: 138085 - DNA, 19 bp, Homo sapiens
  siRNA target sequence for ASPH (NM_004318.2,298-316).
ggtttgatcttgttgacta

SEQ ID NO: 138086 - DNA, 19 bp, Homo sapiens
  siRNA target sequence for ASPH (NM_004318.2,299-317).
gtttgatcttgttgactat

SEQ ID NO: 138087 - DNA, 19 bp, Homo sapiens
  siRNA target sequence for ASPH (NM_004318.2,331-349).
gaaaactaggaatctatga

SEQ ID NO: 138088 - DNA, 19 bp, Homo sapiens
  siRNA target sequence for ASPH (NM_004318.2,486-504).
gaggcagaaccccagaata

SEQ ID NO: 138089 - DNA, 19 bp, Homo sapiens
  siRNA target sequence for ASPH (NM_004318.2,535-553).
cccttctccatgaaatggt

SEQ ID NO: 138090 - DNA, 19 bp, Homo sapiens
  siRNA target sequence for ASPH (NM_004318.2,536-554).
ccttctccatgaaatggta

SEQ ID NO: 138091 - DNA, 19 bp, Homo sapiens
  siRNA target sequence for ASPH (NM_004318.2,621-639).
gaggatgatgagtttctta

SEQ ID NO: 138092 - DNA, 19 bp, Homo sapiens
  siRNA target sequence for ASPH (NM_004318.2,641-659).
ggcgactgatgtagatgat

SEQ ID NO: 138093 - DNA, 19 bp, Homo sapiens
  siRNA target sequence for ASPH (NM_004318.2,674-692).
ggaacctgaagtatctcat

SEQ ID NO: 138094 - DNA, 19 bp, Homo sapiens
  siRNA target sequence for ASPH (NM_004318.2,693-711).
gaagaaaccgagcatagtt

SEQ ID NO: 138095 - DNA, 19 bp, Homo sapiens
  siRNA target sequence for ASPH (NM_004318.2,716-734).
cgtggaagagacagtttca

SEQ ID NO: 138096 - DNA, 19 bp, Homo sapiens
  siRNA target sequence for ASPH (NM_004318.2,767-785).
gtctgagcaggaaaatcca

SEQ ID NO: 138097 - DNA, 19 bp, Homo sapiens
  siRNA target sequence for ASPH (NM_004318.2,793-811).
gtgaaccagtagtagaaga

SEQ ID NO: 138098 - DNA, 19 bp, Homo sapiens
  siRNA target sequence for ASPH (NM_004318.2,821-839).
gcaccatgatacagatgat

SEQ ID NO: 138099 - DNA, 19 bp, Homo sapiens
  siRNA target sequence for ASPH (NM_004318.2,824-842).
ccatgatacagatgatgta

SEQ ID NO: 138100 - DNA, 19 bp, Homo sapiens
  siRNA target sequence for ASPH (NM_004318.2,953-971).
ggtaattgtagaagaagta

SEQ ID NO: 138101 - DNA, 19 bp, Homo sapiens
  siRNA target sequence for ASPH (NM_004318.2,1032-1050).
gatccagaacaaaaagcaa

SEQ ID NO: 138102 - DNA, 19 bp, Homo sapiens
  siRNA target sequence for ASPH (NM_004318.2,1130-1148).
ccgtaaaaggggaaaaatt

SEQ ID NO: 138103 - DNA, 19 bp, Homo sapiens
  siRNA target sequence for ASPH (NM_004318.2,1149-1167).
gaggaagcagtgaatgcat

SEQ ID NO: 138104 - DNA, 19 bp, Homo sapiens
  siRNA target sequence for ASPH (NM_004318.2,1196-1214).
gagtccacgagcaagatat

SEQ ID NO: 138105 - DNA, 19 bp, Homo sapiens
  siRNA target sequence for ASPH (NM_004318.2,1221-1239).
gcgcagtgtgaggatgatt

SEQ ID NO: 138106 - DNA, 19 bp, Homo sapiens
  siRNA target sequence for ASPH (NM_004318.2,1222-1240).
cgcagtgtgaggatgattt

SEQ ID NO: 138107 - DNA, 19 bp, Homo sapiens
  siRNA target sequence for ASPH (NM_004318.2,1353-1371).
cgctcagacaggcaacaat

SEQ ID NO: 138108 - DNA, 19 bp, Homo sapiens
  siRNA target sequence for ASPH (NM_004318.2,1354-1372).
gctcagacaggcaacaatt

SEQ ID NO: 138109 - DNA, 19 bp, Homo sapiens
  siRNA target sequence for ASPH (NM_004318.2,1355-1373).
ctcagacaggcaacaattt

SEQ ID NO: 138110 - DNA, 19 bp, Homo sapiens
  siRNA target sequence for ASPH (NM_004318.2,1357-1375).
cagacaggcaacaatttct

SEQ ID NO: 138111 - DNA, 19 bp, Homo sapiens
  siRNA target sequence for ASPH (NM_004318.2,1402-1420).
ccctgcagagattagttca

SEQ ID NO: 138112 - DNA, 19 bp, Homo sapiens
  siRNA target sequence for ASPH (NM_004318.2,1459-1477).
gcgtgggatacctcttgat

SEQ ID NO: 138113 - DNA, 19 bp, Homo sapiens
  siRNA target sequence for ASPH (NM_004318.2,1460-1478).
cgtgggatacctcttgata

SEQ ID NO: 138114 - DNA, 19 bp, Homo sapiens
  siRNA target sequence for ASPH (NM_004318.2,1469-1487).
cctcttgataggagataat

SEQ ID NO: 138115 - DNA, 19 bp, Homo sapiens
  siRNA target sequence for ASPH (NM_004318.2,1540-1558).
gctttgctaaagtccatta

SEQ ID NO: 138116 - DNA, 19 bp, Homo sapiens
  siRNA target sequence for ASPH (NM_004318.2,1590-1608).
gctgagagcatcccatatt

SEQ ID NO: 138117 - DNA, 19 bp, Homo sapiens
  siRNA target sequence for ASPH (NM_004318.2,1593-1611).
gagagcatcccatatttaa

SEQ ID NO: 138118 - DNA, 19 bp, Homo sapiens
  siRNA target sequence for ASPH (NM_004318.2,1682-1700).
gcagagggttgggaacaaa

SEQ ID NO: 138119 - DNA, 19 bp, Homo sapiens
  siRNA target sequence for ASPH (NM_004318.2,1693-1711).
ggaacaaagaggcatataa

SEQ ID NO: 138120 - DNA, 19 bp, Homo sapiens
  siRNA target sequence for ASPH (NM_004318.2,1757-1775).
gcaacgctcactctacaat

SEQ ID NO: 138121 - DNA, 19 bp, Homo sapiens
  siRNA target sequence for ASPH (NM_004318.2,1761-1779).
cgctcactctacaatgtga

SEQ ID NO: 138122 - DNA, 19 bp, Homo sapiens
  siRNA target sequence for ASPH (NM_004318.2,1819-1837).
cgggctacacagagttagt

SEQ ID NO: 138123 - DNA, 19 bp, Homo sapiens
  siRNA target sequence for ASPH (NM_004318.2,1821-1839).
ggctacacagagttagtaa

SEQ ID NO: 138124 - DNA, 19 bp, Homo sapiens
  siRNA target sequence for ASPH (NM_004318.2,1822-1840).
gctacacagagttagtaaa

SEQ ID NO: 138125 - DNA, 19 bp, Homo sapiens
  siRNA target sequence for ASPH (NM_004318.2,1826-1844).
cacagagttagtaaagtct

SEQ ID NO: 138126 - DNA, 19 bp, Homo sapiens
  siRNA target sequence for ASPH (NM_004318.2,2020-2038).
gtaccttactagaaaagtt

SEQ ID NO: 138127 - DNA, 19 bp, Homo sapiens
  siRNA target sequence for ASPH (NM_004318.2,2064-2082).
ggacagatcaaatattcca

SEQ ID NO: 138128 - DNA, 19 bp, Homo sapiens
  siRNA target sequence for ASPH (NM_004318.2,2065-2083).
gacagatcaaatattccat

SEQ ID NO: 138129 - DNA, 19 bp, Homo sapiens
  siRNA target sequence for ASPH (NM_004318.2,2260-2278).
ggcaggatgcctcatcttt

SEQ ID NO: 138130 - DNA, 19 bp, Homo sapiens
  siRNA target sequence for ASPH (NM_004318.2,2275-2293).
ctttccggctgatattcat

SEQ ID NO: 138131 - DNA, 19 bp, Homo sapiens
  siRNA target sequence for ASPH (NM_020164.2,213-231).
gcaaaggacttccgttata

SEQ ID NO: 138132 - DNA, 19 bp, Homo sapiens
  siRNA target sequence for ASPH (NM_020164.2,214-232).
caaaggacttccgttataa

SEQ ID NO: 138133 - DNA, 19 bp, Homo sapiens
  siRNA target sequence for ASPH (NM_020164.2,218-236).
ggacttccgttataactta

SEQ ID NO: 138134 - DNA, 19 bp, Homo sapiens
  siRNA target sequence for ASPH (NM_020164.2,219-237).
gacttccgttataacttat

SEQ ID NO: 138135 - DNA, 19 bp, Homo sapiens
  siRNA target sequence for ASPH (NM_020164.2,242-260).
ggtgcttcaaggaaaacta

SEQ ID NO: 138136 - DNA, 19 bp, Homo sapiens
  siRNA target sequence for ASPH (NM_020164.2,331-349).
gtggggtagccaagagaaa

SEQ ID NO: 138137 - DNA, 19 bp, Homo sapiens
  siRNA target sequence for ASPH (NM_020164.2,352-370).
ctaaggctaaagttaaaga

SEQ ID NO: 138138 - DNA, 19 bp, Homo sapiens
  siRNA target sequence for ASPH (NM_020164.2,459-477).
gaggatgtccgaaaggata

SEQ ID NO: 138139 - DNA, 19 bp, Homo sapiens
  siRNA target sequence for ASPH (NM_020164.2,510-528).
gagtctcctaagggtaaaa

SEQ ID NO: 138140 - DNA, 19 bp, Homo sapiens
  siRNA target sequence for ASPH (NM_020164.2,628-646).
catcccgagacaaagatga

SEQ ID NO: 138141 - DNA, 19 bp, Homo sapiens
  siRNA target sequence for ASPH (NM_020164.2,671-689).
cagatatgcacacttaaca

SEQ ID NO: 138142 - DNA, 19 bp, Homo sapiens
  siRNA target sequence for BGLAP (NM_000711.1,165-183).
caggcgctacctgtatcaa

SEQ ID NO: 138143 - DNA, 19 bp, Homo sapiens
  siRNA target sequence for BMP1 (NM_001199.1,170-188).
caaggcggctgcctttctt

SEQ ID NO: 138144 - DNA, 19 bp, Homo sapiens
  siRNA target sequence for BMP1 (NM_001199.1,718-736).
gggaccgccacgtttccat

SEQ ID NO: 138145 - DNA, 19 bp, Homo sapiens
  siRNA target sequence for BMP1 (NM_001199.1,733-751).
ccatcgttcgtgagaacat

SEQ ID NO: 138146 - DNA, 19 bp, Homo sapiens
  siRNA target sequence for BMP1 (NM_001199.1,840-858).
cattacgctcggaacacat

SEQ ID NO: 138147 - DNA, 19 bp, Homo sapiens
  siRNA target sequence for BMP1 (NM_001199.1,883-901).
ccattgtccccaagtatga

SEQ ID NO: 138148 - DNA, 19 bp, Homo sapiens
  siRNA target sequence for BMP1 (NM_001199.1,960-978).
gcccaagcccgcaagcttt

SEQ ID NO: 138149 - DNA, 19 bp, Homo sapiens
  siRNA target sequence for BMP1 (NM_001199.1,966-984).
gcccgcaagctttacaagt

SEQ ID NO: 138150 - DNA, 19 bp, Homo sapiens
  siRNA target sequence for BMP1 (NM_001199.1,1352-1370).
ggactatggccacattcaa

SEQ ID NO: 138151 - DNA, 19 bp, Homo sapiens
  siRNA target sequence for BMP1 (NM_001199.1,1551-1569).
cgctactgtggctatgaga

SEQ ID NO: 138152 - DNA, 19 bp, Homo sapiens
  siRNA target sequence for BMP1 (NM_001199.1,1552-1570).
gctactgtggctatgagaa

SEQ ID NO: 138153 - DNA, 19 bp, Homo sapiens
  siRNA target sequence for BMP1 (NM_001199.1,1597-1615).
gccgcctctggctcaagtt

SEQ ID NO: 138154 - DNA, 19 bp, Homo sapiens
  siRNA target sequence for BMP1 (NM_001199.1,1617-1635).
gtctctgacgggtccatta

SEQ ID NO: 138155 - DNA, 19 bp, Homo sapiens
  siRNA target sequence for BMP1 (NM_001199.1,1621-1639).
ctgacgggtccattaacaa

SEQ ID NO: 138156 - DNA, 19 bp, Homo sapiens
  siRNA target sequence for BMP1 (NM_001199.1,1642-1660).
cgggctttgccgtcaactt

SEQ ID NO: 138157 - DNA, 19 bp, Homo sapiens
  siRNA target sequence for BMP1 (NM_001199.1,1643-1661).
gggctttgccgtcaacttt

SEQ ID NO: 138158 - DNA, 19 bp, Homo sapiens
  siRNA target sequence for BMP1 (NM_001199.1,1645-1663).
gctttgccgtcaacttttt

SEQ ID NO: 138159 - DNA, 19 bp, Homo sapiens
  siRNA target sequence for BMP1 (NM_001199.1,1651-1669).
ccgtcaactttttcaaaga

SEQ ID NO: 138160 - DNA, 19 bp, Homo sapiens
  siRNA target sequence for BMP1 (NM_001199.1,1918-1936).
ccctgcagtttgacttctt

SEQ ID NO: 138161 - DNA, 19 bp, Homo sapiens
  siRNA target sequence for BMP1 (NM_001199.1,1919-1937).
cctgcagtttgacttcttt

SEQ ID NO: 138162 - DNA, 19 bp, Homo sapiens
  siRNA target sequence for BMP1 (NM_006128.1,2153-2171).
ggaccgacactcacatcta

SEQ ID NO: 138163 - DNA, 19 bp, Homo sapiens
  siRNA target sequence for BMP1 (NM_006129.2,2157-2175).
caacacgttcggcagttat

SEQ ID NO: 138164 - DNA, 19 bp, Homo sapiens
  siRNA target sequence for BMP1 (NM_006129.2,2195-2213).
gcttcgtcctccatgacaa

SEQ ID NO: 138165 - DNA, 19 bp, Homo sapiens
  siRNA target sequence for BMP1 (NM_006129.2,2518-2536).
cgcttctactcagataact

SEQ ID NO: 138166 - DNA, 19 bp, Homo sapiens
  siRNA target sequence for BMP1 (NM_006131.1,1761-1779).
ccgctgtgaggggtgttat

SEQ ID NO: 138167 - DNA, 19 bp, Homo sapiens
  siRNA target sequence for BMP1 (NM_006131.1,1766-1784).
gtgaggggtgttatgatct

SEQ ID NO: 138168 - DNA, 19 bp, Homo sapiens
  siRNA target sequence for BMP1 (NM_006132.1,763-781).
ctcagctgtggctctagaa

SEQ ID NO: 138169 - DNA, 19 bp, Homo sapiens
  siRNA target sequence for BMP1 (NM_006132.1,765-783).
cagctgtggctctagaaat

SEQ ID NO: 138170 - DNA, 19 bp, Homo sapiens
  siRNA target sequence for BMPER (NM_133468.2,422-440).
cgctcgcctgggattacgt

SEQ ID NO: 138171 - DNA, 19 bp, Homo sapiens
  siRNA target sequence for BMPER (NM_133468.2,445-463).
cgtcttgctgctactcaat

SEQ ID NO: 138172 - DNA, 19 bp, Homo sapiens
  siRNA target sequence for BMPER (NM_133468.2,446-464).
gtcttgctgctactcaatt

SEQ ID NO: 138173 - DNA, 19 bp, Homo sapiens
  siRNA target sequence for BMPER (NM_133468.2,496-514).
cttcttgacaggttctgtt

SEQ ID NO: 138174 - DNA, 19 bp, Homo sapiens
  siRNA target sequence for BMPER (NM_133468.2,536-554).
gaagtcctccagattccat

SEQ ID NO: 138175 - DNA, 19 bp, Homo sapiens
  siRNA target sequence for BMPER (NM_133468.2,559-577).
cacagacaacccttgcata

SEQ ID NO: 138176 - DNA, 19 bp, Homo sapiens
  siRNA target sequence for BMPER (NM_133468.2,561-579).
cagacaacccttgcataat

SEQ ID NO: 138177 - DNA, 19 bp, Homo sapiens
  siRNA target sequence for BMPER (NM_133468.2,664-682).
gaggggagcctgttgtgaa

SEQ ID NO: 138178 - DNA, 19 bp, Homo sapiens
  siRNA target sequence for BMPER (NM_133468.2,688-706).
caaaggttgcacctatgaa

SEQ ID NO: 138179 - DNA, 19 bp, Homo sapiens
  siRNA target sequence for BMPER (NM_133468.2,704-722).
gaaggaaatacctataaca

SEQ ID NO: 138180 - DNA, 19 bp, Homo sapiens
  siRNA target sequence for BMPER (NM_133468.2,798-816).
gggtgcgctgtgttgttca

SEQ ID NO: 138181 - DNA, 19 bp, Homo sapiens
  siRNA target sequence for BMPER (NM_133468.2,799-817).
ggtgcgctgtgttgttcat

SEQ ID NO: 138182 - DNA, 19 bp, Homo sapiens
  siRNA target sequence for BMPER (NM_133468.2,800-818).
gtgcgctgtgttgttcatt

SEQ ID NO: 138183 - DNA, 19 bp, Homo sapiens
  siRNA target sequence for BMPER (NM_133468.2,802-820).
gcgctgtgttgttcattgt

SEQ ID NO: 138184 - DNA, 19 bp, Homo sapiens
  siRNA target sequence for BMPER (NM_133468.2,880-898).
gggtgtgcagtatcaagaa

SEQ ID NO: 138185 - DNA, 19 bp, Homo sapiens
  siRNA target sequence for BMPER (NM_133468.2,914-932).
ccagaaggaagcaaatgta

SEQ ID NO: 138186 - DNA, 19 bp, Homo sapiens
  siRNA target sequence for BMPER (NM_133468.2,1000-1018).
ccagcaccttagtcacata

SEQ ID NO: 138187 - DNA, 19 bp, Homo sapiens
  siRNA target sequence for BMPER (NM_133468.2,1084-1102).
ctgcctctttcgaagtgat

SEQ ID NO: 138188 - DNA, 19 bp, Homo sapiens
  siRNA target sequence for BMPER (NM_133468.2,1087-1105).
cctctttcgaagtgatgtt

SEQ ID NO: 138189 - DNA, 19 bp, Homo sapiens
  siRNA target sequence for BMPER (NM_133468.2,1088-1106).
ctctttcgaagtgatgttt

SEQ ID NO: 138190 - DNA, 19 bp, Homo sapiens
  siRNA target sequence for BMPER (NM_133468.2,1090-1108).
ctttcgaagtgatgtttat

SEQ ID NO: 138191 - DNA, 19 bp, Homo sapiens
  siRNA target sequence for BMPER (NM_133468.2,1119-1137).
cctcatttctgtacgataa

SEQ ID NO: 138192 - DNA, 19 bp, Homo sapiens
  siRNA target sequence for BMPER (NM_133468.2,1248-1266).
gagtgcccccagaagacat

SEQ ID NO: 138193 - DNA, 19 bp, Homo sapiens
  siRNA target sequence for BMPER (NM_133468.2,1256-1274).
ccagaagacatcaaagtat

SEQ ID NO: 138194 - DNA, 19 bp, Homo sapiens
  siRNA target sequence for BMPER (NM_133468.2,1275-1293).
gcaaatttggcaacaagat

SEQ ID NO: 138195 - DNA, 19 bp, Homo sapiens
  siRNA target sequence for BMPER (NM_133468.2,1307-1325).
gagatgtggtcctctatca

SEQ ID NO: 138196 - DNA, 19 bp, Homo sapiens
  siRNA target sequence for BMPER (NM_133468.2,1309-1327).
gatgtggtcctctatcaat

SEQ ID NO: 138197 - DNA, 19 bp, Homo sapiens
  siRNA target sequence for BMPER (NM_133468.2,1312-1330).
gtggtcctctatcaattgt

SEQ ID NO: 138198 - DNA, 19 bp, Homo sapiens
  siRNA target sequence for BMPER (NM_133468.2,1333-1351).
catctgtgcttgtgtgaaa

SEQ ID NO: 138199 - DNA, 19 bp, Homo sapiens
  siRNA target sequence for BMPER (NM_133468.2,1356-1374).
ggacggagtgtcgcaataa

SEQ ID NO: 138200 - DNA, 19 bp, Homo sapiens
  siRNA target sequence for BMPER (NM_133468.2,1359-1377).
cggagtgtcgcaataagca

SEQ ID NO: 138201 - DNA, 19 bp, Homo sapiens
  siRNA target sequence for BMPER (NM_133468.2,1396-1414).
ctgcccacagggcaaaatt

SEQ ID NO: 138202 - DNA, 19 bp, Homo sapiens
  siRNA target sequence for BMPER (NM_133468.2,1406-1424).
ggcaaaattctcaacagaa

SEQ ID NO: 138203 - DNA, 19 bp, Homo sapiens
  siRNA target sequence for BMPER (NM_133468.2,1434-1452).
gtcctatttgcactgaaaa

SEQ ID NO: 138204 - DNA, 19 bp, Homo sapiens
  siRNA target sequence for BMPER (NM_133468.2,1499-1517).
gacggtcggacatttaact

SEQ ID NO: 138205 - DNA, 19 bp, Homo sapiens
  siRNA target sequence for BMPER (NM_133468.2,1501-1519).
cggtcggacatttaacttt

SEQ ID NO: 138206 - DNA, 19 bp, Homo sapiens
  siRNA target sequence for BMPER (NM_133468.2,1503-1521).
gtcggacatttaactttca

SEQ ID NO: 138207 - DNA, 19 bp, Homo sapiens
  siRNA target sequence for BMPER (NM_133468.2,1524-1542).
ggacgtgtcagtacgtttt

SEQ ID NO: 138208 - DNA, 19 bp, Homo sapiens
  siRNA target sequence for BMPER (NM_133468.2,1773-1791).
ccaaagcaggtttggaaat

SEQ ID NO: 138209 - DNA, 19 bp, Homo sapiens
  siRNA target sequence for BMPER (NM_133468.2,1798-1816).
ggatggagacagttttgta

SEQ ID NO: 138210 - DNA, 19 bp, Homo sapiens
  siRNA target sequence for BMPER (NM_133468.2,1866-1884).
gcaactacaatggacataa

SEQ ID NO: 138211 - DNA, 19 bp, Homo sapiens
  siRNA target sequence for BMPER (NM_133468.2,1867-1885).
caactacaatggacataaa

SEQ ID NO: 138212 - DNA, 19 bp, Homo sapiens
  siRNA target sequence for BMPER (NM_133468.2,1878-1896).
gacataaacgtgatgactt

SEQ ID NO: 138213 - DNA, 19 bp, Homo sapiens
  siRNA target sequence for BMPER (NM_133468.2,1880-1898).
cataaacgtgatgacttaa

SEQ ID NO: 138214 - DNA, 19 bp, Homo sapiens
  siRNA target sequence for BMPER (NM_133468.2,1911-1929).
gaaacttcaagtttgatgt

SEQ ID NO: 138215 - DNA, 19 bp, Homo sapiens
  siRNA target sequence for BMPER (NM_133468.2,1953-1971).
gggtggagtccaatgagtt

SEQ ID NO: 138216 - DNA, 19 bp, Homo sapiens
  siRNA target sequence for BMPER (NM_133468.2,2139-2157).
gtgaatgtccagtccataa

SEQ ID NO: 138217 - DNA, 19 bp, Homo sapiens
  siRNA target sequence for BMPER (NM_133468.2,2244-2262).
gtgcagccacccagtgtaa

SEQ ID NO: 138218 - DNA, 19 bp, Homo sapiens
  siRNA target sequence for BMPER (NM_133468.2,2283-2301).
cctgtggtccgggatgtat

SEQ ID NO: 138219 - DNA, 19 bp, Homo sapiens
  siRNA target sequence for BMPER (NM_133468.2,2286-2304).
gtggtccgggatgtatcaa

SEQ ID NO: 138220 - DNA, 19 bp, Homo sapiens
  siRNA target sequence for BMPER (NM_133468.2,2288-2306).
ggtccgggatgtatcaaga

SEQ ID NO: 138221 - DNA, 19 bp, Homo sapiens
  siRNA target sequence for BMPER (NM_133468.2,2361-2379).
gccactgtccagcaaactt

SEQ ID NO: 138222 - DNA, 19 bp, Homo sapiens
  siRNA target sequence for BMPER (NM_133468.2,2373-2391).
caaacttggtccttcacaa

SEQ ID NO: 138223 - DNA, 19 bp, Homo sapiens
  siRNA target sequence for C14orf10 (NM_017917.2,396-414).
caacacctgtccaaacaaa

SEQ ID NO: 138224 - DNA, 19 bp, Homo sapiens
  siRNA target sequence for C14orf10 (NM_017917.2,445-463).
gaaatggatttatttacaa

SEQ ID NO: 138225 - DNA, 19 bp, Homo sapiens
  siRNA target sequence for C14orf10 (NM_017917.2,516-534).
gaccattccccggttttat

SEQ ID NO: 138226 - DNA, 19 bp, Homo sapiens
  siRNA target sequence for C14orf10 (NM_017917.2,518-536).
ccattccccggttttatta

SEQ ID NO: 138227 - DNA, 19 bp, Homo sapiens
  siRNA target sequence for C14orf10 (NM_017917.2,519-537).
cattccccggttttattat

SEQ ID NO: 138228 - DNA, 19 bp, Homo sapiens
  siRNA target sequence for C14orf10 (NM_017917.2,653-671).
ggtttttgctggacaaaca

SEQ ID NO: 138229 - DNA, 19 bp, Homo sapiens
  siRNA target sequence for C14orf10 (NM_017917.2,691-709).
ggagaggaagcgatgatca

SEQ ID NO: 138230 - DNA, 19 bp, Homo sapiens
  siRNA target sequence for C14orf10 (NM_017917.2,692-710).
gagaggaagcgatgatcaa

SEQ ID NO: 138231 - DNA, 19 bp, Homo sapiens
  siRNA target sequence for C14orf10 (NM_017917.2,694-712).
gaggaagcgatgatcaatt

SEQ ID NO: 138232 - DNA, 19 bp, Homo sapiens
  siRNA target sequence for C14orf10 (NM_017917.2,700-718).
gcgatgatcaattacgaaa

SEQ ID NO: 138233 - DNA, 19 bp, Homo sapiens
  siRNA target sequence for C14orf10 (NM_017917.2,701-719).
cgatgatcaattacgaaaa

SEQ ID NO: 138234 - DNA, 19 bp, Homo sapiens
  siRNA target sequence for C14orf10 (NM_017917.2,785-803).
ctaaactccttcatacaga

SEQ ID NO: 138235 - DNA, 19 bp, Homo sapiens
  siRNA target sequence for C14orf10 (NM_017917.2,792-810).
ccttcatacagattcatat

SEQ ID NO: 138236 - DNA, 19 bp, Homo sapiens
  siRNA target sequence for C14orf10 (NM_017917.2,821-839).
ccatcatgcagttctttaa

SEQ ID NO: 138237 - DNA, 19 bp, Homo sapiens
  siRNA target sequence for C14orf10 (NM_017917.2,872-890).
caagaataggactcagttt

SEQ ID NO: 138238 - DNA, 19 bp, Homo sapiens
  siRNA target sequence for C14orf10 (NM_017917.2,875-893).
gaataggactcagtttata

SEQ ID NO: 138239 - DNA, 19 bp, Homo sapiens
  siRNA target sequence for C14orf10 (NM_017917.2,911-929).
ggtaccttcgggaatctga

SEQ ID NO: 138240 - DNA, 19 bp, Homo sapiens
  siRNA target sequence for C14orf10 (NM_017917.2,912-930).
gtaccttcgggaatctgat

SEQ ID NO: 138241 - DNA, 19 bp, Homo sapiens
  siRNA target sequence for C14orf10 (NM_017917.2,915-933).
ccttcgggaatctgattta

SEQ ID NO: 138242 - DNA, 19 bp, Homo sapiens
  siRNA target sequence for C14orf10 (NM_017917.2,957-975).
ccctacgttgccacaatta

SEQ ID NO: 138243 - DNA, 19 bp, Homo sapiens
  siRNA target sequence for C14orf10 (NM_017917.2,1147-1165).
caagaaacaaattggtttt

SEQ ID NO: 138244 - DNA, 19 bp, Homo sapiens
  siRNA target sequence for C14orf10 (NM_017917.2,1171-1189).
ccttctgccctaagagttt

SEQ ID NO: 138245 - DNA, 19 bp, Homo sapiens
  siRNA target sequence for C14orf10 (NM_017917.2,1172-1190).
cttctgccctaagagttta

SEQ ID NO: 138246 - DNA, 19 bp, Homo sapiens
  siRNA target sequence for C14orf10 (NM_017917.2,1186-1204).
gtttatggccagtacttga

SEQ ID NO: 138247 - DNA, 19 bp, Homo sapiens
  siRNA target sequence for C14orf10 (NM_017917.2,1193-1211).
gccagtacttgaatcttga

SEQ ID NO: 138248 - DNA, 19 bp, Homo sapiens
  siRNA target sequence for C14orf10 (NM_017917.2,1221-1239).
caatggcatgctcagtaaa

SEQ ID NO: 138249 - DNA, 19 bp, Homo sapiens
  siRNA target sequence for C14orf10 (NM_017917.2,1227-1245).
catgctcagtaaagaagaa

SEQ ID NO: 138250 - DNA, 19 bp, Homo sapiens
  siRNA target sequence for C14orf10 (NM_017917.2,1299-1317).
ccaggagtgtctcacttat

SEQ ID NO: 138251 - DNA, 19 bp, Homo sapiens
  siRNA target sequence for C14orf10 (NM_017917.2,1354-1372).
gtccttgcattagaaaaca

SEQ ID NO: 138252 - DNA, 19 bp, Homo sapiens
  siRNA target sequence for C14orf10 (NM_017917.2,1356-1374).
ccttgcattagaaaacaga

SEQ ID NO: 138253 - DNA, 19 bp, Homo sapiens
  siRNA target sequence for C14orf10 (NM_017917.2,1381-1399).
cctgcagctctacaatata

SEQ ID NO: 138254 - DNA, 19 bp, Homo sapiens
  siRNA target sequence for C14orf10 (NM_017917.2,1410-1428).
gcttgatattgagaacaaa

SEQ ID NO: 138255 - DNA, 19 bp, Homo sapiens
  siRNA target sequence for C14orf10 (NM_017917.2,1466-1484).
gggccatacaggaactaat

SEQ ID NO: 138256 - DNA, 19 bp, Homo sapiens
  siRNA target sequence for C14orf10 (NM_017917.2,1470-1488).
catacaggaactaatgaaa

SEQ ID NO: 138257 - DNA, 19 bp, Homo sapiens
  siRNA target sequence for C14orf10 (NM_017917.2,1495-1513).
ggacaagatcctgtttcat

SEQ ID NO: 138258 - DNA, 19 bp, Homo sapiens
  siRNA target sequence for C14orf10 (NM_017917.2,1496-1514).
gacaagatcctgtttcatt

SEQ ID NO: 138259 - DNA, 19 bp, Homo sapiens
  siRNA target sequence for C14orf10 (NM_017917.2,1542-1560).
catggtaaaaccaaaggat

SEQ ID NO: 138260 - DNA, 19 bp, Homo sapiens
  siRNA target sequence for C14orf10 (NM_017917.2,1579-1597).
caggatttaatcaacagta

SEQ ID NO: 138261 - DNA, 19 bp, Homo sapiens
  siRNA target sequence for C14orf10 (NM_017917.2,1581-1599).
ggatttaatcaacagtaat

SEQ ID NO: 138262 - DNA, 19 bp, Homo sapiens
  siRNA target sequence for C14orf10 (NM_017917.2,1620-1638).
cattctaatcgatttgaat

SEQ ID NO: 138263 - DNA, 19 bp, Homo sapiens
  siRNA target sequence for C14orf143 (NM_145231.1,91-109).
ggaagtgggtggaagtatt

SEQ ID NO: 138264 - DNA, 19 bp, Homo sapiens
  siRNA target sequence for C14orf143 (NM_145231.1,185-203).
gtacaagccctccaagata

SEQ ID NO: 138265 - DNA, 19 bp, Homo sapiens
  siRNA target sequence for C14orf143 (NM_145231.1,255-273).
ctcgaggggtttttaaata

SEQ ID NO: 138266 - DNA, 19 bp, Homo sapiens
  siRNA target sequence for C14orf143 (NM_145231.1,257-275).
cgaggggtttttaaatatt

SEQ ID NO: 138267 - DNA, 19 bp, Homo sapiens
  siRNA target sequence for C14orf143 (NM_145231.1,287-305).
gaaggaagctcaacgatat

SEQ ID NO: 138268 - DNA, 19 bp, Homo sapiens
  siRNA target sequence for C14orf143 (NM_145231.1,300-318).
cgatatcggaacgaagtaa

SEQ ID NO: 138269 - DNA, 19 bp, Homo sapiens
  siRNA target sequence for C14orf143 (NM_145231.1,341-359).
cacctactatcgtggattt

SEQ ID NO: 138270 - DNA, 19 bp, Homo sapiens
  siRNA target sequence for C14orf143 (NM_145231.1,343-361).
cctactatcgtggattttt

SEQ ID NO: 138271 - DNA, 19 bp, Homo sapiens
  siRNA target sequence for C14orf143 (NM_145231.1,391-409).
ggcaggtggctcccaaatt

SEQ ID NO: 138272 - DNA, 19 bp, Homo sapiens
  siRNA target sequence for C14orf143 (NM_145231.1,392-410).
gcaggtggctcccaaatta

SEQ ID NO: 138273 - DNA, 19 bp, Homo sapiens
  siRNA target sequence for C14orf143 (NM_145231.1,418-436).
ggactgttcttgaggtatt

SEQ ID NO: 138274 - DNA, 19 bp, Homo sapiens
  siRNA target sequence for C14orf143 (NM_145231.1,440-458).
ggaagtagatcgagattca

SEQ ID NO: 138275 - DNA, 19 bp, Homo sapiens
  siRNA target sequence for C14orf143 (NM_145231.1,463-481).
gtcacgtcagctttagaga

SEQ ID NO: 138276 - DNA, 19 bp, Homo sapiens
  siRNA target sequence for C14orf143 (NM_145231.1,467-485).
cgtcagctttagagacttt

SEQ ID NO: 138277 - DNA, 19 bp, Homo sapiens
  siRNA target sequence for C1orf10 (NM_016190.1,59-77).
cagttactgcaaaacatta

SEQ ID NO: 138278 - DNA, 19 bp, Homo sapiens
  siRNA target sequence for C1orf10 (NM_016190.1,61-79).
gttactgcaaaacattaat

SEQ ID NO: 138279 - DNA, 19 bp, Homo sapiens
  siRNA target sequence for C1orf10 (NM_016190.1,92-110).
gccttcaggcgctatgcaa

SEQ ID NO: 138280 - DNA, 19 bp, Homo sapiens
  siRNA target sequence for C1orf10 (NM_016190.1,269-287).
gaattcctggtcttagtgt

SEQ ID NO: 138281 - DNA, 19 bp, Homo sapiens
  siRNA target sequence for C1orf10 (NM_016190.1,274-292).
cctggtcttagtgtttaaa

SEQ ID NO: 138282 - DNA, 19 bp, Homo sapiens
  siRNA target sequence for C1orf10 (NM_016190.1,277-295).
ggtcttagtgtttaaagtt

SEQ ID NO: 138283 - DNA, 19 bp, Homo sapiens
  siRNA target sequence for C1orf10 (NM_016190.1,430-448).
ggggaaagggcagcattat

SEQ ID NO: 138284 - DNA, 19 bp, Homo sapiens
  siRNA target sequence for C1orf10 (NM_016190.1,585-603).
gaataagcccgcagataca

SEQ ID NO: 138285 - DNA, 19 bp, Homo sapiens
  siRNA target sequence for C1orf10 (NM_016190.1,1368-1386).
gtgaggaatgggttgatga

SEQ ID NO: 138286 - DNA, 19 bp, Homo sapiens
  siRNA target sequence for C1orf10 (NM_016190.1,1418-1436).
gaccagggcaacttgcata

SEQ ID NO: 138287 - DNA, 19 bp, Homo sapiens
  siRNA target sequence for C1orf22 (NM_025191.2,108-126).
catgcttatggtaactata

SEQ ID NO: 138288 - DNA, 19 bp, Homo sapiens
  siRNA target sequence for C1orf22 (NM_025191.2,147-165).
gatgaactcatgcctttaa

SEQ ID NO: 138289 - DNA, 19 bp, Homo sapiens
  siRNA target sequence for C1orf22 (NM_025191.2,150-168).
gaactcatgcctttaacct

SEQ ID NO: 138290 - DNA, 19 bp, Homo sapiens
  siRNA target sequence for C1orf22 (NM_025191.2,199-217).
gtcgcggtgacgttgatga

SEQ ID NO: 138291 - DNA, 19 bp, Homo sapiens
  siRNA target sequence for C1orf22 (NM_025191.2,213-231).
gatgatgccttgggaaaat

SEQ ID NO: 138292 - DNA, 19 bp, Homo sapiens
  siRNA target sequence for C1orf22 (NM_025191.2,257-275).
ggacactcttgtggtttta

SEQ ID NO: 138293 - DNA, 19 bp, Homo sapiens
  siRNA target sequence for C1orf22 (NM_025191.2,258-276).
gacactcttgtggttttaa

SEQ ID NO: 138294 - DNA, 19 bp, Homo sapiens
  siRNA target sequence for C1orf22 (NM_025191.2,319-337).
gagatgttaatttagataa

SEQ ID NO: 138295 - DNA, 19 bp, Homo sapiens
  siRNA target sequence for C1orf22 (NM_025191.2,345-363).
gtcgtatcagtctttgaaa

SEQ ID NO: 138296 - DNA, 19 bp, Homo sapiens
  siRNA target sequence for C1orf22 (NM_025191.2,347-365).
cgtatcagtctttgaaaca

SEQ ID NO: 138297 - DNA, 19 bp, Homo sapiens
  siRNA target sequence for C1orf22 (NM_025191.2,348-366).
gtatcagtctttgaaacaa

SEQ ID NO: 138298 - DNA, 19 bp, Homo sapiens
  siRNA target sequence for C1orf22 (NM_025191.2,397-415).
ggcactccctggcaatcat

SEQ ID NO: 138299 - DNA, 19 bp, Homo sapiens
  siRNA target sequence for C1orf22 (NM_025191.2,511-529).
ctaccagtggccttcctta

SEQ ID NO: 138300 - DNA, 19 bp, Homo sapiens
  siRNA target sequence for C1orf22 (NM_025191.2,522-540).
cttccttatccaagaatta

SEQ ID NO: 138301 - DNA, 19 bp, Homo sapiens
  siRNA target sequence for C1orf22 (NM_025191.2,612-630).
ggtaccttgatccttgaat

SEQ ID NO: 138302 - DNA, 19 bp, Homo sapiens
  siRNA target sequence for C1orf22 (NM_025191.2,650-668).
cacaggagcaacaatattt

SEQ ID NO: 138303 - DNA, 19 bp, Homo sapiens
  siRNA target sequence for C1orf22 (NM_025191.2,734-752).
gggcgtgactataaatatt

SEQ ID NO: 138304 - DNA, 19 bp, Homo sapiens
  siRNA target sequence for C1orf22 (NM_025191.2,736-754).
gcgtgactataaatattca

SEQ ID NO: 138305 - DNA, 19 bp, Homo sapiens
  siRNA target sequence for C1orf22 (NM_025191.2,762-780).
gattgggtacgaaaagata

SEQ ID NO: 138306 - DNA, 19 bp, Homo sapiens
  siRNA target sequence for C1orf22 (NM_025191.2,793-811).
cagggattgattcatatta

SEQ ID NO: 138307 - DNA, 19 bp, Homo sapiens
  siRNA target sequence for C1orf22 (NM_025191.2,865-883).
gatttaacacacactatga

SEQ ID NO: 138308 - DNA, 19 bp, Homo sapiens
  siRNA target sequence for C1orf22 (NM_025191.2,882-900).
gatgccataatgaggtata

SEQ ID NO: 138309 - DNA, 19 bp, Homo sapiens
  siRNA target sequence for C1orf22 (NM_025191.2,885-903).
gccataatgaggtatatta

SEQ ID NO: 138310 - DNA, 19 bp, Homo sapiens
  siRNA target sequence for C1orf22 (NM_025191.2,927-945).
gtgcatatccacaaaccaa

SEQ ID NO: 138311 - DNA, 19 bp, Homo sapiens
  siRNA target sequence for C1orf22 (NM_025191.2,990-1008).
ccaggcttgcaggtgttaa

SEQ ID NO: 138312 - DNA, 19 bp, Homo sapiens
  siRNA target sequence for C1orf22 (NM_025191.2,1001-1019).
ggtgttaaagggggatatt

SEQ ID NO: 138313 - DNA, 19 bp, Homo sapiens
  siRNA target sequence for C1orf22 (NM_025191.2,1002-1020).
gtgttaaagggggatatta

SEQ ID NO: 138314 - DNA, 19 bp, Homo sapiens
  siRNA target sequence for C1orf22 (NM_025191.2,1004-1022).
gttaaagggggatattaga

SEQ ID NO: 138315 - DNA, 19 bp, Homo sapiens
  siRNA target sequence for C1orf22 (NM_025191.2,1036-1054).
ctcatgaaatgttatatca

SEQ ID NO: 138316 - DNA, 19 bp, Homo sapiens
  siRNA target sequence for C1orf22 (NM_025191.2,1112-1130).
ctgggctcaacatccttta

SEQ ID NO: 138317 - DNA, 19 bp, Homo sapiens
  siRNA target sequence for C1orf22 (NM_025191.2,1143-1161).
gcagaaagtacctacttct

SEQ ID NO: 138318 - DNA, 19 bp, Homo sapiens
  siRNA target sequence for C1orf22 (NM_025191.2,1144-1162).
cagaaagtacctacttctt

SEQ ID NO: 138319 - DNA, 19 bp, Homo sapiens
  siRNA target sequence for C1orf22 (NM_025191.2,1146-1164).
gaaagtacctacttcttat

SEQ ID NO: 138320 - DNA, 19 bp, Homo sapiens
  siRNA target sequence for C1orf22 (NM_025191.2,1194-1212).
gaagtagggaagacactta

SEQ ID NO: 138321 - DNA, 19 bp, Homo sapiens
  siRNA target sequence for C1orf22 (NM_025191.2,1416-1434).
ctttggctctctactacaa

SEQ ID NO: 138322 - DNA, 19 bp, Homo sapiens
  siRNA target sequence for C1orf22 (NM_025191.2,1482-1500).
gatgacagtaacttcgatt

SEQ ID NO: 138323 - DNA, 19 bp, Homo sapiens
  siRNA target sequence for C1orf22 (NM_025191.2,1539-1557).
ccattgtatgctcaaagta

SEQ ID NO: 138324 - DNA, 19 bp, Homo sapiens
  siRNA target sequence for C1orf22 (NM_025191.2,1540-1558).
cattgtatgctcaaagtat

SEQ ID NO: 138325 - DNA, 19 bp, Homo sapiens
  siRNA target sequence for C1orf22 (NM_025191.2,1544-1562).
gtatgctcaaagtattcgt

SEQ ID NO: 138326 - DNA, 19 bp, Homo sapiens
  siRNA target sequence for C1orf22 (NM_025191.2,1647-1665).
cctctgagagccagagatt

SEQ ID NO: 138327 - DNA, 19 bp, Homo sapiens
  siRNA target sequence for C1orf22 (NM_025191.2,1706-1724).
gatgggggtgagtttgatt

SEQ ID NO: 138328 - DNA, 19 bp, Homo sapiens
  siRNA target sequence for C1orf22 (NM_025191.2,1859-1877).
gcctccacgagctgtacaa

SEQ ID NO: 138329 - DNA, 19 bp, Homo sapiens
  siRNA target sequence for C1orf22 (NM_025191.2,1860-1878).
cctccacgagctgtacaaa

SEQ ID NO: 138330 - DNA, 19 bp, Homo sapiens
  siRNA target sequence for C1orf22 (NM_025191.2,1864-1882).
cacgagctgtacaaattgt

SEQ ID NO: 138331 - DNA, 19 bp, Homo sapiens
  siRNA target sequence for C1orf22 (NM_025191.2,1866-1884).
cgagctgtacaaattgttt

SEQ ID NO: 138332 - DNA, 19 bp, Homo sapiens
  siRNA target sequence for C1orf22 (NM_025191.2,1936-1954).
ggctggatctgtctaaaca

SEQ ID NO: 138333 - DNA, 19 bp, Homo sapiens
  siRNA target sequence for C1orf22 (NM_025191.2,1940-1958).
ggatctgtctaaacataaa

SEQ ID NO: 138334 - DNA, 19 bp, Homo sapiens
  siRNA target sequence for C1orf22 (NM_025191.2,1998-2016).
ggttgttcagagcttacta

SEQ ID NO: 138335 - DNA, 19 bp, Homo sapiens
  siRNA target sequence for C1orf22 (NM_025191.2,1999-2017).
gttgttcagagcttactaa

SEQ ID NO: 138336 - DNA, 19 bp, Homo sapiens
  siRNA target sequence for C1orf22 (NM_025191.2,2035-2053).
gaaaaatcgcactgataca

SEQ ID NO: 138337 - DNA, 19 bp, Homo sapiens
  siRNA target sequence for C1orf22 (NM_025191.2,2116-2134).
gcattgttattgatgacaa

SEQ ID NO: 138338 - DNA, 19 bp, Homo sapiens
  siRNA target sequence for C1orf22 (NM_025191.2,2392-2410).
gttctcaggaggttgattt

SEQ ID NO: 138339 - DNA, 19 bp, Homo sapiens
  siRNA target sequence for C1orf22 (NM_025191.2,2402-2420).
ggttgatttggttgatcaa

SEQ ID NO: 138340 - DNA, 19 bp, Homo sapiens
  siRNA target sequence for C1orf22 (NM_025191.2,2461-2479).
cattatctctagcagatat

SEQ ID NO: 138341 - DNA, 19 bp, Homo sapiens
  siRNA target sequence for C1orf22 (NM_025191.2,2480-2498).
ggacaatgctgcaagcatt

SEQ ID NO: 138342 - DNA, 19 bp, Homo sapiens
  siRNA target sequence for C1orf22 (NM_025191.2,2481-2499).
gacaatgctgcaagcattt

SEQ ID NO: 138343 - DNA, 19 bp, Homo sapiens
  siRNA target sequence for C1orf22 (NM_025191.2,2503-2521).
cttctgaacagacttctaa

SEQ ID NO: 138344 - DNA, 19 bp, Homo sapiens
  siRNA target sequence for C1orf22 (NM_025191.2,2534-2552).
ccatgagactacaaatctt

SEQ ID NO: 138345 - DNA, 19 bp, Homo sapiens
  siRNA target sequence for C1orf22 (NM_025191.2,2563-2581).
gtacagatttagataacca

SEQ ID NO: 138346 - DNA, 19 bp, Homo sapiens
  siRNA target sequence for C1orf22 (NM_025191.2,2604-2622).
gaggaagattccaatccta

SEQ ID NO: 138347 - DNA, 19 bp, Homo sapiens
  siRNA target sequence for C1orf22 (NM_025191.2,2606-2624).
ggaagattccaatcctaat

SEQ ID NO: 138348 - DNA, 19 bp, Homo sapiens
  siRNA target sequence for C1orf22 (NM_025191.2,2646-2664).
cagcctatagactccatat

SEQ ID NO: 138349 - DNA, 19 bp, Homo sapiens
  siRNA target sequence for C1orf22 (NM_025191.2,2648-2666).
gcctatagactccatatta

SEQ ID NO: 138350 - DNA, 19 bp, Homo sapiens
  siRNA target sequence for C1QR1 (NM_012072.2,508-526).
ggaggacacgccttactct

SEQ ID NO: 138351 - DNA, 19 bp, Homo sapiens
  siRNA target sequence for C1QR1 (NM_012072.2,509-527).
gaggacacgccttactcta

SEQ ID NO: 138352 - DNA, 19 bp, Homo sapiens
  siRNA target sequence for C1QR1 (NM_012072.2,512-530).
gacacgccttactctaact

SEQ ID NO: 138353 - DNA, 19 bp, Homo sapiens
  siRNA target sequence for C1QR1 (NM_012072.2,841-859).
cgagactcagagtcattat

SEQ ID NO: 138354 - DNA, 19 bp, Homo sapiens
  siRNA target sequence for C1QR1 (NM_012072.2,1682-1700).
gctacacccaccacaagta

SEQ ID NO: 138355 - DNA, 19 bp, Homo sapiens
  siRNA target sequence for C1QR1 (NM_012072.2,1880-1898).
gggcaaaagctgcttttat

SEQ ID NO: 138356 - DNA, 19 bp, Homo sapiens
  siRNA target sequence for C1R (NM_001733.2,119-137).
catccctcagaagttattt

SEQ ID NO: 138357 - DNA, 19 bp, Homo sapiens
  siRNA target sequence for C1R (NM_001733.2,167-185).
gccttaccccaacaacttt

SEQ ID NO: 138358 - DNA, 19 bp, Homo sapiens
  siRNA target sequence for C1R (NM_001733.2,174-192).
cccaacaactttgaaacaa

SEQ ID NO: 138359 - DNA, 19 bp, Homo sapiens
  siRNA target sequence for C1R (NM_001733.2,271-289).
gcttctatgattatgtcaa

SEQ ID NO: 138360 - DNA, 19 bp, Homo sapiens
  siRNA target sequence for C1R (NM_001733.2,770-788).
ggagccttttgatattgat

SEQ ID NO: 138361 - DNA, 19 bp, Homo sapiens
  siRNA target sequence for C1R (NM_001733.2,811-829).
cctatgaccagctacagat

SEQ ID NO: 138362 - DNA, 19 bp, Homo sapiens
  siRNA target sequence for C1R (NM_001733.2,961-979).
gctacaccaccgagatcat

SEQ ID NO: 138363 - DNA, 19 bp, Homo sapiens
  siRNA target sequence for C1R (NM_001733.2,1044-1062).
cagttccgtgactacttca

SEQ ID NO: 138364 - DNA, 19 bp, Homo sapiens
  siRNA target sequence for C1R (NM_001733.2,1050-1068).
cgtgactacttcattgcta

SEQ ID NO: 138365 - DNA, 19 bp, Homo sapiens
  siRNA target sequence for C1R (NM_001733.2,1448-1466).
catcatcggagggcaaaaa

SEQ ID NO: 138366 - DNA, 19 bp, Homo sapiens
  siRNA target sequence for C1S (NM_001734.1,268-286).
gatcctgtcccctaactat

SEQ ID NO: 138367 - DNA, 19 bp, Homo sapiens
  siRNA target sequence for C1S (NM_001734.1,406-424).
ctcagtgcagataatctca

SEQ ID NO: 138368 - DNA, 19 bp, Homo sapiens
  siRNA target sequence for C1S (NM_001734.1,480-498).
ctccaattgtggaagagtt

SEQ ID NO: 138369 - DNA, 19 bp, Homo sapiens
  siRNA target sequence for C1S (NM_001734.1,518-536).
ctccaggtgatctttaagt

SEQ ID NO: 138370 - DNA, 19 bp, Homo sapiens
  siRNA target sequence for C1S (NM_001734.1,520-538).
ccaggtgatctttaagtca

SEQ ID NO: 138371 - DNA, 19 bp, Homo sapiens
  siRNA target sequence for C1S (NM_001734.1,564-582).
cggggtttgctgcatacta

SEQ ID NO: 138372 - DNA, 19 bp, Homo sapiens
  siRNA target sequence for C1S (NM_001734.1,565-583).
ggggtttgctgcatactat

SEQ ID NO: 138373 - DNA, 19 bp, Homo sapiens
  siRNA target sequence for C1S (NM_001734.1,567-585).
ggtttgctgcatactatgt

SEQ ID NO: 138374 - DNA, 19 bp, Homo sapiens
  siRNA target sequence for C1S (NM_001734.1,706-724).
gaagaattgcggagttaat

SEQ ID NO: 138375 - DNA, 19 bp, Homo sapiens
  siRNA target sequence for C1S (NM_001734.1,760-778).
gattgcaagtcccaattat

SEQ ID NO: 138376 - DNA, 19 bp, Homo sapiens
  siRNA target sequence for C1S (NM_001734.1,770-788).
cccaattatcccaaaccat

SEQ ID NO: 138377 - DNA, 19 bp, Homo sapiens
  siRNA target sequence for C1S (NM_001734.1,771-789).
ccaattatcccaaaccata

SEQ ID NO: 138378 - DNA, 19 bp, Homo sapiens
  siRNA target sequence for C1S (NM_001734.1,785-803).
ccatatccagagaactcaa

SEQ ID NO: 138379 - DNA, 19 bp, Homo sapiens
  siRNA target sequence for C1S (NM_001734.1,850-868).
gaccttgcggagagaagat

SEQ ID NO: 138380 - DNA, 19 bp, Homo sapiens
  siRNA target sequence for C1S (NM_001734.1,852-870).
ccttgcggagagaagattt

SEQ ID NO: 138381 - DNA, 19 bp, Homo sapiens
  siRNA target sequence for C1S (NM_001734.1,853-871).
cttgcggagagaagatttt

SEQ ID NO: 138382 - DNA, 19 bp, Homo sapiens
  siRNA target sequence for C1S (NM_001734.1,937-955).
gcaatttggtccttactgt

SEQ ID NO: 138383 - DNA, 19 bp, Homo sapiens
  siRNA target sequence for C1S (NM_001734.1,948-966).
cttactgtggtcatggatt

SEQ ID NO: 138384 - DNA, 19 bp, Homo sapiens
  siRNA target sequence for C1S (NM_001734.1,991-1009).
caagagtaatgctcttgat

SEQ ID NO: 138385 - DNA, 19 bp, Homo sapiens
  siRNA target sequence for C1S (NM_001734.1,1015-1033).
cttccaaactgatctaaca

SEQ ID NO: 138386 - DNA, 19 bp, Homo sapiens
  siRNA target sequence for C1S (NM_001734.1,1025-1043).
gatctaacagggcaaaaaa

SEQ ID NO: 138387 - DNA, 19 bp, Homo sapiens
  siRNA target sequence for C1S (NM_001734.1,1048-1066).
ctggaaacttcgctatcat

SEQ ID NO: 138388 - DNA, 19 bp, Homo sapiens
  siRNA target sequence for C1S (NM_001734.1,1059-1077).
gctatcatggagatccaat

SEQ ID NO: 138389 - DNA, 19 bp, Homo sapiens
  siRNA target sequence for C1S (NM_001734.1,1090-1108).
ggaagacactcccaattct

SEQ ID NO: 138390 - DNA, 19 bp, Homo sapiens
  siRNA target sequence for C1S (NM_001734.1,1145-1163).
gatgtggtgcagataacct

SEQ ID NO: 138391 - DNA, 19 bp, Homo sapiens
  siRNA target sequence for C1S (NM_001734.1,1164-1182).
gtctggatgggtttgaagt

SEQ ID NO: 138392 - DNA, 19 bp, Homo sapiens
  siRNA target sequence for C1S (NM_001734.1,1193-1211).
cgtgttggtgcaacatctt

SEQ ID NO: 138393 - DNA, 19 bp, Homo sapiens
  siRNA target sequence for C1S (NM_001734.1,1194-1212).
gtgttggtgcaacatcttt

SEQ ID NO: 138394 - DNA, 19 bp, Homo sapiens
  siRNA target sequence for C1S (NM_001734.1,1202-1220).
gcaacatctttctattcga

SEQ ID NO: 138395 - DNA, 19 bp, Homo sapiens
  siRNA target sequence for C1S (NM_001734.1,1293-1311).
ccattgagaatggtaaagt

SEQ ID NO: 138396 - DNA, 19 bp, Homo sapiens
  siRNA target sequence for C1S (NM_001734.1,1294-1312).
cattgagaatggtaaagtt

SEQ ID NO: 138397 - DNA, 19 bp, Homo sapiens
  siRNA target sequence for C1S (NM_001734.1,1318-1336).
cccagagagcactttgttt

SEQ ID NO: 138398 - DNA, 19 bp, Homo sapiens
  siRNA target sequence for C1S (NM_001734.1,1359-1377).
gtgaggagccatattacta

SEQ ID NO: 138399 - DNA, 19 bp, Homo sapiens
  siRNA target sequence for C1S (NM_001734.1,1524-1542).
gatccgatgcagatattaa

SEQ ID NO: 138400 - DNA, 19 bp, Homo sapiens
  siRNA target sequence for C1S (NM_001734.1,1580-1598).
gctggtggagcgctcatta

SEQ ID NO: 138401 - DNA, 19 bp, Homo sapiens
  siRNA target sequence for C1S (NM_001734.1,1581-1599).
ctggtggagcgctcattaa

SEQ ID NO: 138402 - DNA, 19 bp, Homo sapiens
  siRNA target sequence for C1S (NM_001734.1,1584-1602).
gtggagcgctcattaatga

SEQ ID NO: 138403 - DNA, 19 bp, Homo sapiens
  siRNA target sequence for C1S (NM_001734.1,1586-1604).
ggagcgctcattaatgagt

SEQ ID NO: 138404 - DNA, 19 bp, Homo sapiens
  siRNA target sequence for C1S (NM_001734.1,1587-1605).
gagcgctcattaatgagta

SEQ ID NO: 138405 - DNA, 19 bp, Homo sapiens
  siRNA target sequence for C1S (NM_001734.1,1642-1660).
cagggagccaacaatgtat

SEQ ID NO: 138406 - DNA, 19 bp, Homo sapiens
  siRNA target sequence for C1S (NM_001734.1,1644-1662).
gggagccaacaatgtatgt

SEQ ID NO: 138407 - DNA, 19 bp, Homo sapiens
  siRNA target sequence for C1S (NM_001734.1,1711-1729).
cactcctgagcatgtgttt

SEQ ID NO: 138408 - DNA, 19 bp, Homo sapiens
  siRNA target sequence for C1S (NM_001734.1,1759-1777).
cccagaaggacgaaccaat

SEQ ID NO: 138409 - DNA, 19 bp, Homo sapiens
  siRNA target sequence for C1S (NM_001734.1,1760-1778).
ccagaaggacgaaccaatt

SEQ ID NO: 138410 - DNA, 19 bp, Homo sapiens
  siRNA target sequence for C1S (NM_001734.1,1761-1779).
cagaaggacgaaccaattt

SEQ ID NO: 138411 - DNA, 19 bp, Homo sapiens
  siRNA target sequence for C1S (NM_001734.1,1766-1784).
ggacgaaccaattttgata

SEQ ID NO: 138412 - DNA, 19 bp, Homo sapiens
  siRNA target sequence for C1S (NM_001734.1,1767-1785).
gacgaaccaattttgataa

SEQ ID NO: 138413 - DNA, 19 bp, Homo sapiens
  siRNA target sequence for C1S (NM_001734.1,1770-1788).
gaaccaattttgataatga

SEQ ID NO: 138414 - DNA, 19 bp, Homo sapiens
  siRNA target sequence for C1S (NM_001734.1,1794-1812).
cactggtgcggctgaaaga

SEQ ID NO: 138415 - DNA, 19 bp, Homo sapiens
  siRNA target sequence for C1S (NM_001734.1,1857-1875).
gcacctcttccgactacaa

SEQ ID NO: 138416 - DNA, 19 bp, Homo sapiens
  siRNA target sequence for C1S (NM_001734.1,1945-1963).
cctcaaggcggcaaggtta

SEQ ID NO: 138417 - DNA, 19 bp, Homo sapiens
  siRNA target sequence for C1S (NM_001734.1,2197-2215).
cacacgggtaaagaactat

SEQ ID NO: 138418 - DNA, 19 bp, Homo sapiens
  siRNA target sequence for C1S (NM_001734.1,2199-2217).
cacgggtaaagaactatgt

SEQ ID NO: 138419 - DNA, 19 bp, Homo sapiens
  siRNA target sequence for C1S (NM_001734.1,2202-2220).
gggtaaagaactatgttga

SEQ ID NO: 138420 - DNA, 19 bp, Homo sapiens
  siRNA target sequence for C20orf31 (NM_018217.1,326-344).
ctggacaccttgctgattt

SEQ ID NO: 138421 - DNA, 19 bp, Homo sapiens
  siRNA target sequence for C20orf31 (NM_018217.1,338-356).
ctgattttggggaatgtct

SEQ ID NO: 138422 - DNA, 19 bp, Homo sapiens
  siRNA target sequence for C20orf31 (NM_018217.1,388-406).
ggacagcgtggactttgat

SEQ ID NO: 138423 - DNA, 19 bp, Homo sapiens
  siRNA target sequence for C20orf31 (NM_018217.1,389-407).
gacagcgtggactttgata

SEQ ID NO: 138424 - DNA, 19 bp, Homo sapiens
  siRNA target sequence for C20orf31 (NM_018217.1,391-409).
cagcgtggactttgatatt

SEQ ID NO: 138425 - DNA, 19 bp, Homo sapiens
  siRNA target sequence for C20orf31 (NM_018217.1,394-412).
cgtggactttgatattgat

SEQ ID NO: 138426 - DNA, 19 bp, Homo sapiens
  siRNA target sequence for C20orf31 (NM_018217.1,415-433).
gaacgcctctgtgtttgaa

SEQ ID NO: 138427 - DNA, 19 bp, Homo sapiens
  siRNA target sequence for C20orf31 (NM_018217.1,418-436).
cgcctctgtgtttgaaaca

SEQ ID NO: 138428 - DNA, 19 bp, Homo sapiens
  siRNA target sequence for C20orf31 (NM_018217.1,586-604).
cactggcatgccatatgga

SEQ ID NO: 138429 - DNA, 19 bp, Homo sapiens
  siRNA target sequence for C20orf31 (NM_018217.1,603-621).
gaacagtgaacttacttca

SEQ ID NO: 138430 - DNA, 19 bp, Homo sapiens
  siRNA target sequence for C20orf31 (NM_018217.1,668-686).
gggaccttcattgttgaat

SEQ ID NO: 138431 - DNA, 19 bp, Homo sapiens
  siRNA target sequence for C20orf31 (NM_018217.1,759-777).
gggagagccggtcagatat

SEQ ID NO: 138432 - DNA, 19 bp, Homo sapiens
  siRNA target sequence for C20orf31 (NM_018217.1,784-802).
ggtcggcaaccacattgat

SEQ ID NO: 138433 - DNA, 19 bp, Homo sapiens
  siRNA target sequence for C20orf31 (NM_018217.1,849-867).
gcgtggactcctactttga

SEQ ID NO: 138434 - DNA, 19 bp, Homo sapiens
  siRNA target sequence for C20orf31 (NM_018217.1,913-931).
ggccatgttcctagagtat

SEQ ID NO: 138435 - DNA, 19 bp, Homo sapiens
  siRNA target sequence for C20orf31 (NM_018217.1,919-937).
gttcctagagtataacaaa

SEQ ID NO: 138436 - DNA, 19 bp, Homo sapiens
  siRNA target sequence for C20orf31 (NM_018217.1,1051-1069).
gagcctcattggagacatt

SEQ ID NO: 138437 - DNA, 19 bp, Homo sapiens
  siRNA target sequence for C20orf31 (NM_018217.1,1055-1073).
ctcattggagacattgaca

SEQ ID NO: 138438 - DNA, 19 bp, Homo sapiens
  siRNA target sequence for C20orf31 (NM_018217.1,1083-1101).
ggaccttcctcaactacta

SEQ ID NO: 138439 - DNA, 19 bp, Homo sapiens
  siRNA target sequence for C20orf31 (NM_018217.1,1091-1109).
ctcaactactacactgtat

SEQ ID NO: 138440 - DNA, 19 bp, Homo sapiens
  siRNA target sequence for C20orf31 (NM_018217.1,1125-1143).
ggctcccggaattctacaa

SEQ ID NO: 138441 - DNA, 19 bp, Homo sapiens
  siRNA target sequence for C20orf31 (NM_018217.1,1127-1145).
ctcccggaattctacaaca

SEQ ID NO: 138442 - DNA, 19 bp, Homo sapiens
  siRNA target sequence for C20orf31 (NM_018217.1,1184-1202).
ccacttcggccagaactta

SEQ ID NO: 138443 - DNA, 19 bp, Homo sapiens
  siRNA target sequence for C20orf31 (NM_018217.1,1185-1203).
cacttcggccagaacttat

SEQ ID NO: 138444 - DNA, 19 bp, Homo sapiens
  siRNA target sequence for C20orf31 (NM_018217.1,1190-1208).
cggccagaacttattgaaa

SEQ ID NO: 138445 - DNA, 19 bp, Homo sapiens
  siRNA target sequence for C20orf31 (NM_018217.1,1306-1324).
cggatttgcaacaatcaaa

SEQ ID NO: 138446 - DNA, 19 bp, Homo sapiens
  siRNA target sequence for C20orf31 (NM_018217.1,1482-1500).
gggctggggggtacatctt

SEQ ID NO: 138447 - DNA, 19 bp, Homo sapiens
  siRNA target sequence for C20orf31 (NM_018217.1,1614-1632).
gcaggtcgaaatttcagaa

SEQ ID NO: 138448 - DNA, 19 bp, Homo sapiens
  siRNA target sequence for C20orf31 (NM_018217.1,1628-1646).
cagaaaaacactgttagtt

SEQ ID NO: 138449 - DNA, 19 bp, Homo sapiens
  siRNA target sequence for C20orf31 (NM_018217.1,1773-1791).
cctccaagttggcattact

SEQ ID NO: 138450 - DNA, 19 bp, Homo sapiens
  siRNA target sequence for Cab45 (NM_016176.2,518-536).
ggacctgggtggctttgat

SEQ ID NO: 138451 - DNA, 19 bp, Homo sapiens
  siRNA target sequence for Cab45 (NM_016176.2,732-750).
gtgtcttgggacgagtata

SEQ ID NO: 138452 - DNA, 19 bp, Homo sapiens
  siRNA target sequence for Cab45 (NM_016176.2,736-754).
cttgggacgagtataaggt

SEQ ID NO: 138453 - DNA, 19 bp, Homo sapiens
  siRNA target sequence for Cab45 (NM_016176.2,743-761).
cgagtataaggtgaagttt

SEQ ID NO: 138454 - DNA, 19 bp, Homo sapiens
  siRNA target sequence for Cab45 (NM_016547.1,1229-1247).
gccaataggcaccttaaat

SEQ ID NO: 138455 - DNA, 19 bp, Homo sapiens
  siRNA target sequence for CABP1 (NM_004276.3,104-122).
ctctcaaggaaggatagat

SEQ ID NO: 138456 - DNA, 19 bp, Homo sapiens
  siRNA target sequence for CABP1 (NM_004276.3,106-124).
ctcaaggaaggatagatca

SEQ ID NO: 138457 - DNA, 19 bp, Homo sapiens
  siRNA target sequence for CABP1 (NM_004276.3,123-141).
cactgcgaccagaggaaat

SEQ ID NO: 138458 - DNA, 19 bp, Homo sapiens
  siRNA target sequence for CABP1 (NM_004276.3,475-493).
ggtgggacaccgagacata

SEQ ID NO: 138459 - DNA, 19 bp, Homo sapiens
  siRNA target sequence for CABP1 (NM_004276.3,485-503).
cgagacatagaggaaatta

SEQ ID NO: 138460 - DNA, 19 bp, Homo sapiens
  siRNA target sequence for CABP1 (NM_031205.2,286-304).
caggcagcctgatagatca

SEQ ID NO: 138461 - DNA, 19 bp, Homo sapiens
  siRNA target sequence for CABP2 (NM_016366.1,454-472).
cggaaaggtggactttgaa

SEQ ID NO: 138462 - DNA, 19 bp, Homo sapiens
  siRNA target sequence for CABP2 (NM_016366.1,694-712).
ggtcgacttcgaagagttt

SEQ ID NO: 138463 - DNA, 19 bp, Homo sapiens
  siRNA target sequence for CABP4 (NM_145200.1,713-731).
catcgccttccgagagttt

SEQ ID NO: 138464 - DNA, 19 bp, Homo sapiens
  siRNA target sequence for CABP4 (NM_145200.1,737-755).
ggacagggatggacgaatt

SEQ ID NO: 138465 - DNA, 19 bp, Homo sapiens
  siRNA target sequence for CABP5 (NM_019855.3,231-249).
gcatttcttgagttcgata

SEQ ID NO: 138466 - DNA, 19 bp, Homo sapiens
  siRNA target sequence for CABP5 (NM_019855.3,232-250).
catttcttgagttcgataa

SEQ ID NO: 138467 - DNA, 19 bp, Homo sapiens
  siRNA target sequence for CABP5 (NM_019855.3,252-270).
gaccgagatgggttcatct

SEQ ID NO: 138468 - DNA, 19 bp, Homo sapiens
  siRNA target sequence for CABP5 (NM_019855.3,263-281).
gttcatctcttgtaaggat

SEQ ID NO: 138469 - DNA, 19 bp, Homo sapiens
  siRNA target sequence for CABP5 (NM_019855.3,316-334).
ccacggagatggaactgat

SEQ ID NO: 138470 - DNA, 19 bp, Homo sapiens
  siRNA target sequence for CABP5 (NM_019855.3,317-335).
cacggagatggaactgatt

SEQ ID NO: 138471 - DNA, 19 bp, Homo sapiens
  siRNA target sequence for CABP5 (NM_019855.3,319-337).
cggagatggaactgattga

SEQ ID NO: 138472 - DNA, 19 bp, Homo sapiens
  siRNA target sequence for CABP5 (NM_019855.3,401-419).
gatgacccccaaattgctt

SEQ ID NO: 138473 - DNA, 19 bp, Homo sapiens
  siRNA target sequence for CABP5 (NM_019855.3,602-620).
cggcacagttgactttgaa

SEQ ID NO: 138474 - DNA, 19 bp, Homo sapiens
  siRNA target sequence for CABP7 (NM_182527.1,403-421).
ccatggcaccgactttgat

SEQ ID NO: 138475 - DNA, 19 bp, Homo sapiens
  siRNA target sequence for CABP7 (NM_182527.1,404-422).
catggcaccgactttgata

SEQ ID NO: 138476 - DNA, 19 bp, Homo sapiens
  siRNA target sequence for CABP7 (NM_182527.1,408-426).
gcaccgactttgatactgt

SEQ ID NO: 138477 - DNA, 19 bp, Homo sapiens
  siRNA target sequence for CACNA1C (NM_000719.3,275-293).
gagaatacgaggatgtaca

SEQ ID NO: 138478 - DNA, 19 bp, Homo sapiens
  siRNA target sequence for CACNA1C (NM_000719.3,277-295).
gaatacgaggatgtacatt

SEQ ID NO: 138479 - DNA, 19 bp, Homo sapiens
  siRNA target sequence for CACNA1C (NM_000719.3,307-325).
ccaccaaggttccaactat

SEQ ID NO: 138480 - DNA, 19 bp, Homo sapiens
  siRNA target sequence for CACNA1C (NM_000719.3,682-700).
ggccttagcgatctatatt

SEQ ID NO: 138481 - DNA, 19 bp, Homo sapiens
  siRNA target sequence for CACNA1C (NM_000719.3,716-734).
gattccaacgccaccaatt

SEQ ID NO: 138482 - DNA, 19 bp, Homo sapiens
  siRNA target sequence for CACNA1C (NM_000719.3,749-767).
gtggaatatctctttctca

SEQ ID NO: 138483 - DNA, 19 bp, Homo sapiens
  siRNA target sequence for CACNA1C (NM_000719.3,758-776).
ctctttctcataattttta

SEQ ID NO: 138484 - DNA, 19 bp, Homo sapiens
  siRNA target sequence for CACNA1C (NM_000719.3,777-795).
cggtggaagcgtttttaaa

SEQ ID NO: 138485 - DNA, 19 bp, Homo sapiens
  siRNA target sequence for CACNA1C (NM_000719.3,778-796).
ggtggaagcgtttttaaaa

SEQ ID NO: 138486 - DNA, 19 bp, Homo sapiens
  siRNA target sequence for CACNA1C (NM_000719.3,844-862).
cggctggaacctactagat

SEQ ID NO: 138487 - DNA, 19 bp, Homo sapiens
  siRNA target sequence for CACNA1C (NM_000719.3,850-868).
gaacctactagattttata

SEQ ID NO: 138488 - DNA, 19 bp, Homo sapiens
  siRNA target sequence for CACNA1C (NM_000719.3,872-890).
gtggttgtggggcttttta

SEQ ID NO: 138489 - DNA, 19 bp, Homo sapiens
  siRNA target sequence for CACNA1C (NM_000719.3,874-892).
ggttgtggggctttttagt

SEQ ID NO: 138490 - DNA, 19 bp, Homo sapiens
  siRNA target sequence for CACNA1C (NM_000719.3,880-898).
ggggctttttagtgcaatt

SEQ ID NO: 138491 - DNA, 19 bp, Homo sapiens
  siRNA target sequence for CACNA1C (NM_000719.3,1080-1098).
ccctgcttgtgctgtttgt

SEQ ID NO: 138492 - DNA, 19 bp, Homo sapiens
  siRNA target sequence for CACNA1C (NM_000719.3,1411-1429).
gatctattttgttacacta

SEQ ID NO: 138493 - DNA, 19 bp, Homo sapiens
  siRNA target sequence for CACNA1C (NM_000719.3,1439-1457).
gggtcattttttgtactta

SEQ ID NO: 138494 - DNA, 19 bp, Homo sapiens
  siRNA target sequence for CACNA1C (NM_000719.3,1440-1458).
ggtcattttttgtacttaa

SEQ ID NO: 138495 - DNA, 19 bp, Homo sapiens
  siRNA target sequence for CACNA1C (NM_000719.3,1472-1490).
gtgcttagcggagagtttt

SEQ ID NO: 138496 - DNA, 19 bp, Homo sapiens
  siRNA target sequence for CACNA1C (NM_000719.3,1475-1493).
cttagcggagagttttcca

SEQ ID NO: 138497 - DNA, 19 bp, Homo sapiens
  siRNA target sequence for CACNA1C (NM_000719.3,1640-1658).
gagaagccccgaaacatga

SEQ ID NO: 138498 - DNA, 19 bp, Homo sapiens
  siRNA target sequence for CACNA1C (NM_000719.3,1683-1701).
ccgtcaacaccgaaaacgt

SEQ ID NO: 138499 - DNA, 19 bp, Homo sapiens
  siRNA target sequence for CACNA1C (NM_000719.3,1710-1728).
gtgacatcgagggagaaaa

SEQ ID NO: 138500 - DNA, 19 bp, Homo sapiens
  siRNA target sequence for CACNA1C (NM_000719.3,1748-1766).
caccggatctccaagtcaa

SEQ ID NO: 138501 - DNA, 19 bp, Homo sapiens
  siRNA target sequence for CACNA1C (NM_000719.3,1823-1841).
gcagtcaagtctaatgtct

SEQ ID NO: 138502 - DNA, 19 bp, Homo sapiens
  siRNA target sequence for CACNA1C (NM_000719.3,2317-2335).
ccggaggagcacattcgat

SEQ ID NO: 138503 - DNA, 19 bp, Homo sapiens
  siRNA target sequence for CACNA1C (NM_000719.3,2318-2336).
cggaggagcacattcgata

SEQ ID NO: 138504 - DNA, 19 bp, Homo sapiens
  siRNA target sequence for CACNA1C (NM_000719.3,2322-2340).
ggagcacattcgataactt

SEQ ID NO: 138505 - DNA, 19 bp, Homo sapiens
  siRNA target sequence for CACNA1C (NM_000719.3,2389-2407).
gaattcggtgatgtatgat

SEQ ID NO: 138506 - DNA, 19 bp, Homo sapiens
  siRNA target sequence for CACNA1C (NM_000719.3,2433-2451).
cttttccagggatgttagt

SEQ ID NO: 138507 - DNA, 19 bp, Homo sapiens
  siRNA target sequence for CACNA1C (NM_000719.3,2441-2459).
gggatgttagtctgtattt

SEQ ID NO: 138508 - DNA, 19 bp, Homo sapiens
  siRNA target sequence for CACNA1C (NM_000719.3,2442-2460).
ggatgttagtctgtattta

SEQ ID NO: 138509 - DNA, 19 bp, Homo sapiens
  siRNA target sequence for CACNA1C (NM_000719.3,2479-2497).
ctgtggaaactatatccta

SEQ ID NO: 138510 - DNA, 19 bp, Homo sapiens
  siRNA target sequence for CACNA1C (NM_000719.3,2943-2961).
gccaccgcattgtcaatga

SEQ ID NO: 138511 - DNA, 19 bp, Homo sapiens
  siRNA target sequence for CACNA1C (NM_000719.3,3080-3098).
gtttttaccaccattttca

SEQ ID NO: 138512 - DNA, 19 bp, Homo sapiens
  siRNA target sequence for CACNA1C (NM_000719.3,3478-3496).
caactacatcacgtacaaa

SEQ ID NO: 138513 - DNA, 19 bp, Homo sapiens
  siRNA target sequence for CACNA1C (NM_000719.3,3535-3553).
ctgggagaacagcaagttt

SEQ ID NO: 138514 - DNA, 19 bp, Homo sapiens
  siRNA target sequence for CACNA1C (NM_000719.3,3539-3557).
gagaacagcaagtttgact

SEQ ID NO: 138515 - DNA, 19 bp, Homo sapiens
  siRNA target sequence for CACNA1C (NM_000719.3,3550-3568).
gtttgactttgacaatgtt

SEQ ID NO: 138516 - DNA, 19 bp, Homo sapiens
  siRNA target sequence for CACNA1C (NM_000719.3,4069-4087).
gaagctcattgccttcaaa

SEQ ID NO: 138517 - DNA, 19 bp, Homo sapiens
  siRNA target sequence for CACNA1C (NM_000719.3,4102-4120).
ctgtgatgcatggaataca

SEQ ID NO: 138518 - DNA, 19 bp, Homo sapiens
  siRNA target sequence for CACNA1C (NM_000719.3,4104-4122).
gtgatgcatggaatacatt

SEQ ID NO: 138519 - DNA, 19 bp, Homo sapiens
  siRNA target sequence for CACNA1C (NM_000719.3,4119-4137).
catttgacgccttgattgt

SEQ ID NO: 138520 - DNA, 19 bp, Homo sapiens
  siRNA target sequence for CACNA1C (NM_000719.3,4141-4159).
gggtagcattgttgatata

SEQ ID NO: 138521 - DNA, 19 bp, Homo sapiens
  siRNA target sequence for CACNA1C (NM_000719.3,4146-4164).
gcattgttgatatagcaat

SEQ ID NO: 138522 - DNA, 19 bp, Homo sapiens
  siRNA target sequence for CACNA1C (NM_000719.3,4206-4224).
ctatgaacgcagaggaaaa

SEQ ID NO: 138523 - DNA, 19 bp, Homo sapiens
  siRNA target sequence for CACNA1C (NM_000719.3,4582-4600).
cagcacggagggtgaaaca

SEQ ID NO: 138524 - DNA, 19 bp, Homo sapiens
  siRNA target sequence for CACNA1C (NM_000719.3,4889-4907).
cgcctggtctccatgaaca

SEQ ID NO: 138525 - DNA, 19 bp, Homo sapiens
  siRNA target sequence for CACNA1C (NM_000719.3,4969-4987).
ggccctgaggatcaaaaca

SEQ ID NO: 138526 - DNA, 19 bp, Homo sapiens
  siRNA target sequence for CACNA1C (NM_000719.3,5381-5399).
cacgtcagctactaccaaa

SEQ ID NO: 138527 - DNA, 19 bp, Homo sapiens
  siRNA target sequence for CACNA1C (NM_000719.3,5845-5863).
ctaccaggatgacgaaaat

SEQ ID NO: 138528 - DNA, 19 bp, Homo sapiens
  siRNA target sequence for CACNA1C (NM_000719.3,6373-6391).
ggtggaagcggtcttgatt

SEQ ID NO: 138529 - DNA, 19 bp, Homo sapiens
  siRNA target sequence for CACNA1C (NM_000719.3,6413-6431).
gctcaagatcccaagttca

SEQ ID NO: 138530 - DNA, 19 bp, Homo sapiens
  siRNA target sequence for CACNA1D (NM_000720.1,178-196).
cgcgaacgaggcaaactat

SEQ ID NO: 138531 - DNA, 19 bp, Homo sapiens
  siRNA target sequence for CACNA1D (NM_000720.1,245-263).
ccgaatagctccaagcaaa

SEQ ID NO: 138532 - DNA, 19 bp, Homo sapiens
  siRNA target sequence for CACNA1D (NM_000720.1,377-395).
caatacgccaagagcaaaa

SEQ ID NO: 138533 - DNA, 19 bp, Homo sapiens
  siRNA target sequence for CACNA1D (NM_000720.1,463-481).
ccgaagagcctgcattagt

SEQ ID NO: 138534 - DNA, 19 bp, Homo sapiens
  siRNA target sequence for CACNA1D (NM_000720.1,464-482).
cgaagagcctgcattagta

SEQ ID NO: 138535 - DNA, 19 bp, Homo sapiens
  siRNA target sequence for CACNA1D (NM_000720.1,468-486).
gagcctgcattagtatagt

SEQ ID NO: 138536 - DNA, 19 bp, Homo sapiens
  siRNA target sequence for CACNA1D (NM_000720.1,572-590).
gatgattctaattcaacaa

SEQ ID NO: 138537 - DNA, 19 bp, Homo sapiens
  siRNA target sequence for CACNA1D (NM_000720.1,611-629).
gaatatgccttcctgatta

SEQ ID NO: 138538 - DNA, 19 bp, Homo sapiens
  siRNA target sequence for CACNA1D (NM_000720.1,638-656).
gtcgagacatttttgaaga

SEQ ID NO: 138539 - DNA, 19 bp, Homo sapiens
  siRNA target sequence for CACNA1D (NM_000720.1,640-658).
cgagacatttttgaagatt

SEQ ID NO: 138540 - DNA, 19 bp, Homo sapiens
  siRNA target sequence for CACNA1D (NM_000720.1,655-673).
gattatagcgtatggatta

SEQ ID NO: 138541 - DNA, 19 bp, Homo sapiens
  siRNA target sequence for CACNA1D (NM_000720.1,684-702).
ctaatgcttatgttaggaa

SEQ ID NO: 138542 - DNA, 19 bp, Homo sapiens
  siRNA target sequence for CACNA1D (NM_000720.1,689-707).
gcttatgttaggaatggat

SEQ ID NO: 138543 - DNA, 19 bp, Homo sapiens
  siRNA target sequence for CACNA1D (NM_000720.1,793-811).
ccactcaagcggcaaatct

SEQ ID NO: 138544 - DNA, 19 bp, Homo sapiens
  siRNA target sequence for CACNA1D (NM_000720.1,893-911).
gttgtcctgaactccatta

SEQ ID NO: 138545 - DNA, 19 bp, Homo sapiens
  siRNA target sequence for CACNA1D (NM_000720.1,896-914).
gtcctgaactccattataa

SEQ ID NO: 138546 - DNA, 19 bp, Homo sapiens
  siRNA target sequence for CACNA1D (NM_000720.1,898-916).
cctgaactccattataaaa

SEQ ID NO: 138547 - DNA, 19 bp, Homo sapiens
  siRNA target sequence for CACNA1D (NM_000720.1,935-953).
cacatagcccttttggtat

SEQ ID NO: 138548 - DNA, 19 bp, Homo sapiens
  siRNA target sequence for CACNA1D (NM_000720.1,949-967).
ggtattatttgtaatcata

SEQ ID NO: 138549 - DNA, 19 bp, Homo sapiens
  siRNA target sequence for CACNA1D (NM_000720.1,1176-1194).
ccatgcttactgtgtttca

SEQ ID NO: 138550 - DNA, 19 bp, Homo sapiens
  siRNA target sequence for CACNA1D (NM_000720.1,1235-1253).
gtaaatgatgcgataggat

SEQ ID NO: 138551 - DNA, 19 bp, Homo sapiens
  siRNA target sequence for CACNA1D (NM_000720.1,1262-1280).
ccatgggtgtattttgtta

SEQ ID NO: 138552 - DNA, 19 bp, Homo sapiens
  siRNA target sequence for CACNA1D (NM_000720.1,1266-1284).
gggtgtattttgttagtct

SEQ ID NO: 138553 - DNA, 19 bp, Homo sapiens
  siRNA target sequence for CACNA1D (NM_000720.1,1285-1303).
gatcatccttggctcattt

SEQ ID NO: 138554 - DNA, 19 bp, Homo sapiens
  siRNA target sequence for CACNA1D (NM_000720.1,1299-1317).
catttttcgtccttaacct

SEQ ID NO: 138555 - DNA, 19 bp, Homo sapiens
  siRNA target sequence for CACNA1D (NM_000720.1,1331-1349).
cttagtggagaattctcaa

SEQ ID NO: 138556 - DNA, 19 bp, Homo sapiens
  siRNA target sequence for CACNA1D (NM_000720.1,1421-1439).
ctaaagggctacttggatt

SEQ ID NO: 138557 - DNA, 19 bp, Homo sapiens
  siRNA target sequence for CACNA1D (NM_000720.1,1488-1506).
gagaggaaggcaaacgaaa

SEQ ID NO: 138558 - DNA, 19 bp, Homo sapiens
  siRNA target sequence for CACNA1D (NM_000720.1,1490-1508).
gaggaaggcaaacgaaata

SEQ ID NO: 138559 - DNA, 19 bp, Homo sapiens
  siRNA target sequence for CACNA1D (NM_000720.1,1492-1510).
ggaaggcaaacgaaatact

SEQ ID NO: 138560 - DNA, 19 bp, Homo sapiens
  siRNA target sequence for CACNA1D (NM_000720.1,1493-1511).
gaaggcaaacgaaatacta

SEQ ID NO: 138561 - DNA, 19 bp, Homo sapiens
  siRNA target sequence for CACNA1D (NM_000720.1,1655-1673).
ggtcaagccatctcaaaat

SEQ ID NO: 138562 - DNA, 19 bp, Homo sapiens
  siRNA target sequence for CACNA1D (NM_000720.1,1695-1713).
gtcgctggaaccgattcaa

SEQ ID NO: 138563 - DNA, 19 bp, Homo sapiens
  siRNA target sequence for CACNA1D (NM_000720.1,1706-1724).
cgattcaatcgcagaagat

SEQ ID NO: 138564 - DNA, 19 bp, Homo sapiens
  siRNA target sequence for CACNA1D (NM_000720.1,1736-1754).
gtgaagtctgtcacgtttt

SEQ ID NO: 138565 - DNA, 19 bp, Homo sapiens
  siRNA target sequence for CACNA1D (NM_000720.1,1749-1767).
cgttttactggctggttat

SEQ ID NO: 138566 - DNA, 19 bp, Homo sapiens
  siRNA target sequence for CACNA1D (NM_000720.1,1775-1793).
gtgtttctgaacaccttaa

SEQ ID NO: 138567 - DNA, 19 bp, Homo sapiens
  siRNA target sequence for CACNA1D (NM_000720.1,1878-1896).
cctgcgagatgctggtaaa

SEQ ID NO: 138568 - DNA, 19 bp, Homo sapiens
  siRNA target sequence for CACNA1D (NM_000720.1,1879-1897).
ctgcgagatgctggtaaaa

SEQ ID NO: 138569 - DNA, 19 bp, Homo sapiens
  siRNA target sequence for CACNA1D (NM_000720.1,1881-1899).
gcgagatgctggtaaaaat

SEQ ID NO: 138570 - DNA, 19 bp, Homo sapiens
  siRNA target sequence for CACNA1D (NM_000720.1,1906-1924).
cttgggcctccaagcatat

SEQ ID NO: 138571 - DNA, 19 bp, Homo sapiens
  siRNA target sequence for CACNA1D (NM_000720.1,1919-1937).
gcatatttcgtctctcttt

SEQ ID NO: 138572 - DNA, 19 bp, Homo sapiens
  siRNA target sequence for CACNA1D (NM_000720.1,1920-1938).
catatttcgtctctctttt

SEQ ID NO: 138573 - DNA, 19 bp, Homo sapiens
  siRNA target sequence for CACNA1D (NM_000720.1,1960-1978).
ggtgtgtggtggaatcact

SEQ ID NO: 138574 - DNA, 19 bp, Homo sapiens
  siRNA target sequence for CACNA1D (NM_000720.1,2033-2051).
cggtgtgtgcgcctcttaa

SEQ ID NO: 138575 - DNA, 19 bp, Homo sapiens
  siRNA target sequence for CACNA1D (NM_000720.1,2035-2053).
gtgtgtgcgcctcttaaga

SEQ ID NO: 138576 - DNA, 19 bp, Homo sapiens
  siRNA target sequence for CACNA1D (NM_000720.1,2037-2055).
gtgtgcgcctcttaagaat

SEQ ID NO: 138577 - DNA, 19 bp, Homo sapiens
  siRNA target sequence for CACNA1D (NM_000720.1,2039-2057).
gtgcgcctcttaagaatct

SEQ ID NO: 138578 - DNA, 19 bp, Homo sapiens
  siRNA target sequence for CACNA1D (NM_000720.1,2092-2110).
cttagtggcatccttatta

SEQ ID NO: 138579 - DNA, 19 bp, Homo sapiens
  siRNA target sequence for CACNA1D (NM_000720.1,2718-2736).
ggatctcggagttgaacat

SEQ ID NO: 138580 - DNA, 19 bp, Homo sapiens
  siRNA target sequence for CACNA1D (NM_000720.1,2760-2778).
ctgaagggagcgctttctt

SEQ ID NO: 138581 - DNA, 19 bp, Homo sapiens
  siRNA target sequence for CACNA1D (NM_000720.1,2844-2862).
ccaacctcatccttgtctt

SEQ ID NO: 138582 - DNA, 19 bp, Homo sapiens
  siRNA target sequence for CACNA1D (NM_000720.1,2928-2946).
cgatactgggttactttga

SEQ ID NO: 138583 - DNA, 19 bp, Homo sapiens
  siRNA target sequence for CACNA1D (NM_000720.1,2970-2988).
ctgttgagatcctgttgaa

SEQ ID NO: 138584 - DNA, 19 bp, Homo sapiens
  siRNA target sequence for CACNA1D (NM_000720.1,2986-3004).
gaagatgacaacttttgga

SEQ ID NO: 138585 - DNA, 19 bp, Homo sapiens
  siRNA target sequence for CACNA1D (NM_000720.1,3080-3098).
gtgtcatttgggattcaat

SEQ ID NO: 138586 - DNA, 19 bp, Homo sapiens
  siRNA target sequence for CACNA1D (NM_000720.1,3270-3288).
gtatcggggtccagttgtt

SEQ ID NO: 138587 - DNA, 19 bp, Homo sapiens
  siRNA target sequence for CACNA1D (NM_000720.1,3398-3416).
gaacggatctggcaaaaca

SEQ ID NO: 138588 - DNA, 19 bp, Homo sapiens
  siRNA target sequence for CACNA1D (NM_000720.1,3623-3641).
ggctttgtcatcgttacat

SEQ ID NO: 138589 - DNA, 19 bp, Homo sapiens
  siRNA target sequence for CACNA1D (NM_000720.1,3624-3642).
gctttgtcatcgttacatt

SEQ ID NO: 138590 - DNA, 19 bp, Homo sapiens
  siRNA target sequence for CACNA1D (NM_000720.1,3625-3643).
ctttgtcatcgttacattt

SEQ ID NO: 138591 - DNA, 19 bp, Homo sapiens
  siRNA target sequence for CACNA1D (NM_000720.1,3725-3743).
cgtcccttgcggagataca

SEQ ID NO: 138592 - DNA, 19 bp, Homo sapiens
  siRNA target sequence for CACNA1D (NM_000720.1,3726-3744).
gtcccttgcggagatacat

SEQ ID NO: 138593 - DNA, 19 bp, Homo sapiens
  siRNA target sequence for CACNA1D (NM_000720.1,3789-3807).
cttcgcctttcgaatacat

SEQ ID NO: 138594 - DNA, 19 bp, Homo sapiens
  siRNA target sequence for CACNA1D (NM_000720.1,3794-3812).
cctttcgaatacatgatgt

SEQ ID NO: 138595 - DNA, 19 bp, Homo sapiens
  siRNA target sequence for CACNA1D (NM_000720.1,3795-3813).
ctttcgaatacatgatgtt

SEQ ID NO: 138596 - DNA, 19 bp, Homo sapiens
  siRNA target sequence for CACNA1D (NM_000720.1,3865-3883).
gtccaagatgttcaatgat

SEQ ID NO: 138597 - DNA, 19 bp, Homo sapiens
  siRNA target sequence for CACNA1D (NM_000720.1,3924-3942).
ccgtcgagatggttttgaa

SEQ ID NO: 138598 - DNA, 19 bp, Homo sapiens
  siRNA target sequence for CACNA1D (NM_000720.1,3925-3943).
cgtcgagatggttttgaaa

SEQ ID NO: 138599 - DNA, 19 bp, Homo sapiens
  siRNA target sequence for CACNA1D (NM_000720.1,3958-3976).
gcctaaggggtattttagt

SEQ ID NO: 138600 - DNA, 19 bp, Homo sapiens
  siRNA target sequence for CACNA1D (NM_000720.1,3960-3978).
ctaaggggtattttagtga

SEQ ID NO: 138601 - DNA, 19 bp, Homo sapiens
  siRNA target sequence for CACNA1D (NM_000720.1,4006-4024).
cgtaatcggcagcattata

SEQ ID NO: 138602 - DNA, 19 bp, Homo sapiens
  siRNA target sequence for CACNA1D (NM_000720.1,4098-4116).
ctgaagagagcaatagaat

SEQ ID NO: 138603 - DNA, 19 bp, Homo sapiens
  siRNA target sequence for CACNA1D (NM_000720.1,4196-4214).
ctgtggacttttattaagt

SEQ ID NO: 138604 - DNA, 19 bp, Homo sapiens
  siRNA target sequence for CACNA1D (NM_000720.1,4301-4319).
gttgccatgagagataaca

SEQ ID NO: 138605 - DNA, 19 bp, Homo sapiens
  siRNA target sequence for CACNA1D (NM_000720.1,4571-4589).
gataatttcgactatctga

SEQ ID NO: 138606 - DNA, 19 bp, Homo sapiens
  siRNA target sequence for CACNA1D (NM_000720.1,4588-4606).
gacccgggactggtctatt

SEQ ID NO: 138607 - DNA, 19 bp, Homo sapiens
  siRNA target sequence for CACNA1D (NM_000720.1,4590-4608).
cccgggactggtctatttt

SEQ ID NO: 138608 - DNA, 19 bp, Homo sapiens
  siRNA target sequence for CACNA1D (NM_000720.1,4611-4629).
ggcctcaccatttagatga

SEQ ID NO: 138609 - DNA, 19 bp, Homo sapiens
  siRNA target sequence for CACNA1D (NM_000720.1,4616-4634).
caccatttagatgaattca

SEQ ID NO: 138610 - DNA, 19 bp, Homo sapiens
  siRNA target sequence for CACNA1D (NM_000720.1,4638-4656).
gaatatggtcagaatatga

SEQ ID NO: 138611 - DNA, 19 bp, Homo sapiens
  siRNA target sequence for CACNA1D (NM_000720.1,4752-4770).
gggtagcgtgcaagagatt

SEQ ID NO: 138612 - DNA, 19 bp, Homo sapiens
  siRNA target sequence for CACNA1D (NM_000720.1,4753-4771).
ggtagcgtgcaagagatta

SEQ ID NO: 138613 - DNA, 19 bp, Homo sapiens
  siRNA target sequence for CACNA1D (NM_000720.1,4767-4785).
gattagttgccatgaacat

SEQ ID NO: 138614 - DNA, 19 bp, Homo sapiens
  siRNA target sequence for CACNA1D (NM_000720.1,4838-4856).
gttcgaacggctcttaaga

SEQ ID NO: 138615 - DNA, 19 bp, Homo sapiens
  siRNA target sequence for CACNA1D (NM_000720.1,4841-4859).
cgaacggctcttaagatca

SEQ ID NO: 138616 - DNA, 19 bp, Homo sapiens
  siRNA target sequence for CACNA1D (NM_000720.1,4842-4860).
gaacggctcttaagatcaa

SEQ ID NO: 138617 - DNA, 19 bp, Homo sapiens
  siRNA target sequence for CACNA1D (NM_000720.1,4892-4910).
gaacttcgggctgtgataa

SEQ ID NO: 138618 - DNA, 19 bp, Homo sapiens
  siRNA target sequence for CACNA1D (NM_000720.1,4929-4947).
ccagcatgaaattacttga

SEQ ID NO: 138619 - DNA, 19 bp, Homo sapiens
  siRNA target sequence for CACNA1D (NM_000720.1,5008-5026).
cctgatacaggactacttt

SEQ ID NO: 138620 - DNA, 19 bp, Homo sapiens
  siRNA target sequence for CACNA1D (NM_000720.1,5009-5027).
ctgatacaggactacttta

SEQ ID NO: 138621 - DNA, 19 bp, Homo sapiens
  siRNA target sequence for CACNA1D (NM_000720.1,5093-5111).
gccctacaggcgggattaa

SEQ ID NO: 138622 - DNA, 19 bp, Homo sapiens
  siRNA target sequence for CACNA1D (NM_000720.1,5096-5114).
ctacaggcgggattaagga

SEQ ID NO: 138623 - DNA, 19 bp, Homo sapiens
  siRNA target sequence for CACNA1D (NM_000720.1,5135-5153).
gaaatccggcgtgctatat

SEQ ID NO: 138624 - DNA, 19 bp, Homo sapiens
  siRNA target sequence for CACNA1D (NM_000720.1,5144-5162).
cgtgctatatcgtgtgatt

SEQ ID NO: 138625 - DNA, 19 bp, Homo sapiens
  siRNA target sequence for CACNA1D (NM_000720.1,5145-5163).
gtgctatatcgtgtgattt

SEQ ID NO: 138626 - DNA, 19 bp, Homo sapiens
  siRNA target sequence for CACNA1D (NM_000720.1,5148-5166).
ctatatcgtgtgatttgca

SEQ ID NO: 138627 - DNA, 19 bp, Homo sapiens
  siRNA target sequence for CACNA1D (NM_000720.1,5171-5189).
gacgagcctgaggaaacaa

SEQ ID NO: 138628 - DNA, 19 bp, Homo sapiens
  siRNA target sequence for CACNA1D (NM_000720.1,5173-5191).
cgagcctgaggaaacaaaa

SEQ ID NO: 138629 - DNA, 19 bp, Homo sapiens
  siRNA target sequence for CACNA1D (NM_000720.1,5176-5194).
gcctgaggaaacaaaacga

SEQ ID NO: 138630 - DNA, 19 bp, Homo sapiens
  siRNA target sequence for CACNA1D (NM_000720.1,5238-5256).
gaaaccatgtcaatcatgt

SEQ ID NO: 138631 - DNA, 19 bp, Homo sapiens
  siRNA target sequence for CACNA1D (NM_000720.1,5242-5260).
ccatgtcaatcatgttaat

SEQ ID NO: 138632 - DNA, 19 bp, Homo sapiens
  siRNA target sequence for CACNA1D (NM_000720.1,5243-5261).
catgtcaatcatgttaata

SEQ ID NO: 138633 - DNA, 19 bp, Homo sapiens
  siRNA target sequence for CACNA1D (NM_000720.1,5384-5402).
gtgtgtcataaccatcata

SEQ ID NO: 138634 - DNA, 19 bp, Homo sapiens
  siRNA target sequence for CACNA1D (NM_000720.1,5396-5414).
catcataaccataattcca

SEQ ID NO: 138635 - DNA, 19 bp, Homo sapiens
  siRNA target sequence for CACNA1D (NM_000720.1,5423-5441).
caagttcccacctcaacaa

SEQ ID NO: 138636 - DNA, 19 bp, Homo sapiens
  siRNA target sequence for CACNA1D (NM_000720.1,5507-5525).
cttgagcatgtgtctgaaa

SEQ ID NO: 138637 - DNA, 19 bp, Homo sapiens
  siRNA target sequence for CACNA1D (NM_000720.1,5581-5599).
gaaaagaacccgctattat

SEQ ID NO: 138638 - DNA, 19 bp, Homo sapiens
  siRNA target sequence for CACNA1D (NM_000720.1,5589-5607).
cccgctattatgaaactta

SEQ ID NO: 138639 - DNA, 19 bp, Homo sapiens
  siRNA target sequence for CACNA1D (NM_000720.1,5591-5609).
cgctattatgaaacttaca

SEQ ID NO: 138640 - DNA, 19 bp, Homo sapiens
  siRNA target sequence for CACNA1D (NM_000720.1,5614-5632).
gtccgactcaggagatgaa

SEQ ID NO: 138641 - DNA, 19 bp, Homo sapiens
  siRNA target sequence for CACNA1D (NM_000720.1,5661-5679).
cagagatacatggctattt

SEQ ID NO: 138642 - DNA, 19 bp, Homo sapiens
  siRNA target sequence for CACNA1D (NM_000720.1,5663-5681).
gagatacatggctatttca

SEQ ID NO: 138643 - DNA, 19 bp, Homo sapiens
  siRNA target sequence for CACNA1D (NM_000720.1,5863-5881).
ctcgcccgtttgctatgat

SEQ ID NO: 138644 - DNA, 19 bp, Homo sapiens
  siRNA target sequence for CACNA1D (NM_000720.1,5866-5884).
gcccgtttgctatgattca

SEQ ID NO: 138645 - DNA, 19 bp, Homo sapiens
  siRNA target sequence for CACNA1D (NM_000720.1,5933-5951).
cggagatcctccttcaact

SEQ ID NO: 138646 - DNA, 19 bp, Homo sapiens
  siRNA target sequence for CACNA1D (NM_000720.1,6271-6289).
ctcctaccggactttcaca

SEQ ID NO: 138647 - DNA, 19 bp, Homo sapiens
  siRNA target sequence for CACNA1D (NM_000720.1,6386-6404).
ggcttgggacgctatgcaa

SEQ ID NO: 138648 - DNA, 19 bp, Homo sapiens
  siRNA target sequence for CACNA1D (NM_000720.1,6546-6564).
cacaccggcaggactatga

SEQ ID NO: 138649 - DNA, 19 bp, Homo sapiens
  siRNA target sequence for CACNA1D (NM_000720.1,6623-6641).
gaggacctggcggatgaaa

SEQ ID NO: 138650 - DNA, 19 bp, Homo sapiens
  siRNA target sequence for CACNA1D (NM_000720.1,6626-6644).
gacctggcggatgaaatga

SEQ ID NO: 138651 - DNA, 19 bp, Homo sapiens
  siRNA target sequence for CACNA1D (NM_000720.1,6628-6646).
cctggcggatgaaatgata

SEQ ID NO: 138652 - DNA, 19 bp, Homo sapiens
  siRNA target sequence for CACNA1E (NM_000721.1,334-352).
cccgtccggcagaactgtt

SEQ ID NO: 138653 - DNA, 19 bp, Homo sapiens
  siRNA target sequence for CACNA1E (NM_000721.1,335-353).
ccgtccggcagaactgttt

SEQ ID NO: 138654 - DNA, 19 bp, Homo sapiens
  siRNA target sequence for CACNA1E (NM_000721.1,337-355).
gtccggcagaactgtttca

SEQ ID NO: 138655 - DNA, 19 bp, Homo sapiens
  siRNA target sequence for CACNA1E (NM_000721.1,372-390).
gttcatcttcggagaagat

SEQ ID NO: 138656 - DNA, 19 bp, Homo sapiens
  siRNA target sequence for CACNA1E (NM_000721.1,378-396).
cttcggagaagataacatt

SEQ ID NO: 138657 - DNA, 19 bp, Homo sapiens
  siRNA target sequence for CACNA1E (NM_000721.1,431-449).
cgccatttgagtacatgat

SEQ ID NO: 138658 - DNA, 19 bp, Homo sapiens
  siRNA target sequence for CACNA1E (NM_000721.1,537-555).
ggagaagacagaaccttat

SEQ ID NO: 138659 - DNA, 19 bp, Homo sapiens
  siRNA target sequence for CACNA1E (NM_000721.1,543-561).
gacagaaccttatttcatt

SEQ ID NO: 138660 - DNA, 19 bp, Homo sapiens
  siRNA target sequence for CACNA1E (NM_000721.1,601-619).
ctggggttcatcttccata

SEQ ID NO: 138661 - DNA, 19 bp, Homo sapiens
  siRNA target sequence for CACNA1E (NM_000721.1,763-781).
ctcgtgtcagggataccta

SEQ ID NO: 138662 - DNA, 19 bp, Homo sapiens
  siRNA target sequence for CACNA1E (NM_000721.1,888-906).
gttctacagtggcaagtta

SEQ ID NO: 138663 - DNA, 19 bp, Homo sapiens
  siRNA target sequence for CACNA1E (NM_000721.1,891-909).
ctacagtggcaagttacat

SEQ ID NO: 138664 - DNA, 19 bp, Homo sapiens
  siRNA target sequence for CACNA1E (NM_000721.1,921-939).
catgaacaattcaggtatt

SEQ ID NO: 138665 - DNA, 19 bp, Homo sapiens
  siRNA target sequence for CACNA1E (NM_000721.1,924-942).
gaacaattcaggtattcta

SEQ ID NO: 138666 - DNA, 19 bp, Homo sapiens
  siRNA target sequence for CACNA1E (NM_000721.1,932-950).
caggtattctagaaggatt

SEQ ID NO: 138667 - DNA, 19 bp, Homo sapiens
  siRNA target sequence for CACNA1E (NM_000721.1,980-998).
gctgcccagctggttatga

SEQ ID NO: 138668 - DNA, 19 bp, Homo sapiens
  siRNA target sequence for CACNA1E (NM_000721.1,1027-1045).
gggatcacccagtttgata

SEQ ID NO: 138669 - DNA, 19 bp, Homo sapiens
  siRNA target sequence for CACNA1E (NM_000721.1,1103-1121).
ctgtgctgtacaataccaa

SEQ ID NO: 138670 - DNA, 19 bp, Homo sapiens
  siRNA target sequence for CACNA1E (NM_000721.1,1314-1332).
ccgtgcctggatagacaaa

SEQ ID NO: 138671 - DNA, 19 bp, Homo sapiens
  siRNA target sequence for CACNA1E (NM_000721.1,1342-1360).
gtcatgctcgctgaagaaa

SEQ ID NO: 138672 - DNA, 19 bp, Homo sapiens
  siRNA target sequence for CACNA1E (NM_000721.1,1373-1391).
gaacatccgccttagaagt

SEQ ID NO: 138673 - DNA, 19 bp, Homo sapiens
  siRNA target sequence for CACNA1E (NM_000721.1,1396-1414).
cgaagggcaaccatcaaga

SEQ ID NO: 138674 - DNA, 19 bp, Homo sapiens
  siRNA target sequence for CACNA1E (NM_000721.1,1450-1468).
gatgagcactgtgttgata

SEQ ID NO: 138675 - DNA, 19 bp, Homo sapiens
  siRNA target sequence for CACNA1E (NM_000721.1,1453-1471).
gagcactgtgttgatatct

SEQ ID NO: 138676 - DNA, 19 bp, Homo sapiens
  siRNA target sequence for CACNA1E (NM_000721.1,1491-1509).
ggcccgagccagtatcaaa

SEQ ID NO: 138677 - DNA, 19 bp, Homo sapiens
  siRNA target sequence for CACNA1E (NM_000721.1,1518-1536).
ggtagacggggtctcttat

SEQ ID NO: 138678 - DNA, 19 bp, Homo sapiens
  siRNA target sequence for CACNA1E (NM_000721.1,1519-1537).
gtagacggggtctcttatt

SEQ ID NO: 138679 - DNA, 19 bp, Homo sapiens
  siRNA target sequence for CACNA1E (NM_000721.1,1568-1586).
ccattcgccacatggttaa

SEQ ID NO: 138680 - DNA, 19 bp, Homo sapiens
  siRNA target sequence for CACNA1E (NM_000721.1,1569-1587).
cattcgccacatggttaaa

SEQ ID NO: 138681 - DNA, 19 bp, Homo sapiens
  siRNA target sequence for CACNA1E (NM_000721.1,1582-1600).
gttaaatcccaggtgtttt

SEQ ID NO: 138682 - DNA, 19 bp, Homo sapiens
  siRNA target sequence for CACNA1E (NM_000721.1,1752-1770).
catggggcctcgcctttat

SEQ ID NO: 138683 - DNA, 19 bp, Homo sapiens
  siRNA target sequence for CACNA1E (NM_000721.1,1755-1773).
ggggcctcgcctttatttt

SEQ ID NO: 138684 - DNA, 19 bp, Homo sapiens
  siRNA target sequence for CACNA1E (NM_000721.1,1757-1775).
ggcctcgcctttattttca

SEQ ID NO: 138685 - DNA, 19 bp, Homo sapiens
  siRNA target sequence for CACNA1E (NM_000721.1,1804-1822).
gtcacagtgggcagtatct

SEQ ID NO: 138686 - DNA, 19 bp, Homo sapiens
  siRNA target sequence for CACNA1E (NM_000721.1,1828-1846).
gtggtctgggcaatcttca

SEQ ID NO: 138687 - DNA, 19 bp, Homo sapiens
  siRNA target sequence for CACNA1E (NM_000721.1,1850-1868).
ctggtacgtcttttggaat

SEQ ID NO: 138688 - DNA, 19 bp, Homo sapiens
  siRNA target sequence for CACNA1E (NM_000721.1,1882-1900).
gccctccggcttctaagaa

SEQ ID NO: 138689 - DNA, 19 bp, Homo sapiens
  siRNA target sequence for CACNA1E (NM_000721.1,1883-1901).
ccctccggcttctaagaat

SEQ ID NO: 138690 - DNA, 19 bp, Homo sapiens
  siRNA target sequence for CACNA1E (NM_000721.1,1884-1902).
cctccggcttctaagaata

SEQ ID NO: 138691 - DNA, 19 bp, Homo sapiens
  siRNA target sequence for CACNA1E (NM_000721.1,1885-1903).
ctccggcttctaagaatat

SEQ ID NO: 138692 - DNA, 19 bp, Homo sapiens
  siRNA target sequence for CACNA1E (NM_000721.1,1922-1940).
gggcttccctacggaattt

SEQ ID NO: 138693 - DNA, 19 bp, Homo sapiens
  siRNA target sequence for CACNA1E (NM_000721.1,1925-1943).
cttccctacggaatttggt

SEQ ID NO: 138694 - DNA, 19 bp, Homo sapiens
  siRNA target sequence for CACNA1E (NM_000721.1,1949-1967).
ccttgatgagctcaatgaa

SEQ ID NO: 138695 - DNA, 19 bp, Homo sapiens
  siRNA target sequence for CACNA1E (NM_000721.1,2020-2038).
ctcctaggaatgcagttat

SEQ ID NO: 138696 - DNA, 19 bp, Homo sapiens
  siRNA target sequence for CACNA1E (NM_000721.1,2022-2040).
cctaggaatgcagttattt

SEQ ID NO: 138697 - DNA, 19 bp, Homo sapiens
  siRNA target sequence for CACNA1E (NM_000721.1,2042-2060).
gaggcaggtttaactttaa

SEQ ID NO: 138698 - DNA, 19 bp, Homo sapiens
  siRNA target sequence for CACNA1E (NM_000721.1,2065-2083).
gggactccttcggcaaatt

SEQ ID NO: 138699 - DNA, 19 bp, Homo sapiens
  siRNA target sequence for CACNA1E (NM_000721.1,2066-2084).
ggactccttcggcaaattt

SEQ ID NO: 138700 - DNA, 19 bp, Homo sapiens
  siRNA target sequence for CACNA1E (NM_000721.1,2071-2089).
ccttcggcaaattttgata

SEQ ID NO: 138701 - DNA, 19 bp, Homo sapiens
  siRNA target sequence for CACNA1E (NM_000721.1,2198-2216).
ggtctgccatctacttcat

SEQ ID NO: 138702 - DNA, 19 bp, Homo sapiens
  siRNA target sequence for CACNA1E (NM_000721.1,2234-2252).
gcaactacacgctactgaa

SEQ ID NO: 138703 - DNA, 19 bp, Homo sapiens
  siRNA target sequence for CACNA1E (NM_000721.1,2235-2253).
caactacacgctactgaat

SEQ ID NO: 138704 - DNA, 19 bp, Homo sapiens
  siRNA target sequence for CACNA1E (NM_000721.1,3215-3233).
ggaatgtgcagctagacat

SEQ ID NO: 138705 - DNA, 19 bp, Homo sapiens
  siRNA target sequence for CACNA1E (NM_000721.1,3359-3377).
ccgtggtgcacattagcaa

SEQ ID NO: 138706 - DNA, 19 bp, Homo sapiens
  siRNA target sequence for CACNA1E (NM_000721.1,3364-3382).
gtgcacattagcaacaaga

SEQ ID NO: 138707 - DNA, 19 bp, Homo sapiens
  siRNA target sequence for CACNA1E (NM_000721.1,3494-3512).
cccacagctcaatgttcat

SEQ ID NO: 138708 - DNA, 19 bp, Homo sapiens
  siRNA target sequence for CACNA1E (NM_000721.1,3642-3660).
caactcggagcgcaacaaa

SEQ ID NO: 138709 - DNA, 19 bp, Homo sapiens
  siRNA target sequence for CACNA1E (NM_000721.1,3663-3681).
cctgaggtattttgactat

SEQ ID NO: 138710 - DNA, 19 bp, Homo sapiens
  siRNA target sequence for CACNA1E (NM_000721.1,3879-3897).
gcgggtgctccgagttcta

SEQ ID NO: 138711 - DNA, 19 bp, Homo sapiens
  siRNA target sequence for CACNA1E (NM_000721.1,3880-3898).
cgggtgctccgagttctaa

SEQ ID NO: 138712 - DNA, 19 bp, Homo sapiens
  siRNA target sequence for CACNA1E (NM_000721.1,3895-3913).
ctaaggccactgaaaacca

SEQ ID NO: 138713 - DNA, 19 bp, Homo sapiens
  siRNA target sequence for CACNA1E (NM_000721.1,4089-4107).
ggagtgcataggcaactat

SEQ ID NO: 138714 - DNA, 19 bp, Homo sapiens
  siRNA target sequence for CACNA1E (NM_000721.1,4092-4110).
gtgcataggcaactatgta

SEQ ID NO: 138715 - DNA, 19 bp, Homo sapiens
  siRNA target sequence for CACNA1E (NM_000721.1,4094-4112).
gcataggcaactatgtaga

SEQ ID NO: 138716 - DNA, 19 bp, Homo sapiens
  siRNA target sequence for CACNA1E (NM_000721.1,4095-4113).
cataggcaactatgtagat

SEQ ID NO: 138717 - DNA, 19 bp, Homo sapiens
  siRNA target sequence for CACNA1E (NM_000721.1,4151-4169).
ggaagcgccatgaattcca

SEQ ID NO: 138718 - DNA, 19 bp, Homo sapiens
  siRNA target sequence for CACNA1E (NM_000721.1,4168-4186).
cactacgacaacattatct

SEQ ID NO: 138719 - DNA, 19 bp, Homo sapiens
  siRNA target sequence for CACNA1E (NM_000721.1,4299-4317).
ggagatgtctatcttttat

SEQ ID NO: 138720 - DNA, 19 bp, Homo sapiens
  siRNA target sequence for CACNA1E (NM_000721.1,4534-4552).
gtgtctccgtcctttgagt

SEQ ID NO: 138721 - DNA, 19 bp, Homo sapiens
  siRNA target sequence for CACNA1E (NM_000721.1,4544-4562).
cctttgagtacaccattat

SEQ ID NO: 138722 - DNA, 19 bp, Homo sapiens
  siRNA target sequence for CACNA1E (NM_000721.1,4563-4581).
ggccatgatcgccttgaat

SEQ ID NO: 138723 - DNA, 19 bp, Homo sapiens
  siRNA target sequence for CACNA1E (NM_000721.1,4566-4584).
catgatcgccttgaatact

SEQ ID NO: 138724 - DNA, 19 bp, Homo sapiens
  siRNA target sequence for CACNA1E (NM_000721.1,4569-4587).
gatcgccttgaatactgtt

SEQ ID NO: 138725 - DNA, 19 bp, Homo sapiens
  siRNA target sequence for CACNA1E (NM_000721.1,4700-4718).
cttttggctttttgaacta

SEQ ID NO: 138726 - DNA, 19 bp, Homo sapiens
  siRNA target sequence for CACNA1E (NM_000721.1,4867-4885).
ctgcgtcagggctatacca

SEQ ID NO: 138727 - DNA, 19 bp, Homo sapiens
  siRNA target sequence for CACNA1E (NM_000721.1,4869-4887).
gcgtcagggctataccata

SEQ ID NO: 138728 - DNA, 19 bp, Homo sapiens
  siRNA target sequence for CACNA1E (NM_000721.1,5055-5073).
ctttgggtccctaatgcta

SEQ ID NO: 138729 - DNA, 19 bp, Homo sapiens
  siRNA target sequence for CACNA1E (NM_000721.1,5060-5078).
ggtccctaatgctactctt

SEQ ID NO: 138730 - DNA, 19 bp, Homo sapiens
  siRNA target sequence for CACNA1E (NM_000721.1,5343-5361).
ccgcgtctgggcagaatat

SEQ ID NO: 138731 - DNA, 19 bp, Homo sapiens
  siRNA target sequence for CACNA1E (NM_000721.1,5371-5389).
gcatgtggccgcatccatt

SEQ ID NO: 138732 - DNA, 19 bp, Homo sapiens
  siRNA target sequence for CACNA1E (NM_000721.1,5372-5390).
catgtggccgcatccatta

SEQ ID NO: 138733 - DNA, 19 bp, Homo sapiens
  siRNA target sequence for CACNA1E (NM_000721.1,5431-5449).
ctaggcctcggcaagagat

SEQ ID NO: 138734 - DNA, 19 bp, Homo sapiens
  siRNA target sequence for CACNA1E (NM_000721.1,5548-5566).
cggacagctctggacatta

SEQ ID NO: 138735 - DNA, 19 bp, Homo sapiens
  siRNA target sequence for CACNA1E (NM_000721.1,5550-5568).
gacagctctggacattaaa

SEQ ID NO: 138736 - DNA, 19 bp, Homo sapiens
  siRNA target sequence for CACNA1E (NM_000721.1,5695-5713).
ctgactgtgggcaaaatct

SEQ ID NO: 138737 - DNA, 19 bp, Homo sapiens
  siRNA target sequence for CACNA1E (NM_000721.1,5697-5715).
gactgtgggcaaaatctat

SEQ ID NO: 138738 - DNA, 19 bp, Homo sapiens
  siRNA target sequence for CACNA1E (NM_000721.1,5929-5947).
ctctctccccaggatatat

SEQ ID NO: 138739 - DNA, 19 bp, Homo sapiens
  siRNA target sequence for CACNA1E (NM_000721.1,5933-5951).
ctccccaggatatattcca

SEQ ID NO: 138740 - DNA, 19 bp, Homo sapiens
  siRNA target sequence for CACNA1E (NM_000721.1,6024-6042).
ctccatgagacgttcattt

SEQ ID NO: 138741 - DNA, 19 bp, Homo sapiens
  siRNA target sequence for CACNA1E (NM_000721.1,6052-6070).
cgggataagcgttcaaatt

SEQ ID NO: 138742 - DNA, 19 bp, Homo sapiens
  siRNA target sequence for CACNA1E (NM_000721.1,6055-6073).
gataagcgttcaaattcct

SEQ ID NO: 138743 - DNA, 19 bp, Homo sapiens
  siRNA target sequence for CACNA1E (NM_000721.1,6097-6115).
gagcgaagcagtgaaaata

SEQ ID NO: 138744 - DNA, 19 bp, Homo sapiens
  siRNA target sequence for CACNA1E (NM_000721.1,6100-6118).
cgaagcagtgaaaatacct

SEQ ID NO: 138745 - DNA, 19 bp, Homo sapiens
  siRNA target sequence for CACNA1E (NM_000721.1,6166-6184).
caccgcctgaactctgatt

SEQ ID NO: 138746 - DNA, 19 bp, Homo sapiens
  siRNA target sequence for CACNA1E (NM_000721.1,6265-6283).
gatgtctcccgctgcaatt

SEQ ID NO: 138747 - DNA, 19 bp, Homo sapiens
  siRNA target sequence for CACNA1E (NM_000721.1,6720-6738).
ggagacgctcactttcgaa

SEQ ID NO: 138748 - DNA, 19 bp, Homo sapiens
  siRNA target sequence for CACNA1F (NM_005183.1,199-217).
ggacccctaagcgaagaaa

SEQ ID NO: 138749 - DNA, 19 bp, Homo sapiens
  siRNA target sequence for CACNA1F (NM_005183.1,444-462).
gagcaggtggagtacgtat

SEQ ID NO: 138750 - DNA, 19 bp, Homo sapiens
  siRNA target sequence for CACNA1F (NM_005183.1,550-568).
ggaacctactcgacttcat

SEQ ID NO: 138751 - DNA, 19 bp, Homo sapiens
  siRNA target sequence for CACNA1F (NM_005183.1,652-670).
caggaggcttcgatgtgaa

SEQ ID NO: 138752 - DNA, 19 bp, Homo sapiens
  siRNA target sequence for CACNA1F (NM_005183.1,729-747).
ctgcacatagtgctcaatt

SEQ ID NO: 138753 - DNA, 19 bp, Homo sapiens
  siRNA target sequence for CACNA1F (NM_005183.1,732-750).
cacatagtgctcaattcca

SEQ ID NO: 138754 - DNA, 19 bp, Homo sapiens
  siRNA target sequence for CACNA1F (NM_005183.1,1380-1398).
ctgcgctggttcagtcatt

SEQ ID NO: 138755 - DNA, 19 bp, Homo sapiens
  siRNA target sequence for CACNA1F (NM_005183.1,1382-1400).
gcgctggttcagtcattct

SEQ ID NO: 138756 - DNA, 19 bp, Homo sapiens
  siRNA target sequence for CACNA1F (NM_005183.1,1383-1401).
cgctggttcagtcattcta

SEQ ID NO: 138757 - DNA, 19 bp, Homo sapiens
  siRNA target sequence for CACNA1F (NM_005183.1,1513-1531).
gtacacgctgcctaaacaa

SEQ ID NO: 138758 - DNA, 19 bp, Homo sapiens
  siRNA target sequence for CACNA1F (NM_005183.1,1516-1534).
cacgctgcctaaacaagat

SEQ ID NO: 138759 - DNA, 19 bp, Homo sapiens
  siRNA target sequence for CACNA1F (NM_005183.1,1519-1537).
gctgcctaaacaagatcat

SEQ ID NO: 138760 - DNA, 19 bp, Homo sapiens
  siRNA target sequence for CACNA1F (NM_005183.1,1713-1731).
gagtatgccaacaaagtgt

SEQ ID NO: 138761 - DNA, 19 bp, Homo sapiens
  siRNA target sequence for CACNA1F (NM_005183.1,2273-2291).
cctgttgaacgtgtttctt

SEQ ID NO: 138762 - DNA, 19 bp, Homo sapiens
  siRNA target sequence for CACNA1F (NM_005183.1,2626-2644).
ccctcatccaccatcatgt

SEQ ID NO: 138763 - DNA, 19 bp, Homo sapiens
  siRNA target sequence for CACNA1F (NM_005183.1,2640-2658).
catgtcttcaccaatctta

SEQ ID NO: 138764 - DNA, 19 bp, Homo sapiens
  siRNA target sequence for CACNA1F (NM_005183.1,2655-2673).
cttatcctggtgttcatca

SEQ ID NO: 138765 - DNA, 19 bp, Homo sapiens
  siRNA target sequence for CACNA1F (NM_005183.1,2718-2736).
cactccttccgcaaccata

SEQ ID NO: 138766 - DNA, 19 bp, Homo sapiens
  siRNA target sequence for CACNA1F (NM_005183.1,2778-2796).
gtggagattctactaaaga

SEQ ID NO: 138767 - DNA, 19 bp, Homo sapiens
  siRNA target sequence for CACNA1F (NM_005183.1,2836-2854).
gccgtagctggtttaatat

SEQ ID NO: 138768 - DNA, 19 bp, Homo sapiens
  siRNA target sequence for CACNA1F (NM_005183.1,2838-2856).
cgtagctggtttaatatgt

SEQ ID NO: 138769 - DNA, 19 bp, Homo sapiens
  siRNA target sequence for CACNA1F (NM_005183.1,2839-2857).
gtagctggtttaatatgtt

SEQ ID NO: 138770 - DNA, 19 bp, Homo sapiens
  siRNA target sequence for CACNA1F (NM_005183.1,3047-3065).
caccacacttctgcaattt

SEQ ID NO: 138771 - DNA, 19 bp, Homo sapiens
  siRNA target sequence for CACNA1F (NM_005183.1,3289-3307).
gctggcctgcactgctata

SEQ ID NO: 138772 - DNA, 19 bp, Homo sapiens
  siRNA target sequence for CACNA1F (NM_005183.1,3292-3310).
ggcctgcactgctatacaa

SEQ ID NO: 138773 - DNA, 19 bp, Homo sapiens
  siRNA target sequence for CACNA1F (NM_005183.1,3308-3326).
caaggccatcgatgcatat

SEQ ID NO: 138774 - DNA, 19 bp, Homo sapiens
  siRNA target sequence for CACNA1F (NM_005183.1,3332-3350).
ggaccatggccccatctat

SEQ ID NO: 138775 - DNA, 19 bp, Homo sapiens
  siRNA target sequence for CACNA1F (NM_005183.1,3333-3351).
gaccatggccccatctata

SEQ ID NO: 138776 - DNA, 19 bp, Homo sapiens
  siRNA target sequence for CACNA1F (NM_005183.1,3335-3353).
ccatggccccatctataat

SEQ ID NO: 138777 - DNA, 19 bp, Homo sapiens
  siRNA target sequence for CACNA1F (NM_005183.1,3336-3354).
catggccccatctataatt

SEQ ID NO: 138778 - DNA, 19 bp, Homo sapiens
  siRNA target sequence for CACNA1F (NM_005183.1,3370-3388).
cagtgttcttcattgtcta

SEQ ID NO: 138779 - DNA, 19 bp, Homo sapiens
  siRNA target sequence for CACNA1F (NM_005183.1,3459-3477).
ggcgagcaggagtaccaaa

SEQ ID NO: 138780 - DNA, 19 bp, Homo sapiens
  siRNA target sequence for CACNA1F (NM_005183.1,3460-3478).
gcgagcaggagtaccaaaa

SEQ ID NO: 138781 - DNA, 19 bp, Homo sapiens
  siRNA target sequence for CACNA1F (NM_005183.1,3554-3572).
caagaacccgcatcagtat

SEQ ID NO: 138782 - DNA, 19 bp, Homo sapiens
  siRNA target sequence for CACNA1F (NM_005183.1,3721-3739).
gcctcttcactattgagat

SEQ ID NO: 138783 - DNA, 19 bp, Homo sapiens
  siRNA target sequence for CACNA1F (NM_005183.1,3794-3812).
cacgtttgacgctcttatt

SEQ ID NO: 138784 - DNA, 19 bp, Homo sapiens
  siRNA target sequence for CACNA1F (NM_005183.1,3796-3814).
cgtttgacgctcttattgt

SEQ ID NO: 138785 - DNA, 19 bp, Homo sapiens
  siRNA target sequence for CACNA1F (NM_005183.1,3839-3857).
cgtcactgaagtcaataat

SEQ ID NO: 138786 - DNA, 19 bp, Homo sapiens
  siRNA target sequence for CACNA1F (NM_005183.1,3885-3903).
gacagctcccgcatttcca

SEQ ID NO: 138787 - DNA, 19 bp, Homo sapiens
  siRNA target sequence for CACNA1F (NM_005183.1,4021-4039).
ctcttctcatcgcaatgat

SEQ ID NO: 138788 - DNA, 19 bp, Homo sapiens
  siRNA target sequence for CACNA1F (NM_005183.1,4026-4044).
ctcatcgcaatgatattct

SEQ ID NO: 138789 - DNA, 19 bp, Homo sapiens
  siRNA target sequence for CACNA1F (NM_005183.1,4033-4051).
caatgatattcttcatcta

SEQ ID NO: 138790 - DNA, 19 bp, Homo sapiens
  siRNA target sequence for CACNA1F (NM_005183.1,4256-4274).
gtttacctgtggtagcaat

SEQ ID NO: 138791 - DNA, 19 bp, Homo sapiens
  siRNA target sequence for CACNA1F (NM_005183.1,4420-4438).
ggatctggtctgaatatga

SEQ ID NO: 138792 - DNA, 19 bp, Homo sapiens
  siRNA target sequence for CACNA1F (NM_005183.1,4680-4698).
cggattgtcatcaaaaaga

SEQ ID NO: 138793 - DNA, 19 bp, Homo sapiens
  siRNA target sequence for CACNA1F (NM_005183.1,4997-5015).
ggacttggaaactaacaaa

SEQ ID NO: 138794 - DNA, 19 bp, Homo sapiens
  siRNA target sequence for CACNA1F (NM_005183.1,5326-5344).
ccccgtgctcagtcctttt

SEQ ID NO: 138795 - DNA, 19 bp, Homo sapiens
  siRNA target sequence for CACNA1F (NM_005183.1,5483-5501).
catcccaggcacctatcat

SEQ ID NO: 138796 - DNA, 19 bp, Homo sapiens
  siRNA target sequence for CACNA1F (NM_005183.1,5867-5885).
gggaaccagctctctctat

SEQ ID NO: 138797 - DNA, 19 bp, Homo sapiens
  siRNA target sequence for CACNA1G (NM_018896.3,544-562).
ccggtggttttcttctact

SEQ ID NO: 138798 - DNA, 19 bp, Homo sapiens
  siRNA target sequence for CACNA1G (NM_018896.3,545-563).
cggtggttttcttctactt

SEQ ID NO: 138799 - DNA, 19 bp, Homo sapiens
  siRNA target sequence for CACNA1G (NM_018896.3,593-611).
gtctccgcacggtctgtaa

SEQ ID NO: 138800 - DNA, 19 bp, Homo sapiens
  siRNA target sequence for CACNA1G (NM_018896.3,824-842).
cttggaaccggcttgactt

SEQ ID NO: 138801 - DNA, 19 bp, Homo sapiens
  siRNA target sequence for CACNA1G (NM_018896.3,827-845).
ggaaccggcttgacttttt

SEQ ID NO: 138802 - DNA, 19 bp, Homo sapiens
  siRNA target sequence for CACNA1G (NM_018896.3,2435-2453).
cagacagcgaggcagttta

SEQ ID NO: 138803 - DNA, 19 bp, Homo sapiens
  siRNA target sequence for CACNA1G (NM_018896.3,2553-2571).
cttctggaggctaatctgt

SEQ ID NO: 138804 - DNA, 19 bp, Homo sapiens
  siRNA target sequence for CACNA1G (NM_018896.3,2683-2701).
cttaccaacgccctagaaa

SEQ ID NO: 138805 - DNA, 19 bp, Homo sapiens
  siRNA target sequence for CACNA1G (NM_018896.3,2764-2782).
ggtccctttggctacatca

SEQ ID NO: 138806 - DNA, 19 bp, Homo sapiens
  siRNA target sequence for CACNA1G (NM_018896.3,2796-2814).
catcttcgatggtgtcatt

SEQ ID NO: 138807 - DNA, 19 bp, Homo sapiens
  siRNA target sequence for CACNA1G (NM_018896.3,3076-3094).
gaccggaagaattttgact

SEQ ID NO: 138808 - DNA, 19 bp, Homo sapiens
  siRNA target sequence for CACNA1G (NM_018896.3,3147-3165).
gaacaaagtcctctacaat

SEQ ID NO: 138809 - DNA, 19 bp, Homo sapiens
  siRNA target sequence for CACNA1G (NM_018896.3,3301-3319).
gatgcgagtggacagttaa

SEQ ID NO: 138810 - DNA, 19 bp, Homo sapiens
  siRNA target sequence for CACNA1G (NM_018896.3,3304-3322).
gcgagtggacagttaagct

SEQ ID NO: 138811 - DNA, 19 bp, Homo sapiens
  siRNA target sequence for CACNA1G (NM_018896.3,3311-3329).
gacagttaagctgtattca

SEQ ID NO: 138812 - DNA, 19 bp, Homo sapiens
  siRNA target sequence for CACNA1G (NM_018896.3,3359-3377).
ccaacaagtccgaatcaga

SEQ ID NO: 138813 - DNA, 19 bp, Homo sapiens
  siRNA target sequence for CACNA1G (NM_018896.3,4219-4237).
cttgtcatcatcttcctta

SEQ ID NO: 138814 - DNA, 19 bp, Homo sapiens
  siRNA target sequence for CACNA1G (NM_018896.3,4604-4622).
ccatcggcaacattgtagt

SEQ ID NO: 138815 - DNA, 19 bp, Homo sapiens
  siRNA target sequence for CACNA1G (NM_018896.3,4702-4720).
gaggataccaggaacatca

SEQ ID NO: 138816 - DNA, 19 bp, Homo sapiens
  siRNA target sequence for CACNA1G (NM_018896.3,4754-4772).
ggtgggtccggcacaagta

SEQ ID NO: 138817 - DNA, 19 bp, Homo sapiens
  siRNA target sequence for CACNA1G (NM_018896.3,4757-4775).
gggtccggcacaagtacaa

SEQ ID NO: 138818 - DNA, 19 bp, Homo sapiens
  siRNA target sequence for CACNA1G (NM_018896.3,4798-4816).
ctgatgtccctgttcgttt

SEQ ID NO: 138819 - DNA, 19 bp, Homo sapiens
  siRNA target sequence for CACNA1G (NM_018896.3,5085-5103).
gctggacgatgtaattgct

SEQ ID NO: 138820 - DNA, 19 bp, Homo sapiens
  siRNA target sequence for CACNA1G (NM_018896.3,5135-5153).
cccagtgcaaaccttacta

SEQ ID NO: 138821 - DNA, 19 bp, Homo sapiens
  siRNA target sequence for CACNA1G (NM_018896.3,5137-5155).
cagtgcaaaccttactact

SEQ ID NO: 138822 - DNA, 19 bp, Homo sapiens
  siRNA target sequence for CACNA1G (NM_018896.3,5335-5353).
gtcttggagtcagttttca

SEQ ID NO: 138823 - DNA, 19 bp, Homo sapiens
  siRNA target sequence for CACNA1G (NM_018896.3,5824-5842).
gagtccacctgctacaaca

SEQ ID NO: 138824 - DNA, 19 bp, Homo sapiens
  siRNA target sequence for CACNA1G (NM_018896.3,5843-5861).
cggtcatctcgcctatcta

SEQ ID NO: 138825 - DNA, 19 bp, Homo sapiens
  siRNA target sequence for CACNA1G (NM_018896.3,5847-5865).
catctcgcctatctacttt

SEQ ID NO: 138826 - DNA, 19 bp, Homo sapiens
  siRNA target sequence for CACNA1G (NM_018896.3,6324-6342).
gtctctgacgtcagagatt

SEQ ID NO: 138827 - DNA, 19 bp, Homo sapiens
  siRNA target sequence for CACNA1G (NM_018896.3,6326-6344).
ctctgacgtcagagattgt

SEQ ID NO: 138828 - DNA, 19 bp, Homo sapiens
  siRNA target sequence for CACNA1G (NM_198397.1,4962-4980).
ccacagtgccccaaaaagt

SEQ ID NO: 138829 - DNA, 19 bp, Homo sapiens
  siRNA target sequence for CACNA1G (NM_198397.1,4991-5009).
ggtctctagccgtccttaa

SEQ ID NO: 138830 - DNA, 19 bp, Homo sapiens
  siRNA target sequence for CACNA1G (NM_198397.1,4992-5010).
gtctctagccgtccttaaa

SEQ ID NO: 138831 - DNA, 19 bp, Homo sapiens
  siRNA target sequence for CACNA1G (NM_198397.1,4994-5012).
ctctagccgtccttaaaga

SEQ ID NO: 138832 - DNA, 19 bp, Homo sapiens
  siRNA target sequence for CACNA1H (NM_021098.1,561-579).
gtgagcatgctggtaatca

SEQ ID NO: 138833 - DNA, 19 bp, Homo sapiens
  siRNA target sequence for CACNA1H (NM_021098.1,661-679).
cctttgacgccttcatttt

SEQ ID NO: 138834 - DNA, 19 bp, Homo sapiens
  siRNA target sequence for CACNA1H (NM_021098.1,1032-1050).
ctggacagtgcctttgtca

SEQ ID NO: 138835 - DNA, 19 bp, Homo sapiens
  siRNA target sequence for CACNA1H (NM_021098.1,1041-1059).
gcctttgtcaggaacaaca

SEQ ID NO: 138836 - DNA, 19 bp, Homo sapiens
  siRNA target sequence for CACNA1H (NM_021098.1,2418-2436).
ggccgtggcgtctatgaat

SEQ ID NO: 138837 - DNA, 19 bp, Homo sapiens
  siRNA target sequence for CACNA1H (NM_021098.1,2419-2437).
gccgtggcgtctatgaatt

SEQ ID NO: 138838 - DNA, 19 bp, Homo sapiens
  siRNA target sequence for CACNA1H (NM_021098.1,2421-2439).
cgtggcgtctatgaattca

SEQ ID NO: 138839 - DNA, 19 bp, Homo sapiens
  siRNA target sequence for CACNA1H (NM_021098.1,3309-3327).
gagggcgatgccaacagat

SEQ ID NO: 138840 - DNA, 19 bp, Homo sapiens
  siRNA target sequence for CACNA1H (NM_021098.1,3611-3629).
ggccagcctccgaagttct

SEQ ID NO: 138841 - DNA, 19 bp, Homo sapiens
  siRNA target sequence for CACNA1H (NM_021098.1,3997-4015).
gctgcctccgcctgcataa

SEQ ID NO: 138842 - DNA, 19 bp, Homo sapiens
  siRNA target sequence for CACNA1H (NM_021098.1,3998-4016).
ctgcctccgcctgcataaa

SEQ ID NO: 138843 - DNA, 19 bp, Homo sapiens
  siRNA target sequence for CACNA1H (NM_021098.1,4000-4018).
gcctccgcctgcataaagt

SEQ ID NO: 138844 - DNA, 19 bp, Homo sapiens
  siRNA target sequence for CACNA1H (NM_021098.1,4123-4141).
cacacaagatgtttgatca

SEQ ID NO: 138845 - DNA, 19 bp, Homo sapiens
  siRNA target sequence for CACNA1H (NM_021098.1,4230-4248).
ctcagcgtctccaattaca

SEQ ID NO: 138846 - DNA, 19 bp, Homo sapiens
  siRNA target sequence for CACNA1H (NM_021098.1,4632-4650).
cccgacaccaggaacatct

SEQ ID NO: 138847 - DNA, 19 bp, Homo sapiens
  siRNA target sequence for CACNA1H (NM_021098.1,4689-4707).
gtgcgacgcaagtacaact

SEQ ID NO: 138848 - DNA, 19 bp, Homo sapiens
  siRNA target sequence for CACNA1H (NM_021098.1,5749-5767).
ccctgtcgcccgtctactt

SEQ ID NO: 138849 - DNA, 19 bp, Homo sapiens
  siRNA target sequence for CACNA1H (NM_021098.1,6301-6319).
ctgtgcacaccgattcctt

SEQ ID NO: 138850 - DNA, 19 bp, Homo sapiens
  siRNA target sequence for CACNA1H (NM_021098.1,6446-6464).
cgtccgcactcgtaagcat

SEQ ID NO: 138851 - DNA, 19 bp, Homo sapiens
  siRNA target sequence for CACNA1H (NM_021098.1,6447-6465).
gtccgcactcgtaagcata

SEQ ID NO: 138852 - DNA, 19 bp, Homo sapiens
  siRNA target sequence for CACNA1H (NM_021098.1,6451-6469).
gcactcgtaagcatacctt

SEQ ID NO: 138853 - DNA, 19 bp, Homo sapiens
  siRNA target sequence for CACNA1H (NM_021098.1,6783-6801).
ctgggtgcgcgcagaaaga

SEQ ID NO: 138854 - DNA, 19 bp, Homo sapiens
  siRNA target sequence for CACNA1H (NM_021098.1,6786-6804).
ggtgcgcgcagaaagaaga

SEQ ID NO: 138855 - DNA, 19 bp, Homo sapiens
  siRNA target sequence for CACNA1I (NM_021096.2,163-181).
gcgcctattgccttcttct

SEQ ID NO: 138856 - DNA, 19 bp, Homo sapiens
  siRNA target sequence for CACNA1I (NM_021096.2,206-224).
ggaactggtgcatcaagat

SEQ ID NO: 138857 - DNA, 19 bp, Homo sapiens
  siRNA target sequence for CACNA1I (NM_021096.2,815-833).
cgggcgacaatgggataat

SEQ ID NO: 138858 - DNA, 19 bp, Homo sapiens
  siRNA target sequence for CACNA1I (NM_021096.2,954-972).
ctggaaccgttactacaat

SEQ ID NO: 138859 - DNA, 19 bp, Homo sapiens
  siRNA target sequence for CACNA1I (NM_021096.2,956-974).
ggaaccgttactacaatgt

SEQ ID NO: 138860 - DNA, 19 bp, Homo sapiens
  siRNA target sequence for CACNA1I (NM_021096.2,1021-1039).
gacaacatcggttatgctt

SEQ ID NO: 138861 - DNA, 19 bp, Homo sapiens
  siRNA target sequence for CACNA1I (NM_021096.2,1031-1049).
gttatgcttggattgtcat

SEQ ID NO: 138862 - DNA, 19 bp, Homo sapiens
  siRNA target sequence for CACNA1I (NM_021096.2,1131-1149).
cttcatcctgcttatcata

SEQ ID NO: 138863 - DNA, 19 bp, Homo sapiens
  siRNA target sequence for CACNA1I (NM_021096.2,1508-1526).
gccggcattgccagacttt

SEQ ID NO: 138864 - DNA, 19 bp, Homo sapiens
  siRNA target sequence for CACNA1I (NM_021096.2,1512-1530).
gcattgccagactttgcat

SEQ ID NO: 138865 - DNA, 19 bp, Homo sapiens
  siRNA target sequence for CACNA1I (NM_021096.2,2064-2082).
cctgaagctggctgcattt

SEQ ID NO: 138866 - DNA, 19 bp, Homo sapiens
  siRNA target sequence for CACNA1I (NM_021096.2,2330-2348).
gcatccttgggatgcatat

SEQ ID NO: 138867 - DNA, 19 bp, Homo sapiens
  siRNA target sequence for CACNA1I (NM_021096.2,2468-2486).
ggaacgtcgttctctacaa

SEQ ID NO: 138868 - DNA, 19 bp, Homo sapiens
  siRNA target sequence for CACNA1I (NM_021096.2,2469-2487).
gaacgtcgttctctacaat

SEQ ID NO: 138869 - DNA, 19 bp, Homo sapiens
  siRNA target sequence for CACNA1I (NM_021096.2,3591-3609).
cagcaccgaacgcatcttt

SEQ ID NO: 138870 - DNA, 19 bp, Homo sapiens
  siRNA target sequence for CACNA1I (NM_021096.2,3593-3611).
gcaccgaacgcatctttct

SEQ ID NO: 138871 - DNA, 19 bp, Homo sapiens
  siRNA target sequence for CACNA1I (NM_021096.2,3646-3664).
gtgggcgagatgacattga

SEQ ID NO: 138872 - DNA, 19 bp, Homo sapiens
  siRNA target sequence for CACNA1I (NM_021096.2,3723-3741).
cgtgctggatggctttctt

SEQ ID NO: 138873 - DNA, 19 bp, Homo sapiens
  siRNA target sequence for CACNA1I (NM_021096.2,4012-4030).
gtggacacccgcaacatca

SEQ ID NO: 138874 - DNA, 19 bp, Homo sapiens
  siRNA target sequence for CACNA1I (NM_021096.2,4402-4420).
ccctactatgccacctatt

SEQ ID NO: 138875 - DNA, 19 bp, Homo sapiens
  siRNA target sequence for CACNA1I (NM_021096.2,4514-4532).
ccctggagcactacaatca

SEQ ID NO: 138876 - DNA, 19 bp, Homo sapiens
  siRNA target sequence for CACNA1I (NM_021096.2,4625-4643).
gtctgaggcgcttcttcaa

SEQ ID NO: 138877 - DNA, 19 bp, Homo sapiens
  siRNA target sequence for CACNA1I (NM_021096.2,5150-5168).
cgcagttcgtgctcatcaa

SEQ ID NO: 138878 - DNA, 19 bp, Homo sapiens
  siRNA target sequence for CACNA1I (NM_021096.2,5406-5424).
gctggacagcgtctcttta

SEQ ID NO: 138879 - DNA, 19 bp, Homo sapiens
  siRNA target sequence for CACNA1I (NM_021096.2,5407-5425).
ctggacagcgtctctttaa

SEQ ID NO: 138880 - DNA, 19 bp, Homo sapiens
  siRNA target sequence for CACNA1I (NM_021096.2,5410-5428).
gacagcgtctctttaatca

SEQ ID NO: 138881 - DNA, 19 bp, Homo sapiens
  siRNA target sequence for CACNA1I (NM_021096.2,5414-5432).
gcgtctctttaatcatcaa

SEQ ID NO: 138882 - DNA, 19 bp, Homo sapiens
  siRNA target sequence for CACNA1I (NM_021096.2,5699-5717).
gagacctgggcgaatgctt

SEQ ID NO: 138883 - DNA, 19 bp, Homo sapiens
  siRNA target sequence for CACNA1I (NM_021096.2,5744-5762).
cgccggatccagagaactt

SEQ ID NO: 138884 - DNA, 19 bp, Homo sapiens
  siRNA target sequence for CACNA1S (NM_000069.1,380-398).
ccttcgagacgatcatctt

SEQ ID NO: 138885 - DNA, 19 bp, Homo sapiens
  siRNA target sequence for CACNA1S (NM_000069.1,443-461).
ccatgccggaagatgacaa

SEQ ID NO: 138886 - DNA, 19 bp, Homo sapiens
  siRNA target sequence for CACNA1S (NM_000069.1,507-525).
cattgtcttctcgattgaa

SEQ ID NO: 138887 - DNA, 19 bp, Homo sapiens
  siRNA target sequence for CACNA1S (NM_000069.1,540-558).
cattgcctacggcttctta

SEQ ID NO: 138888 - DNA, 19 bp, Homo sapiens
  siRNA target sequence for CACNA1S (NM_000069.1,646-664).
caggttaacgtcatccaaa

SEQ ID NO: 138889 - DNA, 19 bp, Homo sapiens
  siRNA target sequence for CACNA1S (NM_000069.1,692-710).
gagccggcttggatgtcaa

SEQ ID NO: 138890 - DNA, 19 bp, Homo sapiens
  siRNA target sequence for CACNA1S (NM_000069.1,800-818).
ccatgctccccctctttca

SEQ ID NO: 138891 - DNA, 19 bp, Homo sapiens
  siRNA target sequence for CACNA1S (NM_000069.1,903-921).
ctacttcattggtacagat

SEQ ID NO: 138892 - DNA, 19 bp, Homo sapiens
  siRNA target sequence for CACNA1S (NM_000069.1,1103-1121).
gatggactgacgtccttta

SEQ ID NO: 138893 - DNA, 19 bp, Homo sapiens
  siRNA target sequence for CACNA1S (NM_000069.1,1413-1431).
gagcctgtatgaaattgca

SEQ ID NO: 138894 - DNA, 19 bp, Homo sapiens
  siRNA target sequence for CACNA1S (NM_000069.1,1423-1441).
gaaattgcaggcttgaaca

SEQ ID NO: 138895 - DNA, 19 bp, Homo sapiens
  siRNA target sequence for CACNA1S (NM_000069.1,1429-1447).
gcaggcttgaacaaaatca

SEQ ID NO: 138896 - DNA, 19 bp, Homo sapiens
  siRNA target sequence for CACNA1S (NM_000069.1,1470-1488).
gcagtggaaccgcatcttt

SEQ ID NO: 138897 - DNA, 19 bp, Homo sapiens
  siRNA target sequence for CACNA1S (NM_000069.1,1599-1617).
ctggctgacccgtttgcaa

SEQ ID NO: 138898 - DNA, 19 bp, Homo sapiens
  siRNA target sequence for CACNA1S (NM_000069.1,1684-1702).
ggcctgcgccagtacttca

SEQ ID NO: 138899 - DNA, 19 bp, Homo sapiens
  siRNA target sequence for CACNA1S (NM_000069.1,1685-1703).
gcctgcgccagtacttcat

SEQ ID NO: 138900 - DNA, 19 bp, Homo sapiens
  siRNA target sequence for CACNA1S (NM_000069.1,1687-1705).
ctgcgccagtacttcatgt

SEQ ID NO: 138901 - DNA, 19 bp, Homo sapiens
  siRNA target sequence for CACNA1S (NM_000069.1,1690-1708).
cgccagtacttcatgtcta

SEQ ID NO: 138902 - DNA, 19 bp, Homo sapiens
  siRNA target sequence for CACNA1S (NM_000069.1,2002-2020).
cggcgcagcaactttgaca

SEQ ID NO: 138903 - DNA, 19 bp, Homo sapiens
  siRNA target sequence for CACNA1S (NM_000069.1,2068-2086).
gactggacctcaatgatgt

SEQ ID NO: 138904 - DNA, 19 bp, Homo sapiens
  siRNA target sequence for CACNA1S (NM_000069.1,2072-2090).
ggacctcaatgatgtacaa

SEQ ID NO: 138905 - DNA, 19 bp, Homo sapiens
  siRNA target sequence for CACNA1S (NM_000069.1,2073-2091).
gacctcaatgatgtacaat

SEQ ID NO: 138906 - DNA, 19 bp, Homo sapiens
  siRNA target sequence for CACNA1S (NM_000069.1,2125-2143).
ggcatgcttgtgtgcattt

SEQ ID NO: 138907 - DNA, 19 bp, Homo sapiens
  siRNA target sequence for CACNA1S (NM_000069.1,2391-2409).
cgatgagtttgaatctaat

SEQ ID NO: 138908 - DNA, 19 bp, Homo sapiens
  siRNA target sequence for CACNA1S (NM_000069.1,2687-2705).
ccatccgggctgattccat

SEQ ID NO: 138909 - DNA, 19 bp, Homo sapiens
  siRNA target sequence for CACNA1S (NM_000069.1,2692-2710).
cgggctgattccatgagaa

SEQ ID NO: 138910 - DNA, 19 bp, Homo sapiens
  siRNA target sequence for CACNA1S (NM_000069.1,2693-2711).
gggctgattccatgagaaa

SEQ ID NO: 138911 - DNA, 19 bp, Homo sapiens
  siRNA target sequence for CACNA1S (NM_000069.1,2761-2779).
gagattgtcctcaagatga

SEQ ID NO: 138912 - DNA, 19 bp, Homo sapiens
  siRNA target sequence for CACNA1S (NM_000069.1,2807-2825).
gttccttctgccgcaatta

SEQ ID NO: 138913 - DNA, 19 bp, Homo sapiens
  siRNA target sequence for CACNA1S (NM_000069.1,3223-3241).
gtgctctcagccatgatgt

SEQ ID NO: 138914 - DNA, 19 bp, Homo sapiens
  siRNA target sequence for CACNA1S (NM_000069.1,3480-3498).
gcgccaatgtgtacagtat

SEQ ID NO: 138915 - DNA, 19 bp, Homo sapiens
  siRNA target sequence for CACNA1S (NM_000069.1,3521-3539).
ggtgctacattcccaaaaa

SEQ ID NO: 138916 - DNA, 19 bp, Homo sapiens
  siRNA target sequence for CACNA1S (NM_000069.1,3549-3567).
gtaccaggtgtggtacatt

SEQ ID NO: 138917 - DNA, 19 bp, Homo sapiens
  siRNA target sequence for CACNA1S (NM_000069.1,3553-3571).
caggtgtggtacattgtca

SEQ ID NO: 138918 - DNA, 19 bp, Homo sapiens
  siRNA target sequence for CACNA1S (NM_000069.1,3575-3593).
cctcctactttgaatacct

SEQ ID NO: 138919 - DNA, 19 bp, Homo sapiens
  siRNA target sequence for CACNA1S (NM_000069.1,3682-3700).
ctcaatgtggccttcacta

SEQ ID NO: 138920 - DNA, 19 bp, Homo sapiens
  siRNA target sequence for CACNA1S (NM_000069.1,3941-3959).
gtgtcatgaggctgatcaa

SEQ ID NO: 138921 - DNA, 19 bp, Homo sapiens
  siRNA target sequence for CACNA1S (NM_000069.1,4280-4298).
gtggcaccaactttgcata

SEQ ID NO: 138922 - DNA, 19 bp, Homo sapiens
  siRNA target sequence for CACNA1S (NM_000069.1,4294-4312).
gcatactactacttcatca

SEQ ID NO: 138923 - DNA, 19 bp, Homo sapiens
  siRNA target sequence for CACNA1S (NM_000069.1,4434-4452).
ggccatctgggcagagtat

SEQ ID NO: 138924 - DNA, 19 bp, Homo sapiens
  siRNA target sequence for CACNA1S (NM_000069.1,4494-4512).
gaccctgctgagaaggatt

SEQ ID NO: 138925 - DNA, 19 bp, Homo sapiens
  siRNA target sequence for CACNA1S (NM_000069.1,4544-4562).
cacatcgggtagcttgtaa

SEQ ID NO: 138926 - DNA, 19 bp, Homo sapiens
  siRNA target sequence for CACNA1S (NM_000069.1,4599-4617).
cggcacagtcaccttcaat

SEQ ID NO: 138927 - DNA, 19 bp, Homo sapiens
  siRNA target sequence for CACNA1S (NM_000069.1,4639-4657).
cgcacggcactcaagatca

SEQ ID NO: 138928 - DNA, 19 bp, Homo sapiens
  siRNA target sequence for CACNA1S (NM_000069.1,4640-4658).
gcacggcactcaagatcaa

SEQ ID NO: 138929 - DNA, 19 bp, Homo sapiens
  siRNA target sequence for CACNA1S (NM_000069.1,4656-4674).
caagacggaaggtaacttt

SEQ ID NO: 138930 - DNA, 19 bp, Homo sapiens
  siRNA target sequence for CACNA1S (NM_000069.1,4749-4767).
ggtcatccctccaatagga

SEQ ID NO: 138931 - DNA, 19 bp, Homo sapiens
  siRNA target sequence for CACNA1S (NM_000069.1,5191-5209).
ctggctcgtgccaatacca

SEQ ID NO: 138932 - DNA, 19 bp, Homo sapiens
  siRNA target sequence for CACNA1S (NM_000069.1,5498-5516).
caccagggtctcttcatga

SEQ ID NO: 138933 - DNA, 19 bp, Homo sapiens
  siRNA target sequence for CACNA1S (NM_000069.1,5817-5835).
ccaggagacccttattcct

SEQ ID NO: 138934 - DNA, 19 bp, Homo sapiens
  siRNA target sequence for CALB2 (NM_001740.2,123-141).
cgtcccagttcctggaaat

SEQ ID NO: 138935 - DNA, 19 bp, Homo sapiens
  siRNA target sequence for CALB2 (NM_001740.2,124-142).
gtcccagttcctggaaata

SEQ ID NO: 138936 - DNA, 19 bp, Homo sapiens
  siRNA target sequence for CALB2 (NM_001740.2,163-181).
cggaaatgggtatattgaa

SEQ ID NO: 138937 - DNA, 19 bp, Homo sapiens
  siRNA target sequence for CALB2 (NM_001740.2,287-305).
cagaagtatgataaaaact

SEQ ID NO: 138938 - DNA, 19 bp, Homo sapiens
  siRNA target sequence for CALB2 (NM_001740.2,389-407).
ggctccagcgccgagttta

SEQ ID NO: 138939 - DNA, 19 bp, Homo sapiens
  siRNA target sequence for CALB2 (NM_001740.2,390-408).
gctccagcgccgagtttat

SEQ ID NO: 138940 - DNA, 19 bp, Homo sapiens
  siRNA target sequence for CALB2 (NM_001740.2,393-411).
ccagcgccgagtttatgga

SEQ ID NO: 138941 - DNA, 19 bp, Homo sapiens
  siRNA target sequence for CALB2 (NM_001740.2,543-561).
ccatactacggatgtttga

SEQ ID NO: 138942 - DNA, 19 bp, Homo sapiens
  siRNA target sequence for CALB2 (NM_001740.2,608-626).
ctgcctgtccaggaaaact

SEQ ID NO: 138943 - DNA, 19 bp, Homo sapiens
  siRNA target sequence for CALB2 (NM_001740.2,665-683).
gagtttaacgcgatcttca

SEQ ID NO: 138944 - DNA, 19 bp, Homo sapiens
  siRNA target sequence for CALB2 (NM_001740.2,675-693).
cgatcttcacattttacga

SEQ ID NO: 138945 - DNA, 19 bp, Homo sapiens
  siRNA target sequence for CALB2 (NM_001740.2,746-764).
gatctgtacgagaaaaaca

SEQ ID NO: 138946 - DNA, 19 bp, Homo sapiens
  siRNA target sequence for CALB2 (NM_001740.2,782-800).
caacagctcaccaactaca

SEQ ID NO: 138947 - DNA, 19 bp, Homo sapiens
  siRNA target sequence for CALB3 (NM_004057.1,194-212).
gtccaaacaccctagatga

SEQ ID NO: 138948 - DNA, 19 bp, Homo sapiens
  siRNA target sequence for CALB3 (NM_004057.1,201-219).
caccctagatgatctcttt

SEQ ID NO: 138949 - DNA, 19 bp, Homo sapiens
  siRNA target sequence for CALML3 (NM_005185.2,265-283).
ccgagctgcgggacatgat

SEQ ID NO: 138950 - DNA, 19 bp, Homo sapiens
  siRNA target sequence for CALML5 (NM_017422.3,165-183).
cggttgacacggatggaaa

SEQ ID NO: 138951 - DNA, 19 bp, Homo sapiens
  siRNA target sequence for CALML5 (NM_017422.3,284-302).
gacggcgacggcgaaatca

SEQ ID NO: 138952 - DNA, 19 bp, Homo sapiens
  siRNA target sequence for CALN1 (NM_031468.1,571-589).
cagaaggtcgcgatggttt

SEQ ID NO: 138953 - DNA, 19 bp, Homo sapiens
  siRNA target sequence for CALN1 (NM_031468.1,591-609).
cttgggaacacgatagaca

SEQ ID NO: 138954 - DNA, 19 bp, Homo sapiens
  siRNA target sequence for CALN1 (NM_031468.1,651-669).
gagttgaagcacattctct

SEQ ID NO: 138955 - DNA, 19 bp, Homo sapiens
  siRNA target sequence for CALN1 (NM_031468.1,653-671).
gttgaagcacattctctat

SEQ ID NO: 138956 - DNA, 19 bp, Homo sapiens
  siRNA target sequence for CALN1 (NM_031468.1,751-769).
cggggaactgccaaacaga

SEQ ID NO: 138957 - DNA, 19 bp, Homo sapiens
  siRNA target sequence for CALN1 (NM_031468.1,755-773).
gaactgccaaacagagttt

SEQ ID NO: 138958 - DNA, 19 bp, Homo sapiens
  siRNA target sequence for CALN1 (NM_031468.1,825-843).
ctcatatgcgcctttgcta

SEQ ID NO: 138959 - DNA, 19 bp, Homo sapiens
  siRNA target sequence for CALU (NM_001219.2,336-354).
gagctcaaagactggatta

SEQ ID NO: 138960 - DNA, 19 bp, Homo sapiens
  siRNA target sequence for CALU (NM_001219.2,360-378).
gcacaaaagcgctggattt

SEQ ID NO: 138961 - DNA, 19 bp, Homo sapiens
  siRNA target sequence for CALU (NM_001219.2,361-379).
cacaaaagcgctggattta

SEQ ID NO: 138962 - DNA, 19 bp, Homo sapiens
  siRNA target sequence for CALU (NM_001219.2,373-391).
ggatttacgaggatgtaga

SEQ ID NO: 138963 - DNA, 19 bp, Homo sapiens
  siRNA target sequence for CALU (NM_001219.2,432-450).
gtttcctgggaggagtata

SEQ ID NO: 138964 - DNA, 19 bp, Homo sapiens
  siRNA target sequence for CALU (NM_001219.2,456-474).
gccacctacggctacgttt

SEQ ID NO: 138965 - DNA, 19 bp, Homo sapiens
  siRNA target sequence for CALU (NM_001219.2,457-475).
ccacctacggctacgtttt

SEQ ID NO: 138966 - DNA, 19 bp, Homo sapiens
  siRNA target sequence for CALU (NM_001219.2,458-476).
cacctacggctacgtttta

SEQ ID NO: 138967 - DNA, 19 bp, Homo sapiens
  siRNA target sequence for CALU (NM_001219.2,460-478).
cctacggctacgttttaga

SEQ ID NO: 138968 - DNA, 19 bp, Homo sapiens
  siRNA target sequence for CALU (NM_001219.2,461-479).
ctacggctacgttttagat

SEQ ID NO: 138969 - DNA, 19 bp, Homo sapiens
  siRNA target sequence for CALU (NM_001219.2,464-482).
cggctacgttttagatgat

SEQ ID NO: 138970 - DNA, 19 bp, Homo sapiens
  siRNA target sequence for CALU (NM_001219.2,489-507).
cctgatgatggatttaact

SEQ ID NO: 138971 - DNA, 19 bp, Homo sapiens
  siRNA target sequence for CALU (NM_001219.2,492-510).
gatgatggatttaactata

SEQ ID NO: 138972 - DNA, 19 bp, Homo sapiens
  siRNA target sequence for CALU (NM_001219.2,499-517).
gatttaactataaacagat

SEQ ID NO: 138973 - DNA, 19 bp, Homo sapiens
  siRNA target sequence for CALU (NM_001219.2,526-544).
gagatgagcggaggtttaa

SEQ ID NO: 138974 - DNA, 19 bp, Homo sapiens
  siRNA target sequence for CALU (NM_001219.2,528-546).
gatgagcggaggtttaaaa

SEQ ID NO: 138975 - DNA, 19 bp, Homo sapiens
  siRNA target sequence for CALU (NM_001219.2,620-638).
ctacatgaaagatatagta

SEQ ID NO: 138976 - DNA, 19 bp, Homo sapiens
  siRNA target sequence for CALU (NM_001219.2,623-641).
catgaaagatatagtagta

SEQ ID NO: 138977 - DNA, 19 bp, Homo sapiens
  siRNA target sequence for CALU (NM_001219.2,679-697).
gtttcattgatctagaaga

SEQ ID NO: 138978 - DNA, 19 bp, Homo sapiens
  siRNA target sequence for CALU (NM_001219.2,774-792).
gttgagtttcgggataaga

SEQ ID NO: 138979 - DNA, 19 bp, Homo sapiens
  siRNA target sequence for CALU (NM_001219.2,836-854).
ccttccctcagactatgat

SEQ ID NO: 138980 - DNA, 19 bp, Homo sapiens
  siRNA target sequence for CALU (NM_001219.2,926-944).
ggagatcgttgacaagtat

SEQ ID NO: 138981 - DNA, 19 bp, Homo sapiens
  siRNA target sequence for CALU (NM_001219.2,932-950).
cgttgacaagtatgactta

SEQ ID NO: 138982 - DNA, 19 bp, Homo sapiens
  siRNA target sequence for CALU (NM_001219.2,933-951).
gttgacaagtatgacttat

SEQ ID NO: 138983 - DNA, 19 bp, Homo sapiens
  siRNA target sequence for CALU (NM_001219.2,985-1003).
ccttagtacggcatgatga

SEQ ID NO: 138984 - DNA, 19 bp, Homo sapiens
  siRNA target sequence for CAPN1 (NM_005186.2,406-424).
ccacggaactgctgtcaaa

SEQ ID NO: 138985 - DNA, 19 bp, Homo sapiens
  siRNA target sequence for CAPN1 (NM_005186.2,419-437).
gtcaaacccccagttcatt

SEQ ID NO: 138986 - DNA, 19 bp, Homo sapiens
  siRNA target sequence for CAPN1 (NM_005186.2,722-740).
ggcctatgccaaggtaaat

SEQ ID NO: 138987 - DNA, 19 bp, Homo sapiens
  siRNA target sequence for CAPN1 (NM_005186.2,838-856).
gtgacctctaccagatcat

SEQ ID NO: 138988 - DNA, 19 bp, Homo sapiens
  siRNA target sequence for CAPN1 (NM_005186.2,927-945).
gccatcactttcaagaagt

SEQ ID NO: 138989 - DNA, 19 bp, Homo sapiens
  siRNA target sequence for CAPN1 (NM_005186.2,1224-1242).
cggaccatccgcaaatgga

SEQ ID NO: 138990 - DNA, 19 bp, Homo sapiens
  siRNA target sequence for CAPN1 (NM_005186.2,1225-1243).
ggaccatccgcaaatggaa

SEQ ID NO: 138991 - DNA, 19 bp, Homo sapiens
  siRNA target sequence for CAPN1 (NM_005186.2,1318-1336).
gggtgaaccctcagttcaa

SEQ ID NO: 138992 - DNA, 19 bp, Homo sapiens
  siRNA target sequence for CAPN1 (NM_005186.2,1320-1338).
gtgaaccctcagttcaaga

SEQ ID NO: 138993 - DNA, 19 bp, Homo sapiens
  siRNA target sequence for CAPN1 (NM_005186.2,1984-2002).
ggaaccgcatccggaatta

SEQ ID NO: 138994 - DNA, 19 bp, Homo sapiens
  siRNA target sequence for CAPN1 (NM_005186.2,2145-2163).
ctggcggtcgactttgaca

SEQ ID NO: 138995 - DNA, 19 bp, Homo sapiens
  siRNA target sequence for CAPN1 (NM_005186.2,2147-2165).
ggcggtcgactttgacaat

SEQ ID NO: 138996 - DNA, 19 bp, Homo sapiens
  siRNA target sequence for CAPN1 (NM_005186.2,2153-2171).
cgactttgacaatttcgtt

SEQ ID NO: 138997 - DNA, 19 bp, Homo sapiens
  siRNA target sequence for CAPN1 (NM_005186.2,2190-2208).
gagaccatgttccgatttt

SEQ ID NO: 138998 - DNA, 19 bp, Homo sapiens
  siRNA target sequence for CAPN1 (NM_005186.2,2194-2212).
ccatgttccgatttttcaa

SEQ ID NO: 138999 - DNA, 19 bp, Homo sapiens
  siRNA target sequence for CAPN1 (NM_005186.2,2198-2216).
gttccgatttttcaaaact

SEQ ID NO: 139000 - DNA, 19 bp, Homo sapiens
  siRNA target sequence for CAPN1 (NM_005186.2,2235-2253).
ggagttgtgacctttgact

SEQ ID NO: 139001 - DNA, 19 bp, Homo sapiens
  siRNA target sequence for CAPN1 (NM_005186.2,2268-2286).
cagctgaccatgtttgcat

SEQ ID NO: 139002 - DNA, 19 bp, Homo sapiens
  siRNA target sequence for CAPN11 (NM_007058.1,157-175).
cgacaacgcccagaacttt

SEQ ID NO: 139003 - DNA, 19 bp, Homo sapiens
  siRNA target sequence for CAPN11 (NM_007058.1,197-215).
ctgcgagcagcctgtctaa

SEQ ID NO: 139004 - DNA, 19 bp, Homo sapiens
  siRNA target sequence for CAPN11 (NM_007058.1,199-217).
gcgagcagcctgtctaaga

SEQ ID NO: 139005 - DNA, 19 bp, Homo sapiens
  siRNA target sequence for CAPN11 (NM_007058.1,200-218).
cgagcagcctgtctaagaa

SEQ ID NO: 139006 - DNA, 19 bp, Homo sapiens
  siRNA target sequence for CAPN11 (NM_007058.1,566-584).
ctgcccacaaagaatgaca

SEQ ID NO: 139007 - DNA, 19 bp, Homo sapiens
  siRNA target sequence for CAPN11 (NM_007058.1,660-678).
gtgggtcctatgaagcatt

SEQ ID NO: 139008 - DNA, 19 bp, Homo sapiens
  siRNA target sequence for CAPN11 (NM_007058.1,664-682).
gtcctatgaagcattgtca

SEQ ID NO: 139009 - DNA, 19 bp, Homo sapiens
  siRNA target sequence for CAPN11 (NM_007058.1,871-889).
gagagggcacgcttactct

SEQ ID NO: 139010 - DNA, 19 bp, Homo sapiens
  siRNA target sequence for CAPN11 (NM_007058.1,1068-1086).
ggatgtcctaccaagattt

SEQ ID NO: 139011 - DNA, 19 bp, Homo sapiens
  siRNA target sequence for CAPN11 (NM_007058.1,1079-1097).
caagatttcctgaacaact

SEQ ID NO: 139012 - DNA, 19 bp, Homo sapiens
  siRNA target sequence for CAPN11 (NM_007058.1,1134-1152).
cactctctggggactacaa

SEQ ID NO: 139013 - DNA, 19 bp, Homo sapiens
  siRNA target sequence for CAPN11 (NM_007058.1,1239-1257).
ggaccaacccccagtttaa

SEQ ID NO: 139014 - DNA, 19 bp, Homo sapiens
  siRNA target sequence for CAPN11 (NM_007058.1,1242-1260).
ccaacccccagtttaagat

SEQ ID NO: 139015 - DNA, 19 bp, Homo sapiens
  siRNA target sequence for CAPN11 (NM_007058.1,1623-1641).
gcgagtcatgggaattgga

SEQ ID NO: 139016 - DNA, 19 bp, Homo sapiens
  siRNA target sequence for CAPN11 (NM_007058.1,1632-1650).
gggaattggatgaagtcaa

SEQ ID NO: 139017 - DNA, 19 bp, Homo sapiens
  siRNA target sequence for CAPN11 (NM_007058.1,1697-1715).
gaccaggacttcctacatt

SEQ ID NO: 139018 - DNA, 19 bp, Homo sapiens
  siRNA target sequence for CAPN11 (NM_007058.1,1703-1721).
gacttcctacatttgttta

SEQ ID NO: 139019 - DNA, 19 bp, Homo sapiens
  siRNA target sequence for CAPN11 (NM_007058.1,1708-1726).
cctacatttgtttaagata

SEQ ID NO: 139020 - DNA, 19 bp, Homo sapiens
  siRNA target sequence for CAPN11 (NM_007058.1,1782-1800).
ggatggccatcaaattcaa

SEQ ID NO: 139021 - DNA, 19 bp, Homo sapiens
  siRNA target sequence for CAPN11 (NM_007058.1,1875-1893).
gcaagctggggcttctaga

SEQ ID NO: 139022 - DNA, 19 bp, Homo sapiens
  siRNA target sequence for CAPN11 (NM_007058.1,1884-1902).
ggcttctagagttcaagat

SEQ ID NO: 139023 - DNA, 19 bp, Homo sapiens
  siRNA target sequence for CAPN11 (NM_007058.1,1987-2005).
gcgcctggttattgagaaa

SEQ ID NO: 139024 - DNA, 19 bp, Homo sapiens
  siRNA target sequence for CAPN11 (NM_007058.1,2049-2067).
ccaggtatgcagatgatga

SEQ ID NO: 139025 - DNA, 19 bp, Homo sapiens
  siRNA target sequence for CAPN11 (NM_007058.1,2063-2081).
gatgacctgatcatagact

SEQ ID NO: 139026 - DNA, 19 bp, Homo sapiens
  siRNA target sequence for CAPN11 (NM_007058.1,2140-2158).
catggaccccaagaatact

SEQ ID NO: 139027 - DNA, 19 bp, Homo sapiens
  siRNA target sequence for CAPN2 (NM_001748.3,387-405).
gcgctgacccccagtttat

SEQ ID NO: 139028 - DNA, 19 bp, Homo sapiens
  siRNA target sequence for CAPN2 (NM_001748.3,486-504).
ccttgaatgaagaaatcct

SEQ ID NO: 139029 - DNA, 19 bp, Homo sapiens
  siRNA target sequence for CAPN2 (NM_001748.3,510-528).
gagtcgtccccctaaacca

SEQ ID NO: 139030 - DNA, 19 bp, Homo sapiens
  siRNA target sequence for CAPN2 (NM_001748.3,700-718).
caagatcaacggatgctat

SEQ ID NO: 139031 - DNA, 19 bp, Homo sapiens
  siRNA target sequence for CAPN2 (NM_001748.3,803-821).
cctcccaacctgttcaaga

SEQ ID NO: 139032 - DNA, 19 bp, Homo sapiens
  siRNA target sequence for CAPN2 (NM_001748.3,804-822).
ctcccaacctgttcaagat

SEQ ID NO: 139033 - DNA, 19 bp, Homo sapiens
  siRNA target sequence for CAPN2 (NM_001748.3,806-824).
cccaacctgttcaagatca

SEQ ID NO: 139034 - DNA, 19 bp, Homo sapiens
  siRNA target sequence for CAPN2 (NM_001748.3,893-911).
gaggccatcacgtttcaga

SEQ ID NO: 139035 - DNA, 19 bp, Homo sapiens
  siRNA target sequence for CAPN2 (NM_001748.3,948-966).
ccgaggaggttgaaagtaa

SEQ ID NO: 139036 - DNA, 19 bp, Homo sapiens
  siRNA target sequence for CAPN2 (NM_001748.3,963-981).
gtaacggaagcctacagaa

SEQ ID NO: 139037 - DNA, 19 bp, Homo sapiens
  siRNA target sequence for CAPN2 (NM_001748.3,1087-1105).
gaccagacggcatgaagat

SEQ ID NO: 139038 - DNA, 19 bp, Homo sapiens
  siRNA target sequence for CAPN2 (NM_001748.3,1188-1206).
ccagcgatacctacaagaa

SEQ ID NO: 139039 - DNA, 19 bp, Homo sapiens
  siRNA target sequence for CAPN2 (NM_001748.3,1266-1284).
ggaactacccgaacacatt

SEQ ID NO: 139040 - DNA, 19 bp, Homo sapiens
  siRNA target sequence for CAPN2 (NM_001748.3,1426-1444).
catcggctttggcatctat

SEQ ID NO: 139041 - DNA, 19 bp, Homo sapiens
  siRNA target sequence for CAPN2 (NM_001748.3,1575-1593).
cgccaggagagtacattct

SEQ ID NO: 139042 - DNA, 19 bp, Homo sapiens
  siRNA target sequence for CAPN2 (NM_001748.3,1633-1651).
ctgcatccgggtcttttct

SEQ ID NO: 139043 - DNA, 19 bp, Homo sapiens
  siRNA target sequence for CAPN2 (NM_001748.3,1674-1692).
ctgtcgatgatgaaatcga

SEQ ID NO: 139044 - DNA, 19 bp, Homo sapiens
  siRNA target sequence for CAPN2 (NM_001748.3,1826-1844).
gcaaagcgccaagatatca

SEQ ID NO: 139045 - DNA, 19 bp, Homo sapiens
  siRNA target sequence for CAPN2 (NM_001748.3,1827-1845).
caaagcgccaagatatcaa

SEQ ID NO: 139046 - DNA, 19 bp, Homo sapiens
  siRNA target sequence for CAPN2 (NM_001748.3,1860-1878).
gcatcgagacatgcaaaat

SEQ ID NO: 139047 - DNA, 19 bp, Homo sapiens
  siRNA target sequence for CAPN2 (NM_001748.3,1861-1879).
catcgagacatgcaaaatt

SEQ ID NO: 139048 - DNA, 19 bp, Homo sapiens
  siRNA target sequence for CAPN2 (NM_001748.3,1867-1885).
gacatgcaaaattatggtt

SEQ ID NO: 139049 - DNA, 19 bp, Homo sapiens
  siRNA target sequence for CAPN2 (NM_001748.3,1944-1962).
ggacgaagattcaaaaata

SEQ ID NO: 139050 - DNA, 19 bp, Homo sapiens
  siRNA target sequence for CAPN2 (NM_001748.3,1947-1965).
cgaagattcaaaaatacca

SEQ ID NO: 139051 - DNA, 19 bp, Homo sapiens
  siRNA target sequence for CAPN2 (NM_001748.3,1948-1966).
gaagattcaaaaataccaa

SEQ ID NO: 139052 - DNA, 19 bp, Homo sapiens
  siRNA target sequence for CAPN2 (NM_001748.3,1993-2011).
caggtctggtaccatgaat

SEQ ID NO: 139053 - DNA, 19 bp, Homo sapiens
  siRNA target sequence for CAPN2 (NM_001748.3,2101-2119).
ccagctcatcatcgatttt

SEQ ID NO: 139054 - DNA, 19 bp, Homo sapiens
  siRNA target sequence for CAPN2 (NM_001748.3,2104-2122).
gctcatcatcgattttgat

SEQ ID NO: 139055 - DNA, 19 bp, Homo sapiens
  siRNA target sequence for CAPN2 (NM_001748.3,2105-2123).
ctcatcatcgattttgata

SEQ ID NO: 139056 - DNA, 19 bp, Homo sapiens
  siRNA target sequence for CAPN2 (NM_001748.3,2107-2125).
catcatcgattttgataat

SEQ ID NO: 139057 - DNA, 19 bp, Homo sapiens
  siRNA target sequence for CAPN2 (NM_001748.3,2144-2162).
cggctggaaacgctattca

SEQ ID NO: 139058 - DNA, 19 bp, Homo sapiens
  siRNA target sequence for CAPN2 (NM_001748.3,2145-2163).
ggctggaaacgctattcaa

SEQ ID NO: 139059 - DNA, 19 bp, Homo sapiens
  siRNA target sequence for CAPN2 (NM_001748.3,2147-2165).
ctggaaacgctattcaaga

SEQ ID NO: 139060 - DNA, 19 bp, Homo sapiens
  siRNA target sequence for CAPN2 (NM_001748.3,2154-2172).
cgctattcaagatatttaa

SEQ ID NO: 139061 - DNA, 19 bp, Homo sapiens
  siRNA target sequence for CAPN2 (NM_001748.3,2184-2202).
ccgagaatactggaacaat

SEQ ID NO: 139062 - DNA, 19 bp, Homo sapiens
  siRNA target sequence for CAPN2 (NM_001748.3,2185-2203).
cgagaatactggaacaata

SEQ ID NO: 139063 - DNA, 19 bp, Homo sapiens
  siRNA target sequence for CAPN2 (NM_001748.3,2199-2217).
caatagagctcgaccttat

SEQ ID NO: 139064 - DNA, 19 bp, Homo sapiens
  siRNA target sequence for CAPN3 (NM_000070.2,420-438).
cccaagtggcatctattca

SEQ ID NO: 139065 - DNA, 19 bp, Homo sapiens
  siRNA target sequence for CAPN3 (NM_000070.2,440-458).
ccatcatcagccgcaattt

SEQ ID NO: 139066 - DNA, 19 bp, Homo sapiens
  siRNA target sequence for CAPN3 (NM_000070.2,441-459).
catcatcagccgcaatttt

SEQ ID NO: 139067 - DNA, 19 bp, Homo sapiens
  siRNA target sequence for CAPN3 (NM_000070.2,444-462).
catcagccgcaattttcct

SEQ ID NO: 139068 - DNA, 19 bp, Homo sapiens
  siRNA target sequence for CAPN3 (NM_000070.2,447-465).
cagccgcaattttcctatt

SEQ ID NO: 139069 - DNA, 19 bp, Homo sapiens
  siRNA target sequence for CAPN3 (NM_000070.2,449-467).
gccgcaattttcctattat

SEQ ID NO: 139070 - DNA, 19 bp, Homo sapiens
  siRNA target sequence for CAPN3 (NM_000070.2,461-479).
ctattatcggagtgaaaga

SEQ ID NO: 139071 - DNA, 19 bp, Homo sapiens
  siRNA target sequence for CAPN3 (NM_000070.2,485-503).
cattcgagcaacttcacaa

SEQ ID NO: 139072 - DNA, 19 bp, Homo sapiens
  siRNA target sequence for CAPN3 (NM_000070.2,556-574).
gagacctctctcttttata

SEQ ID NO: 139073 - DNA, 19 bp, Homo sapiens
  siRNA target sequence for CAPN3 (NM_000070.2,623-641).
gcgagaatccccgatttat

SEQ ID NO: 139074 - DNA, 19 bp, Homo sapiens
  siRNA target sequence for CAPN3 (NM_000070.2,746-764).
gagtcataccccatgatca

SEQ ID NO: 139075 - DNA, 19 bp, Homo sapiens
  siRNA target sequence for CAPN3 (NM_000070.2,748-766).
gtcataccccatgatcaaa

SEQ ID NO: 139076 - DNA, 19 bp, Homo sapiens
  siRNA target sequence for CAPN3 (NM_000070.2,750-768).
cataccccatgatcaaagt

SEQ ID NO: 139077 - DNA, 19 bp, Homo sapiens
  siRNA target sequence for CAPN3 (NM_000070.2,760-778).
gatcaaagtttcatcgaaa

SEQ ID NO: 139078 - DNA, 19 bp, Homo sapiens
  siRNA target sequence for CAPN3 (NM_000070.2,848-866).
gcctgccaacgtacaacaa

SEQ ID NO: 139079 - DNA, 19 bp, Homo sapiens
  siRNA target sequence for CAPN3 (NM_000070.2,849-867).
cctgccaacgtacaacaat

SEQ ID NO: 139080 - DNA, 19 bp, Homo sapiens
  siRNA target sequence for CAPN3 (NM_000070.2,852-870).
gccaacgtacaacaatcaa

SEQ ID NO: 139081 - DNA, 19 bp, Homo sapiens
  siRNA target sequence for CAPN3 (NM_000070.2,1036-1054).
gctcctagtgacatgtaca

SEQ ID NO: 139082 - DNA, 19 bp, Homo sapiens
  siRNA target sequence for CAPN3 (NM_000070.2,1039-1057).
cctagtgacatgtacaaga

SEQ ID NO: 139083 - DNA, 19 bp, Homo sapiens
  siRNA target sequence for CAPN3 (NM_000070.2,1040-1058).
ctagtgacatgtacaagat

SEQ ID NO: 139084 - DNA, 19 bp, Homo sapiens
  siRNA target sequence for CAPN3 (NM_000070.2,1105-1123).
gatgatggcacgaacatga

SEQ ID NO: 139085 - DNA, 19 bp, Homo sapiens
  siRNA target sequence for CAPN3 (NM_000070.2,1168-1186).
gcacggatggtaaggaata

SEQ ID NO: 139086 - DNA, 19 bp, Homo sapiens
  siRNA target sequence for CAPN3 (NM_000070.2,1169-1187).
cacggatggtaaggaatat

SEQ ID NO: 139087 - DNA, 19 bp, Homo sapiens
  siRNA target sequence for CAPN3 (NM_000070.2,1177-1195).
gtaaggaatatggataact

SEQ ID NO: 139088 - DNA, 19 bp, Homo sapiens
  siRNA target sequence for CAPN3 (NM_000070.2,1241-1259).
gaccgacccggacaatcat

SEQ ID NO: 139089 - DNA, 19 bp, Homo sapiens
  siRNA target sequence for CAPN3 (NM_000070.2,1253-1271).
caatcattccggttcagta

SEQ ID NO: 139090 - DNA, 19 bp, Homo sapiens
  siRNA target sequence for CAPN3 (NM_000070.2,1404-1422).
cggttcttggagtgataga

SEQ ID NO: 139091 - DNA, 19 bp, Homo sapiens
  siRNA target sequence for CAPN3 (NM_000070.2,1405-1423).
ggttcttggagtgatagat

SEQ ID NO: 139092 - DNA, 19 bp, Homo sapiens
  siRNA target sequence for CAPN3 (NM_000070.2,1434-1452).
gagctttgtggacaaagat

SEQ ID NO: 139093 - DNA, 19 bp, Homo sapiens
  siRNA target sequence for CAPN3 (NM_000070.2,1513-1531).
gatttcatctaccatttca

SEQ ID NO: 139094 - DNA, 19 bp, Homo sapiens
  siRNA target sequence for CAPN3 (NM_000070.2,1649-1667).
gcaacttcccagatacttt

SEQ ID NO: 139095 - DNA, 19 bp, Homo sapiens
  siRNA target sequence for CAPN3 (NM_000070.2,1723-1741).
gactcggaggtgatttgca

SEQ ID NO: 139096 - DNA, 19 bp, Homo sapiens
  siRNA target sequence for CAPN3 (NM_000070.2,1904-1922).
ggagcaaaacctacatcaa

SEQ ID NO: 139097 - DNA, 19 bp, Homo sapiens
  siRNA target sequence for CAPN3 (NM_000070.2,2192-2210).
gccctgataagcaaaagca

SEQ ID NO: 139098 - DNA, 19 bp, Homo sapiens
  siRNA target sequence for CAPN3 (NM_000070.2,2249-2267).
gtgaggaacagcaacaatt

SEQ ID NO: 139099 - DNA, 19 bp, Homo sapiens
  siRNA target sequence for CAPN3 (NM_000070.2,2260-2278).
caacaattccggaacattt

SEQ ID NO: 139100 - DNA, 19 bp, Homo sapiens
  siRNA target sequence for CAPN3 (NM_000070.2,2312-2330).
gtgcagatgagctcaagaa

SEQ ID NO: 139101 - DNA, 19 bp, Homo sapiens
  siRNA target sequence for CAPN3 (NM_000070.2,2323-2341).
ctcaagaaggtccttaaca

SEQ ID NO: 139102 - DNA, 19 bp, Homo sapiens
  siRNA target sequence for CAPN3 (NM_000070.2,2391-2409).
gtcctgccgtagcatgatt

SEQ ID NO: 139103 - DNA, 19 bp, Homo sapiens
  siRNA target sequence for CAPN3 (NM_000070.2,2460-2478).
ccacctctggaacaagatt

SEQ ID NO: 139104 - DNA, 19 bp, Homo sapiens
  siRNA target sequence for CAPN3 (NM_000070.2,2518-2536).
cagtccggcaccatcaaca

SEQ ID NO: 139105 - DNA, 19 bp, Homo sapiens
  siRNA target sequence for CAPN3 (NM_000070.2,2586-2604).
ccagctctatgacatcatt

SEQ ID NO: 139106 - DNA, 19 bp, Homo sapiens
  siRNA target sequence for CAPN3 (NM_000070.2,2678-2696).
gcatgttcagagcttttca

SEQ ID NO: 139107 - DNA, 19 bp, Homo sapiens
  siRNA target sequence for CAPN3 (NM_000070.2,2679-2697).
catgttcagagcttttcat

SEQ ID NO: 139108 - DNA, 19 bp, Homo sapiens
  siRNA target sequence for CAPN3 (NM_024344.1,2080-2098).
cggccagtgcccatcatct

SEQ ID NO: 139109 - DNA, 19 bp, Homo sapiens
  siRNA target sequence for CAPN9 (NM_006615.1,190-208).
gccagagctttgagcaaat

SEQ ID NO: 139110 - DNA, 19 bp, Homo sapiens
  siRNA target sequence for CAPN9 (NM_006615.1,360-378).
ggggccaccaggactgata

SEQ ID NO: 139111 - DNA, 19 bp, Homo sapiens
  siRNA target sequence for CAPN9 (NM_006615.1,361-379).
gggccaccaggactgatat

SEQ ID NO: 139112 - DNA, 19 bp, Homo sapiens
  siRNA target sequence for CAPN9 (NM_006615.1,395-413).
gggagactgctggctatta

SEQ ID NO: 139113 - DNA, 19 bp, Homo sapiens
  siRNA target sequence for CAPN9 (NM_006615.1,422-440).
cgcctcccttacgcttaat

SEQ ID NO: 139114 - DNA, 19 bp, Homo sapiens
  siRNA target sequence for CAPN9 (NM_006615.1,424-442).
cctcccttacgcttaatca

SEQ ID NO: 139115 - DNA, 19 bp, Homo sapiens
  siRNA target sequence for CAPN9 (NM_006615.1,425-443).
ctcccttacgcttaatcaa

SEQ ID NO: 139116 - DNA, 19 bp, Homo sapiens
  siRNA target sequence for CAPN9 (NM_006615.1,427-445).
cccttacgcttaatcaaaa

SEQ ID NO: 139117 - DNA, 19 bp, Homo sapiens
  siRNA target sequence for CAPN9 (NM_006615.1,428-446).
ccttacgcttaatcaaaaa

SEQ ID NO: 139118 - DNA, 19 bp, Homo sapiens
  siRNA target sequence for CAPN9 (NM_006615.1,487-505).
ctggttatgccgggatatt

SEQ ID NO: 139119 - DNA, 19 bp, Homo sapiens
  siRNA target sequence for CAPN9 (NM_006615.1,490-508).
gttatgccgggatattcca

SEQ ID NO: 139120 - DNA, 19 bp, Homo sapiens
  siRNA target sequence for CAPN9 (NM_006615.1,574-592).
gggaccgcttggttttcct

SEQ ID NO: 139121 - DNA, 19 bp, Homo sapiens
  siRNA target sequence for CAPN9 (NM_006615.1,751-769).
ccgagaacttctatgagat

SEQ ID NO: 139122 - DNA, 19 bp, Homo sapiens
  siRNA target sequence for CAPN9 (NM_006615.1,752-770).
cgagaacttctatgagatt

SEQ ID NO: 139123 - DNA, 19 bp, Homo sapiens
  siRNA target sequence for CAPN9 (NM_006615.1,755-773).
gaacttctatgagattcta

SEQ ID NO: 139124 - DNA, 19 bp, Homo sapiens
  siRNA target sequence for CAPN9 (NM_006615.1,821-839).
cagaagtgctgcagaatct

SEQ ID NO: 139125 - DNA, 19 bp, Homo sapiens
  siRNA target sequence for CAPN9 (NM_006615.1,847-865).
ggacgccgtttggtcttat

SEQ ID NO: 139126 - DNA, 19 bp, Homo sapiens
  siRNA target sequence for CAPN9 (NM_006615.1,850-868).
cgccgtttggtcttattaa

SEQ ID NO: 139127 - DNA, 19 bp, Homo sapiens
  siRNA target sequence for CAPN9 (NM_006615.1,892-910).
gaattgaccaggtaagctt

SEQ ID NO: 139128 - DNA, 19 bp, Homo sapiens
  siRNA target sequence for CAPN9 (NM_006615.1,1047-1065).
ctggatgatggggaattct

SEQ ID NO: 139129 - DNA, 19 bp, Homo sapiens
  siRNA target sequence for CAPN9 (NM_006615.1,1085-1103).
caaggcccactttgataaa

SEQ ID NO: 139130 - DNA, 19 bp, Homo sapiens
  siRNA target sequence for CAPN9 (NM_006615.1,1140-1158).
gaagacgcgatccacaaat

SEQ ID NO: 139131 - DNA, 19 bp, Homo sapiens
  siRNA target sequence for CAPN9 (NM_006615.1,1204-1222).
ctgggggctgccgcaattt

SEQ ID NO: 139132 - DNA, 19 bp, Homo sapiens
  siRNA target sequence for CAPN9 (NM_006615.1,1207-1225).
ggggctgccgcaatttcct

SEQ ID NO: 139133 - DNA, 19 bp, Homo sapiens
  siRNA target sequence for CAPN9 (NM_006615.1,1217-1235).
caatttcctggataccttt

SEQ ID NO: 139134 - DNA, 19 bp, Homo sapiens
  siRNA target sequence for CAPN9 (NM_006615.1,1259-1277).
gtctctgactgagaaagat

SEQ ID NO: 139135 - DNA, 19 bp, Homo sapiens
  siRNA target sequence for CAPN9 (NM_006615.1,1310-1328).
cctgatgcagaaagataga

SEQ ID NO: 139136 - DNA, 19 bp, Homo sapiens
  siRNA target sequence for CAPN9 (NM_006615.1,1368-1386).
ggctatgccatttatgagt

SEQ ID NO: 139137 - DNA, 19 bp, Homo sapiens
  siRNA target sequence for CAPN9 (NM_006615.1,1407-1425).
ctgaacaaagacttcttca

SEQ ID NO: 139138 - DNA, 19 bp, Homo sapiens
  siRNA target sequence for CAPN9 (NM_006615.1,1591-1609).
cccgggatatggatggaaa

SEQ ID NO: 139139 - DNA, 19 bp, Homo sapiens
  siRNA target sequence for CAPN9 (NM_006615.1,1676-1694).
gcggtttcgggctctgttt

SEQ ID NO: 139140 - DNA, 19 bp, Homo sapiens
  siRNA target sequence for CAPN9 (NM_006615.1,1678-1696).
ggtttcgggctctgtttga

SEQ ID NO: 139141 - DNA, 19 bp, Homo sapiens
  siRNA target sequence for CAPN9 (NM_006615.1,1679-1697).
gtttcgggctctgtttgaa

SEQ ID NO: 139142 - DNA, 19 bp, Homo sapiens
  siRNA target sequence for CAPN9 (NM_006615.1,1798-1816).
gcctgatctcctgtaaaaa

SEQ ID NO: 139143 - DNA, 19 bp, Homo sapiens
  siRNA target sequence for CAPN9 (NM_006615.1,1907-1925).
ccttttccttcggtttgat

SEQ ID NO: 139144 - DNA, 19 bp, Homo sapiens
  siRNA target sequence for CAPN9 (NM_006615.1,1937-1955).
cggcaccatgtctacctat

SEQ ID NO: 139145 - DNA, 19 bp, Homo sapiens
  siRNA target sequence for CAPN9 (NM_006615.1,1943-1961).
catgtctacctatgaacta

SEQ ID NO: 139146 - DNA, 19 bp, Homo sapiens
  siRNA target sequence for CAPN9 (NM_006615.1,2113-2131).
ctctcagtacaaagaacaa

SEQ ID NO: 139147 - DNA, 19 bp, Homo sapiens
  siRNA target sequence for CAPN9 (NM_006615.1,2138-2156).
cattcatctcaatataaat

SEQ ID NO: 139148 - DNA, 19 bp, Homo sapiens
  siRNA target sequence for CAPNS1 (NM_001749.1,455-473).
gcagttccggagactcttt

SEQ ID NO: 139149 - DNA, 19 bp, Homo sapiens
  siRNA target sequence for CAPNS1 (NM_001749.1,505-523).
gcgccacagaactcatgaa

SEQ ID NO: 139150 - DNA, 19 bp, Homo sapiens
  siRNA target sequence for CAPNS1 (NM_001749.1,544-562).
cacgacaccctgatctgaa

SEQ ID NO: 139151 - DNA, 19 bp, Homo sapiens
  siRNA target sequence for CAPNS1 (NM_001749.1,676-694).
ggtggcaggccatatacaa

SEQ ID NO: 139152 - DNA, 19 bp, Homo sapiens
  siRNA target sequence for CAPNS1 (NM_001749.1,679-697).
ggcaggccatatacaaaca

SEQ ID NO: 139153 - DNA, 19 bp, Homo sapiens
  siRNA target sequence for CAPNS1 (NM_001749.1,711-729).
cgatcagggaccatttgca

SEQ ID NO: 139154 - DNA, 19 bp, Homo sapiens
  siRNA target sequence for CAPNS1 (NM_001749.1,760-778).
cagggttccacctgaatga

SEQ ID NO: 139155 - DNA, 19 bp, Homo sapiens
  siRNA target sequence for CAPNS1 (NM_001749.1,770-788).
cctgaatgagcatctctat

SEQ ID NO: 139156 - DNA, 19 bp, Homo sapiens
  siRNA target sequence for CAPNS1 (NM_001749.1,771-789).
ctgaatgagcatctctata

SEQ ID NO: 139157 - DNA, 19 bp, Homo sapiens
  siRNA target sequence for CAPNS1 (NM_001749.1,777-795).
gagcatctctataacatga

SEQ ID NO: 139158 - DNA, 19 bp, Homo sapiens
  siRNA target sequence for CAPNS1 (NM_001749.1,780-798).
catctctataacatgatca

SEQ ID NO: 139159 - DNA, 19 bp, Homo sapiens
  siRNA target sequence for CAPNS1 (NM_001749.1,800-818).
ccgacgctactcagatgaa

SEQ ID NO: 139160 - DNA, 19 bp, Homo sapiens
  siRNA target sequence for CAPNS1 (NM_001749.1,801-819).
cgacgctactcagatgaaa

SEQ ID NO: 139161 - DNA, 19 bp, Homo sapiens
  siRNA target sequence for CAPNS1 (NM_001749.1,820-838).
gtgggaacatggattttga

SEQ ID NO: 139162 - DNA, 19 bp, Homo sapiens
  siRNA target sequence for CAPNS1 (NM_001749.1,913-931).
gacaaatccaggtgaacat

SEQ ID NO: 139163 - DNA, 19 bp, Homo sapiens
  siRNA target sequence for CAPNS2 (NM_032330.1,267-285).
ctcccactcagcagcattt

SEQ ID NO: 139164 - DNA, 19 bp, Homo sapiens
  siRNA target sequence for CAPNS2 (NM_032330.1,321-339).
ggcgatttcggcaacaatt

SEQ ID NO: 139165 - DNA, 19 bp, Homo sapiens
  siRNA target sequence for CAPNS2 (NM_032330.1,322-340).
gcgatttcggcaacaattt

SEQ ID NO: 139166 - DNA, 19 bp, Homo sapiens
  siRNA target sequence for CAPNS2 (NM_032330.1,323-341).
cgatttcggcaacaattta

SEQ ID NO: 139167 - DNA, 19 bp, Homo sapiens
  siRNA target sequence for CAPNS2 (NM_032330.1,425-443).
cttaagactgacggtttta

SEQ ID NO: 139168 - DNA, 19 bp, Homo sapiens
  siRNA target sequence for CAPNS2 (NM_032330.1,430-448).
gactgacggttttagtctt

SEQ ID NO: 139169 - DNA, 19 bp, Homo sapiens
  siRNA target sequence for CAPNS2 (NM_032330.1,624-642).
ccgcaggcttccagctaaa

SEQ ID NO: 139170 - DNA, 19 bp, Homo sapiens
  siRNA target sequence for CAPNS2 (NM_032330.1,625-643).
cgcaggcttccagctaaat

SEQ ID NO: 139171 - DNA, 19 bp, Homo sapiens
  siRNA target sequence for CAPNS2 (NM_032330.1,644-662).
gaacaactttaccaaatga

SEQ ID NO: 139172 - DNA, 19 bp, Homo sapiens
  siRNA target sequence for CAPNS2 (NM_032330.1,670-688).
ccggtatgctaatgaagat

SEQ ID NO: 139173 - DNA, 19 bp, Homo sapiens
  siRNA target sequence for CAPNS2 (NM_032330.1,727-745).
ccgcctggatgccatgttt

SEQ ID NO: 139174 - DNA, 19 bp, Homo sapiens
  siRNA target sequence for CAPNS2 (NM_032330.1,774-792).
gagatggcctgattcaagt

SEQ ID NO: 139175 - DNA, 19 bp, Homo sapiens
  siRNA target sequence for CAPNS2 (NM_032330.1,780-798).
gcctgattcaagtgtctat

SEQ ID NO: 139176 - DNA, 19 bp, Homo sapiens
  siRNA target sequence for CAPNS2 (NM_032330.1,784-802).
gattcaagtgtctatcaaa

SEQ ID NO: 139177 - DNA, 19 bp, Homo sapiens
  siRNA target sequence for CAPNS2 (NM_032330.1,788-806).
caagtgtctatcaaagaat

SEQ ID NO: 139178 - DNA, 19 bp, Homo sapiens
  siRNA target sequence for CAPS (NM_004058.2,207-225).
ggtttttccgccaactaga

SEQ ID NO: 139179 - DNA, 19 bp, Homo sapiens
  siRNA target sequence for CAPS (NM_004058.2,605-623).
gaattccaggactactaca

SEQ ID NO: 139180 - DNA, 19 bp, Homo sapiens
  siRNA target sequence for CAPS2 (NM_032606.2,1117-1135).
gatgacacctcttcgattt

SEQ ID NO: 139181 - DNA, 19 bp, Homo sapiens
  siRNA target sequence for CAPS2 (NM_032606.2,1172-1190).
cattctacattaactgaaa

SEQ ID NO: 139182 - DNA, 19 bp, Homo sapiens
  siRNA target sequence for CAPS2 (NM_032606.2,1200-1218).
ctcataaattacagtttga

SEQ ID NO: 139183 - DNA, 19 bp, Homo sapiens
  siRNA target sequence for CAPS2 (NM_032606.2,1225-1243).
gatcgtatcacgtaatgga

SEQ ID NO: 139184 - DNA, 19 bp, Homo sapiens
  siRNA target sequence for CAPS2 (NM_032606.2,1259-1277).
gagctcattgggttctttt

SEQ ID NO: 139185 - DNA, 19 bp, Homo sapiens
  siRNA target sequence for CAPS2 (NM_032606.2,1313-1331).
cgacaatttgggaaaaata

SEQ ID NO: 139186 - DNA, 19 bp, Homo sapiens
  siRNA target sequence for CAPS2 (NM_032606.2,1424-1442).
gttggtgcaaccttgacat

SEQ ID NO: 139187 - DNA, 19 bp, Homo sapiens
  siRNA target sequence for CAPS2 (NM_032606.2,1496-1514).
cttaaactccgaatcacaa

SEQ ID NO: 139188 - DNA, 19 bp, Homo sapiens
  siRNA target sequence for CAPS2 (NM_032606.2,1520-1538).
gatcaaatagctttggatt

SEQ ID NO: 139189 - DNA, 19 bp, Homo sapiens
  siRNA target sequence for CAPS2 (NM_032606.2,1599-1617).
ggctggtcttcaaagcaat

SEQ ID NO: 139190 - DNA, 19 bp, Homo sapiens
  siRNA target sequence for CAPS2 (NM_032606.2,1668-1686).
ctggattgggaaaatattt

SEQ ID NO: 139191 - DNA, 19 bp, Homo sapiens
  siRNA target sequence for CAPS2 (NM_032606.2,1791-1809).
catggctaattctgaatga

SEQ ID NO: 139192 - DNA, 19 bp, Homo sapiens
  siRNA target sequence for CAPS2 (NM_032606.2,1843-1861).
caaacgtggtattattggt

SEQ ID NO: 139193 - DNA, 19 bp, Homo sapiens
  siRNA target sequence for CAPS2 (NM_032606.2,1851-1869).
gtattattggtgaaatgaa

SEQ ID NO: 139194 - DNA, 19 bp, Homo sapiens
  siRNA target sequence for CAPS2 (NM_032606.2,1878-1896).
ggaaatcatatgttcgaaa

SEQ ID NO: 139195 - DNA, 19 bp, Homo sapiens
  siRNA target sequence for CAPS2 (NM_032606.2,1889-1907).
gttcgaaaggcctttatga

SEQ ID NO: 139196 - DNA, 19 bp, Homo sapiens
  siRNA target sequence for CAPS2 (NM_032606.2,1893-1911).
gaaaggcctttatgaaact

SEQ ID NO: 139197 - DNA, 19 bp, Homo sapiens
  siRNA target sequence for CAPS2 (NM_032606.2,1936-1954).
gcctattataaacataaga

SEQ ID NO: 139198 - DNA, 19 bp, Homo sapiens
  siRNA target sequence for CAPS2 (NM_032606.2,1972-1990).
gaagcattctcaagtaatt

SEQ ID NO: 139199 - DNA, 19 bp, Homo sapiens
  siRNA target sequence for CAPS2 (NM_032606.2,1985-2003).
gtaatttcaggccattcaa

SEQ ID NO: 139200 - DNA, 19 bp, Homo sapiens
  siRNA target sequence for CAPS2 (NM_032606.2,2059-2077).
gtctgatgaagtgtcatat

SEQ ID NO: 139201 - DNA, 19 bp, Homo sapiens
  siRNA target sequence for CAPS2 (NM_032606.2,2078-2096).
ggtgaatttgaagattact

SEQ ID NO: 139202 - DNA, 19 bp, Homo sapiens
  siRNA target sequence for CAPS2 (NM_032606.2,2099-2117).
gaaggtttaagtataggaa

SEQ ID NO: 139203 - DNA, 19 bp, Homo sapiens
  siRNA target sequence for CAPS2 (NM_032606.2,2103-2121).
gtttaagtataggaatagt

SEQ ID NO: 139204 - DNA, 19 bp, Homo sapiens
  siRNA target sequence for CBARA1 (NM_006077.1,155-173).
ccagatccggcgaagacta

SEQ ID NO: 139205 - DNA, 19 bp, Homo sapiens
  siRNA target sequence for CBARA1 (NM_006077.1,156-174).
cagatccggcgaagactaa

SEQ ID NO: 139206 - DNA, 19 bp, Homo sapiens
  siRNA target sequence for CBARA1 (NM_006077.1,208-226).
ctgcaagtactggtctttt

SEQ ID NO: 139207 - DNA, 19 bp, Homo sapiens
  siRNA target sequence for CBARA1 (NM_006077.1,210-228).
gcaagtactggtcttttgt

SEQ ID NO: 139208 - DNA, 19 bp, Homo sapiens
  siRNA target sequence for CBARA1 (NM_006077.1,250-268).
ctccaccatgtgtagacaa

SEQ ID NO: 139209 - DNA, 19 bp, Homo sapiens
  siRNA target sequence for CBARA1 (NM_006077.1,255-273).
ccatgtgtagacaacctaa

SEQ ID NO: 139210 - DNA, 19 bp, Homo sapiens
  siRNA target sequence for CBARA1 (NM_006077.1,256-274).
catgtgtagacaacctaaa

SEQ ID NO: 139211 - DNA, 19 bp, Homo sapiens
  siRNA target sequence for CBARA1 (NM_006077.1,352-370).
cccctcacccagaagagaa

SEQ ID NO: 139212 - DNA, 19 bp, Homo sapiens
  siRNA target sequence for CBARA1 (NM_006077.1,377-395).
gaaacgttctggattcaga

SEQ ID NO: 139213 - DNA, 19 bp, Homo sapiens
  siRNA target sequence for CBARA1 (NM_006077.1,434-452).
ctactccacgccagacaaa

SEQ ID NO: 139214 - DNA, 19 bp, Homo sapiens
  siRNA target sequence for CBARA1 (NM_006077.1,439-457).
ccacgccagacaaaatctt

SEQ ID NO: 139215 - DNA, 19 bp, Homo sapiens
  siRNA target sequence for CBARA1 (NM_006077.1,493-511).
ctggtgaagcagaagtgtt

SEQ ID NO: 139216 - DNA, 19 bp, Homo sapiens
  siRNA target sequence for CBARA1 (NM_006077.1,498-516).
gaagcagaagtgtttatga

SEQ ID NO: 139217 - DNA, 19 bp, Homo sapiens
  siRNA target sequence for CBARA1 (NM_006077.1,525-543).
gattttgtgcgatccataa

SEQ ID NO: 139218 - DNA, 19 bp, Homo sapiens
  siRNA target sequence for CBARA1 (NM_006077.1,538-556).
ccataacacccaatgaaaa

SEQ ID NO: 139219 - DNA, 19 bp, Homo sapiens
  siRNA target sequence for CBARA1 (NM_006077.1,567-585).
cacttgggtctggatcaat

SEQ ID NO: 139220 - DNA, 19 bp, Homo sapiens
  siRNA target sequence for CBARA1 (NM_006077.1,569-587).
cttgggtctggatcaatat

SEQ ID NO: 139221 - DNA, 19 bp, Homo sapiens
  siRNA target sequence for CBARA1 (NM_006077.1,572-590).
gggtctggatcaatatata

SEQ ID NO: 139222 - DNA, 19 bp, Homo sapiens
  siRNA target sequence for CBARA1 (NM_006077.1,573-591).
ggtctggatcaatatataa

SEQ ID NO: 139223 - DNA, 19 bp, Homo sapiens
  siRNA target sequence for CBARA1 (NM_006077.1,574-592).
gtctggatcaatatataat

SEQ ID NO: 139224 - DNA, 19 bp, Homo sapiens
  siRNA target sequence for CBARA1 (NM_006077.1,626-644).
ccaggaacgagaaaaattt

SEQ ID NO: 139225 - DNA, 19 bp, Homo sapiens
  siRNA target sequence for CBARA1 (NM_006077.1,629-647).
ggaacgagaaaaatttgct

SEQ ID NO: 139226 - DNA, 19 bp, Homo sapiens
  siRNA target sequence for CBARA1 (NM_006077.1,651-669).
gaaggcagtatattttaca

SEQ ID NO: 139227 - DNA, 19 bp, Homo sapiens
  siRNA target sequence for CBARA1 (NM_006077.1,685-703).
ggctcatatccttttcaga

SEQ ID NO: 139228 - DNA, 19 bp, Homo sapiens
  siRNA target sequence for CBARA1 (NM_006077.1,731-749).
cactcctcagagaaatttt

SEQ ID NO: 139229 - DNA, 19 bp, Homo sapiens
  siRNA target sequence for CBARA1 (NM_006077.1,860-878).
cagagatcgtccaactact

SEQ ID NO: 139230 - DNA, 19 bp, Homo sapiens
  siRNA target sequence for CBARA1 (NM_006077.1,982-1000).
gtaaactgcagcatgatgt

SEQ ID NO: 139231 - DNA, 19 bp, Homo sapiens
  siRNA target sequence for CBARA1 (NM_006077.1,1028-1046).
ccctgtggatgggagaatt

SEQ ID NO: 139232 - DNA, 19 bp, Homo sapiens
  siRNA target sequence for CBARA1 (NM_006077.1,1147-1165).
gaaagggtctgacatttca

SEQ ID NO: 139233 - DNA, 19 bp, Homo sapiens
  siRNA target sequence for CBARA1 (NM_006077.1,1175-1193).
gaacttctttactttccta

SEQ ID NO: 139234 - DNA, 19 bp, Homo sapiens
  siRNA target sequence for CBARA1 (NM_006077.1,1209-1227).
gtggacactgcattgagtt

SEQ ID NO: 139235 - DNA, 19 bp, Homo sapiens
  siRNA target sequence for CBARA1 (NM_006077.1,1211-1229).
ggacactgcattgagtttt

SEQ ID NO: 139236 - DNA, 19 bp, Homo sapiens
  siRNA target sequence for CBARA1 (NM_006077.1,1357-1375).
gcgaactgagcaataagga

SEQ ID NO: 139237 - DNA, 19 bp, Homo sapiens
  siRNA target sequence for CBARA1 (NM_006077.1,1451-1469).
gcaggccatgtggaaatgt

SEQ ID NO: 139238 - DNA, 19 bp, Homo sapiens
  siRNA target sequence for CD164L1 (NM_020404.1,561-579).
gtctccacagagtttgagt

SEQ ID NO: 139239 - DNA, 19 bp, Homo sapiens
  siRNA target sequence for CD164L1 (NM_020404.1,727-745).
gctgcgaacacgaatgtgt

SEQ ID NO: 139240 - DNA, 19 bp, Homo sapiens
  siRNA target sequence for CD164L1 (NM_020404.1,996-1014).
ggtggcttcgagtgttatt

SEQ ID NO: 139241 - DNA, 19 bp, Homo sapiens
  siRNA target sequence for CD164L1 (NM_020404.1,999-1017).
ggcttcgagtgttattgta

SEQ ID NO: 139242 - DNA, 19 bp, Homo sapiens
  siRNA target sequence for CD164L1 (NM_020404.1,1454-1472).
cgtgatcgcagccaactat

SEQ ID NO: 139243 - DNA, 19 bp, Homo sapiens
  siRNA target sequence for CD164L1 (NM_020404.1,1489-1507).
cctaccaacccggtattct

SEQ ID NO: 139244 - DNA, 19 bp, Homo sapiens
  siRNA target sequence for CD164L1 (NM_020404.1,1542-1560).
cagccccctatgatctcaa

SEQ ID NO: 139245 - DNA, 19 bp, Homo sapiens
  siRNA target sequence for CD164L1 (NM_020404.1,1586-1604).
ccaccagtcccccatgttt

SEQ ID NO: 139246 - DNA, 19 bp, Homo sapiens
  siRNA target sequence for CD164L1 (NM_020404.1,1741-1759).
ccacccagcttcccattat

SEQ ID NO: 139247 - DNA, 19 bp, Homo sapiens
  siRNA target sequence for CD164L1 (NM_020404.1,1909-1927).
ctacacatccccattccaa

SEQ ID NO: 139248 - DNA, 19 bp, Homo sapiens
  siRNA target sequence for CD164L1 (NM_020404.1,2081-2099).
ggtgccaacgtgtgtcttt

SEQ ID NO: 139249 - DNA, 19 bp, Homo sapiens
  siRNA target sequence for CD97 (NM_001784.2,782-800).
ctctcaaaccttgaagata

SEQ ID NO: 139250 - DNA, 19 bp, Homo sapiens
  siRNA target sequence for CD97 (NM_001784.2,894-912).
gggacaagaacgtcactat

SEQ ID NO: 139251 - DNA, 19 bp, Homo sapiens
  siRNA target sequence for CD97 (NM_001784.2,926-944).
gcacgcatgaagctgaatt

SEQ ID NO: 139252 - DNA, 19 bp, Homo sapiens
  siRNA target sequence for CD97 (NM_001784.2,1061-1079).
gccgaactggaggagatat

SEQ ID NO: 139253 - DNA, 19 bp, Homo sapiens
  siRNA target sequence for CD97 (NM_001784.2,1062-1080).
ccgaactggaggagatata

SEQ ID NO: 139254 - DNA, 19 bp, Homo sapiens
  siRNA target sequence for CD97 (NM_001784.2,1063-1081).
cgaactggaggagatatat

SEQ ID NO: 139255 - DNA, 19 bp, Homo sapiens
  siRNA target sequence for CD97 (NM_001784.2,1383-1401).
gcagctttgcgatccttat

SEQ ID NO: 139256 - DNA, 19 bp, Homo sapiens
  siRNA target sequence for CD97 (NM_001784.2,1392-1410).
cgatccttatggctcatta

SEQ ID NO: 139257 - DNA, 19 bp, Homo sapiens
  siRNA target sequence for CD97 (NM_001784.2,1393-1411).
gatccttatggctcattat

SEQ ID NO: 139258 - DNA, 19 bp, Homo sapiens
  siRNA target sequence for CD97 (NM_001784.2,1796-1814).
gtctcggctgccatctaca

SEQ ID NO: 139259 - DNA, 19 bp, Homo sapiens
  siRNA target sequence for CD97 (NM_001784.2,2086-2104).
ggtgctgacctatgtgttt

SEQ ID NO: 139260 - DNA, 19 bp, Homo sapiens
  siRNA target sequence for CD97 (NM_001784.2,2090-2108).
ctgacctatgtgtttacca

SEQ ID NO: 139261 - DNA, 19 bp, Homo sapiens
  siRNA target sequence for CD97 (NM_001784.2,2204-2222).
gctggggggagcaagtact

SEQ ID NO: 139262 - DNA, 19 bp, Homo sapiens
  siRNA target sequence for CD97 (NM_001784.2,2211-2229).
ggagcaagtactcagaatt

SEQ ID NO: 139263 - DNA, 19 bp, Homo sapiens
  siRNA target sequence for CDH1 (NM_004360.2,274-292).
cgtcctgggcagagtgaat

SEQ ID NO: 139264 - DNA, 19 bp, Homo sapiens
  siRNA target sequence for CDH1 (NM_004360.2,333-351).
ccctcgacacccgattcaa

SEQ ID NO: 139265 - DNA, 19 bp, Homo sapiens
  siRNA target sequence for CDH1 (NM_004360.2,334-352).
cctcgacacccgattcaaa

SEQ ID NO: 139266 - DNA, 19 bp, Homo sapiens
  siRNA target sequence for CDH1 (NM_004360.2,355-373).
gggcacagatggtgtgatt

SEQ ID NO: 139267 - DNA, 19 bp, Homo sapiens
  siRNA target sequence for CDH1 (NM_004360.2,356-374).
ggcacagatggtgtgatta

SEQ ID NO: 139268 - DNA, 19 bp, Homo sapiens
  siRNA target sequence for CDH1 (NM_004360.2,384-402).
ggcctctacggtttcataa

SEQ ID NO: 139269 - DNA, 19 bp, Homo sapiens
  siRNA target sequence for CDH1 (NM_004360.2,398-416).
cataacccacagatccatt

SEQ ID NO: 139270 - DNA, 19 bp, Homo sapiens
  siRNA target sequence for CDH1 (NM_004360.2,434-452).
gactccacctacagaaagt

SEQ ID NO: 139271 - DNA, 19 bp, Homo sapiens
  siRNA target sequence for CDH1 (NM_004360.2,436-454).
ctccacctacagaaagttt

SEQ ID NO: 139272 - DNA, 19 bp, Homo sapiens
  siRNA target sequence for CDH1 (NM_004360.2,514-532).
ctccgtttctggaatccaa

SEQ ID NO: 139273 - DNA, 19 bp, Homo sapiens
  siRNA target sequence for CDH1 (NM_004360.2,722-740).
ccccctgttggtgtcttta

SEQ ID NO: 139274 - DNA, 19 bp, Homo sapiens
  siRNA target sequence for CDH1 (NM_004360.2,723-741).
cccctgttggtgtctttat

SEQ ID NO: 139275 - DNA, 19 bp, Homo sapiens
  siRNA target sequence for CDH1 (NM_004360.2,731-749).
ggtgtctttattattgaaa

SEQ ID NO: 139276 - DNA, 19 bp, Homo sapiens
  siRNA target sequence for CDH1 (NM_004360.2,791-809).
gaacgcattgccacataca

SEQ ID NO: 139277 - DNA, 19 bp, Homo sapiens
  siRNA target sequence for CDH1 (NM_004360.2,874-892).
cacggtaaccgatcagaat

SEQ ID NO: 139278 - DNA, 19 bp, Homo sapiens
  siRNA target sequence for CDH1 (NM_004360.2,876-894).
cggtaaccgatcagaatga

SEQ ID NO: 139279 - DNA, 19 bp, Homo sapiens
  siRNA target sequence for CDH1 (NM_004360.2,878-896).
gtaaccgatcagaatgaca

SEQ ID NO: 139280 - DNA, 19 bp, Homo sapiens
  siRNA target sequence for CDH1 (NM_004360.2,893-911).
gacaacaagcccgaattca

SEQ ID NO: 139281 - DNA, 19 bp, Homo sapiens
  siRNA target sequence for CDH1 (NM_004360.2,1049-1067).
cctgagctccctgacaaaa

SEQ ID NO: 139282 - DNA, 19 bp, Homo sapiens
  siRNA target sequence for CDH1 (NM_004360.2,1052-1070).
gagctccctgacaaaaata

SEQ ID NO: 139283 - DNA, 19 bp, Homo sapiens
  siRNA target sequence for CDH1 (NM_004360.2,1055-1073).
ctccctgacaaaaatatgt

SEQ ID NO: 139284 - DNA, 19 bp, Homo sapiens
  siRNA target sequence for CDH1 (NM_004360.2,1130-1148).
gagagtttccctacgtata

SEQ ID NO: 139285 - DNA, 19 bp, Homo sapiens
  siRNA target sequence for CDH1 (NM_004360.2,1232-1250).
gataatcctccgatcttca

SEQ ID NO: 139286 - DNA, 19 bp, Homo sapiens
  siRNA target sequence for CDH1 (NM_004360.2,1286-1304).
gaggctaacgtcgtaatca

SEQ ID NO: 139287 - DNA, 19 bp, Homo sapiens
  siRNA target sequence for CDH1 (NM_004360.2,1346-1364).
gcgtgggaggctgtataca

SEQ ID NO: 139288 - DNA, 19 bp, Homo sapiens
  siRNA target sequence for CDH1 (NM_004360.2,1355-1373).
gctgtatacaccatattga

SEQ ID NO: 139289 - DNA, 19 bp, Homo sapiens
  siRNA target sequence for CDH1 (NM_004360.2,1356-1374).
ctgtatacaccatattgaa

SEQ ID NO: 139290 - DNA, 19 bp, Homo sapiens
  siRNA target sequence for CDH1 (NM_004360.2,1420-1438).
cgatggcattttgaaaaca

SEQ ID NO: 139291 - DNA, 19 bp, Homo sapiens
  siRNA target sequence for CDH1 (NM_004360.2,1459-1477).
ggccaagcagcagtacatt

SEQ ID NO: 139292 - DNA, 19 bp, Homo sapiens
  siRNA target sequence for CDH1 (NM_004360.2,1461-1479).
ccaagcagcagtacattct

SEQ ID NO: 139293 - DNA, 19 bp, Homo sapiens
  siRNA target sequence for CDH1 (NM_004360.2,1492-1510).
gacgaatgtggtacctttt

SEQ ID NO: 139294 - DNA, 19 bp, Homo sapiens
  siRNA target sequence for CDH1 (NM_004360.2,1494-1512).
cgaatgtggtaccttttga

SEQ ID NO: 139295 - DNA, 19 bp, Homo sapiens
  siRNA target sequence for CDH1 (NM_004360.2,1564-1582).
gaatgaagcccccatcttt

SEQ ID NO: 139296 - DNA, 19 bp, Homo sapiens
  siRNA target sequence for CDH1 (NM_004360.2,1622-1640).
ggcgtgggccaggaaatca

SEQ ID NO: 139297 - DNA, 19 bp, Homo sapiens
  siRNA target sequence for CDH1 (NM_004360.2,1714-1732).
caactggctggagattaat

SEQ ID NO: 139298 - DNA, 19 bp, Homo sapiens
  siRNA target sequence for CDH1 (NM_004360.2,1803-1821).
cgtacacagccctaatcat

SEQ ID NO: 139299 - DNA, 19 bp, Homo sapiens
  siRNA target sequence for CDH1 (NM_004360.2,1907-1925).
ccagaacctcgaactatat

SEQ ID NO: 139300 - DNA, 19 bp, Homo sapiens
  siRNA target sequence for CDH1 (NM_004360.2,1908-1926).
cagaacctcgaactatatt

SEQ ID NO: 139301 - DNA, 19 bp, Homo sapiens
  siRNA target sequence for CDH1 (NM_004360.2,1910-1928).
gaacctcgaactatattct

SEQ ID NO: 139302 - DNA, 19 bp, Homo sapiens
  siRNA target sequence for CDH1 (NM_004360.2,1954-1972).
ggtcataaacatcattgat

SEQ ID NO: 139303 - DNA, 19 bp, Homo sapiens
  siRNA target sequence for CDH1 (NM_004360.2,1976-1994).
gaccttcctcccaatacat

SEQ ID NO: 139304 - DNA, 19 bp, Homo sapiens
  siRNA target sequence for CDH1 (NM_004360.2,2053-2071).
cgacccaacccaagaatct

SEQ ID NO: 139305 - DNA, 19 bp, Homo sapiens
  siRNA target sequence for CDH1 (NM_004360.2,2054-2072).
gacccaacccaagaatcta

SEQ ID NO: 139306 - DNA, 19 bp, Homo sapiens
  siRNA target sequence for CDH1 (NM_004360.2,2058-2076).
caacccaagaatctatcat

SEQ ID NO: 139307 - DNA, 19 bp, Homo sapiens
  siRNA target sequence for CDH1 (NM_004360.2,2129-2147).
ctcatggataaccagaata

SEQ ID NO: 139308 - DNA, 19 bp, Homo sapiens
  siRNA target sequence for CDH1 (NM_004360.2,2225-2243).
gtcgaagcaggattgcaaa

SEQ ID NO: 139309 - DNA, 19 bp, Homo sapiens
  siRNA target sequence for CDH1 (NM_004360.2,2227-2245).
cgaagcaggattgcaaatt

SEQ ID NO: 139310 - DNA, 19 bp, Homo sapiens
  siRNA target sequence for CDH1 (NM_004360.2,2270-2288).
ggaattcttgctttgctaa

SEQ ID NO: 139311 - DNA, 19 bp, Homo sapiens
  siRNA target sequence for CDH1 (NM_004360.2,2365-2383).
cacccgggacaacgtttat

SEQ ID NO: 139312 - DNA, 19 bp, Homo sapiens
  siRNA target sequence for CDH1 (NM_004360.2,2369-2387).
cgggacaacgtttattact

SEQ ID NO: 139313 - DNA, 19 bp, Homo sapiens
  siRNA target sequence for CDH1 (NM_004360.2,2377-2395).
cgtttattactatgatgaa

SEQ ID NO: 139314 - DNA, 19 bp, Homo sapiens
  siRNA target sequence for CDH1 (NM_004360.2,2525-2543).
cctgccaatcccgatgaaa

SEQ ID NO: 139315 - DNA, 19 bp, Homo sapiens
  siRNA target sequence for CDH1 (NM_004360.2,2526-2544).
ctgccaatcccgatgaaat

SEQ ID NO: 139316 - DNA, 19 bp, Homo sapiens
  siRNA target sequence for CDH1 (NM_004360.2,2530-2548).
caatcccgatgaaattgga

SEQ ID NO: 139317 - DNA, 19 bp, Homo sapiens
  siRNA target sequence for CDH1 (NM_004360.2,2534-2552).
cccgatgaaattggaaatt

SEQ ID NO: 139318 - DNA, 19 bp, Homo sapiens
  siRNA target sequence for CDH1 (NM_004360.2,2671-2689).
ctcctcagagtcagacaaa

SEQ ID NO: 139319 - DNA, 19 bp, Homo sapiens
  siRNA target sequence for CDH10 (NM_006727.2,337-355).
caatacatcaatttttgct

SEQ ID NO: 139320 - DNA, 19 bp, Homo sapiens
  siRNA target sequence for CDH10 (NM_006727.2,421-439).
ctgtgccacagcaaagaat

SEQ ID NO: 139321 - DNA, 19 bp, Homo sapiens
  siRNA target sequence for CDH10 (NM_006727.2,518-536).
cttacttgaagaatataca

SEQ ID NO: 139322 - DNA, 19 bp, Homo sapiens
  siRNA target sequence for CDH10 (NM_006727.2,554-572).
cgtaggcaagctacattca

SEQ ID NO: 139323 - DNA, 19 bp, Homo sapiens
  siRNA target sequence for CDH10 (NM_006727.2,618-636).
gatggagctggtactcttt

SEQ ID NO: 139324 - DNA, 19 bp, Homo sapiens
  siRNA target sequence for CDH10 (NM_006727.2,621-639).
ggagctggtactcttttta

SEQ ID NO: 139325 - DNA, 19 bp, Homo sapiens
  siRNA target sequence for CDH10 (NM_006727.2,622-640).
gagctggtactctttttat

SEQ ID NO: 139326 - DNA, 19 bp, Homo sapiens
  siRNA target sequence for CDH10 (NM_006727.2,669-687).
gccacaaggcgaattgata

SEQ ID NO: 139327 - DNA, 19 bp, Homo sapiens
  siRNA target sequence for CDH10 (NM_006727.2,709-727).
ctctacgcgcacaagctat

SEQ ID NO: 139328 - DNA, 19 bp, Homo sapiens
  siRNA target sequence for CDH10 (NM_006727.2,711-729).
ctacgcgcacaagctatta

SEQ ID NO: 139329 - DNA, 19 bp, Homo sapiens
  siRNA target sequence for CDH10 (NM_006727.2,714-732).
cgcgcacaagctattaaca

SEQ ID NO: 139330 - DNA, 19 bp, Homo sapiens
  siRNA target sequence for CDH10 (NM_006727.2,716-734).
cgcacaagctattaacaga

SEQ ID NO: 139331 - DNA, 19 bp, Homo sapiens
  siRNA target sequence for CDH10 (NM_006727.2,803-821).
gccaacgttcccagaagaa

SEQ ID NO: 139332 - DNA, 19 bp, Homo sapiens
  siRNA target sequence for CDH10 (NM_006727.2,808-826).
cgttcccagaagaaatcta

SEQ ID NO: 139333 - DNA, 19 bp, Homo sapiens
  siRNA target sequence for CDH10 (NM_006727.2,809-827).
gttcccagaagaaatctat

SEQ ID NO: 139334 - DNA, 19 bp, Homo sapiens
  siRNA target sequence for CDH10 (NM_006727.2,812-830).
cccagaagaaatctataca

SEQ ID NO: 139335 - DNA, 19 bp, Homo sapiens
  siRNA target sequence for CDH10 (NM_006727.2,993-1011).
gctttaccgaacatgaaca

SEQ ID NO: 139336 - DNA, 19 bp, Homo sapiens
  siRNA target sequence for CDH10 (NM_006727.2,1000-1018).
cgaacatgaacagagaaaa

SEQ ID NO: 139337 - DNA, 19 bp, Homo sapiens
  siRNA target sequence for CDH10 (NM_006727.2,1155-1173).
catcttcgagttcttgaat

SEQ ID NO: 139338 - DNA, 19 bp, Homo sapiens
  siRNA target sequence for CDH10 (NM_006727.2,1182-1200).
gttggcacagccattggaa

SEQ ID NO: 139339 - DNA, 19 bp, Homo sapiens
  siRNA target sequence for CDH10 (NM_006727.2,1260-1278).
gatggtgacggtactgata

SEQ ID NO: 139340 - DNA, 19 bp, Homo sapiens
  siRNA target sequence for CDH10 (NM_006727.2,1263-1281).
ggtgacggtactgatatgt

SEQ ID NO: 139341 - DNA, 19 bp, Homo sapiens
  siRNA target sequence for CDH10 (NM_006727.2,1264-1282).
gtgacggtactgatatgtt

SEQ ID NO: 139342 - DNA, 19 bp, Homo sapiens
  siRNA target sequence for CDH10 (NM_006727.2,1269-1287).
ggtactgatatgtttgaca

SEQ ID NO: 139343 - DNA, 19 bp, Homo sapiens
  siRNA target sequence for CDH10 (NM_006727.2,1343-1361).
ctatgagagccgaagactt

SEQ ID NO: 139344 - DNA, 19 bp, Homo sapiens
  siRNA target sequence for CDH10 (NM_006727.2,1349-1367).
gagccgaagactttatact

SEQ ID NO: 139345 - DNA, 19 bp, Homo sapiens
  siRNA target sequence for CDH10 (NM_006727.2,1351-1369).
gccgaagactttatactct

SEQ ID NO: 139346 - DNA, 19 bp, Homo sapiens
  siRNA target sequence for CDH10 (NM_006727.2,1357-1375).
gactttatactctgaaagt

SEQ ID NO: 139347 - DNA, 19 bp, Homo sapiens
  siRNA target sequence for CDH10 (NM_006727.2,1392-1410).
catgtagatccccgttttt

SEQ ID NO: 139348 - DNA, 19 bp, Homo sapiens
  siRNA target sequence for CDH10 (NM_006727.2,1395-1413).
gtagatccccgtttttatt

SEQ ID NO: 139349 - DNA, 19 bp, Homo sapiens
  siRNA target sequence for CDH10 (NM_006727.2,1419-1437).
ggaccatttaaagatacta

SEQ ID NO: 139350 - DNA, 19 bp, Homo sapiens
  siRNA target sequence for CDH10 (NM_006727.2,1438-1456).
ccatagtgaaaatctctat

SEQ ID NO: 139351 - DNA, 19 bp, Homo sapiens
  siRNA target sequence for CDH10 (NM_006727.2,1439-1457).
catagtgaaaatctctata

SEQ ID NO: 139352 - DNA, 19 bp, Homo sapiens
  siRNA target sequence for CDH10 (NM_006727.2,1466-1484).
ggatgaacctcctgttttt

SEQ ID NO: 139353 - DNA, 19 bp, Homo sapiens
  siRNA target sequence for CDH10 (NM_006727.2,1486-1504).
gtaggtcctcctatctgtt

SEQ ID NO: 139354 - DNA, 19 bp, Homo sapiens
  siRNA target sequence for CDH10 (NM_006727.2,1489-1507).
ggtcctcctatctgtttga

SEQ ID NO: 139355 - DNA, 19 bp, Homo sapiens
  siRNA target sequence for CDH10 (NM_006727.2,1532-1550).
cacaatcattggtactgta

SEQ ID NO: 139356 - DNA, 19 bp, Homo sapiens
  siRNA target sequence for CDH10 (NM_006727.2,1553-1571).
ggcaagggacccagattct

SEQ ID NO: 139357 - DNA, 19 bp, Homo sapiens
  siRNA target sequence for CDH10 (NM_006727.2,1579-1597).
gccccattagattttcctt

SEQ ID NO: 139358 - DNA, 19 bp, Homo sapiens
  siRNA target sequence for CDH10 (NM_006727.2,1609-1627).
ctgaccttgacagaatctt

SEQ ID NO: 139359 - DNA, 19 bp, Homo sapiens
  siRNA target sequence for CDH10 (NM_006727.2,1619-1637).
cagaatctttaacattcat

SEQ ID NO: 139360 - DNA, 19 bp, Homo sapiens
  siRNA target sequence for CDH10 (NM_006727.2,1668-1686).
cctcttgaccgtgaactat

SEQ ID NO: 139361 - DNA, 19 bp, Homo sapiens
  siRNA target sequence for CDH10 (NM_006727.2,1707-1725).
gttattgctgctgaaatca

SEQ ID NO: 139362 - DNA, 19 bp, Homo sapiens
  siRNA target sequence for CDH10 (NM_006727.2,1837-1855).
gaccagggcagctaataca

SEQ ID NO: 139363 - DNA, 19 bp, Homo sapiens
  siRNA target sequence for CDH10 (NM_006727.2,1839-1857).
ccagggcagctaatacaga

SEQ ID NO: 139364 - DNA, 19 bp, Homo sapiens
  siRNA target sequence for CDH10 (NM_006727.2,1864-1882).
gtgcagtagacaaagatga

SEQ ID NO: 139365 - DNA, 19 bp, Homo sapiens
  siRNA target sequence for CDH10 (NM_006727.2,1939-1957).
cagtacaggataatgaaga

SEQ ID NO: 139366 - DNA, 19 bp, Homo sapiens
  siRNA target sequence for CDH10 (NM_006727.2,1990-2008).
gattcaatagacatgaaat

SEQ ID NO: 139367 - DNA, 19 bp, Homo sapiens
  siRNA target sequence for CDH10 (NM_006727.2,2030-2048).
ggtgatatcagacaatgat

SEQ ID NO: 139368 - DNA, 19 bp, Homo sapiens
  siRNA target sequence for CDH10 (NM_006727.2,2031-2049).
gtgatatcagacaatgatt

SEQ ID NO: 139369 - DNA, 19 bp, Homo sapiens
  siRNA target sequence for CDH10 (NM_006727.2,2195-2213).
catcattctactggttata

SEQ ID NO: 139370 - DNA, 19 bp, Homo sapiens
  siRNA target sequence for CDH10 (NM_006727.2,2198-2216).
cattctactggttatagta

SEQ ID NO: 139371 - DNA, 19 bp, Homo sapiens
  siRNA target sequence for CDH10 (NM_006727.2,2253-2271).
gagcctctgatcttgtcaa

SEQ ID NO: 139372 - DNA, 19 bp, Homo sapiens
  siRNA target sequence for CDH10 (NM_006727.2,2387-2405).
gctccggcgagatattatt

SEQ ID NO: 139373 - DNA, 19 bp, Homo sapiens
  siRNA target sequence for CDH10 (NM_006727.2,2390-2408).
ccggcgagatattattcca

SEQ ID NO: 139374 - DNA, 19 bp, Homo sapiens
  siRNA target sequence for CDH10 (NM_006727.2,2455-2473).
cggacgtccgggatttcat

SEQ ID NO: 139375 - DNA, 19 bp, Homo sapiens
  siRNA target sequence for CDH10 (NM_006727.2,2456-2474).
ggacgtccgggatttcatt

SEQ ID NO: 139376 - DNA, 19 bp, Homo sapiens
  siRNA target sequence for CDH10 (NM_006727.2,2457-2475).
gacgtccgggatttcatta

SEQ ID NO: 139377 - DNA, 19 bp, Homo sapiens
  siRNA target sequence for CDH10 (NM_006727.2,2459-2477).
cgtccgggatttcattaat

SEQ ID NO: 139378 - DNA, 19 bp, Homo sapiens
  siRNA target sequence for CDH10 (NM_006727.2,2522-2540).
cgactcacttgcaacctat

SEQ ID NO: 139379 - DNA, 19 bp, Homo sapiens
  siRNA target sequence for CDH10 (NM_006727.2,2596-2614).
ctactgaaggagaccaaaa

SEQ ID NO: 139380 - DNA, 19 bp, Homo sapiens
  siRNA target sequence for CDH10 (NM_006727.2,2639-2657).
ccctcggtttaataagcta

SEQ ID NO: 139381 - DNA, 19 bp, Homo sapiens
  siRNA target sequence for CDH11 (NM_001797.2,651-669).
cttgtgggcaggcttcatt

SEQ ID NO: 139382 - DNA, 19 bp, Homo sapiens
  siRNA target sequence for CDH11 (NM_001797.2,680-698).
ctctggtgatgggaacatt

SEQ ID NO: 139383 - DNA, 19 bp, Homo sapiens
  siRNA target sequence for CDH11 (NM_001797.2,682-700).
ctggtgatgggaacattaa

SEQ ID NO: 139384 - DNA, 19 bp, Homo sapiens
  siRNA target sequence for CDH11 (NM_001797.2,687-705).
gatgggaacattaaataca

SEQ ID NO: 139385 - DNA, 19 bp, Homo sapiens
  siRNA target sequence for CDH11 (NM_001797.2,852-870).
gagccaccgtcggaattca

SEQ ID NO: 139386 - DNA, 19 bp, Homo sapiens
  siRNA target sequence for CDH11 (NM_001797.2,854-872).
gccaccgtcggaattcatt

SEQ ID NO: 139387 - DNA, 19 bp, Homo sapiens
  siRNA target sequence for CDH11 (NM_001797.2,856-874).
caccgtcggaattcattgt

SEQ ID NO: 139388 - DNA, 19 bp, Homo sapiens
  siRNA target sequence for CDH11 (NM_001797.2,859-877).
cgtcggaattcattgtcaa

SEQ ID NO: 139389 - DNA, 19 bp, Homo sapiens
  siRNA target sequence for CDH11 (NM_001797.2,911-929).
cctgcacgagacctatcat

SEQ ID NO: 139390 - DNA, 19 bp, Homo sapiens
  siRNA target sequence for CDH11 (NM_001797.2,971-989).
ccaggtgacagcttcagat

SEQ ID NO: 139391 - DNA, 19 bp, Homo sapiens
  siRNA target sequence for CDH11 (NM_001797.2,1009-1027).
gaaatagcgccaagttagt

SEQ ID NO: 139392 - DNA, 19 bp, Homo sapiens
  siRNA target sequence for CDH11 (NM_001797.2,1017-1035).
gccaagttagtgtacagta

SEQ ID NO: 139393 - DNA, 19 bp, Homo sapiens
  siRNA target sequence for CDH11 (NM_001797.2,1018-1036).
ccaagttagtgtacagtat

SEQ ID NO: 139394 - DNA, 19 bp, Homo sapiens
  siRNA target sequence for CDH11 (NM_001797.2,1040-1058).
cgaaggacaaccctatttt

SEQ ID NO: 139395 - DNA, 19 bp, Homo sapiens
  siRNA target sequence for CDH11 (NM_001797.2,1071-1089).
cagacaggtatcatcagaa

SEQ ID NO: 139396 - DNA, 19 bp, Homo sapiens
  siRNA target sequence for CDH11 (NM_001797.2,1337-1355).
cttagtcacatacaatatt

SEQ ID NO: 139397 - DNA, 19 bp, Homo sapiens
  siRNA target sequence for CDH11 (NM_001797.2,1363-1381).
gagatggtatggaatcgtt

SEQ ID NO: 139398 - DNA, 19 bp, Homo sapiens
  siRNA target sequence for CDH11 (NM_001797.2,1388-1406).
cacaacggactatgaaaca

SEQ ID NO: 139399 - DNA, 19 bp, Homo sapiens
  siRNA target sequence for CDH11 (NM_001797.2,1390-1408).
caacggactatgaaacaca

SEQ ID NO: 139400 - DNA, 19 bp, Homo sapiens
  siRNA target sequence for CDH11 (NM_001797.2,1450-1468).
ccaaaagagcctatagctt

SEQ ID NO: 139401 - DNA, 19 bp, Homo sapiens
  siRNA target sequence for CDH11 (NM_001797.2,1491-1509).
cacatcgacccgaagttta

SEQ ID NO: 139402 - DNA, 19 bp, Homo sapiens
  siRNA target sequence for CDH11 (NM_001797.2,1541-1559).
cgtcaagatctcagtagaa

SEQ ID NO: 139403 - DNA, 19 bp, Homo sapiens
  siRNA target sequence for CDH11 (NM_001797.2,1544-1562).
caagatctcagtagaagat

SEQ ID NO: 139404 - DNA, 19 bp, Homo sapiens
  siRNA target sequence for CDH11 (NM_001797.2,1564-1582).
ctgatgagccccctatgtt

SEQ ID NO: 139405 - DNA, 19 bp, Homo sapiens
  siRNA target sequence for CDH11 (NM_001797.2,1671-1689).
gccaacagcccgataaggt

SEQ ID NO: 139406 - DNA, 19 bp, Homo sapiens
  siRNA target sequence for CDH11 (NM_001797.2,1672-1690).
ccaacagcccgataaggta

SEQ ID NO: 139407 - DNA, 19 bp, Homo sapiens
  siRNA target sequence for CDH11 (NM_001797.2,1673-1691).
caacagcccgataaggtat

SEQ ID NO: 139408 - DNA, 19 bp, Homo sapiens
  siRNA target sequence for CDH11 (NM_001797.2,1678-1696).
gcccgataaggtattccat

SEQ ID NO: 139409 - DNA, 19 bp, Homo sapiens
  siRNA target sequence for CDH11 (NM_001797.2,1710-1728).
gacctcgacagatttttca

SEQ ID NO: 139410 - DNA, 19 bp, Homo sapiens
  siRNA target sequence for CDH11 (NM_001797.2,1713-1731).
ctcgacagatttttcacta

SEQ ID NO: 139411 - DNA, 19 bp, Homo sapiens
  siRNA target sequence for CDH11 (NM_001797.2,1858-1876).
ccattagggtccttgatgt

SEQ ID NO: 139412 - DNA, 19 bp, Homo sapiens
  siRNA target sequence for CDH11 (NM_001797.2,1903-1921).
ccccttatgaaggtttcat

SEQ ID NO: 139413 - DNA, 19 bp, Homo sapiens
  siRNA target sequence for CDH11 (NM_001797.2,1905-1923).
ccttatgaaggtttcatct

SEQ ID NO: 139414 - DNA, 19 bp, Homo sapiens
  siRNA target sequence for CDH11 (NM_001797.2,1952-1970).
caaccagccaattgttaca

SEQ ID NO: 139415 - DNA, 19 bp, Homo sapiens
  siRNA target sequence for CDH11 (NM_001797.2,1955-1973).
ccagccaattgttacaatt

SEQ ID NO: 139416 - DNA, 19 bp, Homo sapiens
  siRNA target sequence for CDH11 (NM_001797.2,1956-1974).
cagccaattgttacaatta

SEQ ID NO: 139417 - DNA, 19 bp, Homo sapiens
  siRNA target sequence for CDH11 (NM_001797.2,1958-1976).
gccaattgttacaattagt

SEQ ID NO: 139418 - DNA, 19 bp, Homo sapiens
  siRNA target sequence for CDH11 (NM_001797.2,2023-2041).
gcctaccccctgaaatcat

SEQ ID NO: 139419 - DNA, 19 bp, Homo sapiens
  siRNA target sequence for CDH11 (NM_001797.2,2119-2137).
ggcagaagcaggacttgta

SEQ ID NO: 139420 - DNA, 19 bp, Homo sapiens
  siRNA target sequence for CDH11 (NM_001797.2,2246-2264).
caacgcagaggcctacatt

SEQ ID NO: 139421 - DNA, 19 bp, Homo sapiens
  siRNA target sequence for CDH11 (NM_001797.2,2250-2268).
gcagaggcctacattctga

SEQ ID NO: 139422 - DNA, 19 bp, Homo sapiens
  siRNA target sequence for CDH11 (NM_001797.2,2251-2269).
cagaggcctacattctgaa

SEQ ID NO: 139423 - DNA, 19 bp, Homo sapiens
  siRNA target sequence for CDH11 (NM_001797.2,2322-2340).
ctcctggtcattgtagtat

SEQ ID NO: 139424 - DNA, 19 bp, Homo sapiens
  siRNA target sequence for CDH11 (NM_001797.2,2403-2421).
cgtgagaacatcattactt

SEQ ID NO: 139425 - DNA, 19 bp, Homo sapiens
  siRNA target sequence for CDH11 (NM_001797.2,2480-2498).
gaatcctgatggtatcaat

SEQ ID NO: 139426 - DNA, 19 bp, Homo sapiens
  siRNA target sequence for CDH11 (NM_001797.2,2484-2502).
cctgatggtatcaatggat

SEQ ID NO: 139427 - DNA, 19 bp, Homo sapiens
  siRNA target sequence for CDH11 (NM_001797.2,2575-2593).
gcgtggatgtcgatgactt

SEQ ID NO: 139428 - DNA, 19 bp, Homo sapiens
  siRNA target sequence for CDH11 (NM_001797.2,2580-2598).
gatgtcgatgacttcatca

SEQ ID NO: 139429 - DNA, 19 bp, Homo sapiens
  siRNA target sequence for CDH11 (NM_001797.2,2583-2601).
gtcgatgacttcatcaaca

SEQ ID NO: 139430 - DNA, 19 bp, Homo sapiens
  siRNA target sequence for CDH11 (NM_001797.2,2627-2645).
ccccacggctcctccttat

SEQ ID NO: 139431 - DNA, 19 bp, Homo sapiens
  siRNA target sequence for CDH11 (NM_001797.2,2709-2727).
gagtcggccaccacagatt

SEQ ID NO: 139432 - DNA, 19 bp, Homo sapiens
  siRNA target sequence for CDH11 (NM_001797.2,2711-2729).
gtcggccaccacagattca

SEQ ID NO: 139433 - DNA, 19 bp, Homo sapiens
  siRNA target sequence for CDH11 (NM_001797.2,2728-2746).
cagacttggactatgatta

SEQ ID NO: 139434 - DNA, 19 bp, Homo sapiens
  siRNA target sequence for CDH11 (NM_001797.2,2732-2750).
cttggactatgattatcta

SEQ ID NO: 139435 - DNA, 19 bp, Homo sapiens
  siRNA target sequence for CDH11 (NM_001797.2,2753-2771).
gaactggggacctcgtttt

SEQ ID NO: 139436 - DNA, 19 bp, Homo sapiens
  siRNA target sequence for CDH11 (NM_001797.2,2774-2792).
gaaactagcagatttgtat

SEQ ID NO: 139437 - DNA, 19 bp, Homo sapiens
  siRNA target sequence for CDH11 (NM_001797.2,2797-2815).
ccaaagacacttttgatga

SEQ ID NO: 139438 - DNA, 19 bp, Homo sapiens
  siRNA target sequence for CDH11 (NM_033664.1,2388-2406).
ggcttccagctgatgctat

SEQ ID NO: 139439 - DNA, 19 bp, Homo sapiens
  siRNA target sequence for CDH11 (NM_033664.1,2394-2412).
cagctgatgctattttcct

SEQ ID NO: 139440 - DNA, 19 bp, Homo sapiens
  siRNA target sequence for CDH11 (NM_033664.1,2396-2414).
gctgatgctattttcctat

SEQ ID NO: 139441 - DNA, 19 bp, Homo sapiens
  siRNA target sequence for CDH11 (NM_033664.1,2487-2505).
gagagtccaaccacactta

SEQ ID NO: 139442 - DNA, 19 bp, Homo sapiens
  siRNA target sequence for CDH12 (NM_004061.2,1090-1108).
gcttacaaggaactgttta

SEQ ID NO: 139443 - DNA, 19 bp, Homo sapiens
  siRNA target sequence for CDH12 (NM_004061.2,1214-1232).
ccaggacaacggtcacatt

SEQ ID NO: 139444 - DNA, 19 bp, Homo sapiens
  siRNA target sequence for CDH12 (NM_004061.2,1227-1245).
cacatttccaacgtgttaa

SEQ ID NO: 139445 - DNA, 19 bp, Homo sapiens
  siRNA target sequence for CDH12 (NM_004061.2,1608-1626).
ctgtgggtgcatatgtact

SEQ ID NO: 139446 - DNA, 19 bp, Homo sapiens
  siRNA target sequence for CDH12 (NM_004061.2,1694-1712).
cttcagggacaaccttatt

SEQ ID NO: 139447 - DNA, 19 bp, Homo sapiens
  siRNA target sequence for CDH12 (NM_004061.2,1699-1717).
gggacaaccttatttctct

SEQ ID NO: 139448 - DNA, 19 bp, Homo sapiens
  siRNA target sequence for CDH12 (NM_004061.2,1724-1742).
cccaagacaggtgttatta

SEQ ID NO: 139449 - DNA, 19 bp, Homo sapiens
  siRNA target sequence for CDH12 (NM_004061.2,1726-1744).
caagacaggtgttattaga

SEQ ID NO: 139450 - DNA, 19 bp, Homo sapiens
  siRNA target sequence for CDH12 (NM_004061.2,1743-1761).
gaacagctttgccaaacat

SEQ ID NO: 139451 - DNA, 19 bp, Homo sapiens
  siRNA target sequence for CDH12 (NM_004061.2,1829-1847).
ggattagccggaacaacaa

SEQ ID NO: 139452 - DNA, 19 bp, Homo sapiens
  siRNA target sequence for CDH12 (NM_004061.2,1835-1853).
gccggaacaacaatagtca

SEQ ID NO: 139453 - DNA, 19 bp, Homo sapiens
  siRNA target sequence for CDH12 (NM_004061.2,1836-1854).
ccggaacaacaatagtcaa

SEQ ID NO: 139454 - DNA, 19 bp, Homo sapiens
  siRNA target sequence for CDH12 (NM_004061.2,1839-1857).
gaacaacaatagtcaacat

SEQ ID NO: 139455 - DNA, 19 bp, Homo sapiens
  siRNA target sequence for CDH12 (NM_004061.2,1887-1905).
ctcgattccccaaaagcat

SEQ ID NO: 139456 - DNA, 19 bp, Homo sapiens
  siRNA target sequence for CDH12 (NM_004061.2,1902-1920).
gcatcttccacttgaaagt

SEQ ID NO: 139457 - DNA, 19 bp, Homo sapiens
  siRNA target sequence for CDH12 (NM_004061.2,1941-1959).
gttcagctattggaagaat

SEQ ID NO: 139458 - DNA, 19 bp, Homo sapiens
  siRNA target sequence for CDH12 (NM_004061.2,2018-2036).
ggagatgggggaaatttgt

SEQ ID NO: 139459 - DNA, 19 bp, Homo sapiens
  siRNA target sequence for CDH12 (NM_004061.2,2024-2042).
gggggaaatttgtttgaca

SEQ ID NO: 139460 - DNA, 19 bp, Homo sapiens
  siRNA target sequence for CDH12 (NM_004061.2,2025-2043).
ggggaaatttgtttgacat

SEQ ID NO: 139461 - DNA, 19 bp, Homo sapiens
  siRNA target sequence for CDH12 (NM_004061.2,2047-2065).
cacagatgaggatacacaa

SEQ ID NO: 139462 - DNA, 19 bp, Homo sapiens
  siRNA target sequence for CDH12 (NM_004061.2,2063-2081).
caagagggagtcatcaaat

SEQ ID NO: 139463 - DNA, 19 bp, Homo sapiens
  siRNA target sequence for CDH12 (NM_004061.2,2150-2168).
cttgaccaccggtttcact

SEQ ID NO: 139464 - DNA, 19 bp, Homo sapiens
  siRNA target sequence for CDH12 (NM_004061.2,2208-2226).
gcgtgctggacgtagatga

SEQ ID NO: 139465 - DNA, 19 bp, Homo sapiens
  siRNA target sequence for CDH12 (NM_004061.2,2251-2269).
ctacaccatggaggtttat

SEQ ID NO: 139466 - DNA, 19 bp, Homo sapiens
  siRNA target sequence for CDH12 (NM_004061.2,2334-2352).
gtgctgttaggtacttcat

SEQ ID NO: 139467 - DNA, 19 bp, Homo sapiens
  siRNA target sequence for CDH12 (NM_004061.2,2369-2387).
ggggacagctactttacaa

SEQ ID NO: 139468 - DNA, 19 bp, Homo sapiens
  siRNA target sequence for CDH12 (NM_004061.2,2371-2389).
ggacagctactttacaata

SEQ ID NO: 139469 - DNA, 19 bp, Homo sapiens
  siRNA target sequence for CDH12 (NM_004061.2,2374-2392).
cagctactttacaatagat

SEQ ID NO: 139470 - DNA, 19 bp, Homo sapiens
  siRNA target sequence for CDH12 (NM_004061.2,2403-2421).
gaaccatcgccactaatga

SEQ ID NO: 139471 - DNA, 19 bp, Homo sapiens
  siRNA target sequence for CDH12 (NM_004061.2,2410-2428).
cgccactaatgaattacta

SEQ ID NO: 139472 - DNA, 19 bp, Homo sapiens
  siRNA target sequence for CDH12 (NM_004061.2,2435-2453).
gaaagcactgcgcagtata

SEQ ID NO: 139473 - DNA, 19 bp, Homo sapiens
  siRNA target sequence for CDH12 (NM_004061.2,2439-2457).
gcactgcgcagtataattt

SEQ ID NO: 139474 - DNA, 19 bp, Homo sapiens
  siRNA target sequence for CDH12 (NM_004061.2,2447-2465).
cagtataatttctccataa

SEQ ID NO: 139475 - DNA, 19 bp, Homo sapiens
  siRNA target sequence for CDH12 (NM_004061.2,2458-2476).
ctccataattgcgagtaaa

SEQ ID NO: 139476 - DNA, 19 bp, Homo sapiens
  siRNA target sequence for CDH12 (NM_004061.2,2461-2479).
cataattgcgagtaaagtt

SEQ ID NO: 139477 - DNA, 19 bp, Homo sapiens
  siRNA target sequence for CDH12 (NM_004061.2,2499-2517).
gcaaagtcaatatactgat

SEQ ID NO: 139478 - DNA, 19 bp, Homo sapiens
  siRNA target sequence for CDH12 (NM_004061.2,2500-2518).
caaagtcaatatactgatt

SEQ ID NO: 139479 - DNA, 19 bp, Homo sapiens
  siRNA target sequence for CDH12 (NM_004061.2,2567-2585).
gagacagccgtgtgtgaaa

SEQ ID NO: 139480 - DNA, 19 bp, Homo sapiens
  siRNA target sequence for CDH12 (NM_004061.2,2588-2606).
gccaagccaggacagataa

SEQ ID NO: 139481 - DNA, 19 bp, Homo sapiens
  siRNA target sequence for CDH12 (NM_004061.2,2621-2639).
gctgcagaccgagatcttt

SEQ ID NO: 139482 - DNA, 19 bp, Homo sapiens
  siRNA target sequence for CDH12 (NM_004061.2,2648-2666).
gggcaacaattctccttta

SEQ ID NO: 139483 - DNA, 19 bp, Homo sapiens
  siRNA target sequence for CDH12 (NM_004061.2,2680-2698).
ggctgctatcaaaccaaat

SEQ ID NO: 139484 - DNA, 19 bp, Homo sapiens
  siRNA target sequence for CDH12 (NM_004061.2,2681-2699).
gctgctatcaaaccaaatt

SEQ ID NO: 139485 - DNA, 19 bp, Homo sapiens
  siRNA target sequence for CDH12 (NM_004061.2,2684-2702).
gctatcaaaccaaatttta

SEQ ID NO: 139486 - DNA, 19 bp, Homo sapiens
  siRNA target sequence for CDH12 (NM_004061.2,2705-2723).
gttcgtgacttcagaaaca

SEQ ID NO: 139487 - DNA, 19 bp, Homo sapiens
  siRNA target sequence for CDH12 (NM_004061.2,2708-2726).
cgtgacttcagaaacaaca

SEQ ID NO: 139488 - DNA, 19 bp, Homo sapiens
  siRNA target sequence for CDH12 (NM_004061.2,2722-2740).
caacacagcggggattgaa

SEQ ID NO: 139489 - DNA, 19 bp, Homo sapiens
  siRNA target sequence for CDH12 (NM_004061.2,2733-2751).
ggattgaaacccgaagaaa

SEQ ID NO: 139490 - DNA, 19 bp, Homo sapiens
  siRNA target sequence for CDH12 (NM_004061.2,2734-2752).
gattgaaacccgaagaaat

SEQ ID NO: 139491 - DNA, 19 bp, Homo sapiens
  siRNA target sequence for CDH12 (NM_004061.2,2760-2778).
gccgcaggcagcaagagtt

SEQ ID NO: 139492 - DNA, 19 bp, Homo sapiens
  siRNA target sequence for CDH12 (NM_004061.2,2764-2782).
caggcagcaagagttgtat

SEQ ID NO: 139493 - DNA, 19 bp, Homo sapiens
  siRNA target sequence for CDH12 (NM_004061.2,2779-2797).
gtatttcctccctgttgta

SEQ ID NO: 139494 - DNA, 19 bp, Homo sapiens
  siRNA target sequence for CDH12 (NM_004061.2,2785-2803).
cctccctgttgtaatagaa

SEQ ID NO: 139495 - DNA, 19 bp, Homo sapiens
  siRNA target sequence for CDH12 (NM_004061.2,2931-2949).
gggcgttgattgcaattct

SEQ ID NO: 139496 - DNA, 19 bp, Homo sapiens
  siRNA target sequence for CDH12 (NM_004061.2,2932-2950).
ggcgttgattgcaattcta

SEQ ID NO: 139497 - DNA, 19 bp, Homo sapiens
  siRNA target sequence for CDH12 (NM_004061.2,2934-2952).
cgttgattgcaattctact

SEQ ID NO: 139498 - DNA, 19 bp, Homo sapiens
  siRNA target sequence for CDH12 (NM_004061.2,2935-2953).
gttgattgcaattctacta

SEQ ID NO: 139499 - DNA, 19 bp, Homo sapiens
  siRNA target sequence for CDH12 (NM_004061.2,3022-3040).
cctgatgacctctaaagaa

SEQ ID NO: 139500 - DNA, 19 bp, Homo sapiens
  siRNA target sequence for CDH12 (NM_004061.2,3052-3070).
caacgtcatccattacgat

SEQ ID NO: 139501 - DNA, 19 bp, Homo sapiens
  siRNA target sequence for CDH12 (NM_004061.2,3276-3294).
ccccaccatacgattcact

SEQ ID NO: 139502 - DNA, 19 bp, Homo sapiens
  siRNA target sequence for CDH12 (NM_004061.2,3286-3304).
cgattcactggccacatat

SEQ ID NO: 139503 - DNA, 19 bp, Homo sapiens
  siRNA target sequence for CDH12 (NM_004061.2,3399-3417).
ggggaccccgctttaaagt

SEQ ID NO: 139504 - DNA, 19 bp, Homo sapiens
  siRNA target sequence for CDH12 (NM_004061.2,3401-3419).
ggaccccgctttaaagtct

SEQ ID NO: 139505 - DNA, 19 bp, Homo sapiens
  siRNA target sequence for CDH12 (NM_004061.2,3402-3420).
gaccccgctttaaagtctt

SEQ ID NO: 139506 - DNA, 19 bp, Homo sapiens
  siRNA target sequence for CDH12 (NM_004061.2,3447-3465).
gttataaccctgataaagt

SEQ ID NO: 139507 - DNA, 19 bp, Homo sapiens
  siRNA target sequence for CDH13 (NM_001257.2,206-224).
ctggatttcagcagaaagt

SEQ ID NO: 139508 - DNA, 19 bp, Homo sapiens
  siRNA target sequence for CDH13 (NM_001257.2,217-235).
cagaaagtgttccatatca

SEQ ID NO: 139509 - DNA, 19 bp, Homo sapiens
  siRNA target sequence for CDH13 (NM_001257.2,252-270).
cattgaggaccagtcaatt

SEQ ID NO: 139510 - DNA, 19 bp, Homo sapiens
  siRNA target sequence for CDH13 (NM_001257.2,259-277).
gaccagtcaattctaaact

SEQ ID NO: 139511 - DNA, 19 bp, Homo sapiens
  siRNA target sequence for CDH13 (NM_001257.2,262-280).
cagtcaattctaaacttga

SEQ ID NO: 139512 - DNA, 19 bp, Homo sapiens
  siRNA target sequence for CDH13 (NM_001257.2,322-340).
gtctcgagcccatacttca

SEQ ID NO: 139513 - DNA, 19 bp, Homo sapiens
  siRNA target sequence for CDH13 (NM_001257.2,348-366).
cagcgatggcggcttagtt

SEQ ID NO: 139514 - DNA, 19 bp, Homo sapiens
  siRNA target sequence for CDH13 (NM_001257.2,364-382).
gttgctctgagaaacataa

SEQ ID NO: 139515 - DNA, 19 bp, Homo sapiens
  siRNA target sequence for CDH13 (NM_001257.2,474-492).
gggctccttgcaggatata

SEQ ID NO: 139516 - DNA, 19 bp, Homo sapiens
  siRNA target sequence for CDH13 (NM_001257.2,599-617).
gcaaggtagtcgatagtga

SEQ ID NO: 139517 - DNA, 19 bp, Homo sapiens
  siRNA target sequence for CDH13 (NM_001257.2,725-743).
ccttggacagagaagtaat

SEQ ID NO: 139518 - DNA, 19 bp, Homo sapiens
  siRNA target sequence for CDH13 (NM_001257.2,734-752).
gagaagtaatcgctgttta

SEQ ID NO: 139519 - DNA, 19 bp, Homo sapiens
  siRNA target sequence for CDH13 (NM_001257.2,765-783).
ggagaccactgatgtcaat

SEQ ID NO: 139520 - DNA, 19 bp, Homo sapiens
  siRNA target sequence for CDH13 (NM_001257.2,813-831).
ggaagtcattgtgattgat

SEQ ID NO: 139521 - DNA, 19 bp, Homo sapiens
  siRNA target sequence for CDH13 (NM_001257.2,915-933).
gcggatgacagcctttgat

SEQ ID NO: 139522 - DNA, 19 bp, Homo sapiens
  siRNA target sequence for CDH13 (NM_001257.2,958-976).
gccctcctgcggtataata

SEQ ID NO: 139523 - DNA, 19 bp, Homo sapiens
  siRNA target sequence for CDH13 (NM_001257.2,959-977).
ccctcctgcggtataatat

SEQ ID NO: 139524 - DNA, 19 bp, Homo sapiens
  siRNA target sequence for CDH13 (NM_001257.2,1017-1035).
ctacatcgatcctgagaaa

SEQ ID NO: 139525 - DNA, 19 bp, Homo sapiens
  siRNA target sequence for CDH13 (NM_001257.2,1074-1092).
ccgagagactctggaaaat

SEQ ID NO: 139526 - DNA, 19 bp, Homo sapiens
  siRNA target sequence for CDH13 (NM_001257.2,1107-1125).
gatcatcgaggctcaagat

SEQ ID NO: 139527 - DNA, 19 bp, Homo sapiens
  siRNA target sequence for CDH13 (NM_001257.2,1169-1187).
cgatcatgatcgatgacaa

SEQ ID NO: 139528 - DNA, 19 bp, Homo sapiens
  siRNA target sequence for CDH13 (NM_001257.2,1170-1188).
gatcatgatcgatgacaaa

SEQ ID NO: 139529 - DNA, 19 bp, Homo sapiens
  siRNA target sequence for CDH13 (NM_001257.2,1173-1191).
catgatcgatgacaaaaat

SEQ ID NO: 139530 - DNA, 19 bp, Homo sapiens
  siRNA target sequence for CDH13 (NM_001257.2,1176-1194).
gatcgatgacaaaaatgat

SEQ ID NO: 139531 - DNA, 19 bp, Homo sapiens
  siRNA target sequence for CDH13 (NM_001257.2,1192-1210).
gatcactcaccaaaattca

SEQ ID NO: 139532 - DNA, 19 bp, Homo sapiens
  siRNA target sequence for CDH13 (NM_001257.2,1246-1264).
gctgtgggagttattgtca

SEQ ID NO: 139533 - DNA, 19 bp, Homo sapiens
  siRNA target sequence for CDH13 (NM_001257.2,1247-1265).
ctgtgggagttattgtcaa

SEQ ID NO: 139534 - DNA, 19 bp, Homo sapiens
  siRNA target sequence for CDH13 (NM_001257.2,1249-1267).
gtgggagttattgtcaatt

SEQ ID NO: 139535 - DNA, 19 bp, Homo sapiens
  siRNA target sequence for CDH13 (NM_001257.2,1252-1270).
ggagttattgtcaatttga

SEQ ID NO: 139536 - DNA, 19 bp, Homo sapiens
  siRNA target sequence for CDH13 (NM_001257.2,1269-1287).
gacagttgaagataaggat

SEQ ID NO: 139537 - DNA, 19 bp, Homo sapiens
  siRNA target sequence for CDH13 (NM_001257.2,1343-1361).
ggcagagctttgaaatcca

SEQ ID NO: 139538 - DNA, 19 bp, Homo sapiens
  siRNA target sequence for CDH13 (NM_001257.2,1405-1423).
ccattggactatgaaattt

SEQ ID NO: 139539 - DNA, 19 bp, Homo sapiens
  siRNA target sequence for CDH13 (NM_001257.2,1678-1696).
ccagcaggttggctgaata

SEQ ID NO: 139540 - DNA, 19 bp, Homo sapiens
  siRNA target sequence for CDH13 (NM_001257.2,1681-1699).
gcaggttggctgaatatta

SEQ ID NO: 139541 - DNA, 19 bp, Homo sapiens
  siRNA target sequence for CDH13 (NM_001257.2,1858-1876).
gacaatgccccgttcattt

SEQ ID NO: 139542 - DNA, 19 bp, Homo sapiens
  siRNA target sequence for CDH13 (NM_001257.2,1926-1944).
cattttgggagcatcagat

SEQ ID NO: 139543 - DNA, 19 bp, Homo sapiens
  siRNA target sequence for CDH13 (NM_001257.2,1947-1965).
ggatcttcacccgaataca

SEQ ID NO: 139544 - DNA, 19 bp, Homo sapiens
  siRNA target sequence for CDH13 (NM_001257.2,1958-1976).
cgaatacagatcctttcaa

SEQ ID NO: 139545 - DNA, 19 bp, Homo sapiens
  siRNA target sequence for CDH13 (NM_001257.2,2024-2042).
ccaagatcaacaatacaca

SEQ ID NO: 139546 - DNA, 19 bp, Homo sapiens
  siRNA target sequence for CDH13 (NM_001257.2,2047-2065).
ctggtaagccttcttcaaa

SEQ ID NO: 139547 - DNA, 19 bp, Homo sapiens
  siRNA target sequence for CDH13 (NM_001257.2,2092-2110).
cccatcatggtgacagatt

SEQ ID NO: 139548 - DNA, 19 bp, Homo sapiens
  siRNA target sequence for CDH13 (NM_001257.2,2119-2137).
ccacccatgacgaatatca

SEQ ID NO: 139549 - DNA, 19 bp, Homo sapiens
  siRNA target sequence for CDH13 (NM_001257.2,2155-2173).
gtgtgctcctgcaggaatt

SEQ ID NO: 139550 - DNA, 19 bp, Homo sapiens
  siRNA target sequence for CDH15 (NM_004933.2,267-285).
cccctggttcagatcaagt

SEQ ID NO: 139551 - DNA, 19 bp, Homo sapiens
  siRNA target sequence for CDH15 (NM_004933.2,573-591).
gtcccaggcacctatgtga

SEQ ID NO: 139552 - DNA, 19 bp, Homo sapiens
  siRNA target sequence for CDH15 (NM_004933.2,740-758).
ggtggtcgcggtgtacaat

SEQ ID NO: 139553 - DNA, 19 bp, Homo sapiens
  siRNA target sequence for CDH15 (NM_004933.2,744-762).
gtcgcggtgtacaatctga

SEQ ID NO: 139554 - DNA, 19 bp, Homo sapiens
  siRNA target sequence for CDH15 (NM_004933.2,1080-1098).
cactacgaactcaaagtgt

SEQ ID NO: 139555 - DNA, 19 bp, Homo sapiens
  siRNA target sequence for CDH15 (NM_004933.2,2009-2027).
ggacgaccttcgagacaat

SEQ ID NO: 139556 - DNA, 19 bp, Homo sapiens
  siRNA target sequence for CDH15 (NM_004933.2,2210-2228).
cgccgacttcatcaatgat

SEQ ID NO: 139557 - DNA, 19 bp, Homo sapiens
  siRNA target sequence for CDH15 (NM_004933.2,2270-2288).
cgacacagccctcatctat

SEQ ID NO: 139558 - DNA, 19 bp, Homo sapiens
  siRNA target sequence for CDH16 (NM_004062.2,271-289).
gggcccatttgctatggat

SEQ ID NO: 139559 - DNA, 19 bp, Homo sapiens
  siRNA target sequence for CDH16 (NM_004062.2,549-567).
ccaactcggatcttcgatt

SEQ ID NO: 139560 - DNA, 19 bp, Homo sapiens
  siRNA target sequence for CDH16 (NM_004062.2,761-779).
gaagtctccatcatagaga

SEQ ID NO: 139561 - DNA, 19 bp, Homo sapiens
  siRNA target sequence for CDH16 (NM_004062.2,985-1003).
ccaggtgcgggctcagaat

SEQ ID NO: 139562 - DNA, 19 bp, Homo sapiens
  siRNA target sequence for CDH16 (NM_004062.2,986-1004).
caggtgcgggctcagaatt

SEQ ID NO: 139563 - DNA, 19 bp, Homo sapiens
  siRNA target sequence for CDH16 (NM_004062.2,1045-1063).
gctggtgatggatgagaat

SEQ ID NO: 139564 - DNA, 19 bp, Homo sapiens
  siRNA target sequence for CDH16 (NM_004062.2,1179-1197).
ccaattcccacgttgtgta

SEQ ID NO: 139565 - DNA, 19 bp, Homo sapiens
  siRNA target sequence for CDH16 (NM_004062.2,1180-1198).
caattcccacgttgtgtat

SEQ ID NO: 139566 - DNA, 19 bp, Homo sapiens
  siRNA target sequence for CDH16 (NM_004062.2,1379-1397).
gaagtcgcagtcacagata

SEQ ID NO: 139567 - DNA, 19 bp, Homo sapiens
  siRNA target sequence for CDH16 (NM_004062.2,1382-1400).
gtcgcagtcacagatatca

SEQ ID NO: 139568 - DNA, 19 bp, Homo sapiens
  siRNA target sequence for CDH16 (NM_004062.2,1384-1402).
cgcagtcacagatatcaat

SEQ ID NO: 139569 - DNA, 19 bp, Homo sapiens
  siRNA target sequence for CDH16 (NM_004062.2,1483-1501).
catgctaacagccattgat

SEQ ID NO: 139570 - DNA, 19 bp, Homo sapiens
  siRNA target sequence for CDH16 (NM_004062.2,1517-1535).
gccttccgcctcatggatt

SEQ ID NO: 139571 - DNA, 19 bp, Homo sapiens
  siRNA target sequence for CDH16 (NM_004062.2,1518-1536).
ccttccgcctcatggattt

SEQ ID NO: 139572 - DNA, 19 bp, Homo sapiens
  siRNA target sequence for CDH16 (NM_004062.2,1615-1633).
ctgcaagaacctcagttat

SEQ ID NO: 139573 - DNA, 19 bp, Homo sapiens
  siRNA target sequence for CDH16 (NM_004062.2,2027-2045).
ctggtgatccacttcctaa

SEQ ID NO: 139574 - DNA, 19 bp, Homo sapiens
  siRNA target sequence for CDH16 (NM_004062.2,2079-2097).
ctgtgccctcccaatacct

SEQ ID NO: 139575 - DNA, 19 bp, Homo sapiens
  siRNA target sequence for CDH17 (NM_004063.2,150-168).
gtgtcttcttatgctttat

SEQ ID NO: 139576 - DNA, 19 bp, Homo sapiens
  siRNA target sequence for CDH17 (NM_004063.2,184-202).
ggccaagaggggaagttta

SEQ ID NO: 139577 - DNA, 19 bp, Homo sapiens
  siRNA target sequence for CDH17 (NM_004063.2,243-261).
ccaagaaccgagtcaaatt

SEQ ID NO: 139578 - DNA, 19 bp, Homo sapiens
  siRNA target sequence for CDH17 (NM_004063.2,244-262).
caagaaccgagtcaaatta

SEQ ID NO: 139579 - DNA, 19 bp, Homo sapiens
  siRNA target sequence for CDH17 (NM_004063.2,247-265).
gaaccgagtcaaattatat

SEQ ID NO: 139580 - DNA, 19 bp, Homo sapiens
  siRNA target sequence for CDH17 (NM_004063.2,317-335).
cagacaacatatttgtgat

SEQ ID NO: 139581 - DNA, 19 bp, Homo sapiens
  siRNA target sequence for CDH17 (NM_004063.2,340-358).
cgggagggacttctgtatt

SEQ ID NO: 139582 - DNA, 19 bp, Homo sapiens
  siRNA target sequence for CDH17 (NM_004063.2,343-361).
gagggacttctgtattaca

SEQ ID NO: 139583 - DNA, 19 bp, Homo sapiens
  siRNA target sequence for CDH17 (NM_004063.2,383-401).
caagatctactcacaatct

SEQ ID NO: 139584 - DNA, 19 bp, Homo sapiens
  siRNA target sequence for CDH17 (NM_004063.2,412-430).
gccctggacgctaatggaa

SEQ ID NO: 139585 - DNA, 19 bp, Homo sapiens
  siRNA target sequence for CDH17 (NM_004063.2,413-431).
ccctggacgctaatggaat

SEQ ID NO: 139586 - DNA, 19 bp, Homo sapiens
  siRNA target sequence for CDH17 (NM_004063.2,414-432).
cctggacgctaatggaatt

SEQ ID NO: 139587 - DNA, 19 bp, Homo sapiens
  siRNA target sequence for CDH17 (NM_004063.2,417-435).
ggacgctaatggaattata

SEQ ID NO: 139588 - DNA, 19 bp, Homo sapiens
  siRNA target sequence for CDH17 (NM_004063.2,491-509).
ccacgtttctccagtcaaa

SEQ ID NO: 139589 - DNA, 19 bp, Homo sapiens
  siRNA target sequence for CDH17 (NM_004063.2,494-512).
cgtttctccagtcaaagta

SEQ ID NO: 139590 - DNA, 19 bp, Homo sapiens
  siRNA target sequence for CDH17 (NM_004063.2,549-567).
gcccttcttgtatgtcaat

SEQ ID NO: 139591 - DNA, 19 bp, Homo sapiens
  siRNA target sequence for CDH17 (NM_004063.2,596-614).
ccaatggccagctttatta

SEQ ID NO: 139592 - DNA, 19 bp, Homo sapiens
  siRNA target sequence for CDH17 (NM_004063.2,628-646).
cagcttcccatgatcaaca

SEQ ID NO: 139593 - DNA, 19 bp, Homo sapiens
  siRNA target sequence for CDH17 (NM_004063.2,630-648).
gcttcccatgatcaacaat

SEQ ID NO: 139594 - DNA, 19 bp, Homo sapiens
  siRNA target sequence for CDH17 (NM_004063.2,702-720).
gggatctcaggaattgaat

SEQ ID NO: 139595 - DNA, 19 bp, Homo sapiens
  siRNA target sequence for CDH17 (NM_004063.2,724-742).
gctaagaatccttcctata

SEQ ID NO: 139596 - DNA, 19 bp, Homo sapiens
  siRNA target sequence for CDH17 (NM_004063.2,773-791).
gccagagtgagaattcctt

SEQ ID NO: 139597 - DNA, 19 bp, Homo sapiens
  siRNA target sequence for CDH17 (NM_004063.2,800-818).
ccacatctgtggatatcat

SEQ ID NO: 139598 - DNA, 19 bp, Homo sapiens
  siRNA target sequence for CDH17 (NM_004063.2,803-821).
catctgtggatatcatagt

SEQ ID NO: 139599 - DNA, 19 bp, Homo sapiens
  siRNA target sequence for CDH17 (NM_004063.2,877-895).
gatcctcaccccatcaaaa

SEQ ID NO: 139600 - DNA, 19 bp, Homo sapiens
  siRNA target sequence for CDH17 (NM_004063.2,916-934).
gatcccggtgcacaatatt

SEQ ID NO: 139601 - DNA, 19 bp, Homo sapiens
  siRNA target sequence for CDH17 (NM_004063.2,919-937).
cccggtgcacaatattcct

SEQ ID NO: 139602 - DNA, 19 bp, Homo sapiens
  siRNA target sequence for CDH17 (NM_004063.2,920-938).
ccggtgcacaatattcctt

SEQ ID NO: 139603 - DNA, 19 bp, Homo sapiens
  siRNA target sequence for CDH17 (NM_004063.2,921-939).
cggtgcacaatattcctta

SEQ ID NO: 139604 - DNA, 19 bp, Homo sapiens
  siRNA target sequence for CDH17 (NM_004063.2,1008-1026).
gcccttggaccgagaagaa

SEQ ID NO: 139605 - DNA, 19 bp, Homo sapiens
  siRNA target sequence for CDH17 (NM_004063.2,1059-1077).
ggatgagtacggaaaacca

SEQ ID NO: 139606 - DNA, 19 bp, Homo sapiens
  siRNA target sequence for CDH17 (NM_004063.2,1087-1105).
ccgctggaaattcatgtaa

SEQ ID NO: 139607 - DNA, 19 bp, Homo sapiens
  siRNA target sequence for CDH17 (NM_004063.2,1088-1106).
cgctggaaattcatgtaaa

SEQ ID NO: 139608 - DNA, 19 bp, Homo sapiens
  siRNA target sequence for CDH17 (NM_004063.2,1089-1107).
gctggaaattcatgtaaaa

SEQ ID NO: 139609 - DNA, 19 bp, Homo sapiens
  siRNA target sequence for CDH17 (NM_004063.2,1143-1161).
gtcaccagtaaccgtattt

SEQ ID NO: 139610 - DNA, 19 bp, Homo sapiens
  siRNA target sequence for CDH17 (NM_004063.2,1145-1163).
caccagtaaccgtatttga

SEQ ID NO: 139611 - DNA, 19 bp, Homo sapiens
  siRNA target sequence for CDH17 (NM_004063.2,1177-1195).
gaacgactgggtaacagta

SEQ ID NO: 139612 - DNA, 19 bp, Homo sapiens
  siRNA target sequence for CDH17 (NM_004063.2,1235-1253).
ctgccaacagttttctaaa

SEQ ID NO: 139613 - DNA, 19 bp, Homo sapiens
  siRNA target sequence for CDH17 (NM_004063.2,1294-1312).
ggactcttcctaatccaaa

SEQ ID NO: 139614 - DNA, 19 bp, Homo sapiens
  siRNA target sequence for CDH17 (NM_004063.2,1299-1317).
cttcctaatccaaacctat

SEQ ID NO: 139615 - DNA, 19 bp, Homo sapiens
  siRNA target sequence for CDH17 (NM_004063.2,1360-1378).
gatactcctcagtacaact

SEQ ID NO: 139616 - DNA, 19 bp, Homo sapiens
  siRNA target sequence for CDH17 (NM_004063.2,1387-1405).
gaggtgtctgacaaagatt

SEQ ID NO: 139617 - DNA, 19 bp, Homo sapiens
  siRNA target sequence for CDH17 (NM_004063.2,1425-1443).
gcaaatcaacgttattgat

SEQ ID NO: 139618 - DNA, 19 bp, Homo sapiens
  siRNA target sequence for CDH17 (NM_004063.2,1434-1452).
cgttattgatatcaatgat

SEQ ID NO: 139619 - DNA, 19 bp, Homo sapiens
  siRNA target sequence for CDH17 (NM_004063.2,1458-1476).
ccccatctttgaaaaatca

SEQ ID NO: 139620 - DNA, 19 bp, Homo sapiens
  siRNA target sequence for CDH17 (NM_004063.2,1512-1530).
cattgggtccaccatctta

SEQ ID NO: 139621 - DNA, 19 bp, Homo sapiens
  siRNA target sequence for CDH17 (NM_004063.2,1643-1661).
ccaacaccggatatgtcat

SEQ ID NO: 139622 - DNA, 19 bp, Homo sapiens
  siRNA target sequence for CDH17 (NM_004063.2,1644-1662).
caacaccggatatgtcata

SEQ ID NO: 139623 - DNA, 19 bp, Homo sapiens
  siRNA target sequence for CDH17 (NM_004063.2,1647-1665).
caccggatatgtcataatt

SEQ ID NO: 139624 - DNA, 19 bp, Homo sapiens
  siRNA target sequence for CDH17 (NM_004063.2,1651-1669).
ggatatgtcataattaaaa

SEQ ID NO: 139625 - DNA, 19 bp, Homo sapiens
  siRNA target sequence for CDH17 (NM_004063.2,1710-1728).
gttcaaagcagaaaatcct

SEQ ID NO: 139626 - DNA, 19 bp, Homo sapiens
  siRNA target sequence for CDH17 (NM_004063.2,1738-1756).
gtgtttggtgtgaagtaca

SEQ ID NO: 139627 - DNA, 19 bp, Homo sapiens
  siRNA target sequence for CDH17 (NM_004063.2,1749-1767).
gaagtacaatgcaagttct

SEQ ID NO: 139628 - DNA, 19 bp, Homo sapiens
  siRNA target sequence for CDH17 (NM_004063.2,1752-1770).
gtacaatgcaagttctttt

SEQ ID NO: 139629 - DNA, 19 bp, Homo sapiens
  siRNA target sequence for CDH17 (NM_004063.2,1828-1846).
gtattccaagcgaaagtca

SEQ ID NO: 139630 - DNA, 19 bp, Homo sapiens
  siRNA target sequence for CDH17 (NM_004063.2,1845-1863).
cagtgaggatgtagctata

SEQ ID NO: 139631 - DNA, 19 bp, Homo sapiens
  siRNA target sequence for CDH17 (NM_004063.2,1900-1918).
gaaggtctggacataagct

SEQ ID NO: 139632 - DNA, 19 bp, Homo sapiens
  siRNA target sequence for CDH17 (NM_004063.2,1962-1980).
cgtgactggtgagatcttt

SEQ ID NO: 139633 - DNA, 19 bp, Homo sapiens
  siRNA target sequence for CDH17 (NM_004063.2,1963-1981).
gtgactggtgagatcttta

SEQ ID NO: 139634 - DNA, 19 bp, Homo sapiens
  siRNA target sequence for CDH17 (NM_004063.2,1965-1983).
gactggtgagatctttagt

SEQ ID NO: 139635 - DNA, 19 bp, Homo sapiens
  siRNA target sequence for CDH17 (NM_004063.2,1967-1985).
ctggtgagatctttagtgt

SEQ ID NO: 139636 - DNA, 19 bp, Homo sapiens
  siRNA target sequence for CDH17 (NM_004063.2,2012-2030).
gtccatatcgggtacaagt

SEQ ID NO: 139637 - DNA, 19 bp, Homo sapiens
  siRNA target sequence for CDH17 (NM_004063.2,2074-2092).
gagttccacctgatcctta

SEQ ID NO: 139638 - DNA, 19 bp, Homo sapiens
  siRNA target sequence for CDH17 (NM_004063.2,2128-2146).
gactacacgggcttgttct

SEQ ID NO: 139639 - DNA, 19 bp, Homo sapiens
  siRNA target sequence for CDH17 (NM_004063.2,2215-2233).
cggggtccccattttacat

SEQ ID NO: 139640 - DNA, 19 bp, Homo sapiens
  siRNA target sequence for CDH17 (NM_004063.2,2216-2234).
ggggtccccattttacatt

SEQ ID NO: 139641 - DNA, 19 bp, Homo sapiens
  siRNA target sequence for CDH17 (NM_004063.2,2238-2256).
cctcggcagtggaagctta

SEQ ID NO: 139642 - DNA, 19 bp, Homo sapiens
  siRNA target sequence for CDH17 (NM_004063.2,2241-2259).
cggcagtggaagcttacaa

SEQ ID NO: 139643 - DNA, 19 bp, Homo sapiens
  siRNA target sequence for CDH17 (NM_004063.2,2242-2260).
ggcagtggaagcttacaaa

SEQ ID NO: 139644 - DNA, 19 bp, Homo sapiens
  siRNA target sequence for CDH17 (NM_004063.2,2277-2295).
caaaatcaatggtactcat

SEQ ID NO: 139645 - DNA, 19 bp, Homo sapiens
  siRNA target sequence for CDH17 (NM_004063.2,2309-2327).
ccaggcacacagagtttga

SEQ ID NO: 139646 - DNA, 19 bp, Homo sapiens
  siRNA target sequence for CDH17 (NM_004063.2,2333-2351).
gggagtatgtcgtcttgat

SEQ ID NO: 139647 - DNA, 19 bp, Homo sapiens
  siRNA target sequence for CDH17 (NM_004063.2,2343-2361).
cgtcttgatccgcatcaat

SEQ ID NO: 139648 - DNA, 19 bp, Homo sapiens
  siRNA target sequence for CDH17 (NM_004063.2,2346-2364).
cttgatccgcatcaatgat

SEQ ID NO: 139649 - DNA, 19 bp, Homo sapiens
  siRNA target sequence for CDH17 (NM_004063.2,2377-2395).
cccttggaaggcattgttt

SEQ ID NO: 139650 - DNA, 19 bp, Homo sapiens
  siRNA target sequence for CDH17 (NM_004063.2,2382-2400).
ggaaggcattgtttcttta

SEQ ID NO: 139651 - DNA, 19 bp, Homo sapiens
  siRNA target sequence for CDH17 (NM_004063.2,2477-2495).
gcatggcagttggtatact

SEQ ID NO: 139652 - DNA, 19 bp, Homo sapiens
  siRNA target sequence for CDH17 (NM_004063.2,2504-2522).
cccttctggtgattggtat

SEQ ID NO: 139653 - DNA, 19 bp, Homo sapiens
  siRNA target sequence for CDH17 (NM_004063.2,2505-2523).
ccttctggtgattggtata

SEQ ID NO: 139654 - DNA, 19 bp, Homo sapiens
  siRNA target sequence for CDH17 (NM_004063.2,2506-2524).
cttctggtgattggtataa

SEQ ID NO: 139655 - DNA, 19 bp, Homo sapiens
  siRNA target sequence for CDH17 (NM_004063.2,2514-2532).
gattggtataattttagca

SEQ ID NO: 139656 - DNA, 19 bp, Homo sapiens
  siRNA target sequence for CDH17 (NM_004063.2,2536-2554).
gtgtttatccgcataaaga

SEQ ID NO: 139657 - DNA, 19 bp, Homo sapiens
  siRNA target sequence for CDH18 (NM_004934.2,413-431).
cctagtgtgtctctgtttt

SEQ ID NO: 139658 - DNA, 19 bp, Homo sapiens
  siRNA target sequence for CDH18 (NM_004934.2,470-488).
caaggtgatgagaaaccaa

SEQ ID NO: 139659 - DNA, 19 bp, Homo sapiens
  siRNA target sequence for CDH18 (NM_004934.2,580-598).
gaccagatcctcagtatgt

SEQ ID NO: 139660 - DNA, 19 bp, Homo sapiens
  siRNA target sequence for CDH18 (NM_004934.2,630-648).
gatggatctgtcaagtaca

SEQ ID NO: 139661 - DNA, 19 bp, Homo sapiens
  siRNA target sequence for CDH18 (NM_004934.2,662-680).
gggtgctgggactatattt

SEQ ID NO: 139662 - DNA, 19 bp, Homo sapiens
  siRNA target sequence for CDH18 (NM_004934.2,663-681).
ggtgctgggactatattta

SEQ ID NO: 139663 - DNA, 19 bp, Homo sapiens
  siRNA target sequence for CDH18 (NM_004934.2,666-684).
gctgggactatatttatca

SEQ ID NO: 139664 - DNA, 19 bp, Homo sapiens
  siRNA target sequence for CDH18 (NM_004934.2,667-685).
ctgggactatatttatcat

SEQ ID NO: 139665 - DNA, 19 bp, Homo sapiens
  siRNA target sequence for CDH18 (NM_004934.2,699-717).
ggtgatatccactcaacaa

SEQ ID NO: 139666 - DNA, 19 bp, Homo sapiens
  siRNA target sequence for CDH18 (NM_004934.2,700-718).
gtgatatccactcaacaaa

SEQ ID NO: 139667 - DNA, 19 bp, Homo sapiens
  siRNA target sequence for CDH18 (NM_004934.2,752-770).
gcttcatgctcaagctatt

SEQ ID NO: 139668 - DNA, 19 bp, Homo sapiens
  siRNA target sequence for CDH18 (NM_004934.2,756-774).
catgctcaagctattgata

SEQ ID NO: 139669 - DNA, 19 bp, Homo sapiens
  siRNA target sequence for CDH18 (NM_004934.2,766-784).
ctattgatagacgtacaaa

SEQ ID NO: 139670 - DNA, 19 bp, Homo sapiens
  siRNA target sequence for CDH18 (NM_004934.2,839-857).
caacgctccaaaattcaca

SEQ ID NO: 139671 - DNA, 19 bp, Homo sapiens
  siRNA target sequence for CDH18 (NM_004934.2,854-872).
cacagatggaccatacatt

SEQ ID NO: 139672 - DNA, 19 bp, Homo sapiens
  siRNA target sequence for CDH18 (NM_004934.2,856-874).
cagatggaccatacattgt

SEQ ID NO: 139673 - DNA, 19 bp, Homo sapiens
  siRNA target sequence for CDH18 (NM_004934.2,862-880).
gaccatacattgttactgt

SEQ ID NO: 139674 - DNA, 19 bp, Homo sapiens
  siRNA target sequence for CDH18 (NM_004934.2,1001-1019).
ctccgtcgaccctaaaaca

SEQ ID NO: 139675 - DNA, 19 bp, Homo sapiens
  siRNA target sequence for CDH18 (NM_004934.2,1011-1029).
cctaaaacaggagttatta

SEQ ID NO: 139676 - DNA, 19 bp, Homo sapiens
  siRNA target sequence for CDH18 (NM_004934.2,1030-1048).
gaacggccttacataacat

SEQ ID NO: 139677 - DNA, 19 bp, Homo sapiens
  siRNA target sequence for CDH18 (NM_004934.2,1054-1072).
gagaagccagagaacatta

SEQ ID NO: 139678 - DNA, 19 bp, Homo sapiens
  siRNA target sequence for CDH18 (NM_004934.2,1118-1136).
gctttcaggatctacaaca

SEQ ID NO: 139679 - DNA, 19 bp, Homo sapiens
  siRNA target sequence for CDH18 (NM_004934.2,1171-1189).
caccacgctttcctcaaaa

SEQ ID NO: 139680 - DNA, 19 bp, Homo sapiens
  siRNA target sequence for CDH18 (NM_004934.2,1283-1301).
catgacctactccatcata

SEQ ID NO: 139681 - DNA, 19 bp, Homo sapiens
  siRNA target sequence for CDH18 (NM_004934.2,1286-1304).
gacctactccatcataaat

SEQ ID NO: 139682 - DNA, 19 bp, Homo sapiens
  siRNA target sequence for CDH18 (NM_004934.2,1289-1307).
ctactccatcataaatggt

SEQ ID NO: 139683 - DNA, 19 bp, Homo sapiens
  siRNA target sequence for CDH18 (NM_004934.2,1305-1323).
ggtgatggcatgggaatat

SEQ ID NO: 139684 - DNA, 19 bp, Homo sapiens
  siRNA target sequence for CDH18 (NM_004934.2,1312-1330).
gcatgggaatattctcaat

SEQ ID NO: 139685 - DNA, 19 bp, Homo sapiens
  siRNA target sequence for CDH18 (NM_004934.2,1400-1418).
gtcatataccctcaacata

SEQ ID NO: 139686 - DNA, 19 bp, Homo sapiens
  siRNA target sequence for CDH18 (NM_004934.2,1402-1420).
catataccctcaacataga

SEQ ID NO: 139687 - DNA, 19 bp, Homo sapiens
  siRNA target sequence for CDH18 (NM_004934.2,1476-1494).
gctactatgctgaagatca

SEQ ID NO: 139688 - DNA, 19 bp, Homo sapiens
  siRNA target sequence for CDH18 (NM_004934.2,1477-1495).
ctactatgctgaagatcat

SEQ ID NO: 139689 - DNA, 19 bp, Homo sapiens
  siRNA target sequence for CDH18 (NM_004934.2,1512-1530).
gaaccaccactattttcca

SEQ ID NO: 139690 - DNA, 19 bp, Homo sapiens
  siRNA target sequence for CDH18 (NM_004934.2,1537-1555).
cctacctcatggaagtcta

SEQ ID NO: 139691 - DNA, 19 bp, Homo sapiens
  siRNA target sequence for CDH18 (NM_004934.2,1544-1562).
catggaagtctacgaaaat

SEQ ID NO: 139692 - DNA, 19 bp, Homo sapiens
  siRNA target sequence for CDH18 (NM_004934.2,1574-1592).
gaccgtcgttggtacagtt

SEQ ID NO: 139693 - DNA, 19 bp, Homo sapiens
  siRNA target sequence for CDH18 (NM_004934.2,1576-1594).
ccgtcgttggtacagtttt

SEQ ID NO: 139694 - DNA, 19 bp, Homo sapiens
  siRNA target sequence for CDH18 (NM_004934.2,1599-1617).
caagatcctgacagtacta

SEQ ID NO: 139695 - DNA, 19 bp, Homo sapiens
  siRNA target sequence for CDH18 (NM_004934.2,1610-1628).
cagtactaacagcttagta

SEQ ID NO: 139696 - DNA, 19 bp, Homo sapiens
  siRNA target sequence for CDH18 (NM_004934.2,1615-1633).
ctaacagcttagtaagata

SEQ ID NO: 139697 - DNA, 19 bp, Homo sapiens
  siRNA target sequence for CDH18 (NM_004934.2,1621-1639).
gcttagtaagatacttcat

SEQ ID NO: 139698 - DNA, 19 bp, Homo sapiens
  siRNA target sequence for CDH18 (NM_004934.2,1626-1644).
gtaagatacttcatcaact

SEQ ID NO: 139699 - DNA, 19 bp, Homo sapiens
  siRNA target sequence for CDH18 (NM_004934.2,1630-1648).
gatacttcatcaactacaa

SEQ ID NO: 139700 - DNA, 19 bp, Homo sapiens
  siRNA target sequence for CDH18 (NM_004934.2,1634-1652).
cttcatcaactacaatgtt

SEQ ID NO: 139701 - DNA, 19 bp, Homo sapiens
  siRNA target sequence for CDH18 (NM_004934.2,1656-1674).
gacgacagatttttcaaca

SEQ ID NO: 139702 - DNA, 19 bp, Homo sapiens
  siRNA target sequence for CDH18 (NM_004934.2,1689-1707).
gggaccattaggactacaa

SEQ ID NO: 139703 - DNA, 19 bp, Homo sapiens
  siRNA target sequence for CDH18 (NM_004934.2,1690-1708).
ggaccattaggactacaaa

SEQ ID NO: 139704 - DNA, 19 bp, Homo sapiens
  siRNA target sequence for CDH18 (NM_004934.2,1694-1712).
cattaggactacaaaggtt

SEQ ID NO: 139705 - DNA, 19 bp, Homo sapiens
  siRNA target sequence for CDH18 (NM_004934.2,1835-1853).
cgaacttgccagggaatat

SEQ ID NO: 139706 - DNA, 19 bp, Homo sapiens
  siRNA target sequence for CDH18 (NM_004934.2,1842-1860).
gccagggaatatgatatta

SEQ ID NO: 139707 - DNA, 19 bp, Homo sapiens
  siRNA target sequence for CDH18 (NM_004934.2,1843-1861).
ccagggaatatgatattat

SEQ ID NO: 139708 - DNA, 19 bp, Homo sapiens
  siRNA target sequence for CDH18 (NM_004934.2,1847-1865).
ggaatatgatattattgta

SEQ ID NO: 139709 - DNA, 19 bp, Homo sapiens
  siRNA target sequence for CDH18 (NM_004934.2,1876-1894).
ctaagcctggccaggttat

SEQ ID NO: 139710 - DNA, 19 bp, Homo sapiens
  siRNA target sequence for CDH18 (NM_004934.2,1881-1899).
cctggccaggttattcata

SEQ ID NO: 139711 - DNA, 19 bp, Homo sapiens
  siRNA target sequence for CDH18 (NM_004934.2,1885-1903).
gccaggttattcataccat

SEQ ID NO: 139712 - DNA, 19 bp, Homo sapiens
  siRNA target sequence for CDH18 (NM_004934.2,1904-1922).
cagtgccactgataaagat

SEQ ID NO: 139713 - DNA, 19 bp, Homo sapiens
  siRNA target sequence for CDH18 (NM_004934.2,1939-1957).
caaggtttaacttctttct

SEQ ID NO: 139714 - DNA, 19 bp, Homo sapiens
  siRNA target sequence for CDH18 (NM_004934.2,1966-1984).
gcctgcctgtaaatccaaa

SEQ ID NO: 139715 - DNA, 19 bp, Homo sapiens
  siRNA target sequence for CDH18 (NM_004934.2,2050-2068).
gaactgttcaggatgtgta

SEQ ID NO: 139716 - DNA, 19 bp, Homo sapiens
  siRNA target sequence for CDH18 (NM_004934.2,2195-2213).
gtcctcggctggtttgagt

SEQ ID NO: 139717 - DNA, 19 bp, Homo sapiens
  siRNA target sequence for CDH18 (NM_004934.2,2218-2236).
gagccttaatcgctattct

SEQ ID NO: 139718 - DNA, 19 bp, Homo sapiens
  siRNA target sequence for CDH18 (NM_004934.2,2221-2239).
ccttaatcgctattcttct

SEQ ID NO: 139719 - DNA, 19 bp, Homo sapiens
  siRNA target sequence for CDH18 (NM_004934.2,2256-2274).
ctggcaattgtggtacttt

SEQ ID NO: 139720 - DNA, 19 bp, Homo sapiens
  siRNA target sequence for CDH18 (NM_004934.2,2281-2299).
ccctgaggcgcagcaaaaa

SEQ ID NO: 139721 - DNA, 19 bp, Homo sapiens
  siRNA target sequence for CDH18 (NM_004934.2,2282-2300).
cctgaggcgcagcaaaaaa

SEQ ID NO: 139722 - DNA, 19 bp, Homo sapiens
  siRNA target sequence for CDH18 (NM_004934.2,2492-2510).
caccctggaaagcatagat

SEQ ID NO: 139723 - DNA, 19 bp, Homo sapiens
  siRNA target sequence for CDH18 (NM_004934.2,2557-2575).
ctagcgttcccccttatga

SEQ ID NO: 139724 - DNA, 19 bp, Homo sapiens
  siRNA target sequence for CDH18 (NM_004934.2,2689-2707).
gacccgagtttaaaaagtt

SEQ ID NO: 139725 - DNA, 19 bp, Homo sapiens
  siRNA target sequence for CDH19 (NM_021153.2,194-212).
gtcttggagcaacagaaaa

SEQ ID NO: 139726 - DNA, 19 bp, Homo sapiens
  siRNA target sequence for CDH19 (NM_021153.2,196-214).
cttggagcaacagaaaact

SEQ ID NO: 139727 - DNA, 19 bp, Homo sapiens
  siRNA target sequence for CDH19 (NM_021153.2,215-233).
ctcaaacaaagaaagtcaa

SEQ ID NO: 139728 - DNA, 19 bp, Homo sapiens
  siRNA target sequence for CDH19 (NM_021153.2,234-252).
gcagccagtgcgatctcat

SEQ ID NO: 139729 - DNA, 19 bp, Homo sapiens
  siRNA target sequence for CDH19 (NM_021153.2,238-256).
ccagtgcgatctcatttga

SEQ ID NO: 139730 - DNA, 19 bp, Homo sapiens
  siRNA target sequence for CDH19 (NM_021153.2,322-340).
cacatcggccagctaagat

SEQ ID NO: 139731 - DNA, 19 bp, Homo sapiens
  siRNA target sequence for CDH19 (NM_021153.2,324-342).
catcggccagctaagatct

SEQ ID NO: 139732 - DNA, 19 bp, Homo sapiens
  siRNA target sequence for CDH19 (NM_021153.2,327-345).
cggccagctaagatctgat

SEQ ID NO: 139733 - DNA, 19 bp, Homo sapiens
  siRNA target sequence for CDH19 (NM_021153.2,328-346).
ggccagctaagatctgatt

SEQ ID NO: 139734 - DNA, 19 bp, Homo sapiens
  siRNA target sequence for CDH19 (NM_021153.2,329-347).
gccagctaagatctgattt

SEQ ID NO: 139735 - DNA, 19 bp, Homo sapiens
  siRNA target sequence for CDH19 (NM_021153.2,330-348).
ccagctaagatctgattta

SEQ ID NO: 139736 - DNA, 19 bp, Homo sapiens
  siRNA target sequence for CDH19 (NM_021153.2,334-352).
ctaagatctgatttagaca

SEQ ID NO: 139737 - DNA, 19 bp, Homo sapiens
  siRNA target sequence for CDH19 (NM_021153.2,392-410).
gagctggaagtacttttat

SEQ ID NO: 139738 - DNA, 19 bp, Homo sapiens
  siRNA target sequence for CDH19 (NM_021153.2,430-448).
gacatatatgccatacaga

SEQ ID NO: 139739 - DNA, 19 bp, Homo sapiens
  siRNA target sequence for CDH19 (NM_021153.2,439-457).
gccatacagaagcttgata

SEQ ID NO: 139740 - DNA, 19 bp, Homo sapiens
  siRNA target sequence for CDH19 (NM_021153.2,463-481).
gagcgatccctctacatct

SEQ ID NO: 139741 - DNA, 19 bp, Homo sapiens
  siRNA target sequence for CDH19 (NM_021153.2,485-503).
gagcccaggtaatagacat

SEQ ID NO: 139742 - DNA, 19 bp, Homo sapiens
  siRNA target sequence for CDH19 (NM_021153.2,546-564).
caaagtttcggatatcaat

SEQ ID NO: 139743 - DNA, 19 bp, Homo sapiens
  siRNA target sequence for CDH19 (NM_021153.2,618-636).
gtctccagaaggaacatta

SEQ ID NO: 139744 - DNA, 19 bp, Homo sapiens
  siRNA target sequence for CDH19 (NM_021153.2,622-640).
ccagaaggaacattagtta

SEQ ID NO: 139745 - DNA, 19 bp, Homo sapiens
  siRNA target sequence for CDH19 (NM_021153.2,666-684).
cgatccctcaagtggtaat

SEQ ID NO: 139746 - DNA, 19 bp, Homo sapiens
  siRNA target sequence for CDH19 (NM_021153.2,667-685).
gatccctcaagtggtaata

SEQ ID NO: 139747 - DNA, 19 bp, Homo sapiens
  siRNA target sequence for CDH19 (NM_021153.2,672-690).
ctcaagtggtaataatgct

SEQ ID NO: 139748 - DNA, 19 bp, Homo sapiens
  siRNA target sequence for CDH19 (NM_021153.2,748-766).
ggagtcataagaatatctt

SEQ ID NO: 139749 - DNA, 19 bp, Homo sapiens
  siRNA target sequence for CDH19 (NM_021153.2,751-769).
gtcataagaatatcttcta

SEQ ID NO: 139750 - DNA, 19 bp, Homo sapiens
  siRNA target sequence for CDH19 (NM_021153.2,781-799).
gaactgcaagatgagtatt

SEQ ID NO: 139751 - DNA, 19 bp, Homo sapiens
  siRNA target sequence for CDH19 (NM_021153.2,795-813).
gtattgggtaatcattcaa

SEQ ID NO: 139752 - DNA, 19 bp, Homo sapiens
  siRNA target sequence for CDH19 (NM_021153.2,841-859).
gcgttgtctggaacaacaa

SEQ ID NO: 139753 - DNA, 19 bp, Homo sapiens
  siRNA target sequence for CDH19 (NM_021153.2,843-861).
gttgtctggaacaacaagt

SEQ ID NO: 139754 - DNA, 19 bp, Homo sapiens
  siRNA target sequence for CDH19 (NM_021153.2,850-868).
ggaacaacaagtgtattaa

SEQ ID NO: 139755 - DNA, 19 bp, Homo sapiens
  siRNA target sequence for CDH19 (NM_021153.2,851-869).
gaacaacaagtgtattaat

SEQ ID NO: 139756 - DNA, 19 bp, Homo sapiens
  siRNA target sequence for CDH19 (NM_021153.2,889-907).
gacaataagcctatattta

SEQ ID NO: 139757 - DNA, 19 bp, Homo sapiens
  siRNA target sequence for CDH19 (NM_021153.2,922-940).
cgcttgactgtctctgaat

SEQ ID NO: 139758 - DNA, 19 bp, Homo sapiens
  siRNA target sequence for CDH19 (NM_021153.2,953-971).
ggacttctataggaacaat

SEQ ID NO: 139759 - DNA, 19 bp, Homo sapiens
  siRNA target sequence for CDH19 (NM_021153.2,956-974).
cttctataggaacaatcat

SEQ ID NO: 139760 - DNA, 19 bp, Homo sapiens
  siRNA target sequence for CDH19 (NM_021153.2,1033-1051).
gattcgcaaacatttgaca

SEQ ID NO: 139761 - DNA, 19 bp, Homo sapiens
  siRNA target sequence for CDH19 (NM_021153.2,1037-1055).
cgcaaacatttgacattat

SEQ ID NO: 139762 - DNA, 19 bp, Homo sapiens
  siRNA target sequence for CDH19 (NM_021153.2,1070-1088).
ctcaagaaggaatagttat

SEQ ID NO: 139763 - DNA, 19 bp, Homo sapiens
  siRNA target sequence for CDH19 (NM_021153.2,1117-1135).
cagaaccactacggtatta

SEQ ID NO: 139764 - DNA, 19 bp, Homo sapiens
  siRNA target sequence for CDH19 (NM_021153.2,1119-1137).
gaaccactacggtattaga

SEQ ID NO: 139765 - DNA, 19 bp, Homo sapiens
  siRNA target sequence for CDH19 (NM_021153.2,1128-1146).
cggtattagagcaaaagtt

SEQ ID NO: 139766 - DNA, 19 bp, Homo sapiens
  siRNA target sequence for CDH19 (NM_021153.2,1191-1209).
ggcttccaccactttcatt

SEQ ID NO: 139767 - DNA, 19 bp, Homo sapiens
  siRNA target sequence for CDH19 (NM_021153.2,1287-1305).
cccacagggatcatttgta

SEQ ID NO: 139768 - DNA, 19 bp, Homo sapiens
  siRNA target sequence for CDH19 (NM_021153.2,1380-1398).
caatatcaatgataatggt

SEQ ID NO: 139769 - DNA, 19 bp, Homo sapiens
  siRNA target sequence for CDH19 (NM_021153.2,1390-1408).
gataatggtacaatcacta

SEQ ID NO: 139770 - DNA, 19 bp, Homo sapiens
  siRNA target sequence for CDH19 (NM_021153.2,1396-1414).
ggtacaatcactacaagta

SEQ ID NO: 139771 - DNA, 19 bp, Homo sapiens
  siRNA target sequence for CDH19 (NM_021153.2,1397-1415).
gtacaatcactacaagtaa

SEQ ID NO: 139772 - DNA, 19 bp, Homo sapiens
  siRNA target sequence for CDH19 (NM_021153.2,1438-1456).
gcttggtacaacctaagta

SEQ ID NO: 139773 - DNA, 19 bp, Homo sapiens
  siRNA target sequence for CDH19 (NM_021153.2,1439-1457).
cttggtacaacctaagtat

SEQ ID NO: 139774 - DNA, 19 bp, Homo sapiens
  siRNA target sequence for CDH19 (NM_021153.2,1493-1511).
cttcgatcccactgtatgt

SEQ ID NO: 139775 - DNA, 19 bp, Homo sapiens
  siRNA target sequence for CDH19 (NM_021153.2,1510-1528).
gtgcaagttcttaacatca

SEQ ID NO: 139776 - DNA, 19 bp, Homo sapiens
  siRNA target sequence for CDH19 (NM_021153.2,1512-1530).
gcaagttcttaacatcaat

SEQ ID NO: 139777 - DNA, 19 bp, Homo sapiens
  siRNA target sequence for CDH19 (NM_021153.2,1541-1559).
ctgagttctctcaatacta

SEQ ID NO: 139778 - DNA, 19 bp, Homo sapiens
  siRNA target sequence for CDH19 (NM_021153.2,1550-1568).
ctcaatactatgagactta

SEQ ID NO: 139779 - DNA, 19 bp, Homo sapiens
  siRNA target sequence for CDH19 (NM_021153.2,1557-1575).
ctatgagacttatgtttgt

SEQ ID NO: 139780 - DNA, 19 bp, Homo sapiens
  siRNA target sequence for CDH19 (NM_021153.2,1561-1579).
gagacttatgtttgtgaaa

SEQ ID NO: 139781 - DNA, 19 bp, Homo sapiens
  siRNA target sequence for CDH19 (NM_021153.2,1615-1633).
gcagtggatagagatgaat

SEQ ID NO: 139782 - DNA, 19 bp, Homo sapiens
  siRNA target sequence for CDH19 (NM_021153.2,1620-1638).
ggatagagatgaatccata

SEQ ID NO: 139783 - DNA, 19 bp, Homo sapiens
  siRNA target sequence for CDH19 (NM_021153.2,1625-1643).
gagatgaatccatagaaga

SEQ ID NO: 139784 - DNA, 19 bp, Homo sapiens
  siRNA target sequence for CDH19 (NM_021153.2,1634-1652).
ccatagaagagcaccattt

SEQ ID NO: 139785 - DNA, 19 bp, Homo sapiens
  siRNA target sequence for CDH19 (NM_021153.2,1669-1687).
gtagaagacactaacaatt

SEQ ID NO: 139786 - DNA, 19 bp, Homo sapiens
  siRNA target sequence for CDH19 (NM_021153.2,1672-1690).
gaagacactaacaattcaa

SEQ ID NO: 139787 - DNA, 19 bp, Homo sapiens
  siRNA target sequence for CDH19 (NM_021153.2,1675-1693).
gacactaacaattcaagtt

SEQ ID NO: 139788 - DNA, 19 bp, Homo sapiens
  siRNA target sequence for CDH19 (NM_021153.2,1697-1715).
caatcatagataatcaaga

SEQ ID NO: 139789 - DNA, 19 bp, Homo sapiens
  siRNA target sequence for CDH19 (NM_021153.2,1719-1737).
cacagctgtcattttgact

SEQ ID NO: 139790 - DNA, 19 bp, Homo sapiens
  siRNA target sequence for CDH19 (NM_021153.2,1721-1739).
cagctgtcattttgactaa

SEQ ID NO: 139791 - DNA, 19 bp, Homo sapiens
  siRNA target sequence for CDH19 (NM_021153.2,1734-1752).
gactaatagaactggtttt

SEQ ID NO: 139792 - DNA, 19 bp, Homo sapiens
  siRNA target sequence for CDH19 (NM_021153.2,1765-1783).
gaacctgtcttctacatct

SEQ ID NO: 139793 - DNA, 19 bp, Homo sapiens
  siRNA target sequence for CDH19 (NM_021153.2,1809-1827).
cccgtcacttacaagtaca

SEQ ID NO: 139794 - DNA, 19 bp, Homo sapiens
  siRNA target sequence for CDH19 (NM_021153.2,1810-1828).
ccgtcacttacaagtacaa

SEQ ID NO: 139795 - DNA, 19 bp, Homo sapiens
  siRNA target sequence for CDH19 (NM_021153.2,1823-1841).
gtacaaacacccttaccat

SEQ ID NO: 139796 - DNA, 19 bp, Homo sapiens
  siRNA target sequence for CDH19 (NM_021153.2,1944-1962).
catttgcattatgatcata

SEQ ID NO: 139797 - DNA, 19 bp, Homo sapiens
  siRNA target sequence for CDH19 (NM_021153.2,2040-2058).
cagagagaatatattccaa

SEQ ID NO: 139798 - DNA, 19 bp, Homo sapiens
  siRNA target sequence for CDH19 (NM_021153.2,2046-2064).
gaatatattccaatatgat

SEQ ID NO: 139799 - DNA, 19 bp, Homo sapiens
  siRNA target sequence for CDH19 (NM_021153.2,2112-2130).
gctgaggagtagtaccata

SEQ ID NO: 139800 - DNA, 19 bp, Homo sapiens
  siRNA target sequence for CDH19 (NM_021153.2,2113-2131).
ctgaggagtagtaccataa

SEQ ID NO: 139801 - DNA, 19 bp, Homo sapiens
  siRNA target sequence for CDH19 (NM_021153.2,2167-2185).
gagatcaggagcctataca

SEQ ID NO: 139802 - DNA, 19 bp, Homo sapiens
  siRNA target sequence for CDH19 (NM_021153.2,2177-2195).
gcctatacaggcagtcttt

SEQ ID NO: 139803 - DNA, 19 bp, Homo sapiens
  siRNA target sequence for CDH19 (NM_021153.2,2206-2224).
cccgacagtgccatattca

SEQ ID NO: 139804 - DNA, 19 bp, Homo sapiens
  siRNA target sequence for CDH19 (NM_021153.2,2213-2231).
gtgccatattcaggaaatt

SEQ ID NO: 139805 - DNA, 19 bp, Homo sapiens
  siRNA target sequence for CDH19 (NM_021153.2,2215-2233).
gccatattcaggaaattca

SEQ ID NO: 139806 - DNA, 19 bp, Homo sapiens
  siRNA target sequence for CDH19 (NM_021153.2,2216-2234).
ccatattcaggaaattcat

SEQ ID NO: 139807 - DNA, 19 bp, Homo sapiens
  siRNA target sequence for CDH19 (NM_021153.2,2217-2235).
catattcaggaaattcatt

SEQ ID NO: 139808 - DNA, 19 bp, Homo sapiens
  siRNA target sequence for CDH19 (NM_021153.2,2244-2262).
gctcgaagaagctaatact

SEQ ID NO: 139809 - DNA, 19 bp, Homo sapiens
  siRNA target sequence for CDH19 (NM_021153.2,2334-2352).
cctgagctccttagaatca

SEQ ID NO: 139810 - DNA, 19 bp, Homo sapiens
  siRNA target sequence for CDH19 (NM_021153.2,2432-2450).
gttctgcagtgcagtcaaa

SEQ ID NO: 139811 - DNA, 19 bp, Homo sapiens
  siRNA target sequence for CDH19 (NM_021153.2,2435-2453).
ctgcagtgcagtcaaataa

SEQ ID NO: 139812 - DNA, 19 bp, Homo sapiens
  siRNA target sequence for CDH2 (NM_001792.2,360-378).
gacagcctcttctcaatgt

SEQ ID NO: 139813 - DNA, 19 bp, Homo sapiens
  siRNA target sequence for CDH2 (NM_001792.2,371-389).
ctcaatgtgaagtttagca

SEQ ID NO: 139814 - DNA, 19 bp, Homo sapiens
  siRNA target sequence for CDH2 (NM_001792.2,466-484).
gtatgccgtgagaagcttt

SEQ ID NO: 139815 - DNA, 19 bp, Homo sapiens
  siRNA target sequence for CDH2 (NM_001792.2,568-586).
gagcctgaagccaacctta

SEQ ID NO: 139816 - DNA, 19 bp, Homo sapiens
  siRNA target sequence for CDH2 (NM_001792.2,689-707).
gtcatccctccaatcaact

SEQ ID NO: 139817 - DNA, 19 bp, Homo sapiens
  siRNA target sequence for CDH2 (NM_001792.2,746-764).
gtcaggatcaggtctgata

SEQ ID NO: 139818 - DNA, 19 bp, Homo sapiens
  siRNA target sequence for CDH2 (NM_001792.2,748-766).
caggatcaggtctgataga

SEQ ID NO: 139819 - DNA, 19 bp, Homo sapiens
  siRNA target sequence for CDH2 (NM_001792.2,751-769).
gatcaggtctgatagagat

SEQ ID NO: 139820 - DNA, 19 bp, Homo sapiens
  siRNA target sequence for CDH2 (NM_001792.2,756-774).
ggtctgatagagataaaaa

SEQ ID NO: 139821 - DNA, 19 bp, Homo sapiens
  siRNA target sequence for CDH2 (NM_001792.2,765-783).
gagataaaaacctttcact

SEQ ID NO: 139822 - DNA, 19 bp, Homo sapiens
  siRNA target sequence for CDH2 (NM_001792.2,819-837).
ctccaactggtatcttcat

SEQ ID NO: 139823 - DNA, 19 bp, Homo sapiens
  siRNA target sequence for CDH2 (NM_001792.2,825-843).
ctggtatcttcattatcaa

SEQ ID NO: 139824 - DNA, 19 bp, Homo sapiens
  siRNA target sequence for CDH2 (NM_001792.2,889-907).
gcagatagcccggtttcat

SEQ ID NO: 139825 - DNA, 19 bp, Homo sapiens
  siRNA target sequence for CDH2 (NM_001792.2,890-908).
cagatagcccggtttcatt

SEQ ID NO: 139826 - DNA, 19 bp, Homo sapiens
  siRNA target sequence for CDH2 (NM_001792.2,910-928).
gagggcacatgcagtagat

SEQ ID NO: 139827 - DNA, 19 bp, Homo sapiens
  siRNA target sequence for CDH2 (NM_001792.2,912-930).
gggcacatgcagtagatat

SEQ ID NO: 139828 - DNA, 19 bp, Homo sapiens
  siRNA target sequence for CDH2 (NM_001792.2,921-939).
cagtagatattaatggaaa

SEQ ID NO: 139829 - DNA, 19 bp, Homo sapiens
  siRNA target sequence for CDH2 (NM_001792.2,965-983).
gtcatcaatgttattgaca

SEQ ID NO: 139830 - DNA, 19 bp, Homo sapiens
  siRNA target sequence for CDH2 (NM_001792.2,970-988).
caatgttattgacatgaat

SEQ ID NO: 139831 - DNA, 19 bp, Homo sapiens
  siRNA target sequence for CDH2 (NM_001792.2,1006-1024).
cttacaccaggtttggaat

SEQ ID NO: 139832 - DNA, 19 bp, Homo sapiens
  siRNA target sequence for CDH2 (NM_001792.2,1100-1118).
gccctcaatgggatgttga

SEQ ID NO: 139833 - DNA, 19 bp, Homo sapiens
  siRNA target sequence for CDH2 (NM_001792.2,1229-1247).
gtgcaacagtatacgttaa

SEQ ID NO: 139834 - DNA, 19 bp, Homo sapiens
  siRNA target sequence for CDH2 (NM_001792.2,1231-1249).
gcaacagtatacgttaata

SEQ ID NO: 139835 - DNA, 19 bp, Homo sapiens
  siRNA target sequence for CDH2 (NM_001792.2,1232-1250).
caacagtatacgttaataa

SEQ ID NO: 139836 - DNA, 19 bp, Homo sapiens
  siRNA target sequence for CDH2 (NM_001792.2,1267-1285).
ggaaggcaatcccacatat

SEQ ID NO: 139837 - DNA, 19 bp, Homo sapiens
  siRNA target sequence for CDH2 (NM_001792.2,1360-1378).
gacgttttatggtgaagtt

SEQ ID NO: 139838 - DNA, 19 bp, Homo sapiens
  siRNA target sequence for CDH2 (NM_001792.2,1380-1398).
ctgagaacagggtagacat

SEQ ID NO: 139839 - DNA, 19 bp, Homo sapiens
  siRNA target sequence for CDH2 (NM_001792.2,1384-1402).
gaacagggtagacatcata

SEQ ID NO: 139840 - DNA, 19 bp, Homo sapiens
  siRNA target sequence for CDH2 (NM_001792.2,1387-1405).
cagggtagacatcatagta

SEQ ID NO: 139841 - DNA, 19 bp, Homo sapiens
  siRNA target sequence for CDH2 (NM_001792.2,1396-1414).
catcatagtagctaatcta

SEQ ID NO: 139842 - DNA, 19 bp, Homo sapiens
  siRNA target sequence for CDH2 (NM_001792.2,1399-1417).
catagtagctaatctaact

SEQ ID NO: 139843 - DNA, 19 bp, Homo sapiens
  siRNA target sequence for CDH2 (NM_001792.2,1456-1474).
cgcagtgtacagaatcagt

SEQ ID NO: 139844 - DNA, 19 bp, Homo sapiens
  siRNA target sequence for CDH2 (NM_001792.2,1535-1553).
gtcaccgtggtcaaaccaa

SEQ ID NO: 139845 - DNA, 19 bp, Homo sapiens
  siRNA target sequence for CDH2 (NM_001792.2,1546-1564).
caaaccaatcgactttgaa

SEQ ID NO: 139846 - DNA, 19 bp, Homo sapiens
  siRNA target sequence for CDH2 (NM_001792.2,1550-1568).
ccaatcgactttgaaacaa

SEQ ID NO: 139847 - DNA, 19 bp, Homo sapiens
  siRNA target sequence for CDH2 (NM_001792.2,1573-1591).
gatgtttgtccttactgtt

SEQ ID NO: 139848 - DNA, 19 bp, Homo sapiens
  siRNA target sequence for CDH2 (NM_001792.2,1653-1671).
ccgtgtctgttacagttat

SEQ ID NO: 139849 - DNA, 19 bp, Homo sapiens
  siRNA target sequence for CDH2 (NM_001792.2,1654-1672).
cgtgtctgttacagttatt

SEQ ID NO: 139850 - DNA, 19 bp, Homo sapiens
  siRNA target sequence for CDH2 (NM_001792.2,1697-1715).
gcccccaatcctaagatca

SEQ ID NO: 139851 - DNA, 19 bp, Homo sapiens
  siRNA target sequence for CDH2 (NM_001792.2,1699-1717).
ccccaatcctaagatcatt

SEQ ID NO: 139852 - DNA, 19 bp, Homo sapiens
  siRNA target sequence for CDH2 (NM_001792.2,1711-1729).
gatcattcgccaagaagaa

SEQ ID NO: 139853 - DNA, 19 bp, Homo sapiens
  siRNA target sequence for CDH2 (NM_001792.2,1736-1754).
catgccggtaccatgttga

SEQ ID NO: 139854 - DNA, 19 bp, Homo sapiens
  siRNA target sequence for CDH2 (NM_001792.2,1739-1757).
gccggtaccatgttgacaa

SEQ ID NO: 139855 - DNA, 19 bp, Homo sapiens
  siRNA target sequence for CDH2 (NM_001792.2,1742-1760).
ggtaccatgttgacaacat

SEQ ID NO: 139856 - DNA, 19 bp, Homo sapiens
  siRNA target sequence for CDH2 (NM_001792.2,1743-1761).
gtaccatgttgacaacatt

SEQ ID NO: 139857 - DNA, 19 bp, Homo sapiens
  siRNA target sequence for CDH2 (NM_001792.2,1769-1787).
caggacccagatcgatata

SEQ ID NO: 139858 - DNA, 19 bp, Homo sapiens
  siRNA target sequence for CDH2 (NM_001792.2,1823-1841).
cctgccaattggctaaaaa

SEQ ID NO: 139859 - DNA, 19 bp, Homo sapiens
  siRNA target sequence for CDH2 (NM_001792.2,1827-1845).
ccaattggctaaaaataga

SEQ ID NO: 139860 - DNA, 19 bp, Homo sapiens
  siRNA target sequence for CDH2 (NM_001792.2,1828-1846).
caattggctaaaaatagat

SEQ ID NO: 139861 - DNA, 19 bp, Homo sapiens
  siRNA target sequence for CDH2 (NM_001792.2,1882-1900).
ggaccgagaatcaccaaat

SEQ ID NO: 139862 - DNA, 19 bp, Homo sapiens
  siRNA target sequence for CDH2 (NM_001792.2,1887-1905).
gagaatcaccaaatgtgaa

SEQ ID NO: 139863 - DNA, 19 bp, Homo sapiens
  siRNA target sequence for CDH2 (NM_001792.2,1970-1988).
ggaacgctgcagatctatt

SEQ ID NO: 139864 - DNA, 19 bp, Homo sapiens
  siRNA target sequence for CDH2 (NM_001792.2,1971-1989).
gaacgctgcagatctattt

SEQ ID NO: 139865 - DNA, 19 bp, Homo sapiens
  siRNA target sequence for CDH2 (NM_001792.2,1974-1992).
cgctgcagatctatttact

SEQ ID NO: 139866 - DNA, 19 bp, Homo sapiens
  siRNA target sequence for CDH2 (NM_001792.2,1975-1993).
gctgcagatctatttactt

SEQ ID NO: 139867 - DNA, 19 bp, Homo sapiens
  siRNA target sequence for CDH2 (NM_001792.2,1978-1996).
gcagatctatttacttgat

SEQ ID NO: 139868 - DNA, 19 bp, Homo sapiens
  siRNA target sequence for CDH2 (NM_001792.2,1979-1997).
cagatctatttacttgata

SEQ ID NO: 139869 - DNA, 19 bp, Homo sapiens
  siRNA target sequence for CDH2 (NM_001792.2,2052-2070).
cagaccccaattcaattaa

SEQ ID NO: 139870 - DNA, 19 bp, Homo sapiens
  siRNA target sequence for CDH2 (NM_001792.2,2106-2124).
ctggaccatttgcttttga

SEQ ID NO: 139871 - DNA, 19 bp, Homo sapiens
  siRNA target sequence for CDH2 (NM_001792.2,2161-2179).
gaccatcactcggcttaat

SEQ ID NO: 139872 - DNA, 19 bp, Homo sapiens
  siRNA target sequence for CDH2 (NM_001792.2,2164-2182).
catcactcggcttaatggt

SEQ ID NO: 139873 - DNA, 19 bp, Homo sapiens
  siRNA target sequence for CDH2 (NM_001792.2,2169-2187).
ctcggcttaatggtgattt

SEQ ID NO: 139874 - DNA, 19 bp, Homo sapiens
  siRNA target sequence for CDH2 (NM_001792.2,2173-2191).
gcttaatggtgattttgct

SEQ ID NO: 139875 - DNA, 19 bp, Homo sapiens
  siRNA target sequence for CDH2 (NM_001792.2,2189-2207).
gctcagcttaatttaaaga

SEQ ID NO: 139876 - DNA, 19 bp, Homo sapiens
  siRNA target sequence for CDH2 (NM_001792.2,2190-2208).
ctcagcttaatttaaagat

SEQ ID NO: 139877 - DNA, 19 bp, Homo sapiens
  siRNA target sequence for CDH2 (NM_001792.2,2240-2258).
cccatcataatcacagatt

SEQ ID NO: 139878 - DNA, 19 bp, Homo sapiens
  siRNA target sequence for CDH2 (NM_001792.2,2260-2278).
gggtaatcctcccaaatca

SEQ ID NO: 139879 - DNA, 19 bp, Homo sapiens
  siRNA target sequence for CDH2 (NM_001792.2,2428-2446).
gtttgtggtatggatgaaa

SEQ ID NO: 139880 - DNA, 19 bp, Homo sapiens
  siRNA target sequence for CDH2 (NM_001792.2,2462-2480).
cgccaggccaaacaacttt

SEQ ID NO: 139881 - DNA, 19 bp, Homo sapiens
  siRNA target sequence for CDH2 (NM_001792.2,2463-2481).
gccaggccaaacaactttt

SEQ ID NO: 139882 - DNA, 19 bp, Homo sapiens
  siRNA target sequence for CDH2 (NM_001792.2,2464-2482).
ccaggccaaacaactttta

SEQ ID NO: 139883 - DNA, 19 bp, Homo sapiens
  siRNA target sequence for CDH2 (NM_001792.2,2465-2483).
caggccaaacaacttttaa

SEQ ID NO: 139884 - DNA, 19 bp, Homo sapiens
  siRNA target sequence for CDH2 (NM_001792.2,2470-2488).
caaacaacttttaattgat

SEQ ID NO: 139885 - DNA, 19 bp, Homo sapiens
  siRNA target sequence for CDH2 (NM_001792.2,2623-2641).
ccgacgaatggatgaaaga

SEQ ID NO: 139886 - DNA, 19 bp, Homo sapiens
  siRNA target sequence for CDH2 (NM_001792.2,2683-2701).
cccacaccctggagacatt

SEQ ID NO: 139887 - DNA, 19 bp, Homo sapiens
  siRNA target sequence for CDH2 (NM_001792.2,2696-2714).
gacattggggacttcatta

SEQ ID NO: 139888 - DNA, 19 bp, Homo sapiens
  siRNA target sequence for CDH2 (NM_001792.2,2698-2716).
cattggggacttcattaat

SEQ ID NO: 139889 - DNA, 19 bp, Homo sapiens
  siRNA target sequence for CDH2 (NM_001792.2,2743-2761).
ccccacagctccaccatat

SEQ ID NO: 139890 - DNA, 19 bp, Homo sapiens
  siRNA target sequence for CDH2 (NM_001792.2,2745-2763).
ccacagctccaccatatga

SEQ ID NO: 139891 - DNA, 19 bp, Homo sapiens
  siRNA target sequence for CDH2 (NM_001792.2,2757-2775).
catatgactccctgttagt

SEQ ID NO: 139892 - DNA, 19 bp, Homo sapiens
  siRNA target sequence for CDH2 (NM_001792.2,2843-2861).
ggtgagcaggactatgatt

SEQ ID NO: 139893 - DNA, 19 bp, Homo sapiens
  siRNA target sequence for CDH2 (NM_001792.2,2890-2908).
gaaacttgctgacatgtat

SEQ ID NO: 139894 - DNA, 19 bp, Homo sapiens
  siRNA target sequence for CDH20 (NM_031891.2,61-79).
ggcatgtccttgtacttct

SEQ ID NO: 139895 - DNA, 19 bp, Homo sapiens
  siRNA target sequence for CDH20 (NM_031891.2,122-140).
caacaccacaaggtgaatt

SEQ ID NO: 139896 - DNA, 19 bp, Homo sapiens
  siRNA target sequence for CDH20 (NM_031891.2,125-143).
caccacaaggtgaattaga

SEQ ID NO: 139897 - DNA, 19 bp, Homo sapiens
  siRNA target sequence for CDH20 (NM_031891.2,230-248).
ctgggaccgaccctttgta

SEQ ID NO: 139898 - DNA, 19 bp, Homo sapiens
  siRNA target sequence for CDH20 (NM_031891.2,233-251).
ggaccgaccctttgtatgt

SEQ ID NO: 139899 - DNA, 19 bp, Homo sapiens
  siRNA target sequence for CDH20 (NM_031891.2,355-373).
gacatccacgccattcaga

SEQ ID NO: 139900 - DNA, 19 bp, Homo sapiens
  siRNA target sequence for CDH20 (NM_031891.2,387-405).
ggaaagagcccagtatact

SEQ ID NO: 139901 - DNA, 19 bp, Homo sapiens
  siRNA target sequence for CDH20 (NM_031891.2,504-522).
gttcctggacggaccttat

SEQ ID NO: 139902 - DNA, 19 bp, Homo sapiens
  siRNA target sequence for CDH20 (NM_031891.2,663-681).
ctctaaaacaggtgtaatt

SEQ ID NO: 139903 - DNA, 19 bp, Homo sapiens
  siRNA target sequence for CDH20 (NM_031891.2,718-736).
gaatactacgaagtgatta

SEQ ID NO: 139904 - DNA, 19 bp, Homo sapiens
  siRNA target sequence for CDH20 (NM_031891.2,800-818).
ccctctcagatgtcaatga

SEQ ID NO: 139905 - DNA, 19 bp, Homo sapiens
  siRNA target sequence for CDH20 (NM_031891.2,801-819).
cctctcagatgtcaatgat

SEQ ID NO: 139906 - DNA, 19 bp, Homo sapiens
  siRNA target sequence for CDH20 (NM_031891.2,829-847).
cgctttccccagaaacatt

SEQ ID NO: 139907 - DNA, 19 bp, Homo sapiens
  siRNA target sequence for CDH20 (NM_031891.2,830-848).
gctttccccagaaacatta

SEQ ID NO: 139908 - DNA, 19 bp, Homo sapiens
  siRNA target sequence for CDH20 (NM_031891.2,865-883).
gaatcagctccaattagct

SEQ ID NO: 139909 - DNA, 19 bp, Homo sapiens
  siRNA target sequence for CDH20 (NM_031891.2,885-903).
cactgtcgggagagtgttt

SEQ ID NO: 139910 - DNA, 19 bp, Homo sapiens
  siRNA target sequence for CDH20 (NM_031891.2,995-1013).
ccaatttccaagttggtat

SEQ ID NO: 139911 - DNA, 19 bp, Homo sapiens
  siRNA target sequence for CDH20 (NM_031891.2,1079-1097).
ccaatcctcacctagagat

SEQ ID NO: 139912 - DNA, 19 bp, Homo sapiens
  siRNA target sequence for CDH20 (NM_031891.2,1161-1179).
ggacgagccccctgtgttt

SEQ ID NO: 139913 - DNA, 19 bp, Homo sapiens
  siRNA target sequence for CDH20 (NM_031891.2,1218-1236).
ggcgattggaacaaccata

SEQ ID NO: 139914 - DNA, 19 bp, Homo sapiens
  siRNA target sequence for CDH20 (NM_031891.2,1226-1244).
gaacaaccatacagatcat

SEQ ID NO: 139915 - DNA, 19 bp, Homo sapiens
  siRNA target sequence for CDH20 (NM_031891.2,1258-1276).
ccagatgtgaccaacaact

SEQ ID NO: 139916 - DNA, 19 bp, Homo sapiens
  siRNA target sequence for CDH20 (NM_031891.2,1261-1279).
gatgtgaccaacaactcaa

SEQ ID NO: 139917 - DNA, 19 bp, Homo sapiens
  siRNA target sequence for CDH20 (NM_031891.2,1268-1286).
ccaacaactcaatcagata

SEQ ID NO: 139918 - DNA, 19 bp, Homo sapiens
  siRNA target sequence for CDH20 (NM_031891.2,1281-1299).
cagatactccattgataga

SEQ ID NO: 139919 - DNA, 19 bp, Homo sapiens
  siRNA target sequence for CDH20 (NM_031891.2,1304-1322).
gtgaccctggaagattttt

SEQ ID NO: 139920 - DNA, 19 bp, Homo sapiens
  siRNA target sequence for CDH20 (NM_031891.2,1313-1331).
gaagatttttctatgttga

SEQ ID NO: 139921 - DNA, 19 bp, Homo sapiens
  siRNA target sequence for CDH20 (NM_031891.2,1316-1334).
gatttttctatgttgacat

SEQ ID NO: 139922 - DNA, 19 bp, Homo sapiens
  siRNA target sequence for CDH20 (NM_031891.2,1364-1382).
ccctagaccgggaagaatt

SEQ ID NO: 139923 - DNA, 19 bp, Homo sapiens
  siRNA target sequence for CDH20 (NM_031891.2,1365-1383).
cctagaccgggaagaattt

SEQ ID NO: 139924 - DNA, 19 bp, Homo sapiens
  siRNA target sequence for CDH20 (NM_031891.2,1366-1384).
ctagaccgggaagaatttt

SEQ ID NO: 139925 - DNA, 19 bp, Homo sapiens
  siRNA target sequence for CDH20 (NM_031891.2,1400-1418).
ctgtccttgctatggaaat

SEQ ID NO: 139926 - DNA, 19 bp, Homo sapiens
  siRNA target sequence for CDH20 (NM_031891.2,1447-1465).
cctgtcacaatcaaagtct

SEQ ID NO: 139927 - DNA, 19 bp, Homo sapiens
  siRNA target sequence for CDH20 (NM_031891.2,1496-1514).
ccagattctatgaagcttt

SEQ ID NO: 139928 - DNA, 19 bp, Homo sapiens
  siRNA target sequence for CDH20 (NM_031891.2,1497-1515).
cagattctatgaagctttt

SEQ ID NO: 139929 - DNA, 19 bp, Homo sapiens
  siRNA target sequence for CDH20 (NM_031891.2,1580-1598).
cacgcaatggtcagcattt

SEQ ID NO: 139930 - DNA, 19 bp, Homo sapiens
  siRNA target sequence for CDH20 (NM_031891.2,1582-1600).
cgcaatggtcagcatttct

SEQ ID NO: 139931 - DNA, 19 bp, Homo sapiens
  siRNA target sequence for CDH20 (NM_031891.2,1629-1647).
caaccccaactttaccata

SEQ ID NO: 139932 - DNA, 19 bp, Homo sapiens
  siRNA target sequence for CDH20 (NM_031891.2,1943-1961).
ggcaccggaaacaaccata

SEQ ID NO: 139933 - DNA, 19 bp, Homo sapiens
  siRNA target sequence for CDH20 (NM_031891.2,1948-1966).
cggaaacaaccatacatca

SEQ ID NO: 139934 - DNA, 19 bp, Homo sapiens
  siRNA target sequence for CDH20 (NM_031891.2,1949-1967).
ggaaacaaccatacatcat

SEQ ID NO: 139935 - DNA, 19 bp, Homo sapiens
  siRNA target sequence for CDH20 (NM_031891.2,2239-2257).
gactccctccagacgtata

SEQ ID NO: 139936 - DNA, 19 bp, Homo sapiens
  siRNA target sequence for CDH20 (NM_031891.2,2243-2261).
ccctccagacgtatatgtt

SEQ ID NO: 139937 - DNA, 19 bp, Homo sapiens
  siRNA target sequence for CDH22 (NM_021248.1,631-649).
gcacggagcccctgtatgt

SEQ ID NO: 139938 - DNA, 19 bp, Homo sapiens
  siRNA target sequence for CDH22 (NM_021248.1,743-761).
gctgacaggcgacattcat

SEQ ID NO: 139939 - DNA, 19 bp, Homo sapiens
  siRNA target sequence for CDH22 (NM_021248.1,777-795).
gaccgcgagcagaaaacct

SEQ ID NO: 139940 - DNA, 19 bp, Homo sapiens
  siRNA target sequence for CDH22 (NM_021248.1,1227-1245).
cgtttcccgcagaagatgt

SEQ ID NO: 139941 - DNA, 19 bp, Homo sapiens
  siRNA target sequence for CDH22 (NM_021248.1,1228-1246).
gtttcccgcagaagatgta

SEQ ID NO: 139942 - DNA, 19 bp, Homo sapiens
  siRNA target sequence for CDH22 (NM_021248.1,1323-1341).
gagaacacagacatgactt

SEQ ID NO: 139943 - DNA, 19 bp, Homo sapiens
  siRNA target sequence for CDH22 (NM_021248.1,1693-1711).
ccattgaccgcgaatcaga

SEQ ID NO: 139944 - DNA, 19 bp, Homo sapiens
  siRNA target sequence for CDH22 (NM_021248.1,1694-1712).
cattgaccgcgaatcagat

SEQ ID NO: 139945 - DNA, 19 bp, Homo sapiens
  siRNA target sequence for CDH22 (NM_021248.1,1718-1736).
ccagatcttcgatatcgat

SEQ ID NO: 139946 - DNA, 19 bp, Homo sapiens
  siRNA target sequence for CDH22 (NM_021248.1,1814-1832).
catggaggcggacaatcat

SEQ ID NO: 139947 - DNA, 19 bp, Homo sapiens
  siRNA target sequence for CDH22 (NM_021248.1,2390-2408).
gcgggacaacgtcatcaaa

SEQ ID NO: 139948 - DNA, 19 bp, Homo sapiens
  siRNA target sequence for CDH23 (NM_022124.2,804-822).
cgtccgcatccctgagaat

SEQ ID NO: 139949 - DNA, 19 bp, Homo sapiens
  siRNA target sequence for CDH23 (NM_022124.2,805-823).
gtccgcatccctgagaata

SEQ ID NO: 139950 - DNA, 19 bp, Homo sapiens
  siRNA target sequence for CDH23 (NM_022124.2,1002-1020).
ggtcaacgccacagatcaa

SEQ ID NO: 139951 - DNA, 19 bp, Homo sapiens
  siRNA target sequence for CDH23 (NM_022124.2,1166-1184).
ccgccatagaccaggataa

SEQ ID NO: 139952 - DNA, 19 bp, Homo sapiens
  siRNA target sequence for CDH23 (NM_022124.2,1260-1278).
cggagtgctgaccttgaat

SEQ ID NO: 139953 - DNA, 19 bp, Homo sapiens
  siRNA target sequence for CDH23 (NM_022124.2,1378-1396).
gtcaccacgaccttcaata

SEQ ID NO: 139954 - DNA, 19 bp, Homo sapiens
  siRNA target sequence for CDH23 (NM_022124.2,1388-1406).
ccttcaatatcctggttat

SEQ ID NO: 139955 - DNA, 19 bp, Homo sapiens
  siRNA target sequence for CDH23 (NM_022124.2,1609-1627).
gggaaggcggacattcgta

SEQ ID NO: 139956 - DNA, 19 bp, Homo sapiens
  siRNA target sequence for CDH23 (NM_022124.2,1610-1628).
ggaaggcggacattcgtat

SEQ ID NO: 139957 - DNA, 19 bp, Homo sapiens
  siRNA target sequence for CDH23 (NM_022124.2,1678-1696).
gatctctttgccaatgaga

SEQ ID NO: 139958 - DNA, 19 bp, Homo sapiens
  siRNA target sequence for CDH23 (NM_022124.2,1772-1790).
gccagccactgtacaacat

SEQ ID NO: 139959 - DNA, 19 bp, Homo sapiens
  siRNA target sequence for CDH23 (NM_022124.2,1774-1792).
cagccactgtacaacatca

SEQ ID NO: 139960 - DNA, 19 bp, Homo sapiens
  siRNA target sequence for CDH23 (NM_022124.2,1836-1854).
cctggcaactgacaatgat

SEQ ID NO: 139961 - DNA, 19 bp, Homo sapiens
  siRNA target sequence for CDH23 (NM_022124.2,2026-2044).
cgggtcaggatcaatgtgt

SEQ ID NO: 139962 - DNA, 19 bp, Homo sapiens
  siRNA target sequence for CDH23 (NM_022124.2,2267-2285).
ccctggattatgaacagat

SEQ ID NO: 139963 - DNA, 19 bp, Homo sapiens
  siRNA target sequence for CDH23 (NM_022124.2,2268-2286).
cctggattatgaacagata

SEQ ID NO: 139964 - DNA, 19 bp, Homo sapiens
  siRNA target sequence for CDH23 (NM_022124.2,2288-2306).
ccaatgggctgatttatct

SEQ ID NO: 139965 - DNA, 19 bp, Homo sapiens
  siRNA target sequence for CDH23 (NM_022124.2,2504-2522).
gccaggagtccatcatcta

SEQ ID NO: 139966 - DNA, 19 bp, Homo sapiens
  siRNA target sequence for CDH23 (NM_022124.2,2506-2524).
caggagtccatcatctact

SEQ ID NO: 139967 - DNA, 19 bp, Homo sapiens
  siRNA target sequence for CDH23 (NM_022124.2,2596-2614).
cgagagaccaagtctgaat

SEQ ID NO: 139968 - DNA, 19 bp, Homo sapiens
  siRNA target sequence for CDH23 (NM_022124.2,2647-2665).
gtgggccacaaccagaaaa

SEQ ID NO: 139969 - DNA, 19 bp, Homo sapiens
  siRNA target sequence for CDH23 (NM_022124.2,2649-2667).
gggccacaaccagaaaact

SEQ ID NO: 139970 - DNA, 19 bp, Homo sapiens
  siRNA target sequence for CDH23 (NM_022124.2,2669-2687).
gcatcgccaccgtaaacat

SEQ ID NO: 139971 - DNA, 19 bp, Homo sapiens
  siRNA target sequence for CDH23 (NM_022124.2,2728-2746).
gacgcaccctactacatca

SEQ ID NO: 139972 - DNA, 19 bp, Homo sapiens
  siRNA target sequence for CDH23 (NM_022124.2,3810-3828).
catcctccatggtaaccat

SEQ ID NO: 139973 - DNA, 19 bp, Homo sapiens
  siRNA target sequence for CDH23 (NM_022124.2,3889-3907).
gaccgggagcggaactcat

SEQ ID NO: 139974 - DNA, 19 bp, Homo sapiens
  siRNA target sequence for CDH23 (NM_022124.2,3905-3923).
catcccacgtgctgatagt

SEQ ID NO: 139975 - DNA, 19 bp, Homo sapiens
  siRNA target sequence for CDH23 (NM_022124.2,3962-3980).
ccgtcagggtgattgtgta

SEQ ID NO: 139976 - DNA, 19 bp, Homo sapiens
  siRNA target sequence for CDH23 (NM_022124.2,4168-4186).
gagagcacagggcttatca

SEQ ID NO: 139977 - DNA, 19 bp, Homo sapiens
  siRNA target sequence for CDH23 (NM_022124.2,4218-4236).
gaccagctacatgatgaat

SEQ ID NO: 139978 - DNA, 19 bp, Homo sapiens
  siRNA target sequence for CDH23 (NM_022124.2,4526-4544).
gtgagaagggcgacttcta

SEQ ID NO: 139979 - DNA, 19 bp, Homo sapiens
  siRNA target sequence for CDH23 (NM_022124.2,4528-4546).
gagaagggcgacttctata

SEQ ID NO: 139980 - DNA, 19 bp, Homo sapiens
  siRNA target sequence for CDH23 (NM_022124.2,4812-4830).
ctccattggcgaagtgttt

SEQ ID NO: 139981 - DNA, 19 bp, Homo sapiens
  siRNA target sequence for CDH23 (NM_022124.2,4974-4992).
gagcccctttggatacaat

SEQ ID NO: 139982 - DNA, 19 bp, Homo sapiens
  siRNA target sequence for CDH23 (NM_022124.2,5053-5071).
cgtgacatcgggatcaaca

SEQ ID NO: 139983 - DNA, 19 bp, Homo sapiens
  siRNA target sequence for CDH23 (NM_022124.2,5072-5090).
gtgttctgtcctactacat

SEQ ID NO: 139984 - DNA, 19 bp, Homo sapiens
  siRNA target sequence for CDH23 (NM_022124.2,5074-5092).
gttctgtcctactacatca

SEQ ID NO: 139985 - DNA, 19 bp, Homo sapiens
  siRNA target sequence for CDH23 (NM_022124.2,5571-5589).
caccacggtgcttgtgaat

SEQ ID NO: 139986 - DNA, 19 bp, Homo sapiens
  siRNA target sequence for CDH23 (NM_022124.2,6041-6059).
cacgcctcaccttcaacat

SEQ ID NO: 139987 - DNA, 19 bp, Homo sapiens
  siRNA target sequence for CDH23 (NM_022124.2,6043-6061).
cgcctcaccttcaacatca

SEQ ID NO: 139988 - DNA, 19 bp, Homo sapiens
  siRNA target sequence for CDH23 (NM_022124.2,6151-6169).
gagtacaagctgaccattt

SEQ ID NO: 139989 - DNA, 19 bp, Homo sapiens
  siRNA target sequence for CDH23 (NM_022124.2,6153-6171).
gtacaagctgaccatttct

SEQ ID NO: 139990 - DNA, 19 bp, Homo sapiens
  siRNA target sequence for CDH23 (NM_022124.2,6198-6216).
catagccaggagggattat

SEQ ID NO: 139991 - DNA, 19 bp, Homo sapiens
  siRNA target sequence for CDH23 (NM_022124.2,6202-6220).
gccaggagggattatgact

SEQ ID NO: 139992 - DNA, 19 bp, Homo sapiens
  siRNA target sequence for CDH23 (NM_022124.2,6699-6717).
gctggtctaccgaatagaa

SEQ ID NO: 139993 - DNA, 19 bp, Homo sapiens
  siRNA target sequence for CDH23 (NM_022124.2,6758-6776).
gggtcatccgtgttggtaa

SEQ ID NO: 139994 - DNA, 19 bp, Homo sapiens
  siRNA target sequence for CDH23 (NM_022124.2,6759-6777).
ggtcatccgtgttggtaat

SEQ ID NO: 139995 - DNA, 19 bp, Homo sapiens
  siRNA target sequence for CDH23 (NM_022124.2,6862-6880).
gccattgtcaccattctga

SEQ ID NO: 139996 - DNA, 19 bp, Homo sapiens
  siRNA target sequence for CDH23 (NM_022124.2,6993-7011).
cgacctcaacccaaagcta

SEQ ID NO: 139997 - DNA, 19 bp, Homo sapiens
  siRNA target sequence for CDH23 (NM_022124.2,7079-7097).
cctttgctgtgaatatcaa

SEQ ID NO: 139998 - DNA, 19 bp, Homo sapiens
  siRNA target sequence for CDH23 (NM_022124.2,7113-7131).
ggtgaagtcccccatgaat

SEQ ID NO: 139999 - DNA, 19 bp, Homo sapiens
  siRNA target sequence for CDH23 (NM_022124.2,7160-7178).
ctctctcagtgattgacaa

SEQ ID NO: 140000 - DNA, 19 bp, Homo sapiens
  siRNA target sequence for CDH23 (NM_022124.2,7320-7338).
ccctgggaccacactcatt

SEQ ID NO: 140001 - DNA, 19 bp, Homo sapiens
  siRNA target sequence for CDH23 (NM_022124.2,7356-7374).
ccctgacaagggccttaat

SEQ ID NO: 140002 - DNA, 19 bp, Homo sapiens
  siRNA target sequence for CDH23 (NM_022124.2,7483-7501).
gtgcactggctcaacttta

SEQ ID NO: 140003 - DNA, 19 bp, Homo sapiens
  siRNA target sequence for CDH23 (NM_022124.2,7550-7568).
ctgtctacctggaaatcgt

SEQ ID NO: 140004 - DNA, 19 bp, Homo sapiens
  siRNA target sequence for CDH23 (NM_022124.2,7745-7763).
ccaccacgggtgacatcta

SEQ ID NO: 140005 - DNA, 19 bp, Homo sapiens
  siRNA target sequence for CDH23 (NM_022124.2,7746-7764).
caccacgggtgacatctat

SEQ ID NO: 140006 - DNA, 19 bp, Homo sapiens
  siRNA target sequence for CDH23 (NM_022124.2,7748-7766).
ccacgggtgacatctatgt

SEQ ID NO: 140007 - DNA, 19 bp, Homo sapiens
  siRNA target sequence for CDH23 (NM_022124.2,7845-7863).
cagcaaccgtcgcgaaaat

SEQ ID NO: 140008 - DNA, 19 bp, Homo sapiens
  siRNA target sequence for CDH23 (NM_022124.2,7848-7866).
caaccgtcgcgaaaattca

SEQ ID NO: 140009 - DNA, 19 bp, Homo sapiens
  siRNA target sequence for CDH23 (NM_022124.2,7935-7953).
cacaagcgtgtatgagaat

SEQ ID NO: 140010 - DNA, 19 bp, Homo sapiens
  siRNA target sequence for CDH23 (NM_022124.2,7937-7955).
caagcgtgtatgagaatga

SEQ ID NO: 140011 - DNA, 19 bp, Homo sapiens
  siRNA target sequence for CDH23 (NM_022124.2,8365-8383).
cgggactgggagttcttca

SEQ ID NO: 140012 - DNA, 19 bp, Homo sapiens
  siRNA target sequence for CDH23 (NM_022124.2,8444-8462).
cggtgtacagcctcatctt

SEQ ID NO: 140013 - DNA, 19 bp, Homo sapiens
  siRNA target sequence for CDH23 (NM_022124.2,8486-8504).
cagtgccatacgagactat

SEQ ID NO: 140014 - DNA, 19 bp, Homo sapiens
  siRNA target sequence for CDH23 (NM_022124.2,8669-8687).
ccaacgcgatcgtgtacta

SEQ ID NO: 140015 - DNA, 19 bp, Homo sapiens
  siRNA target sequence for CDH23 (NM_022124.2,9017-9035).
gcaacaacagccttgtctt

SEQ ID NO: 140016 - DNA, 19 bp, Homo sapiens
  siRNA target sequence for CDH23 (NM_022124.2,9256-9274).
cgcgtcaagatcgtcatta

SEQ ID NO: 140017 - DNA, 19 bp, Homo sapiens
  siRNA target sequence for CDH23 (NM_022124.2,9257-9275).
gcgtcaagatcgtcattaa

SEQ ID NO: 140018 - DNA, 19 bp, Homo sapiens
  siRNA target sequence for CDH23 (NM_022124.2,9336-9354).
cactggggccattgtcaat

SEQ ID NO: 140019 - DNA, 19 bp, Homo sapiens
  siRNA target sequence for CDH23 (NM_022124.2,9341-9359).
gggccattgtcaatactga

SEQ ID NO: 140020 - DNA, 19 bp, Homo sapiens
  siRNA target sequence for CDH23 (NM_022124.2,9495-9513).
ggagcagctacggaatctt

SEQ ID NO: 140021 - DNA, 19 bp, Homo sapiens
  siRNA target sequence for CDH23 (NM_022124.2,9496-9514).
gagcagctacggaatcttt

SEQ ID NO: 140022 - DNA, 19 bp, Homo sapiens
  siRNA target sequence for CDH23 (NM_022124.2,9716-9734).
gtggcttcatcgacatcat

SEQ ID NO: 140023 - DNA, 19 bp, Homo sapiens
  siRNA target sequence for CDH23 (NM_022124.2,9742-9760).
cctaacaccaacaagtact

SEQ ID NO: 140024 - DNA, 19 bp, Homo sapiens
  siRNA target sequence for CDH23 (NM_022124.2,9750-9768).
caacaagtactcctttgat

SEQ ID NO: 140025 - DNA, 19 bp, Homo sapiens
  siRNA target sequence for CDH24 (NM_022478.2,269-287).
gtccagagcctgttctcat

SEQ ID NO: 140026 - DNA, 19 bp, Homo sapiens
  siRNA target sequence for CDH24 (NM_022478.2,351-369).
gggggcaggcaccgtattt

SEQ ID NO: 140027 - DNA, 19 bp, Homo sapiens
  siRNA target sequence for CDH24 (NM_022478.2,355-373).
gcaggcaccgtatttgtga

SEQ ID NO: 140028 - DNA, 19 bp, Homo sapiens
  siRNA target sequence for CDH24 (NM_022478.2,356-374).
caggcaccgtatttgtgat

SEQ ID NO: 140029 - DNA, 19 bp, Homo sapiens
  siRNA target sequence for CDH24 (NM_022478.2,359-377).
gcaccgtatttgtgattga

SEQ ID NO: 140030 - DNA, 19 bp, Homo sapiens
  siRNA target sequence for CDH24 (NM_022478.2,360-378).
caccgtatttgtgattgat

SEQ ID NO: 140031 - DNA, 19 bp, Homo sapiens
  siRNA target sequence for CDH24 (NM_022478.2,381-399).
ggccacaggcaatattcat

SEQ ID NO: 140032 - DNA, 19 bp, Homo sapiens
  siRNA target sequence for CDH24 (NM_022478.2,383-401).
ccacaggcaatattcatgt

SEQ ID NO: 140033 - DNA, 19 bp, Homo sapiens
  siRNA target sequence for CDH24 (NM_022478.2,384-402).
cacaggcaatattcatgtt

SEQ ID NO: 140034 - DNA, 19 bp, Homo sapiens
  siRNA target sequence for CDH24 (NM_022478.2,389-407).
gcaatattcatgttaccaa

SEQ ID NO: 140035 - DNA, 19 bp, Homo sapiens
  siRNA target sequence for CDH24 (NM_022478.2,420-438).
ggaggaaaaggcgcaatat

SEQ ID NO: 140036 - DNA, 19 bp, Homo sapiens
  siRNA target sequence for CDH24 (NM_022478.2,487-505).
cccccatcagagttcatca

SEQ ID NO: 140037 - DNA, 19 bp, Homo sapiens
  siRNA target sequence for CDH24 (NM_022478.2,488-506).
ccccatcagagttcatcat

SEQ ID NO: 140038 - DNA, 19 bp, Homo sapiens
  siRNA target sequence for CDH24 (NM_022478.2,1059-1077).
ccgcaagcccctagacttt

SEQ ID NO: 140039 - DNA, 19 bp, Homo sapiens
  siRNA target sequence for CDH24 (NM_022478.2,1061-1079).
gcaagcccctagactttga

SEQ ID NO: 140040 - DNA, 19 bp, Homo sapiens
  siRNA target sequence for CDH24 (NM_022478.2,1302-1320).
ccctgccagcccaatcaga

SEQ ID NO: 140041 - DNA, 19 bp, Homo sapiens
  siRNA target sequence for CDH24 (NM_022478.2,1303-1321).
cctgccagcccaatcagat

SEQ ID NO: 140042 - DNA, 19 bp, Homo sapiens
  siRNA target sequence for CDH24 (NM_022478.2,1346-1364).
cggagcgttgcttctctat

SEQ ID NO: 140043 - DNA, 19 bp, Homo sapiens
  siRNA target sequence for CDH24 (NM_022478.2,1372-1390).
gaggaaggcaccatccata

SEQ ID NO: 140044 - DNA, 19 bp, Homo sapiens
  siRNA target sequence for CDH24 (NM_022478.2,1645-1663).
gctgagccctacgatactt

SEQ ID NO: 140045 - DNA, 19 bp, Homo sapiens
  siRNA target sequence for CDH24 (NM_022478.2,1646-1664).
ctgagccctacgatacttt

SEQ ID NO: 140046 - DNA, 19 bp, Homo sapiens
  siRNA target sequence for CDH24 (NM_022478.2,1651-1669).
ccctacgatacttttgtgt

SEQ ID NO: 140047 - DNA, 19 bp, Homo sapiens
  siRNA target sequence for CDH24 (NM_022478.2,1723-1741).
gatgaagttggcaacagta

SEQ ID NO: 140048 - DNA, 19 bp, Homo sapiens
  siRNA target sequence for CDH26 (NM_021810.3,274-292).
gacccacgcagggagttaa

SEQ ID NO: 140049 - DNA, 19 bp, Homo sapiens
  siRNA target sequence for CDH26 (NM_021810.3,277-295).
ccacgcagggagttaagga

SEQ ID NO: 140050 - DNA, 19 bp, Homo sapiens
  siRNA target sequence for CDH26 (NM_021810.3,278-296).
cacgcagggagttaaggat

SEQ ID NO: 140051 - DNA, 19 bp, Homo sapiens
  siRNA target sequence for CDH26 (NM_021810.3,619-637).
ctgatttgctggactcttt

SEQ ID NO: 140052 - DNA, 19 bp, Homo sapiens
  siRNA target sequence for CDH26 (NM_021810.3,652-670).
ctccgtttgaggaaatata

SEQ ID NO: 140053 - DNA, 19 bp, Homo sapiens
  siRNA target sequence for CDH26 (NM_177980.1,445-463).
ctacggcgatccaagagaa

SEQ ID NO: 140054 - DNA, 19 bp, Homo sapiens
  siRNA target sequence for CDH26 (NM_177980.1,448-466).
cggcgatccaagagaagat

SEQ ID NO: 140055 - DNA, 19 bp, Homo sapiens
  siRNA target sequence for CDH26 (NM_177980.1,526-544).
ggtgagctgttcaataata

SEQ ID NO: 140056 - DNA, 19 bp, Homo sapiens
  siRNA target sequence for CDH26 (NM_177980.1,527-545).
gtgagctgttcaataatat

SEQ ID NO: 140057 - DNA, 19 bp, Homo sapiens
  siRNA target sequence for CDH26 (NM_177980.1,529-547).
gagctgttcaataatatgt

SEQ ID NO: 140058 - DNA, 19 bp, Homo sapiens
  siRNA target sequence for CDH26 (NM_177980.1,531-549).
gctgttcaataatatgtct

SEQ ID NO: 140059 - DNA, 19 bp, Homo sapiens
  siRNA target sequence for CDH26 (NM_177980.1,548-566).
cttataacatgtcactaat

SEQ ID NO: 140060 - DNA, 19 bp, Homo sapiens
  siRNA target sequence for CDH26 (NM_177980.1,555-573).
catgtcactaatgtatcta

SEQ ID NO: 140061 - DNA, 19 bp, Homo sapiens
  siRNA target sequence for CDH26 (NM_177980.1,620-638).
ctctagaagatcatgagaa

SEQ ID NO: 140062 - DNA, 19 bp, Homo sapiens
  siRNA target sequence for CDH26 (NM_177980.1,631-649).
catgagaacggaaggatat

SEQ ID NO: 140063 - DNA, 19 bp, Homo sapiens
  siRNA target sequence for CDH26 (NM_177980.1,636-654).
gaacggaaggatatatgtt

SEQ ID NO: 140064 - DNA, 19 bp, Homo sapiens
  siRNA target sequence for CDH26 (NM_177980.1,659-677).
gccctgtcgatcgagaaat

SEQ ID NO: 140065 - DNA, 19 bp, Homo sapiens
  siRNA target sequence for CDH26 (NM_177980.1,661-679).
cctgtcgatcgagaaatga

SEQ ID NO: 140066 - DNA, 19 bp, Homo sapiens
  siRNA target sequence for CDH26 (NM_177980.1,686-704).
ctttcacggtttattttga

SEQ ID NO: 140067 - DNA, 19 bp, Homo sapiens
  siRNA target sequence for CDH26 (NM_177980.1,690-708).
cacggtttattttgatgtt

SEQ ID NO: 140068 - DNA, 19 bp, Homo sapiens
  siRNA target sequence for CDH26 (NM_177980.1,711-729).
ggagcgctcaacaggaaaa

SEQ ID NO: 140069 - DNA, 19 bp, Homo sapiens
  siRNA target sequence for CDH26 (NM_177980.1,712-730).
gagcgctcaacaggaaaaa

SEQ ID NO: 140070 - DNA, 19 bp, Homo sapiens
  siRNA target sequence for CDH26 (NM_177980.1,714-732).
gcgctcaacaggaaaaatt

SEQ ID NO: 140071 - DNA, 19 bp, Homo sapiens
  siRNA target sequence for CDH26 (NM_177980.1,716-734).
gctcaacaggaaaaattgt

SEQ ID NO: 140072 - DNA, 19 bp, Homo sapiens
  siRNA target sequence for CDH26 (NM_177980.1,724-742).
ggaaaaattgtggatacat

SEQ ID NO: 140073 - DNA, 19 bp, Homo sapiens
  siRNA target sequence for CDH26 (NM_177980.1,841-859).
gggcaacctatttttcaga

SEQ ID NO: 140074 - DNA, 19 bp, Homo sapiens
  siRNA target sequence for CDH26 (NM_177980.1,842-860).
ggcaacctatttttcagat

SEQ ID NO: 140075 - DNA, 19 bp, Homo sapiens
  siRNA target sequence for CDH26 (NM_177980.1,861-879).
gttagcagtcgatttggat

SEQ ID NO: 140076 - DNA, 19 bp, Homo sapiens
  siRNA target sequence for CDH26 (NM_177980.1,923-941).
ctcaaacaccattactgaa

SEQ ID NO: 140077 - DNA, 19 bp, Homo sapiens
  siRNA target sequence for CDH26 (NM_177980.1,989-1007).
ctggctgcttagattatga

SEQ ID NO: 140078 - DNA, 19 bp, Homo sapiens
  siRNA target sequence for CDH26 (NM_177980.1,1006-1024).
gagaccgctcctcagttta

SEQ ID NO: 140079 - DNA, 19 bp, Homo sapiens
  siRNA target sequence for CDH26 (NM_177980.1,1010-1028).
ccgctcctcagtttacact

SEQ ID NO: 140080 - DNA, 19 bp, Homo sapiens
  siRNA target sequence for CDH26 (NM_177980.1,1016-1034).
ctcagtttacactgctaat

SEQ ID NO: 140081 - DNA, 19 bp, Homo sapiens
  siRNA target sequence for CDH26 (NM_177980.1,1018-1036).
cagtttacactgctaatca

SEQ ID NO: 140082 - DNA, 19 bp, Homo sapiens
  siRNA target sequence for CDH26 (NM_177980.1,1020-1038).
gtttacactgctaatcaga

SEQ ID NO: 140083 - DNA, 19 bp, Homo sapiens
  siRNA target sequence for CDH26 (NM_177980.1,1121-1139).
catttacccaggagaacta

SEQ ID NO: 140084 - DNA, 19 bp, Homo sapiens
  siRNA target sequence for CDH26 (NM_177980.1,1182-1200).
gcgtctcctggttcaagat

SEQ ID NO: 140085 - DNA, 19 bp, Homo sapiens
  siRNA target sequence for CDH26 (NM_177980.1,1191-1209).
ggttcaagatcgagattct

SEQ ID NO: 140086 - DNA, 19 bp, Homo sapiens
  siRNA target sequence for CDH26 (NM_177980.1,1198-1216).
gatcgagattctccattta

SEQ ID NO: 140087 - DNA, 19 bp, Homo sapiens
  siRNA target sequence for CDH26 (NM_177980.1,1201-1219).
cgagattctccatttacat

SEQ ID NO: 140088 - DNA, 19 bp, Homo sapiens
  siRNA target sequence for CDH26 (NM_177980.1,1220-1238).
cagcttggagagcaaaatt

SEQ ID NO: 140089 - DNA, 19 bp, Homo sapiens
  siRNA target sequence for CDH26 (NM_177980.1,1222-1240).
gcttggagagcaaaattca

SEQ ID NO: 140090 - DNA, 19 bp, Homo sapiens
  siRNA target sequence for CDH26 (NM_177980.1,1226-1244).
ggagagcaaaattcaacat

SEQ ID NO: 140091 - DNA, 19 bp, Homo sapiens
  siRNA target sequence for CDH26 (NM_177980.1,1261-1279).
gaggggcattttgacattt

SEQ ID NO: 140092 - DNA, 19 bp, Homo sapiens
  siRNA target sequence for CDH26 (NM_177980.1,1293-1311).
gaccaacgaagggatatta

SEQ ID NO: 140093 - DNA, 19 bp, Homo sapiens
  siRNA target sequence for CDH26 (NM_177980.1,1296-1314).
caacgaagggatattaaat

SEQ ID NO: 140094 - DNA, 19 bp, Homo sapiens
  siRNA target sequence for CDH26 (NM_177980.1,1299-1317).
cgaagggatattaaatgtt

SEQ ID NO: 140095 - DNA, 19 bp, Homo sapiens
  siRNA target sequence for CDH26 (NM_177980.1,1349-1367).
cgcaaagcctcatcattgt

SEQ ID NO: 140096 - DNA, 19 bp, Homo sapiens
  siRNA target sequence for CDH26 (NM_177980.1,1564-1582).
gatccagacagccagataa

SEQ ID NO: 140097 - DNA, 19 bp, Homo sapiens
  siRNA target sequence for CDH26 (NM_177980.1,1567-1585).
ccagacagccagataagat

SEQ ID NO: 140098 - DNA, 19 bp, Homo sapiens
  siRNA target sequence for CDH26 (NM_177980.1,1568-1586).
cagacagccagataagata

SEQ ID NO: 140099 - DNA, 19 bp, Homo sapiens
  siRNA target sequence for CDH26 (NM_177980.1,1574-1592).
gccagataagatatgaact

SEQ ID NO: 140100 - DNA, 19 bp, Homo sapiens
  siRNA target sequence for CDH26 (NM_177980.1,1615-1633).
gtcagcgtcgacaaaaact

SEQ ID NO: 140101 - DNA, 19 bp, Homo sapiens
  siRNA target sequence for CDH26 (NM_177980.1,1666-1684).
cgagaatcccctcatgtaa

SEQ ID NO: 140102 - DNA, 19 bp, Homo sapiens
  siRNA target sequence for CDH26 (NM_177980.1,1704-1722).
catcattcacgctgttgat

SEQ ID NO: 140103 - DNA, 19 bp, Homo sapiens
  siRNA target sequence for CDH26 (NM_177980.1,1745-1763).
ctacagggaccctaatgct

SEQ ID NO: 140104 - DNA, 19 bp, Homo sapiens
  siRNA target sequence for CDH26 (NM_177980.1,1764-1782).
cttcctgtctgacatcaat

SEQ ID NO: 140105 - DNA, 19 bp, Homo sapiens
  siRNA target sequence for CDH26 (NM_177980.1,1885-1903).
ccgttctctgacccattta

SEQ ID NO: 140106 - DNA, 19 bp, Homo sapiens
  siRNA target sequence for CDH26 (NM_177980.1,1887-1905).
gttctctgacccatttaca

SEQ ID NO: 140107 - DNA, 19 bp, Homo sapiens
  siRNA target sequence for CDH26 (NM_177980.1,1964-1982).
ggggtcaatcagttgaact

SEQ ID NO: 140108 - DNA, 19 bp, Homo sapiens
  siRNA target sequence for CDH26 (NM_177980.1,1965-1983).
gggtcaatcagttgaactt

SEQ ID NO: 140109 - DNA, 19 bp, Homo sapiens
  siRNA target sequence for CDH26 (NM_177980.1,1997-2015).
gcctgccacgtggtaatta

SEQ ID NO: 140110 - DNA, 19 bp, Homo sapiens
  siRNA target sequence for CDH26 (NM_177980.1,1999-2017).
ctgccacgtggtaattact

SEQ ID NO: 140111 - DNA, 19 bp, Homo sapiens
  siRNA target sequence for CDH26 (NM_177980.1,2016-2034).
cttggtgccactcttcatt

SEQ ID NO: 140112 - DNA, 19 bp, Homo sapiens
  siRNA target sequence for CDH26 (NM_177980.1,2126-2144).
cagaagtggggcttcatgt

SEQ ID NO: 140113 - DNA, 19 bp, Homo sapiens
  siRNA target sequence for CDH26 (NM_177980.1,2246-2264).
gctctgtatccaatgatga

SEQ ID NO: 140114 - DNA, 19 bp, Homo sapiens
  siRNA target sequence for CDH26 (NM_177980.1,2272-2290).
caaacactggtcatgtata

SEQ ID NO: 140115 - DNA, 19 bp, Homo sapiens
  siRNA target sequence for CDH3 (NM_001793.2,218-236).
gcgctggggaaagtattca

SEQ ID NO: 140116 - DNA, 19 bp, Homo sapiens
  siRNA target sequence for CDH3 (NM_001793.2,254-272).
gagccagctctgtttagca

SEQ ID NO: 140117 - DNA, 19 bp, Homo sapiens
  siRNA target sequence for CDH3 (NM_001793.2,261-279).
ctctgtttagcactgataa

SEQ ID NO: 140118 - DNA, 19 bp, Homo sapiens
  siRNA target sequence for CDH3 (NM_001793.2,265-283).
gtttagcactgataatgat

SEQ ID NO: 140119 - DNA, 19 bp, Homo sapiens
  siRNA target sequence for CDH3 (NM_001793.2,335-353).
gaaaggaatccattgaaga

SEQ ID NO: 140120 - DNA, 19 bp, Homo sapiens
  siRNA target sequence for CDH3 (NM_001793.2,358-376).
cccatccaaacgtatctta

SEQ ID NO: 140121 - DNA, 19 bp, Homo sapiens
  siRNA target sequence for CDH3 (NM_001793.2,397-415).
ggtggttgctccaatatct

SEQ ID NO: 140122 - DNA, 19 bp, Homo sapiens
  siRNA target sequence for CDH3 (NM_001793.2,452-470).
ctgaatcagctcaagtcta

SEQ ID NO: 140123 - DNA, 19 bp, Homo sapiens
  siRNA target sequence for CDH3 (NM_001793.2,454-472).
gaatcagctcaagtctaat

SEQ ID NO: 140124 - DNA, 19 bp, Homo sapiens
  siRNA target sequence for CDH3 (NM_001793.2,460-478).
gctcaagtctaataaagat

SEQ ID NO: 140125 - DNA, 19 bp, Homo sapiens
  siRNA target sequence for CDH3 (NM_001793.2,461-479).
ctcaagtctaataaagata

SEQ ID NO: 140126 - DNA, 19 bp, Homo sapiens
  siRNA target sequence for CDH3 (NM_001793.2,727-745).
cttccgagggagtgtctta

SEQ ID NO: 140127 - DNA, 19 bp, Homo sapiens
  siRNA target sequence for CDH3 (NM_001793.2,827-845).
gttgcttactccatccata

SEQ ID NO: 140128 - DNA, 19 bp, Homo sapiens
  siRNA target sequence for CDH3 (NM_001793.2,863-881).
ccacacgacctcatgttca

SEQ ID NO: 140129 - DNA, 19 bp, Homo sapiens
  siRNA target sequence for CDH3 (NM_001793.2,1155-1173).
ggcgtgccacctaccttat

SEQ ID NO: 140130 - DNA, 19 bp, Homo sapiens
  siRNA target sequence for CDH3 (NM_001793.2,1157-1175).
cgtgccacctaccttatca

SEQ ID NO: 140131 - DNA, 19 bp, Homo sapiens
  siRNA target sequence for CDH3 (NM_001793.2,1158-1176).
gtgccacctaccttatcat

SEQ ID NO: 140132 - DNA, 19 bp, Homo sapiens
  siRNA target sequence for CDH3 (NM_001793.2,1182-1200).
gtgacgacggggaccattt

SEQ ID NO: 140133 - DNA, 19 bp, Homo sapiens
  siRNA target sequence for CDH3 (NM_001793.2,1184-1202).
gacgacggggaccatttta

SEQ ID NO: 140134 - DNA, 19 bp, Homo sapiens
  siRNA target sequence for CDH3 (NM_001793.2,1302-1320).
ccaacgaggccccttttgt

SEQ ID NO: 140135 - DNA, 19 bp, Homo sapiens
  siRNA target sequence for CDH3 (NM_001793.2,1669-1687).
ccttctgctaacactgatt

SEQ ID NO: 140136 - DNA, 19 bp, Homo sapiens
  siRNA target sequence for CDH3 (NM_001793.2,1897-1915).
cctgaagcaggatacatat

SEQ ID NO: 140137 - DNA, 19 bp, Homo sapiens
  siRNA target sequence for CDH3 (NM_001793.2,1933-1951).
gtctgaccatggcaacaaa

SEQ ID NO: 140138 - DNA, 19 bp, Homo sapiens
  siRNA target sequence for CDH3 (NM_001793.2,1935-1953).
ctgaccatggcaacaaaga

SEQ ID NO: 140139 - DNA, 19 bp, Homo sapiens
  siRNA target sequence for CDH3 (NM_001793.2,2151-2169).
cccgtgacaacgtcttcta

SEQ ID NO: 140140 - DNA, 19 bp, Homo sapiens
  siRNA target sequence for CDH3 (NM_001793.2,2153-2171).
cgtgacaacgtcttctact

SEQ ID NO: 140141 - DNA, 19 bp, Homo sapiens
  siRNA target sequence for CDH3 (NM_001793.2,2154-2172).
gtgacaacgtcttctacta

SEQ ID NO: 140142 - DNA, 19 bp, Homo sapiens
  siRNA target sequence for CDH3 (NM_001793.2,2353-2371).
cctgaaggcggctaacaca

SEQ ID NO: 140143 - DNA, 19 bp, Homo sapiens
  siRNA target sequence for CDH3 (NM_001793.2,2469-2487).
ccgaccaagaccaagatta

SEQ ID NO: 140144 - DNA, 19 bp, Homo sapiens
  siRNA target sequence for CDH4 (NM_001794.2,115-133).
ggttctctgaagatgatta

SEQ ID NO: 140145 - DNA, 19 bp, Homo sapiens
  siRNA target sequence for CDH4 (NM_001794.2,137-155).
ggcattaatctcccaaaat

SEQ ID NO: 140146 - DNA, 19 bp, Homo sapiens
  siRNA target sequence for CDH4 (NM_001794.2,138-156).
gcattaatctcccaaaata

SEQ ID NO: 140147 - DNA, 19 bp, Homo sapiens
  siRNA target sequence for CDH4 (NM_001794.2,174-192).
ctacttcaagtcaagttca

SEQ ID NO: 140148 - DNA, 19 bp, Homo sapiens
  siRNA target sequence for CDH4 (NM_001794.2,206-224).
gaccaaggggacacaatat

SEQ ID NO: 140149 - DNA, 19 bp, Homo sapiens
  siRNA target sequence for CDH4 (NM_001794.2,208-226).
ccaaggggacacaatatga

SEQ ID NO: 140150 - DNA, 19 bp, Homo sapiens
  siRNA target sequence for CDH4 (NM_001794.2,589-607).
ggatccggtccgacaaaga

SEQ ID NO: 140151 - DNA, 19 bp, Homo sapiens
  siRNA target sequence for CDH4 (NM_001794.2,593-611).
ccggtccgacaaagacaat

SEQ ID NO: 140152 - DNA, 19 bp, Homo sapiens
  siRNA target sequence for CDH4 (NM_001794.2,595-613).
ggtccgacaaagacaatga

SEQ ID NO: 140153 - DNA, 19 bp, Homo sapiens
  siRNA target sequence for CDH4 (NM_001794.2,598-616).
ccgacaaagacaatgacat

SEQ ID NO: 140154 - DNA, 19 bp, Homo sapiens
  siRNA target sequence for CDH4 (NM_001794.2,755-773).
ccacgctgtggacatgaat

SEQ ID NO: 140155 - DNA, 19 bp, Homo sapiens
  siRNA target sequence for CDH4 (NM_001794.2,793-811).
ccatcgacctgtacatcta

SEQ ID NO: 140156 - DNA, 19 bp, Homo sapiens
  siRNA target sequence for CDH4 (NM_001794.2,809-827).
ctacgtcatcgacatgaat

SEQ ID NO: 140157 - DNA, 19 bp, Homo sapiens
  siRNA target sequence for CDH4 (NM_001794.2,984-1002).
cagagcccgtcccagaata

SEQ ID NO: 140158 - DNA, 19 bp, Homo sapiens
  siRNA target sequence for CDH4 (NM_001794.2,988-1006).
gcccgtcccagaatatgtt

SEQ ID NO: 140159 - DNA, 19 bp, Homo sapiens
  siRNA target sequence for CDH4 (NM_001794.2,990-1008).
ccgtcccagaatatgttca

SEQ ID NO: 140160 - DNA, 19 bp, Homo sapiens
  siRNA target sequence for CDH4 (NM_001794.2,1018-1036).
gcgagactggagatatcgt

SEQ ID NO: 140161 - DNA, 19 bp, Homo sapiens
  siRNA target sequence for CDH4 (NM_001794.2,1296-1314).
gccgtttaccgcatcatca

SEQ ID NO: 140162 - DNA, 19 bp, Homo sapiens
  siRNA target sequence for CDH4 (NM_001794.2,1586-1604).
cgtgctgaccacgttttca

SEQ ID NO: 140163 - DNA, 19 bp, Homo sapiens
  siRNA target sequence for CDH4 (NM_001794.2,1666-1684).
cgagctggctgcacatcaa

SEQ ID NO: 140164 - DNA, 19 bp, Homo sapiens
  siRNA target sequence for CDH4 (NM_001794.2,1728-1746).
gagtccctctacaccaaaa

SEQ ID NO: 140165 - DNA, 19 bp, Homo sapiens
  siRNA target sequence for CDH4 (NM_001794.2,1732-1750).
ccctctacaccaaaaacaa

SEQ ID NO: 140166 - DNA, 19 bp, Homo sapiens
  siRNA target sequence for CDH4 (NM_001794.2,1766-1784).
cttcctggcagctgacaat

SEQ ID NO: 140167 - DNA, 19 bp, Homo sapiens
  siRNA target sequence for CDH4 (NM_001794.2,1807-1825).
ccgggaccctccagatcta

SEQ ID NO: 140168 - DNA, 19 bp, Homo sapiens
  siRNA target sequence for CDH4 (NM_001794.2,1808-1826).
cgggaccctccagatctat

SEQ ID NO: 140169 - DNA, 19 bp, Homo sapiens
  siRNA target sequence for CDH4 (NM_001794.2,1814-1832).
cctccagatctatctcatt

SEQ ID NO: 140170 - DNA, 19 bp, Homo sapiens
  siRNA target sequence for CDH4 (NM_001794.2,2009-2027).
ccgcctgaacggtgactat

SEQ ID NO: 140171 - DNA, 19 bp, Homo sapiens
  siRNA target sequence for CDH4 (NM_001794.2,2117-2135).
caacacgtccatcatcaaa

SEQ ID NO: 140172 - DNA, 19 bp, Homo sapiens
  siRNA target sequence for CDH4 (NM_001794.2,2122-2140).
cgtccatcatcaaagtcaa

SEQ ID NO: 140173 - DNA, 19 bp, Homo sapiens
  siRNA target sequence for CDH4 (NM_001794.2,2138-2156).
caaggtgtgcccatgtgat

SEQ ID NO: 140174 - DNA, 19 bp, Homo sapiens
  siRNA target sequence for CDH4 (NM_001794.2,2254-2272).
ccatggtcctgctgtttgt

SEQ ID NO: 140175 - DNA, 19 bp, Homo sapiens
  siRNA target sequence for CDH4 (NM_001794.2,2344-2362).
gcgacaacatcctcaagta

SEQ ID NO: 140176 - DNA, 19 bp, Homo sapiens
  siRNA target sequence for CDH4 (NM_001794.2,2432-2450).
ggggcacgtgccaagcaaa

SEQ ID NO: 140177 - DNA, 19 bp, Homo sapiens
  siRNA target sequence for CDH4 (NM_001794.2,2674-2692).
gttccggggaccaagacta

SEQ ID NO: 140178 - DNA, 19 bp, Homo sapiens
  siRNA target sequence for CDH5 (NM_001795.2,272-290).
ggaaccagatgcacattga

SEQ ID NO: 140179 - DNA, 19 bp, Homo sapiens
  siRNA target sequence for CDH5 (NM_001795.2,322-340).
gtaggcaagatcaagtcaa

SEQ ID NO: 140180 - DNA, 19 bp, Homo sapiens
  siRNA target sequence for CDH5 (NM_001795.2,366-384).
cctgctcaaaggagaatat

SEQ ID NO: 140181 - DNA, 19 bp, Homo sapiens
  siRNA target sequence for CDH5 (NM_001795.2,421-439).
gacgtgttcgccattgaga

SEQ ID NO: 140182 - DNA, 19 bp, Homo sapiens
  siRNA target sequence for CDH5 (NM_001795.2,442-460).
ctggaccgggagaatatct

SEQ ID NO: 140183 - DNA, 19 bp, Homo sapiens
  siRNA target sequence for CDH5 (NM_001795.2,444-462).
ggaccgggagaatatctca

SEQ ID NO: 140184 - DNA, 19 bp, Homo sapiens
  siRNA target sequence for CDH5 (NM_001795.2,524-542).
ccagcttcaccatcaaagt

SEQ ID NO: 140185 - DNA, 19 bp, Homo sapiens
  siRNA target sequence for CDH5 (NM_001795.2,525-543).
cagcttcaccatcaaagtt

SEQ ID NO: 140186 - DNA, 19 bp, Homo sapiens
  siRNA target sequence for CDH5 (NM_001795.2,679-697).
gcctctgtcatgtaccaaa

SEQ ID NO: 140187 - DNA, 19 bp, Homo sapiens
  siRNA target sequence for CDH5 (NM_001795.2,683-701).
ctgtcatgtaccaaatcct

SEQ ID NO: 140188 - DNA, 19 bp, Homo sapiens
  siRNA target sequence for CDH5 (NM_001795.2,714-732).
gtattttgccatcgataat

SEQ ID NO: 140189 - DNA, 19 bp, Homo sapiens
  siRNA target sequence for CDH5 (NM_001795.2,726-744).
cgataattctggacgtatt

SEQ ID NO: 140190 - DNA, 19 bp, Homo sapiens
  siRNA target sequence for CDH5 (NM_001795.2,727-745).
gataattctggacgtatta

SEQ ID NO: 140191 - DNA, 19 bp, Homo sapiens
  siRNA target sequence for CDH5 (NM_001795.2,734-752).
ctggacgtattatcacaat

SEQ ID NO: 140192 - DNA, 19 bp, Homo sapiens
  siRNA target sequence for CDH5 (NM_001795.2,739-757).
cgtattatcacaataacga

SEQ ID NO: 140193 - DNA, 19 bp, Homo sapiens
  siRNA target sequence for CDH5 (NM_001795.2,1030-1048).
gacgctttcaccattgaga

SEQ ID NO: 140194 - DNA, 19 bp, Homo sapiens
  siRNA target sequence for CDH5 (NM_001795.2,1082-1100).
ccatgaagcctctggatta

SEQ ID NO: 140195 - DNA, 19 bp, Homo sapiens
  siRNA target sequence for CDH5 (NM_001795.2,1187-1205).
gagcccaggtcattatcaa

SEQ ID NO: 140196 - DNA, 19 bp, Homo sapiens
  siRNA target sequence for CDH5 (NM_001795.2,1190-1208).
cccaggtcattatcaacat

SEQ ID NO: 140197 - DNA, 19 bp, Homo sapiens
  siRNA target sequence for CDH5 (NM_001795.2,1321-1339).
gctaggcatagcattggat

SEQ ID NO: 140198 - DNA, 19 bp, Homo sapiens
  siRNA target sequence for CDH5 (NM_001795.2,1322-1340).
ctaggcatagcattggata

SEQ ID NO: 140199 - DNA, 19 bp, Homo sapiens
  siRNA target sequence for CDH5 (NM_001795.2,1371-1389).
gttcttccgagtcacaaaa

SEQ ID NO: 140200 - DNA, 19 bp, Homo sapiens
  siRNA target sequence for CDH5 (NM_001795.2,1426-1444).
gaagtctacccctggtata

SEQ ID NO: 140201 - DNA, 19 bp, Homo sapiens
  siRNA target sequence for CDH5 (NM_001795.2,1451-1469).
ctgtggaggccaaagaact

SEQ ID NO: 140202 - DNA, 19 bp, Homo sapiens
  siRNA target sequence for CDH5 (NM_001795.2,1615-1633).
cagatctccgcaatagaca

SEQ ID NO: 140203 - DNA, 19 bp, Homo sapiens
  siRNA target sequence for CDH5 (NM_001795.2,1624-1642).
gcaatagacaaggacataa

SEQ ID NO: 140204 - DNA, 19 bp, Homo sapiens
  siRNA target sequence for CDH5 (NM_001795.2,1643-1661).
caccacgaaacgtgaagtt

SEQ ID NO: 140205 - DNA, 19 bp, Homo sapiens
  siRNA target sequence for CDH5 (NM_001795.2,1646-1664).
cacgaaacgtgaagttcaa

SEQ ID NO: 140206 - DNA, 19 bp, Homo sapiens
  siRNA target sequence for CDH5 (NM_001795.2,1649-1667).
gaaacgtgaagttcaaatt

SEQ ID NO: 140207 - DNA, 19 bp, Homo sapiens
  siRNA target sequence for CDH5 (NM_001795.2,1689-1707).
ctttaccctcacggataat

SEQ ID NO: 140208 - DNA, 19 bp, Homo sapiens
  siRNA target sequence for CDH5 (NM_001795.2,1711-1729).
gataacacggccaacatca

SEQ ID NO: 140209 - DNA, 19 bp, Homo sapiens
  siRNA target sequence for CDH5 (NM_001795.2,1782-1800).
cgtggtcatctcagacaat

SEQ ID NO: 140210 - DNA, 19 bp, Homo sapiens
  siRNA target sequence for CDH5 (NM_001795.2,1917-1935).
ggcagtggtagccatctta

SEQ ID NO: 140211 - DNA, 19 bp, Homo sapiens
  siRNA target sequence for CDH5 (NM_001795.2,1919-1937).
cagtggtagccatcttact

SEQ ID NO: 140212 - DNA, 19 bp, Homo sapiens
  siRNA target sequence for CDH5 (NM_001795.2,1921-1939).
gtggtagccatcttactct

SEQ ID NO: 140213 - DNA, 19 bp, Homo sapiens
  siRNA target sequence for CDH5 (NM_001795.2,2372-2390).
ccgactctgacgtggatta

SEQ ID NO: 140214 - DNA, 19 bp, Homo sapiens
  siRNA target sequence for CDH5 (NM_001795.2,2408-2426).
ggggacccaggtttaagat

SEQ ID NO: 140215 - DNA, 19 bp, Homo sapiens
  siRNA target sequence for CDH6 (NM_004932.2,331-349).
gaacttaccgctacttctt

SEQ ID NO: 140216 - DNA, 19 bp, Homo sapiens
  siRNA target sequence for CDH6 (NM_004932.2,613-631).
gagcaggagatctcttcat

SEQ ID NO: 140217 - DNA, 19 bp, Homo sapiens
  siRNA target sequence for CDH6 (NM_004932.2,615-633).
gcaggagatctcttcatta

SEQ ID NO: 140218 - DNA, 19 bp, Homo sapiens
  siRNA target sequence for CDH6 (NM_004932.2,616-634).
caggagatctcttcattat

SEQ ID NO: 140219 - DNA, 19 bp, Homo sapiens
  siRNA target sequence for CDH6 (NM_004932.2,681-699).
gaagaaaaacccgtttaca

SEQ ID NO: 140220 - DNA, 19 bp, Homo sapiens
  siRNA target sequence for CDH6 (NM_004932.2,701-719).
ccttcgagctcaagctata

SEQ ID NO: 140221 - DNA, 19 bp, Homo sapiens
  siRNA target sequence for CDH6 (NM_004932.2,702-720).
cttcgagctcaagctataa

SEQ ID NO: 140222 - DNA, 19 bp, Homo sapiens
  siRNA target sequence for CDH6 (NM_004932.2,839-857).
gtctgatgtcggtacattt

SEQ ID NO: 140223 - DNA, 19 bp, Homo sapiens
  siRNA target sequence for CDH6 (NM_004932.2,841-859).
ctgatgtcggtacatttgt

SEQ ID NO: 140224 - DNA, 19 bp, Homo sapiens
  siRNA target sequence for CDH6 (NM_004932.2,910-928).
ctaaagttgtctacagtat

SEQ ID NO: 140225 - DNA, 19 bp, Homo sapiens
  siRNA target sequence for CDH6 (NM_004932.2,944-962).
ctatttttcagttgaatca

SEQ ID NO: 140226 - DNA, 19 bp, Homo sapiens
  siRNA target sequence for CDH6 (NM_004932.2,1019-1037).
gtaccaagtggtgattcaa

SEQ ID NO: 140227 - DNA, 19 bp, Homo sapiens
  siRNA target sequence for CDH6 (NM_004932.2,1029-1047).
gtgattcaagccaaggata

SEQ ID NO: 140228 - DNA, 19 bp, Homo sapiens
  siRNA target sequence for CDH6 (NM_004932.2,1261-1279).
ggctggatatgtttgatgt

SEQ ID NO: 140229 - DNA, 19 bp, Homo sapiens
  siRNA target sequence for CDH6 (NM_004932.2,1367-1385).
ggaagcctccaatccttat

SEQ ID NO: 140230 - DNA, 19 bp, Homo sapiens
  siRNA target sequence for CDH6 (NM_004932.2,1403-1421).
ctacttggggcctttcaaa

SEQ ID NO: 140231 - DNA, 19 bp, Homo sapiens
  siRNA target sequence for CDH6 (NM_004932.2,1422-1440).
gattcagccacggttagaa

SEQ ID NO: 140232 - DNA, 19 bp, Homo sapiens
  siRNA target sequence for CDH6 (NM_004932.2,1426-1444).
cagccacggttagaattgt

SEQ ID NO: 140233 - DNA, 19 bp, Homo sapiens
  siRNA target sequence for CDH6 (NM_004932.2,1477-1495).
gcaaactggcctacatctt

SEQ ID NO: 140234 - DNA, 19 bp, Homo sapiens
  siRNA target sequence for CDH6 (NM_004932.2,1484-1502).
ggcctacatcttacaaata

SEQ ID NO: 140235 - DNA, 19 bp, Homo sapiens
  siRNA target sequence for CDH6 (NM_004932.2,1564-1582).
ccaggaatcctgtcaagta

SEQ ID NO: 140236 - DNA, 19 bp, Homo sapiens
  siRNA target sequence for CDH6 (NM_004932.2,1632-1650).
ggaaatggttcgattttta

SEQ ID NO: 140237 - DNA, 19 bp, Homo sapiens
  siRNA target sequence for CDH6 (NM_004932.2,1643-1661).
gatttttacatcgaaactt

SEQ ID NO: 140238 - DNA, 19 bp, Homo sapiens
  siRNA target sequence for CDH6 (NM_004932.2,1675-1693).
cactgctatggcacaacat

SEQ ID NO: 140239 - DNA, 19 bp, Homo sapiens
  siRNA target sequence for CDH6 (NM_004932.2,1677-1695).
ctgctatggcacaacatta

SEQ ID NO: 140240 - DNA, 19 bp, Homo sapiens
  siRNA target sequence for CDH6 (NM_004932.2,1735-1753).
gtcgagtacctctatatat

SEQ ID NO: 140241 - DNA, 19 bp, Homo sapiens
  siRNA target sequence for CDH6 (NM_004932.2,1863-1881).
gacaaggatgacccttata

SEQ ID NO: 140242 - DNA, 19 bp, Homo sapiens
  siRNA target sequence for CDH6 (NM_004932.2,1865-1883).
caaggatgacccttatagt

SEQ ID NO: 140243 - DNA, 19 bp, Homo sapiens
  siRNA target sequence for CDH6 (NM_004932.2,1876-1894).
cttatagtggacaccaatt

SEQ ID NO: 140244 - DNA, 19 bp, Homo sapiens
  siRNA target sequence for CDH6 (NM_004932.2,1882-1900).
gtggacaccaattttcgtt

SEQ ID NO: 140245 - DNA, 19 bp, Homo sapiens
  siRNA target sequence for CDH6 (NM_004932.2,1887-1905).
caccaattttcgttttcct

SEQ ID NO: 140246 - DNA, 19 bp, Homo sapiens
  siRNA target sequence for CDH6 (NM_004932.2,1924-1942).
gtggctcaaactttaccat

SEQ ID NO: 140247 - DNA, 19 bp, Homo sapiens
  siRNA target sequence for CDH6 (NM_004932.2,1969-1987).
gaatcttaactcggaaaaa

SEQ ID NO: 140248 - DNA, 19 bp, Homo sapiens
  siRNA target sequence for CDH6 (NM_004932.2,1978-1996).
ctcggaaaaatggctataa

SEQ ID NO: 140249 - DNA, 19 bp, Homo sapiens
  siRNA target sequence for CDH6 (NM_004932.2,1980-1998).
cggaaaaatggctataata

SEQ ID NO: 140250 - DNA, 19 bp, Homo sapiens
  siRNA target sequence for CDH6 (NM_004932.2,2042-2060).
caacgactacccagttcaa

SEQ ID NO: 140251 - DNA, 19 bp, Homo sapiens
  siRNA target sequence for CDH6 (NM_004932.2,2103-2121).
caccacgggaacatgcaat

SEQ ID NO: 140252 - DNA, 19 bp, Homo sapiens
  siRNA target sequence for CDH6 (NM_004932.2,2232-2250).
ctgaggcggcagcgaaaaa

SEQ ID NO: 140253 - DNA, 19 bp, Homo sapiens
  siRNA target sequence for CDH6 (NM_004932.2,2274-2292).
gaggacatcagagataaca

SEQ ID NO: 140254 - DNA, 19 bp, Homo sapiens
  siRNA target sequence for CDH6 (NM_004932.2,2284-2302).
gagataacattgtcagtta

SEQ ID NO: 140255 - DNA, 19 bp, Homo sapiens
  siRNA target sequence for CDH6 (NM_004932.2,2286-2304).
gataacattgtcagttaca

SEQ ID NO: 140256 - DNA, 19 bp, Homo sapiens
  siRNA target sequence for CDH6 (NM_004932.2,2371-2389).
ccatagaggacaacaaatt

SEQ ID NO: 140257 - DNA, 19 bp, Homo sapiens
  siRNA target sequence for CDH6 (NM_004932.2,2372-2390).
catagaggacaacaaatta

SEQ ID NO: 140258 - DNA, 19 bp, Homo sapiens
  siRNA target sequence for CDH6 (NM_004932.2,2376-2394).
gaggacaacaaattacgaa

SEQ ID NO: 140259 - DNA, 19 bp, Homo sapiens
  siRNA target sequence for CDH6 (NM_004932.2,2455-2473).
ccgatgtcagagatttcat

SEQ ID NO: 140260 - DNA, 19 bp, Homo sapiens
  siRNA target sequence for CDH6 (NM_004932.2,2456-2474).
cgatgtcagagatttcatt

SEQ ID NO: 140261 - DNA, 19 bp, Homo sapiens
  siRNA target sequence for CDH6 (NM_004932.2,2531-2549).
ggccacttacgcctatgaa

SEQ ID NO: 140262 - DNA, 19 bp, Homo sapiens
  siRNA target sequence for CDH6 (NM_004932.2,2594-2612).
gaccacggatgcagatcaa

SEQ ID NO: 140263 - DNA, 19 bp, Homo sapiens
  siRNA target sequence for CDH6 (NM_004932.2,2599-2617).
cggatgcagatcaagacta

SEQ ID NO: 140264 - DNA, 19 bp, Homo sapiens
  siRNA target sequence for CDH6 (NM_004932.2,2600-2618).
ggatgcagatcaagactat

SEQ ID NO: 140265 - DNA, 19 bp, Homo sapiens
  siRNA target sequence for CDH7 (NM_004361.2,511-529).
ctctcaaggtccagatcaa

SEQ ID NO: 140266 - DNA, 19 bp, Homo sapiens
  siRNA target sequence for CDH7 (NM_004361.2,611-629).
gttcagaccccctctatgt

SEQ ID NO: 140267 - DNA, 19 bp, Homo sapiens
  siRNA target sequence for CDH7 (NM_004361.2,690-708).
cgaaggggcaagttccatt

SEQ ID NO: 140268 - DNA, 19 bp, Homo sapiens
  siRNA target sequence for CDH7 (NM_004361.2,691-709).
gaaggggcaagttccattt

SEQ ID NO: 140269 - DNA, 19 bp, Homo sapiens
  siRNA target sequence for CDH7 (NM_004361.2,695-713).
gggcaagttccattttcat

SEQ ID NO: 140270 - DNA, 19 bp, Homo sapiens
  siRNA target sequence for CDH7 (NM_004361.2,696-714).
ggcaagttccattttcatt

SEQ ID NO: 140271 - DNA, 19 bp, Homo sapiens
  siRNA target sequence for CDH7 (NM_004361.2,723-741).
gaacactggggatattcat

SEQ ID NO: 140272 - DNA, 19 bp, Homo sapiens
  siRNA target sequence for CDH7 (NM_004361.2,801-819).
ggataggctcaccaacaaa

SEQ ID NO: 140273 - DNA, 19 bp, Homo sapiens
  siRNA target sequence for CDH7 (NM_004361.2,904-922).
gcaggagttcccgaaatgt

SEQ ID NO: 140274 - DNA, 19 bp, Homo sapiens
  siRNA target sequence for CDH7 (NM_004361.2,932-950).
ggacctcagtggtacaagt

SEQ ID NO: 140275 - DNA, 19 bp, Homo sapiens
  siRNA target sequence for CDH7 (NM_004361.2,991-1009).
gccagagtggtctacagta

SEQ ID NO: 140276 - DNA, 19 bp, Homo sapiens
  siRNA target sequence for CDH7 (NM_004361.2,1091-1109).
ctaaagaccagtatttgct

SEQ ID NO: 140277 - DNA, 19 bp, Homo sapiens
  siRNA target sequence for CDH7 (NM_004361.2,1125-1143).
ggatatggttggtcaaaat

SEQ ID NO: 140278 - DNA, 19 bp, Homo sapiens
  siRNA target sequence for CDH7 (NM_004361.2,1170-1188).
cactgtgaccctaactgat

SEQ ID NO: 140279 - DNA, 19 bp, Homo sapiens
  siRNA target sequence for CDH7 (NM_004361.2,1213-1231).
cctcgaaggtcttatcaat

SEQ ID NO: 140280 - DNA, 19 bp, Homo sapiens
  siRNA target sequence for CDH7 (NM_004361.2,1216-1234).
cgaaggtcttatcaatata

SEQ ID NO: 140281 - DNA, 19 bp, Homo sapiens
  siRNA target sequence for CDH7 (NM_004361.2,1220-1238).
ggtcttatcaatataacgt

SEQ ID NO: 140282 - DNA, 19 bp, Homo sapiens
  siRNA target sequence for CDH7 (NM_004361.2,1260-1278).
ctcagttgtggccagaatt

SEQ ID NO: 140283 - DNA, 19 bp, Homo sapiens
  siRNA target sequence for CDH7 (NM_004361.2,1444-1462).
cggatagaagctgcaaata

SEQ ID NO: 140284 - DNA, 19 bp, Homo sapiens
  siRNA target sequence for CDH7 (NM_004361.2,1468-1486).
gccgaccctcgctttctga

SEQ ID NO: 140285 - DNA, 19 bp, Homo sapiens
  siRNA target sequence for CDH7 (NM_004361.2,1506-1524).
cacgacaactgtgaagata

SEQ ID NO: 140286 - DNA, 19 bp, Homo sapiens
  siRNA target sequence for CDH7 (NM_004361.2,1521-1539).
gataattgtggaagatgta

SEQ ID NO: 140287 - DNA, 19 bp, Homo sapiens
  siRNA target sequence for CDH7 (NM_004361.2,1652-1670).
gccctgtgaggtactcaat

SEQ ID NO: 140288 - DNA, 19 bp, Homo sapiens
  siRNA target sequence for CDH7 (NM_004361.2,1653-1671).
ccctgtgaggtactcaatt

SEQ ID NO: 140289 - DNA, 19 bp, Homo sapiens
  siRNA target sequence for CDH7 (NM_004361.2,1682-1700).
cagacttggagagatactt

SEQ ID NO: 140290 - DNA, 19 bp, Homo sapiens
  siRNA target sequence for CDH7 (NM_004361.2,1684-1702).
gacttggagagatacttca

SEQ ID NO: 140291 - DNA, 19 bp, Homo sapiens
  siRNA target sequence for CDH7 (NM_004361.2,1692-1710).
gagatacttcaatattgat

SEQ ID NO: 140292 - DNA, 19 bp, Homo sapiens
  siRNA target sequence for CDH7 (NM_004361.2,1757-1775).
caaatgctattcacaatat

SEQ ID NO: 140293 - DNA, 19 bp, Homo sapiens
  siRNA target sequence for CDH7 (NM_004361.2,1822-1840).
ggctatgtggccatcacta

SEQ ID NO: 140294 - DNA, 19 bp, Homo sapiens
  siRNA target sequence for CDH7 (NM_004361.2,1836-1854).
cactatacttgacatcaat

SEQ ID NO: 140295 - DNA, 19 bp, Homo sapiens
  siRNA target sequence for CDH7 (NM_004361.2,1838-1856).
ctatacttgacatcaatga

SEQ ID NO: 140296 - DNA, 19 bp, Homo sapiens
  siRNA target sequence for CDH7 (NM_004361.2,1916-1934).
ggcaggttatccagaaaat

SEQ ID NO: 140297 - DNA, 19 bp, Homo sapiens
  siRNA target sequence for CDH7 (NM_004361.2,1920-1938).
ggttatccagaaaatcagt

SEQ ID NO: 140298 - DNA, 19 bp, Homo sapiens
  siRNA target sequence for CDH7 (NM_004361.2,1961-1979).
ccaatggacaccagtttta

SEQ ID NO: 140299 - DNA, 19 bp, Homo sapiens
  siRNA target sequence for CDH7 (NM_004361.2,1966-1984).
ggacaccagttttacttca

SEQ ID NO: 140300 - DNA, 19 bp, Homo sapiens
  siRNA target sequence for CDH7 (NM_004361.2,1994-2012).
cggatgcaacaaataacca

SEQ ID NO: 140301 - DNA, 19 bp, Homo sapiens
  siRNA target sequence for CDH7 (NM_004361.2,2081-2099).
gacaggaacaatcagttta

SEQ ID NO: 140302 - DNA, 19 bp, Homo sapiens
  siRNA target sequence for CDH7 (NM_004361.2,2085-2103).
ggaacaatcagtttactat

SEQ ID NO: 140303 - DNA, 19 bp, Homo sapiens
  siRNA target sequence for CDH7 (NM_004361.2,2268-2286).
cgcctgtgtcttgacatta

SEQ ID NO: 140304 - DNA, 19 bp, Homo sapiens
  siRNA target sequence for CDH7 (NM_004361.2,2299-2317).
ctccttatcgtcactatga

SEQ ID NO: 140305 - DNA, 19 bp, Homo sapiens
  siRNA target sequence for CDH7 (NM_004361.2,2301-2319).
ccttatcgtcactatgaga

SEQ ID NO: 140306 - DNA, 19 bp, Homo sapiens
  siRNA target sequence for CDH7 (NM_004361.2,2302-2320).
cttatcgtcactatgagaa

SEQ ID NO: 140307 - DNA, 19 bp, Homo sapiens
  siRNA target sequence for CDH7 (NM_004361.2,2482-2500).
gtgactccagaaattcaat

SEQ ID NO: 140308 - DNA, 19 bp, Homo sapiens
  siRNA target sequence for CDH7 (NM_004361.2,2503-2521).
ctgagtcgaccagctttta

SEQ ID NO: 140309 - DNA, 19 bp, Homo sapiens
  siRNA target sequence for CDH7 (NM_004361.2,2505-2523).
gagtcgaccagcttttaaa

SEQ ID NO: 140310 - DNA, 19 bp, Homo sapiens
  siRNA target sequence for CDH7 (NM_004361.2,2593-2611).
ggtgctcctccttatgact

SEQ ID NO: 140311 - DNA, 19 bp, Homo sapiens
  siRNA target sequence for CDH7 (NM_004361.2,2642-2660).
gctcagttgctgaatcact

SEQ ID NO: 140312 - DNA, 19 bp, Homo sapiens
  siRNA target sequence for CDH7 (NM_004361.2,2681-2699).
gctcaaactctgatcagaa

SEQ ID NO: 140313 - DNA, 19 bp, Homo sapiens
  siRNA target sequence for CDH7 (NM_004361.2,2756-2774).
ggactggccaagagagttt

SEQ ID NO: 140314 - DNA, 19 bp, Homo sapiens
  siRNA target sequence for CDH7 (NM_004361.2,2759-2777).
ctggccaagagagtttgta

SEQ ID NO: 140315 - DNA, 19 bp, Homo sapiens
  siRNA target sequence for CDH7 (NM_004361.2,2761-2779).
ggccaagagagtttgtact

SEQ ID NO: 140316 - DNA, 19 bp, Homo sapiens
  siRNA target sequence for CDH7 (NM_004361.2,2764-2782).
caagagagtttgtactcat

SEQ ID NO: 140317 - DNA, 19 bp, Homo sapiens
  siRNA target sequence for CDH8 (NM_001796.2,283-301).
gatctctggactccattaa

SEQ ID NO: 140318 - DNA, 19 bp, Homo sapiens
  siRNA target sequence for CDH8 (NM_001796.2,288-306).
ctggactccattaataata

SEQ ID NO: 140319 - DNA, 19 bp, Homo sapiens
  siRNA target sequence for CDH8 (NM_001796.2,290-308).
ggactccattaataatatt

SEQ ID NO: 140320 - DNA, 19 bp, Homo sapiens
  siRNA target sequence for CDH8 (NM_001796.2,295-313).
ccattaataatattatgga

SEQ ID NO: 140321 - DNA, 19 bp, Homo sapiens
  siRNA target sequence for CDH8 (NM_001796.2,345-363).
gatgaatcagtctcaagtt

SEQ ID NO: 140322 - DNA, 19 bp, Homo sapiens
  siRNA target sequence for CDH8 (NM_001796.2,369-387).
gagtggatcccctttggaa

SEQ ID NO: 140323 - DNA, 19 bp, Homo sapiens
  siRNA target sequence for CDH8 (NM_001796.2,373-391).
ggatcccctttggaactaa

SEQ ID NO: 140324 - DNA, 19 bp, Homo sapiens
  siRNA target sequence for CDH8 (NM_001796.2,374-392).
gatcccctttggaactaaa

SEQ ID NO: 140325 - DNA, 19 bp, Homo sapiens
  siRNA target sequence for CDH8 (NM_001796.2,400-418).
ggtgaagaacagcgaattt

SEQ ID NO: 140326 - DNA, 19 bp, Homo sapiens
  siRNA target sequence for CDH8 (NM_001796.2,401-419).
gtgaagaacagcgaatttt

SEQ ID NO: 140327 - DNA, 19 bp, Homo sapiens
  siRNA target sequence for CDH8 (NM_001796.2,559-577).
gatggagctgggaccatat

SEQ ID NO: 140328 - DNA, 19 bp, Homo sapiens
  siRNA target sequence for CDH8 (NM_001796.2,563-581).
gagctgggaccatatttca

SEQ ID NO: 140329 - DNA, 19 bp, Homo sapiens
  siRNA target sequence for CDH8 (NM_001796.2,565-583).
gctgggaccatatttcaaa

SEQ ID NO: 140330 - DNA, 19 bp, Homo sapiens
  siRNA target sequence for CDH8 (NM_001796.2,568-586).
gggaccatatttcaaataa

SEQ ID NO: 140331 - DNA, 19 bp, Homo sapiens
  siRNA target sequence for CDH8 (NM_001796.2,596-614).
ctggagatatccatgctat

SEQ ID NO: 140332 - DNA, 19 bp, Homo sapiens
  siRNA target sequence for CDH8 (NM_001796.2,691-709).
ctggagcctccttctgaat

SEQ ID NO: 140333 - DNA, 19 bp, Homo sapiens
  siRNA target sequence for CDH8 (NM_001796.2,693-711).
ggagcctccttctgaattt

SEQ ID NO: 140334 - DNA, 19 bp, Homo sapiens
  siRNA target sequence for CDH8 (NM_001796.2,694-712).
gagcctccttctgaattta

SEQ ID NO: 140335 - DNA, 19 bp, Homo sapiens
  siRNA target sequence for CDH8 (NM_001796.2,698-716).
ctccttctgaatttattat

SEQ ID NO: 140336 - DNA, 19 bp, Homo sapiens
  siRNA target sequence for CDH8 (NM_001796.2,789-807).
gtccattttgggtacatct

SEQ ID NO: 140337 - DNA, 19 bp, Homo sapiens
  siRNA target sequence for CDH8 (NM_001796.2,831-849).
cgctgatgacccagtttat

SEQ ID NO: 140338 - DNA, 19 bp, Homo sapiens
  siRNA target sequence for CDH8 (NM_001796.2,855-873).
cagtgcaaagttggtttat

SEQ ID NO: 140339 - DNA, 19 bp, Homo sapiens
  siRNA target sequence for CDH8 (NM_001796.2,859-877).
gcaaagttggtttatagta

SEQ ID NO: 140340 - DNA, 19 bp, Homo sapiens
  siRNA target sequence for CDH8 (NM_001796.2,867-885).
ggtttatagtatattggaa

SEQ ID NO: 140341 - DNA, 19 bp, Homo sapiens
  siRNA target sequence for CDH8 (NM_001796.2,886-904).
gggcagccttatttttcca

SEQ ID NO: 140342 - DNA, 19 bp, Homo sapiens
  siRNA target sequence for CDH8 (NM_001796.2,969-987).
gtacctggttgttatccaa

SEQ ID NO: 140343 - DNA, 19 bp, Homo sapiens
  siRNA target sequence for CDH8 (NM_001796.2,979-997).
gttatccaagccaaagata

SEQ ID NO: 140344 - DNA, 19 bp, Homo sapiens
  siRNA target sequence for CDH8 (NM_001796.2,1081-1099).
gcacagagcctgtatcact

SEQ ID NO: 140345 - DNA, 19 bp, Homo sapiens
  siRNA target sequence for CDH8 (NM_001796.2,1082-1100).
cacagagcctgtatcactt

SEQ ID NO: 140346 - DNA, 19 bp, Homo sapiens
  siRNA target sequence for CDH8 (NM_001796.2,1123-1141).
cttggcactgcaataggaa

SEQ ID NO: 140347 - DNA, 19 bp, Homo sapiens
  siRNA target sequence for CDH8 (NM_001796.2,1142-1160).
gggtgaaggccaatgatca

SEQ ID NO: 140348 - DNA, 19 bp, Homo sapiens
  siRNA target sequence for CDH8 (NM_001796.2,1178-1196).
cacagtcatcatatgatat

SEQ ID NO: 140349 - DNA, 19 bp, Homo sapiens
  siRNA target sequence for CDH8 (NM_001796.2,1180-1198).
cagtcatcatatgatatca

SEQ ID NO: 140350 - DNA, 19 bp, Homo sapiens
  siRNA target sequence for CDH8 (NM_001796.2,1205-1223).
gagatggaacagcactttt

SEQ ID NO: 140351 - DNA, 19 bp, Homo sapiens
  siRNA target sequence for CDH8 (NM_001796.2,1245-1263).
ggcccaggatggcattata

SEQ ID NO: 140352 - DNA, 19 bp, Homo sapiens
  siRNA target sequence for CDH8 (NM_001796.2,1322-1340).
cagccaatgtccatattga

SEQ ID NO: 140353 - DNA, 19 bp, Homo sapiens
  siRNA target sequence for CDH8 (NM_001796.2,1372-1390).
gacacggcgacagtcaaaa

SEQ ID NO: 140354 - DNA, 19 bp, Homo sapiens
  siRNA target sequence for CDH8 (NM_001796.2,1376-1394).
cggcgacagtcaaaatcgt

SEQ ID NO: 140355 - DNA, 19 bp, Homo sapiens
  siRNA target sequence for CDH8 (NM_001796.2,1411-1429).
gagcctccggtcttctctt

SEQ ID NO: 140356 - DNA, 19 bp, Homo sapiens
  siRNA target sequence for CDH8 (NM_001796.2,1430-1448).
caccgacttacctacttga

SEQ ID NO: 140357 - DNA, 19 bp, Homo sapiens
  siRNA target sequence for CDH8 (NM_001796.2,1433-1451).
cgacttacctacttgaagt

SEQ ID NO: 140358 - DNA, 19 bp, Homo sapiens
  siRNA target sequence for CDH8 (NM_001796.2,1434-1452).
gacttacctacttgaagtt

SEQ ID NO: 140359 - DNA, 19 bp, Homo sapiens
  siRNA target sequence for CDH8 (NM_001796.2,1436-1454).
cttacctacttgaagttca

SEQ ID NO: 140360 - DNA, 19 bp, Homo sapiens
  siRNA target sequence for CDH8 (NM_001796.2,1498-1516).
cgtgaccctgatatcactt

SEQ ID NO: 140361 - DNA, 19 bp, Homo sapiens
  siRNA target sequence for CDH8 (NM_001796.2,1520-1538).
gtcctataaggttttccat

SEQ ID NO: 140362 - DNA, 19 bp, Homo sapiens
  siRNA target sequence for CDH8 (NM_001796.2,1555-1573).
ctggagaggcagttcaaca

SEQ ID NO: 140363 - DNA, 19 bp, Homo sapiens
  siRNA target sequence for CDH8 (NM_001796.2,1557-1575).
ggagaggcagttcaacatt

SEQ ID NO: 140364 - DNA, 19 bp, Homo sapiens
  siRNA target sequence for CDH8 (NM_001796.2,1558-1576).
gagaggcagttcaacatta

SEQ ID NO: 140365 - DNA, 19 bp, Homo sapiens
  siRNA target sequence for CDH8 (NM_001796.2,1685-1703).
cacgagtacctgttgctat

SEQ ID NO: 140366 - DNA, 19 bp, Homo sapiens
  siRNA target sequence for CDH8 (NM_001796.2,1687-1705).
cgagtacctgttgctatta

SEQ ID NO: 140367 - DNA, 19 bp, Homo sapiens
  siRNA target sequence for CDH8 (NM_001796.2,1688-1706).
gagtacctgttgctattaa

SEQ ID NO: 140368 - DNA, 19 bp, Homo sapiens
  siRNA target sequence for CDH8 (NM_001796.2,1784-1802).
gccaagtcattcaaactgt

SEQ ID NO: 140369 - DNA, 19 bp, Homo sapiens
  siRNA target sequence for CDH8 (NM_001796.2,1825-1843).
cccaaaaacggacattatt

SEQ ID NO: 140370 - DNA, 19 bp, Homo sapiens
  siRNA target sequence for CDH8 (NM_001796.2,1917-1935).
cagtattttggcaaagcat

SEQ ID NO: 140371 - DNA, 19 bp, Homo sapiens
  siRNA target sequence for CDH8 (NM_001796.2,1949-1967).
gccagaagcaagaagtcta

SEQ ID NO: 140372 - DNA, 19 bp, Homo sapiens
  siRNA target sequence for CDH8 (NM_001796.2,1950-1968).
ccagaagcaagaagtctat

SEQ ID NO: 140373 - DNA, 19 bp, Homo sapiens
  siRNA target sequence for CDH8 (NM_001796.2,1956-1974).
gcaagaagtctatctttta

SEQ ID NO: 140374 - DNA, 19 bp, Homo sapiens
  siRNA target sequence for CDH8 (NM_001796.2,1965-1983).
ctatcttttaccaatcata

SEQ ID NO: 140375 - DNA, 19 bp, Homo sapiens
  siRNA target sequence for CDH8 (NM_001796.2,1975-1993).
ccaatcataatcagtgata

SEQ ID NO: 140376 - DNA, 19 bp, Homo sapiens
  siRNA target sequence for CDH8 (NM_001796.2,2015-2033).
gcactagcaccttgacaat

SEQ ID NO: 140377 - DNA, 19 bp, Homo sapiens
  siRNA target sequence for CDH8 (NM_001796.2,2072-2090).
cttgcaatgtcgaagctta

SEQ ID NO: 140378 - DNA, 19 bp, Homo sapiens
  siRNA target sequence for CDH8 (NM_001796.2,2075-2093).
gcaatgtcgaagcttatgt

SEQ ID NO: 140379 - DNA, 19 bp, Homo sapiens
  siRNA target sequence for CDH8 (NM_001796.2,2166-2184).
ggtgctgtttgtaactcta

SEQ ID NO: 140380 - DNA, 19 bp, Homo sapiens
  siRNA target sequence for CDH8 (NM_001796.2,2190-2208).
gcataaaaatgaaccatta

SEQ ID NO: 140381 - DNA, 19 bp, Homo sapiens
  siRNA target sequence for CDH8 (NM_001796.2,2229-2247).
cgttcgagaaaacatcatt

SEQ ID NO: 140382 - DNA, 19 bp, Homo sapiens
  siRNA target sequence for CDH8 (NM_001796.2,2293-2311).
gacattgcaactttacaaa

SEQ ID NO: 140383 - DNA, 19 bp, Homo sapiens
  siRNA target sequence for CDH8 (NM_001796.2,2340-2358).
ccgtaaggatattaaacca

SEQ ID NO: 140384 - DNA, 19 bp, Homo sapiens
  siRNA target sequence for CDH8 (NM_001796.2,2384-2402).
ggcttgctccagttccaaa

SEQ ID NO: 140385 - DNA, 19 bp, Homo sapiens
  siRNA target sequence for CDH8 (NM_001796.2,2405-2423).
gtgttgatgtcgatgaatt

SEQ ID NO: 140386 - DNA, 19 bp, Homo sapiens
  siRNA target sequence for CDH8 (NM_001796.2,2407-2425).
gttgatgtcgatgaattta

SEQ ID NO: 140387 - DNA, 19 bp, Homo sapiens
  siRNA target sequence for CDH8 (NM_001796.2,2552-2570).
cagactcagaccagaattt

SEQ ID NO: 140388 - DNA, 19 bp, Homo sapiens
  siRNA target sequence for CDH8 (NM_001796.2,2589-2607).
gggtccccgctttaagaga

SEQ ID NO: 140389 - DNA, 19 bp, Homo sapiens
  siRNA target sequence for CDH9 (NM_016279.2,162-180).
cttaccattatataccatt

SEQ ID NO: 140390 - DNA, 19 bp, Homo sapiens
  siRNA target sequence for CDH9 (NM_016279.2,192-210).
cctatatgttccatacagt

SEQ ID NO: 140391 - DNA, 19 bp, Homo sapiens
  siRNA target sequence for CDH9 (NM_016279.2,214-232).
caccatcctattacaagaa

SEQ ID NO: 140392 - DNA, 19 bp, Homo sapiens
  siRNA target sequence for CDH9 (NM_016279.2,230-248).
gaaaaacctaacagttatt

SEQ ID NO: 140393 - DNA, 19 bp, Homo sapiens
  siRNA target sequence for CDH9 (NM_016279.2,262-280).
gatagcgggtctgacaaaa

SEQ ID NO: 140394 - DNA, 19 bp, Homo sapiens
  siRNA target sequence for CDH9 (NM_016279.2,267-285).
cgggtctgacaaaagatga

SEQ ID NO: 140395 - DNA, 19 bp, Homo sapiens
  siRNA target sequence for CDH9 (NM_016279.2,354-372).
caggtactgacacacaata

SEQ ID NO: 140396 - DNA, 19 bp, Homo sapiens
  siRNA target sequence for CDH9 (NM_016279.2,441-459).
gggctggcagtctatttgt

SEQ ID NO: 140397 - DNA, 19 bp, Homo sapiens
  siRNA target sequence for CDH9 (NM_016279.2,443-461).
gctggcagtctatttgtta

SEQ ID NO: 140398 - DNA, 19 bp, Homo sapiens
  siRNA target sequence for CDH9 (NM_016279.2,444-462).
ctggcagtctatttgttat

SEQ ID NO: 140399 - DNA, 19 bp, Homo sapiens
  siRNA target sequence for CDH9 (NM_016279.2,571-589).
ggaaccggaatcggaattt

SEQ ID NO: 140400 - DNA, 19 bp, Homo sapiens
  siRNA target sequence for CDH9 (NM_016279.2,572-590).
gaaccggaatcggaattta

SEQ ID NO: 140401 - DNA, 19 bp, Homo sapiens
  siRNA target sequence for CDH9 (NM_016279.2,575-593).
ccggaatcggaatttatca

SEQ ID NO: 140402 - DNA, 19 bp, Homo sapiens
  siRNA target sequence for CDH9 (NM_016279.2,576-594).
cggaatcggaatttatcat

SEQ ID NO: 140403 - DNA, 19 bp, Homo sapiens
  siRNA target sequence for CDH9 (NM_016279.2,577-595).
ggaatcggaatttatcatt

SEQ ID NO: 140404 - DNA, 19 bp, Homo sapiens
  siRNA target sequence for CDH9 (NM_016279.2,667-685).
gtctggagtcggtacatct

SEQ ID NO: 140405 - DNA, 19 bp, Homo sapiens
  siRNA target sequence for CDH9 (NM_016279.2,671-689).
ggagtcggtacatctgtta

SEQ ID NO: 140406 - DNA, 19 bp, Homo sapiens
  siRNA target sequence for CDH9 (NM_016279.2,672-690).
gagtcggtacatctgttat

SEQ ID NO: 140407 - DNA, 19 bp, Homo sapiens
  siRNA target sequence for CDH9 (NM_016279.2,716-734).
gacgccaactatggaaata

SEQ ID NO: 140408 - DNA, 19 bp, Homo sapiens
  siRNA target sequence for CDH9 (NM_016279.2,718-736).
cgccaactatggaaatagt

SEQ ID NO: 140409 - DNA, 19 bp, Homo sapiens
  siRNA target sequence for CDH9 (NM_016279.2,738-756).
ccaaagtggtctatagcat

SEQ ID NO: 140410 - DNA, 19 bp, Homo sapiens
  siRNA target sequence for CDH9 (NM_016279.2,739-757).
caaagtggtctatagcata

SEQ ID NO: 140411 - DNA, 19 bp, Homo sapiens
  siRNA target sequence for CDH9 (NM_016279.2,745-763).
ggtctatagcatattgcaa

SEQ ID NO: 140412 - DNA, 19 bp, Homo sapiens
  siRNA target sequence for CDH9 (NM_016279.2,788-806).
ccagaatcaggcataataa

SEQ ID NO: 140413 - DNA, 19 bp, Homo sapiens
  siRNA target sequence for CDH9 (NM_016279.2,940-958).
caacaaccctcctcgattt

SEQ ID NO: 140414 - DNA, 19 bp, Homo sapiens
  siRNA target sequence for CDH9 (NM_016279.2,959-977).
ccccagagtacgtatcaat

SEQ ID NO: 140415 - DNA, 19 bp, Homo sapiens
  siRNA target sequence for CDH9 (NM_016279.2,960-978).
cccagagtacgtatcaatt

SEQ ID NO: 140416 - DNA, 19 bp, Homo sapiens
  siRNA target sequence for CDH9 (NM_016279.2,961-979).
ccagagtacgtatcaattt

SEQ ID NO: 140417 - DNA, 19 bp, Homo sapiens
  siRNA target sequence for CDH9 (NM_016279.2,962-980).
cagagtacgtatcaattta

SEQ ID NO: 140418 - DNA, 19 bp, Homo sapiens
  siRNA target sequence for CDH9 (NM_016279.2,964-982).
gagtacgtatcaatttaat

SEQ ID NO: 140419 - DNA, 19 bp, Homo sapiens
  siRNA target sequence for CDH9 (NM_016279.2,1092-1110).
cagacatgttcgatgtcat

SEQ ID NO: 140420 - DNA, 19 bp, Homo sapiens
  siRNA target sequence for CDH9 (NM_016279.2,1250-1268).
gatacagctgtggtcaaaa

SEQ ID NO: 140421 - DNA, 19 bp, Homo sapiens
  siRNA target sequence for CDH9 (NM_016279.2,1305-1323).
ctaaagtctcttacttgat

SEQ ID NO: 140422 - DNA, 19 bp, Homo sapiens
  siRNA target sequence for CDH9 (NM_016279.2,1314-1332).
cttacttgatagaagtaga

SEQ ID NO: 140423 - DNA, 19 bp, Homo sapiens
  siRNA target sequence for CDH9 (NM_016279.2,1318-1336).
cttgatagaagtagatgaa

SEQ ID NO: 140424 - DNA, 19 bp, Homo sapiens
  siRNA target sequence for CDH9 (NM_016279.2,1340-1358).
gtaaaggagggcagtatca

SEQ ID NO: 140425 - DNA, 19 bp, Homo sapiens
  siRNA target sequence for CDH9 (NM_016279.2,1388-1406).
gccaggaacaatttaataa

SEQ ID NO: 140426 - DNA, 19 bp, Homo sapiens
  siRNA target sequence for CDH9 (NM_016279.2,1415-1433).
gttgatcggcatactgata

SEQ ID NO: 140427 - DNA, 19 bp, Homo sapiens
  siRNA target sequence for CDH9 (NM_016279.2,1435-1453).
ggaccgtatttttggtatt

SEQ ID NO: 140428 - DNA, 19 bp, Homo sapiens
  siRNA target sequence for CDH9 (NM_016279.2,1487-1505).
gcccttgaccgggaatcat

SEQ ID NO: 140429 - DNA, 19 bp, Homo sapiens
  siRNA target sequence for CDH9 (NM_016279.2,1489-1507).
ccttgaccgggaatcatct

SEQ ID NO: 140430 - DNA, 19 bp, Homo sapiens
  siRNA target sequence for CDH9 (NM_016279.2,1576-1594).
cttcatcagaattctagat

SEQ ID NO: 140431 - DNA, 19 bp, Homo sapiens
  siRNA target sequence for CDH9 (NM_016279.2,1610-1628).
ccggaatttgccatgtatt

SEQ ID NO: 140432 - DNA, 19 bp, Homo sapiens
  siRNA target sequence for CDH9 (NM_016279.2,1653-1671).
caaaacctgggcagttgat

SEQ ID NO: 140433 - DNA, 19 bp, Homo sapiens
  siRNA target sequence for CDH9 (NM_016279.2,1677-1695).
ctgtcagtgtcatggataa

SEQ ID NO: 140434 - DNA, 19 bp, Homo sapiens
  siRNA target sequence for CDH9 (NM_016279.2,1758-1776).
cgaatttcaccattgtaga

SEQ ID NO: 140435 - DNA, 19 bp, Homo sapiens
  siRNA target sequence for CDH9 (NM_016279.2,1759-1777).
gaatttcaccattgtagat

SEQ ID NO: 140436 - DNA, 19 bp, Homo sapiens
  siRNA target sequence for CDH9 (NM_016279.2,1818-1836).
gctacagtcgcaacaaaat

SEQ ID NO: 140437 - DNA, 19 bp, Homo sapiens
  siRNA target sequence for CDH9 (NM_016279.2,1831-1849).
caaaatgagcacctactta

SEQ ID NO: 140438 - DNA, 19 bp, Homo sapiens
  siRNA target sequence for CDH9 (NM_016279.2,1843-1861).
ctacttattgccgatttta

SEQ ID NO: 140439 - DNA, 19 bp, Homo sapiens
  siRNA target sequence for CDH9 (NM_016279.2,1864-1882).
ctttgacaacgattatcca

SEQ ID NO: 140440 - DNA, 19 bp, Homo sapiens
  siRNA target sequence for CDH9 (NM_016279.2,1870-1888).
caacgattatccaattcaa

SEQ ID NO: 140441 - DNA, 19 bp, Homo sapiens
  siRNA target sequence for CDH9 (NM_016279.2,1893-1911).
gcactggtacactcactat

SEQ ID NO: 140442 - DNA, 19 bp, Homo sapiens
  siRNA target sequence for CDH9 (NM_016279.2,1918-1936).
gtgtgcctgcgataatcaa

SEQ ID NO: 140443 - DNA, 19 bp, Homo sapiens
  siRNA target sequence for CDH9 (NM_016279.2,1923-1941).
cctgcgataatcaaggaaa

SEQ ID NO: 140444 - DNA, 19 bp, Homo sapiens
  siRNA target sequence for CDH9 (NM_016279.2,1998-2016).
ctctcgttgcgattctact

SEQ ID NO: 140445 - DNA, 19 bp, Homo sapiens
  siRNA target sequence for CDH9 (NM_016279.2,2023-2041).
cctcatactgcttatttta

SEQ ID NO: 140446 - DNA, 19 bp, Homo sapiens
  siRNA target sequence for CDH9 (NM_016279.2,2081-2099).
gaacctctgataatttcaa

SEQ ID NO: 140447 - DNA, 19 bp, Homo sapiens
  siRNA target sequence for CDH9 (NM_016279.2,2104-2122).
cgatgtccgggacaacatt

SEQ ID NO: 140448 - DNA, 19 bp, Homo sapiens
  siRNA target sequence for CDH9 (NM_016279.2,2171-2189).
gacattggcacattaagga

SEQ ID NO: 140449 - DNA, 19 bp, Homo sapiens
  siRNA target sequence for CDH9 (NM_016279.2,2228-2246).
gtaatgcctgaaactattt

SEQ ID NO: 140450 - DNA, 19 bp, Homo sapiens
  siRNA target sequence for CDH9 (NM_016279.2,2274-2292).
gggaaaatattgatgtaca

SEQ ID NO: 140451 - DNA, 19 bp, Homo sapiens
  siRNA target sequence for CDH9 (NM_016279.2,2302-2320).
ccatcgaagattaaaagaa

SEQ ID NO: 140452 - DNA, 19 bp, Homo sapiens
  siRNA target sequence for CDH9 (NM_016279.2,2332-2350).
cccaagtgcacctccatat

SEQ ID NO: 140453 - DNA, 19 bp, Homo sapiens
  siRNA target sequence for CDH9 (NM_016279.2,2426-2444).
gctgattgtaaccaagatt

SEQ ID NO: 140454 - DNA, 19 bp, Homo sapiens
  siRNA target sequence for CDH9 (NM_016279.2,2427-2445).
ctgattgtaaccaagatta

SEQ ID NO: 140455 - DNA, 19 bp, Homo sapiens
  siRNA target sequence for CDH9 (NM_016279.2,2433-2451).
gtaaccaagattatgatta

SEQ ID NO: 140456 - DNA, 19 bp, Homo sapiens
  siRNA target sequence for CDH9 (NM_016279.2,2466-2484).
ggcctcgtttcaaaaaact

SEQ ID NO: 140457 - DNA, 19 bp, Homo sapiens
  siRNA target sequence for CEGF3 (NM_152753.2,225-243).
gtgcgagcgagaggataat

SEQ ID NO: 140458 - DNA, 19 bp, Homo sapiens
  siRNA target sequence for CEGF3 (NM_152753.2,228-246).
cgagcgagaggataatgca

SEQ ID NO: 140459 - DNA, 19 bp, Homo sapiens
  siRNA target sequence for CEGF3 (NM_152753.2,538-556).
gggggtattgcctgtgaat

SEQ ID NO: 140460 - DNA, 19 bp, Homo sapiens
  siRNA target sequence for CEGF3 (NM_152753.2,589-607).
cgggactgtaaattgacat

SEQ ID NO: 140461 - DNA, 19 bp, Homo sapiens
  siRNA target sequence for CEGF3 (NM_152753.2,664-682).
cggtgcggctgccatatca

SEQ ID NO: 140462 - DNA, 19 bp, Homo sapiens
  siRNA target sequence for CEGF3 (NM_152753.2,665-683).
ggtgcggctgccatatcaa

SEQ ID NO: 140463 - DNA, 19 bp, Homo sapiens
  siRNA target sequence for CEGF3 (NM_152753.2,668-686).
gcggctgccatatcaagtt

SEQ ID NO: 140464 - DNA, 19 bp, Homo sapiens
  siRNA target sequence for CEGF3 (NM_152753.2,669-687).
cggctgccatatcaagttt

SEQ ID NO: 140465 - DNA, 19 bp, Homo sapiens
  siRNA target sequence for CEGF3 (NM_152753.2,671-689).
gctgccatatcaagtttgt

SEQ ID NO: 140466 - DNA, 19 bp, Homo sapiens
  siRNA target sequence for CEGF3 (NM_152753.2,694-712).
cataccgacgggaagacat

SEQ ID NO: 140467 - DNA, 19 bp, Homo sapiens
  siRNA target sequence for CEGF3 (NM_152753.2,822-840).
gaagacgtgcaaagatata

SEQ ID NO: 140468 - DNA, 19 bp, Homo sapiens
  siRNA target sequence for CEGF3 (NM_152753.2,825-843).
gacgtgcaaagatatagat

SEQ ID NO: 140469 - DNA, 19 bp, Homo sapiens
  siRNA target sequence for CEGF3 (NM_152753.2,827-845).
cgtgcaaagatatagatga

SEQ ID NO: 140470 - DNA, 19 bp, Homo sapiens
  siRNA target sequence for CEGF3 (NM_152753.2,841-859).
gatgagtgccgcttaaaca

SEQ ID NO: 140471 - DNA, 19 bp, Homo sapiens
  siRNA target sequence for CEGF3 (NM_152753.2,911-929).
gttgcaagaaaggctataa

SEQ ID NO: 140472 - DNA, 19 bp, Homo sapiens
  siRNA target sequence for CEGF3 (NM_152753.2,915-933).
caagaaaggctataagctt

SEQ ID NO: 140473 - DNA, 19 bp, Homo sapiens
  siRNA target sequence for CEGF3 (NM_152753.2,923-941).
gctataagcttctcatcaa

SEQ ID NO: 140474 - DNA, 19 bp, Homo sapiens
  siRNA target sequence for CEGF3 (NM_152753.2,924-942).
ctataagcttctcatcaat

SEQ ID NO: 140475 - DNA, 19 bp, Homo sapiens
  siRNA target sequence for CEGF3 (NM_152753.2,1042-1060).
ggctacctgttgtatggta

SEQ ID NO: 140476 - DNA, 19 bp, Homo sapiens
  siRNA target sequence for CEGF3 (NM_152753.2,1043-1061).
gctacctgttgtatggtat

SEQ ID NO: 140477 - DNA, 19 bp, Homo sapiens
  siRNA target sequence for CEGF3 (NM_152753.2,1111-1129).
cgctttggctgcatcaaca

SEQ ID NO: 140478 - DNA, 19 bp, Homo sapiens
  siRNA target sequence for CEGF3 (NM_152753.2,1176-1194).
gcactggaatggcaaagat

SEQ ID NO: 140479 - DNA, 19 bp, Homo sapiens
  siRNA target sequence for CEGF3 (NM_152753.2,1177-1195).
cactggaatggcaaagatt

SEQ ID NO: 140480 - DNA, 19 bp, Homo sapiens
  siRNA target sequence for CEGF3 (NM_152753.2,1430-1448).
cagtgctgtccattaaaca

SEQ ID NO: 140481 - DNA, 19 bp, Homo sapiens
  siRNA target sequence for CEGF3 (NM_152753.2,1447-1465).
caacgggcctccttcaaga

SEQ ID NO: 140482 - DNA, 19 bp, Homo sapiens
  siRNA target sequence for CEGF3 (NM_152753.2,1572-1590).
cttcatccaccttaagtgt

SEQ ID NO: 140483 - DNA, 19 bp, Homo sapiens
  siRNA target sequence for CEGF3 (NM_152753.2,1719-1737).
cctccgacagcgaatggaa

SEQ ID NO: 140484 - DNA, 19 bp, Homo sapiens
  siRNA target sequence for CEGF3 (NM_152753.2,1801-1819).
cgcctggcaggccttgatt

SEQ ID NO: 140485 - DNA, 19 bp, Homo sapiens
  siRNA target sequence for CEGF3 (NM_152753.2,1802-1820).
gcctggcaggccttgatta

SEQ ID NO: 140486 - DNA, 19 bp, Homo sapiens
  siRNA target sequence for CEGF3 (NM_152753.2,1920-1938).
ctgcccgcagggaacgtat

SEQ ID NO: 140487 - DNA, 19 bp, Homo sapiens
  siRNA target sequence for CEGF3 (NM_152753.2,1922-1940).
gcccgcagggaacgtatta

SEQ ID NO: 140488 - DNA, 19 bp, Homo sapiens
  siRNA target sequence for CEGF3 (NM_152753.2,1925-1943).
cgcagggaacgtattacca

SEQ ID NO: 140489 - DNA, 19 bp, Homo sapiens
  siRNA target sequence for CEGF3 (NM_152753.2,2159-2177).
caggacggaccctatgctt

SEQ ID NO: 140490 - DNA, 19 bp, Homo sapiens
  siRNA target sequence for CEGF3 (NM_152753.2,2257-2275).
ccagggcactactacaaca

SEQ ID NO: 140491 - DNA, 19 bp, Homo sapiens
  siRNA target sequence for CEGF3 (NM_152753.2,2321-2339).
ccgacttccgtcagaactt

SEQ ID NO: 140492 - DNA, 19 bp, Homo sapiens
  siRNA target sequence for CEGF3 (NM_152753.2,2323-2341).
gacttccgtcagaacttct

SEQ ID NO: 140493 - DNA, 19 bp, Homo sapiens
  siRNA target sequence for CEGF3 (NM_152753.2,2346-2364).
ccgctgtccaggaaacaca

SEQ ID NO: 140494 - DNA, 19 bp, Homo sapiens
  siRNA target sequence for CEGF3 (NM_152753.2,2347-2365).
cgctgtccaggaaacacaa

SEQ ID NO: 140495 - DNA, 19 bp, Homo sapiens
  siRNA target sequence for CEGF3 (NM_152753.2,2519-2537).
ccaagcgcaagatccttat

SEQ ID NO: 140496 - DNA, 19 bp, Homo sapiens
  siRNA target sequence for CEGF3 (NM_152753.2,2590-2608).
gtcatgagaaagaactcat

SEQ ID NO: 140497 - DNA, 19 bp, Homo sapiens
  siRNA target sequence for CEGF3 (NM_152753.2,2730-2748).
cttccagattccctatgtt

SEQ ID NO: 140498 - DNA, 19 bp, Homo sapiens
  siRNA target sequence for CEGF3 (NM_152753.2,2736-2754).
gattccctatgttacctat

SEQ ID NO: 140499 - DNA, 19 bp, Homo sapiens
  siRNA target sequence for CELSR1 (NM_014246.1,747-765).
ctaccaggtggcgttgttt

SEQ ID NO: 140500 - DNA, 19 bp, Homo sapiens
  siRNA target sequence for CELSR1 (NM_014246.1,751-769).
caggtggcgttgtttgaga

SEQ ID NO: 140501 - DNA, 19 bp, Homo sapiens
  siRNA target sequence for CELSR1 (NM_014246.1,829-847).
gaggagcgcgtgagctatt

SEQ ID NO: 140502 - DNA, 19 bp, Homo sapiens
  siRNA target sequence for CELSR1 (NM_014246.1,1677-1695).
cgacaacgagcctatcttt

SEQ ID NO: 140503 - DNA, 19 bp, Homo sapiens
  siRNA target sequence for CELSR1 (NM_014246.1,2073-2091).
ctacgagcttcgtctgaat

SEQ ID NO: 140504 - DNA, 19 bp, Homo sapiens
  siRNA target sequence for CELSR1 (NM_014246.1,2143-2161).
gacgccaacagtgtgatta

SEQ ID NO: 140505 - DNA, 19 bp, Homo sapiens
  siRNA target sequence for CELSR1 (NM_014246.1,2146-2164).
gccaacagtgtgattacct

SEQ ID NO: 140506 - DNA, 19 bp, Homo sapiens
  siRNA target sequence for CELSR1 (NM_014246.1,2315-2333).
ctgcgcatgtcctaatcaa

SEQ ID NO: 140507 - DNA, 19 bp, Homo sapiens
  siRNA target sequence for CELSR1 (NM_014246.1,2410-2428).
gtgggcacctccattgcta

SEQ ID NO: 140508 - DNA, 19 bp, Homo sapiens
  siRNA target sequence for CELSR1 (NM_014246.1,2603-2621).
gcatcccgcagaaatcaga

SEQ ID NO: 140509 - DNA, 19 bp, Homo sapiens
  siRNA target sequence for CELSR1 (NM_014246.1,2810-2828).
gcgatggggacttctacat

SEQ ID NO: 140510 - DNA, 19 bp, Homo sapiens
  siRNA target sequence for CELSR1 (NM_014246.1,2832-2850).
gcccacgtccggtgtgatt

SEQ ID NO: 140511 - DNA, 19 bp, Homo sapiens
  siRNA target sequence for CELSR1 (NM_014246.1,2935-2953).
cttagcgcctcggtagaaa

SEQ ID NO: 140512 - DNA, 19 bp, Homo sapiens
  siRNA target sequence for CELSR1 (NM_014246.1,2939-2957).
gcgcctcggtagaaatcca

SEQ ID NO: 140513 - DNA, 19 bp, Homo sapiens
  siRNA target sequence for CELSR1 (NM_014246.1,3045-3063).
gtcggtggtggcaaagatt

SEQ ID NO: 140514 - DNA, 19 bp, Homo sapiens
  siRNA target sequence for CELSR1 (NM_014246.1,3088-3106).
cctaatgcccagatcatgt

SEQ ID NO: 140515 - DNA, 19 bp, Homo sapiens
  siRNA target sequence for CELSR1 (NM_014246.1,3121-3139).
ggggacatgcggcatttct

SEQ ID NO: 140516 - DNA, 19 bp, Homo sapiens
  siRNA target sequence for CELSR1 (NM_014246.1,3338-3356).
ccaacaagtccaacagttt

SEQ ID NO: 140517 - DNA, 19 bp, Homo sapiens
  siRNA target sequence for CELSR1 (NM_014246.1,4289-4307).
gtcctcctggcgagtatga

SEQ ID NO: 140518 - DNA, 19 bp, Homo sapiens
  siRNA target sequence for CELSR1 (NM_014246.1,4291-4309).
cctcctggcgagtatgaga

SEQ ID NO: 140519 - DNA, 19 bp, Homo sapiens
  siRNA target sequence for CELSR1 (NM_014246.1,4588-4606).
gtgcaggtgcagtactaca

SEQ ID NO: 140520 - DNA, 19 bp, Homo sapiens
  siRNA target sequence for CELSR1 (NM_014246.1,4642-4660).
gggccgtccggggaaaaga

SEQ ID NO: 140521 - DNA, 19 bp, Homo sapiens
  siRNA target sequence for CELSR1 (NM_014246.1,4643-4661).
ggccgtccggggaaaagat

SEQ ID NO: 140522 - DNA, 19 bp, Homo sapiens
  siRNA target sequence for CELSR1 (NM_014246.1,4668-4686).
ggtgacagtggatgattgt

SEQ ID NO: 140523 - DNA, 19 bp, Homo sapiens
  siRNA target sequence for CELSR1 (NM_014246.1,4872-4890).
gtcagtcgacggcaaaaat

SEQ ID NO: 140524 - DNA, 19 bp, Homo sapiens
  siRNA target sequence for CELSR1 (NM_014246.1,4874-4892).
cagtcgacggcaaaaatgt

SEQ ID NO: 140525 - DNA, 19 bp, Homo sapiens
  siRNA target sequence for CELSR1 (NM_014246.1,4902-4920).
cggattcatcgccaacaat

SEQ ID NO: 140526 - DNA, 19 bp, Homo sapiens
  siRNA target sequence for CELSR1 (NM_014246.1,4991-5009).
gtgtcaacaggtggaatat

SEQ ID NO: 140527 - DNA, 19 bp, Homo sapiens
  siRNA target sequence for CELSR1 (NM_014246.1,5138-5156).
ggtacctggggctcatgtt

SEQ ID NO: 140528 - DNA, 19 bp, Homo sapiens
  siRNA target sequence for CELSR1 (NM_014246.1,5557-5575).
gtcgccaccctgaacatga

SEQ ID NO: 140529 - DNA, 19 bp, Homo sapiens
  siRNA target sequence for CELSR1 (NM_014246.1,5826-5844).
gccgtactgtgagaacaaa

SEQ ID NO: 140530 - DNA, 19 bp, Homo sapiens
  siRNA target sequence for CELSR1 (NM_014246.1,5918-5936).
gctttgatcccgactgtaa

SEQ ID NO: 140531 - DNA, 19 bp, Homo sapiens
  siRNA target sequence for CELSR1 (NM_014246.1,5919-5937).
ctttgatcccgactgtaat

SEQ ID NO: 140532 - DNA, 19 bp, Homo sapiens
  siRNA target sequence for CELSR1 (NM_014246.1,6134-6152).
cgctcggctgtgaagtgat

SEQ ID NO: 140533 - DNA, 19 bp, Homo sapiens
  siRNA target sequence for CELSR1 (NM_014246.1,6236-6254).
ctaagggatccgttggaaa

SEQ ID NO: 140534 - DNA, 19 bp, Homo sapiens
  siRNA target sequence for CELSR1 (NM_014246.1,6533-6551).
cgcaggacgccgactttca

SEQ ID NO: 140535 - DNA, 19 bp, Homo sapiens
  siRNA target sequence for CELSR1 (NM_014246.1,6723-6741).
cgtcaccgccaacatgatt

SEQ ID NO: 140536 - DNA, 19 bp, Homo sapiens
  siRNA target sequence for CELSR1 (NM_014246.1,6726-6744).
caccgccaacatgattctt

SEQ ID NO: 140537 - DNA, 19 bp, Homo sapiens
  siRNA target sequence for CELSR1 (NM_014246.1,7354-7372).
gcggtgctcatggatatct

SEQ ID NO: 140538 - DNA, 19 bp, Homo sapiens
  siRNA target sequence for CELSR1 (NM_014246.1,7612-7630).
ctccactacatctacatga

SEQ ID NO: 140539 - DNA, 19 bp, Homo sapiens
  siRNA target sequence for CELSR1 (NM_014246.1,7808-7826).
gctggctgtcgcttcaaga

SEQ ID NO: 140540 - DNA, 19 bp, Homo sapiens
  siRNA target sequence for CELSR1 (NM_014246.1,7851-7869).
gcccatcggagctgttata

SEQ ID NO: 140541 - DNA, 19 bp, Homo sapiens
  siRNA target sequence for CELSR1 (NM_014246.1,7852-7870).
cccatcggagctgttataa

SEQ ID NO: 140542 - DNA, 19 bp, Homo sapiens
  siRNA target sequence for CELSR1 (NM_014246.1,7858-7876).
ggagctgttataatcatca

SEQ ID NO: 140543 - DNA, 19 bp, Homo sapiens
  siRNA target sequence for CELSR1 (NM_014246.1,7861-7879).
gctgttataatcatcaaca

SEQ ID NO: 140544 - DNA, 19 bp, Homo sapiens
  siRNA target sequence for CELSR1 (NM_014246.1,7891-7909).
gtcctatctgcaaaggttt

SEQ ID NO: 140545 - DNA, 19 bp, Homo sapiens
  siRNA target sequence for CELSR1 (NM_014246.1,8407-8425).
cacgattccgactcagata

SEQ ID NO: 140546 - DNA, 19 bp, Homo sapiens
  siRNA target sequence for CELSR1 (NM_014246.1,8497-8515).
gtgggagctgaggaaaaat

SEQ ID NO: 140547 - DNA, 19 bp, Homo sapiens
  siRNA target sequence for CELSR1 (NM_014246.1,8976-8994).
caacggggtggccatgaat

SEQ ID NO: 140548 - DNA, 19 bp, Homo sapiens
  siRNA target sequence for CELSR2 (NM_001408.1,459-477).
gaggagcacccgtgcttaa

SEQ ID NO: 140549 - DNA, 19 bp, Homo sapiens
  siRNA target sequence for CELSR2 (NM_001408.1,564-582).
ggtgggcgtcggaaaagga

SEQ ID NO: 140550 - DNA, 19 bp, Homo sapiens
  siRNA target sequence for CELSR2 (NM_001408.1,569-587).
gcgtcggaaaaggaatgta

SEQ ID NO: 140551 - DNA, 19 bp, Homo sapiens
  siRNA target sequence for CELSR2 (NM_001408.1,570-588).
cgtcggaaaaggaatgtaa

SEQ ID NO: 140552 - DNA, 19 bp, Homo sapiens
  siRNA target sequence for CELSR2 (NM_001408.1,741-759).
cgctccaaccagttcttct

SEQ ID NO: 140553 - DNA, 19 bp, Homo sapiens
  siRNA target sequence for CELSR2 (NM_001408.1,1015-1033).
cccctcccaatgccaatat

SEQ ID NO: 140554 - DNA, 19 bp, Homo sapiens
  siRNA target sequence for CELSR2 (NM_001408.1,1020-1038).
cccaatgccaatattctgt

SEQ ID NO: 140555 - DNA, 19 bp, Homo sapiens
  siRNA target sequence for CELSR2 (NM_001408.1,1201-1219).
gtaccacagccgctgtttt

SEQ ID NO: 140556 - DNA, 19 bp, Homo sapiens
  siRNA target sequence for CELSR2 (NM_001408.1,1357-1375).
ccgtggtgcactatagcat

SEQ ID NO: 140557 - DNA, 19 bp, Homo sapiens
  siRNA target sequence for CELSR2 (NM_001408.1,1362-1380).
gtgcactatagcatcatga

SEQ ID NO: 140558 - DNA, 19 bp, Homo sapiens
  siRNA target sequence for CELSR2 (NM_001408.1,1390-1408).
ctcggggacagttttatct

SEQ ID NO: 140559 - DNA, 19 bp, Homo sapiens
  siRNA target sequence for CELSR2 (NM_001408.1,1504-1522).
gtcccccactctctaatgt

SEQ ID NO: 140560 - DNA, 19 bp, Homo sapiens
  siRNA target sequence for CELSR2 (NM_001408.1,1696-1714).
ctggggtgggacatgactt

SEQ ID NO: 140561 - DNA, 19 bp, Homo sapiens
  siRNA target sequence for CELSR2 (NM_001408.1,1767-1785).
gaccgggaggaagttgatt

SEQ ID NO: 140562 - DNA, 19 bp, Homo sapiens
  siRNA target sequence for CELSR2 (NM_001408.1,1770-1788).
cgggaggaagttgatttct

SEQ ID NO: 140563 - DNA, 19 bp, Homo sapiens
  siRNA target sequence for CELSR2 (NM_001408.1,1869-1887).
gtcaacgacaacaatccaa

SEQ ID NO: 140564 - DNA, 19 bp, Homo sapiens
  siRNA target sequence for CELSR2 (NM_001408.1,1874-1892).
cgacaacaatccaaccttt

SEQ ID NO: 140565 - DNA, 19 bp, Homo sapiens
  siRNA target sequence for CELSR2 (NM_001408.1,1967-1985).
ggaccgtgatgctcatagt

SEQ ID NO: 140566 - DNA, 19 bp, Homo sapiens
  siRNA target sequence for CELSR2 (NM_001408.1,2077-2095).
cactggactacaaacttga

SEQ ID NO: 140567 - DNA, 19 bp, Homo sapiens
  siRNA target sequence for CELSR2 (NM_001408.1,2204-2222).
ctcccactatacagtgaat

SEQ ID NO: 140568 - DNA, 19 bp, Homo sapiens
  siRNA target sequence for CELSR2 (NM_001408.1,2208-2226).
cactatacagtgaatgtta

SEQ ID NO: 140569 - DNA, 19 bp, Homo sapiens
  siRNA target sequence for CELSR2 (NM_001408.1,2541-2559).
gatgtgccacccttcacta

SEQ ID NO: 140570 - DNA, 19 bp, Homo sapiens
  siRNA target sequence for CELSR2 (NM_001408.1,2636-2654).
cgatggagacggtgacttt

SEQ ID NO: 140571 - DNA, 19 bp, Homo sapiens
  siRNA target sequence for CELSR2 (NM_001408.1,2637-2655).
gatggagacggtgacttta

SEQ ID NO: 140572 - DNA, 19 bp, Homo sapiens
  siRNA target sequence for CELSR2 (NM_001408.1,2641-2659).
gagacggtgactttattgt

SEQ ID NO: 140573 - DNA, 19 bp, Homo sapiens
  siRNA target sequence for CELSR2 (NM_001408.1,2913-2931).
ggcaccaatgcccagatta

SEQ ID NO: 140574 - DNA, 19 bp, Homo sapiens
  siRNA target sequence for CELSR2 (NM_001408.1,2914-2932).
gcaccaatgcccagattat

SEQ ID NO: 140575 - DNA, 19 bp, Homo sapiens
  siRNA target sequence for CELSR2 (NM_001408.1,2996-3014).
gacagccctggtagactta

SEQ ID NO: 140576 - DNA, 19 bp, Homo sapiens
  siRNA target sequence for CELSR2 (NM_001408.1,3213-3231).
gcccatgaccctgatatct

SEQ ID NO: 140577 - DNA, 19 bp, Homo sapiens
  siRNA target sequence for CELSR2 (NM_001408.1,3223-3241).
ctgatatctcagatagtct

SEQ ID NO: 140578 - DNA, 19 bp, Homo sapiens
  siRNA target sequence for CELSR2 (NM_001408.1,3250-3268).
gctttgagcggggaaatga

SEQ ID NO: 140579 - DNA, 19 bp, Homo sapiens
  siRNA target sequence for CELSR2 (NM_001408.1,3251-3269).
ctttgagcggggaaatgaa

SEQ ID NO: 140580 - DNA, 19 bp, Homo sapiens
  siRNA target sequence for CELSR2 (NM_001408.1,4101-4119).
ctggtgggcggtttcaagt

SEQ ID NO: 140581 - DNA, 19 bp, Homo sapiens
  siRNA target sequence for CELSR2 (NM_001408.1,4261-4279).
gcgacgggttgctgttgta

SEQ ID NO: 140582 - DNA, 19 bp, Homo sapiens
  siRNA target sequence for CELSR2 (NM_001408.1,4263-4281).
gacgggttgctgttgtaca

SEQ ID NO: 140583 - DNA, 19 bp, Homo sapiens
  siRNA target sequence for CELSR2 (NM_001408.1,4265-4283).
cgggttgctgttgtacaat

SEQ ID NO: 140584 - DNA, 19 bp, Homo sapiens
  siRNA target sequence for CELSR2 (NM_001408.1,4277-4295).
gtacaatgggcgtttcaat

SEQ ID NO: 140585 - DNA, 19 bp, Homo sapiens
  siRNA target sequence for CELSR2 (NM_001408.1,4419-4437).
catacggtgcagctgaaat

SEQ ID NO: 140586 - DNA, 19 bp, Homo sapiens
  siRNA target sequence for CELSR2 (NM_001408.1,4423-4441).
cggtgcagctgaaatacta

SEQ ID NO: 140587 - DNA, 19 bp, Homo sapiens
  siRNA target sequence for CELSR2 (NM_001408.1,4716-4734).
gacagccggcacatagaca

SEQ ID NO: 140588 - DNA, 19 bp, Homo sapiens
  siRNA target sequence for CELSR2 (NM_001408.1,4975-4993).
ggtacctcagcctcatgtt

SEQ ID NO: 140589 - DNA, 19 bp, Homo sapiens
  siRNA target sequence for CELSR2 (NM_001408.1,5538-5556).
gacaactgtactaatgtgt

SEQ ID NO: 140590 - DNA, 19 bp, Homo sapiens
  siRNA target sequence for CELSR2 (NM_001408.1,5630-5648).
gtgtcccccaaattacctt

SEQ ID NO: 140591 - DNA, 19 bp, Homo sapiens
  siRNA target sequence for CELSR2 (NM_001408.1,6117-6135).
cccccaaacctcttcaact

SEQ ID NO: 140592 - DNA, 19 bp, Homo sapiens
  siRNA target sequence for CELSR2 (NM_001408.1,6177-6195).
cggctacagcggaatgagt

SEQ ID NO: 140593 - DNA, 19 bp, Homo sapiens
  siRNA target sequence for CELSR2 (NM_001408.1,6365-6383).
cgtgcacttcactgagaat

SEQ ID NO: 140594 - DNA, 19 bp, Homo sapiens
  siRNA target sequence for CELSR2 (NM_001408.1,6831-6849).
gggctactgcctcataact

SEQ ID NO: 140595 - DNA, 19 bp, Homo sapiens
  siRNA target sequence for CELSR2 (NM_001408.1,6833-6851).
gctactgcctcataactat

SEQ ID NO: 140596 - DNA, 19 bp, Homo sapiens
  siRNA target sequence for CELSR2 (NM_001408.1,6879-6897).
cccaaacgcccgatcatca

SEQ ID NO: 140597 - DNA, 19 bp, Homo sapiens
  siRNA target sequence for CELSR2 (NM_001408.1,6880-6898).
ccaaacgcccgatcatcaa

SEQ ID NO: 140598 - DNA, 19 bp, Homo sapiens
  siRNA target sequence for CELSR2 (NM_001408.1,6914-6932).
catcagcgtccatgatgat

SEQ ID NO: 140599 - DNA, 19 bp, Homo sapiens
  siRNA target sequence for CELSR2 (NM_001408.1,7083-7101).
gtcgtcttccgcaatgaga

SEQ ID NO: 140600 - DNA, 19 bp, Homo sapiens
  siRNA target sequence for CELSR2 (NM_001408.1,7592-7610).
ctgctggctctccatctat

SEQ ID NO: 140601 - DNA, 19 bp, Homo sapiens
  siRNA target sequence for CELSR2 (NM_001408.1,7613-7631).
cacgctcatctggagtttt

SEQ ID NO: 140602 - DNA, 19 bp, Homo sapiens
  siRNA target sequence for CELSR2 (NM_001408.1,7839-7857).
ctctttgctacctgcaatt

SEQ ID NO: 140603 - DNA, 19 bp, Homo sapiens
  siRNA target sequence for CELSR2 (NM_001408.1,7980-7998).
ctgacctcgtcctacaact

SEQ ID NO: 140604 - DNA, 19 bp, Homo sapiens
  siRNA target sequence for CELSR2 (NM_001408.1,8792-8810).
ctcgtcaggctccgaattt

SEQ ID NO: 140605 - DNA, 19 bp, Homo sapiens
  siRNA target sequence for CELSR2 (NM_001408.1,8794-8812).
cgtcaggctccgaatttct

SEQ ID NO: 140606 - DNA, 19 bp, Homo sapiens
  siRNA target sequence for CELSR2 (NM_001408.1,8797-8815).
caggctccgaatttctctt

SEQ ID NO: 140607 - DNA, 19 bp, Homo sapiens
  siRNA target sequence for CELSR2 (NM_001408.1,8800-8818).
gctccgaatttctcttctt

SEQ ID NO: 140608 - DNA, 19 bp, Homo sapiens
  siRNA target sequence for CELSR3 (NM_001407.1,455-473).
cggagccttagctctttgt

SEQ ID NO: 140609 - DNA, 19 bp, Homo sapiens
  siRNA target sequence for CELSR3 (NM_001407.1,662-680).
gggaccagggtctgtgtta

SEQ ID NO: 140610 - DNA, 19 bp, Homo sapiens
  siRNA target sequence for CELSR3 (NM_001407.1,664-682).
gaccagggtctgtgttata

SEQ ID NO: 140611 - DNA, 19 bp, Homo sapiens
  siRNA target sequence for CELSR3 (NM_001407.1,711-729).
cggacaggacctttgcaaa

SEQ ID NO: 140612 - DNA, 19 bp, Homo sapiens
  siRNA target sequence for CELSR3 (NM_001407.1,789-807).
cccctcccttcagactttt

SEQ ID NO: 140613 - DNA, 19 bp, Homo sapiens
  siRNA target sequence for CELSR3 (NM_001407.1,790-808).
ccctcccttcagacttttt

SEQ ID NO: 140614 - DNA, 19 bp, Homo sapiens
  siRNA target sequence for CELSR3 (NM_001407.1,1249-1267).
cgcagtttccgcagtacaa

SEQ ID NO: 140615 - DNA, 19 bp, Homo sapiens
  siRNA target sequence for CELSR3 (NM_001407.1,1562-1580).
cgaccactcgccggttttt

SEQ ID NO: 140616 - DNA, 19 bp, Homo sapiens
  siRNA target sequence for CELSR3 (NM_001407.1,1785-1803).
gaccgcgagcacatggaaa

SEQ ID NO: 140617 - DNA, 19 bp, Homo sapiens
  siRNA target sequence for CELSR3 (NM_001407.1,1789-1807).
gcgagcacatggaaagcta

SEQ ID NO: 140618 - DNA, 19 bp, Homo sapiens
  siRNA target sequence for CELSR3 (NM_001407.1,2013-2031).
ggattggtgcactacaaca

SEQ ID NO: 140619 - DNA, 19 bp, Homo sapiens
  siRNA target sequence for CELSR3 (NM_001407.1,2014-2032).
gattggtgcactacaacat

SEQ ID NO: 140620 - DNA, 19 bp, Homo sapiens
  siRNA target sequence for CELSR3 (NM_001407.1,2042-2060).
caatagccgtggacacttt

SEQ ID NO: 140621 - DNA, 19 bp, Homo sapiens
  siRNA target sequence for CELSR3 (NM_001407.1,2163-2181).
ccaccgctgtccaacaaca

SEQ ID NO: 140622 - DNA, 19 bp, Homo sapiens
  siRNA target sequence for CELSR3 (NM_001407.1,2213-2231).
caatgaccacattcctatt

SEQ ID NO: 140623 - DNA, 19 bp, Homo sapiens
  siRNA target sequence for CELSR3 (NM_001407.1,2240-2258).
cacgcccttccaagtttct

SEQ ID NO: 140624 - DNA, 19 bp, Homo sapiens
  siRNA target sequence for CELSR3 (NM_001407.1,2367-2385).
gatactccttttgtgataa

SEQ ID NO: 140625 - DNA, 19 bp, Homo sapiens
  siRNA target sequence for CELSR3 (NM_001407.1,2538-2556).
cggcctgagttcacaatga

SEQ ID NO: 140626 - DNA, 19 bp, Homo sapiens
  siRNA target sequence for CELSR3 (NM_001407.1,2539-2557).
ggcctgagttcacaatgaa

SEQ ID NO: 140627 - DNA, 19 bp, Homo sapiens
  siRNA target sequence for CELSR3 (NM_001407.1,2806-2824).
gctatgtgcacatcaacat

SEQ ID NO: 140628 - DNA, 19 bp, Homo sapiens
  siRNA target sequence for CELSR3 (NM_001407.1,3010-3028).
caggagccattacattaca

SEQ ID NO: 140629 - DNA, 19 bp, Homo sapiens
  siRNA target sequence for CELSR3 (NM_001407.1,3059-3077).
ctacaccctggctatcaca

SEQ ID NO: 140630 - DNA, 19 bp, Homo sapiens
  siRNA target sequence for CELSR3 (NM_001407.1,3099-3117).
cagaaggcagacactactt

SEQ ID NO: 140631 - DNA, 19 bp, Homo sapiens
  siRNA target sequence for CELSR3 (NM_001407.1,3101-3119).
gaaggcagacactacttat

SEQ ID NO: 140632 - DNA, 19 bp, Homo sapiens
  siRNA target sequence for CELSR3 (NM_001407.1,3330-3348).
ggaattgtccgtacagtaa

SEQ ID NO: 140633 - DNA, 19 bp, Homo sapiens
  siRNA target sequence for CELSR3 (NM_001407.1,3362-3380).
ggaggcagtatcagtgtat

SEQ ID NO: 140634 - DNA, 19 bp, Homo sapiens
  siRNA target sequence for CELSR3 (NM_001407.1,3366-3384).
gcagtatcagtgtatgagt

SEQ ID NO: 140635 - DNA, 19 bp, Homo sapiens
  siRNA target sequence for CELSR3 (NM_001407.1,3367-3385).
cagtatcagtgtatgagtt

SEQ ID NO: 140636 - DNA, 19 bp, Homo sapiens
  siRNA target sequence for CELSR3 (NM_001407.1,3504-3522).
cgggtgaaagagaatagca

SEQ ID NO: 140637 - DNA, 19 bp, Homo sapiens
  siRNA target sequence for CELSR3 (NM_001407.1,3573-3591).
cccaatgcccatataatgt

SEQ ID NO: 140638 - DNA, 19 bp, Homo sapiens
  siRNA target sequence for CELSR3 (NM_001407.1,3658-3676).
cactcattgacctagacta

SEQ ID NO: 140639 - DNA, 19 bp, Homo sapiens
  siRNA target sequence for CELSR3 (NM_001407.1,3681-3699).
gctcgccaagaatatgtga

SEQ ID NO: 140640 - DNA, 19 bp, Homo sapiens
  siRNA target sequence for CELSR3 (NM_001407.1,3682-3700).
ctcgccaagaatatgtgat

SEQ ID NO: 140641 - DNA, 19 bp, Homo sapiens
  siRNA target sequence for CELSR3 (NM_001407.1,3838-3856).
ccttcccgtcgggcattat

SEQ ID NO: 140642 - DNA, 19 bp, Homo sapiens
  siRNA target sequence for CELSR3 (NM_001407.1,3839-3857).
cttcccgtcgggcattatt

SEQ ID NO: 140643 - DNA, 19 bp, Homo sapiens
  siRNA target sequence for CELSR3 (NM_001407.1,3965-3983).
gcgactcagccgaaagcta

SEQ ID NO: 140644 - DNA, 19 bp, Homo sapiens
  siRNA target sequence for CELSR3 (NM_001407.1,3971-3989).
cagccgaaagctagacaat

SEQ ID NO: 140645 - DNA, 19 bp, Homo sapiens
  siRNA target sequence for CELSR3 (NM_001407.1,3973-3991).
gccgaaagctagacaataa

SEQ ID NO: 140646 - DNA, 19 bp, Homo sapiens
  siRNA target sequence for CELSR3 (NM_001407.1,4062-4080).
ctgcgcgtggtcatcatca

SEQ ID NO: 140647 - DNA, 19 bp, Homo sapiens
  siRNA target sequence for CELSR3 (NM_001407.1,4198-4216).
ccgctgaggacgtcttcat

SEQ ID NO: 140648 - DNA, 19 bp, Homo sapiens
  siRNA target sequence for CELSR3 (NM_001407.1,4246-4264).
ggggcaccgtgctcaatgt

SEQ ID NO: 140649 - DNA, 19 bp, Homo sapiens
  siRNA target sequence for CELSR3 (NM_001407.1,4556-4574).
cggattcacgggagacttt

SEQ ID NO: 140650 - DNA, 19 bp, Homo sapiens
  siRNA target sequence for CELSR3 (NM_001407.1,4557-4575).
ggattcacgggagactttt

SEQ ID NO: 140651 - DNA, 19 bp, Homo sapiens
  siRNA target sequence for CELSR3 (NM_001407.1,4846-4864).
ccagttcgttcgtcatgtt

SEQ ID NO: 140652 - DNA, 19 bp, Homo sapiens
  siRNA target sequence for CELSR3 (NM_001407.1,4847-4865).
cagttcgttcgtcatgttt

SEQ ID NO: 140653 - DNA, 19 bp, Homo sapiens
  siRNA target sequence for CELSR3 (NM_001407.1,4927-4945).
gcgggctgctcttctacaa

SEQ ID NO: 140654 - DNA, 19 bp, Homo sapiens
  siRNA target sequence for CELSR3 (NM_001407.1,4996-5014).
gccaagtgcggctcacata

SEQ ID NO: 140655 - DNA, 19 bp, Homo sapiens
  siRNA target sequence for CELSR3 (NM_001407.1,4997-5015).
ccaagtgcggctcacatat

SEQ ID NO: 140656 - DNA, 19 bp, Homo sapiens
  siRNA target sequence for CELSR3 (NM_001407.1,5001-5019).
gtgcggctcacatattcca

SEQ ID NO: 140657 - DNA, 19 bp, Homo sapiens
  siRNA target sequence for CELSR3 (NM_001407.1,5086-5104).
cagtgcatctgagatacta

SEQ ID NO: 140658 - DNA, 19 bp, Homo sapiens
  siRNA target sequence for CELSR3 (NM_001407.1,5168-5186).
gctaagcgtggatgattgt

SEQ ID NO: 140659 - DNA, 19 bp, Homo sapiens
  siRNA target sequence for CELSR3 (NM_001407.1,5217-5235).
gagattggcaactactcat

SEQ ID NO: 140660 - DNA, 19 bp, Homo sapiens
  siRNA target sequence for CELSR3 (NM_001407.1,5400-5418).
gcggcttttgtcgcaaata

SEQ ID NO: 140661 - DNA, 19 bp, Homo sapiens
  siRNA target sequence for CELSR3 (NM_001407.1,5401-5419).
cggcttttgtcgcaaataa

SEQ ID NO: 140662 - DNA, 19 bp, Homo sapiens
  siRNA target sequence for CELSR3 (NM_001407.1,5402-5420).
ggcttttgtcgcaaataat

SEQ ID NO: 140663 - DNA, 19 bp, Homo sapiens
  siRNA target sequence for CELSR3 (NM_001407.1,5443-5461).
ccaagctacacttttgtga

SEQ ID NO: 140664 - DNA, 19 bp, Homo sapiens
  siRNA target sequence for CELSR3 (NM_001407.1,5730-5748).
ctagatcgggggttactgt

SEQ ID NO: 140665 - DNA, 19 bp, Homo sapiens
  siRNA target sequence for CELSR3 (NM_001407.1,6080-6098).
ccccagccaccgagtgaat

SEQ ID NO: 140666 - DNA, 19 bp, Homo sapiens
  siRNA target sequence for CELSR3 (NM_001407.1,6168-6186).
gacctctggcagacctttt

SEQ ID NO: 140667 - DNA, 19 bp, Homo sapiens
  siRNA target sequence for CELSR3 (NM_001407.1,6426-6444).
gatcccaactgcaacaaga

SEQ ID NO: 140668 - DNA, 19 bp, Homo sapiens
  siRNA target sequence for CELSR3 (NM_001407.1,6644-6662).
ctgccgggtgctctatgat

SEQ ID NO: 140669 - DNA, 19 bp, Homo sapiens
  siRNA target sequence for CELSR3 (NM_001407.1,6695-6713).
gtggccccagacaaagttt

SEQ ID NO: 140670 - DNA, 19 bp, Homo sapiens
  siRNA target sequence for CELSR3 (NM_001407.1,6798-6816).
cccgacctcttcaactgta

SEQ ID NO: 140671 - DNA, 19 bp, Homo sapiens
  siRNA target sequence for CELSR3 (NM_001407.1,6931-6949).
gccacactgaccactattt

SEQ ID NO: 140672 - DNA, 19 bp, Homo sapiens
  siRNA target sequence for CELSR3 (NM_001407.1,7188-7206).
gccacactcgcaaggaata

SEQ ID NO: 140673 - DNA, 19 bp, Homo sapiens
  siRNA target sequence for CELSR3 (NM_001407.1,7189-7207).
ccacactcgcaaggaatat

SEQ ID NO: 140674 - DNA, 19 bp, Homo sapiens
  siRNA target sequence for CELSR3 (NM_001407.1,7192-7210).
cactcgcaaggaatatgga

SEQ ID NO: 140675 - DNA, 19 bp, Homo sapiens
  siRNA target sequence for CELSR3 (NM_001407.1,7201-7219).
ggaatatggaactcacata

SEQ ID NO: 140676 - DNA, 19 bp, Homo sapiens
  siRNA target sequence for CELSR3 (NM_001407.1,7234-7252).
ggctggtgacgcctaatat

SEQ ID NO: 140677 - DNA, 19 bp, Homo sapiens
  siRNA target sequence for CELSR3 (NM_001407.1,7236-7254).
ctggtgacgcctaatatca

SEQ ID NO: 140678 - DNA, 19 bp, Homo sapiens
  siRNA target sequence for CELSR3 (NM_001407.1,7420-7438).
caagcagcagcatagaaaa

SEQ ID NO: 140679 - DNA, 19 bp, Homo sapiens
  siRNA target sequence for CELSR3 (NM_001407.1,7492-7510).
ggatctccattatcattct

SEQ ID NO: 140680 - DNA, 19 bp, Homo sapiens
  siRNA target sequence for CELSR3 (NM_001407.1,7582-7600).
ctcagaaccccgtcatgaa

SEQ ID NO: 140681 - DNA, 19 bp, Homo sapiens
  siRNA target sequence for CELSR3 (NM_001407.1,8691-8709).
cctggggcctacaacaaca

SEQ ID NO: 140682 - DNA, 19 bp, Homo sapiens
  siRNA target sequence for CELSR3 (NM_001407.1,8702-8720).
caacaacacggctctcttt

SEQ ID NO: 140683 - DNA, 19 bp, Homo sapiens
  siRNA target sequence for CELSR3 (NM_001407.1,9312-9330).
ctgaagaaccggttgcaat

SEQ ID NO: 140684 - DNA, 19 bp, Homo sapiens
  siRNA target sequence for CELSR3 (NM_001407.1,9416-9434).
ctcttacggtcgcatctat

SEQ ID NO: 140685 - DNA, 19 bp, Homo sapiens
  siRNA target sequence for CELSR3 (NM_001407.1,9468-9486).
gccagccgctactcttcta

SEQ ID NO: 140686 - DNA, 19 bp, Homo sapiens
  siRNA target sequence for CELSR3 (NM_001407.1,9473-9491).
ccgctactcttctagagaa

SEQ ID NO: 140687 - DNA, 19 bp, Homo sapiens
  siRNA target sequence for CELSR3 (NM_001407.1,10000-10018).
cagaacagttggacattct

SEQ ID NO: 140688 - DNA, 19 bp, Homo sapiens
  siRNA target sequence for CETN1 (NM_004066.1,73-91).
gcctccaccggccaaaaga

SEQ ID NO: 140689 - DNA, 19 bp, Homo sapiens
  siRNA target sequence for CETN1 (NM_004066.1,277-295).
gaaggcacggggaagatca

SEQ ID NO: 140690 - DNA, 19 bp, Homo sapiens
  siRNA target sequence for CETN1 (NM_004066.1,314-332).
ccgtgatgacgcagaagat

SEQ ID NO: 140691 - DNA, 19 bp, Homo sapiens
  siRNA target sequence for CETN2 (NM_004344.1,85-103).
gttctcagcgaaaaagaat

SEQ ID NO: 140692 - DNA, 19 bp, Homo sapiens
  siRNA target sequence for CETN2 (NM_004344.1,147-165).
cgggaagcttttgatcttt

SEQ ID NO: 140693 - DNA, 19 bp, Homo sapiens
  siRNA target sequence for CETN2 (NM_004344.1,178-196).
gaactggcaccatagatgt

SEQ ID NO: 140694 - DNA, 19 bp, Homo sapiens
  siRNA target sequence for CETN2 (NM_004344.1,181-199).
ctggcaccatagatgttaa

SEQ ID NO: 140695 - DNA, 19 bp, Homo sapiens
  siRNA target sequence for CETN2 (NM_004344.1,184-202).
gcaccatagatgttaaaga

SEQ ID NO: 140696 - DNA, 19 bp, Homo sapiens
  siRNA target sequence for CETN2 (NM_004344.1,299-317).
gaactttggtgacttttta

SEQ ID NO: 140697 - DNA, 19 bp, Homo sapiens
  siRNA target sequence for CETN2 (NM_004344.1,534-552).
ctgcgcatcatgaaaaaga

SEQ ID NO: 140698 - DNA, 19 bp, Homo sapiens
  siRNA target sequence for CETN3 (NM_004365.1,97-115).
gcttttgaactatttgata

SEQ ID NO: 140699 - DNA, 19 bp, Homo sapiens
  siRNA target sequence for CETN3 (NM_004365.1,130-148).
gcaatagattatcatgaat

SEQ ID NO: 140700 - DNA, 19 bp, Homo sapiens
  siRNA target sequence for CETN3 (NM_004365.1,162-180).
gagagccttggggtttgat

SEQ ID NO: 140701 - DNA, 19 bp, Homo sapiens
  siRNA target sequence for CETN3 (NM_004365.1,191-209).
ctgatgtactgaagattct

SEQ ID NO: 140702 - DNA, 19 bp, Homo sapiens
  siRNA target sequence for CETN3 (NM_004365.1,265-283).
gttgtgacagactggatat

SEQ ID NO: 140703 - DNA, 19 bp, Homo sapiens
  siRNA target sequence for CETN3 (NM_004365.1,304-322).
gaaatactcaaggcattta

SEQ ID NO: 140704 - DNA, 19 bp, Homo sapiens
  siRNA target sequence for CETN3 (NM_004365.1,310-328).
ctcaaggcatttaaactat

SEQ ID NO: 140705 - DNA, 19 bp, Homo sapiens
  siRNA target sequence for CETN3 (NM_004365.1,369-387).
gcgacgtgttgctagagaa

SEQ ID NO: 140706 - DNA, 19 bp, Homo sapiens
  siRNA target sequence for CETN3 (NM_004365.1,370-388).
cgacgtgttgctagagaat

SEQ ID NO: 140707 - DNA, 19 bp, Homo sapiens
  siRNA target sequence for CETN3 (NM_004365.1,418-436).
cgagctatgatagaagaat

SEQ ID NO: 140708 - DNA, 19 bp, Homo sapiens
  siRNA target sequence for CETN3 (NM_004365.1,472-490).
gagttcattgctattatga

SEQ ID NO: 140709 - DNA, 19 bp, Homo sapiens
  siRNA target sequence for CGREF1 (NM_006569.2,283-301).
cgatgacagtgttaatcct

SEQ ID NO: 140710 - DNA, 19 bp, Homo sapiens
  siRNA target sequence for CGREF1 (NM_006569.2,772-790).
ggcagtccctattagctaa

SEQ ID NO: 140711 - DNA, 19 bp, Homo sapiens
  siRNA target sequence for CGREF1 (NM_006569.2,773-791).
gcagtccctattagctaaa

SEQ ID NO: 140712 - DNA, 19 bp, Homo sapiens
  siRNA target sequence for CGREF1 (NM_006569.2,787-805).
ctaaaagcccattaagaca

SEQ ID NO: 140713 - DNA, 19 bp, Homo sapiens
  siRNA target sequence for CGREF1 (NM_006569.2,1112-1130).
gtctaagaacacccaaaat

SEQ ID NO: 140714 - DNA, 19 bp, Homo sapiens
  siRNA target sequence for CHGA (NM_001275.2,298-316).
gataccgaggtgatgaaat

SEQ ID NO: 140715 - DNA, 19 bp, Homo sapiens
  siRNA target sequence for CHGA (NM_001275.2,302-320).
ccgaggtgatgaaatgcat

SEQ ID NO: 140716 - DNA, 19 bp, Homo sapiens
  siRNA target sequence for CHGA (NM_001275.2,328-346).
gtcatctccgacacacttt

SEQ ID NO: 140717 - DNA, 19 bp, Homo sapiens
  siRNA target sequence for CHGA (NM_001275.2,397-415).
ggagatgaacggatccttt

SEQ ID NO: 140718 - DNA, 19 bp, Homo sapiens
  siRNA target sequence for CHGA (NM_001275.2,498-516).
gaaacacagcggttttgaa

SEQ ID NO: 140719 - DNA, 19 bp, Homo sapiens
  siRNA target sequence for CHGA (NM_001275.2,583-601).
ccatcatccaaggatgtta

SEQ ID NO: 140720 - DNA, 19 bp, Homo sapiens
  siRNA target sequence for CHGA (NM_001275.2,584-602).
catcatccaaggatgttat

SEQ ID NO: 140721 - DNA, 19 bp, Homo sapiens
  siRNA target sequence for CHP (NM_007236.3,208-226).
ggcttttcccacagtcaaa

SEQ ID NO: 140722 - DNA, 19 bp, Homo sapiens
  siRNA target sequence for CHP (NM_007236.3,386-404).
gtggattcatgcgaacttt

SEQ ID NO: 140723 - DNA, 19 bp, Homo sapiens
  siRNA target sequence for CHP (NM_007236.3,417-435).
ccccattgaggataatgaa

SEQ ID NO: 140724 - DNA, 19 bp, Homo sapiens
  siRNA target sequence for CHP (NM_007236.3,536-554).
cccgtgatgagctgttaca

SEQ ID NO: 140725 - DNA, 19 bp, Homo sapiens
  siRNA target sequence for CHP (NM_007236.3,570-588).
ggtcggagtaaatatctca

SEQ ID NO: 140726 - DNA, 19 bp, Homo sapiens
  siRNA target sequence for CLSTN1 (NM_014944.1,966-984).
cactgatcgcgctggataa

SEQ ID NO: 140727 - DNA, 19 bp, Homo sapiens
  siRNA target sequence for CLSTN1 (NM_014944.1,970-988).
gatcgcgctggataaagat

SEQ ID NO: 140728 - DNA, 19 bp, Homo sapiens
  siRNA target sequence for CLSTN1 (NM_014944.1,1066-1084).
gcagaatgtcccctttgat

SEQ ID NO: 140729 - DNA, 19 bp, Homo sapiens
  siRNA target sequence for CLSTN1 (NM_014944.1,1085-1103).
gcagtggtagtggataaat

SEQ ID NO: 140730 - DNA, 19 bp, Homo sapiens
  siRNA target sequence for CLSTN1 (NM_014944.1,1118-1136).
gtcattcgctccaaagaga

SEQ ID NO: 140731 - DNA, 19 bp, Homo sapiens
  siRNA target sequence for CLSTN1 (NM_014944.1,1120-1138).
cattcgctccaaagagaaa

SEQ ID NO: 140732 - DNA, 19 bp, Homo sapiens
  siRNA target sequence for CLSTN1 (NM_014944.1,1150-1168).
gctgcagaaagactattca

SEQ ID NO: 140733 - DNA, 19 bp, Homo sapiens
  siRNA target sequence for CLSTN1 (NM_014944.1,1154-1172).
cagaaagactattcattca

SEQ ID NO: 140734 - DNA, 19 bp, Homo sapiens
  siRNA target sequence for CLSTN1 (NM_014944.1,1205-1223).
gatggcaccaacgtgaaaa

SEQ ID NO: 140735 - DNA, 19 bp, Homo sapiens
  siRNA target sequence for CLSTN1 (NM_014944.1,1225-1243).
gtctcataaagcaactgtt

SEQ ID NO: 140736 - DNA, 19 bp, Homo sapiens
  siRNA target sequence for CLSTN1 (NM_014944.1,1229-1247).
cataaagcaactgttcata

SEQ ID NO: 140737 - DNA, 19 bp, Homo sapiens
  siRNA target sequence for CLSTN1 (NM_014944.1,1373-1391).
cctcagttcagccagattt

SEQ ID NO: 140738 - DNA, 19 bp, Homo sapiens
  siRNA target sequence for CLSTN1 (NM_014944.1,1385-1403).
cagatttgcagctacgaaa

SEQ ID NO: 140739 - DNA, 19 bp, Homo sapiens
  siRNA target sequence for CLSTN1 (NM_014944.1,1413-1431).
cagacgtgccctttactgt

SEQ ID NO: 140740 - DNA, 19 bp, Homo sapiens
  siRNA target sequence for CLSTN1 (NM_014944.1,1422-1440).
cctttactgttgacaaaga

SEQ ID NO: 140741 - DNA, 19 bp, Homo sapiens
  siRNA target sequence for CLSTN1 (NM_014944.1,1430-1448).
gttgacaaagatggttata

SEQ ID NO: 140742 - DNA, 19 bp, Homo sapiens
  siRNA target sequence for CLSTN1 (NM_014944.1,1597-1615).
gaacaacaggattgagtat

SEQ ID NO: 140743 - DNA, 19 bp, Homo sapiens
  siRNA target sequence for CLSTN1 (NM_014944.1,1633-1651).
gttggccgtctttccaaat

SEQ ID NO: 140744 - DNA, 19 bp, Homo sapiens
  siRNA target sequence for CLSTN1 (NM_014944.1,1869-1887).
gcgaccaggtgtttgagtt

SEQ ID NO: 140745 - DNA, 19 bp, Homo sapiens
  siRNA target sequence for CLSTN1 (NM_014944.1,2006-2024).
ctttgcagttctgataaaa

SEQ ID NO: 140746 - DNA, 19 bp, Homo sapiens
  siRNA target sequence for CLSTN1 (NM_014944.1,2013-2031).
gttctgataaaacagatat

SEQ ID NO: 140747 - DNA, 19 bp, Homo sapiens
  siRNA target sequence for CLSTN1 (NM_014944.1,2170-2188).
ccactacgtcctcaatgta

SEQ ID NO: 140748 - DNA, 19 bp, Homo sapiens
  siRNA target sequence for CLSTN1 (NM_014944.1,2173-2191).
ctacgtcctcaatgtagaa

SEQ ID NO: 140749 - DNA, 19 bp, Homo sapiens
  siRNA target sequence for CLSTN1 (NM_014944.1,2194-2212).
cccgagtgtgactctctat

SEQ ID NO: 140750 - DNA, 19 bp, Homo sapiens
  siRNA target sequence for CLSTN1 (NM_014944.1,2196-2214).
cgagtgtgactctctatgt

SEQ ID NO: 140751 - DNA, 19 bp, Homo sapiens
  siRNA target sequence for CLSTN1 (NM_014944.1,2260-2278).
gctccatccatccaagata

SEQ ID NO: 140752 - DNA, 19 bp, Homo sapiens
  siRNA target sequence for CLSTN1 (NM_014944.1,2264-2282).
catccatccaagatagaaa

SEQ ID NO: 140753 - DNA, 19 bp, Homo sapiens
  siRNA target sequence for CLSTN1 (NM_014944.1,2298-2316).
gggcttgctggcaagagtt

SEQ ID NO: 140754 - DNA, 19 bp, Homo sapiens
  siRNA target sequence for CLSTN1 (NM_014944.1,2299-2317).
ggcttgctggcaagagttt

SEQ ID NO: 140755 - DNA, 19 bp, Homo sapiens
  siRNA target sequence for CLSTN1 (NM_014944.1,2404-2422).
caatctggctggcttaact

SEQ ID NO: 140756 - DNA, 19 bp, Homo sapiens
  siRNA target sequence for CLSTN1 (NM_014944.1,2432-2450).
gggaaactcgcggataaga

SEQ ID NO: 140757 - DNA, 19 bp, Homo sapiens
  siRNA target sequence for CLSTN1 (NM_014944.1,2433-2451).
ggaaactcgcggataagaa

SEQ ID NO: 140758 - DNA, 19 bp, Homo sapiens
  siRNA target sequence for CLSTN1 (NM_014944.1,2452-2470).
ggtgatcgactgtctgtat

SEQ ID NO: 140759 - DNA, 19 bp, Homo sapiens
  siRNA target sequence for CLSTN1 (NM_014944.1,2453-2471).
gtgatcgactgtctgtata

SEQ ID NO: 140760 - DNA, 19 bp, Homo sapiens
  siRNA target sequence for CLSTN1 (NM_014944.1,2665-2683).
cagcacaatcaagtgtttt

SEQ ID NO: 140761 - DNA, 19 bp, Homo sapiens
  siRNA target sequence for CLSTN1 (NM_014944.1,2670-2688).
caatcaagtgttttaacga

SEQ ID NO: 140762 - DNA, 19 bp, Homo sapiens
  siRNA target sequence for CLSTN1 (NM_014944.1,2717-2735).
gatggctacgtgatggttt

SEQ ID NO: 140763 - DNA, 19 bp, Homo sapiens
  siRNA target sequence for CLSTN1 (NM_014944.1,2721-2739).
gctacgtgatggttttaca

SEQ ID NO: 140764 - DNA, 19 bp, Homo sapiens
  siRNA target sequence for CLSTN1 (NM_014944.1,2764-2782).
gagtggcgtccaccatttt

SEQ ID NO: 140765 - DNA, 19 bp, Homo sapiens
  siRNA target sequence for CLSTN1 (NM_014944.1,2784-2802).
cccgagcagcttctgaatt

SEQ ID NO: 140766 - DNA, 19 bp, Homo sapiens
  siRNA target sequence for CLSTN1 (NM_014944.1,2785-2803).
ccgagcagcttctgaattt

SEQ ID NO: 140767 - DNA, 19 bp, Homo sapiens
  siRNA target sequence for CLSTN1 (NM_014944.1,3145-3163).
cttgcttgaccggaagttt

SEQ ID NO: 140768 - DNA, 19 bp, Homo sapiens
  siRNA target sequence for CLSTN1 (NM_014944.1,3191-3209).
cgctacatcagcaacgaat

SEQ ID NO: 140769 - DNA, 19 bp, Homo sapiens
  siRNA target sequence for CLSTN1 (NM_014944.1,3193-3211).
ctacatcagcaacgaattt

SEQ ID NO: 140770 - DNA, 19 bp, Homo sapiens
  siRNA target sequence for CLSTN1 (NM_014944.1,3295-3313).
ggaacaccgctcctttgtt

SEQ ID NO: 140771 - DNA, 19 bp, Homo sapiens
  siRNA target sequence for CLSTN1 (NM_014944.1,3366-3384).
gcactgcgacagttgtgat

SEQ ID NO: 140772 - DNA, 19 bp, Homo sapiens
  siRNA target sequence for CLSTN1 (NM_014944.1,3415-3433).
gattatcctgggggtattt

SEQ ID NO: 140773 - DNA, 19 bp, Homo sapiens
  siRNA target sequence for CLSTN2 (NM_022131.1,102-120).
gcctcctcgcggctaaagt

SEQ ID NO: 140774 - DNA, 19 bp, Homo sapiens
  siRNA target sequence for CLSTN2 (NM_022131.1,104-122).
ctcctcgcggctaaagtca

SEQ ID NO: 140775 - DNA, 19 bp, Homo sapiens
  siRNA target sequence for CLSTN2 (NM_022131.1,106-124).
cctcgcggctaaagtcaat

SEQ ID NO: 140776 - DNA, 19 bp, Homo sapiens
  siRNA target sequence for CLSTN2 (NM_022131.1,107-125).
ctcgcggctaaagtcaata

SEQ ID NO: 140777 - DNA, 19 bp, Homo sapiens
  siRNA target sequence for CLSTN2 (NM_022131.1,138-156).
ggatcgagacttcatatca

SEQ ID NO: 140778 - DNA, 19 bp, Homo sapiens
  siRNA target sequence for CLSTN2 (NM_022131.1,201-219).
cactggtagccctggataa

SEQ ID NO: 140779 - DNA, 19 bp, Homo sapiens
  siRNA target sequence for CLSTN2 (NM_022131.1,290-308).
gctgtggtgctcaacaaga

SEQ ID NO: 140780 - DNA, 19 bp, Homo sapiens
  siRNA target sequence for CLSTN2 (NM_022131.1,293-311).
gtggtgctcaacaagacat

SEQ ID NO: 140781 - DNA, 19 bp, Homo sapiens
  siRNA target sequence for CLSTN2 (NM_022131.1,410-428).
cacgagacagcctggaaaa

SEQ ID NO: 140782 - DNA, 19 bp, Homo sapiens
  siRNA target sequence for CLSTN2 (NM_022131.1,627-645).
cttttgccatcgacagaaa

SEQ ID NO: 140783 - DNA, 19 bp, Homo sapiens
  siRNA target sequence for CLSTN2 (NM_022131.1,670-688).
gctgagctatgacaaacaa

SEQ ID NO: 140784 - DNA, 19 bp, Homo sapiens
  siRNA target sequence for CLSTN2 (NM_022131.1,904-922).
cacagagctgcagactaat

SEQ ID NO: 140785 - DNA, 19 bp, Homo sapiens
  siRNA target sequence for CLSTN2 (NM_022131.1,946-964).
ggagacctactctgagaaa

SEQ ID NO: 140786 - DNA, 19 bp, Homo sapiens
  siRNA target sequence for CLSTN2 (NM_022131.1,947-965).
gagacctactctgagaaat

SEQ ID NO: 140787 - DNA, 19 bp, Homo sapiens
  siRNA target sequence for CLSTN2 (NM_022131.1,1062-1080).
gcagtgagatgatcttcaa

SEQ ID NO: 140788 - DNA, 19 bp, Homo sapiens
  siRNA target sequence for CLSTN2 (NM_022131.1,1342-1360).
gaagctggatcagatttgt

SEQ ID NO: 140789 - DNA, 19 bp, Homo sapiens
  siRNA target sequence for CLSTN2 (NM_022131.1,1363-1381).
caaagagtggcactactat

SEQ ID NO: 140790 - DNA, 19 bp, Homo sapiens
  siRNA target sequence for CLSTN2 (NM_022131.1,1367-1385).
gagtggcactactatgtca

SEQ ID NO: 140791 - DNA, 19 bp, Homo sapiens
  siRNA target sequence for CLSTN2 (NM_022131.1,1371-1389).
ggcactactatgtcatcaa

SEQ ID NO: 140792 - DNA, 19 bp, Homo sapiens
  siRNA target sequence for CLSTN2 (NM_022131.1,1372-1390).
gcactactatgtcatcaat

SEQ ID NO: 140793 - DNA, 19 bp, Homo sapiens
  siRNA target sequence for CLSTN2 (NM_022131.1,1417-1435).
catggatggagcaacatat

SEQ ID NO: 140794 - DNA, 19 bp, Homo sapiens
  siRNA target sequence for CLSTN2 (NM_022131.1,1425-1443).
gagcaacatatgaaccata

SEQ ID NO: 140795 - DNA, 19 bp, Homo sapiens
  siRNA target sequence for CLSTN2 (NM_022131.1,1453-1471).
caacgactggcccattcat

SEQ ID NO: 140796 - DNA, 19 bp, Homo sapiens
  siRNA target sequence for CLSTN2 (NM_022131.1,1582-1600).
ccgccctggcaaaatggaa

SEQ ID NO: 140797 - DNA, 19 bp, Homo sapiens
  siRNA target sequence for CLSTN2 (NM_022131.1,1641-1659).
ggctggacattaattcctt

SEQ ID NO: 140798 - DNA, 19 bp, Homo sapiens
  siRNA target sequence for CLSTN2 (NM_022131.1,1671-1689).
gccaaggaataaagtatca

SEQ ID NO: 140799 - DNA, 19 bp, Homo sapiens
  siRNA target sequence for CLSTN2 (NM_022131.1,1844-1862).
gaagacgtatgcatcagta

SEQ ID NO: 140800 - DNA, 19 bp, Homo sapiens
  siRNA target sequence for CLSTN2 (NM_022131.1,1868-1886).
gaggtagatgcctatgtga

SEQ ID NO: 140801 - DNA, 19 bp, Homo sapiens
  siRNA target sequence for CLSTN2 (NM_022131.1,2055-2073).
ccaaatcagaagtcttaga

SEQ ID NO: 140802 - DNA, 19 bp, Homo sapiens
  siRNA target sequence for CLSTN2 (NM_022131.1,2074-2092).
ggaaatgcttcataactta

SEQ ID NO: 140803 - DNA, 19 bp, Homo sapiens
  siRNA target sequence for CLSTN2 (NM_022131.1,2180-2198).
cacctggatgccactaatt

SEQ ID NO: 140804 - DNA, 19 bp, Homo sapiens
  siRNA target sequence for CLSTN2 (NM_022131.1,2182-2200).
cctggatgccactaattct

SEQ ID NO: 140805 - DNA, 19 bp, Homo sapiens
  siRNA target sequence for CLSTN2 (NM_022131.1,2183-2201).
ctggatgccactaattcta

SEQ ID NO: 140806 - DNA, 19 bp, Homo sapiens
  siRNA target sequence for CLSTN2 (NM_022131.1,2330-2348).
ctcaatgggcgctacacta

SEQ ID NO: 140807 - DNA, 19 bp, Homo sapiens
  siRNA target sequence for CLSTN2 (NM_022131.1,2346-2364).
ctagcaatgagttcaactt

SEQ ID NO: 140808 - DNA, 19 bp, Homo sapiens
  siRNA target sequence for CLSTN2 (NM_022131.1,2368-2386).
ggtcagcatccttcatgaa

SEQ ID NO: 140809 - DNA, 19 bp, Homo sapiens
  siRNA target sequence for CLSTN2 (NM_022131.1,2642-2660).
gattctgcgctgactatca

SEQ ID NO: 140810 - DNA, 19 bp, Homo sapiens
  siRNA target sequence for CLSTN2 (NM_022131.1,2668-2686).
ccccatggagaaacatgaa

SEQ ID NO: 140811 - DNA, 19 bp, Homo sapiens
  siRNA target sequence for CLSTN3 (NM_014718.1,697-715).
caacacggtcctactgaat

SEQ ID NO: 140812 - DNA, 19 bp, Homo sapiens
  siRNA target sequence for CLSTN3 (NM_014718.1,1209-1227).
ggctctataagtttacagt

SEQ ID NO: 140813 - DNA, 19 bp, Homo sapiens
  siRNA target sequence for CLSTN3 (NM_014718.1,1320-1338).
ggaacaaaaggatcgaata

SEQ ID NO: 140814 - DNA, 19 bp, Homo sapiens
  siRNA target sequence for CLSTN3 (NM_014718.1,1321-1339).
gaacaaaaggatcgaatat

SEQ ID NO: 140815 - DNA, 19 bp, Homo sapiens
  siRNA target sequence for CLSTN3 (NM_014718.1,1324-1342).
caaaaggatcgaatatgca

SEQ ID NO: 140816 - DNA, 19 bp, Homo sapiens
  siRNA target sequence for CLSTN3 (NM_014718.1,1589-1607).
gacagcagcctgatctact

SEQ ID NO: 140817 - DNA, 19 bp, Homo sapiens
  siRNA target sequence for CLSTN3 (NM_014718.1,1597-1615).
cctgatctactggttcaat

SEQ ID NO: 140818 - DNA, 19 bp, Homo sapiens
  siRNA target sequence for CLSTN3 (NM_014718.1,1754-1772).
gaaaccatcgtatgtaaca

SEQ ID NO: 140819 - DNA, 19 bp, Homo sapiens
  siRNA target sequence for CLSTN3 (NM_014718.1,1767-1785).
gtaacactgtccagaatga

SEQ ID NO: 140820 - DNA, 19 bp, Homo sapiens
  siRNA target sequence for CLSTN3 (NM_014718.1,2025-2043).
gggagcctgctctcatgat

SEQ ID NO: 140821 - DNA, 19 bp, Homo sapiens
  siRNA target sequence for CLSTN3 (NM_014718.1,2509-2527).
gagtggcactgctcatttt

SEQ ID NO: 140822 - DNA, 19 bp, Homo sapiens
  siRNA target sequence for CLSTN3 (NM_014718.1,2556-2574).
ccaacggcgtccctttgtt

SEQ ID NO: 140823 - DNA, 19 bp, Homo sapiens
  siRNA target sequence for CLSTN3 (NM_014718.1,2658-2676).
cacgcatgtcggatgagat

SEQ ID NO: 140824 - DNA, 19 bp, Homo sapiens
  siRNA target sequence for CLSTN3 (NM_014718.1,2827-2845).
gagcatcactgtgtatgaa

SEQ ID NO: 140825 - DNA, 19 bp, Homo sapiens
  siRNA target sequence for CLSTN3 (NM_014718.1,2829-2847).
gcatcactgtgtatgaaga

SEQ ID NO: 140826 - DNA, 19 bp, Homo sapiens
  siRNA target sequence for CLSTN3 (NM_014718.1,2851-2869).
cctgaggcaggctcgttat

SEQ ID NO: 140827 - DNA, 19 bp, Homo sapiens
  siRNA target sequence for CLSTN3 (NM_014718.1,2935-2953).
ccgttactccagcaatgaa

SEQ ID NO: 140828 - DNA, 19 bp, Homo sapiens
  siRNA target sequence for CLSTN3 (NM_014718.1,2936-2954).
cgttactccagcaatgaat

SEQ ID NO: 140829 - DNA, 19 bp, Homo sapiens
  siRNA target sequence for CLSTN3 (NM_014718.1,3088-3106).
ccacagaaactccatgata

SEQ ID NO: 140830 - DNA, 19 bp, Homo sapiens
  siRNA target sequence for CLSTN3 (NM_014718.1,3170-3188).
ggcctggtgcgcatccatt

SEQ ID NO: 140831 - DNA, 19 bp, Homo sapiens
  siRNA target sequence for CLSTN3 (NM_014718.1,3273-3291).
cagctctcaccatcattgt

SEQ ID NO: 140832 - DNA, 19 bp, Homo sapiens
  siRNA target sequence for CLSTN3 (NM_014718.1,3275-3293).
gctctcaccatcattgtga

SEQ ID NO: 140833 - DNA, 19 bp, Homo sapiens
  siRNA target sequence for CLSTN3 (NM_014718.1,3276-3294).
ctctcaccatcattgtgaa

SEQ ID NO: 140834 - DNA, 19 bp, Homo sapiens
  siRNA target sequence for CLTA (NM_001833.1,292-310).
gggtccggatgctgttgat

SEQ ID NO: 140835 - DNA, 19 bp, Homo sapiens
  siRNA target sequence for CLTA (NM_001833.1,326-344).
gaatactaccaggaaagta

SEQ ID NO: 140836 - DNA, 19 bp, Homo sapiens
  siRNA target sequence for CLTA (NM_001833.1,331-349).
ctaccaggaaagtaatggt

SEQ ID NO: 140837 - DNA, 19 bp, Homo sapiens
  siRNA target sequence for CLTA (NM_001833.1,404-422).
gaaagtatccgtaaatgga

SEQ ID NO: 140838 - DNA, 19 bp, Homo sapiens
  siRNA target sequence for CLTA (NM_001833.1,582-600).
cctttgtaaatgacattga

SEQ ID NO: 140839 - DNA, 19 bp, Homo sapiens
  siRNA target sequence for CLTA (NM_007096.1,559-577).
gggtggcagatgaagcttt

SEQ ID NO: 140840 - DNA, 19 bp, Homo sapiens
  siRNA target sequence for CLTA (NM_007096.1,593-611).
cgctgacgtgattggttat

SEQ ID NO: 140841 - DNA, 19 bp, Homo sapiens
  siRNA target sequence for CLTA (NM_007096.1,595-613).
ctgacgtgattggttatgt

SEQ ID NO: 140842 - DNA, 19 bp, Homo sapiens
  siRNA target sequence for CLTA (NM_007096.1,597-615).
gacgtgattggttatgtca

SEQ ID NO: 140843 - DNA, 19 bp, Homo sapiens
  siRNA target sequence for CLTA (NM_007096.1,606-624).
ggttatgtcacaaacataa

SEQ ID NO: 140844 - DNA, 19 bp, Homo sapiens
  siRNA target sequence for CLTB (NM_001834.2,598-616).
gcgccagagtgaacaagta

SEQ ID NO: 140845 - DNA, 19 bp, Homo sapiens
  siRNA target sequence for CLTB (NM_001834.2,650-668).
gaggctttcgtgaaggaat

SEQ ID NO: 140846 - DNA, 19 bp, Homo sapiens
  siRNA target sequence for CLTB (NM_007097.2,634-652).
caaccggatcgctgacaaa

SEQ ID NO: 140847 - DNA, 19 bp, Homo sapiens
  siRNA target sequence for CLTB (NM_007097.2,638-656).
cggatcgctgacaaagcat

SEQ ID NO: 140848 - DNA, 19 bp, Homo sapiens
  siRNA target sequence for CLTB (NM_007097.2,665-683).
cagccagatgctgatatca

SEQ ID NO: 140849 - DNA, 19 bp, Homo sapiens
  siRNA target sequence for CPNE6 (NM_006032.2,317-335).
gggtgctggcccttgagta

SEQ ID NO: 140850 - DNA, 19 bp, Homo sapiens
  siRNA target sequence for CPNE6 (NM_006032.2,474-492).
gccattattgctgaagaat

SEQ ID NO: 140851 - DNA, 19 bp, Homo sapiens
  siRNA target sequence for CPNE6 (NM_006032.2,542-560).
caggcacaaacgactatgt

SEQ ID NO: 140852 - DNA, 19 bp, Homo sapiens
  siRNA target sequence for CPNE6 (NM_006032.2,608-626).
gcaagtctgaccctttcat

SEQ ID NO: 140853 - DNA, 19 bp, Homo sapiens
  siRNA target sequence for CPNE6 (NM_006032.2,616-634).
gaccctttcatggaaatct

SEQ ID NO: 140854 - DNA, 19 bp, Homo sapiens
  siRNA target sequence for CPNE6 (NM_006032.2,642-660).
caacgaggaccaaagtgat

SEQ ID NO: 140855 - DNA, 19 bp, Homo sapiens
  siRNA target sequence for CPNE6 (NM_006032.2,1233-1251).
caactttgacccggaaaat

SEQ ID NO: 140856 - DNA, 19 bp, Homo sapiens
  siRNA target sequence for CPNE6 (NM_006032.2,1584-1602).
gcctgcagcccgagacatt

SEQ ID NO: 140857 - DNA, 19 bp, Homo sapiens
  siRNA target sequence for CRB1 (NM_012076.1,183-201).
ctcactgcttatctacata

SEQ ID NO: 140858 - DNA, 19 bp, Homo sapiens
  siRNA target sequence for CRB1 (NM_012076.1,509-527).
gccatcaggaccctattta

SEQ ID NO: 140859 - DNA, 19 bp, Homo sapiens
  siRNA target sequence for CRB1 (NM_012076.1,550-568).
ggatatgctggaagattct

SEQ ID NO: 140860 - DNA, 19 bp, Homo sapiens
  siRNA target sequence for CRB1 (NM_012076.1,618-636).
cgtgtgccaggatggaatt

SEQ ID NO: 140861 - DNA, 19 bp, Homo sapiens
  siRNA target sequence for CRB1 (NM_012076.1,685-703).
gacttggaagtggatgaat

SEQ ID NO: 140862 - DNA, 19 bp, Homo sapiens
  siRNA target sequence for CRB1 (NM_012076.1,751-769).
ggaagatatacttgtatct

SEQ ID NO: 140863 - DNA, 19 bp, Homo sapiens
  siRNA target sequence for CRB1 (NM_012076.1,764-782).
gtatctgtccccacaatta

SEQ ID NO: 140864 - DNA, 19 bp, Homo sapiens
  siRNA target sequence for CRB1 (NM_012076.1,818-836).
gttggtcccagccttgttt

SEQ ID NO: 140865 - DNA, 19 bp, Homo sapiens
  siRNA target sequence for CRB1 (NM_012076.1,821-839).
ggtcccagccttgtttaaa

SEQ ID NO: 140866 - DNA, 19 bp, Homo sapiens
  siRNA target sequence for CRB1 (NM_012076.1,999-1017).
cacgggtagtggattcaca

SEQ ID NO: 140867 - DNA, 19 bp, Homo sapiens
  siRNA target sequence for CRB1 (NM_012076.1,1045-1063).
ctttgttggtcaaaacctt

SEQ ID NO: 140868 - DNA, 19 bp, Homo sapiens
  siRNA target sequence for CRB1 (NM_012076.1,1053-1071).
gtcaaaaccttgtcacaat

SEQ ID NO: 140869 - DNA, 19 bp, Homo sapiens
  siRNA target sequence for CRB1 (NM_012076.1,1060-1078).
ccttgtcacaataatgcta

SEQ ID NO: 140870 - DNA, 19 bp, Homo sapiens
  siRNA target sequence for CRB1 (NM_012076.1,1144-1162).
gagatcgacctcaatgaat

SEQ ID NO: 140871 - DNA, 19 bp, Homo sapiens
  siRNA target sequence for CRB1 (NM_012076.1,1149-1167).
cgacctcaatgaatgcaat

SEQ ID NO: 140872 - DNA, 19 bp, Homo sapiens
  siRNA target sequence for CRB1 (NM_012076.1,1150-1168).
gacctcaatgaatgcaata

SEQ ID NO: 140873 - DNA, 19 bp, Homo sapiens
  siRNA target sequence for CRB1 (NM_012076.1,1152-1170).
cctcaatgaatgcaatagt

SEQ ID NO: 140874 - DNA, 19 bp, Homo sapiens
  siRNA target sequence for CRB1 (NM_012076.1,1153-1171).
ctcaatgaatgcaatagta

SEQ ID NO: 140875 - DNA, 19 bp, Homo sapiens
  siRNA target sequence for CRB1 (NM_012076.1,1206-1224).
gtcctcagagaaacaatat

SEQ ID NO: 140876 - DNA, 19 bp, Homo sapiens
  siRNA target sequence for CRB1 (NM_012076.1,1260-1278).
ccatgaagcctcaggttat

SEQ ID NO: 140877 - DNA, 19 bp, Homo sapiens
  siRNA target sequence for CRB1 (NM_012076.1,1264-1282).
gaagcctcaggttatgtct

SEQ ID NO: 140878 - DNA, 19 bp, Homo sapiens
  siRNA target sequence for CRB1 (NM_012076.1,1268-1286).
cctcaggttatgtctgtat

SEQ ID NO: 140879 - DNA, 19 bp, Homo sapiens
  siRNA target sequence for CRB1 (NM_012076.1,1316-1334).
gcgaagaagacgtcaatga

SEQ ID NO: 140880 - DNA, 19 bp, Homo sapiens
  siRNA target sequence for CRB1 (NM_012076.1,1324-1342).
gacgtcaatgaatgttctt

SEQ ID NO: 140881 - DNA, 19 bp, Homo sapiens
  siRNA target sequence for CRB1 (NM_012076.1,1361-1379).
gtggtacttgtgagaactt

SEQ ID NO: 140882 - DNA, 19 bp, Homo sapiens
  siRNA target sequence for CRB1 (NM_012076.1,1377-1395).
cttgcctgggaattatact

SEQ ID NO: 140883 - DNA, 19 bp, Homo sapiens
  siRNA target sequence for CRB1 (NM_012076.1,1411-1429).
gataacctttctagaactt

SEQ ID NO: 140884 - DNA, 19 bp, Homo sapiens
  siRNA target sequence for CRB1 (NM_012076.1,1479-1497).
gcaatgtctaaataatgga

SEQ ID NO: 140885 - DNA, 19 bp, Homo sapiens
  siRNA target sequence for CRB1 (NM_012076.1,1609-1627).
ggcttcctgtgggtcaaaa

SEQ ID NO: 140886 - DNA, 19 bp, Homo sapiens
  siRNA target sequence for CRB1 (NM_012076.1,1647-1665).
gggctcagtttgtaacata

SEQ ID NO: 140887 - DNA, 19 bp, Homo sapiens
  siRNA target sequence for CRB1 (NM_012076.1,1689-1707).
gccaatggctcttctactt

SEQ ID NO: 140888 - DNA, 19 bp, Homo sapiens
  siRNA target sequence for CRB1 (NM_012076.1,1690-1708).
ccaatggctcttctacttt

SEQ ID NO: 140889 - DNA, 19 bp, Homo sapiens
  siRNA target sequence for CRB1 (NM_012076.1,1747-1765).
ctaagtggctacattcact

SEQ ID NO: 140890 - DNA, 19 bp, Homo sapiens
  siRNA target sequence for CRB1 (NM_012076.1,1753-1771).
ggctacattcacttatcaa

SEQ ID NO: 140891 - DNA, 19 bp, Homo sapiens
  siRNA target sequence for CRB1 (NM_012076.1,1836-1854).
gcatttcgtggaggtaata

SEQ ID NO: 140892 - DNA, 19 bp, Homo sapiens
  siRNA target sequence for CRB1 (NM_012076.1,1837-1855).
catttcgtggaggtaatat

SEQ ID NO: 140893 - DNA, 19 bp, Homo sapiens
  siRNA target sequence for CRB1 (NM_012076.1,1888-1906).
gactcctgtaaggagaaat

SEQ ID NO: 140894 - DNA, 19 bp, Homo sapiens
  siRNA target sequence for CRB1 (NM_012076.1,1918-1936).
gctcctactccacttgaaa

SEQ ID NO: 140895 - DNA, 19 bp, Homo sapiens
  siRNA target sequence for CRB1 (NM_012076.1,1922-1940).
ctactccacttgaaagtga

SEQ ID NO: 140896 - DNA, 19 bp, Homo sapiens
  siRNA target sequence for CRB1 (NM_012076.1,2005-2023).
ggtgttgctctgcttaact

SEQ ID NO: 140897 - DNA, 19 bp, Homo sapiens
  siRNA target sequence for CRB1 (NM_012076.1,2006-2024).
gtgttgctctgcttaactt

SEQ ID NO: 140898 - DNA, 19 bp, Homo sapiens
  siRNA target sequence for CRB1 (NM_012076.1,2011-2029).
gctctgcttaacttctata

SEQ ID NO: 140899 - DNA, 19 bp, Homo sapiens
  siRNA target sequence for CRB1 (NM_012076.1,2034-2052).
gccatccacaccttcgttt

SEQ ID NO: 140900 - DNA, 19 bp, Homo sapiens
  siRNA target sequence for CRB1 (NM_012076.1,2057-2075).
gctgtctccaagacattaa

SEQ ID NO: 140901 - DNA, 19 bp, Homo sapiens
  siRNA target sequence for CRB1 (NM_012076.1,2058-2076).
ctgtctccaagacattaaa

SEQ ID NO: 140902 - DNA, 19 bp, Homo sapiens
  siRNA target sequence for CRB1 (NM_012076.1,2070-2088).
cattaaaattgattggaat

SEQ ID NO: 140903 - DNA, 19 bp, Homo sapiens
  siRNA target sequence for CRB1 (NM_012076.1,2109-2127).
ctcgtctggctcatcatta

SEQ ID NO: 140904 - DNA, 19 bp, Homo sapiens
  siRNA target sequence for CRB1 (NM_012076.1,2111-2129).
cgtctggctcatcattaaa

SEQ ID NO: 140905 - DNA, 19 bp, Homo sapiens
  siRNA target sequence for CRB1 (NM_012076.1,2117-2135).
gctcatcattaaatgtcaa

SEQ ID NO: 140906 - DNA, 19 bp, Homo sapiens
  siRNA target sequence for CRB1 (NM_012076.1,2164-2182).
gaaagccaaccttgtcaaa

SEQ ID NO: 140907 - DNA, 19 bp, Homo sapiens
  siRNA target sequence for CRB1 (NM_012076.1,2186-2204).
gaggacgctgcatcaactt

SEQ ID NO: 140908 - DNA, 19 bp, Homo sapiens
  siRNA target sequence for CRB1 (NM_012076.1,2250-2268).
caactgtctgagagagtat

SEQ ID NO: 140909 - DNA, 19 bp, Homo sapiens
  siRNA target sequence for CRB1 (NM_012076.1,2265-2283).
gtatgtggcaggcagattt

SEQ ID NO: 140910 - DNA, 19 bp, Homo sapiens
  siRNA target sequence for CRB1 (NM_012076.1,2289-2307).
ggatgactccactggttat

SEQ ID NO: 140911 - DNA, 19 bp, Homo sapiens
  siRNA target sequence for CRB1 (NM_012076.1,2381-2399).
caggcttacttctagcttt

SEQ ID NO: 140912 - DNA, 19 bp, Homo sapiens
  siRNA target sequence for CRB1 (NM_012076.1,2469-2487).
ctctcccaaattagtagta

SEQ ID NO: 140913 - DNA, 19 bp, Homo sapiens
  siRNA target sequence for CRB1 (NM_012076.1,2473-2491).
cccaaattagtagtaaaat

SEQ ID NO: 140914 - DNA, 19 bp, Homo sapiens
  siRNA target sequence for CRB1 (NM_012076.1,2535-2553).
caagccatataaaattgaa

SEQ ID NO: 140915 - DNA, 19 bp, Homo sapiens
  siRNA target sequence for CRB1 (NM_012076.1,2567-2585).
cacaaaacctaggatttat

SEQ ID NO: 140916 - DNA, 19 bp, Homo sapiens
  siRNA target sequence for CRB1 (NM_012076.1,2588-2606).
ctgcttctacgtggaaaat

SEQ ID NO: 140917 - DNA, 19 bp, Homo sapiens
  siRNA target sequence for CRB1 (NM_012076.1,2594-2612).
ctacgtggaaaatcgaaaa

SEQ ID NO: 140918 - DNA, 19 bp, Homo sapiens
  siRNA target sequence for CRB1 (NM_012076.1,2613-2631).
gggagatgtcatctacatt

SEQ ID NO: 140919 - DNA, 19 bp, Homo sapiens
  siRNA target sequence for CRB1 (NM_012076.1,2683-2701).
ggctgtatccaagatgtaa

SEQ ID NO: 140920 - DNA, 19 bp, Homo sapiens
  siRNA target sequence for CRB1 (NM_012076.1,2685-2703).
ctgtatccaagatgtaaga

SEQ ID NO: 140921 - DNA, 19 bp, Homo sapiens
  siRNA target sequence for CRB1 (NM_012076.1,2687-2705).
gtatccaagatgtaagact

SEQ ID NO: 140922 - DNA, 19 bp, Homo sapiens
  siRNA target sequence for CRB1 (NM_012076.1,2702-2720).
gactaaacaaccaaaatct

SEQ ID NO: 140923 - DNA, 19 bp, Homo sapiens
  siRNA target sequence for CRB1 (NM_012076.1,2955-2973).
gccggtgcttcaaggattt

SEQ ID NO: 140924 - DNA, 19 bp, Homo sapiens
  siRNA target sequence for CRB1 (NM_012076.1,3002-3020).
gacaaagcggtcaaatatt

SEQ ID NO: 140925 - DNA, 19 bp, Homo sapiens
  siRNA target sequence for CRB1 (NM_012076.1,3009-3027).
cggtcaaatattattcaga

SEQ ID NO: 140926 - DNA, 19 bp, Homo sapiens
  siRNA target sequence for CRB1 (NM_012076.1,3010-3028).
ggtcaaatattattcagaa

SEQ ID NO: 140927 - DNA, 19 bp, Homo sapiens
  siRNA target sequence for CRB1 (NM_012076.1,3044-3062).
ccagagaactcaccaatat

SEQ ID NO: 140928 - DNA, 19 bp, Homo sapiens
  siRNA target sequence for CRB1 (NM_012076.1,3124-3142).
gaatttcttaatattagca

SEQ ID NO: 140929 - DNA, 19 bp, Homo sapiens
  siRNA target sequence for CRB1 (NM_012076.1,3185-3203).
gcttttatatgctaagtct

SEQ ID NO: 140930 - DNA, 19 bp, Homo sapiens
  siRNA target sequence for CRB1 (NM_012076.1,3300-3318).
ggacaacgaaacacctttt

SEQ ID NO: 140931 - DNA, 19 bp, Homo sapiens
  siRNA target sequence for CRB1 (NM_012076.1,3319-3337).
gtgaccagcacaattgcta

SEQ ID NO: 140932 - DNA, 19 bp, Homo sapiens
  siRNA target sequence for CRB1 (NM_012076.1,3335-3353).
ctactggaagcctcaactt

SEQ ID NO: 140933 - DNA, 19 bp, Homo sapiens
  siRNA target sequence for CRB1 (NM_012076.1,3351-3369).
ctttttgaaggataataca

SEQ ID NO: 140934 - DNA, 19 bp, Homo sapiens
  siRNA target sequence for CRB1 (NM_012076.1,3357-3375).
gaaggataatacagatatt

SEQ ID NO: 140935 - DNA, 19 bp, Homo sapiens
  siRNA target sequence for CRB1 (NM_012076.1,3409-3427).
ggcctgcaagggtgtctaa

SEQ ID NO: 140936 - DNA, 19 bp, Homo sapiens
  siRNA target sequence for CRB1 (NM_012076.1,3411-3429).
cctgcaagggtgtctaagt

SEQ ID NO: 140937 - DNA, 19 bp, Homo sapiens
  siRNA target sequence for CRB1 (NM_012076.1,3412-3430).
ctgcaagggtgtctaagta

SEQ ID NO: 140938 - DNA, 19 bp, Homo sapiens
  siRNA target sequence for CRB1 (NM_012076.1,3443-3461).
gaggcatttatctctctta

SEQ ID NO: 140939 - DNA, 19 bp, Homo sapiens
  siRNA target sequence for CRB1 (NM_012076.1,3445-3463).
ggcatttatctctcttact

SEQ ID NO: 140940 - DNA, 19 bp, Homo sapiens
  siRNA target sequence for CRB1 (NM_012076.1,3446-3464).
gcatttatctctcttactt

SEQ ID NO: 140941 - DNA, 19 bp, Homo sapiens
  siRNA target sequence for CRB1 (NM_012076.1,3502-3520).
gagcaatttctcaaaatct

SEQ ID NO: 140942 - DNA, 19 bp, Homo sapiens
  siRNA target sequence for CRB1 (NM_012076.1,3511-3529).
ctcaaaatctctaccaatt

SEQ ID NO: 140943 - DNA, 19 bp, Homo sapiens
  siRNA target sequence for CRB1 (NM_012076.1,3658-3676).
gaactcaacatcgatgaat

SEQ ID NO: 140944 - DNA, 19 bp, Homo sapiens
  siRNA target sequence for CRB1 (NM_012076.1,3767-3785).
gtgaagtggatatagacaa

SEQ ID NO: 140945 - DNA, 19 bp, Homo sapiens
  siRNA target sequence for CRB1 (NM_012076.1,3812-3830).
gagccacctgcattagtca

SEQ ID NO: 140946 - DNA, 19 bp, Homo sapiens
  siRNA target sequence for CRB1 (NM_012076.1,3814-3832).
gccacctgcattagtcata

SEQ ID NO: 140947 - DNA, 19 bp, Homo sapiens
  siRNA target sequence for CRB1 (NM_012076.1,3829-3847).
catactaatggctattctt

SEQ ID NO: 140948 - DNA, 19 bp, Homo sapiens
  siRNA target sequence for CRB1 (NM_012076.1,3848-3866).
gcctctgttttggaaattt

SEQ ID NO: 140949 - DNA, 19 bp, Homo sapiens
  siRNA target sequence for CRB1 (NM_012076.1,3914-3932).
ggaatgagaagacaaatct

SEQ ID NO: 140950 - DNA, 19 bp, Homo sapiens
  siRNA target sequence for CRB1 (NM_012076.1,4041-4059).
ctctgatccgtgtgtcaat

SEQ ID NO: 140951 - DNA, 19 bp, Homo sapiens
  siRNA target sequence for CRB1 (NM_012076.1,4064-4082).
gtctgtgccaggacttact

SEQ ID NO: 140952 - DNA, 19 bp, Homo sapiens
  siRNA target sequence for CRB1 (NM_012076.1,4221-4239).
gaatgacgagccagttgtt

SEQ ID NO: 140953 - DNA, 19 bp, Homo sapiens
  siRNA target sequence for CRELD1 (NM_015513.2,484-502).
cagccccatccgtgtcata

SEQ ID NO: 140954 - DNA, 19 bp, Homo sapiens
  siRNA target sequence for CRELD1 (NM_015513.2,514-532).
ctggttgacagctttaaca

SEQ ID NO: 140955 - DNA, 19 bp, Homo sapiens
  siRNA target sequence for CRELD1 (NM_015513.2,754-772).
cagtggctgtgctcagatt

SEQ ID NO: 140956 - DNA, 19 bp, Homo sapiens
  siRNA target sequence for CRELD1 (NM_015513.2,944-962).
gtggccttggctactttga

SEQ ID NO: 140957 - DNA, 19 bp, Homo sapiens
  siRNA target sequence for CRELD1 (NM_015513.2,976-994).
gccagccatctggtatgtt

SEQ ID NO: 140958 - DNA, 19 bp, Homo sapiens
  siRNA target sequence for CRELD1 (NM_015513.2,1040-1058).
caaactgtttgcaatgcaa

SEQ ID NO: 140959 - DNA, 19 bp, Homo sapiens
  siRNA target sequence for CRELD1 (NM_015513.2,1080-1098).
cctcaagtgtgtagacatt

SEQ ID NO: 140960 - DNA, 19 bp, Homo sapiens
  siRNA target sequence for CRELD1 (NM_015513.2,1213-1231).
gggccaggtcgctgtaaga

SEQ ID NO: 140961 - DNA, 19 bp, Homo sapiens
  siRNA target sequence for CRELD1 (NM_015513.2,1214-1232).
ggccaggtcgctgtaagaa

SEQ ID NO: 140962 - DNA, 19 bp, Homo sapiens
  siRNA target sequence for CRELD1 (NM_015513.2,1216-1234).
ccaggtcgctgtaagaagt

SEQ ID NO: 140963 - DNA, 19 bp, Homo sapiens
  siRNA target sequence for CRELD1 (NM_015513.2,1219-1237).
ggtcgctgtaagaagtgta

SEQ ID NO: 140964 - DNA, 19 bp, Homo sapiens
  siRNA target sequence for CRTAC1 (NM_018058.1,382-400).
gctggggtcagcaaatata

SEQ ID NO: 140965 - DNA, 19 bp, Homo sapiens
  siRNA target sequence for CRTAC1 (NM_018058.1,456-474).
cttctgcgacaatgagaat

SEQ ID NO: 140966 - DNA, 19 bp, Homo sapiens
  siRNA target sequence for CRTAC1 (NM_018058.1,640-658).
cgcctctatctgcaaatga

SEQ ID NO: 140967 - DNA, 19 bp, Homo sapiens
  siRNA target sequence for CRTAC1 (NM_018058.1,737-755).
ccgccgactttgacaatga

SEQ ID NO: 140968 - DNA, 19 bp, Homo sapiens
  siRNA target sequence for CRTAC1 (NM_018058.1,935-953).
ggatgctggacctcatctt

SEQ ID NO: 140969 - DNA, 19 bp, Homo sapiens
  siRNA target sequence for CRTAC1 (NM_018058.1,997-1015).
ggcaatcagggcttcaaca

SEQ ID NO: 140970 - DNA, 19 bp, Homo sapiens
  siRNA target sequence for CRTAC1 (NM_018058.1,1149-1167).
ggagcccgtggcacacttt

SEQ ID NO: 140971 - DNA, 19 bp, Homo sapiens
  siRNA target sequence for CRTAC1 (NM_018058.1,1360-1378).
gagacaagcccgtatgtgt

SEQ ID NO: 140972 - DNA, 19 bp, Homo sapiens
  siRNA target sequence for CSN2 (NM_001891.1,86-104).
cagtgaggaatctattaca

SEQ ID NO: 140973 - DNA, 19 bp, Homo sapiens
  siRNA target sequence for CSN2 (NM_001891.1,90-108).
gaggaatctattacagaat

SEQ ID NO: 140974 - DNA, 19 bp, Homo sapiens
  siRNA target sequence for CSN2 (NM_001891.1,222-240).
gaacctatcccctatggtt

SEQ ID NO: 140975 - DNA, 19 bp, Homo sapiens
  siRNA target sequence for CSN2 (NM_001891.1,226-244).
ctatcccctatggttttct

SEQ ID NO: 140976 - DNA, 19 bp, Homo sapiens
  siRNA target sequence for CSN2 (NM_001891.1,315-333).
gtccctaaagctaaagaca

SEQ ID NO: 140977 - DNA, 19 bp, Homo sapiens
  siRNA target sequence for CSN2 (NM_001891.1,352-370).
gagtgatgcctgtccttaa

SEQ ID NO: 140978 - DNA, 19 bp, Homo sapiens
  siRNA target sequence for CSN2 (NM_001891.1,354-372).
gtgatgcctgtccttaaat

SEQ ID NO: 140979 - DNA, 19 bp, Homo sapiens
  siRNA target sequence for CSN2 (NM_001891.1,356-374).
gatgcctgtccttaaatct

SEQ ID NO: 140980 - DNA, 19 bp, Homo sapiens
  siRNA target sequence for CSN2 (NM_001891.1,608-626).
caaccaagaacttctactt

SEQ ID NO: 140981 - DNA, 19 bp, Homo sapiens
  siRNA target sequence for CSPG2 (NM_004385.2,296-314).
gatgtgttcaaccttaata

SEQ ID NO: 140982 - DNA, 19 bp, Homo sapiens
  siRNA target sequence for CSPG2 (NM_004385.2,315-333).
gtaacccatgcgctacata

SEQ ID NO: 140983 - DNA, 19 bp, Homo sapiens
  siRNA target sequence for CSPG2 (NM_004385.2,321-339).
catgcgctacataaagtca

SEQ ID NO: 140984 - DNA, 19 bp, Homo sapiens
  siRNA target sequence for CSPG2 (NM_004385.2,325-343).
cgctacataaagtcaaagt

SEQ ID NO: 140985 - DNA, 19 bp, Homo sapiens
  siRNA target sequence for CSPG2 (NM_004385.2,453-471).
cgcatcaaatggtctaaga

SEQ ID NO: 140986 - DNA, 19 bp, Homo sapiens
  siRNA target sequence for CSPG2 (NM_004385.2,454-472).
gcatcaaatggtctaagat

SEQ ID NO: 140987 - DNA, 19 bp, Homo sapiens
  siRNA target sequence for CSPG2 (NM_004385.2,455-473).
catcaaatggtctaagatt

SEQ ID NO: 140988 - DNA, 19 bp, Homo sapiens
  siRNA target sequence for CSPG2 (NM_004385.2,631-649).
caagtgatgcgggtcttta

SEQ ID NO: 140989 - DNA, 19 bp, Homo sapiens
  siRNA target sequence for CSPG2 (NM_004385.2,659-677).
cgtcatgtacgggattgaa

SEQ ID NO: 140990 - DNA, 19 bp, Homo sapiens
  siRNA target sequence for CSPG2 (NM_004385.2,785-803).
ggacgttggggcagtcata

SEQ ID NO: 140991 - DNA, 19 bp, Homo sapiens
  siRNA target sequence for CSPG2 (NM_004385.2,905-923).
cagagtaggctgttatgga

SEQ ID NO: 140992 - DNA, 19 bp, Homo sapiens
  siRNA target sequence for CSPG2 (NM_004385.2,943-961).
gagtcaggacttatggatt

SEQ ID NO: 140993 - DNA, 19 bp, Homo sapiens
  siRNA target sequence for CSPG2 (NM_004385.2,974-992).
ggaaacttacgatgtgtat

SEQ ID NO: 140994 - DNA, 19 bp, Homo sapiens
  siRNA target sequence for CSPG2 (NM_004385.2,1028-1046).
cctcactgtccccagtaaa

SEQ ID NO: 140995 - DNA, 19 bp, Homo sapiens
  siRNA target sequence for CSPG2 (NM_004385.2,1062-1080).
gctgcaaaagagtgtgaaa

SEQ ID NO: 140996 - DNA, 19 bp, Homo sapiens
  siRNA target sequence for CSPG2 (NM_004385.2,1237-1255).
ccctgtatcgttttgagaa

SEQ ID NO: 140997 - DNA, 19 bp, Homo sapiens
  siRNA target sequence for CSPG2 (NM_004385.2,1273-1291).
cccctgatagcagatttga

SEQ ID NO: 140998 - DNA, 19 bp, Homo sapiens
  siRNA target sequence for CSPG2 (NM_004385.2,1314-1332).
gaggctacaaccatcgatt

SEQ ID NO: 140999 - DNA, 19 bp, Homo sapiens
  siRNA target sequence for CSPG2 (NM_004385.2,1317-1335).
gctacaaccatcgatttga

SEQ ID NO: 141000 - DNA, 19 bp, Homo sapiens
  siRNA target sequence for CSPG2 (NM_004385.2,1321-1339).
caaccatcgatttgagtat

SEQ ID NO: 141001 - DNA, 19 bp, Homo sapiens
  siRNA target sequence for CSPG2 (NM_004385.2,1405-1423).
caatcatccctttagttga

SEQ ID NO: 141002 - DNA, 19 bp, Homo sapiens
  siRNA target sequence for CSPG2 (NM_004385.2,1409-1427).
catccctttagttgatgaa

SEQ ID NO: 141003 - DNA, 19 bp, Homo sapiens
  siRNA target sequence for CSPG2 (NM_004385.2,1412-1430).
ccctttagttgatgaatta

SEQ ID NO: 141004 - DNA, 19 bp, Homo sapiens
  siRNA target sequence for CSPG2 (NM_004385.2,1425-1443).
gaattacctgtcattccaa

SEQ ID NO: 141005 - DNA, 19 bp, Homo sapiens
  siRNA target sequence for CSPG2 (NM_004385.2,1496-1514).
ccaacctcaggctatcaca

SEQ ID NO: 141006 - DNA, 19 bp, Homo sapiens
  siRNA target sequence for CSPG2 (NM_004385.2,1500-1518).
cctcaggctatcacagata

SEQ ID NO: 141007 - DNA, 19 bp, Homo sapiens
  siRNA target sequence for CSPG2 (NM_004385.2,1503-1521).
caggctatcacagatagtt

SEQ ID NO: 141008 - DNA, 19 bp, Homo sapiens
  siRNA target sequence for CSPG2 (NM_004385.2,1505-1523).
ggctatcacagatagttta

SEQ ID NO: 141009 - DNA, 19 bp, Homo sapiens
  siRNA target sequence for CSPG2 (NM_004385.2,1515-1533).
gatagtttagccaccaaat

SEQ ID NO: 141010 - DNA, 19 bp, Homo sapiens
  siRNA target sequence for CSPG2 (NM_004385.2,1603-1621).
ctcttggaaagctagacat

SEQ ID NO: 141011 - DNA, 19 bp, Homo sapiens
  siRNA target sequence for CSPG2 (NM_004385.2,1605-1623).
cttggaaagctagacatat

SEQ ID NO: 141012 - DNA, 19 bp, Homo sapiens
  siRNA target sequence for CSPG2 (NM_004385.2,1659-1677).
ggcgtctctcattatgcta

SEQ ID NO: 141013 - DNA, 19 bp, Homo sapiens
  siRNA target sequence for CSPG2 (NM_004385.2,1668-1686).
cattatgctacggattcat

SEQ ID NO: 141014 - DNA, 19 bp, Homo sapiens
  siRNA target sequence for CSPG2 (NM_004385.2,1714-1732).
cacaagaatcggttacaca

SEQ ID NO: 141015 - DNA, 19 bp, Homo sapiens
  siRNA target sequence for CSPG2 (NM_004385.2,1723-1741).
cggttacacagattgaaca

SEQ ID NO: 141016 - DNA, 19 bp, Homo sapiens
  siRNA target sequence for CSPG2 (NM_004385.2,1724-1742).
ggttacacagattgaacaa

SEQ ID NO: 141017 - DNA, 19 bp, Homo sapiens
  siRNA target sequence for CSPG2 (NM_004385.2,1725-1743).
gttacacagattgaacaaa

SEQ ID NO: 141018 - DNA, 19 bp, Homo sapiens
  siRNA target sequence for CSPG2 (NM_004385.2,1746-1764).
gaagtgggtcctttggtaa

SEQ ID NO: 141019 - DNA, 19 bp, Homo sapiens
  siRNA target sequence for CSPG2 (NM_004385.2,1752-1770).
ggtcctttggtaacatcta

SEQ ID NO: 141020 - DNA, 19 bp, Homo sapiens
  siRNA target sequence for CSPG2 (NM_004385.2,1753-1771).
gtcctttggtaacatctat

SEQ ID NO: 141021 - DNA, 19 bp, Homo sapiens
  siRNA target sequence for CSPG2 (NM_004385.2,1785-1803).
cacattccttccaaggaat

SEQ ID NO: 141022 - DNA, 19 bp, Homo sapiens
  siRNA target sequence for CSPG2 (NM_004385.2,1800-1818).
gaattccctgtaactgaaa

SEQ ID NO: 141023 - DNA, 19 bp, Homo sapiens
  siRNA target sequence for CSPG2 (NM_004385.2,1988-2006).
ccaaattcctgaagtcatt

SEQ ID NO: 141024 - DNA, 19 bp, Homo sapiens
  siRNA target sequence for CSPG2 (NM_004385.2,2001-2019).
gtcattacggtgtcaaaga

SEQ ID NO: 141025 - DNA, 19 bp, Homo sapiens
  siRNA target sequence for CSPG2 (NM_004385.2,2003-2021).
cattacggtgtcaaagact

SEQ ID NO: 141026 - DNA, 19 bp, Homo sapiens
  siRNA target sequence for CSPG2 (NM_004385.2,2032-2050).
ccatccacactcatttaga

SEQ ID NO: 141027 - DNA, 19 bp, Homo sapiens
  siRNA target sequence for CSPG2 (NM_004385.2,2033-2051).
catccacactcatttagaa

SEQ ID NO: 141028 - DNA, 19 bp, Homo sapiens
  siRNA target sequence for CSPG2 (NM_004385.2,2142-2160).
caaactagtggtaggataa

SEQ ID NO: 141029 - DNA, 19 bp, Homo sapiens
  siRNA target sequence for CSPG2 (NM_004385.2,2155-2173).
ggataacggaagagtttct

SEQ ID NO: 141030 - DNA, 19 bp, Homo sapiens
  siRNA target sequence for CSPG2 (NM_004385.2,2156-2174).
gataacggaagagtttctt

SEQ ID NO: 141031 - DNA, 19 bp, Homo sapiens
  siRNA target sequence for CSPG2 (NM_004385.2,2177-2195).
caaatatctgtctactaca

SEQ ID NO: 141032 - DNA, 19 bp, Homo sapiens
  siRNA target sequence for CSPG2 (NM_004385.2,2242-2260).
ctggtgataaaatattagt

SEQ ID NO: 141033 - DNA, 19 bp, Homo sapiens
  siRNA target sequence for CSPG2 (NM_004385.2,2262-2280).
gagggaatttccacagtta

SEQ ID NO: 141034 - DNA, 19 bp, Homo sapiens
  siRNA target sequence for CSPG2 (NM_004385.2,2343-2361).
gagatgagaacagatactt

SEQ ID NO: 141035 - DNA, 19 bp, Homo sapiens
  siRNA target sequence for CSPG2 (NM_004385.2,2433-2451).
gggatgaaactctctacat

SEQ ID NO: 141036 - DNA, 19 bp, Homo sapiens
  siRNA target sequence for CSPG2 (NM_004385.2,2452-2470).
ctctctcagagccaattca

SEQ ID NO: 141037 - DNA, 19 bp, Homo sapiens
  siRNA target sequence for CSPG2 (NM_004385.2,2487-2505).
gtggaaatgaccaagtctt

SEQ ID NO: 141038 - DNA, 19 bp, Homo sapiens
  siRNA target sequence for CSPG2 (NM_004385.2,2544-2562).
ccaacagaagtaagagata

SEQ ID NO: 141039 - DNA, 19 bp, Homo sapiens
  siRNA target sequence for CSPG2 (NM_004385.2,2545-2563).
caacagaagtaagagatat

SEQ ID NO: 141040 - DNA, 19 bp, Homo sapiens
  siRNA target sequence for CSPG2 (NM_004385.2,2581-2599).
caactccaggtactacaaa

SEQ ID NO: 141041 - DNA, 19 bp, Homo sapiens
  siRNA target sequence for CSPG2 (NM_004385.2,2587-2605).
caggtactacaaaatatga

SEQ ID NO: 141042 - DNA, 19 bp, Homo sapiens
  siRNA target sequence for CSPG2 (NM_004385.2,2682-2700).
gatgaagataatacaacat

SEQ ID NO: 141043 - DNA, 19 bp, Homo sapiens
  siRNA target sequence for CSPG2 (NM_004385.2,2759-2777).
cacaactgtggggatgaat

SEQ ID NO: 141044 - DNA, 19 bp, Homo sapiens
  siRNA target sequence for CSPG2 (NM_004385.2,2815-2833).
gagcagatgaatttactct

SEQ ID NO: 141045 - DNA, 19 bp, Homo sapiens
  siRNA target sequence for CSPG2 (NM_004385.2,2858-2876).
gttagaggaggttactgat

SEQ ID NO: 141046 - DNA, 19 bp, Homo sapiens
  siRNA target sequence for CSPG2 (NM_004385.2,2892-2910).
catggaaaattcacaatta

SEQ ID NO: 141047 - DNA, 19 bp, Homo sapiens
  siRNA target sequence for CSPG2 (NM_004385.2,2896-2914).
gaaaattcacaattagatt

SEQ ID NO: 141048 - DNA, 19 bp, Homo sapiens
  siRNA target sequence for CSPG2 (NM_004385.2,2998-3016).
gcactgaaggccaagttta

SEQ ID NO: 141049 - DNA, 19 bp, Homo sapiens
  siRNA target sequence for CSPG2 (NM_004385.2,3037-3055).
ctttgggtgaagtagaaga

SEQ ID NO: 141050 - DNA, 19 bp, Homo sapiens
  siRNA target sequence for CSPG2 (NM_004385.2,3062-3080).
cctctctaagccagtatct

SEQ ID NO: 141051 - DNA, 19 bp, Homo sapiens
  siRNA target sequence for CSPG2 (NM_004385.2,3065-3083).
ctctaagccagtatctact

SEQ ID NO: 141052 - DNA, 19 bp, Homo sapiens
  siRNA target sequence for CSPG2 (NM_004385.2,3108-3126).
gaggtggaaggattagcat

SEQ ID NO: 141053 - DNA, 19 bp, Homo sapiens
  siRNA target sequence for CSPG2 (NM_004385.2,3110-3128).
ggtggaaggattagcattt

SEQ ID NO: 141054 - DNA, 19 bp, Homo sapiens
  siRNA target sequence for CSPG2 (NM_004385.2,3123-3141).
gcatttgttagttatagta

SEQ ID NO: 141055 - DNA, 19 bp, Homo sapiens
  siRNA target sequence for CSPG2 (NM_004385.2,3143-3161).
cacccaagagcctactact

SEQ ID NO: 141056 - DNA, 19 bp, Homo sapiens
  siRNA target sequence for CSPG2 (NM_004385.2,3145-3163).
cccaagagcctactactta

SEQ ID NO: 141057 - DNA, 19 bp, Homo sapiens
  siRNA target sequence for CSPG2 (NM_004385.2,3146-3164).
ccaagagcctactacttat

SEQ ID NO: 141058 - DNA, 19 bp, Homo sapiens
  siRNA target sequence for CSPG2 (NM_004385.2,3206-3224).
gacagactggggagtgtta

SEQ ID NO: 141059 - DNA, 19 bp, Homo sapiens
  siRNA target sequence for CSPG2 (NM_004385.2,3268-3286).
ctcaagacatacttgtcat

SEQ ID NO: 141060 - DNA, 19 bp, Homo sapiens
  siRNA target sequence for CSPG2 (NM_004385.2,3297-3315).
cgccttgaagcgactattt

SEQ ID NO: 141061 - DNA, 19 bp, Homo sapiens
  siRNA target sequence for CSPG2 (NM_004385.2,3308-3326).
gactatttctccagaaact

SEQ ID NO: 141062 - DNA, 19 bp, Homo sapiens
  siRNA target sequence for CSPG2 (NM_004385.2,3402-3420).
gttcctgctctcagttcta

SEQ ID NO: 141063 - DNA, 19 bp, Homo sapiens
  siRNA target sequence for CSPG2 (NM_004385.2,3467-3485).
gggcgatggatcagcatat

SEQ ID NO: 141064 - DNA, 19 bp, Homo sapiens
  siRNA target sequence for CSPG2 (NM_004385.2,3468-3486).
ggcgatggatcagcatata

SEQ ID NO: 141065 - DNA, 19 bp, Homo sapiens
  siRNA target sequence for CSPG2 (NM_004385.2,3525-3543).
gtcccagttttagaaacaa

SEQ ID NO: 141066 - DNA, 19 bp, Homo sapiens
  siRNA target sequence for CSPG2 (NM_004385.2,3580-3598).
caccaggtgctgtaactga

SEQ ID NO: 141067 - DNA, 19 bp, Homo sapiens
  siRNA target sequence for CSPG2 (NM_004385.2,3615-3633).
gatgaagtggtaacactaa

SEQ ID NO: 141068 - DNA, 19 bp, Homo sapiens
  siRNA target sequence for CSPG2 (NM_004385.2,3637-3655).
cacgcattgggccaaaagt

SEQ ID NO: 141069 - DNA, 19 bp, Homo sapiens
  siRNA target sequence for CSPG2 (NM_004385.2,3639-3657).
cgcattgggccaaaagtat

SEQ ID NO: 141070 - DNA, 19 bp, Homo sapiens
  siRNA target sequence for CSPG2 (NM_004385.2,3687-3705).
gaaacagaaggtagtagta

SEQ ID NO: 141071 - DNA, 19 bp, Homo sapiens
  siRNA target sequence for CSPG2 (NM_004385.2,3732-3750).
ccttttagtacccacatta

SEQ ID NO: 141072 - DNA, 19 bp, Homo sapiens
  siRNA target sequence for CSPG2 (NM_004385.2,3742-3760).
cccacattacccagcttat

SEQ ID NO: 141073 - DNA, 19 bp, Homo sapiens
  siRNA target sequence for CSPG2 (NM_004385.2,3746-3764).
cattacccagcttatggaa

SEQ ID NO: 141074 - DNA, 19 bp, Homo sapiens
  siRNA target sequence for CSPG2 (NM_004385.2,3784-3802).
catccctagaggatattga

SEQ ID NO: 141075 - DNA, 19 bp, Homo sapiens
  siRNA target sequence for CSPG2 (NM_004385.2,3787-3805).
ccctagaggatattgattt

SEQ ID NO: 141076 - DNA, 19 bp, Homo sapiens
  siRNA target sequence for CSPG2 (NM_004385.2,3788-3806).
cctagaggatattgattta

SEQ ID NO: 141077 - DNA, 19 bp, Homo sapiens
  siRNA target sequence for CSPG2 (NM_004385.2,3867-3885).
gtcacagttccaagtgata

SEQ ID NO: 141078 - DNA, 19 bp, Homo sapiens
  siRNA target sequence for CSPG2 (NM_004385.2,3909-3927).
gacagacttcacacaactt

SEQ ID NO: 141079 - DNA, 19 bp, Homo sapiens
  siRNA target sequence for CSPG2 (NM_004385.2,3939-3957).
ccatcttccgcgatcacta

SEQ ID NO: 141080 - DNA, 19 bp, Homo sapiens
  siRNA target sequence for CSPG2 (NM_004385.2,3940-3958).
catcttccgcgatcactaa

SEQ ID NO: 141081 - DNA, 19 bp, Homo sapiens
  siRNA target sequence for CSPG2 (NM_004385.2,3943-3961).
cttccgcgatcactaagaa

SEQ ID NO: 141082 - DNA, 19 bp, Homo sapiens
  siRNA target sequence for CSPG2 (NM_004385.2,4046-4064).
cactacccttgaagatatt

SEQ ID NO: 141083 - DNA, 19 bp, Homo sapiens
  siRNA target sequence for CSPG2 (NM_004385.2,4048-4066).
ctacccttgaagatattgt

SEQ ID NO: 141084 - DNA, 19 bp, Homo sapiens
  siRNA target sequence for CSPG2 (NM_004385.2,4073-4091).
ggaaacagaaaccgatatt

SEQ ID NO: 141085 - DNA, 19 bp, Homo sapiens
  siRNA target sequence for CSPG2 (NM_004385.2,4085-4103).
cgatattgatagagagtat

SEQ ID NO: 141086 - DNA, 19 bp, Homo sapiens
  siRNA target sequence for CSPG2 (NM_004385.2,4086-4104).
gatattgatagagagtatt

SEQ ID NO: 141087 - DNA, 19 bp, Homo sapiens
  siRNA target sequence for CSPG2 (NM_004385.2,4098-4116).
gagtatttcacgacttcaa

SEQ ID NO: 141088 - DNA, 19 bp, Homo sapiens
  siRNA target sequence for CSPG2 (NM_004385.2,4173-4191).
ggacctcaggcgctttcta

SEQ ID NO: 141089 - DNA, 19 bp, Homo sapiens
  siRNA target sequence for CSPG2 (NM_004385.2,4202-4220).
cccagcaagcacaaaattt

SEQ ID NO: 141090 - DNA, 19 bp, Homo sapiens
  siRNA target sequence for CSPG2 (NM_004385.2,4223-4241).
ccctgacattaatgtttat

SEQ ID NO: 141091 - DNA, 19 bp, Homo sapiens
  siRNA target sequence for CSPG2 (NM_004385.2,4267-4285).
caggtcgaatgagtgattt

SEQ ID NO: 141092 - DNA, 19 bp, Homo sapiens
  siRNA target sequence for CSPG2 (NM_004385.2,4302-4320).
ccaatagattcagaatcta

SEQ ID NO: 141093 - DNA, 19 bp, Homo sapiens
  siRNA target sequence for CSPG2 (NM_004385.2,4350-4368).
gatccagtgcatgatctaa

SEQ ID NO: 141094 - DNA, 19 bp, Homo sapiens
  siRNA target sequence for CSPG2 (NM_004385.2,4383-4401).
cctgaattccctgacataa

SEQ ID NO: 141095 - DNA, 19 bp, Homo sapiens
  siRNA target sequence for CSPG2 (NM_004385.2,4391-4409).
ccctgacataattgaaata

SEQ ID NO: 141096 - DNA, 19 bp, Homo sapiens
  siRNA target sequence for CSPG2 (NM_004385.2,4393-4411).
ctgacataattgaaataga

SEQ ID NO: 141097 - DNA, 19 bp, Homo sapiens
  siRNA target sequence for CSPG2 (NM_004385.2,4412-4430).
cctataccacagtgaagaa

SEQ ID NO: 141098 - DNA, 19 bp, Homo sapiens
  siRNA target sequence for CSPG2 (NM_004385.2,4451-4469).
gtgtgcaaatgctactgat

SEQ ID NO: 141099 - DNA, 19 bp, Homo sapiens
  siRNA target sequence for CSPG2 (NM_004385.2,4552-4570).
ctaggcgtggccagtttga

SEQ ID NO: 141100 - DNA, 19 bp, Homo sapiens
  siRNA target sequence for CSPG2 (NM_004385.2,4556-4574).
gcgtggccagtttgaaagt

SEQ ID NO: 141101 - DNA, 19 bp, Homo sapiens
  siRNA target sequence for CSPG2 (NM_004385.2,4601-4619).
cagctctgaaagtgatact

SEQ ID NO: 141102 - DNA, 19 bp, Homo sapiens
  siRNA target sequence for CSPG2 (NM_004385.2,4603-4621).
gctctgaaagtgatactca

SEQ ID NO: 141103 - DNA, 19 bp, Homo sapiens
  siRNA target sequence for CSPG2 (NM_004385.2,4612-4630).
gtgatactcatccatttgt

SEQ ID NO: 141104 - DNA, 19 bp, Homo sapiens
  siRNA target sequence for CSPG2 (NM_004385.2,4635-4653).
gccaaaacggaattgtcta

SEQ ID NO: 141105 - DNA, 19 bp, Homo sapiens
  siRNA target sequence for CSPG2 (NM_004385.2,4684-4702).
caactgagtctcttgaagt

SEQ ID NO: 141106 - DNA, 19 bp, Homo sapiens
  siRNA target sequence for CSPG2 (NM_004385.2,4689-4707).
gagtctcttgaagttacat

SEQ ID NO: 141107 - DNA, 19 bp, Homo sapiens
  siRNA target sequence for CSPG2 (NM_004385.2,4718-4736).
gacttaccctgaaacatca

SEQ ID NO: 141108 - DNA, 19 bp, Homo sapiens
  siRNA target sequence for CSPG2 (NM_004385.2,4857-4875).
catcaggcacatgaacata

SEQ ID NO: 141109 - DNA, 19 bp, Homo sapiens
  siRNA target sequence for CSPG2 (NM_004385.2,4862-4880).
ggcacatgaacatactgaa

SEQ ID NO: 141110 - DNA, 19 bp, Homo sapiens
  siRNA target sequence for CSPG2 (NM_004385.2,4957-4975).
gggctacagaagtaacatt

SEQ ID NO: 141111 - DNA, 19 bp, Homo sapiens
  siRNA target sequence for CSPG2 (NM_004385.2,4958-4976).
ggctacagaagtaacattt

SEQ ID NO: 141112 - DNA, 19 bp, Homo sapiens
  siRNA target sequence for CSPG2 (NM_004385.2,5064-5082).
gcagttaccctaataggaa

SEQ ID NO: 141113 - DNA, 19 bp, Homo sapiens
  siRNA target sequence for CSPG2 (NM_004385.2,5065-5083).
cagttaccctaataggaaa

SEQ ID NO: 141114 - DNA, 19 bp, Homo sapiens
  siRNA target sequence for CSPG2 (NM_004385.2,5091-5109).
ccagatgacctgttgtcta

SEQ ID NO: 141115 - DNA, 19 bp, Homo sapiens
  siRNA target sequence for CSPG2 (NM_004385.2,5131-5149).
caactcctagacaagttgt

SEQ ID NO: 141116 - DNA, 19 bp, Homo sapiens
  siRNA target sequence for CSPG2 (NM_004385.2,5156-5174).
ctcagggagttcttcgatt

SEQ ID NO: 141117 - DNA, 19 bp, Homo sapiens
  siRNA target sequence for CSPG2 (NM_004385.2,5160-5178).
gggagttcttcgattccaa

SEQ ID NO: 141118 - DNA, 19 bp, Homo sapiens
  siRNA target sequence for CSPG2 (NM_004385.2,5247-5265).
cagagaaatactactgata

SEQ ID NO: 141119 - DNA, 19 bp, Homo sapiens
  siRNA target sequence for CSPG2 (NM_004385.2,5280-5298).
gacactagcaggataatca

SEQ ID NO: 141120 - DNA, 19 bp, Homo sapiens
  siRNA target sequence for CSPG2 (NM_004385.2,5282-5300).
cactagcaggataatcaca

SEQ ID NO: 141121 - DNA, 19 bp, Homo sapiens
  siRNA target sequence for CSPG2 (NM_004385.2,5291-5309).
gataatcacagaaagcttt

SEQ ID NO: 141122 - DNA, 19 bp, Homo sapiens
  siRNA target sequence for CSPG2 (NM_004385.2,5366-5384).
ggtgcctaccaagtttgta

SEQ ID NO: 141123 - DNA, 19 bp, Homo sapiens
  siRNA target sequence for CSPG2 (NM_004385.2,5367-5385).
gtgcctaccaagtttgtaa

SEQ ID NO: 141124 - DNA, 19 bp, Homo sapiens
  siRNA target sequence for CSPG2 (NM_004385.2,5369-5387).
gcctaccaagtttgtaagt

SEQ ID NO: 141125 - DNA, 19 bp, Homo sapiens
  siRNA target sequence for CSPG2 (NM_004385.2,5375-5393).
caagtttgtaagtgaaaca

SEQ ID NO: 141126 - DNA, 19 bp, Homo sapiens
  siRNA target sequence for CSPG2 (NM_004385.2,5464-5482).
gtacggcttctacatttga

SEQ ID NO: 141127 - DNA, 19 bp, Homo sapiens
  siRNA target sequence for CSPG2 (NM_004385.2,5470-5488).
cttctacatttgaggtata

SEQ ID NO: 141128 - DNA, 19 bp, Homo sapiens
  siRNA target sequence for CSPG2 (NM_004385.2,5497-5515).
cacagagatcggatcaatt

SEQ ID NO: 141129 - DNA, 19 bp, Homo sapiens
  siRNA target sequence for CSPG2 (NM_004385.2,5499-5517).
cagagatcggatcaattaa

SEQ ID NO: 141130 - DNA, 19 bp, Homo sapiens
  siRNA target sequence for CSPG2 (NM_004385.2,5501-5519).
gagatcggatcaattaatt

SEQ ID NO: 141131 - DNA, 19 bp, Homo sapiens
  siRNA target sequence for CSPG2 (NM_004385.2,5503-5521).
gatcggatcaattaatttt

SEQ ID NO: 141132 - DNA, 19 bp, Homo sapiens
  siRNA target sequence for CSPG2 (NM_004385.2,5541-5559).
ccaaatgtagctacatcta

SEQ ID NO: 141133 - DNA, 19 bp, Homo sapiens
  siRNA target sequence for CSPG2 (NM_004385.2,5566-5584).
caggtaccaggaaaagttt

SEQ ID NO: 141134 - DNA, 19 bp, Homo sapiens
  siRNA target sequence for CSPG2 (NM_004385.2,5568-5586).
ggtaccaggaaaagtttta

SEQ ID NO: 141135 - DNA, 19 bp, Homo sapiens
  siRNA target sequence for CSPG2 (NM_004385.2,5569-5587).
gtaccaggaaaagttttat

SEQ ID NO: 141136 - DNA, 19 bp, Homo sapiens
  siRNA target sequence for CSPG2 (NM_004385.2,5632-5650).
ctactcctgtctttacaga

SEQ ID NO: 141137 - DNA, 19 bp, Homo sapiens
  siRNA target sequence for CSPG2 (NM_004385.2,5799-5817).
gaaaccaccactgtttctt

SEQ ID NO: 141138 - DNA, 19 bp, Homo sapiens
  siRNA target sequence for CSPG2 (NM_004385.2,5831-5849).
cgtagagtatgcaattcaa

SEQ ID NO: 141139 - DNA, 19 bp, Homo sapiens
  siRNA target sequence for CSPG2 (NM_004385.2,5944-5962).
gagtagttgctgaaaatat

SEQ ID NO: 141140 - DNA, 19 bp, Homo sapiens
  siRNA target sequence for CSPG2 (NM_004385.2,5971-5989).
catccagggaaatagtgat

SEQ ID NO: 141141 - DNA, 19 bp, Homo sapiens
  siRNA target sequence for CSPG2 (NM_004385.2,5996-6014).
gcgattaggagaaccaaat

SEQ ID NO: 141142 - DNA, 19 bp, Homo sapiens
  siRNA target sequence for CSPG2 (NM_004385.2,5997-6015).
cgattaggagaaccaaatt

SEQ ID NO: 141143 - DNA, 19 bp, Homo sapiens
  siRNA target sequence for CSPG2 (NM_004385.2,6072-6090).
ggtgactttagagaatact

SEQ ID NO: 141144 - DNA, 19 bp, Homo sapiens
  siRNA target sequence for CSPG2 (NM_004385.2,6075-6093).
gactttagagaatactcaa

SEQ ID NO: 141145 - DNA, 19 bp, Homo sapiens
  siRNA target sequence for CSPG2 (NM_004385.2,6096-6114).
gtgtctcatcccatagcaa

SEQ ID NO: 141146 - DNA, 19 bp, Homo sapiens
  siRNA target sequence for CSPG2 (NM_004385.2,6170-6188).
gacttcaccatctacagta

SEQ ID NO: 141147 - DNA, 19 bp, Homo sapiens
  siRNA target sequence for CSPG2 (NM_004385.2,6198-6216).
gttcacatcagtcacatat

SEQ ID NO: 141148 - DNA, 19 bp, Homo sapiens
  siRNA target sequence for CSPG2 (NM_004385.2,6382-6400).
ccattatcgacgaaggatt

SEQ ID NO: 141149 - DNA, 19 bp, Homo sapiens
  siRNA target sequence for CSPG2 (NM_004385.2,6408-6426).
gtgggtactgtcaatgaaa

SEQ ID NO: 141150 - DNA, 19 bp, Homo sapiens
  siRNA target sequence for CSPG2 (NM_004385.2,6410-6428).
gggtactgtcaatgaaatt

SEQ ID NO: 141151 - DNA, 19 bp, Homo sapiens
  siRNA target sequence for CSPG2 (NM_004385.2,6429-6447).
gatagaagatccaccattt

SEQ ID NO: 141152 - DNA, 19 bp, Homo sapiens
  siRNA target sequence for CSPG2 (NM_004385.2,6472-6490).
cgaaagctccagtagagaa

SEQ ID NO: 141153 - DNA, 19 bp, Homo sapiens
  siRNA target sequence for CSPG2 (NM_004385.2,6503-6521).
ggtcagtggcacagtttca

SEQ ID NO: 141154 - DNA, 19 bp, Homo sapiens
  siRNA target sequence for CSPG2 (NM_004385.2,6504-6522).
gtcagtggcacagtttcaa

SEQ ID NO: 141155 - DNA, 19 bp, Homo sapiens
  siRNA target sequence for CSPG2 (NM_004385.2,6506-6524).
cagtggcacagtttcaaca

SEQ ID NO: 141156 - DNA, 19 bp, Homo sapiens
  siRNA target sequence for CSPG2 (NM_004385.2,6511-6529).
gcacagtttcaacaaactt

SEQ ID NO: 141157 - DNA, 19 bp, Homo sapiens
  siRNA target sequence for CSPG2 (NM_004385.2,6559-6577).
ggtctaggcaagaagtcaa

SEQ ID NO: 141158 - DNA, 19 bp, Homo sapiens
  siRNA target sequence for CSPG2 (NM_004385.2,6672-6690).
gaacaaacaatctttgatt

SEQ ID NO: 141159 - DNA, 19 bp, Homo sapiens
  siRNA target sequence for CSPG2 (NM_004385.2,6786-6804).
gacacttctttagttaaca

SEQ ID NO: 141160 - DNA, 19 bp, Homo sapiens
  siRNA target sequence for CSPG2 (NM_004385.2,6825-6843).
gcaaatggcttggaatctt

SEQ ID NO: 141161 - DNA, 19 bp, Homo sapiens
  siRNA target sequence for CSPG2 (NM_004385.2,6894-6912).
gcattagtaactgaatcta

SEQ ID NO: 141162 - DNA, 19 bp, Homo sapiens
  siRNA target sequence for CSPG2 (NM_004385.2,6895-6913).
cattagtaactgaatctat

SEQ ID NO: 141163 - DNA, 19 bp, Homo sapiens
  siRNA target sequence for CSPG2 (NM_004385.2,6934-6952).
cagattcaccaatcaaaaa

SEQ ID NO: 141164 - DNA, 19 bp, Homo sapiens
  siRNA target sequence for CSPG2 (NM_004385.2,7006-7024).
cagatactgagctcttatt

SEQ ID NO: 141165 - DNA, 19 bp, Homo sapiens
  siRNA target sequence for CSPG2 (NM_004385.2,7008-7026).
gatactgagctcttattct

SEQ ID NO: 141166 - DNA, 19 bp, Homo sapiens
  siRNA target sequence for CSPG2 (NM_004385.2,7041-7059).
ggagaagaagttttaccta

SEQ ID NO: 141167 - DNA, 19 bp, Homo sapiens
  siRNA target sequence for CSPG2 (NM_004385.2,7065-7083).
ccaacagagtcagtgaatt

SEQ ID NO: 141168 - DNA, 19 bp, Homo sapiens
  siRNA target sequence for CSPG2 (NM_004385.2,7092-7110).
gtggaacaaatcaataaca

SEQ ID NO: 141169 - DNA, 19 bp, Homo sapiens
  siRNA target sequence for CSPG2 (NM_004385.2,7094-7112).
ggaacaaatcaataacaca

SEQ ID NO: 141170 - DNA, 19 bp, Homo sapiens
  siRNA target sequence for CSPG2 (NM_004385.2,7098-7116).
caaatcaataacacattat

SEQ ID NO: 141171 - DNA, 19 bp, Homo sapiens
  siRNA target sequence for CSPG2 (NM_004385.2,7141-7159).
gtacctcaagtgacaaaat

SEQ ID NO: 141172 - DNA, 19 bp, Homo sapiens
  siRNA target sequence for CSPG2 (NM_004385.2,7200-7218).
ggaccactcgtatctcaaa

SEQ ID NO: 141173 - DNA, 19 bp, Homo sapiens
  siRNA target sequence for CSPG2 (NM_004385.2,7204-7222).
cactcgtatctcaaacaga

SEQ ID NO: 141174 - DNA, 19 bp, Homo sapiens
  siRNA target sequence for CSPG2 (NM_004385.2,7230-7248).
gaaggtagtgggtcagtaa

SEQ ID NO: 141175 - DNA, 19 bp, Homo sapiens
  siRNA target sequence for CSPG2 (NM_004385.2,7249-7267).
ccagcacaacattaataga

SEQ ID NO: 141176 - DNA, 19 bp, Homo sapiens
  siRNA target sequence for CSPG2 (NM_004385.2,7250-7268).
cagcacaacattaatagaa

SEQ ID NO: 141177 - DNA, 19 bp, Homo sapiens
  siRNA target sequence for CSPG2 (NM_004385.2,7365-7383).
gaagaaatccagactagta

SEQ ID NO: 141178 - DNA, 19 bp, Homo sapiens
  siRNA target sequence for CSPG2 (NM_004385.2,7399-7417).
ctgaacaagactctaacaa

SEQ ID NO: 141179 - DNA, 19 bp, Homo sapiens
  siRNA target sequence for CSPG2 (NM_004385.2,7426-7444).
caacagcagaaattaacga

SEQ ID NO: 141180 - DNA, 19 bp, Homo sapiens
  siRNA target sequence for CSPG2 (NM_004385.2,7474-7492).
ctagagcttatggttttga

SEQ ID NO: 141181 - DNA, 19 bp, Homo sapiens
  siRNA target sequence for CSPG2 (NM_004385.2,7704-7722).
gatggattcccaacagttt

SEQ ID NO: 141182 - DNA, 19 bp, Homo sapiens
  siRNA target sequence for CSPG2 (NM_004385.2,7708-7726).
gattcccaacagtttcagt

SEQ ID NO: 141183 - DNA, 19 bp, Homo sapiens
  siRNA target sequence for CSPG2 (NM_004385.2,7784-7802).
gtcaaatacagtgtcatat

SEQ ID NO: 141184 - DNA, 19 bp, Homo sapiens
  siRNA target sequence for CSPG2 (NM_004385.2,7807-7825).
ggtccacagacggtagttt

SEQ ID NO: 141185 - DNA, 19 bp, Homo sapiens
  siRNA target sequence for CSPG2 (NM_004385.2,7811-7829).
cacagacggtagtttccaa

SEQ ID NO: 141186 - DNA, 19 bp, Homo sapiens
  siRNA target sequence for CSPG2 (NM_004385.2,7847-7865).
cgaggattccaccttaaaa

SEQ ID NO: 141187 - DNA, 19 bp, Homo sapiens
  siRNA target sequence for CSPG2 (NM_004385.2,7856-7874).
caccttaaaacctaacaga

SEQ ID NO: 141188 - DNA, 19 bp, Homo sapiens
  siRNA target sequence for CSPG2 (NM_004385.2,7881-7899).
cccactgaaaatattatca

SEQ ID NO: 141189 - DNA, 19 bp, Homo sapiens
  siRNA target sequence for CSPG2 (NM_004385.2,7922-7940).
ggatttaatattgacaatt

SEQ ID NO: 141190 - DNA, 19 bp, Homo sapiens
  siRNA target sequence for CSPG2 (NM_004385.2,7923-7941).
gatttaatattgacaatta

SEQ ID NO: 141191 - DNA, 19 bp, Homo sapiens
  siRNA target sequence for CSPG2 (NM_004385.2,7973-7991).
gctgacatcggataaaaat

SEQ ID NO: 141192 - DNA, 19 bp, Homo sapiens
  siRNA target sequence for CSPG2 (NM_004385.2,7974-7992).
ctgacatcggataaaaata

SEQ ID NO: 141193 - DNA, 19 bp, Homo sapiens
  siRNA target sequence for CSPG2 (NM_004385.2,7976-7994).
gacatcggataaaaatact

SEQ ID NO: 141194 - DNA, 19 bp, Homo sapiens
  siRNA target sequence for CSPG2 (NM_004385.2,7978-7996).
catcggataaaaatactat

SEQ ID NO: 141195 - DNA, 19 bp, Homo sapiens
  siRNA target sequence for CSPG2 (NM_004385.2,7981-7999).
cggataaaaatactatcat

SEQ ID NO: 141196 - DNA, 19 bp, Homo sapiens
  siRNA target sequence for CSPG2 (NM_004385.2,7982-8000).
ggataaaaatactatcata

SEQ ID NO: 141197 - DNA, 19 bp, Homo sapiens
  siRNA target sequence for CSPG2 (NM_004385.2,8041-8059).
gaatgcaaacagatataga

SEQ ID NO: 141198 - DNA, 19 bp, Homo sapiens
  siRNA target sequence for CSPG2 (NM_004385.2,8201-8219).
ctacactcaggcaacacat

SEQ ID NO: 141199 - DNA, 19 bp, Homo sapiens
  siRNA target sequence for CSPG2 (NM_004385.2,8289-8307).
cctgctcctagcacagaaa

SEQ ID NO: 141200 - DNA, 19 bp, Homo sapiens
  siRNA target sequence for CSPG2 (NM_004385.2,8308-8326).
cagaattagacgttttact

SEQ ID NO: 141201 - DNA, 19 bp, Homo sapiens
  siRNA target sequence for CSPG2 (NM_004385.2,8356-8374).
gtaagtctgccacagttat

SEQ ID NO: 141202 - DNA, 19 bp, Homo sapiens
  siRNA target sequence for CSPG2 (NM_004385.2,8381-8399).
gattgaaggaataaaagct

SEQ ID NO: 141203 - DNA, 19 bp, Homo sapiens
  siRNA target sequence for CSPG2 (NM_004385.2,8414-8432).
ggatgacatgtttgaatca

SEQ ID NO: 141204 - DNA, 19 bp, Homo sapiens
  siRNA target sequence for CSPG2 (NM_004385.2,8441-8459).
gtctgatggtcaagctatt

SEQ ID NO: 141205 - DNA, 19 bp, Homo sapiens
  siRNA target sequence for CSPG2 (NM_004385.2,8482-8500).
caacattgggccaatttga

SEQ ID NO: 141206 - DNA, 19 bp, Homo sapiens
  siRNA target sequence for CSPG2 (NM_004385.2,8542-8560).
cttcttttcagccagaatt

SEQ ID NO: 141207 - DNA, 19 bp, Homo sapiens
  siRNA target sequence for CSPG2 (NM_004385.2,8591-8609).
ccatactccctatctaagt

SEQ ID NO: 141208 - DNA, 19 bp, Homo sapiens
  siRNA target sequence for CSPG2 (NM_004385.2,8592-8610).
catactccctatctaagta

SEQ ID NO: 141209 - DNA, 19 bp, Homo sapiens
  siRNA target sequence for CSPG2 (NM_004385.2,8598-8616).
ccctatctaagtattgcta

SEQ ID NO: 141210 - DNA, 19 bp, Homo sapiens
  siRNA target sequence for CSPG2 (NM_004385.2,8614-8632).
ctactacccaccttatgga

SEQ ID NO: 141211 - DNA, 19 bp, Homo sapiens
  siRNA target sequence for CSPG2 (NM_004385.2,8667-8685).
ggatccaatcccccatatt

SEQ ID NO: 141212 - DNA, 19 bp, Homo sapiens
  siRNA target sequence for CSPG2 (NM_004385.2,8672-8690).
caatcccccatattacact

SEQ ID NO: 141213 - DNA, 19 bp, Homo sapiens
  siRNA target sequence for CSPG2 (NM_004385.2,8676-8694).
cccccatattacactgata

SEQ ID NO: 141214 - DNA, 19 bp, Homo sapiens
  siRNA target sequence for CSPG2 (NM_004385.2,8743-8761).
catctcccctcactatcta

SEQ ID NO: 141215 - DNA, 19 bp, Homo sapiens
  siRNA target sequence for CSPG2 (NM_004385.2,8804-8822).
cagtgctctgccaggaata

SEQ ID NO: 141216 - DNA, 19 bp, Homo sapiens
  siRNA target sequence for CSPG2 (NM_004385.2,8823-8841).
gacgtcggctcatctgtaa

SEQ ID NO: 141217 - DNA, 19 bp, Homo sapiens
  siRNA target sequence for CSPG2 (NM_004385.2,8848-8866).
cacaggattcttttaagga

SEQ ID NO: 141218 - DNA, 19 bp, Homo sapiens
  siRNA target sequence for CSPG2 (NM_004385.2,8899-8917).
catcaagtgaggaatacct

SEQ ID NO: 141219 - DNA, 19 bp, Homo sapiens
  siRNA target sequence for CSPG2 (NM_004385.2,8938-8956).
ctttatctcctgacacaaa

SEQ ID NO: 141220 - DNA, 19 bp, Homo sapiens
  siRNA target sequence for CSPG2 (NM_004385.2,8944-8962).
ctcctgacacaaaattaga

SEQ ID NO: 141221 - DNA, 19 bp, Homo sapiens
  siRNA target sequence for CSPG2 (NM_004385.2,8980-8998).
gtaaacctgagttattaga

SEQ ID NO: 141222 - DNA, 19 bp, Homo sapiens
  siRNA target sequence for CSPG2 (NM_004385.2,9129-9147).
gaggctggaactgttatta

SEQ ID NO: 141223 - DNA, 19 bp, Homo sapiens
  siRNA target sequence for CSPG2 (NM_004385.2,9148-9166).
caactgccgatgaaattga

SEQ ID NO: 141224 - DNA, 19 bp, Homo sapiens
  siRNA target sequence for CSPG2 (NM_004385.2,9151-9169).
ctgccgatgaaattgaatt

SEQ ID NO: 141225 - DNA, 19 bp, Homo sapiens
  siRNA target sequence for CSPG2 (NM_004385.2,9183-9201).
cagtggccacactctactt

SEQ ID NO: 141226 - DNA, 19 bp, Homo sapiens
  siRNA target sequence for CSPG2 (NM_004385.2,9365-9383).
ggcagcgagaattcttgat

SEQ ID NO: 141227 - DNA, 19 bp, Homo sapiens
  siRNA target sequence for CSPG2 (NM_004385.2,9366-9384).
gcagcgagaattcttgatt

SEQ ID NO: 141228 - DNA, 19 bp, Homo sapiens
  siRNA target sequence for CSPG2 (NM_004385.2,9370-9388).
cgagaattcttgattccaa

SEQ ID NO: 141229 - DNA, 19 bp, Homo sapiens
  siRNA target sequence for CSPG2 (NM_004385.2,9371-9389).
gagaattcttgattccaat

SEQ ID NO: 141230 - DNA, 19 bp, Homo sapiens
  siRNA target sequence for CSPG2 (NM_004385.2,9402-9420).
gtaaaccctgtggaattta

SEQ ID NO: 141231 - DNA, 19 bp, Homo sapiens
  siRNA target sequence for CSPG2 (NM_004385.2,9407-9425).
ccctgtggaatttaatact

SEQ ID NO: 141232 - DNA, 19 bp, Homo sapiens
  siRNA target sequence for CSPG2 (NM_004385.2,9428-9446).
ggttgcaacaccaccattt

SEQ ID NO: 141233 - DNA, 19 bp, Homo sapiens
  siRNA target sequence for CSPG2 (NM_004385.2,9455-9473).
ggagacttctaatgaaaca

SEQ ID NO: 141234 - DNA, 19 bp, Homo sapiens
  siRNA target sequence for CSPG2 (NM_004385.2,9506-9524).
ggaaggcacggcaatctat

SEQ ID NO: 141235 - DNA, 19 bp, Homo sapiens
  siRNA target sequence for CSPG2 (NM_004385.2,9507-9525).
gaaggcacggcaatctatt

SEQ ID NO: 141236 - DNA, 19 bp, Homo sapiens
  siRNA target sequence for CSPG2 (NM_004385.2,9531-9549).
ggacctgatcgctgcaaaa

SEQ ID NO: 141237 - DNA, 19 bp, Homo sapiens
  siRNA target sequence for CSPG2 (NM_004385.2,9532-9550).
gacctgatcgctgcaaaat

SEQ ID NO: 141238 - DNA, 19 bp, Homo sapiens
  siRNA target sequence for CSPG2 (NM_004385.2,9534-9552).
cctgatcgctgcaaaatga

SEQ ID NO: 141239 - DNA, 19 bp, Homo sapiens
  siRNA target sequence for CSPG2 (NM_004385.2,9535-9553).
ctgatcgctgcaaaatgaa

SEQ ID NO: 141240 - DNA, 19 bp, Homo sapiens
  siRNA target sequence for CSPG2 (NM_004385.2,9566-9584).
cggaggcacctgttatcct

SEQ ID NO: 141241 - DNA, 19 bp, Homo sapiens
  siRNA target sequence for CSPG2 (NM_004385.2,9626-9644).
cggagaccagtgtgaactt

SEQ ID NO: 141242 - DNA, 19 bp, Homo sapiens
  siRNA target sequence for CSPG2 (NM_004385.2,9662-9680).
ctctaatccctgtcgtaat

SEQ ID NO: 141243 - DNA, 19 bp, Homo sapiens
  siRNA target sequence for CSPG2 (NM_004385.2,9693-9711).
gttgatggttttaacacat

SEQ ID NO: 141244 - DNA, 19 bp, Homo sapiens
  siRNA target sequence for CSPG2 (NM_004385.2,9722-9740).
ctgccttccaagttatgtt

SEQ ID NO: 141245 - DNA, 19 bp, Homo sapiens
  siRNA target sequence for CSPG2 (NM_004385.2,9774-9792).
gactatggctggcacaaat

SEQ ID NO: 141246 - DNA, 19 bp, Homo sapiens
  siRNA target sequence for CSPG2 (NM_004385.2,9795-9813).
caagggcagtgctacaaat

SEQ ID NO: 141247 - DNA, 19 bp, Homo sapiens
  siRNA target sequence for CSPG2 (NM_004385.2,9798-9816).
gggcagtgctacaaatact

SEQ ID NO: 141248 - DNA, 19 bp, Homo sapiens
  siRNA target sequence for CSPG2 (NM_004385.2,9800-9818).
gcagtgctacaaatacttt

SEQ ID NO: 141249 - DNA, 19 bp, Homo sapiens
  siRNA target sequence for CSPG2 (NM_004385.2,9892-9910).
ctcacgaagaacaaatgtt

SEQ ID NO: 141250 - DNA, 19 bp, Homo sapiens
  siRNA target sequence for CSPG2 (NM_004385.2,9991-10009).
gcagcacactgcaatacga

SEQ ID NO: 141251 - DNA, 19 bp, Homo sapiens
  siRNA target sequence for CSPG2 (NM_004385.2,9999-10017).
ctgcaatacgagaattgga

SEQ ID NO: 141252 - DNA, 19 bp, Homo sapiens
  siRNA target sequence for CSPG2 (NM_004385.2,10121-10139).
cacctatacgtgcaagaaa

SEQ ID NO: 141253 - DNA, 19 bp, Homo sapiens
  siRNA target sequence for CSPG2 (NM_004385.2,10157-10175).
ccagccccctgttgtagaa

SEQ ID NO: 141254 - DNA, 19 bp, Homo sapiens
  siRNA target sequence for CSPG2 (NM_004385.2,10196-10214).
gatgaaacctcgttatgaa

SEQ ID NO: 141255 - DNA, 19 bp, Homo sapiens
  siRNA target sequence for CSPG2 (NM_004385.2,10203-10221).
cctcgttatgaaatcaact

SEQ ID NO: 141256 - DNA, 19 bp, Homo sapiens
  siRNA target sequence for CSPG2 (NM_004385.2,10240-10258).
gcaaagatggtttcattca

SEQ ID NO: 141257 - DNA, 19 bp, Homo sapiens
  siRNA target sequence for CSPG2 (NM_004385.2,10297-10315).
gatgggctatacctaaaat

SEQ ID NO: 141258 - DNA, 19 bp, Homo sapiens
  siRNA target sequence for CSPG3 (NM_004386.1,167-185).
gccctgccctgtctcttta

SEQ ID NO: 141259 - DNA, 19 bp, Homo sapiens
  siRNA target sequence for CSPG3 (NM_004386.1,213-231).
gagatgcccctcggataaa

SEQ ID NO: 141260 - DNA, 19 bp, Homo sapiens
  siRNA target sequence for CSPG3 (NM_004386.1,641-659).
cgcactgttcggtatccta

SEQ ID NO: 141261 - DNA, 19 bp, Homo sapiens
  siRNA target sequence for CSPG3 (NM_004386.1,642-660).
gcactgttcggtatcctat

SEQ ID NO: 141262 - DNA, 19 bp, Homo sapiens
  siRNA target sequence for CSPG3 (NM_004386.1,667-685).
gtcccgtcctggttgctat

SEQ ID NO: 141263 - DNA, 19 bp, Homo sapiens
  siRNA target sequence for CSPG3 (NM_004386.1,729-747).
gcaacccacaggaactcta

SEQ ID NO: 141264 - DNA, 19 bp, Homo sapiens
  siRNA target sequence for CSPG3 (NM_004386.1,739-757).
ggaactctacgatgtgtat

SEQ ID NO: 141265 - DNA, 19 bp, Homo sapiens
  siRNA target sequence for CSPG3 (NM_004386.1,743-761).
ctctacgatgtgtattgct

SEQ ID NO: 141266 - DNA, 19 bp, Homo sapiens
  siRNA target sequence for CSPG3 (NM_004386.1,1793-1811).
gccaccccagacctgtttt

SEQ ID NO: 141267 - DNA, 19 bp, Homo sapiens
  siRNA target sequence for CSPG3 (NM_004386.1,1907-1925).
ctgcgtggtcccaaagagt

SEQ ID NO: 141268 - DNA, 19 bp, Homo sapiens
  siRNA target sequence for CSPG3 (NM_004386.1,1951-1969).
ctccaccgaggccaataga

SEQ ID NO: 141269 - DNA, 19 bp, Homo sapiens
  siRNA target sequence for CSPG3 (NM_004386.1,1953-1971).
ccaccgaggccaatagagt

SEQ ID NO: 141270 - DNA, 19 bp, Homo sapiens
  siRNA target sequence for CSPG3 (NM_004386.1,1954-1972).
caccgaggccaatagagtt

SEQ ID NO: 141271 - DNA, 19 bp, Homo sapiens
  siRNA target sequence for CSPG3 (NM_004386.1,2018-2036).
gcagagaccaaggtgtatt

SEQ ID NO: 141272 - DNA, 19 bp, Homo sapiens
  siRNA target sequence for CSPG3 (NM_004386.1,2107-2125).
ggcagacttcagagaaact

SEQ ID NO: 141273 - DNA, 19 bp, Homo sapiens
  siRNA target sequence for CSPG3 (NM_004386.1,2137-2155).
ccctgctcaggtcaacaaa

SEQ ID NO: 141274 - DNA, 19 bp, Homo sapiens
  siRNA target sequence for CSPG3 (NM_004386.1,2590-2608).
ggccctggatacaagcatt

SEQ ID NO: 141275 - DNA, 19 bp, Homo sapiens
  siRNA target sequence for CSPG3 (NM_004386.1,3040-3058).
gaacaacccttgtcttcat

SEQ ID NO: 141276 - DNA, 19 bp, Homo sapiens
  siRNA target sequence for CSPG3 (NM_004386.1,3120-3138).
gggagaactgtgagattga

SEQ ID NO: 141277 - DNA, 19 bp, Homo sapiens
  siRNA target sequence for CSPG3 (NM_004386.1,3174-3192).
gaggcacctgtattgatga

SEQ ID NO: 141278 - DNA, 19 bp, Homo sapiens
  siRNA target sequence for CSPG3 (NM_004386.1,3292-3310).
ccactgttaccgctatttt

SEQ ID NO: 141279 - DNA, 19 bp, Homo sapiens
  siRNA target sequence for CSPG3 (NM_004386.1,3388-3406).
ggaggaacacagcttcatt

SEQ ID NO: 141280 - DNA, 19 bp, Homo sapiens
  siRNA target sequence for CSPG3 (NM_004386.1,3392-3410).
gaacacagcttcattaata

SEQ ID NO: 141281 - DNA, 19 bp, Homo sapiens
  siRNA target sequence for CSPG3 (NM_004386.1,3395-3413).
cacagcttcattaatagct

SEQ ID NO: 141282 - DNA, 19 bp, Homo sapiens
  siRNA target sequence for CSPG3 (NM_004386.1,3397-3415).
cagcttcattaatagcttt

SEQ ID NO: 141283 - DNA, 19 bp, Homo sapiens
  siRNA target sequence for CSPG3 (NM_004386.1,3450-3468).
ggatcgtggagagagattt

SEQ ID NO: 141284 - DNA, 19 bp, Homo sapiens
  siRNA target sequence for CSPG3 (NM_004386.1,3481-3499).
caacaccgggctgcaattt

SEQ ID NO: 141285 - DNA, 19 bp, Homo sapiens
  siRNA target sequence for CSPG3 (NM_004386.1,3486-3504).
ccgggctgcaatttgagaa

SEQ ID NO: 141286 - DNA, 19 bp, Homo sapiens
  siRNA target sequence for CSPG3 (NM_004386.1,3512-3530).
gagaaccagccggacaatt

SEQ ID NO: 141287 - DNA, 19 bp, Homo sapiens
  siRNA target sequence for CSPG3 (NM_004386.1,3557-3575).
gtgatggtggcgcatgaaa

SEQ ID NO: 141288 - DNA, 19 bp, Homo sapiens
  siRNA target sequence for CSPG3 (NM_004386.1,3790-3808).
gtgggacaggccccaaatt

SEQ ID NO: 141289 - DNA, 19 bp, Homo sapiens
  siRNA target sequence for CSPG3 (NM_004386.1,3817-3835).
caaacccagacgttcacat

SEQ ID NO: 141290 - DNA, 19 bp, Homo sapiens
  siRNA target sequence for CUBN (NM_001081.2,190-208).
cggggtctgctcaaaacat

SEQ ID NO: 141291 - DNA, 19 bp, Homo sapiens
  siRNA target sequence for CUBN (NM_001081.2,191-209).
ggggtctgctcaaaacatt

SEQ ID NO: 141292 - DNA, 19 bp, Homo sapiens
  siRNA target sequence for CUBN (NM_001081.2,193-211).
ggtctgctcaaaacattga

SEQ ID NO: 141293 - DNA, 19 bp, Homo sapiens
  siRNA target sequence for CUBN (NM_001081.2,223-241).
gatccctgggaaaaattaa

SEQ ID NO: 141294 - DNA, 19 bp, Homo sapiens
  siRNA target sequence for CUBN (NM_001081.2,294-312).
gaagatattatagagttaa

SEQ ID NO: 141295 - DNA, 19 bp, Homo sapiens
  siRNA target sequence for CUBN (NM_001081.2,322-340).
caattggtctgcctcaaaa

SEQ ID NO: 141296 - DNA, 19 bp, Homo sapiens
  siRNA target sequence for CUBN (NM_001081.2,327-345).
ggtctgcctcaaaatatat

SEQ ID NO: 141297 - DNA, 19 bp, Homo sapiens
  siRNA target sequence for CUBN (NM_001081.2,377-395).
ggtggatcttgagagaaaa

SEQ ID NO: 141298 - DNA, 19 bp, Homo sapiens
  siRNA target sequence for CUBN (NM_001081.2,407-425).
gcagcagactgttgacaaa

SEQ ID NO: 141299 - DNA, 19 bp, Homo sapiens
  siRNA target sequence for CUBN (NM_001081.2,429-447).
gtttgcagcagcaatcctt

SEQ ID NO: 141300 - DNA, 19 bp, Homo sapiens
  siRNA target sequence for CUBN (NM_001081.2,470-488).
caatctgcatgattccttt

SEQ ID NO: 141301 - DNA, 19 bp, Homo sapiens
  siRNA target sequence for CUBN (NM_001081.2,522-540).
ctctgctcagctgatgtta

SEQ ID NO: 141302 - DNA, 19 bp, Homo sapiens
  siRNA target sequence for CUBN (NM_001081.2,526-544).
gctcagctgatgttaacga

SEQ ID NO: 141303 - DNA, 19 bp, Homo sapiens
  siRNA target sequence for CUBN (NM_001081.2,527-545).
ctcagctgatgttaacgaa

SEQ ID NO: 141304 - DNA, 19 bp, Homo sapiens
  siRNA target sequence for CUBN (NM_001081.2,588-606).
ggcacatgtgttaatacaa

SEQ ID NO: 141305 - DNA, 19 bp, Homo sapiens
  siRNA target sequence for CUBN (NM_001081.2,589-607).
gcacatgtgttaatacaat

SEQ ID NO: 141306 - DNA, 19 bp, Homo sapiens
  siRNA target sequence for CUBN (NM_001081.2,648-666).
ccccagtgtgcatccaaat

SEQ ID NO: 141307 - DNA, 19 bp, Homo sapiens
  siRNA target sequence for CUBN (NM_001081.2,649-667).
cccagtgtgcatccaaata

SEQ ID NO: 141308 - DNA, 19 bp, Homo sapiens
  siRNA target sequence for CUBN (NM_001081.2,708-726).
ggcatctgtgaggatttaa

SEQ ID NO: 141309 - DNA, 19 bp, Homo sapiens
  siRNA target sequence for CUBN (NM_001081.2,855-873).
cttgtgcagtgtttcaaca

SEQ ID NO: 141310 - DNA, 19 bp, Homo sapiens
  siRNA target sequence for CUBN (NM_001081.2,987-1005).
cccgttgagtgtgtgaata

SEQ ID NO: 141311 - DNA, 19 bp, Homo sapiens
  siRNA target sequence for CUBN (NM_001081.2,1163-1181).
cccgggttatactggaaat

SEQ ID NO: 141312 - DNA, 19 bp, Homo sapiens
  siRNA target sequence for CUBN (NM_001081.2,1166-1184).
gggttatactggaaatggt

SEQ ID NO: 141313 - DNA, 19 bp, Homo sapiens
  siRNA target sequence for CUBN (NM_001081.2,1167-1185).
ggttatactggaaatggtt

SEQ ID NO: 141314 - DNA, 19 bp, Homo sapiens
  siRNA target sequence for CUBN (NM_001081.2,1168-1186).
gttatactggaaatggtta

SEQ ID NO: 141315 - DNA, 19 bp, Homo sapiens
  siRNA target sequence for CUBN (NM_001081.2,1182-1200).
ggttatgggccaaatggat

SEQ ID NO: 141316 - DNA, 19 bp, Homo sapiens
  siRNA target sequence for CUBN (NM_001081.2,1201-1219).
gtgtgcagctcagtaatat

SEQ ID NO: 141317 - DNA, 19 bp, Homo sapiens
  siRNA target sequence for CUBN (NM_001081.2,1237-1255).
gtctaaatggacaatgcat

SEQ ID NO: 141318 - DNA, 19 bp, Homo sapiens
  siRNA target sequence for CUBN (NM_001081.2,1368-1386).
gttgatggcgttgattctt

SEQ ID NO: 141319 - DNA, 19 bp, Homo sapiens
  siRNA target sequence for CUBN (NM_001081.2,1371-1389).
gatggcgttgattctttca

SEQ ID NO: 141320 - DNA, 19 bp, Homo sapiens
  siRNA target sequence for CUBN (NM_001081.2,1428-1446).
caggttcctcagcaagttt

SEQ ID NO: 141321 - DNA, 19 bp, Homo sapiens
  siRNA target sequence for CUBN (NM_001081.2,1430-1448).
ggttcctcagcaagtttgt

SEQ ID NO: 141322 - DNA, 19 bp, Homo sapiens
  siRNA target sequence for CUBN (NM_001081.2,1452-1470).
gagtccctctcaggaataa

SEQ ID NO: 141323 - DNA, 19 bp, Homo sapiens
  siRNA target sequence for CUBN (NM_001081.2,1489-1507).
ggagcccggatgttggtta

SEQ ID NO: 141324 - DNA, 19 bp, Homo sapiens
  siRNA target sequence for CUBN (NM_001081.2,1490-1508).
gagcccggatgttggttat

SEQ ID NO: 141325 - DNA, 19 bp, Homo sapiens
  siRNA target sequence for CUBN (NM_001081.2,1496-1514).
ggatgttggttatgttcat

SEQ ID NO: 141326 - DNA, 19 bp, Homo sapiens
  siRNA target sequence for CUBN (NM_001081.2,1526-1544).
cttctgggttatcaaaact

SEQ ID NO: 141327 - DNA, 19 bp, Homo sapiens
  siRNA target sequence for CUBN (NM_001081.2,1557-1575).
gtcctgcgtatcactttca

SEQ ID NO: 141328 - DNA, 19 bp, Homo sapiens
  siRNA target sequence for CUBN (NM_001081.2,1604-1622).
ctgtccacacgagtttctt

SEQ ID NO: 141329 - DNA, 19 bp, Homo sapiens
  siRNA target sequence for CUBN (NM_001081.2,1606-1624).
gtccacacgagtttcttca

SEQ ID NO: 141330 - DNA, 19 bp, Homo sapiens
  siRNA target sequence for CUBN (NM_001081.2,1705-1723).
gtgacaatgctctctattt

SEQ ID NO: 141331 - DNA, 19 bp, Homo sapiens
  siRNA target sequence for CUBN (NM_001081.2,1754-1772).
gagaggctttacagtaaga

SEQ ID NO: 141332 - DNA, 19 bp, Homo sapiens
  siRNA target sequence for CUBN (NM_001081.2,1810-1828).
ctggtccttacggttctat

SEQ ID NO: 141333 - DNA, 19 bp, Homo sapiens
  siRNA target sequence for CUBN (NM_001081.2,1812-1830).
ggtccttacggttctatta

SEQ ID NO: 141334 - DNA, 19 bp, Homo sapiens
  siRNA target sequence for CUBN (NM_001081.2,1813-1831).
gtccttacggttctattaa

SEQ ID NO: 141335 - DNA, 19 bp, Homo sapiens
  siRNA target sequence for CUBN (NM_001081.2,1815-1833).
ccttacggttctattaagt

SEQ ID NO: 141336 - DNA, 19 bp, Homo sapiens
  siRNA target sequence for CUBN (NM_001081.2,1896-1914).
cctgacctcctggtaacat

SEQ ID NO: 141337 - DNA, 19 bp, Homo sapiens
  siRNA target sequence for CUBN (NM_001081.2,1933-1951).
gcctcgagcaccatgatga

SEQ ID NO: 141338 - DNA, 19 bp, Homo sapiens
  siRNA target sequence for CUBN (NM_001081.2,1978-1996).
gagatggtcctttgtatca

SEQ ID NO: 141339 - DNA, 19 bp, Homo sapiens
  siRNA target sequence for CUBN (NM_001081.2,2056-2074).
gcccctttgccagaattca

SEQ ID NO: 141340 - DNA, 19 bp, Homo sapiens
  siRNA target sequence for CUBN (NM_001081.2,2079-2097).
cattcagactcccagatta

SEQ ID NO: 141341 - DNA, 19 bp, Homo sapiens
  siRNA target sequence for CUBN (NM_001081.2,2083-2101).
cagactcccagattagtga

SEQ ID NO: 141342 - DNA, 19 bp, Homo sapiens
  siRNA target sequence for CUBN (NM_001081.2,2111-2129).
ccatatcacctacttaaca

SEQ ID NO: 141343 - DNA, 19 bp, Homo sapiens
  siRNA target sequence for CUBN (NM_001081.2,2112-2130).
catatcacctacttaacat

SEQ ID NO: 141344 - DNA, 19 bp, Homo sapiens
  siRNA target sequence for CUBN (NM_001081.2,2145-2163).
cgttgtggtgggaactaca

SEQ ID NO: 141345 - DNA, 19 bp, Homo sapiens
  siRNA target sequence for CUBN (NM_001081.2,2170-2188).
cagagggtgaactcttctt

SEQ ID NO: 141346 - DNA, 19 bp, Homo sapiens
  siRNA target sequence for CUBN (NM_001081.2,2218-2236).
ccaggcaatgcgtctatat

SEQ ID NO: 141347 - DNA, 19 bp, Homo sapiens
  siRNA target sequence for CUBN (NM_001081.2,2259-2277).
caaatacaaatcaacttca

SEQ ID NO: 141348 - DNA, 19 bp, Homo sapiens
  siRNA target sequence for CUBN (NM_001081.2,2302-2320).
gtgacagttctcagaatta

SEQ ID NO: 141349 - DNA, 19 bp, Homo sapiens
  siRNA target sequence for CUBN (NM_001081.2,2370-2388).
ggaaccatctctcacatta

SEQ ID NO: 141350 - DNA, 19 bp, Homo sapiens
  siRNA target sequence for CUBN (NM_001081.2,2371-2389).
gaaccatctctcacattaa

SEQ ID NO: 141351 - DNA, 19 bp, Homo sapiens
  siRNA target sequence for CUBN (NM_001081.2,2378-2396).
ctctcacattaaatccatt

SEQ ID NO: 141352 - DNA, 19 bp, Homo sapiens
  siRNA target sequence for CUBN (NM_001081.2,2382-2400).
cacattaaatccattacta

SEQ ID NO: 141353 - DNA, 19 bp, Homo sapiens
  siRNA target sequence for CUBN (NM_001081.2,2406-2424).
gtctggatcaggtttaaaa

SEQ ID NO: 141354 - DNA, 19 bp, Homo sapiens
  siRNA target sequence for CUBN (NM_001081.2,2410-2428).
ggatcaggtttaaaataga

SEQ ID NO: 141355 - DNA, 19 bp, Homo sapiens
  siRNA target sequence for CUBN (NM_001081.2,2411-2429).
gatcaggtttaaaatagat

SEQ ID NO: 141356 - DNA, 19 bp, Homo sapiens
  siRNA target sequence for CUBN (NM_001081.2,2469-2487).
gtcgcttgcggggatgaat

SEQ ID NO: 141357 - DNA, 19 bp, Homo sapiens
  siRNA target sequence for CUBN (NM_001081.2,2471-2489).
cgcttgcggggatgaatta

SEQ ID NO: 141358 - DNA, 19 bp, Homo sapiens
  siRNA target sequence for CUBN (NM_001081.2,2472-2490).
gcttgcggggatgaattaa

SEQ ID NO: 141359 - DNA, 19 bp, Homo sapiens
  siRNA target sequence for CUBN (NM_001081.2,2502-2520).
gtcattcgctcgccttttt

SEQ ID NO: 141360 - DNA, 19 bp, Homo sapiens
  siRNA target sequence for CUBN (NM_001081.2,2623-2641).
ctgcccactgtgaaacaga

SEQ ID NO: 141361 - DNA, 19 bp, Homo sapiens
  siRNA target sequence for CUBN (NM_001081.2,2651-2669).
gattggtagcagttccatt

SEQ ID NO: 141362 - DNA, 19 bp, Homo sapiens
  siRNA target sequence for CUBN (NM_001081.2,2693-2711).
gtattgcggtacagacata

SEQ ID NO: 141363 - DNA, 19 bp, Homo sapiens
  siRNA target sequence for CUBN (NM_001081.2,2748-2766).
gtcacattcgtgaaaagtt

SEQ ID NO: 141364 - DNA, 19 bp, Homo sapiens
  siRNA target sequence for CUBN (NM_001081.2,2821-2839).
gtggagaaattcttacaga

SEQ ID NO: 141365 - DNA, 19 bp, Homo sapiens
  siRNA target sequence for CUBN (NM_001081.2,2862-2880).
cctggccatccaaatgtct

SEQ ID NO: 141366 - DNA, 19 bp, Homo sapiens
  siRNA target sequence for CUBN (NM_001081.2,2863-2881).
ctggccatccaaatgtcta

SEQ ID NO: 141367 - DNA, 19 bp, Homo sapiens
  siRNA target sequence for CUBN (NM_001081.2,2883-2901).
ccccacggtatcaactgta

SEQ ID NO: 141368 - DNA, 19 bp, Homo sapiens
  siRNA target sequence for CUBN (NM_001081.2,2937-2955).
catttaatgttcgaaacat

SEQ ID NO: 141369 - DNA, 19 bp, Homo sapiens
  siRNA target sequence for CUBN (NM_001081.2,2958-2976).
catctggagtttcattaca

SEQ ID NO: 141370 - DNA, 19 bp, Homo sapiens
  siRNA target sequence for CUBN (NM_001081.2,3065-3083).
cacaagcagtggtaactca

SEQ ID NO: 141371 - DNA, 19 bp, Homo sapiens
  siRNA target sequence for CUBN (NM_001081.2,3067-3085).
caagcagtggtaactcatt

SEQ ID NO: 141372 - DNA, 19 bp, Homo sapiens
  siRNA target sequence for CUBN (NM_001081.2,3070-3088).
gcagtggtaactcattgat

SEQ ID NO: 141373 - DNA, 19 bp, Homo sapiens
  siRNA target sequence for CUBN (NM_001081.2,3107-3125).
ctccgacctcgcttatgaa

SEQ ID NO: 141374 - DNA, 19 bp, Homo sapiens
  siRNA target sequence for CUBN (NM_001081.2,3116-3134).
cgcttatgaaggcttctta

SEQ ID NO: 141375 - DNA, 19 bp, Homo sapiens
  siRNA target sequence for CUBN (NM_001081.2,3117-3135).
gcttatgaaggcttcttaa

SEQ ID NO: 141376 - DNA, 19 bp, Homo sapiens
  siRNA target sequence for CUBN (NM_001081.2,3173-3191).
gcaagactacacagatgat

SEQ ID NO: 141377 - DNA, 19 bp, Homo sapiens
  siRNA target sequence for CUBN (NM_001081.2,3208-3226).
ctccaaacttccccaataa

SEQ ID NO: 141378 - DNA, 19 bp, Homo sapiens
  siRNA target sequence for CUBN (NM_001081.2,3285-3303).
gcagtgcacttcacaaact

SEQ ID NO: 141379 - DNA, 19 bp, Homo sapiens
  siRNA target sequence for CUBN (NM_001081.2,3288-3306).
gtgcacttcacaaacttct

SEQ ID NO: 141380 - DNA, 19 bp, Homo sapiens
  siRNA target sequence for CUBN (NM_001081.2,3379-3397).
cattgctgggaatattcta

SEQ ID NO: 141381 - DNA, 19 bp, Homo sapiens
  siRNA target sequence for CUBN (NM_001081.2,3408-3426).
ctacccccaacaatcatct

SEQ ID NO: 141382 - DNA, 19 bp, Homo sapiens
  siRNA target sequence for CUBN (NM_001081.2,3414-3432).
ccaacaatcatctctcata

SEQ ID NO: 141383 - DNA, 19 bp, Homo sapiens
  siRNA target sequence for CUBN (NM_001081.2,3418-3436).
caatcatctctcatagtaa

SEQ ID NO: 141384 - DNA, 19 bp, Homo sapiens
  siRNA target sequence for CUBN (NM_001081.2,3525-3543).
ggtaatctcaccacttcaa

SEQ ID NO: 141385 - DNA, 19 bp, Homo sapiens
  siRNA target sequence for CUBN (NM_001081.2,3619-3637).
gccacggcagcgcatttga

SEQ ID NO: 141386 - DNA, 19 bp, Homo sapiens
  siRNA target sequence for CUBN (NM_001081.2,3620-3638).
ccacggcagcgcatttgaa

SEQ ID NO: 141387 - DNA, 19 bp, Homo sapiens
  siRNA target sequence for CUBN (NM_001081.2,3630-3648).
gcatttgaactggaattca

SEQ ID NO: 141388 - DNA, 19 bp, Homo sapiens
  siRNA target sequence for CUBN (NM_001081.2,3673-3691).
caaactgcactttagatta

SEQ ID NO: 141389 - DNA, 19 bp, Homo sapiens
  siRNA target sequence for CUBN (NM_001081.2,3761-3779).
ccctcttattcgttctagt

SEQ ID NO: 141390 - DNA, 19 bp, Homo sapiens
  siRNA target sequence for CUBN (NM_001081.2,3778-3796).
gtggagacagcatgtttat

SEQ ID NO: 141391 - DNA, 19 bp, Homo sapiens
  siRNA target sequence for CUBN (NM_001081.2,3829-3847).
gtggcttcaaggctgaata

SEQ ID NO: 141392 - DNA, 19 bp, Homo sapiens
  siRNA target sequence for CUBN (NM_001081.2,3863-3881).
gaatgtggtaatagtcaat

SEQ ID NO: 141393 - DNA, 19 bp, Homo sapiens
  siRNA target sequence for CUBN (NM_001081.2,3867-3885).
gtggtaatagtcaatcaaa

SEQ ID NO: 141394 - DNA, 19 bp, Homo sapiens
  siRNA target sequence for CUBN (NM_001081.2,3909-3927).
gggtatccgaatccttatt

SEQ ID NO: 141395 - DNA, 19 bp, Homo sapiens
  siRNA target sequence for CUBN (NM_001081.2,3915-3933).
ccgaatccttattctgaaa

SEQ ID NO: 141396 - DNA, 19 bp, Homo sapiens
  siRNA target sequence for CUBN (NM_001081.2,3916-3934).
cgaatccttattctgaaaa

SEQ ID NO: 141397 - DNA, 19 bp, Homo sapiens
  siRNA target sequence for CUBN (NM_001081.2,4002-4020).
gacttggaacatcacataa

SEQ ID NO: 141398 - DNA, 19 bp, Homo sapiens
  siRNA target sequence for CUBN (NM_001081.2,4092-4110).
ccccctccagggagtacta

SEQ ID NO: 141399 - DNA, 19 bp, Homo sapiens
  siRNA target sequence for CUBN (NM_001081.2,4094-4112).
ccctccagggagtactaca

SEQ ID NO: 141400 - DNA, 19 bp, Homo sapiens
  siRNA target sequence for CUBN (NM_001081.2,4095-4113).
cctccagggagtactacaa

SEQ ID NO: 141401 - DNA, 19 bp, Homo sapiens
  siRNA target sequence for CUBN (NM_001081.2,4271-4289).
ggagtgtatctggtacatt

SEQ ID NO: 141402 - DNA, 19 bp, Homo sapiens
  siRNA target sequence for CUBN (NM_001081.2,4272-4290).
gagtgtatctggtacatta

SEQ ID NO: 141403 - DNA, 19 bp, Homo sapiens
  siRNA target sequence for CUBN (NM_001081.2,4331-4349).
cttcgatgtggagtatcat

SEQ ID NO: 141404 - DNA, 19 bp, Homo sapiens
  siRNA target sequence for CUBN (NM_001081.2,4334-4352).
cgatgtggagtatcattca

SEQ ID NO: 141405 - DNA, 19 bp, Homo sapiens
  siRNA target sequence for CUBN (NM_001081.2,4351-4369).
caaggtgcaactttgatgt

SEQ ID NO: 141406 - DNA, 19 bp, Homo sapiens
  siRNA target sequence for CUBN (NM_001081.2,4354-4372).
ggtgcaactttgatgtctt

SEQ ID NO: 141407 - DNA, 19 bp, Homo sapiens
  siRNA target sequence for CUBN (NM_001081.2,4454-4472).
ggtctccagcactggaaat

SEQ ID NO: 141408 - DNA, 19 bp, Homo sapiens
  siRNA target sequence for CUBN (NM_001081.2,4465-4483).
ctggaaatgagctagcaat

SEQ ID NO: 141409 - DNA, 19 bp, Homo sapiens
  siRNA target sequence for CUBN (NM_001081.2,4476-4494).
ctagcaattcgattcaaga

SEQ ID NO: 141410 - DNA, 19 bp, Homo sapiens
  siRNA target sequence for CUBN (NM_001081.2,4493-4511).
gaccgacttgtccataaat

SEQ ID NO: 141411 - DNA, 19 bp, Homo sapiens
  siRNA target sequence for CUBN (NM_001081.2,4575-4593).
cccagtggagagattcatt

SEQ ID NO: 141412 - DNA, 19 bp, Homo sapiens
  siRNA target sequence for CUBN (NM_001081.2,4584-4602).
gagattcattctccaaatt

SEQ ID NO: 141413 - DNA, 19 bp, Homo sapiens
  siRNA target sequence for CUBN (NM_001081.2,4662-4680).
catcgtgttctcttgaact

SEQ ID NO: 141414 - DNA, 19 bp, Homo sapiens
  siRNA target sequence for CUBN (NM_001081.2,4698-4716).
gaaccacaagactcttgta

SEQ ID NO: 141415 - DNA, 19 bp, Homo sapiens
  siRNA target sequence for CUBN (NM_001081.2,4701-4719).
ccacaagactcttgtatta

SEQ ID NO: 141416 - DNA, 19 bp, Homo sapiens
  siRNA target sequence for CUBN (NM_001081.2,4702-4720).
cacaagactcttgtattat

SEQ ID NO: 141417 - DNA, 19 bp, Homo sapiens
  siRNA target sequence for CUBN (NM_001081.2,4722-4740).
gcatacgatggcttaagct

SEQ ID NO: 141418 - DNA, 19 bp, Homo sapiens
  siRNA target sequence for CUBN (NM_001081.2,4731-4749).
ggcttaagctccacaatgt

SEQ ID NO: 141419 - DNA, 19 bp, Homo sapiens
  siRNA target sequence for CUBN (NM_001081.2,4855-4873).
gaggcttccgagctcaatt

SEQ ID NO: 141420 - DNA, 19 bp, Homo sapiens
  siRNA target sequence for CUBN (NM_001081.2,4857-4875).
ggcttccgagctcaattca

SEQ ID NO: 141421 - DNA, 19 bp, Homo sapiens
  siRNA target sequence for CUBN (NM_001081.2,4930-4948).
cacggttccctgccaatta

SEQ ID NO: 141422 - DNA, 19 bp, Homo sapiens
  siRNA target sequence for CUBN (NM_001081.2,4942-4960).
ccaattatccaaacaatca

SEQ ID NO: 141423 - DNA, 19 bp, Homo sapiens
  siRNA target sequence for CUBN (NM_001081.2,4961-4979).
gaactgcagctggatcatt

SEQ ID NO: 141424 - DNA, 19 bp, Homo sapiens
  siRNA target sequence for CUBN (NM_001081.2,4984-5002).
cgcaacctccattaaatca

SEQ ID NO: 141425 - DNA, 19 bp, Homo sapiens
  siRNA target sequence for CUBN (NM_001081.2,4985-5003).
gcaacctccattaaatcat

SEQ ID NO: 141426 - DNA, 19 bp, Homo sapiens
  siRNA target sequence for CUBN (NM_001081.2,4989-5007).
cctccattaaatcatatca

SEQ ID NO: 141427 - DNA, 19 bp, Homo sapiens
  siRNA target sequence for CUBN (NM_001081.2,5001-5019).
catatcaccctctctttta

SEQ ID NO: 141428 - DNA, 19 bp, Homo sapiens
  siRNA target sequence for CUBN (NM_001081.2,5012-5030).
ctcttttacccactttgaa

SEQ ID NO: 141429 - DNA, 19 bp, Homo sapiens
  siRNA target sequence for CUBN (NM_001081.2,5055-5073).
cgtgactttgtagaaattt

SEQ ID NO: 141430 - DNA, 19 bp, Homo sapiens
  siRNA target sequence for CUBN (NM_001081.2,5099-5117).
cctccgaggccgttactgt

SEQ ID NO: 141431 - DNA, 19 bp, Homo sapiens
  siRNA target sequence for CUBN (NM_001081.2,5122-5140).
ccgacatgccccatcctat

SEQ ID NO: 141432 - DNA, 19 bp, Homo sapiens
  siRNA target sequence for CUBN (NM_001081.2,5126-5144).
catgccccatcctatcaca

SEQ ID NO: 141433 - DNA, 19 bp, Homo sapiens
  siRNA target sequence for CUBN (NM_001081.2,5239-5257).
gtggtggaacgttctacat

SEQ ID NO: 141434 - DNA, 19 bp, Homo sapiens
  siRNA target sequence for CUBN (NM_001081.2,5280-5298).
cctggctacccagacattt

SEQ ID NO: 141435 - DNA, 19 bp, Homo sapiens
  siRNA target sequence for CUBN (NM_001081.2,5351-5369).
gctccagctgtcttttata

SEQ ID NO: 141436 - DNA, 19 bp, Homo sapiens
  siRNA target sequence for CUBN (NM_001081.2,5414-5432).
ggagatccgtgaaggaaat

SEQ ID NO: 141437 - DNA, 19 bp, Homo sapiens
  siRNA target sequence for CUBN (NM_001081.2,5471-5489).
cttccctctcaattattct

SEQ ID NO: 141438 - DNA, 19 bp, Homo sapiens
  siRNA target sequence for CUBN (NM_001081.2,5570-5588).
gaagatatttggcaatgat

SEQ ID NO: 141439 - DNA, 19 bp, Homo sapiens
  siRNA target sequence for CUBN (NM_001081.2,5622-5640).
cctttctggcctgaaaact

SEQ ID NO: 141440 - DNA, 19 bp, Homo sapiens
  siRNA target sequence for CUBN (NM_001081.2,5623-5641).
ctttctggcctgaaaacta

SEQ ID NO: 141441 - DNA, 19 bp, Homo sapiens
  siRNA target sequence for CUBN (NM_001081.2,5808-5826).
ggtacccagactgaatctt

SEQ ID NO: 141442 - DNA, 19 bp, Homo sapiens
  siRNA target sequence for CUBN (NM_001081.2,5828-5846).
cagctccactggaaattct

SEQ ID NO: 141443 - DNA, 19 bp, Homo sapiens
  siRNA target sequence for CUBN (NM_001081.2,5830-5848).
gctccactggaaattcttt

SEQ ID NO: 141444 - DNA, 19 bp, Homo sapiens
  siRNA target sequence for CUBN (NM_001081.2,5922-5940).
cctgatggtgttttaccta

SEQ ID NO: 141445 - DNA, 19 bp, Homo sapiens
  siRNA target sequence for CUBN (NM_001081.2,5982-6000).
gatgcacccgtgtttctct

SEQ ID NO: 141446 - DNA, 19 bp, Homo sapiens
  siRNA target sequence for CUBN (NM_001081.2,6009-6027).
ggctggcctgacagttaca

SEQ ID NO: 141447 - DNA, 19 bp, Homo sapiens
  siRNA target sequence for CUBN (NM_001081.2,6070-6088).
ctaccgtggaactcaacat

SEQ ID NO: 141448 - DNA, 19 bp, Homo sapiens
  siRNA target sequence for CUBN (NM_001081.2,6113-6131).
ccgaacgtgtgcctatgat

SEQ ID NO: 141449 - DNA, 19 bp, Homo sapiens
  siRNA target sequence for CUBN (NM_001081.2,6114-6132).
cgaacgtgtgcctatgata

SEQ ID NO: 141450 - DNA, 19 bp, Homo sapiens
  siRNA target sequence for CUBN (NM_001081.2,6125-6143).
ctatgatagccttgtgata

SEQ ID NO: 141451 - DNA, 19 bp, Homo sapiens
  siRNA target sequence for CUBN (NM_001081.2,6140-6158).
gatacgagatggagataat

SEQ ID NO: 141452 - DNA, 19 bp, Homo sapiens
  siRNA target sequence for CUBN (NM_001081.2,6144-6162).
cgagatggagataataact

SEQ ID NO: 141453 - DNA, 19 bp, Homo sapiens
  siRNA target sequence for CUBN (NM_001081.2,6214-6232).
ggtctactggagagtacat

SEQ ID NO: 141454 - DNA, 19 bp, Homo sapiens
  siRNA target sequence for CUBN (NM_001081.2,6217-6235).
ctactggagagtacatgtt

SEQ ID NO: 141455 - DNA, 19 bp, Homo sapiens
  siRNA target sequence for CUBN (NM_001081.2,6298-6316).
gctgcggtggatatttgca

SEQ ID NO: 141456 - DNA, 19 bp, Homo sapiens
  siRNA target sequence for CUBN (NM_001081.2,6363-6381).
ccatccaacctcaactgtt

SEQ ID NO: 141457 - DNA, 19 bp, Homo sapiens
  siRNA target sequence for CUBN (NM_001081.2,6434-6452).
gcctttccagattccaaat

SEQ ID NO: 141458 - DNA, 19 bp, Homo sapiens
  siRNA target sequence for CUBN (NM_001081.2,6447-6465).
ccaaatggagattcttctt

SEQ ID NO: 141459 - DNA, 19 bp, Homo sapiens
  siRNA target sequence for CUBN (NM_001081.2,6584-6602).
ctcggataatcaaatgttt

SEQ ID NO: 141460 - DNA, 19 bp, Homo sapiens
  siRNA target sequence for CUBN (NM_001081.2,6586-6604).
cggataatcaaatgtttgt

SEQ ID NO: 141461 - DNA, 19 bp, Homo sapiens
  siRNA target sequence for CUBN (NM_001081.2,6676-6694).
gtgggggcaacgtctacat

SEQ ID NO: 141462 - DNA, 19 bp, Homo sapiens
  siRNA target sequence for CUBN (NM_001081.2,6727-6745).
cccccaaccaccctcataa

SEQ ID NO: 141463 - DNA, 19 bp, Homo sapiens
  siRNA target sequence for CUBN (NM_001081.2,6728-6746).
ccccaaccaccctcataat

SEQ ID NO: 141464 - DNA, 19 bp, Homo sapiens
  siRNA target sequence for CUBN (NM_001081.2,6731-6749).
caaccaccctcataattat

SEQ ID NO: 141465 - DNA, 19 bp, Homo sapiens
  siRNA target sequence for CUBN (NM_001081.2,6753-6771).
ccgcacgctgattgcattt

SEQ ID NO: 141466 - DNA, 19 bp, Homo sapiens
  siRNA target sequence for CUBN (NM_001081.2,6796-6814).
cacgcatacagctgcaatt

SEQ ID NO: 141467 - DNA, 19 bp, Homo sapiens
  siRNA target sequence for CUBN (NM_001081.2,6800-6818).
catacagctgcaatttgaa

SEQ ID NO: 141468 - DNA, 19 bp, Homo sapiens
  siRNA target sequence for CUBN (NM_001081.2,6822-6840).
cgattcgatattgaagtaa

SEQ ID NO: 141469 - DNA, 19 bp, Homo sapiens
  siRNA target sequence for CUBN (NM_001081.2,6884-6902).
ggattcggatgcaccaata

SEQ ID NO: 141470 - DNA, 19 bp, Homo sapiens
  siRNA target sequence for CUBN (NM_001081.2,6951-6969).
ggagaggttatgtatttga

SEQ ID NO: 141471 - DNA, 19 bp, Homo sapiens
  siRNA target sequence for CUBN (NM_001081.2,6954-6972).
gaggttatgtatttgagat

SEQ ID NO: 141472 - DNA, 19 bp, Homo sapiens
  siRNA target sequence for CUBN (NM_001081.2,7010-7028).
ggccaagtattctatagct

SEQ ID NO: 141473 - DNA, 19 bp, Homo sapiens
  siRNA target sequence for CUBN (NM_001081.2,7073-7091).
cattggacatccaacactt

SEQ ID NO: 141474 - DNA, 19 bp, Homo sapiens
  siRNA target sequence for CUBN (NM_001081.2,7078-7096).
gacatccaacacttccata

SEQ ID NO: 141475 - DNA, 19 bp, Homo sapiens
  siRNA target sequence for CUBN (NM_001081.2,7092-7110).
ccatacagagacaacttat

SEQ ID NO: 141476 - DNA, 19 bp, Homo sapiens
  siRNA target sequence for CUBN (NM_001081.2,7134-7152).
ctctctggacactatctca

SEQ ID NO: 141477 - DNA, 19 bp, Homo sapiens
  siRNA target sequence for CUBN (NM_001081.2,7211-7229).
ggagatctgggacaatcat

SEQ ID NO: 141478 - DNA, 19 bp, Homo sapiens
  siRNA target sequence for CUBN (NM_001081.2,7212-7230).
gagatctgggacaatcata

SEQ ID NO: 141479 - DNA, 19 bp, Homo sapiens
  siRNA target sequence for CUBN (NM_001081.2,7302-7320).
gctgtggtcaggtttgtca

SEQ ID NO: 141480 - DNA, 19 bp, Homo sapiens
  siRNA target sequence for CUBN (NM_001081.2,7388-7406).
ggatcttcagggctctatt

SEQ ID NO: 141481 - DNA, 19 bp, Homo sapiens
  siRNA target sequence for CUBN (NM_001081.2,7397-7415).
gggctctattggaacattt

SEQ ID NO: 141482 - DNA, 19 bp, Homo sapiens
  siRNA target sequence for CUBN (NM_001081.2,7427-7445).
ctacccgaacccaaatcct

SEQ ID NO: 141483 - DNA, 19 bp, Homo sapiens
  siRNA target sequence for CUBN (NM_001081.2,7490-7508).
gcggatcaccctaatgttt

SEQ ID NO: 141484 - DNA, 19 bp, Homo sapiens
  siRNA target sequence for CUBN (NM_001081.2,7491-7509).
cggatcaccctaatgttta

SEQ ID NO: 141485 - DNA, 19 bp, Homo sapiens
  siRNA target sequence for CUBN (NM_001081.2,7540-7558).
gcaacaatgagcatgtgat

SEQ ID NO: 141486 - DNA, 19 bp, Homo sapiens
  siRNA target sequence for CUBN (NM_001081.2,7548-7566).
gagcatgtgatagtattca

SEQ ID NO: 141487 - DNA, 19 bp, Homo sapiens
  siRNA target sequence for CUBN (NM_001081.2,7560-7578).
gtattcaatggcattagaa

SEQ ID NO: 141488 - DNA, 19 bp, Homo sapiens
  siRNA target sequence for CUBN (NM_001081.2,7587-7605).
ccccagctagagaaactgt

SEQ ID NO: 141489 - DNA, 19 bp, Homo sapiens
  siRNA target sequence for CUBN (NM_001081.2,7593-7611).
ctagagaaactgtgtagta

SEQ ID NO: 141490 - DNA, 19 bp, Homo sapiens
  siRNA target sequence for CUBN (NM_001081.2,7616-7634).
gaatgtaagcaatgagatt

SEQ ID NO: 141491 - DNA, 19 bp, Homo sapiens
  siRNA target sequence for CUBN (NM_001081.2,7694-7712).
cggcttcactgcttcctat

SEQ ID NO: 141492 - DNA, 19 bp, Homo sapiens
  siRNA target sequence for CUBN (NM_001081.2,7985-8003).
gcctacattgccattggtt

SEQ ID NO: 141493 - DNA, 19 bp, Homo sapiens
  siRNA target sequence for CUBN (NM_001081.2,7994-8012).
gccattggttataccttat

SEQ ID NO: 141494 - DNA, 19 bp, Homo sapiens
  siRNA target sequence for CUBN (NM_001081.2,8008-8026).
cttattctcaggtatggat

SEQ ID NO: 141495 - DNA, 19 bp, Homo sapiens
  siRNA target sequence for CUBN (NM_001081.2,8014-8032).
ctcaggtatggattcactt

SEQ ID NO: 141496 - DNA, 19 bp, Homo sapiens
  siRNA target sequence for CUBN (NM_001081.2,8019-8037).
gtatggattcactttgtca

SEQ ID NO: 141497 - DNA, 19 bp, Homo sapiens
  siRNA target sequence for CUBN (NM_001081.2,8036-8054).
caccaacgaacgtgtagaa

SEQ ID NO: 141498 - DNA, 19 bp, Homo sapiens
  siRNA target sequence for CUBN (NM_001081.2,8042-8060).
cgaacgtgtagaacacatt

SEQ ID NO: 141499 - DNA, 19 bp, Homo sapiens
  siRNA target sequence for CUBN (NM_001081.2,8046-8064).
cgtgtagaacacattggat

SEQ ID NO: 141500 - DNA, 19 bp, Homo sapiens
  siRNA target sequence for CUBN (NM_001081.2,8047-8065).
gtgtagaacacattggatt

SEQ ID NO: 141501 - DNA, 19 bp, Homo sapiens
  siRNA target sequence for CUBN (NM_001081.2,8061-8079).
ggattccatgcaaagtatt

SEQ ID NO: 141502 - DNA, 19 bp, Homo sapiens
  siRNA target sequence for CUBN (NM_001081.2,8088-8106).
gattgtggcggaatacaga

SEQ ID NO: 141503 - DNA, 19 bp, Homo sapiens
  siRNA target sequence for CUBN (NM_001081.2,8123-8141).
gatcacaagccccaactat

SEQ ID NO: 141504 - DNA, 19 bp, Homo sapiens
  siRNA target sequence for CUBN (NM_001081.2,8132-8150).
ccccaactatccaaatgct

SEQ ID NO: 141505 - DNA, 19 bp, Homo sapiens
  siRNA target sequence for CUBN (NM_001081.2,8133-8151).
cccaactatccaaatgctt

SEQ ID NO: 141506 - DNA, 19 bp, Homo sapiens
  siRNA target sequence for CUBN (NM_001081.2,8135-8153).
caactatccaaatgcttat

SEQ ID NO: 141507 - DNA, 19 bp, Homo sapiens
  siRNA target sequence for CUBN (NM_001081.2,8215-8233).
catttagtgactttgatat

SEQ ID NO: 141508 - DNA, 19 bp, Homo sapiens
  siRNA target sequence for CUBN (NM_001081.2,8288-8306).
ccctgaatcacccatcata

SEQ ID NO: 141509 - DNA, 19 bp, Homo sapiens
  siRNA target sequence for CUBN (NM_001081.2,8298-8316).
cccatcataggacaatact

SEQ ID NO: 141510 - DNA, 19 bp, Homo sapiens
  siRNA target sequence for CUBN (NM_001081.2,8300-8318).
catcataggacaatactgt

SEQ ID NO: 141511 - DNA, 19 bp, Homo sapiens
  siRNA target sequence for CUBN (NM_001081.2,8358-8376).
cagctggtcgtgactttta

SEQ ID NO: 141512 - DNA, 19 bp, Homo sapiens
  siRNA target sequence for CUBN (NM_001081.2,8361-8379).
ctggtcgtgacttttaact

SEQ ID NO: 141513 - DNA, 19 bp, Homo sapiens
  siRNA target sequence for CUBN (NM_001081.2,8363-8381).
ggtcgtgacttttaactca

SEQ ID NO: 141514 - DNA, 19 bp, Homo sapiens
  siRNA target sequence for CUBN (NM_001081.2,8397-8415).
ggtggtggattttatgcta

SEQ ID NO: 141515 - DNA, 19 bp, Homo sapiens
  siRNA target sequence for CUBN (NM_001081.2,8416-8434).
cgtggaacacacaaacttt

SEQ ID NO: 141516 - DNA, 19 bp, Homo sapiens
  siRNA target sequence for CUBN (NM_001081.2,8420-8438).
gaacacacaaactttaggt

SEQ ID NO: 141517 - DNA, 19 bp, Homo sapiens
  siRNA target sequence for CUBN (NM_001081.2,8521-8539).
cctggacggccattactca

SEQ ID NO: 141518 - DNA, 19 bp, Homo sapiens
  siRNA target sequence for CUBN (NM_001081.2,8525-8543).
gacggccattactcacaaa

SEQ ID NO: 141519 - DNA, 19 bp, Homo sapiens
  siRNA target sequence for CUBN (NM_001081.2,8528-8546).
ggccattactcacaaaagt

SEQ ID NO: 141520 - DNA, 19 bp, Homo sapiens
  siRNA target sequence for CUBN (NM_001081.2,8529-8547).
gccattactcacaaaagta

SEQ ID NO: 141521 - DNA, 19 bp, Homo sapiens
  siRNA target sequence for CUBN (NM_001081.2,8530-8548).
ccattactcacaaaagtaa

SEQ ID NO: 141522 - DNA, 19 bp, Homo sapiens
  siRNA target sequence for CUBN (NM_001081.2,8531-8549).
cattactcacaaaagtaaa

SEQ ID NO: 141523 - DNA, 19 bp, Homo sapiens
  siRNA target sequence for CUBN (NM_001081.2,8590-8608).
gcggtgatggacaatgtca

SEQ ID NO: 141524 - DNA, 19 bp, Homo sapiens
  siRNA target sequence for CUBN (NM_001081.2,8598-8616).
ggacaatgtcagaatagct

SEQ ID NO: 141525 - DNA, 19 bp, Homo sapiens
  siRNA target sequence for CUBN (NM_001081.2,8685-8703).
gctccgggtcccgttatca

SEQ ID NO: 141526 - DNA, 19 bp, Homo sapiens
  siRNA target sequence for CUBN (NM_001081.2,8695-8713).
ccgttatcacaccaagtaa

SEQ ID NO: 141527 - DNA, 19 bp, Homo sapiens
  siRNA target sequence for CUBN (NM_001081.2,8697-8715).
gttatcacaccaagtaaca

SEQ ID NO: 141528 - DNA, 19 bp, Homo sapiens
  siRNA target sequence for CUBN (NM_001081.2,8759-8777).
cttctccgcgtcctttgtt

SEQ ID NO: 141529 - DNA, 19 bp, Homo sapiens
  siRNA target sequence for CUBN (NM_001081.2,8779-8797).
gccgatgtggaagtaattt

SEQ ID NO: 141530 - DNA, 19 bp, Homo sapiens
  siRNA target sequence for CUBN (NM_001081.2,8781-8799).
cgatgtggaagtaatttca

SEQ ID NO: 141531 - DNA, 19 bp, Homo sapiens
  siRNA target sequence for CUBN (NM_001081.2,8802-8820).
ggcccttcaggttacatca

SEQ ID NO: 141532 - DNA, 19 bp, Homo sapiens
  siRNA target sequence for CUBN (NM_001081.2,8803-8821).
gcccttcaggttacatcat

SEQ ID NO: 141533 - DNA, 19 bp, Homo sapiens
  siRNA target sequence for CUBN (NM_001081.2,8804-8822).
cccttcaggttacatcatt

SEQ ID NO: 141534 - DNA, 19 bp, Homo sapiens
  siRNA target sequence for CUBN (NM_001081.2,9060-9078).
ccggttctgcttaacttct

SEQ ID NO: 141535 - DNA, 19 bp, Homo sapiens
  siRNA target sequence for CUBN (NM_001081.2,9061-9079).
cggttctgcttaacttcta

SEQ ID NO: 141536 - DNA, 19 bp, Homo sapiens
  siRNA target sequence for CUBN (NM_001081.2,9063-9081).
gttctgcttaacttctact

SEQ ID NO: 141537 - DNA, 19 bp, Homo sapiens
  siRNA target sequence for CUBN (NM_001081.2,9097-9115).
cagacttcggattcaagtt

SEQ ID NO: 141538 - DNA, 19 bp, Homo sapiens
  siRNA target sequence for CUBN (NM_001081.2,9104-9122).
cggattcaagttttcctat

SEQ ID NO: 141539 - DNA, 19 bp, Homo sapiens
  siRNA target sequence for CUBN (NM_001081.2,9105-9123).
ggattcaagttttcctata

SEQ ID NO: 141540 - DNA, 19 bp, Homo sapiens
  siRNA target sequence for CUBN (NM_001081.2,9133-9151).
cctgtggtggtgtgttcaa

SEQ ID NO: 141541 - DNA, 19 bp, Homo sapiens
  siRNA target sequence for CUBN (NM_001081.2,9134-9152).
ctgtggtggtgtgttcaat

SEQ ID NO: 141542 - DNA, 19 bp, Homo sapiens
  siRNA target sequence for CUBN (NM_001081.2,9170-9188).
cacaagtcctgcctattca

SEQ ID NO: 141543 - DNA, 19 bp, Homo sapiens
  siRNA target sequence for CUBN (NM_001081.2,9191-9209).
cgcagactacccaaatgat

SEQ ID NO: 141544 - DNA, 19 bp, Homo sapiens
  siRNA target sequence for CUBN (NM_001081.2,9192-9210).
gcagactacccaaatgata

SEQ ID NO: 141545 - DNA, 19 bp, Homo sapiens
  siRNA target sequence for CUBN (NM_001081.2,9193-9211).
cagactacccaaatgatat

SEQ ID NO: 141546 - DNA, 19 bp, Homo sapiens
  siRNA target sequence for CUBN (NM_001081.2,9207-9225).
gatatgcactgtctgtata

SEQ ID NO: 141547 - DNA, 19 bp, Homo sapiens
  siRNA target sequence for CUBN (NM_001081.2,9249-9267).
gtgatcgagctcaagttca

SEQ ID NO: 141548 - DNA, 19 bp, Homo sapiens
  siRNA target sequence for CUBN (NM_001081.2,9370-9388).
ccaagcgcccaccaaatgt

SEQ ID NO: 141549 - DNA, 19 bp, Homo sapiens
  siRNA target sequence for CUBN (NM_001081.2,9387-9405).
gtgaagagcagcaataata

SEQ ID NO: 141550 - DNA, 19 bp, Homo sapiens
  siRNA target sequence for CUBN (NM_001081.2,9389-9407).
gaagagcagcaataatagt

SEQ ID NO: 141551 - DNA, 19 bp, Homo sapiens
  siRNA target sequence for CUBN (NM_001081.2,9416-9434).
ggtgttcaagacagattca

SEQ ID NO: 141552 - DNA, 19 bp, Homo sapiens
  siRNA target sequence for CUBN (NM_001081.2,9417-9435).
gtgttcaagacagattcat

SEQ ID NO: 141553 - DNA, 19 bp, Homo sapiens
  siRNA target sequence for CUBN (NM_001081.2,9488-9506).
gcaaggatgtggtggttat

SEQ ID NO: 141554 - DNA, 19 bp, Homo sapiens
  siRNA target sequence for CUBN (NM_001081.2,9492-9510).
ggatgtggtggttatctga

SEQ ID NO: 141555 - DNA, 19 bp, Homo sapiens
  siRNA target sequence for CUBN (NM_001081.2,9507-9525).
ctgacaggctcgaataata

SEQ ID NO: 141556 - DNA, 19 bp, Homo sapiens
  siRNA target sequence for CUBN (NM_001081.2,9511-9529).
caggctcgaataatacctt

SEQ ID NO: 141557 - DNA, 19 bp, Homo sapiens
  siRNA target sequence for CUBN (NM_001081.2,9535-9553).
ctcctgattctgattcgaa

SEQ ID NO: 141558 - DNA, 19 bp, Homo sapiens
  siRNA target sequence for CUBN (NM_001081.2,9540-9558).
gattctgattcgaatggaa

SEQ ID NO: 141559 - DNA, 19 bp, Homo sapiens
  siRNA target sequence for CUBN (NM_001081.2,9544-9562).
ctgattcgaatggaatgta

SEQ ID NO: 141560 - DNA, 19 bp, Homo sapiens
  siRNA target sequence for CUBN (NM_001081.2,9550-9568).
cgaatggaatgtatgacaa

SEQ ID NO: 141561 - DNA, 19 bp, Homo sapiens
  siRNA target sequence for CUBN (NM_001081.2,9642-9660).
ctggaggcagcaagtacta

SEQ ID NO: 141562 - DNA, 19 bp, Homo sapiens
  siRNA target sequence for CUBN (NM_001081.2,9662-9680).
gcaaagatgcctttatgat

SEQ ID NO: 141563 - DNA, 19 bp, Homo sapiens
  siRNA target sequence for CUBN (NM_001081.2,9663-9681).
caaagatgcctttatgatt

SEQ ID NO: 141564 - DNA, 19 bp, Homo sapiens
  siRNA target sequence for CUBN (NM_001081.2,10053-10071).
ccgcagggtcacggaaatt

SEQ ID NO: 141565 - DNA, 19 bp, Homo sapiens
  siRNA target sequence for CUBN (NM_001081.2,10059-10077).
ggtcacggaaattcaagat

SEQ ID NO: 141566 - DNA, 19 bp, Homo sapiens
  siRNA target sequence for CUBN (NM_001081.2,10465-10483).
ctcaaaataatgaactata

SEQ ID NO: 141567 - DNA, 19 bp, Homo sapiens
  siRNA target sequence for CUBN (NM_001081.2,10476-10494).
gaactatacctacgattta

SEQ ID NO: 141568 - DNA, 19 bp, Homo sapiens
  siRNA target sequence for CUBN (NM_001081.2,10479-10497).
ctatacctacgatttaaga

SEQ ID NO: 141569 - DNA, 19 bp, Homo sapiens
  siRNA target sequence for CUBN (NM_001081.2,10485-10503).
ctacgatttaagagtgata

SEQ ID NO: 141570 - DNA, 19 bp, Homo sapiens
  siRNA target sequence for CUBN (NM_001081.2,10496-10514).
gagtgatagtgtaacttct

SEQ ID NO: 141571 - DNA, 19 bp, Homo sapiens
  siRNA target sequence for CUBN (NM_001081.2,10666-10684).
ggcttgtcaccatcaactt

SEQ ID NO: 141572 - DNA, 19 bp, Homo sapiens
  siRNA target sequence for CUBN (NM_001081.2,10866-10884).
ccatccgcattccgattaa

SEQ ID NO: 141573 - DNA, 19 bp, Homo sapiens
  siRNA target sequence for DCSTAMP (NM_030788.2,68-86).
ggcactgatatcttcctaa

SEQ ID NO: 141574 - DNA, 19 bp, Homo sapiens
  siRNA target sequence for DCSTAMP (NM_030788.2,72-90).
ctgatatcttcctaagtct

SEQ ID NO: 141575 - DNA, 19 bp, Homo sapiens
  siRNA target sequence for DCSTAMP (NM_030788.2,87-105).
gtctttgggagatttacgt

SEQ ID NO: 141576 - DNA, 19 bp, Homo sapiens
  siRNA target sequence for DCSTAMP (NM_030788.2,120-138).
ccggatggatggactttat

SEQ ID NO: 141577 - DNA, 19 bp, Homo sapiens
  siRNA target sequence for DCSTAMP (NM_030788.2,123-141).
gatggatggactttatcca

SEQ ID NO: 141578 - DNA, 19 bp, Homo sapiens
  siRNA target sequence for DCSTAMP (NM_030788.2,157-175).
ctgtttggttgctcttatt

SEQ ID NO: 141579 - DNA, 19 bp, Homo sapiens
  siRNA target sequence for DCSTAMP (NM_030788.2,273-291).
ccaagcatgcacgatgttt

SEQ ID NO: 141580 - DNA, 19 bp, Homo sapiens
  siRNA target sequence for DCSTAMP (NM_030788.2,274-292).
caagcatgcacgatgtttt

SEQ ID NO: 141581 - DNA, 19 bp, Homo sapiens
  siRNA target sequence for DCSTAMP (NM_030788.2,277-295).
gcatgcacgatgttttatt

SEQ ID NO: 141582 - DNA, 19 bp, Homo sapiens
  siRNA target sequence for DCSTAMP (NM_030788.2,282-300).
cacgatgttttattcttct

SEQ ID NO: 141583 - DNA, 19 bp, Homo sapiens
  siRNA target sequence for DCSTAMP (NM_030788.2,370-388).
cttgggacacgtagaaaat

SEQ ID NO: 141584 - DNA, 19 bp, Homo sapiens
  siRNA target sequence for DCSTAMP (NM_030788.2,373-391).
gggacacgtagaaaatatt

SEQ ID NO: 141585 - DNA, 19 bp, Homo sapiens
  siRNA target sequence for DCSTAMP (NM_030788.2,410-428).
ctcctagatggtatgactt

SEQ ID NO: 141586 - DNA, 19 bp, Homo sapiens
  siRNA target sequence for DCSTAMP (NM_030788.2,419-437).
ggtatgacttgcaacctaa

SEQ ID NO: 141587 - DNA, 19 bp, Homo sapiens
  siRNA target sequence for DCSTAMP (NM_030788.2,512-530).
gccactccactaagtgtat

SEQ ID NO: 141588 - DNA, 19 bp, Homo sapiens
  siRNA target sequence for DCSTAMP (NM_030788.2,513-531).
ccactccactaagtgtatt

SEQ ID NO: 141589 - DNA, 19 bp, Homo sapiens
  siRNA target sequence for DCSTAMP (NM_030788.2,516-534).
ctccactaagtgtatttga

SEQ ID NO: 141590 - DNA, 19 bp, Homo sapiens
  siRNA target sequence for DCSTAMP (NM_030788.2,592-610).
cctggaggcacagctaaat

SEQ ID NO: 141591 - DNA, 19 bp, Homo sapiens
  siRNA target sequence for DCSTAMP (NM_030788.2,725-743).
ggcactggcctcttcatga

SEQ ID NO: 141592 - DNA, 19 bp, Homo sapiens
  siRNA target sequence for DCSTAMP (NM_030788.2,784-802).
ctacatcaccagacaattt

SEQ ID NO: 141593 - DNA, 19 bp, Homo sapiens
  siRNA target sequence for DCSTAMP (NM_030788.2,795-813).
gacaatttgttcagtttga

SEQ ID NO: 141594 - DNA, 19 bp, Homo sapiens
  siRNA target sequence for DCSTAMP (NM_030788.2,843-861).
gtgtgctcccgctgaataa

SEQ ID NO: 141595 - DNA, 19 bp, Homo sapiens
  siRNA target sequence for DCSTAMP (NM_030788.2,881-899).
gtcatcatcccgactttct

SEQ ID NO: 141596 - DNA, 19 bp, Homo sapiens
  siRNA target sequence for DCSTAMP (NM_030788.2,934-952).
gtttttcctccccatactt

SEQ ID NO: 141597 - DNA, 19 bp, Homo sapiens
  siRNA target sequence for DCSTAMP (NM_030788.2,995-1013).
ctgctgtatcggctcattt

SEQ ID NO: 141598 - DNA, 19 bp, Homo sapiens
  siRNA target sequence for DCSTAMP (NM_030788.2,998-1016).
ctgtatcggctcattttct

SEQ ID NO: 141599 - DNA, 19 bp, Homo sapiens
  siRNA target sequence for DCSTAMP (NM_030788.2,1000-1018).
gtatcggctcattttctca

SEQ ID NO: 141600 - DNA, 19 bp, Homo sapiens
  siRNA target sequence for DCSTAMP (NM_030788.2,1044-1062).
cagggtttgaggttcactt

SEQ ID NO: 141601 - DNA, 19 bp, Homo sapiens
  siRNA target sequence for DCSTAMP (NM_030788.2,1082-1100).
caaggaactcaagatatta

SEQ ID NO: 141602 - DNA, 19 bp, Homo sapiens
  siRNA target sequence for DCSTAMP (NM_030788.2,1094-1112).
gatattatccatgattctt

SEQ ID NO: 141603 - DNA, 19 bp, Homo sapiens
  siRNA target sequence for DCSTAMP (NM_030788.2,1155-1173).
caaaattccttctatctga

SEQ ID NO: 141604 - DNA, 19 bp, Homo sapiens
  siRNA target sequence for DCSTAMP (NM_030788.2,1228-1246).
gtcctctatccttatgcaa

SEQ ID NO: 141605 - DNA, 19 bp, Homo sapiens
  siRNA target sequence for DCSTAMP (NM_030788.2,1288-1306).
gaggaagcgcatccaatat

SEQ ID NO: 141606 - DNA, 19 bp, Homo sapiens
  siRNA target sequence for DCSTAMP (NM_030788.2,1362-1380).
gacggctgagtctctatct

SEQ ID NO: 141607 - DNA, 19 bp, Homo sapiens
  siRNA target sequence for DCSTAMP (NM_030788.2,1366-1384).
gctgagtctctatcttaca

SEQ ID NO: 141608 - DNA, 19 bp, Homo sapiens
  siRNA target sequence for DCSTAMP (NM_030788.2,1367-1385).
ctgagtctctatcttacaa

SEQ ID NO: 141609 - DNA, 19 bp, Homo sapiens
  siRNA target sequence for DCSTAMP (NM_030788.2,1375-1393).
ctatcttacaaagattcat

SEQ ID NO: 141610 - DNA, 19 bp, Homo sapiens
  siRNA target sequence for DCSTAMP (NM_030788.2,1442-1460).
gcaagtgcagacaagtcat

SEQ ID NO: 141611 - DNA, 19 bp, Homo sapiens
  siRNA target sequence for DEF6 (NM_022047.2,195-213).
ggaacacttccgagatgat

SEQ ID NO: 141612 - DNA, 19 bp, Homo sapiens
  siRNA target sequence for DEF6 (NM_022047.2,330-348).
gacggccaagaagaactat

SEQ ID NO: 141613 - DNA, 19 bp, Homo sapiens
  siRNA target sequence for DEF6 (NM_022047.2,355-373).
gatagcaacgggaacagta

SEQ ID NO: 141614 - DNA, 19 bp, Homo sapiens
  siRNA target sequence for DEF6 (NM_022047.2,989-1007).
ggaagacgtccctacacaa

SEQ ID NO: 141615 - DNA, 19 bp, Homo sapiens
  siRNA target sequence for DEF6 (NM_022047.2,1377-1395).
gaaagctcggcgagatgaa

SEQ ID NO: 141616 - DNA, 19 bp, Homo sapiens
  siRNA target sequence for DEF6 (NM_022047.2,1385-1403).
ggcgagatgaagaatctgt

SEQ ID NO: 141617 - DNA, 19 bp, Homo sapiens
  siRNA target sequence for DEF6 (NM_022047.2,1646-1664).
ccagcaccaacgtgaaaca

SEQ ID NO: 141618 - DNA, 19 bp, Homo sapiens
  siRNA target sequence for DEF6 (NM_022047.2,1683-1701).
ccggctgatgcatccaatt

SEQ ID NO: 141619 - DNA, 19 bp, Homo sapiens
  siRNA target sequence for DGKA (NM_001345.3,219-237).
ctaataagccccagtgatt

SEQ ID NO: 141620 - DNA, 19 bp, Homo sapiens
  siRNA target sequence for DGKA (NM_001345.3,306-324).
gatggcgagatggctaaat

SEQ ID NO: 141621 - DNA, 19 bp, Homo sapiens
  siRNA target sequence for DGKA (NM_001345.3,441-459).
ggtcactgcttaaatgaga

SEQ ID NO: 141622 - DNA, 19 bp, Homo sapiens
  siRNA target sequence for DGKA (NM_001345.3,526-544).
gtcggccagaagacaagtt

SEQ ID NO: 141623 - DNA, 19 bp, Homo sapiens
  siRNA target sequence for DGKA (NM_001345.3,563-581).
gtacgacacggacagaaat

SEQ ID NO: 141624 - DNA, 19 bp, Homo sapiens
  siRNA target sequence for DGKA (NM_001345.3,846-864).
ccagtctactgcaatctgt

SEQ ID NO: 141625 - DNA, 19 bp, Homo sapiens
  siRNA target sequence for DGKA (NM_001345.3,944-962).
gaaagccctgccttgtgaa

SEQ ID NO: 141626 - DNA, 19 bp, Homo sapiens
  siRNA target sequence for DGKA (NM_001345.3,1043-1061).
ctgcgaccgctgtcagaaa

SEQ ID NO: 141627 - DNA, 19 bp, Homo sapiens
  siRNA target sequence for DGKA (NM_001345.3,1045-1063).
gcgaccgctgtcagaaaaa

SEQ ID NO: 141628 - DNA, 19 bp, Homo sapiens
  siRNA target sequence for DGKA (NM_001345.3,1047-1065).
gaccgctgtcagaaaaaga

SEQ ID NO: 141629 - DNA, 19 bp, Homo sapiens
  siRNA target sequence for DGKA (NM_001345.3,1085-1103).
gaccgggctgcattgtgta

SEQ ID NO: 141630 - DNA, 19 bp, Homo sapiens
  siRNA target sequence for DGKA (NM_001345.3,1165-1183).
ggctgctccgggatcacat

SEQ ID NO: 141631 - DNA, 19 bp, Homo sapiens
  siRNA target sequence for DGKA (NM_001345.3,1222-1240).
ctggaccggatcgtaaaaa

SEQ ID NO: 141632 - DNA, 19 bp, Homo sapiens
  siRNA target sequence for DGKA (NM_001345.3,1224-1242).
ggaccggatcgtaaaaata

SEQ ID NO: 141633 - DNA, 19 bp, Homo sapiens
  siRNA target sequence for DGKA (NM_001345.3,1227-1245).
ccggatcgtaaaaatagca

SEQ ID NO: 141634 - DNA, 19 bp, Homo sapiens
  siRNA target sequence for DGKA (NM_001345.3,1228-1246).
cggatcgtaaaaatagcaa

SEQ ID NO: 141635 - DNA, 19 bp, Homo sapiens
  siRNA target sequence for DGKA (NM_001345.3,1326-1344).
ccacttctcgtctttgtca

SEQ ID NO: 141636 - DNA, 19 bp, Homo sapiens
  siRNA target sequence for DGKA (NM_001345.3,1327-1345).
cacttctcgtctttgtcaa

SEQ ID NO: 141637 - DNA, 19 bp, Homo sapiens
  siRNA target sequence for DGKA (NM_001345.3,1384-1402).
ggaagttccagtatatatt

SEQ ID NO: 141638 - DNA, 19 bp, Homo sapiens
  siRNA target sequence for DGKA (NM_001345.3,1443-1461).
gagatagggctccgattat

SEQ ID NO: 141639 - DNA, 19 bp, Homo sapiens
  siRNA target sequence for DGKA (NM_001345.3,1474-1492).
ctgatagccggattttggt

SEQ ID NO: 141640 - DNA, 19 bp, Homo sapiens
  siRNA target sequence for DGKA (NM_001345.3,1531-1549).
ccattgacaaagctaactt

SEQ ID NO: 141641 - DNA, 19 bp, Homo sapiens
  siRNA target sequence for DGKA (NM_001345.3,1599-1617).
ctggctcgatgcctaagat

SEQ ID NO: 141642 - DNA, 19 bp, Homo sapiens
  siRNA target sequence for DGKA (NM_001345.3,1627-1645).
gttatgaaggacagaatct

SEQ ID NO: 141643 - DNA, 19 bp, Homo sapiens
  siRNA target sequence for DGKA (NM_001345.3,1636-1654).
gacagaatctggcaaagat

SEQ ID NO: 141644 - DNA, 19 bp, Homo sapiens
  siRNA target sequence for DGKA (NM_001345.3,1706-1724).
ggaggtgatacctcaacaa

SEQ ID NO: 141645 - DNA, 19 bp, Homo sapiens
  siRNA target sequence for DGKA (NM_001345.3,1707-1725).
gaggtgatacctcaacaaa

SEQ ID NO: 141646 - DNA, 19 bp, Homo sapiens
  siRNA target sequence for DGKA (NM_001345.3,1709-1727).
ggtgatacctcaacaaact

SEQ ID NO: 141647 - DNA, 19 bp, Homo sapiens
  siRNA target sequence for DGKA (NM_001345.3,1746-1764).
gtcccctttcaaatcatca

SEQ ID NO: 141648 - DNA, 19 bp, Homo sapiens
  siRNA target sequence for DGKA (NM_001345.3,1748-1766).
cccctttcaaatcatcaat

SEQ ID NO: 141649 - DNA, 19 bp, Homo sapiens
  siRNA target sequence for DGKA (NM_001345.3,1749-1767).
ccctttcaaatcatcaata

SEQ ID NO: 141650 - DNA, 19 bp, Homo sapiens
  siRNA target sequence for DGKA (NM_001345.3,1755-1773).
caaatcatcaataactact

SEQ ID NO: 141651 - DNA, 19 bp, Homo sapiens
  siRNA target sequence for DGKA (NM_001345.3,1763-1781).
caataactacttctctatt

SEQ ID NO: 141652 - DNA, 19 bp, Homo sapiens
  siRNA target sequence for DGKA (NM_001345.3,1792-1810).
cctctattgctcatcgatt

SEQ ID NO: 141653 - DNA, 19 bp, Homo sapiens
  siRNA target sequence for DGKA (NM_001345.3,1801-1819).
ctcatcgattccacatcat

SEQ ID NO: 141654 - DNA, 19 bp, Homo sapiens
  siRNA target sequence for DGKA (NM_001345.3,1877-1895).
cgaatttgccacatctgaa

SEQ ID NO: 141655 - DNA, 19 bp, Homo sapiens
  siRNA target sequence for DGKA (NM_001345.3,1878-1896).
gaatttgccacatctgaat

SEQ ID NO: 141656 - DNA, 19 bp, Homo sapiens
  siRNA target sequence for DGKA (NM_001345.3,1893-1911).
gaatccatcttctcaacat

SEQ ID NO: 141657 - DNA, 19 bp, Homo sapiens
  siRNA target sequence for DGKA (NM_001345.3,2050-2068).
gaccccatggggatatcta

SEQ ID NO: 141658 - DNA, 19 bp, Homo sapiens
  siRNA target sequence for DGKA (NM_001345.3,2089-2107).
gtgctacagctaaagtcat

SEQ ID NO: 141659 - DNA, 19 bp, Homo sapiens
  siRNA target sequence for DGKA (NM_001345.3,2134-2152).
gtgtaccagacctaagtga

SEQ ID NO: 141660 - DNA, 19 bp, Homo sapiens
  siRNA target sequence for DGKA (NM_001345.3,2190-2208).
gagatgggccaaatctata

SEQ ID NO: 141661 - DNA, 19 bp, Homo sapiens
  siRNA target sequence for DGKA (NM_001345.3,2275-2293).
cccttcccatgcaaattga

SEQ ID NO: 141662 - DNA, 19 bp, Homo sapiens
  siRNA target sequence for DGKA (NM_001345.3,2310-2328).
cagacgccctgtacaatca

SEQ ID NO: 141663 - DNA, 19 bp, Homo sapiens
  siRNA target sequence for DGKB (NM_004080.1,28-46).
ctcagcccttcggaatttt

SEQ ID NO: 141664 - DNA, 19 bp, Homo sapiens
  siRNA target sequence for DGKB (NM_004080.1,38-56).
cggaattttcccaacttca

SEQ ID NO: 141665 - DNA, 19 bp, Homo sapiens
  siRNA target sequence for DGKB (NM_004080.1,118-136).
ggtgtgcttgcaaagtata

SEQ ID NO: 141666 - DNA, 19 bp, Homo sapiens
  siRNA target sequence for DGKB (NM_004080.1,119-137).
gtgtgcttgcaaagtataa

SEQ ID NO: 141667 - DNA, 19 bp, Homo sapiens
  siRNA target sequence for DGKB (NM_004080.1,140-158).
ctgaagggaaacaagacat

SEQ ID NO: 141668 - DNA, 19 bp, Homo sapiens
  siRNA target sequence for DGKB (NM_004080.1,160-178).
cttaaccaaacaatagatt

SEQ ID NO: 141669 - DNA, 19 bp, Homo sapiens
  siRNA target sequence for DGKB (NM_004080.1,217-235).
gccgagcttcctgatgatt

SEQ ID NO: 141670 - DNA, 19 bp, Homo sapiens
  siRNA target sequence for DGKB (NM_004080.1,218-236).
ccgagcttcctgatgattt

SEQ ID NO: 141671 - DNA, 19 bp, Homo sapiens
  siRNA target sequence for DGKB (NM_004080.1,255-273).
gtcatttagcaacaagttt

SEQ ID NO: 141672 - DNA, 19 bp, Homo sapiens
  siRNA target sequence for DGKB (NM_004080.1,267-285).
caagtttcctcattctagt

SEQ ID NO: 141673 - DNA, 19 bp, Homo sapiens
  siRNA target sequence for DGKB (NM_004080.1,277-295).
cattctagtccaatggtaa

SEQ ID NO: 141674 - DNA, 19 bp, Homo sapiens
  siRNA target sequence for DGKB (NM_004080.1,317-335).
caggcggtctgagaatgaa

SEQ ID NO: 141675 - DNA, 19 bp, Homo sapiens
  siRNA target sequence for DGKB (NM_004080.1,321-339).
cggtctgagaatgaataaa

SEQ ID NO: 141676 - DNA, 19 bp, Homo sapiens
  siRNA target sequence for DGKB (NM_004080.1,380-398).
cgtgttccccagaagtaat

SEQ ID NO: 141677 - DNA, 19 bp, Homo sapiens
  siRNA target sequence for DGKB (NM_004080.1,383-401).
gttccccagaagtaatcca

SEQ ID NO: 141678 - DNA, 19 bp, Homo sapiens
  siRNA target sequence for DGKB (NM_004080.1,451-469).
gaggataagcttgagttta

SEQ ID NO: 141679 - DNA, 19 bp, Homo sapiens
  siRNA target sequence for DGKB (NM_004080.1,510-528).
cagctcggagctagaaaat

SEQ ID NO: 141680 - DNA, 19 bp, Homo sapiens
  siRNA target sequence for DGKB (NM_004080.1,512-530).
gctcggagctagaaaatat

SEQ ID NO: 141681 - DNA, 19 bp, Homo sapiens
  siRNA target sequence for DGKB (NM_004080.1,515-533).
cggagctagaaaatatcat

SEQ ID NO: 141682 - DNA, 19 bp, Homo sapiens
  siRNA target sequence for DGKB (NM_004080.1,567-585).
gtgggatgtcactgaactt

SEQ ID NO: 141683 - DNA, 19 bp, Homo sapiens
  siRNA target sequence for DGKB (NM_004080.1,574-592).
gtcactgaacttaatccaa

SEQ ID NO: 141684 - DNA, 19 bp, Homo sapiens
  siRNA target sequence for DGKB (NM_004080.1,589-607).
ccaatcctccatgaaatga

SEQ ID NO: 141685 - DNA, 19 bp, Homo sapiens
  siRNA target sequence for DGKB (NM_004080.1,590-608).
caatcctccatgaaatgat

SEQ ID NO: 141686 - DNA, 19 bp, Homo sapiens
  siRNA target sequence for DGKB (NM_004080.1,672-690).
gacaacgattccacttctt

SEQ ID NO: 141687 - DNA, 19 bp, Homo sapiens
  siRNA target sequence for DGKB (NM_004080.1,674-692).
caacgattccacttcttgt

SEQ ID NO: 141688 - DNA, 19 bp, Homo sapiens
  siRNA target sequence for DGKB (NM_004080.1,950-968).
gcccaaccaagtgtgataa

SEQ ID NO: 141689 - DNA, 19 bp, Homo sapiens
  siRNA target sequence for DGKB (NM_004080.1,1082-1100).
gacctttgaaggaccatat

SEQ ID NO: 141690 - DNA, 19 bp, Homo sapiens
  siRNA target sequence for DGKB (NM_004080.1,1084-1102).
cctttgaaggaccatattt

SEQ ID NO: 141691 - DNA, 19 bp, Homo sapiens
  siRNA target sequence for DGKB (NM_004080.1,1143-1161).
gcccacttcaggagtttca

SEQ ID NO: 141692 - DNA, 19 bp, Homo sapiens
  siRNA target sequence for DGKB (NM_004080.1,1145-1163).
ccacttcaggagtttcagt

SEQ ID NO: 141693 - DNA, 19 bp, Homo sapiens
  siRNA target sequence for DGKB (NM_004080.1,1246-1264).
caaagagccaactctgtta

SEQ ID NO: 141694 - DNA, 19 bp, Homo sapiens
  siRNA target sequence for DGKB (NM_004080.1,1301-1319).
ctggtactcacccactttt

SEQ ID NO: 141695 - DNA, 19 bp, Homo sapiens
  siRNA target sequence for DGKB (NM_004080.1,1312-1330).
ccacttttagtttttgtga

SEQ ID NO: 141696 - DNA, 19 bp, Homo sapiens
  siRNA target sequence for DGKB (NM_004080.1,1346-1364).
gaaaacaaggagaacgaat

SEQ ID NO: 141697 - DNA, 19 bp, Homo sapiens
  siRNA target sequence for DGKB (NM_004080.1,1357-1375).
gaacgaatttacagaaaat

SEQ ID NO: 141698 - DNA, 19 bp, Homo sapiens
  siRNA target sequence for DGKB (NM_004080.1,1396-1414).
cgtcaggtttacagtcttt

SEQ ID NO: 141699 - DNA, 19 bp, Homo sapiens
  siRNA target sequence for DGKB (NM_004080.1,1518-1536).
catagaaaaggccaatgta

SEQ ID NO: 141700 - DNA, 19 bp, Homo sapiens
  siRNA target sequence for DGKB (NM_004080.1,1674-1692).
gttggacaggtggaagttt

SEQ ID NO: 141701 - DNA, 19 bp, Homo sapiens
  siRNA target sequence for DGKB (NM_004080.1,1683-1701).
gtggaagtttgaagtcata

SEQ ID NO: 141702 - DNA, 19 bp, Homo sapiens
  siRNA target sequence for DGKB (NM_004080.1,1734-1752).
gccttacagtatcatcaat

SEQ ID NO: 141703 - DNA, 19 bp, Homo sapiens
  siRNA target sequence for DGKB (NM_004080.1,1742-1760).
gtatcatcaataattactt

SEQ ID NO: 141704 - DNA, 19 bp, Homo sapiens
  siRNA target sequence for DGKB (NM_004080.1,1896-1914).
ctgcaagaagctacatgaa

SEQ ID NO: 141705 - DNA, 19 bp, Homo sapiens
  siRNA target sequence for DGKB (NM_004080.1,1899-1917).
caagaagctacatgaatct

SEQ ID NO: 141706 - DNA, 19 bp, Homo sapiens
  siRNA target sequence for DGKB (NM_004080.1,1902-1920).
gaagctacatgaatctgta

SEQ ID NO: 141707 - DNA, 19 bp, Homo sapiens
  siRNA target sequence for DGKB (NM_004080.1,1905-1923).
gctacatgaatctgtagaa

SEQ ID NO: 141708 - DNA, 19 bp, Homo sapiens
  siRNA target sequence for DGKB (NM_004080.1,1931-1949).
gtgatggagtacagataga

SEQ ID NO: 141709 - DNA, 19 bp, Homo sapiens
  siRNA target sequence for DGKB (NM_004080.1,1933-1951).
gatggagtacagatagatt

SEQ ID NO: 141710 - DNA, 19 bp, Homo sapiens
  siRNA target sequence for DGKB (NM_004080.1,1964-1982).
ctctggaaggaattgctat

SEQ ID NO: 141711 - DNA, 19 bp, Homo sapiens
  siRNA target sequence for DGKB (NM_004080.1,2017-2035).
ctttggggagagtctaaga

SEQ ID NO: 141712 - DNA, 19 bp, Homo sapiens
  siRNA target sequence for DGKB (NM_004080.1,2022-2040).
gggagagtctaagaaaaga

SEQ ID NO: 141713 - DNA, 19 bp, Homo sapiens
  siRNA target sequence for DGKB (NM_004080.1,2042-2060).
gaagccatcgacgaataga

SEQ ID NO: 141714 - DNA, 19 bp, Homo sapiens
  siRNA target sequence for DGKB (NM_004080.1,2045-2063).
gccatcgacgaatagagaa

SEQ ID NO: 141715 - DNA, 19 bp, Homo sapiens
  siRNA target sequence for DGKB (NM_004080.1,2046-2064).
ccatcgacgaatagagaaa

SEQ ID NO: 141716 - DNA, 19 bp, Homo sapiens
  siRNA target sequence for DGKB (NM_004080.1,2047-2065).
catcgacgaatagagaaaa

SEQ ID NO: 141717 - DNA, 19 bp, Homo sapiens
  siRNA target sequence for DGKB (NM_004080.1,2353-2371).
cctccaaaaaccggtttat

SEQ ID NO: 141718 - DNA, 19 bp, Homo sapiens
  siRNA target sequence for DGKB (NM_004080.1,2354-2372).
ctccaaaaaccggtttatt

SEQ ID NO: 141719 - DNA, 19 bp, Homo sapiens
  siRNA target sequence for DGKB (NM_004080.1,2356-2374).
ccaaaaaccggtttattct

SEQ ID NO: 141720 - DNA, 19 bp, Homo sapiens
  siRNA target sequence for DGKB (NM_004080.1,2380-2398).
ctcgtcaaaaggacaagaa

SEQ ID NO: 141721 - DNA, 19 bp, Homo sapiens
  siRNA target sequence for DGKG (NM_001346.1,559-577).
gaccaactccagaaatatt

SEQ ID NO: 141722 - DNA, 19 bp, Homo sapiens
  siRNA target sequence for DGKG (NM_001346.1,561-579).
ccaactccagaaatattca

SEQ ID NO: 141723 - DNA, 19 bp, Homo sapiens
  siRNA target sequence for DGKG (NM_001346.1,627-645).
gggtgggagcctcaaacaa

SEQ ID NO: 141724 - DNA, 19 bp, Homo sapiens
  siRNA target sequence for DGKG (NM_001346.1,628-646).
ggtgggagcctcaaacaat

SEQ ID NO: 141725 - DNA, 19 bp, Homo sapiens
  siRNA target sequence for DGKG (NM_001346.1,629-647).
gtgggagcctcaaacaata

SEQ ID NO: 141726 - DNA, 19 bp, Homo sapiens
  siRNA target sequence for DGKG (NM_001346.1,632-650).
ggagcctcaaacaatatga

SEQ ID NO: 141727 - DNA, 19 bp, Homo sapiens
  siRNA target sequence for DGKG (NM_001346.1,652-670).
ccacatgagccgattagct

SEQ ID NO: 141728 - DNA, 19 bp, Homo sapiens
  siRNA target sequence for DGKG (NM_001346.1,653-671).
cacatgagccgattagcta

SEQ ID NO: 141729 - DNA, 19 bp, Homo sapiens
  siRNA target sequence for DGKG (NM_001346.1,662-680).
cgattagctatgatgtctt

SEQ ID NO: 141730 - DNA, 19 bp, Homo sapiens
  siRNA target sequence for DGKG (NM_001346.1,813-831).
ggccaacagcgcagatact

SEQ ID NO: 141731 - DNA, 19 bp, Homo sapiens
  siRNA target sequence for DGKG (NM_001346.1,816-834).
caacagcgcagatactaat

SEQ ID NO: 141732 - DNA, 19 bp, Homo sapiens
  siRNA target sequence for DGKG (NM_001346.1,821-839).
gcgcagatactaatataca

SEQ ID NO: 141733 - DNA, 19 bp, Homo sapiens
  siRNA target sequence for DGKG (NM_001346.1,824-842).
cagatactaatatacagaa

SEQ ID NO: 141734 - DNA, 19 bp, Homo sapiens
  siRNA target sequence for DGKG (NM_001346.1,877-895).
gcccctgatactgaatcaa

SEQ ID NO: 141735 - DNA, 19 bp, Homo sapiens
  siRNA target sequence for DGKG (NM_001346.1,955-973).
cccgtccctcggtcttcaa

SEQ ID NO: 141736 - DNA, 19 bp, Homo sapiens
  siRNA target sequence for DGKG (NM_001346.1,1065-1083).
gtttcgcctctatgattca

SEQ ID NO: 141737 - DNA, 19 bp, Homo sapiens
  siRNA target sequence for DGKG (NM_001346.1,1102-1120).
gaccaagcggagatggatt

SEQ ID NO: 141738 - DNA, 19 bp, Homo sapiens
  siRNA target sequence for DGKG (NM_001346.1,1174-1192).
gagctgaggcctatattga

SEQ ID NO: 141739 - DNA, 19 bp, Homo sapiens
  siRNA target sequence for DGKG (NM_001346.1,1219-1237).
gaccgggacggctttgtgt

SEQ ID NO: 141740 - DNA, 19 bp, Homo sapiens
  siRNA target sequence for DGKG (NM_001346.1,1337-1355).
ggaccatgaagcacttcaa

SEQ ID NO: 141741 - DNA, 19 bp, Homo sapiens
  siRNA target sequence for DGKG (NM_001346.1,1467-1485).
cattcctggttgtgtcaaa

SEQ ID NO: 141742 - DNA, 19 bp, Homo sapiens
  siRNA target sequence for DGKG (NM_001346.1,1478-1496).
gtgtcaaaacgtactcaaa

SEQ ID NO: 141743 - DNA, 19 bp, Homo sapiens
  siRNA target sequence for DGKG (NM_001346.1,1564-1582).
cggtgccacaaaagtatca

SEQ ID NO: 141744 - DNA, 19 bp, Homo sapiens
  siRNA target sequence for DGKG (NM_001346.1,1565-1583).
ggtgccacaaaagtatcaa

SEQ ID NO: 141745 - DNA, 19 bp, Homo sapiens
  siRNA target sequence for DGKG (NM_001346.1,1629-1647).
gacgtttcaccgcaaatgt

SEQ ID NO: 141746 - DNA, 19 bp, Homo sapiens
  siRNA target sequence for DGKG (NM_001346.1,1631-1649).
cgtttcaccgcaaatgtga

SEQ ID NO: 141747 - DNA, 19 bp, Homo sapiens
  siRNA target sequence for DGKG (NM_001346.1,1632-1650).
gtttcaccgcaaatgtgaa

SEQ ID NO: 141748 - DNA, 19 bp, Homo sapiens
  siRNA target sequence for DGKG (NM_001346.1,1636-1654).
caccgcaaatgtgaattat

SEQ ID NO: 141749 - DNA, 19 bp, Homo sapiens
  siRNA target sequence for DGKG (NM_001346.1,1760-1778).
ccgccaagggcgaacttgt

SEQ ID NO: 141750 - DNA, 19 bp, Homo sapiens
  siRNA target sequence for DGKG (NM_001346.1,1763-1781).
ccaagggcgaacttgtcat

SEQ ID NO: 141751 - DNA, 19 bp, Homo sapiens
  siRNA target sequence for DGKG (NM_001346.1,1774-1792).
cttgtcatgcagtataaga

SEQ ID NO: 141752 - DNA, 19 bp, Homo sapiens
  siRNA target sequence for DGKG (NM_001346.1,1777-1795).
gtcatgcagtataagatca

SEQ ID NO: 141753 - DNA, 19 bp, Homo sapiens
  siRNA target sequence for DGKG (NM_001346.1,1934-1952).
ctccagggttgaacttttt

SEQ ID NO: 141754 - DNA, 19 bp, Homo sapiens
  siRNA target sequence for DGKG (NM_001346.1,1944-1962).
gaactttttccgtgatact

SEQ ID NO: 141755 - DNA, 19 bp, Homo sapiens
  siRNA target sequence for DGKG (NM_001346.1,2000-2018).
cagttggctggattttgga

SEQ ID NO: 141756 - DNA, 19 bp, Homo sapiens
  siRNA target sequence for DGKG (NM_001346.1,2026-2044).
gataaggccaactttgcaa

SEQ ID NO: 141757 - DNA, 19 bp, Homo sapiens
  siRNA target sequence for DGKG (NM_001346.1,2031-2049).
ggccaactttgcaaagcat

SEQ ID NO: 141758 - DNA, 19 bp, Homo sapiens
  siRNA target sequence for DGKG (NM_001346.1,2067-2085).
gcctcttggaacaggaaat

SEQ ID NO: 141759 - DNA, 19 bp, Homo sapiens
  siRNA target sequence for DGKG (NM_001346.1,2103-2121).
ccgctggggaggaggttat

SEQ ID NO: 141760 - DNA, 19 bp, Homo sapiens
  siRNA target sequence for DGKG (NM_001346.1,2129-2147).
gcagcttgacaaaaatcct

SEQ ID NO: 141761 - DNA, 19 bp, Homo sapiens
  siRNA target sequence for DGKG (NM_001346.1,2240-2258).
catacagcatcatgaacaa

SEQ ID NO: 141762 - DNA, 19 bp, Homo sapiens
  siRNA target sequence for DGKG (NM_001346.1,2244-2262).
cagcatcatgaacaactat

SEQ ID NO: 141763 - DNA, 19 bp, Homo sapiens
  siRNA target sequence for DGKG (NM_001346.1,2376-2394).
cacctcggagacttttgca

SEQ ID NO: 141764 - DNA, 19 bp, Homo sapiens
  siRNA target sequence for DGKG (NM_001346.1,2722-2740).
gtcaccatcaggacaaaca

SEQ ID NO: 141765 - DNA, 19 bp, Homo sapiens
  siRNA target sequence for DGKG (NM_001346.1,2779-2797).
cagccatgttgcacgatta

SEQ ID NO: 141766 - DNA, 19 bp, Homo sapiens
  siRNA target sequence for DGKG (NM_001346.1,2789-2807).
gcacgattaaaattactca

SEQ ID NO: 141767 - DNA, 19 bp, Homo sapiens
  siRNA target sequence for DGKG (NM_001346.1,2867-2885).
gaaggaagagccgttcaaa

SEQ ID NO: 141768 - DNA, 19 bp, Homo sapiens
  siRNA target sequence for DGKG (NM_001346.1,2870-2888).
ggaagagccgttcaaaaga

SEQ ID NO: 141769 - DNA, 19 bp, Homo sapiens
  siRNA target sequence for DKFZp566D234 (NM_020116.2,680-698).
gacagggcaagcagaatgt

SEQ ID NO: 141770 - DNA, 19 bp, Homo sapiens
  siRNA target sequence for DKFZp566D234 (NM_020116.2,701-719).
ctgtatggacctttgcaaa

SEQ ID NO: 141771 - DNA, 19 bp, Homo sapiens
  siRNA target sequence for DKFZp566D234 (NM_020116.2,741-759).
ggatctgacggagaattct

SEQ ID NO: 141772 - DNA, 19 bp, Homo sapiens
  siRNA target sequence for DKFZp566D234 (NM_020116.2,742-760).
gatctgacggagaattcta

SEQ ID NO: 141773 - DNA, 19 bp, Homo sapiens
  siRNA target sequence for DKFZp566D234 (NM_020116.2,809-827).
gattaccattgttcacaat

SEQ ID NO: 141774 - DNA, 19 bp, Homo sapiens
  siRNA target sequence for DKFZp566D234 (NM_020116.2,846-864).
ggagataagtgcaagacta

SEQ ID NO: 141775 - DNA, 19 bp, Homo sapiens
  siRNA target sequence for DKFZp566D234 (NM_020116.2,939-957).
cctaatggcgacgacatat

SEQ ID NO: 141776 - DNA, 19 bp, Homo sapiens
  siRNA target sequence for DKFZp566D234 (NM_020116.2,958-976).
ctcggaagaagctattggt

SEQ ID NO: 141777 - DNA, 19 bp, Homo sapiens
  siRNA target sequence for DKFZp566D234 (NM_020116.2,1007-1025).
cagtaatggacttgtagat

SEQ ID NO: 141778 - DNA, 19 bp, Homo sapiens
  siRNA target sequence for DKFZp566D234 (NM_020116.2,1071-1089).
gatctctttgattgtactt

SEQ ID NO: 141779 - DNA, 19 bp, Homo sapiens
  siRNA target sequence for DKFZp566D234 (NM_020116.2,1084-1102).
gtactttgtatgttctatt

SEQ ID NO: 141780 - DNA, 19 bp, Homo sapiens
  siRNA target sequence for DKFZp566D234 (NM_020116.2,1091-1109).
gtatgttctattgaaatat

SEQ ID NO: 141781 - DNA, 19 bp, Homo sapiens
  siRNA target sequence for DKFZp566D234 (NM_020116.2,1098-1116).
ctattgaaatatgatgatt

SEQ ID NO: 141782 - DNA, 19 bp, Homo sapiens
  siRNA target sequence for DKFZp566D234 (NM_020116.2,1130-1148).
gcacctggctcttgaagaa

SEQ ID NO: 141783 - DNA, 19 bp, Homo sapiens
  siRNA target sequence for DKFZp566D234 (NM_020116.2,1136-1154).
ggctcttgaagaattttat

SEQ ID NO: 141784 - DNA, 19 bp, Homo sapiens
  siRNA target sequence for DKFZp566D234 (NM_020116.2,1263-1281).
ctgagacctcccattatct

SEQ ID NO: 141785 - DNA, 19 bp, Homo sapiens
  siRNA target sequence for DKFZp566D234 (NM_020116.2,1341-1359).
gatgatgggtccttgtata

SEQ ID NO: 141786 - DNA, 19 bp, Homo sapiens
  siRNA target sequence for DKFZp566D234 (NM_020116.2,1400-1418).
ctatgcagatggctatgaa

SEQ ID NO: 141787 - DNA, 19 bp, Homo sapiens
  siRNA target sequence for DKFZp566D234 (NM_020116.2,1548-1566).
cagcttggctggttgaaga

SEQ ID NO: 141788 - DNA, 19 bp, Homo sapiens
  siRNA target sequence for DKFZp566D234 (NM_020116.2,1554-1572).
ggctggttgaagaatggaa

SEQ ID NO: 141789 - DNA, 19 bp, Homo sapiens
  siRNA target sequence for DKFZp566D234 (NM_020116.2,1565-1583).
gaatggaattgatattaca

SEQ ID NO: 141790 - DNA, 19 bp, Homo sapiens
  siRNA target sequence for DKFZp566D234 (NM_020116.2,1620-1638).
ggcagtgaggttcacataa

SEQ ID NO: 141791 - DNA, 19 bp, Homo sapiens
  siRNA target sequence for DKFZp566D234 (NM_020116.2,1624-1642).
gtgaggttcacataagcaa

SEQ ID NO: 141792 - DNA, 19 bp, Homo sapiens
  siRNA target sequence for DKFZp566D234 (NM_020116.2,1639-1657).
gcaatgtgcgctatgaaga

SEQ ID NO: 141793 - DNA, 19 bp, Homo sapiens
  siRNA target sequence for DKFZp566D234 (NM_020116.2,1640-1658).
caatgtgcgctatgaagat

SEQ ID NO: 141794 - DNA, 19 bp, Homo sapiens
  siRNA target sequence for DKFZp566D234 (NM_020116.2,1670-1688).
cacttgtatcgcaaagaat

SEQ ID NO: 141795 - DNA, 19 bp, Homo sapiens
  siRNA target sequence for DKFZp566D234 (NM_020116.2,1745-1763).
gaccctagctaacatatta

SEQ ID NO: 141796 - DNA, 19 bp, Homo sapiens
  siRNA target sequence for DKFZp566D234 (NM_020116.2,1827-1845).
gtgatacaacccatagaat

SEQ ID NO: 141797 - DNA, 19 bp, Homo sapiens
  siRNA target sequence for DKFZp566D234 (NM_020116.2,1859-1877).
gcacattaagcctagtgaa

SEQ ID NO: 141798 - DNA, 19 bp, Homo sapiens
  siRNA target sequence for DKFZp566D234 (NM_020116.2,1860-1878).
cacattaagcctagtgaaa

SEQ ID NO: 141799 - DNA, 19 bp, Homo sapiens
  siRNA target sequence for DKFZp566D234 (NM_020116.2,1943-1961).
gtgggcatcagctgttaat

SEQ ID NO: 141800 - DNA, 19 bp, Homo sapiens
  siRNA target sequence for DKFZp566D234 (NM_020116.2,1948-1966).
catcagctgttaatgtcaa

SEQ ID NO: 141801 - DNA, 19 bp, Homo sapiens
  siRNA target sequence for DKFZp566D234 (NM_020116.2,1953-1971).
gctgttaatgtcaaagaca

SEQ ID NO: 141802 - DNA, 19 bp, Homo sapiens
  siRNA target sequence for DKFZp566D234 (NM_020116.2,2005-2023).
gagtccttattgttgatgt

SEQ ID NO: 141803 - DNA, 19 bp, Homo sapiens
  siRNA target sequence for DKFZp566D234 (NM_020116.2,2024-2042).
gcagtcccaaaaagttgtt

SEQ ID NO: 141804 - DNA, 19 bp, Homo sapiens
  siRNA target sequence for DKFZp566D234 (NM_020116.2,2060-2078).
ccctgtcccagttaaatta

SEQ ID NO: 141805 - DNA, 19 bp, Homo sapiens
  siRNA target sequence for DKFZp566D234 (NM_020116.2,2070-2088).
gttaaattacactatgaca

SEQ ID NO: 141806 - DNA, 19 bp, Homo sapiens
  siRNA target sequence for DKFZp566D234 (NM_020116.2,2140-2158).
caccaacactacaggtaat

SEQ ID NO: 141807 - DNA, 19 bp, Homo sapiens
  siRNA target sequence for DKFZp566D234 (NM_020116.2,2142-2160).
ccaacactacaggtaatta

SEQ ID NO: 141808 - DNA, 19 bp, Homo sapiens
  siRNA target sequence for DKFZp566D234 (NM_020116.2,2269-2287).
cccatatgaggtttggatt

SEQ ID NO: 141809 - DNA, 19 bp, Homo sapiens
  siRNA target sequence for DKFZp566D234 (NM_020116.2,2270-2288).
ccatatgaggtttggattt

SEQ ID NO: 141810 - DNA, 19 bp, Homo sapiens
  siRNA target sequence for DKFZp566D234 (NM_020116.2,2341-2359).
catacatcaagacaattaa

SEQ ID NO: 141811 - DNA, 19 bp, Homo sapiens
  siRNA target sequence for DKFZp566D234 (NM_020116.2,2408-2426).
gggaggctactacttcatt

SEQ ID NO: 141812 - DNA, 19 bp, Homo sapiens
  siRNA target sequence for DKFZp566D234 (NM_020116.2,2468-2486).
catggtggacggtgtaact

SEQ ID NO: 141813 - DNA, 19 bp, Homo sapiens
  siRNA target sequence for DKFZp566D234 (NM_020116.2,2549-2567).
ctaccttgtcagcattaat

SEQ ID NO: 141814 - DNA, 19 bp, Homo sapiens
  siRNA target sequence for DKFZp566D234 (NM_020116.2,2578-2596).
gtcttgtaagggttcagta

SEQ ID NO: 141815 - DNA, 19 bp, Homo sapiens
  siRNA target sequence for DKFZp566D234 (NM_020116.2,2624-2642).
ggcttttgatatttacaca

SEQ ID NO: 141816 - DNA, 19 bp, Homo sapiens
  siRNA target sequence for DKFZp566D234 (NM_020116.2,2625-2643).
gcttttgatatttacacaa

SEQ ID NO: 141817 - DNA, 19 bp, Homo sapiens
  siRNA target sequence for DKFZp566D234 (NM_020116.2,2663-2681).
ggcatttcaaccatccttt

SEQ ID NO: 141818 - DNA, 19 bp, Homo sapiens
  siRNA target sequence for DKFZp566D234 (NM_020116.2,2685-2703).
gaagcccaccaatataaca

SEQ ID NO: 141819 - DNA, 19 bp, Homo sapiens
  siRNA target sequence for DKFZp566D234 (NM_020116.2,2688-2706).
gcccaccaatataacatct

SEQ ID NO: 141820 - DNA, 19 bp, Homo sapiens
  siRNA target sequence for DKFZp566D234 (NM_020116.2,2689-2707).
cccaccaatataacatcta

SEQ ID NO: 141821 - DNA, 19 bp, Homo sapiens
  siRNA target sequence for DKFZp566D234 (NM_020116.2,2713-2731).
gttcaagcacacaaactga

SEQ ID NO: 141822 - DNA, 19 bp, Homo sapiens
  siRNA target sequence for DKFZp566D234 (NM_020116.2,2762-2780).
ggtcaagatgataaagagt

SEQ ID NO: 141823 - DNA, 19 bp, Homo sapiens
  siRNA target sequence for DKFZp566D234 (NM_020116.2,2809-2827).
ggccttggaaccggaaaaa

SEQ ID NO: 141824 - DNA, 19 bp, Homo sapiens
  siRNA target sequence for DKFZp566D234 (NM_020116.2,2845-2863).
gtggcttgtttggtcaata

SEQ ID NO: 141825 - DNA, 19 bp, Homo sapiens
  siRNA target sequence for DKFZp566D234 (NM_020116.2,2848-2866).
gcttgtttggtcaatacct

SEQ ID NO: 141826 - DNA, 19 bp, Homo sapiens
  siRNA target sequence for DKFZp566D234 (NM_020116.2,2878-2896).
ccaaggactctctcttcat

SEQ ID NO: 141827 - DNA, 19 bp, Homo sapiens
  siRNA target sequence for DKFZp566D234 (NM_020116.2,2897-2915).
cctagatggacgactcaat

SEQ ID NO: 141828 - DNA, 19 bp, Homo sapiens
  siRNA target sequence for DKFZp566D234 (NM_020116.2,2898-2916).
ctagatggacgactcaata

SEQ ID NO: 141829 - DNA, 19 bp, Homo sapiens
  siRNA target sequence for DKFZp566D234 (NM_020116.2,2901-2919).
gatggacgactcaataaat

SEQ ID NO: 141830 - DNA, 19 bp, Homo sapiens
  siRNA target sequence for DKFZp566D234 (NM_020116.2,2905-2923).
gacgactcaataaattaaa

SEQ ID NO: 141831 - DNA, 19 bp, Homo sapiens
  siRNA target sequence for DKFZp566D234 (NM_020116.2,2907-2925).
cgactcaataaattaaact

SEQ ID NO: 141832 - DNA, 19 bp, Homo sapiens
  siRNA target sequence for DKFZp586G0123 (NM_013386.2,309-327).
ggacgccgaggagaaaatt

SEQ ID NO: 141833 - DNA, 19 bp, Homo sapiens
  siRNA target sequence for DKFZp586G0123 (NM_013386.2,310-328).
gacgccgaggagaaaattt

SEQ ID NO: 141834 - DNA, 19 bp, Homo sapiens
  siRNA target sequence for DKFZp586G0123 (NM_013386.2,315-333).
cgaggagaaaatttttact

SEQ ID NO: 141835 - DNA, 19 bp, Homo sapiens
  siRNA target sequence for DKFZp586G0123 (NM_013386.2,418-436).
gcatttaagagtttagaca

SEQ ID NO: 141836 - DNA, 19 bp, Homo sapiens
  siRNA target sequence for DKFZp586G0123 (NM_013386.2,486-504).
gacactgggtctgactatt

SEQ ID NO: 141837 - DNA, 19 bp, Homo sapiens
  siRNA target sequence for DKFZp586G0123 (NM_013386.2,492-510).
gggtctgactatttctgaa

SEQ ID NO: 141838 - DNA, 19 bp, Homo sapiens
  siRNA target sequence for DKFZp586G0123 (NM_013386.2,578-596).
ggagagactacttcttatt

SEQ ID NO: 141839 - DNA, 19 bp, Homo sapiens
  siRNA target sequence for DKFZp586G0123 (NM_013386.2,655-673).
gacataggggatagcttaa

SEQ ID NO: 141840 - DNA, 19 bp, Homo sapiens
  siRNA target sequence for DKFZp586G0123 (NM_013386.2,657-675).
cataggggatagcttaact

SEQ ID NO: 141841 - DNA, 19 bp, Homo sapiens
  siRNA target sequence for DKFZp586G0123 (NM_013386.2,778-796).
cctttggaccgtctgaaaa

SEQ ID NO: 141842 - DNA, 19 bp, Homo sapiens
  siRNA target sequence for DKFZp586G0123 (NM_013386.2,784-802).
gaccgtctgaaaatcatga

SEQ ID NO: 141843 - DNA, 19 bp, Homo sapiens
  siRNA target sequence for DKFZp586G0123 (NM_013386.2,804-822).
gcaggttcacggttcaaaa

SEQ ID NO: 141844 - DNA, 19 bp, Homo sapiens
  siRNA target sequence for DKFZp586G0123 (NM_013386.2,805-823).
caggttcacggttcaaaat

SEQ ID NO: 141845 - DNA, 19 bp, Homo sapiens
  siRNA target sequence for DKFZp586G0123 (NM_013386.2,807-825).
ggttcacggttcaaaatca

SEQ ID NO: 141846 - DNA, 19 bp, Homo sapiens
  siRNA target sequence for DKFZp586G0123 (NM_013386.2,813-831).
cggttcaaaatcagacaaa

SEQ ID NO: 141847 - DNA, 19 bp, Homo sapiens
  siRNA target sequence for DKFZp586G0123 (NM_013386.2,847-865).
ggctttcgacagatggtaa

SEQ ID NO: 141848 - DNA, 19 bp, Homo sapiens
  siRNA target sequence for DKFZp586G0123 (NM_013386.2,901-919).
ggtacaaacgtcatcaaaa

SEQ ID NO: 141849 - DNA, 19 bp, Homo sapiens
  siRNA target sequence for DKFZp586G0123 (NM_013386.2,925-943).
cctgagacagctgttaaat

SEQ ID NO: 141850 - DNA, 19 bp, Homo sapiens
  siRNA target sequence for DKFZp586G0123 (NM_013386.2,947-965).
gggcatatgaacagtacaa

SEQ ID NO: 141851 - DNA, 19 bp, Homo sapiens
  siRNA target sequence for DKFZp586G0123 (NM_013386.2,960-978).
gtacaagaagttacttact

SEQ ID NO: 141852 - DNA, 19 bp, Homo sapiens
  siRNA target sequence for DKFZp586G0123 (NM_013386.2,963-981).
caagaagttacttactgaa

SEQ ID NO: 141853 - DNA, 19 bp, Homo sapiens
  siRNA target sequence for DKFZp586G0123 (NM_013386.2,986-1004).
gacaaaaaataggaacatt

SEQ ID NO: 141854 - DNA, 19 bp, Homo sapiens
  siRNA target sequence for DKFZp586G0123 (NM_013386.2,1036-1054).
gcaactgcacagactttta

SEQ ID NO: 141855 - DNA, 19 bp, Homo sapiens
  siRNA target sequence for DKFZp586G0123 (NM_013386.2,1040-1058).
ctgcacagacttttatata

SEQ ID NO: 141856 - DNA, 19 bp, Homo sapiens
  siRNA target sequence for DKFZp586G0123 (NM_013386.2,1045-1063).
cagacttttatatatccaa

SEQ ID NO: 141857 - DNA, 19 bp, Homo sapiens
  siRNA target sequence for DKFZp586G0123 (NM_013386.2,1060-1078).
ccaatggaggttatgaaaa

SEQ ID NO: 141858 - DNA, 19 bp, Homo sapiens
  siRNA target sequence for DKFZp586G0123 (NM_013386.2,1102-1120).
gggcagtactctggaatat

SEQ ID NO: 141859 - DNA, 19 bp, Homo sapiens
  siRNA target sequence for DKFZp586G0123 (NM_013386.2,1107-1125).
gtactctggaatatatgat

SEQ ID NO: 141860 - DNA, 19 bp, Homo sapiens
  siRNA target sequence for DKFZp586G0123 (NM_013386.2,1127-1145).
gtgccaagaagattttgaa

SEQ ID NO: 141861 - DNA, 19 bp, Homo sapiens
  siRNA target sequence for DKFZp586G0123 (NM_013386.2,1153-1171).
ggcttgggagctttttaca

SEQ ID NO: 141862 - DNA, 19 bp, Homo sapiens
  siRNA target sequence for DKFZp586G0123 (NM_013386.2,1184-1202).
ccaatttattaggtatcat

SEQ ID NO: 141863 - DNA, 19 bp, Homo sapiens
  siRNA target sequence for DKFZp586G0123 (NM_013386.2,1228-1246).
gtgtatgagctcttgaagt

SEQ ID NO: 141864 - DNA, 19 bp, Homo sapiens
  siRNA target sequence for DKFZp586G0123 (NM_013386.2,1247-1265).
cctattggctggataattt

SEQ ID NO: 141865 - DNA, 19 bp, Homo sapiens
  siRNA target sequence for DKFZp586G0123 (NM_013386.2,1248-1266).
ctattggctggataatttt

SEQ ID NO: 141866 - DNA, 19 bp, Homo sapiens
  siRNA target sequence for DKFZp586G0123 (NM_013386.2,1306-1324).
ggatgcggtgccttatcca

SEQ ID NO: 141867 - DNA, 19 bp, Homo sapiens
  siRNA target sequence for DKFZp586G0123 (NM_013386.2,1374-1392).
catgcaggctcaagtgtta

SEQ ID NO: 141868 - DNA, 19 bp, Homo sapiens
  siRNA target sequence for DKFZp586G0123 (NM_013386.2,1377-1395).
gcaggctcaagtgttagaa

SEQ ID NO: 141869 - DNA, 19 bp, Homo sapiens
  siRNA target sequence for DKFZp586G0123 (NM_013386.2,1397-1415).
gttccccacagctgaatat

SEQ ID NO: 141870 - DNA, 19 bp, Homo sapiens
  siRNA target sequence for DKFZp586G0123 (NM_013386.2,1401-1419).
cccacagctgaatatggtt

SEQ ID NO: 141871 - DNA, 19 bp, Homo sapiens
  siRNA target sequence for DKFZp586G0123 (NM_013386.2,1420-1438).
ggcctctttcgacgaatta

SEQ ID NO: 141872 - DNA, 19 bp, Homo sapiens
  siRNA target sequence for DKFZp586G0123 (NM_013386.2,1421-1439).
gcctctttcgacgaattat

SEQ ID NO: 141873 - DNA, 19 bp, Homo sapiens
  siRNA target sequence for DKFZp586G0123 (NM_013386.2,1422-1440).
cctctttcgacgaattatt

SEQ ID NO: 141874 - DNA, 19 bp, Homo sapiens
  siRNA target sequence for DKFZp586G0123 (NM_013386.2,1423-1441).
ctctttcgacgaattattt

SEQ ID NO: 141875 - DNA, 19 bp, Homo sapiens
  siRNA target sequence for DKFZp586G0123 (NM_013386.2,1469-1487).
gaggcatcaccccaaactt

SEQ ID NO: 141876 - DNA, 19 bp, Homo sapiens
  siRNA target sequence for DKFZp586G0123 (NM_013386.2,1505-1523).
ctgtaggcatcagttatgt

SEQ ID NO: 141877 - DNA, 19 bp, Homo sapiens
  siRNA target sequence for DKFZp586G0123 (NM_013386.2,1512-1530).
catcagttatgtggtttat

SEQ ID NO: 141878 - DNA, 19 bp, Homo sapiens
  siRNA target sequence for DLK1 (NM_003836.3,215-233).
cctatggggctgaatgctt

SEQ ID NO: 141879 - DNA, 19 bp, Homo sapiens
  siRNA target sequence for DLK1 (NM_003836.3,237-255).
ggcctgcaacccccaaaat

SEQ ID NO: 141880 - DNA, 19 bp, Homo sapiens
  siRNA target sequence for DLK1 (NM_003836.3,242-260).
gcaacccccaaaatggatt

SEQ ID NO: 141881 - DNA, 19 bp, Homo sapiens
  siRNA target sequence for DLK1 (NM_003836.3,257-275).
gattctgcgaggatgacaa

SEQ ID NO: 141882 - DNA, 19 bp, Homo sapiens
  siRNA target sequence for DLK1 (NM_003836.3,394-412).
gacggggagctctgtgata

SEQ ID NO: 141883 - DNA, 19 bp, Homo sapiens
  siRNA target sequence for DLK1 (NM_003836.3,396-414).
cggggagctctgtgataga

SEQ ID NO: 141884 - DNA, 19 bp, Homo sapiens
  siRNA target sequence for DLK1 (NM_003836.3,472-490).
gacgatggcctctatgaat

SEQ ID NO: 141885 - DNA, 19 bp, Homo sapiens
  siRNA target sequence for DLK1 (NM_003836.3,632-650).
ctggcttctcaggcaattt

SEQ ID NO: 141886 - DNA, 19 bp, Homo sapiens
  siRNA target sequence for DLL1 (NM_005618.2,383-401).
ctggggtgttcgaactgaa

SEQ ID NO: 141887 - DNA, 19 bp, Homo sapiens
  siRNA target sequence for DLL1 (NM_005618.2,1073-1091).
ggtactgtgacgagtgtat

SEQ ID NO: 141888 - DNA, 19 bp, Homo sapiens
  siRNA target sequence for DLL1 (NM_005618.2,1315-1333).
gaccccagcccttgtaaga

SEQ ID NO: 141889 - DNA, 19 bp, Homo sapiens
  siRNA target sequence for DLL1 (NM_005618.2,1385-1403).
ccggcttctacggcaaaat

SEQ ID NO: 141890 - DNA, 19 bp, Homo sapiens
  siRNA target sequence for DLL1 (NM_005618.2,1387-1405).
ggcttctacggcaaaatct

SEQ ID NO: 141891 - DNA, 19 bp, Homo sapiens
  siRNA target sequence for DLL1 (NM_005618.2,1389-1407).
cttctacggcaaaatctgt

SEQ ID NO: 141892 - DNA, 19 bp, Homo sapiens
  siRNA target sequence for DLL1 (NM_005618.2,1398-1416).
caaaatctgtgaattgagt

SEQ ID NO: 141893 - DNA, 19 bp, Homo sapiens
  siRNA target sequence for DLL1 (NM_005618.2,1429-1447).
gcggacggcccttgcttta

SEQ ID NO: 141894 - DNA, 19 bp, Homo sapiens
  siRNA target sequence for DLL1 (NM_005618.2,1430-1448).
cggacggcccttgctttaa

SEQ ID NO: 141895 - DNA, 19 bp, Homo sapiens
  siRNA target sequence for DLL1 (NM_005618.2,1504-1522).
ggctactccggcttcaact

SEQ ID NO: 141896 - DNA, 19 bp, Homo sapiens
  siRNA target sequence for DLL1 (NM_005618.2,2228-2246).
cagcggtggactataacct

SEQ ID NO: 141897 - DNA, 19 bp, Homo sapiens
  siRNA target sequence for DLL1 (NM_005618.2,2392-2410).
ccggactcgggctgttcaa

SEQ ID NO: 141898 - DNA, 19 bp, Homo sapiens
  siRNA target sequence for DLL1 (NM_005618.2,2395-2413).
gactcgggctgttcaactt

SEQ ID NO: 141899 - DNA, 19 bp, Homo sapiens
  siRNA target sequence for DLL1 (NM_005618.2,2397-2415).
ctcgggctgttcaacttca

SEQ ID NO: 141900 - DNA, 19 bp, Homo sapiens
  siRNA target sequence for DLL1 (NM_005618.2,2399-2417).
cgggctgttcaacttcaaa

SEQ ID NO: 141901 - DNA, 19 bp, Homo sapiens
  siRNA target sequence for DLL1 (NM_005618.2,2400-2418).
gggctgttcaacttcaaaa

SEQ ID NO: 141902 - DNA, 19 bp, Homo sapiens
  siRNA target sequence for DLL1 (NM_005618.2,2402-2420).
gctgttcaacttcaaaaga

SEQ ID NO: 141903 - DNA, 19 bp, Homo sapiens
  siRNA target sequence for DLL1 (NM_005618.2,2431-2449).
cagtcggtgtacgtcatat

SEQ ID NO: 141904 - DNA, 19 bp, Homo sapiens
  siRNA target sequence for DLL1 (NM_005618.2,2461-2479).
gatgagtgcgtcatagcaa

SEQ ID NO: 141905 - DNA, 19 bp, Homo sapiens
  siRNA target sequence for DLL3 (NM_016941.1,47-65).
gtgatcctagcgctcattt

SEQ ID NO: 141906 - DNA, 19 bp, Homo sapiens
  siRNA target sequence for DLL3 (NM_016941.1,633-651).
cgctcgaggacgaatgtga

SEQ ID NO: 141907 - DNA, 19 bp, Homo sapiens
  siRNA target sequence for DLL3 (NM_016941.1,1631-1649).
gatgcactcaacaacctaa

SEQ ID NO: 141908 - DNA, 19 bp, Homo sapiens
  siRNA target sequence for DLL3 (NM_016941.1,1676-1694).
ccgagctcgtccgtagatt

SEQ ID NO: 141909 - DNA, 19 bp, Homo sapiens
  siRNA target sequence for DLL3 (NM_016941.1,1680-1698).
gctcgtccgtagattggaa

SEQ ID NO: 141910 - DNA, 19 bp, Homo sapiens
  siRNA target sequence for DLL3 (NM_016941.1,1681-1699).
ctcgtccgtagattggaat

SEQ ID NO: 141911 - DNA, 19 bp, Homo sapiens
  siRNA target sequence for DLL3 (NM_016941.1,1695-1713).
ggaatcgccctgaagatgt

SEQ ID NO: 141912 - DNA, 19 bp, Homo sapiens
  siRNA target sequence for DLL3 (NM_016941.1,1696-1714).
gaatcgccctgaagatgta

SEQ ID NO: 141913 - DNA, 19 bp, Homo sapiens
  siRNA target sequence for DLL3 (NM_016941.1,1813-1831).
gaggcagcacctgcttttt

SEQ ID NO: 141914 - DNA, 19 bp, Homo sapiens
  siRNA target sequence for DLL4 (NM_019074.2,627-645).
ctccaactgcccttcaatt

SEQ ID NO: 141915 - DNA, 19 bp, Homo sapiens
  siRNA target sequence for DLL4 (NM_019074.2,771-789).
gtgggtcagaactggttat

SEQ ID NO: 141916 - DNA, 19 bp, Homo sapiens
  siRNA target sequence for DLL4 (NM_019074.2,814-832).
caaggctgcgctactctta

SEQ ID NO: 141917 - DNA, 19 bp, Homo sapiens
  siRNA target sequence for DLL4 (NM_019074.2,921-939).
cagccagatggcaacttgt

SEQ ID NO: 141918 - DNA, 19 bp, Homo sapiens
  siRNA target sequence for DLL4 (NM_019074.2,950-968).
cggttggactggggaatat

SEQ ID NO: 141919 - DNA, 19 bp, Homo sapiens
  siRNA target sequence for DLL4 (NM_019074.2,951-969).
ggttggactggggaatatt

SEQ ID NO: 141920 - DNA, 19 bp, Homo sapiens
  siRNA target sequence for DLL4 (NM_019074.2,972-990).
caacagcctatctgtcttt

SEQ ID NO: 141921 - DNA, 19 bp, Homo sapiens
  siRNA target sequence for DLL4 (NM_019074.2,1063-1081).
ggctgtgtaacgaatgcat

SEQ ID NO: 141922 - DNA, 19 bp, Homo sapiens
  siRNA target sequence for DLL4 (NM_019074.2,1367-1385).
gtgtcctccgggctactat

SEQ ID NO: 141923 - DNA, 19 bp, Homo sapiens
  siRNA target sequence for DLL4 (NM_019074.2,1382-1400).
ctatggcctgcattgtgaa

SEQ ID NO: 141924 - DNA, 19 bp, Homo sapiens
  siRNA target sequence for DLL4 (NM_019074.2,1421-1439).
cgactccccctgcttcaat

SEQ ID NO: 141925 - DNA, 19 bp, Homo sapiens
  siRNA target sequence for DLL4 (NM_019074.2,1469-1487).
ggccaactatgcttgtgaa

SEQ ID NO: 141926 - DNA, 19 bp, Homo sapiens
  siRNA target sequence for DLL4 (NM_019074.2,1470-1488).
gccaactatgcttgtgaat

SEQ ID NO: 141927 - DNA, 19 bp, Homo sapiens
  siRNA target sequence for DLL4 (NM_019074.2,1510-1528).
ccaactgcgagaagaaagt

SEQ ID NO: 141928 - DNA, 19 bp, Homo sapiens
  siRNA target sequence for DLL4 (NM_019074.2,2194-2212).
ggaccatgccaggaaagtt

SEQ ID NO: 141929 - DNA, 19 bp, Homo sapiens
  siRNA target sequence for DLL4 (NM_019074.2,2195-2213).
gaccatgccaggaaagttt

SEQ ID NO: 141930 - DNA, 19 bp, Homo sapiens
  siRNA target sequence for DLL4 (NM_019074.2,2244-2262).
gcgccactgcggttacaca

SEQ ID NO: 141931 - DNA, 19 bp, Homo sapiens
  siRNA target sequence for DLL4 (NM_019074.2,2270-2288).
gccagagtgtcggatatca

SEQ ID NO: 141932 - DNA, 19 bp, Homo sapiens
  siRNA target sequence for DMP1 (NM_004407.1,151-169).
ccagtaaccaggtatcaaa

SEQ ID NO: 141933 - DNA, 19 bp, Homo sapiens
  siRNA target sequence for DMP1 (NM_004407.1,152-170).
cagtaaccaggtatcaaaa

SEQ ID NO: 141934 - DNA, 19 bp, Homo sapiens
  siRNA target sequence for DMP1 (NM_004407.1,158-176).
ccaggtatcaaaataatga

SEQ ID NO: 141935 - DNA, 19 bp, Homo sapiens
  siRNA target sequence for DMP1 (NM_004407.1,327-345).
gggctctgatgatcatcaa

SEQ ID NO: 141936 - DNA, 19 bp, Homo sapiens
  siRNA target sequence for DMP1 (NM_004407.1,328-346).
ggctctgatgatcatcaat

SEQ ID NO: 141937 - DNA, 19 bp, Homo sapiens
  siRNA target sequence for DMP1 (NM_004407.1,332-350).
ctgatgatcatcaatacat

SEQ ID NO: 141938 - DNA, 19 bp, Homo sapiens
  siRNA target sequence for DMP1 (NM_004407.1,492-510).
ctccagactgggaagtgat

SEQ ID NO: 141939 - DNA, 19 bp, Homo sapiens
  siRNA target sequence for DMP1 (NM_004407.1,587-605).
gtgagagcagggaacttga

SEQ ID NO: 141940 - DNA, 19 bp, Homo sapiens
  siRNA target sequence for DMP1 (NM_004407.1,591-609).
gagcagggaacttgacaat

SEQ ID NO: 141941 - DNA, 19 bp, Homo sapiens
  siRNA target sequence for DMP1 (NM_004407.1,593-611).
gcagggaacttgacaatga

SEQ ID NO: 141942 - DNA, 19 bp, Homo sapiens
  siRNA target sequence for DMP1 (NM_004407.1,803-821).
caggcatgaaatcaaaaga

SEQ ID NO: 141943 - DNA, 19 bp, Homo sapiens
  siRNA target sequence for DMP1 (NM_004407.1,840-858).
gcaagcaaacactcaagat

SEQ ID NO: 141944 - DNA, 19 bp, Homo sapiens
  siRNA target sequence for DMP1 (NM_004407.1,841-859).
caagcaaacactcaagatt

SEQ ID NO: 141945 - DNA, 19 bp, Homo sapiens
  siRNA target sequence for DMP1 (NM_004407.1,943-961).
cttgatgacaacaacacaa

SEQ ID NO: 141946 - DNA, 19 bp, Homo sapiens
  siRNA target sequence for DMP1 (NM_004407.1,1181-1199).
gtgagtccaggggagataa

SEQ ID NO: 141947 - DNA, 19 bp, Homo sapiens
  siRNA target sequence for DMP1 (NM_004407.1,1202-1220).
ccgaccccacaactagtta

SEQ ID NO: 141948 - DNA, 19 bp, Homo sapiens
  siRNA target sequence for DMP1 (NM_004407.1,1203-1221).
cgaccccacaactagttat

SEQ ID NO: 141949 - DNA, 19 bp, Homo sapiens
  siRNA target sequence for DMP1 (NM_004407.1,1206-1224).
ccccacaactagttatgta

SEQ ID NO: 141950 - DNA, 19 bp, Homo sapiens
  siRNA target sequence for DMP1 (NM_004407.1,1208-1226).
ccacaactagttatgtaga

SEQ ID NO: 141951 - DNA, 19 bp, Homo sapiens
  siRNA target sequence for DMP1 (NM_004407.1,1209-1227).
cacaactagttatgtagaa

SEQ ID NO: 141952 - DNA, 19 bp, Homo sapiens
  siRNA target sequence for DMP1 (NM_004407.1,1500-1518).
ctccacggagagcaaatca

SEQ ID NO: 141953 - DNA, 19 bp, Homo sapiens
  siRNA target sequence for DMP1 (NM_004407.1,1528-1546).
gaagatggccagttgaaaa

SEQ ID NO: 141954 - DNA, 19 bp, Homo sapiens
  siRNA target sequence for DMP1 (NM_004407.1,1539-1557).
gttgaaaaacattgagata

SEQ ID NO: 141955 - DNA, 19 bp, Homo sapiens
  siRNA target sequence for DMP1 (NM_004407.1,1554-1572).
gatagagagccggaaatta

SEQ ID NO: 141956 - DNA, 19 bp, Homo sapiens
  siRNA target sequence for DMP1 (NM_004407.1,1560-1578).
gagccggaaattaacagtt

SEQ ID NO: 141957 - DNA, 19 bp, Homo sapiens
  siRNA target sequence for DMP1 (NM_004407.1,1563-1581).
ccggaaattaacagttgat

SEQ ID NO: 141958 - DNA, 19 bp, Homo sapiens
  siRNA target sequence for DMP1 (NM_004407.1,1574-1592).
cagttgatgcctatcacaa

SEQ ID NO: 141959 - DNA, 19 bp, Homo sapiens
  siRNA target sequence for DNER (NM_139072.2,676-694).
cgaaaacagggcagaaagt

SEQ ID NO: 141960 - DNA, 19 bp, Homo sapiens
  siRNA target sequence for DNER (NM_139072.2,685-703).
ggcagaaagttgtagaaat

SEQ ID NO: 141961 - DNA, 19 bp, Homo sapiens
  siRNA target sequence for DNER (NM_139072.2,831-849).
gccactgcctcactgattt

SEQ ID NO: 141962 - DNA, 19 bp, Homo sapiens
  siRNA target sequence for DNER (NM_139072.2,832-850).
ccactgcctcactgatttt

SEQ ID NO: 141963 - DNA, 19 bp, Homo sapiens
  siRNA target sequence for DNER (NM_139072.2,956-974).
gctcgccttggggaataat

SEQ ID NO: 141964 - DNA, 19 bp, Homo sapiens
  siRNA target sequence for DNER (NM_139072.2,996-1014).
gattctgtgactaagtcta

SEQ ID NO: 141965 - DNA, 19 bp, Homo sapiens
  siRNA target sequence for DNER (NM_139072.2,1066-1084).
gggagagtcacgcaaatga

SEQ ID NO: 141966 - DNA, 19 bp, Homo sapiens
  siRNA target sequence for DNER (NM_139072.2,1068-1086).
gagagtcacgcaaatgact

SEQ ID NO: 141967 - DNA, 19 bp, Homo sapiens
  siRNA target sequence for DNER (NM_139072.2,1121-1139).
gccgtcagaggcaactttt

SEQ ID NO: 141968 - DNA, 19 bp, Homo sapiens
  siRNA target sequence for DNER (NM_139072.2,1122-1140).
ccgtcagaggcaacttttt

SEQ ID NO: 141969 - DNA, 19 bp, Homo sapiens
  siRNA target sequence for DNER (NM_139072.2,1158-1176).
cagtacgtgggtactttct

SEQ ID NO: 141970 - DNA, 19 bp, Homo sapiens
  siRNA target sequence for DNER (NM_139072.2,1160-1178).
gtacgtgggtactttctgt

SEQ ID NO: 141971 - DNA, 19 bp, Homo sapiens
  siRNA target sequence for DNER (NM_139072.2,1191-1209).
gcttgccagaggaaacctt

SEQ ID NO: 141972 - DNA, 19 bp, Homo sapiens
  siRNA target sequence for DNER (NM_139072.2,1217-1235).
caacgcgagctgtattgat

SEQ ID NO: 141973 - DNA, 19 bp, Homo sapiens
  siRNA target sequence for DNER (NM_139072.2,1222-1240).
cgagctgtattgatgcaaa

SEQ ID NO: 141974 - DNA, 19 bp, Homo sapiens
  siRNA target sequence for DNER (NM_139072.2,1303-1321).
gccagtccaagattgatta

SEQ ID NO: 141975 - DNA, 19 bp, Homo sapiens
  siRNA target sequence for DNER (NM_139072.2,1347-1365).
ggagcaacatgcatttcca

SEQ ID NO: 141976 - DNA, 19 bp, Homo sapiens
  siRNA target sequence for DNER (NM_139072.2,1403-1421).
cttcggatctgcttgtgaa

SEQ ID NO: 141977 - DNA, 19 bp, Homo sapiens
  siRNA target sequence for DNER (NM_139072.2,1406-1424).
cggatctgcttgtgaagaa

SEQ ID NO: 141978 - DNA, 19 bp, Homo sapiens
  siRNA target sequence for DNER (NM_139072.2,1479-1497).
gacggggtacactttacct

SEQ ID NO: 141979 - DNA, 19 bp, Homo sapiens
  siRNA target sequence for DNER (NM_139072.2,1525-1543).
cgacctgtgcccagcttat

SEQ ID NO: 141980 - DNA, 19 bp, Homo sapiens
  siRNA target sequence for DNER (NM_139072.2,1526-1544).
gacctgtgcccagcttatt

SEQ ID NO: 141981 - DNA, 19 bp, Homo sapiens
  siRNA target sequence for DNER (NM_139072.2,1693-1711).
cctgcagggacctcgttaa

SEQ ID NO: 141982 - DNA, 19 bp, Homo sapiens
  siRNA target sequence for DNER (NM_139072.2,1704-1722).
ctcgttaatggctatgagt

SEQ ID NO: 141983 - DNA, 19 bp, Homo sapiens
  siRNA target sequence for DNER (NM_139072.2,1866-1884).
gagtgcgacattgacataa

SEQ ID NO: 141984 - DNA, 19 bp, Homo sapiens
  siRNA target sequence for DNER (NM_139072.2,1870-1888).
gcgacattgacataaatga

SEQ ID NO: 141985 - DNA, 19 bp, Homo sapiens
  siRNA target sequence for DNER (NM_139072.2,1932-1950).
cagcccaatggttataact

SEQ ID NO: 141986 - DNA, 19 bp, Homo sapiens
  siRNA target sequence for DNER (NM_139072.2,2041-2059).
cacggcactccctctacat

SEQ ID NO: 141987 - DNA, 19 bp, Homo sapiens
  siRNA target sequence for DNER (NM_139072.2,2077-2095).
gcgtggccttcatccttat

SEQ ID NO: 141988 - DNA, 19 bp, Homo sapiens
  siRNA target sequence for DNER (NM_139072.2,2124-2142).
cgcatcagccgcattgaat

SEQ ID NO: 141989 - DNA, 19 bp, Homo sapiens
  siRNA target sequence for DNER (NM_139072.2,2125-2143).
gcatcagccgcattgaata

SEQ ID NO: 141990 - DNA, 19 bp, Homo sapiens
  siRNA target sequence for DNER (NM_139072.2,2229-2247).
cggcatgccaggtttggaa

SEQ ID NO: 141991 - DNA, 19 bp, Homo sapiens
  siRNA target sequence for DNER (NM_139072.2,2257-2275).
ggcctgcaatgtatgatgt

SEQ ID NO: 141992 - DNA, 19 bp, Homo sapiens
  siRNA target sequence for DNER (NM_139072.2,2285-2303).
cgcctatgaagattacagt

SEQ ID NO: 141993 - DNA, 19 bp, Homo sapiens
  siRNA target sequence for DNER (NM_139072.2,2316-2334).
cccttggtcacactgatta

SEQ ID NO: 141994 - DNA, 19 bp, Homo sapiens
  siRNA target sequence for DSC1 (NM_004948.2,316-334).
ctctctcctggttttaaca

SEQ ID NO: 141995 - DNA, 19 bp, Homo sapiens
  siRNA target sequence for DSC1 (NM_004948.2,322-340).
cctggttttaacattactt

SEQ ID NO: 141996 - DNA, 19 bp, Homo sapiens
  siRNA target sequence for DSC1 (NM_004948.2,342-360).
gcgatgcttgtcagaaagt

SEQ ID NO: 141997 - DNA, 19 bp, Homo sapiens
  siRNA target sequence for DSC1 (NM_004948.2,343-361).
cgatgcttgtcagaaagtt

SEQ ID NO: 141998 - DNA, 19 bp, Homo sapiens
  siRNA target sequence for DSC1 (NM_004948.2,344-362).
gatgcttgtcagaaagttt

SEQ ID NO: 141999 - DNA, 19 bp, Homo sapiens
  siRNA target sequence for DSC1 (NM_004948.2,479-497).
gaagatggctcaatttaca

SEQ ID NO: 142000 - DNA, 19 bp, Homo sapiens
  siRNA target sequence for DSC1 (NM_004948.2,482-500).
gatggctcaatttacacaa

SEQ ID NO: 142001 - DNA, 19 bp, Homo sapiens
  siRNA target sequence for DSC1 (NM_004948.2,487-505).
ctcaatttacacaacacat

SEQ ID NO: 142002 - DNA, 19 bp, Homo sapiens
  siRNA target sequence for DSC1 (NM_004948.2,564-582).
gacgggaacaacaagagat

SEQ ID NO: 142003 - DNA, 19 bp, Homo sapiens
  siRNA target sequence for DSC1 (NM_004948.2,566-584).
cgggaacaacaagagataa

SEQ ID NO: 142004 - DNA, 19 bp, Homo sapiens
  siRNA target sequence for DSC1 (NM_004948.2,697-715).
gaactcgttgggtccattt

SEQ ID NO: 142005 - DNA, 19 bp, Homo sapiens
  siRNA target sequence for DSC1 (NM_004948.2,722-740).
cacgttcagcagatccaat

SEQ ID NO: 142006 - DNA, 19 bp, Homo sapiens
  siRNA target sequence for DSC1 (NM_004948.2,783-801).
ggccaggcgtggacaaaga

SEQ ID NO: 142007 - DNA, 19 bp, Homo sapiens
  siRNA target sequence for DSC1 (NM_004948.2,784-802).
gccaggcgtggacaaagaa

SEQ ID NO: 142008 - DNA, 19 bp, Homo sapiens
  siRNA target sequence for DSC1 (NM_004948.2,793-811).
ggacaaagaacccttcaat

SEQ ID NO: 142009 - DNA, 19 bp, Homo sapiens
  siRNA target sequence for DSC1 (NM_004948.2,856-874).
gagcattgaccgtgagaaa

SEQ ID NO: 142010 - DNA, 19 bp, Homo sapiens
  siRNA target sequence for DSC1 (NM_004948.2,887-905).
gcgttatatggctatgcaa

SEQ ID NO: 142011 - DNA, 19 bp, Homo sapiens
  siRNA target sequence for DSC1 (NM_004948.2,992-1010).
cacagagtgactatcttta

SEQ ID NO: 142012 - DNA, 19 bp, Homo sapiens
  siRNA target sequence for DSC1 (NM_004948.2,1085-1103).
ctccatactcgtctgaaat

SEQ ID NO: 142013 - DNA, 19 bp, Homo sapiens
  siRNA target sequence for DSC1 (NM_004948.2,1087-1105).
ccatactcgtctgaaatat

SEQ ID NO: 142014 - DNA, 19 bp, Homo sapiens
  siRNA target sequence for DSC1 (NM_004948.2,1088-1106).
catactcgtctgaaatata

SEQ ID NO: 142015 - DNA, 19 bp, Homo sapiens
  siRNA target sequence for DSC1 (NM_004948.2,1247-1265).
ggtcagcctttcggtttat

SEQ ID NO: 142016 - DNA, 19 bp, Homo sapiens
  siRNA target sequence for DSC1 (NM_004948.2,1248-1266).
gtcagcctttcggtttatt

SEQ ID NO: 142017 - DNA, 19 bp, Homo sapiens
  siRNA target sequence for DSC1 (NM_004948.2,1252-1270).
gcctttcggtttatttaat

SEQ ID NO: 142018 - DNA, 19 bp, Homo sapiens
  siRNA target sequence for DSC1 (NM_004948.2,1324-1342).
cacagaaacttcttatgtt

SEQ ID NO: 142019 - DNA, 19 bp, Homo sapiens
  siRNA target sequence for DSC1 (NM_004948.2,1362-1380).
gaattgacgtggagatttt

SEQ ID NO: 142020 - DNA, 19 bp, Homo sapiens
  siRNA target sequence for DSC1 (NM_004948.2,1423-1441).
ctcaaaggctgtatacaaa

SEQ ID NO: 142021 - DNA, 19 bp, Homo sapiens
  siRNA target sequence for DSC1 (NM_004948.2,1463-1481).
ggaaacttcataattagca

SEQ ID NO: 142022 - DNA, 19 bp, Homo sapiens
  siRNA target sequence for DSC1 (NM_004948.2,1482-1500).
cagatccaaatacaaatga

SEQ ID NO: 142023 - DNA, 19 bp, Homo sapiens
  siRNA target sequence for DSC1 (NM_004948.2,1503-1521).
gagtgctgtgtgttgtcaa

SEQ ID NO: 142024 - DNA, 19 bp, Homo sapiens
  siRNA target sequence for DSC1 (NM_004948.2,1512-1530).
gtgttgtcaagccattgaa

SEQ ID NO: 142025 - DNA, 19 bp, Homo sapiens
  siRNA target sequence for DSC1 (NM_004948.2,1535-1553).
gaagtcaatcgccaagtta

SEQ ID NO: 142026 - DNA, 19 bp, Homo sapiens
  siRNA target sequence for DSC1 (NM_004948.2,1538-1556).
gtcaatcgccaagttattt

SEQ ID NO: 142027 - DNA, 19 bp, Homo sapiens
  siRNA target sequence for DSC1 (NM_004948.2,1632-1650).
ctgtcaccgttaaaattat

SEQ ID NO: 142028 - DNA, 19 bp, Homo sapiens
  siRNA target sequence for DSC1 (NM_004948.2,1676-1694).
caccctccagtgaaagtta

SEQ ID NO: 142029 - DNA, 19 bp, Homo sapiens
  siRNA target sequence for DSC1 (NM_004948.2,1678-1696).
ccctccagtgaaagttatt

SEQ ID NO: 142030 - DNA, 19 bp, Homo sapiens
  siRNA target sequence for DSC1 (NM_004948.2,1745-1763).
gcactggacccggaaatat

SEQ ID NO: 142031 - DNA, 19 bp, Homo sapiens
  siRNA target sequence for DSC1 (NM_004948.2,1772-1790).
gaaggcttaaggtatcaga

SEQ ID NO: 142032 - DNA, 19 bp, Homo sapiens
  siRNA target sequence for DSC1 (NM_004948.2,1829-1847).
cacactggcgacttgagaa

SEQ ID NO: 142033 - DNA, 19 bp, Homo sapiens
  siRNA target sequence for DSC1 (NM_004948.2,1835-1853).
ggcgacttgagaactctaa

SEQ ID NO: 142034 - DNA, 19 bp, Homo sapiens
  siRNA target sequence for DSC1 (NM_004948.2,1837-1855).
cgacttgagaactctaaaa

SEQ ID NO: 142035 - DNA, 19 bp, Homo sapiens
  siRNA target sequence for DSC1 (NM_004948.2,1845-1863).
gaactctaaaagtactaga

SEQ ID NO: 142036 - DNA, 19 bp, Homo sapiens
  siRNA target sequence for DSC1 (NM_004948.2,1859-1877).
ctagatagagaatccaaat

SEQ ID NO: 142037 - DNA, 19 bp, Homo sapiens
  siRNA target sequence for DSC1 (NM_004948.2,1935-1953).
cttgcactggaacattagt

SEQ ID NO: 142038 - DNA, 19 bp, Homo sapiens
  siRNA target sequence for DSC1 (NM_004948.2,1938-1956).
gcactggaacattagtagt

SEQ ID NO: 142039 - DNA, 19 bp, Homo sapiens
  siRNA target sequence for DSC1 (NM_004948.2,1947-1965).
cattagtagttcatttgga

SEQ ID NO: 142040 - DNA, 19 bp, Homo sapiens
  siRNA target sequence for DSC1 (NM_004948.2,1952-1970).
gtagttcatttggatgatt

SEQ ID NO: 142041 - DNA, 19 bp, Homo sapiens
  siRNA target sequence for DSC1 (NM_004948.2,1975-1993).
cgatcacgcacctcaaatt

SEQ ID NO: 142042 - DNA, 19 bp, Homo sapiens
  siRNA target sequence for DSC1 (NM_004948.2,1979-1997).
cacgcacctcaaattgaca

SEQ ID NO: 142043 - DNA, 19 bp, Homo sapiens
  siRNA target sequence for DSC1 (NM_004948.2,1981-1999).
cgcacctcaaattgacaaa

SEQ ID NO: 142044 - DNA, 19 bp, Homo sapiens
  siRNA target sequence for DSC1 (NM_004948.2,2003-2021).
gtgaccatttgtcagaata

SEQ ID NO: 142045 - DNA, 19 bp, Homo sapiens
  siRNA target sequence for DSC1 (NM_004948.2,2005-2023).
gaccatttgtcagaataat

SEQ ID NO: 142046 - DNA, 19 bp, Homo sapiens
  siRNA target sequence for DSC1 (NM_004948.2,2017-2035).
gaataatgaggattttgct

SEQ ID NO: 142047 - DNA, 19 bp, Homo sapiens
  siRNA target sequence for DSC1 (NM_004948.2,2084-2102).
caattctttctggataatt

SEQ ID NO: 142048 - DNA, 19 bp, Homo sapiens
  siRNA target sequence for DSC1 (NM_004948.2,2157-2175).
gtcaacggcaaaatcttga

SEQ ID NO: 142049 - DNA, 19 bp, Homo sapiens
  siRNA target sequence for DSC1 (NM_004948.2,2162-2180).
cggcaaaatcttgattata

SEQ ID NO: 142050 - DNA, 19 bp, Homo sapiens
  siRNA target sequence for DSC1 (NM_004948.2,2220-2238).
gtttagttgcaacacatat

SEQ ID NO: 142051 - DNA, 19 bp, Homo sapiens
  siRNA target sequence for DSC1 (NM_004948.2,2304-2322).
gagacgttagaccaaatgt

SEQ ID NO: 142052 - DNA, 19 bp, Homo sapiens
  siRNA target sequence for DSC1 (NM_004948.2,2308-2326).
cgttagaccaaatgtaata

SEQ ID NO: 142053 - DNA, 19 bp, Homo sapiens
  siRNA target sequence for DSC1 (NM_004948.2,2334-2352).
gatgggctattcttgctat

SEQ ID NO: 142054 - DNA, 19 bp, Homo sapiens
  siRNA target sequence for DSC1 (NM_004948.2,2354-2372).
gtgttgggttctgtattgt

SEQ ID NO: 142055 - DNA, 19 bp, Homo sapiens
  siRNA target sequence for DSC1 (NM_004948.2,2356-2374).
gttgggttctgtattgtta

SEQ ID NO: 142056 - DNA, 19 bp, Homo sapiens
  siRNA target sequence for DSC1 (NM_004948.2,2409-2427).
ctaagagaacagtcaagaa

SEQ ID NO: 142057 - DNA, 19 bp, Homo sapiens
  siRNA target sequence for DSC1 (NM_004948.2,2441-2459).
gacatagcccagcaaaatt

SEQ ID NO: 142058 - DNA, 19 bp, Homo sapiens
  siRNA target sequence for DSC1 (NM_004948.2,2443-2461).
catagcccagcaaaattta

SEQ ID NO: 142059 - DNA, 19 bp, Homo sapiens
  siRNA target sequence for DSC1 (NM_004948.2,2492-2510).
gaagtaacggaagcaaata

SEQ ID NO: 142060 - DNA, 19 bp, Homo sapiens
  siRNA target sequence for DSC1 (NM_004948.2,2499-2517).
cggaagcaaatattagact

SEQ ID NO: 142061 - DNA, 19 bp, Homo sapiens
  siRNA target sequence for DSC1 (NM_004948.2,2521-2539).
catgcagacatccaacatt

SEQ ID NO: 142062 - DNA, 19 bp, Homo sapiens
  siRNA target sequence for DSC1 (NM_004948.2,2609-2627).
gtcaaaggaggctacactt

SEQ ID NO: 142063 - DNA, 19 bp, Homo sapiens
  siRNA target sequence for DSC1 (NM_004948.2,2615-2633).
ggaggctacactttggatt

SEQ ID NO: 142064 - DNA, 19 bp, Homo sapiens
  siRNA target sequence for DSC1 (NM_004948.2,2619-2637).
gctacactttggattccaa

SEQ ID NO: 142065 - DNA, 19 bp, Homo sapiens
  siRNA target sequence for DSC1 (NM_004948.2,2735-2753).
cctcggcttggcgaagaat

SEQ ID NO: 142066 - DNA, 19 bp, Homo sapiens
  siRNA target sequence for DSC1 (NM_024421.1,2741-2759).
cttggcgaaaaggtgtatt

SEQ ID NO: 142067 - DNA, 19 bp, Homo sapiens
  siRNA target sequence for DSC1 (NM_024421.1,2755-2773).
gtatttgtgtggacaagat

SEQ ID NO: 142068 - DNA, 19 bp, Homo sapiens
  siRNA target sequence for DSC1 (NM_024421.1,2766-2784).
gacaagatgaggagcataa

SEQ ID NO: 142069 - DNA, 19 bp, Homo sapiens
  siRNA target sequence for DSC1 (NM_024421.1,2795-2813).
gactacgtttgttcgtata

SEQ ID NO: 142070 - DNA, 19 bp, Homo sapiens
  siRNA target sequence for DSC1 (NM_024421.1,2800-2818).
cgtttgttcgtataactat

SEQ ID NO: 142071 - DNA, 19 bp, Homo sapiens
  siRNA target sequence for DSC1 (NM_024421.1,2859-2877).
gcgatcggcaggaagaaga

SEQ ID NO: 142072 - DNA, 19 bp, Homo sapiens
  siRNA target sequence for DSC1 (NM_024421.1,2880-2898).
gactggagtttctagatca

SEQ ID NO: 142073 - DNA, 19 bp, Homo sapiens
  siRNA target sequence for DSC2 (NM_004949.2,503-521).
gaccctcgcgatcttaata

SEQ ID NO: 142074 - DNA, 19 bp, Homo sapiens
  siRNA target sequence for DSC2 (NM_004949.2,505-523).
ccctcgcgatcttaatatt

SEQ ID NO: 142075 - DNA, 19 bp, Homo sapiens
  siRNA target sequence for DSC2 (NM_004949.2,506-524).
cctcgcgatcttaatattt

SEQ ID NO: 142076 - DNA, 19 bp, Homo sapiens
  siRNA target sequence for DSC2 (NM_004949.2,525-543).
gccagtgatgcctgcaaaa

SEQ ID NO: 142077 - DNA, 19 bp, Homo sapiens
  siRNA target sequence for DSC2 (NM_004949.2,592-610).
gtagagttaacctgaaaga

SEQ ID NO: 142078 - DNA, 19 bp, Homo sapiens
  siRNA target sequence for DSC2 (NM_004949.2,602-620).
cctgaaagagtgctttaca

SEQ ID NO: 142079 - DNA, 19 bp, Homo sapiens
  siRNA target sequence for DSC2 (NM_004949.2,621-639).
gctgcaaatctaattcatt

SEQ ID NO: 142080 - DNA, 19 bp, Homo sapiens
  siRNA target sequence for DSC2 (NM_004949.2,668-686).
ggatggttcagtctataca

SEQ ID NO: 142081 - DNA, 19 bp, Homo sapiens
  siRNA target sequence for DSC2 (NM_004949.2,669-687).
gatggttcagtctatacaa

SEQ ID NO: 142082 - DNA, 19 bp, Homo sapiens
  siRNA target sequence for DSC2 (NM_004949.2,680-698).
ctatacaacaaatactatt

SEQ ID NO: 142083 - DNA, 19 bp, Homo sapiens
  siRNA target sequence for DSC2 (NM_004949.2,711-729).
gagaagagaagttttacca

SEQ ID NO: 142084 - DNA, 19 bp, Homo sapiens
  siRNA target sequence for DSC2 (NM_004949.2,716-734).
gagaagttttaccatatta

SEQ ID NO: 142085 - DNA, 19 bp, Homo sapiens
  siRNA target sequence for DSC2 (NM_004949.2,864-882).
ccttgttcgatgctagaaa

SEQ ID NO: 142086 - DNA, 19 bp, Homo sapiens
  siRNA target sequence for DSC2 (NM_004949.2,908-926).
ccttcaacaggttcaatct

SEQ ID NO: 142087 - DNA, 19 bp, Homo sapiens
  siRNA target sequence for DSC2 (NM_004949.2,925-943).
ctgacacggcccaaaacta

SEQ ID NO: 142088 - DNA, 19 bp, Homo sapiens
  siRNA target sequence for DSC2 (NM_004949.2,927-945).
gacacggcccaaaactata

SEQ ID NO: 142089 - DNA, 19 bp, Homo sapiens
  siRNA target sequence for DSC2 (NM_004949.2,932-950).
ggcccaaaactataccata

SEQ ID NO: 142090 - DNA, 19 bp, Homo sapiens
  siRNA target sequence for DSC2 (NM_004949.2,933-951).
gcccaaaactataccatat

SEQ ID NO: 142091 - DNA, 19 bp, Homo sapiens
  siRNA target sequence for DSC2 (NM_004949.2,934-952).
cccaaaactataccatata

SEQ ID NO: 142092 - DNA, 19 bp, Homo sapiens
  siRNA target sequence for DSC2 (NM_004949.2,984-1002).
gaacctcggaatttatttt

SEQ ID NO: 142093 - DNA, 19 bp, Homo sapiens
  siRNA target sequence for DSC2 (NM_004949.2,1014-1032).
gacactggaaacttgtatt

SEQ ID NO: 142094 - DNA, 19 bp, Homo sapiens
  siRNA target sequence for DSC2 (NM_004949.2,1016-1034).
cactggaaacttgtattgt

SEQ ID NO: 142095 - DNA, 19 bp, Homo sapiens
  siRNA target sequence for DSC2 (NM_004949.2,1047-1065).
gatcgtgagcagtatgaat

SEQ ID NO: 142096 - DNA, 19 bp, Homo sapiens
  siRNA target sequence for DSC2 (NM_004949.2,1050-1068).
cgtgagcagtatgaatctt

SEQ ID NO: 142097 - DNA, 19 bp, Homo sapiens
  siRNA target sequence for DSC2 (NM_004949.2,1058-1076).
gtatgaatcttttgagata

SEQ ID NO: 142098 - DNA, 19 bp, Homo sapiens
  siRNA target sequence for DSC2 (NM_004949.2,1071-1089).
gagataattgcctttgcaa

SEQ ID NO: 142099 - DNA, 19 bp, Homo sapiens
  siRNA target sequence for DSC2 (NM_004949.2,1116-1134).
cttccactgcccctaataa

SEQ ID NO: 142100 - DNA, 19 bp, Homo sapiens
  siRNA target sequence for DSC2 (NM_004949.2,1119-1137).
ccactgcccctaataatca

SEQ ID NO: 142101 - DNA, 19 bp, Homo sapiens
  siRNA target sequence for DSC2 (NM_004949.2,1120-1138).
cactgcccctaataatcaa

SEQ ID NO: 142102 - DNA, 19 bp, Homo sapiens
  siRNA target sequence for DSC2 (NM_004949.2,1183-1201).
cttatacttttacaatttt

SEQ ID NO: 142103 - DNA, 19 bp, Homo sapiens
  siRNA target sequence for DSC2 (NM_004949.2,1272-1290).
cacacacgcctgaagtact

SEQ ID NO: 142104 - DNA, 19 bp, Homo sapiens
  siRNA target sequence for DSC2 (NM_004949.2,1315-1333).
cacccaccctattttctat

SEQ ID NO: 142105 - DNA, 19 bp, Homo sapiens
  siRNA target sequence for DSC2 (NM_004949.2,1319-1337).
caccctattttctatgcat

SEQ ID NO: 142106 - DNA, 19 bp, Homo sapiens
  siRNA target sequence for DSC2 (NM_004949.2,1347-1365).
ggcgtgatcaccacaacat

SEQ ID NO: 142107 - DNA, 19 bp, Homo sapiens
  siRNA target sequence for DSC2 (NM_004949.2,1352-1370).
gatcaccacaacatcatct

SEQ ID NO: 142108 - DNA, 19 bp, Homo sapiens
  siRNA target sequence for DSC2 (NM_004949.2,1377-1395).
gacagagagttaattgaca

SEQ ID NO: 142109 - DNA, 19 bp, Homo sapiens
  siRNA target sequence for DSC2 (NM_004949.2,1392-1410).
gacaagtaccagttgaaaa

SEQ ID NO: 142110 - DNA, 19 bp, Homo sapiens
  siRNA target sequence for DSC2 (NM_004949.2,1491-1509).
gaccacttgccaacattta

SEQ ID NO: 142111 - DNA, 19 bp, Homo sapiens
  siRNA target sequence for DSC2 (NM_004949.2,1493-1511).
ccacttgccaacatttact

SEQ ID NO: 142112 - DNA, 19 bp, Homo sapiens
  siRNA target sequence for DSC2 (NM_004949.2,1556-1574).
ggaaatcttacgagttact

SEQ ID NO: 142113 - DNA, 19 bp, Homo sapiens
  siRNA target sequence for DSC2 (NM_004949.2,1567-1585).
gagttactgttgaggataa

SEQ ID NO: 142114 - DNA, 19 bp, Homo sapiens
  siRNA target sequence for DSC2 (NM_004949.2,1603-1621).
ctaactggagagctaatta

SEQ ID NO: 142115 - DNA, 19 bp, Homo sapiens
  siRNA target sequence for DSC2 (NM_004949.2,1696-1714).
gtgtagttaagcctttgaa

SEQ ID NO: 142116 - DNA, 19 bp, Homo sapiens
  siRNA target sequence for DSC2 (NM_004949.2,1739-1757).
cttgcaaattggtgtagtt

SEQ ID NO: 142117 - DNA, 19 bp, Homo sapiens
  siRNA target sequence for DSC2 (NM_004949.2,1742-1760).
gcaaattggtgtagttaat

SEQ ID NO: 142118 - DNA, 19 bp, Homo sapiens
  siRNA target sequence for DSC2 (NM_004949.2,1819-1837).
ctgttaatgtagaagatca

SEQ ID NO: 142119 - DNA, 19 bp, Homo sapiens
  siRNA target sequence for DSC2 (NM_004949.2,1871-1889).
gactgttcgcatgaaagaa

SEQ ID NO: 142120 - DNA, 19 bp, Homo sapiens
  siRNA target sequence for DSC2 (NM_004949.2,1926-1944).
gcatatgacccagaaacaa

SEQ ID NO: 142121 - DNA, 19 bp, Homo sapiens
  siRNA target sequence for DSC2 (NM_004949.2,1948-1966).
gtagcagtggcataaggta

SEQ ID NO: 142122 - DNA, 19 bp, Homo sapiens
  siRNA target sequence for DSC2 (NM_004949.2,1951-1969).
gcagtggcataaggtataa

SEQ ID NO: 142123 - DNA, 19 bp, Homo sapiens
  siRNA target sequence for DSC2 (NM_004949.2,1956-1974).
ggcataaggtataagaaat

SEQ ID NO: 142124 - DNA, 19 bp, Homo sapiens
  siRNA target sequence for DSC2 (NM_004949.2,1957-1975).
gcataaggtataagaaatt

SEQ ID NO: 142125 - DNA, 19 bp, Homo sapiens
  siRNA target sequence for DSC2 (NM_004949.2,1963-1981).
ggtataagaaattaactga

SEQ ID NO: 142126 - DNA, 19 bp, Homo sapiens
  siRNA target sequence for DSC2 (NM_004949.2,2007-2025).
gaaaatacaggatcaatca

SEQ ID NO: 142127 - DNA, 19 bp, Homo sapiens
  siRNA target sequence for DSC2 (NM_004949.2,2103-2121).
caaggagggagaacatgta

SEQ ID NO: 142128 - DNA, 19 bp, Homo sapiens
  siRNA target sequence for DSC2 (NM_004949.2,2125-2143).
ggacactgggcattatact

SEQ ID NO: 142129 - DNA, 19 bp, Homo sapiens
  siRNA target sequence for DSC2 (NM_004949.2,2145-2163).
caagacgtgaatgataaca

SEQ ID NO: 142130 - DNA, 19 bp, Homo sapiens
  siRNA target sequence for DSC2 (NM_004949.2,2210-2228).
gtcatctgcggagattgtt

SEQ ID NO: 142131 - DNA, 19 bp, Homo sapiens
  siRNA target sequence for DSC2 (NM_004949.2,2253-2271).
catggcccaccctttgact

SEQ ID NO: 142132 - DNA, 19 bp, Homo sapiens
  siRNA target sequence for DSC2 (NM_004949.2,2256-2274).
ggcccaccctttgacttta

SEQ ID NO: 142133 - DNA, 19 bp, Homo sapiens
  siRNA target sequence for DSC2 (NM_004949.2,2258-2276).
cccaccctttgactttagt

SEQ ID NO: 142134 - DNA, 19 bp, Homo sapiens
  siRNA target sequence for DSC2 (NM_004949.2,2260-2278).
caccctttgactttagtct

SEQ ID NO: 142135 - DNA, 19 bp, Homo sapiens
  siRNA target sequence for DSC2 (NM_004949.2,2374-2392).
gctcatatgtagtacctat

SEQ ID NO: 142136 - DNA, 19 bp, Homo sapiens
  siRNA target sequence for DSC2 (NM_004949.2,2424-2442).
gtcacttcattggatgtta

SEQ ID NO: 142137 - DNA, 19 bp, Homo sapiens
  siRNA target sequence for DSC2 (NM_004949.2,2428-2446).
cttcattggatgttacact

SEQ ID NO: 142138 - DNA, 19 bp, Homo sapiens
  siRNA target sequence for DSC2 (NM_004949.2,2471-2489).
ctgcacacatcgtgtagat

SEQ ID NO: 142139 - DNA, 19 bp, Homo sapiens
  siRNA target sequence for DSC2 (NM_004949.2,2501-2519).
cggtggaggagtacaactt

SEQ ID NO: 142140 - DNA, 19 bp, Homo sapiens
  siRNA target sequence for DSC2 (NM_004949.2,2530-2548).
ccatccttgcaatattgtt

SEQ ID NO: 142141 - DNA, 19 bp, Homo sapiens
  siRNA target sequence for DSC2 (NM_004949.2,2594-2612).
ggcttctgggacgtctaaa

SEQ ID NO: 142142 - DNA, 19 bp, Homo sapiens
  siRNA target sequence for DSC2 (NM_004949.2,2643-2661).
cagcagaacctaattgtat

SEQ ID NO: 142143 - DNA, 19 bp, Homo sapiens
  siRNA target sequence for DSC2 (NM_004949.2,2781-2799).
ggtcaggagaccatcgaaa

SEQ ID NO: 142144 - DNA, 19 bp, Homo sapiens
  siRNA target sequence for DSC2 (NM_004949.2,2782-2800).
gtcaggagaccatcgaaat

SEQ ID NO: 142145 - DNA, 19 bp, Homo sapiens
  siRNA target sequence for DSC2 (NM_024422.2,2941-2959).
gtcttggtgaaaaagtgta

SEQ ID NO: 142146 - DNA, 19 bp, Homo sapiens
  siRNA target sequence for DSC2 (NM_024422.2,2961-2979).
ctgtgtaatcaagatgaaa

SEQ ID NO: 142147 - DNA, 19 bp, Homo sapiens
  siRNA target sequence for DSC2 (NM_024422.2,2984-3002).
caagcatgcccaagactat

SEQ ID NO: 142148 - DNA, 19 bp, Homo sapiens
  siRNA target sequence for DSC2 (NM_024422.2,2997-3015).
gactatgtcctgacatata

SEQ ID NO: 142149 - DNA, 19 bp, Homo sapiens
  siRNA target sequence for DSC2 (NM_024422.2,3081-3099).
gggcttgaatttttggata

SEQ ID NO: 142150 - DNA, 19 bp, Homo sapiens
  siRNA target sequence for DSC3 (NM_001941.2,155-173).
cctgcaaaaaggtgatact

SEQ ID NO: 142151 - DNA, 19 bp, Homo sapiens
  siRNA target sequence for DSC3 (NM_001941.2,156-174).
ctgcaaaaaggtgatactt

SEQ ID NO: 142152 - DNA, 19 bp, Homo sapiens
  siRNA target sequence for DSC3 (NM_001941.2,249-267).
cctcatccggtcaagtgat

SEQ ID NO: 142153 - DNA, 19 bp, Homo sapiens
  siRNA target sequence for DSC3 (NM_001941.2,257-275).
ggtcaagtgatcctgattt

SEQ ID NO: 142154 - DNA, 19 bp, Homo sapiens
  siRNA target sequence for DSC3 (NM_001941.2,269-287).
ctgatttcagagttctaaa

SEQ ID NO: 142155 - DNA, 19 bp, Homo sapiens
  siRNA target sequence for DSC3 (NM_001941.2,313-331).
gctgttgcgctgtctgata

SEQ ID NO: 142156 - DNA, 19 bp, Homo sapiens
  siRNA target sequence for DSC3 (NM_001941.2,314-332).
ctgttgcgctgtctgataa

SEQ ID NO: 142157 - DNA, 19 bp, Homo sapiens
  siRNA target sequence for DSC3 (NM_001941.2,316-334).
gttgcgctgtctgataaga

SEQ ID NO: 142158 - DNA, 19 bp, Homo sapiens
  siRNA target sequence for DSC3 (NM_001941.2,319-337).
gcgctgtctgataagaaaa

SEQ ID NO: 142159 - DNA, 19 bp, Homo sapiens
  siRNA target sequence for DSC3 (NM_001941.2,321-339).
gctgtctgataagaaaaga

SEQ ID NO: 142160 - DNA, 19 bp, Homo sapiens
  siRNA target sequence for DSC3 (NM_001941.2,348-366).
catatggctttctgacaaa

SEQ ID NO: 142161 - DNA, 19 bp, Homo sapiens
  siRNA target sequence for DSC3 (NM_001941.2,377-395).
cacagaaagaggttactgt

SEQ ID NO: 142162 - DNA, 19 bp, Homo sapiens
  siRNA target sequence for DSC3 (NM_001941.2,468-486).
gagatgggcacctattcct

SEQ ID NO: 142163 - DNA, 19 bp, Homo sapiens
  siRNA target sequence for DSC3 (NM_001941.2,491-509).
ctatgcaagagaattcctt

SEQ ID NO: 142164 - DNA, 19 bp, Homo sapiens
  siRNA target sequence for DSC3 (NM_001941.2,547-565).
gatgcagcacagaactata

SEQ ID NO: 142165 - DNA, 19 bp, Homo sapiens
  siRNA target sequence for DSC3 (NM_001941.2,551-569).
cagcacagaactatactgt

SEQ ID NO: 142166 - DNA, 19 bp, Homo sapiens
  siRNA target sequence for DSC3 (NM_001941.2,584-602).
gtggacgtggagttgataa

SEQ ID NO: 142167 - DNA, 19 bp, Homo sapiens
  siRNA target sequence for DSC3 (NM_001941.2,587-605).
gacgtggagttgataaaga

SEQ ID NO: 142168 - DNA, 19 bp, Homo sapiens
  siRNA target sequence for DSC3 (NM_001941.2,666-684).
ggatcgtgaagaatatgat

SEQ ID NO: 142169 - DNA, 19 bp, Homo sapiens
  siRNA target sequence for DSC3 (NM_001941.2,707-725).
cgtcaactgcagatggata

SEQ ID NO: 142170 - DNA, 19 bp, Homo sapiens
  siRNA target sequence for DSC3 (NM_001941.2,708-726).
gtcaactgcagatggatat

SEQ ID NO: 142171 - DNA, 19 bp, Homo sapiens
  siRNA target sequence for DSC3 (NM_001941.2,775-793).
gacaaccaccctgttttca

SEQ ID NO: 142172 - DNA, 19 bp, Homo sapiens
  siRNA target sequence for DSC3 (NM_001941.2,872-890).
gagatgaaccggacacaat

SEQ ID NO: 142173 - DNA, 19 bp, Homo sapiens
  siRNA target sequence for DSC3 (NM_001941.2,877-895).
gaaccggacacaatgcata

SEQ ID NO: 142174 - DNA, 19 bp, Homo sapiens
  siRNA target sequence for DSC3 (NM_001941.2,892-910).
catacgcgcctgaaataca

SEQ ID NO: 142175 - DNA, 19 bp, Homo sapiens
  siRNA target sequence for DSC3 (NM_001941.2,958-976).
cccagcacaggcgtaatca

SEQ ID NO: 142176 - DNA, 19 bp, Homo sapiens
  siRNA target sequence for DSC3 (NM_001941.2,977-995).
ccacagtctctcattattt

SEQ ID NO: 142177 - DNA, 19 bp, Homo sapiens
  siRNA target sequence for DSC3 (NM_001941.2,980-998).
cagtctctcattatttgga

SEQ ID NO: 142178 - DNA, 19 bp, Homo sapiens
  siRNA target sequence for DSC3 (NM_001941.2,1009-1027).
gtagacaagtactcattga

SEQ ID NO: 142179 - DNA, 19 bp, Homo sapiens
  siRNA target sequence for DSC3 (NM_001941.2,1012-1030).
gacaagtactcattgataa

SEQ ID NO: 142180 - DNA, 19 bp, Homo sapiens
  siRNA target sequence for DSC3 (NM_001941.2,1017-1035).
gtactcattgataatgaaa

SEQ ID NO: 142181 - DNA, 19 bp, Homo sapiens
  siRNA target sequence for DSC3 (NM_001941.2,1020-1038).
ctcattgataatgaaagta

SEQ ID NO: 142182 - DNA, 19 bp, Homo sapiens
  siRNA target sequence for DSC3 (NM_001941.2,1053-1071).
ccagttttttggattgata

SEQ ID NO: 142183 - DNA, 19 bp, Homo sapiens
  siRNA target sequence for DSC3 (NM_001941.2,1063-1081).
ggattgataggcacatcaa

SEQ ID NO: 142184 - DNA, 19 bp, Homo sapiens
  siRNA target sequence for DSC3 (NM_001941.2,1072-1090).
ggcacatcaacttgtatca

SEQ ID NO: 142185 - DNA, 19 bp, Homo sapiens
  siRNA target sequence for DSC3 (NM_001941.2,1073-1091).
gcacatcaacttgtatcat

SEQ ID NO: 142186 - DNA, 19 bp, Homo sapiens
  siRNA target sequence for DSC3 (NM_001941.2,1074-1092).
cacatcaacttgtatcata

SEQ ID NO: 142187 - DNA, 19 bp, Homo sapiens
  siRNA target sequence for DSC3 (NM_001941.2,1079-1097).
caacttgtatcataacagt

SEQ ID NO: 142188 - DNA, 19 bp, Homo sapiens
  siRNA target sequence for DSC3 (NM_001941.2,1089-1107).
cataacagtaacagattca

SEQ ID NO: 142189 - DNA, 19 bp, Homo sapiens
  siRNA target sequence for DSC3 (NM_001941.2,1118-1136).
cacccactttcagacaaaa

SEQ ID NO: 142190 - DNA, 19 bp, Homo sapiens
  siRNA target sequence for DSC3 (NM_001941.2,1176-1194).
ggaaatcttacgaatacct

SEQ ID NO: 142191 - DNA, 19 bp, Homo sapiens
  siRNA target sequence for DSC3 (NM_001941.2,1177-1195).
gaaatcttacgaataccta

SEQ ID NO: 142192 - DNA, 19 bp, Homo sapiens
  siRNA target sequence for DSC3 (NM_001941.2,1186-1204).
cgaatacctatagaagata

SEQ ID NO: 142193 - DNA, 19 bp, Homo sapiens
  siRNA target sequence for DSC3 (NM_001941.2,1222-1240).
gccaattggagagtcaatt

SEQ ID NO: 142194 - DNA, 19 bp, Homo sapiens
  siRNA target sequence for DSC3 (NM_001941.2,1223-1241).
ccaattggagagtcaattt

SEQ ID NO: 142195 - DNA, 19 bp, Homo sapiens
  siRNA target sequence for DSC3 (NM_001941.2,1232-1250).
gagtcaattttaccatttt

SEQ ID NO: 142196 - DNA, 19 bp, Homo sapiens
  siRNA target sequence for DSC3 (NM_001941.2,1487-1505).
cccaatatgtgcggattaa

SEQ ID NO: 142197 - DNA, 19 bp, Homo sapiens
  siRNA target sequence for DSC3 (NM_001941.2,1488-1506).
ccaatatgtgcggattaaa

SEQ ID NO: 142198 - DNA, 19 bp, Homo sapiens
  siRNA target sequence for DSC3 (NM_001941.2,1495-1513).
gtgcggattaaagaaaact

SEQ ID NO: 142199 - DNA, 19 bp, Homo sapiens
  siRNA target sequence for DSC3 (NM_001941.2,1497-1515).
gcggattaaagaaaactta

SEQ ID NO: 142200 - DNA, 19 bp, Homo sapiens
  siRNA target sequence for DSC3 (NM_001941.2,1517-1535).
cagtggggtcaaagatcaa

SEQ ID NO: 142201 - DNA, 19 bp, Homo sapiens
  siRNA target sequence for DSC3 (NM_001941.2,1526-1544).
caaagatcaacggctataa

SEQ ID NO: 142202 - DNA, 19 bp, Homo sapiens
  siRNA target sequence for DSC3 (NM_001941.2,1545-1563).
ggcatatgaccccgaaaat

SEQ ID NO: 142203 - DNA, 19 bp, Homo sapiens
  siRNA target sequence for DSC3 (NM_001941.2,1572-1590).
caatggtttaaggtacaaa

SEQ ID NO: 142204 - DNA, 19 bp, Homo sapiens
  siRNA target sequence for DSC3 (NM_001941.2,1576-1594).
ggtttaaggtacaaaaaat

SEQ ID NO: 142205 - DNA, 19 bp, Homo sapiens
  siRNA target sequence for DSC3 (NM_001941.2,1627-1645).
gaaatttcagggtcaatca

SEQ ID NO: 142206 - DNA, 19 bp, Homo sapiens
  siRNA target sequence for DSC3 (NM_001941.2,1638-1656).
gtcaatcataacttccaaa

SEQ ID NO: 142207 - DNA, 19 bp, Homo sapiens
  siRNA target sequence for DSC3 (NM_001941.2,1640-1658).
caatcataacttccaaaat

SEQ ID NO: 142208 - DNA, 19 bp, Homo sapiens
  siRNA target sequence for DSC3 (NM_001941.2,1662-1680).
ggatagggaggttgaaact

SEQ ID NO: 142209 - DNA, 19 bp, Homo sapiens
  siRNA target sequence for DSC3 (NM_001941.2,1671-1689).
ggttgaaactcccaaaaat

SEQ ID NO: 142210 - DNA, 19 bp, Homo sapiens
  siRNA target sequence for DSC3 (NM_001941.2,1714-1732).
gcaatagacaaagatgata

SEQ ID NO: 142211 - DNA, 19 bp, Homo sapiens
  siRNA target sequence for DSC3 (NM_001941.2,1720-1738).
gacaaagatgatagatcat

SEQ ID NO: 142212 - DNA, 19 bp, Homo sapiens
  siRNA target sequence for DSC3 (NM_001941.2,1786-1804).
ccagaaatacttcaagaat

SEQ ID NO: 142213 - DNA, 19 bp, Homo sapiens
  siRNA target sequence for DSC3 (NM_001941.2,1798-1816).
caagaatatgtagtcattt

SEQ ID NO: 142214 - DNA, 19 bp, Homo sapiens
  siRNA target sequence for DSC3 (NM_001941.2,1830-1848).
ggggtataccgacatttta

SEQ ID NO: 142215 - DNA, 19 bp, Homo sapiens
  siRNA target sequence for DSC3 (NM_001941.2,1833-1851).
gtataccgacattttagct

SEQ ID NO: 142216 - DNA, 19 bp, Homo sapiens
  siRNA target sequence for DSC3 (NM_001941.2,1870-1888).
gtccatggagctccatttt

SEQ ID NO: 142217 - DNA, 19 bp, Homo sapiens
  siRNA target sequence for DSC3 (NM_001941.2,1873-1891).
catggagctccattttatt

SEQ ID NO: 142218 - DNA, 19 bp, Homo sapiens
  siRNA target sequence for DSC3 (NM_001941.2,1876-1894).
ggagctccattttatttca

SEQ ID NO: 142219 - DNA, 19 bp, Homo sapiens
  siRNA target sequence for DSC3 (NM_001941.2,1879-1897).
gctccattttatttcagtt

SEQ ID NO: 142220 - DNA, 19 bp, Homo sapiens
  siRNA target sequence for DSC3 (NM_001941.2,1901-1919).
ccaatacttctccagaaat

SEQ ID NO: 142221 - DNA, 19 bp, Homo sapiens
  siRNA target sequence for DSC3 (NM_001941.2,1929-1947).
gtggagcctcaccaaagtt

SEQ ID NO: 142222 - DNA, 19 bp, Homo sapiens
  siRNA target sequence for DSC3 (NM_001941.2,1932-1950).
gagcctcaccaaagttaat

SEQ ID NO: 142223 - DNA, 19 bp, Homo sapiens
  siRNA target sequence for DSC3 (NM_001941.2,1934-1952).
gcctcaccaaagttaatga

SEQ ID NO: 142224 - DNA, 19 bp, Homo sapiens
  siRNA target sequence for DSC3 (NM_001941.2,1935-1953).
cctcaccaaagttaatgat

SEQ ID NO: 142225 - DNA, 19 bp, Homo sapiens
  siRNA target sequence for DSC3 (NM_001941.2,1955-1973).
cagctgcccgtctttcata

SEQ ID NO: 142226 - DNA, 19 bp, Homo sapiens
  siRNA target sequence for DSC3 (NM_001941.2,1996-2014).
gaatataccattcctatta

SEQ ID NO: 142227 - DNA, 19 bp, Homo sapiens
  siRNA target sequence for DSC3 (NM_001941.2,2032-2050).
ggccaagctgcaacaaaat

SEQ ID NO: 142228 - DNA, 19 bp, Homo sapiens
  siRNA target sequence for DSC3 (NM_001941.2,2033-2051).
gccaagctgcaacaaaatt

SEQ ID NO: 142229 - DNA, 19 bp, Homo sapiens
  siRNA target sequence for DSC3 (NM_001941.2,2089-2107).
cagtgtcgtgcgacttcaa

SEQ ID NO: 142230 - DNA, 19 bp, Homo sapiens
  siRNA target sequence for DSC3 (NM_001941.2,2105-2123).
caaggagtacaggagtaat

SEQ ID NO: 142231 - DNA, 19 bp, Homo sapiens
  siRNA target sequence for DSC3 (NM_001941.2,2108-2126).
ggagtacaggagtaatact

SEQ ID NO: 142232 - DNA, 19 bp, Homo sapiens
  siRNA target sequence for DSC3 (NM_001941.2,2109-2127).
gagtacaggagtaatactt

SEQ ID NO: 142233 - DNA, 19 bp, Homo sapiens
  siRNA target sequence for DSC3 (NM_001941.2,2114-2132).
caggagtaatacttggaaa

SEQ ID NO: 142234 - DNA, 19 bp, Homo sapiens
  siRNA target sequence for DSC3 (NM_001941.2,2138-2156).
caatccttgcaatattact

SEQ ID NO: 142235 - DNA, 19 bp, Homo sapiens
  siRNA target sequence for DSC3 (NM_001941.2,2169-2187).
gctcttttctgtattgcta

SEQ ID NO: 142236 - DNA, 19 bp, Homo sapiens
  siRNA target sequence for DSC3 (NM_001941.2,2170-2188).
ctcttttctgtattgctaa

SEQ ID NO: 142237 - DNA, 19 bp, Homo sapiens
  siRNA target sequence for DSC3 (NM_001941.2,2179-2197).
gtattgctaactttagtat

SEQ ID NO: 142238 - DNA, 19 bp, Homo sapiens
  siRNA target sequence for DSC3 (NM_001941.2,2189-2207).
ctttagtatgtggagtttt

SEQ ID NO: 142239 - DNA, 19 bp, Homo sapiens
  siRNA target sequence for DSC3 (NM_001941.2,2239-2257).
gatttagcacagcaaaact

SEQ ID NO: 142240 - DNA, 19 bp, Homo sapiens
  siRNA target sequence for DSC3 (NM_001941.2,2245-2263).
gcacagcaaaacttaatta

SEQ ID NO: 142241 - DNA, 19 bp, Homo sapiens
  siRNA target sequence for DSC3 (NM_001941.2,2279-2297).
cacctggagacgatagagt

SEQ ID NO: 142242 - DNA, 19 bp, Homo sapiens
  siRNA target sequence for DSC3 (NM_001941.2,2296-2314).
gtgtgctctgccaatggat

SEQ ID NO: 142243 - DNA, 19 bp, Homo sapiens
  siRNA target sequence for DSC3 (NM_001941.2,2298-2316).
gtgctctgccaatggattt

SEQ ID NO: 142244 - DNA, 19 bp, Homo sapiens
  siRNA target sequence for DSC3 (NM_001941.2,2311-2329).
ggatttatgacccaaacta

SEQ ID NO: 142245 - DNA, 19 bp, Homo sapiens
  siRNA target sequence for DSC3 (NM_001941.2,2323-2341).
caaactaccaacaactcta

SEQ ID NO: 142246 - DNA, 19 bp, Homo sapiens
  siRNA target sequence for DSC3 (NM_001941.2,2334-2352).
caactctagccaaggtttt

SEQ ID NO: 142247 - DNA, 19 bp, Homo sapiens
  siRNA target sequence for DSC3 (NM_001941.2,2386-2404).
gggcaggaaaccattgaaa

SEQ ID NO: 142248 - DNA, 19 bp, Homo sapiens
  siRNA target sequence for DSC3 (NM_001941.2,2387-2405).
ggcaggaaaccattgaaat

SEQ ID NO: 142249 - DNA, 19 bp, Homo sapiens
  siRNA target sequence for DSC3 (NM_001941.2,2389-2407).
caggaaaccattgaaatga

SEQ ID NO: 142250 - DNA, 19 bp, Homo sapiens
  siRNA target sequence for DSC3 (NM_001941.2,2546-2564).
gtctcggtgaaaaattgca

SEQ ID NO: 142251 - DNA, 19 bp, Homo sapiens
  siRNA target sequence for DSC3 (NM_001941.2,2587-2605).
cgcatgccatcccaagatt

SEQ ID NO: 142252 - DNA, 19 bp, Homo sapiens
  siRNA target sequence for DSG1 (NM_001942.1,288-306).
ccgaatccaggtaagagat

SEQ ID NO: 142253 - DNA, 19 bp, Homo sapiens
  siRNA target sequence for DSG1 (NM_001942.1,297-315).
ggtaagagattataacact

SEQ ID NO: 142254 - DNA, 19 bp, Homo sapiens
  siRNA target sequence for DSG1 (NM_001942.1,386-404).
gtcgtgaaggtgaagacaa

SEQ ID NO: 142255 - DNA, 19 bp, Homo sapiens
  siRNA target sequence for DSG1 (NM_001942.1,495-513).
gccaccatatgggatcttt

SEQ ID NO: 142256 - DNA, 19 bp, Homo sapiens
  siRNA target sequence for DSG1 (NM_001942.1,499-517).
ccatatgggatctttgtca

SEQ ID NO: 142257 - DNA, 19 bp, Homo sapiens
  siRNA target sequence for DSG1 (NM_001942.1,500-518).
catatgggatctttgtcat

SEQ ID NO: 142258 - DNA, 19 bp, Homo sapiens
  siRNA target sequence for DSG1 (NM_001942.1,523-541).
cagaaaactggtgaaatta

SEQ ID NO: 142259 - DNA, 19 bp, Homo sapiens
  siRNA target sequence for DSG1 (NM_001942.1,593-611).
gccgagctctgaactcaat

SEQ ID NO: 142260 - DNA, 19 bp, Homo sapiens
  siRNA target sequence for DSG1 (NM_001942.1,606-624).
ctcaatgggccaagattta

SEQ ID NO: 142261 - DNA, 19 bp, Homo sapiens
  siRNA target sequence for DSG1 (NM_001942.1,608-626).
caatgggccaagatttaga

SEQ ID NO: 142262 - DNA, 19 bp, Homo sapiens
  siRNA target sequence for DSG1 (NM_001942.1,642-660).
cagagtcagggttttggat

SEQ ID NO: 142263 - DNA, 19 bp, Homo sapiens
  siRNA target sequence for DSG1 (NM_001942.1,695-713).
catttgcaggacaaataga

SEQ ID NO: 142264 - DNA, 19 bp, Homo sapiens
  siRNA target sequence for DSG1 (NM_001942.1,762-780).
cgcagatgaaccgaacaat

SEQ ID NO: 142265 - DNA, 19 bp, Homo sapiens
  siRNA target sequence for DSG1 (NM_001942.1,763-781).
gcagatgaaccgaacaatt

SEQ ID NO: 142266 - DNA, 19 bp, Homo sapiens
  siRNA target sequence for DSG1 (NM_001942.1,764-782).
cagatgaaccgaacaattt

SEQ ID NO: 142267 - DNA, 19 bp, Homo sapiens
  siRNA target sequence for DSG1 (NM_001942.1,766-784).
gatgaaccgaacaatttga

SEQ ID NO: 142268 - DNA, 19 bp, Homo sapiens
  siRNA target sequence for DSG1 (NM_001942.1,772-790).
ccgaacaatttgaactcaa

SEQ ID NO: 142269 - DNA, 19 bp, Homo sapiens
  siRNA target sequence for DSG1 (NM_001942.1,773-791).
cgaacaatttgaactcaaa

SEQ ID NO: 142270 - DNA, 19 bp, Homo sapiens
  siRNA target sequence for DSG1 (NM_001942.1,797-815).
ccttcaagattataagaca

SEQ ID NO: 142271 - DNA, 19 bp, Homo sapiens
  siRNA target sequence for DSG1 (NM_001942.1,798-816).
cttcaagattataagacaa

SEQ ID NO: 142272 - DNA, 19 bp, Homo sapiens
  siRNA target sequence for DSG1 (NM_001942.1,801-819).
caagattataagacaagaa

SEQ ID NO: 142273 - DNA, 19 bp, Homo sapiens
  siRNA target sequence for DSG1 (NM_001942.1,824-842).
cagattcaccaatgtttat

SEQ ID NO: 142274 - DNA, 19 bp, Homo sapiens
  siRNA target sequence for DSG1 (NM_001942.1,862-880).
gaaattcgaacgatgaata

SEQ ID NO: 142275 - DNA, 19 bp, Homo sapiens
  siRNA target sequence for DSG1 (NM_001942.1,869-887).
gaacgatgaataattttct

SEQ ID NO: 142276 - DNA, 19 bp, Homo sapiens
  siRNA target sequence for DSG1 (NM_001942.1,872-890).
cgatgaataattttctaga

SEQ ID NO: 142277 - DNA, 19 bp, Homo sapiens
  siRNA target sequence for DSG1 (NM_001942.1,966-984).
ggaatgtgagtgcaacatt

SEQ ID NO: 142278 - DNA, 19 bp, Homo sapiens
  siRNA target sequence for DSG1 (NM_001942.1,1074-1092).
gctcgagattagagtaatt

SEQ ID NO: 142279 - DNA, 19 bp, Homo sapiens
  siRNA target sequence for DSG1 (NM_001942.1,1077-1095).
cgagattagagtaattgat

SEQ ID NO: 142280 - DNA, 19 bp, Homo sapiens
  siRNA target sequence for DSG1 (NM_001942.1,1210-1228).
gttgttaagcccttagatt

SEQ ID NO: 142281 - DNA, 19 bp, Homo sapiens
  siRNA target sequence for DSG1 (NM_001942.1,1220-1238).
ccttagattatgaagctat

SEQ ID NO: 142282 - DNA, 19 bp, Homo sapiens
  siRNA target sequence for DSG1 (NM_001942.1,1333-1351).
gtgactgtgttaaatgtaa

SEQ ID NO: 142283 - DNA, 19 bp, Homo sapiens
  siRNA target sequence for DSG1 (NM_001942.1,1373-1391).
caggttcaaagacatatgt

SEQ ID NO: 142284 - DNA, 19 bp, Homo sapiens
  siRNA target sequence for DSG1 (NM_001942.1,1376-1394).
gttcaaagacatatgttgt

SEQ ID NO: 142285 - DNA, 19 bp, Homo sapiens
  siRNA target sequence for DSG1 (NM_001942.1,1397-1415).
ctggtaatatgggatcaaa

SEQ ID NO: 142286 - DNA, 19 bp, Homo sapiens
  siRNA target sequence for DSG1 (NM_001942.1,1463-1481).
cttcaacgactgttaggta

SEQ ID NO: 142287 - DNA, 19 bp, Homo sapiens
  siRNA target sequence for DSG1 (NM_001942.1,1469-1487).
cgactgttaggtatgtaat

SEQ ID NO: 142288 - DNA, 19 bp, Homo sapiens
  siRNA target sequence for DSG1 (NM_001942.1,1509-1527).
gctagctgttgattcaaga

SEQ ID NO: 142289 - DNA, 19 bp, Homo sapiens
  siRNA target sequence for DSG1 (NM_001942.1,1598-1616).
gaacgattctctctataga

SEQ ID NO: 142290 - DNA, 19 bp, Homo sapiens
  siRNA target sequence for DSG1 (NM_001942.1,1601-1619).
cgattctctctatagatga

SEQ ID NO: 142291 - DNA, 19 bp, Homo sapiens
  siRNA target sequence for DSG1 (NM_001942.1,1608-1626).
ctctatagatgataatctt

SEQ ID NO: 142292 - DNA, 19 bp, Homo sapiens
  siRNA target sequence for DSG1 (NM_001942.1,1610-1628).
ctatagatgataatcttca

SEQ ID NO: 142293 - DNA, 19 bp, Homo sapiens
  siRNA target sequence for DSG1 (NM_001942.1,1631-1649).
gaacttgcactggtacaat

SEQ ID NO: 142294 - DNA, 19 bp, Homo sapiens
  siRNA target sequence for DSG1 (NM_001942.1,1637-1655).
gcactggtacaattaatat

SEQ ID NO: 142295 - DNA, 19 bp, Homo sapiens
  siRNA target sequence for DSG1 (NM_001942.1,1638-1656).
cactggtacaattaatatt

SEQ ID NO: 142296 - DNA, 19 bp, Homo sapiens
  siRNA target sequence for DSG1 (NM_001942.1,1698-1716).
gccgaacactaaaattact

SEQ ID NO: 142297 - DNA, 19 bp, Homo sapiens
  siRNA target sequence for DSG1 (NM_001942.1,1699-1717).
ccgaacactaaaattacta

SEQ ID NO: 142298 - DNA, 19 bp, Homo sapiens
  siRNA target sequence for DSG1 (NM_001942.1,1759-1777).
gataccagcacaacttcta

SEQ ID NO: 142299 - DNA, 19 bp, Homo sapiens
  siRNA target sequence for DSG1 (NM_001942.1,1778-1796).
ctgactctagccaagtata

SEQ ID NO: 142300 - DNA, 19 bp, Homo sapiens
  siRNA target sequence for DSG1 (NM_001942.1,1809-1827).
cggaaacggagccaaagat

SEQ ID NO: 142301 - DNA, 19 bp, Homo sapiens
  siRNA target sequence for DSG1 (NM_001942.1,1811-1829).
gaaacggagccaaagattt

SEQ ID NO: 142302 - DNA, 19 bp, Homo sapiens
  siRNA target sequence for DSG1 (NM_001942.1,1815-1833).
cggagccaaagatttgtta

SEQ ID NO: 142303 - DNA, 19 bp, Homo sapiens
  siRNA target sequence for DSG1 (NM_001942.1,1816-1834).
ggagccaaagatttgttat

SEQ ID NO: 142304 - DNA, 19 bp, Homo sapiens
  siRNA target sequence for DSG1 (NM_001942.1,1830-1848).
gttatcagacaatgtacat

SEQ ID NO: 142305 - DNA, 19 bp, Homo sapiens
  siRNA target sequence for DSG1 (NM_001942.1,1882-1900).
ggattcttggtcttaggat

SEQ ID NO: 142306 - DNA, 19 bp, Homo sapiens
  siRNA target sequence for DSG1 (NM_001942.1,1903-1921).
gtcccatttttgatgatct

SEQ ID NO: 142307 - DNA, 19 bp, Homo sapiens
  siRNA target sequence for DSG1 (NM_001942.1,1963-1981).
gagcctgttcccgaatgtt

SEQ ID NO: 142308 - DNA, 19 bp, Homo sapiens
  siRNA target sequence for DSG1 (NM_001942.1,2022-2040).
gcctgaacccagggatata

SEQ ID NO: 142309 - DNA, 19 bp, Homo sapiens
  siRNA target sequence for DSG1 (NM_001942.1,2026-2044).
gaacccagggatataacca

SEQ ID NO: 142310 - DNA, 19 bp, Homo sapiens
  siRNA target sequence for DSG1 (NM_001942.1,2042-2060).
ccactgtcataccacaaat

SEQ ID NO: 142311 - DNA, 19 bp, Homo sapiens
  siRNA target sequence for DSG1 (NM_001942.1,2054-2072).
cacaaataccacctgataa

SEQ ID NO: 142312 - DNA, 19 bp, Homo sapiens
  siRNA target sequence for DSG1 (NM_001942.1,2062-2080).
ccacctgataacgcaaata

SEQ ID NO: 142313 - DNA, 19 bp, Homo sapiens
  siRNA target sequence for DSG1 (NM_001942.1,2063-2081).
cacctgataacgcaaatat

SEQ ID NO: 142314 - DNA, 19 bp, Homo sapiens
  siRNA target sequence for DSG1 (NM_001942.1,2097-2115).
caactcaggagtttataca

SEQ ID NO: 142315 - DNA, 19 bp, Homo sapiens
  siRNA target sequence for DSG1 (NM_001942.1,2212-2230).
gagatatgtcaagaatact

SEQ ID NO: 142316 - DNA, 19 bp, Homo sapiens
  siRNA target sequence for DSG1 (NM_001942.1,2214-2232).
gatatgtcaagaatactct

SEQ ID NO: 142317 - DNA, 19 bp, Homo sapiens
  siRNA target sequence for DSG1 (NM_001942.1,2269-2287).
gaaggaggtctgaatatga

SEQ ID NO: 142318 - DNA, 19 bp, Homo sapiens
  siRNA target sequence for DSG1 (NM_001942.1,2272-2290).
ggaggtctgaatatgaatt

SEQ ID NO: 142319 - DNA, 19 bp, Homo sapiens
  siRNA target sequence for DSG1 (NM_001942.1,2276-2294).
gtctgaatatgaatttcat

SEQ ID NO: 142320 - DNA, 19 bp, Homo sapiens
  siRNA target sequence for DSG1 (NM_001942.1,2344-2362).
ggacgcccatctaatgact

SEQ ID NO: 142321 - DNA, 19 bp, Homo sapiens
  siRNA target sequence for DSG1 (NM_001942.1,2363-2381).
gtttgctcatatatgacat

SEQ ID NO: 142322 - DNA, 19 bp, Homo sapiens
  siRNA target sequence for DSG1 (NM_001942.1,2457-2475).
ggataccctgggacctaaa

SEQ ID NO: 142323 - DNA, 19 bp, Homo sapiens
  siRNA target sequence for DSG1 (NM_001942.1,2458-2476).
gataccctgggacctaaat

SEQ ID NO: 142324 - DNA, 19 bp, Homo sapiens
  siRNA target sequence for DSG1 (NM_001942.1,2498-2516).
gcctaggaaaagaatcata

SEQ ID NO: 142325 - DNA, 19 bp, Homo sapiens
  siRNA target sequence for DSG1 (NM_001942.1,2499-2517).
cctaggaaaagaatcatat

SEQ ID NO: 142326 - DNA, 19 bp, Homo sapiens
  siRNA target sequence for DSG1 (NM_001942.1,2575-2593).
gaaacagagcccgttgtta

SEQ ID NO: 142327 - DNA, 19 bp, Homo sapiens
  siRNA target sequence for DSG1 (NM_001942.1,2622-2640).
cggcactaccacagtaatt

SEQ ID NO: 142328 - DNA, 19 bp, Homo sapiens
  siRNA target sequence for DSG1 (NM_001942.1,2625-2643).
cactaccacagtaatttct

SEQ ID NO: 142329 - DNA, 19 bp, Homo sapiens
  siRNA target sequence for DSG1 (NM_001942.1,2695-2713).
gatcctctgggctatggta

SEQ ID NO: 142330 - DNA, 19 bp, Homo sapiens
  siRNA target sequence for DSG1 (NM_001942.1,2699-2717).
ctctgggctatggtaatgt

SEQ ID NO: 142331 - DNA, 19 bp, Homo sapiens
  siRNA target sequence for DSG1 (NM_001942.1,2701-2719).
ctgggctatggtaatgtca

SEQ ID NO: 142332 - DNA, 19 bp, Homo sapiens
  siRNA target sequence for DSG1 (NM_001942.1,2829-2847).
ctctggcgctgatttgcat

SEQ ID NO: 142333 - DNA, 19 bp, Homo sapiens
  siRNA target sequence for DSG1 (NM_001942.1,2834-2852).
gcgctgatttgcatggaat

SEQ ID NO: 142334 - DNA, 19 bp, Homo sapiens
  siRNA target sequence for DSG1 (NM_001942.1,2871-2889).
gcgagatgggtcgaatgtt

SEQ ID NO: 142335 - DNA, 19 bp, Homo sapiens
  siRNA target sequence for DSG1 (NM_001942.1,2872-2890).
cgagatgggtcgaatgtta

SEQ ID NO: 142336 - DNA, 19 bp, Homo sapiens
  siRNA target sequence for DSG1 (NM_001942.1,2873-2891).
gagatgggtcgaatgttat

SEQ ID NO: 142337 - DNA, 19 bp, Homo sapiens
  siRNA target sequence for DSG1 (NM_001942.1,2878-2896).
gggtcgaatgttatagtga

SEQ ID NO: 142338 - DNA, 19 bp, Homo sapiens
  siRNA target sequence for DSG1 (NM_001942.1,2950-2968).
catcctagagagtcttcaa

SEQ ID NO: 142339 - DNA, 19 bp, Homo sapiens
  siRNA target sequence for DSG1 (NM_001942.1,2954-2972).
ctagagagtcttcaaatgt

SEQ ID NO: 142340 - DNA, 19 bp, Homo sapiens
  siRNA target sequence for DSG1 (NM_001942.1,3043-3061).
gccaatgcccacaatgtca

SEQ ID NO: 142341 - DNA, 19 bp, Homo sapiens
  siRNA target sequence for DSG1 (NM_001942.1,3064-3082).
gtgacagagagggttgttt

SEQ ID NO: 142342 - DNA, 19 bp, Homo sapiens
  siRNA target sequence for DSG1 (NM_001942.1,3186-3204).
gagtggagctggcataagt

SEQ ID NO: 142343 - DNA, 19 bp, Homo sapiens
  siRNA target sequence for DSG1 (NM_001942.1,3319-3337).
cgaagtcgaatcacaaagt

SEQ ID NO: 142344 - DNA, 19 bp, Homo sapiens
  siRNA target sequence for DSG1 (NM_001942.1,3320-3338).
gaagtcgaatcacaaagta

SEQ ID NO: 142345 - DNA, 19 bp, Homo sapiens
  siRNA target sequence for DSG1 (NM_001942.1,3336-3354).
gtatagtaccgtgcaatat

SEQ ID NO: 142346 - DNA, 19 bp, Homo sapiens
  siRNA target sequence for DSG2 (NM_001943.1,45-63).
cttctcctgatctgcttta

SEQ ID NO: 142347 - DNA, 19 bp, Homo sapiens
  siRNA target sequence for DSG2 (NM_001943.1,50-68).
cctgatctgctttaacgtt

SEQ ID NO: 142348 - DNA, 19 bp, Homo sapiens
  siRNA target sequence for DSG2 (NM_001943.1,70-88).
gaagtggacttcacttaca

SEQ ID NO: 142349 - DNA, 19 bp, Homo sapiens
  siRNA target sequence for DSG2 (NM_001943.1,78-96).
cttcacttacaggtcttaa

SEQ ID NO: 142350 - DNA, 19 bp, Homo sapiens
  siRNA target sequence for DSG2 (NM_001943.1,81-99).
cacttacaggtcttaagca

SEQ ID NO: 142351 - DNA, 19 bp, Homo sapiens
  siRNA target sequence for DSG2 (NM_001943.1,87-105).
caggtcttaagcacaagaa

SEQ ID NO: 142352 - DNA, 19 bp, Homo sapiens
  siRNA target sequence for DSG2 (NM_001943.1,89-107).
ggtcttaagcacaagaaat

SEQ ID NO: 142353 - DNA, 19 bp, Homo sapiens
  siRNA target sequence for DSG2 (NM_001943.1,200-218).
gtccaagaagaatccaatt

SEQ ID NO: 142354 - DNA, 19 bp, Homo sapiens
  siRNA target sequence for DSG2 (NM_001943.1,221-239).
caagatacattctgatctt

SEQ ID NO: 142355 - DNA, 19 bp, Homo sapiens
  siRNA target sequence for DSG2 (NM_001943.1,252-270).
ggactcaaaattacttaca

SEQ ID NO: 142356 - DNA, 19 bp, Homo sapiens
  siRNA target sequence for DSG2 (NM_001943.1,292-310).
cagagccaccttttggtat

SEQ ID NO: 142357 - DNA, 19 bp, Homo sapiens
  siRNA target sequence for DSG2 (NM_001943.1,341-359).
gaatgttaccagcattctt

SEQ ID NO: 142358 - DNA, 19 bp, Homo sapiens
  siRNA target sequence for DSG2 (NM_001943.1,433-451).
ccttagagctacgcattaa

SEQ ID NO: 142359 - DNA, 19 bp, Homo sapiens
  siRNA target sequence for DSG2 (NM_001943.1,444-462).
cgcattaaggttcttgata

SEQ ID NO: 142360 - DNA, 19 bp, Homo sapiens
  siRNA target sequence for DSG2 (NM_001943.1,482-500).
gttcacacaggatgtcttt

SEQ ID NO: 142361 - DNA, 19 bp, Homo sapiens
  siRNA target sequence for DSG2 (NM_001943.1,526-544).
cagcacatactcttgtgat

SEQ ID NO: 142362 - DNA, 19 bp, Homo sapiens
  siRNA target sequence for DSG2 (NM_001943.1,529-547).
cacatactcttgtgatgaa

SEQ ID NO: 142363 - DNA, 19 bp, Homo sapiens
  siRNA target sequence for DSG2 (NM_001943.1,575-593).
caataccctgaattcgaaa

SEQ ID NO: 142364 - DNA, 19 bp, Homo sapiens
  siRNA target sequence for DSG2 (NM_001943.1,584-602).
gaattcgaaaatttcctat

SEQ ID NO: 142365 - DNA, 19 bp, Homo sapiens
  siRNA target sequence for DSG2 (NM_001943.1,589-607).
cgaaaatttcctatagaat

SEQ ID NO: 142366 - DNA, 19 bp, Homo sapiens
  siRNA target sequence for DSG2 (NM_001943.1,598-616).
cctatagaatcgtatctct

SEQ ID NO: 142367 - DNA, 19 bp, Homo sapiens
  siRNA target sequence for DSG2 (NM_001943.1,633-651).
ccagtgttctacctaaata

SEQ ID NO: 142368 - DNA, 19 bp, Homo sapiens
  siRNA target sequence for DSG2 (NM_001943.1,634-652).
cagtgttctacctaaataa

SEQ ID NO: 142369 - DNA, 19 bp, Homo sapiens
  siRNA target sequence for DSG2 (NM_001943.1,699-717).
gaacacagcagctacactt

SEQ ID NO: 142370 - DNA, 19 bp, Homo sapiens
  siRNA target sequence for DSG2 (NM_001943.1,710-728).
ctacactttgacagtagaa

SEQ ID NO: 142371 - DNA, 19 bp, Homo sapiens
  siRNA target sequence for DSG2 (NM_001943.1,739-757).
gcaatggagaagttacaga

SEQ ID NO: 142372 - DNA, 19 bp, Homo sapiens
  siRNA target sequence for DSG2 (NM_001943.1,754-772).
cagacaaacctgtaaaaca

SEQ ID NO: 142373 - DNA, 19 bp, Homo sapiens
  siRNA target sequence for DSG2 (NM_001943.1,774-792).
gctcaagttcagattcgta

SEQ ID NO: 142374 - DNA, 19 bp, Homo sapiens
  siRNA target sequence for DSG2 (NM_001943.1,775-793).
ctcaagttcagattcgtat

SEQ ID NO: 142375 - DNA, 19 bp, Homo sapiens
  siRNA target sequence for DSG2 (NM_001943.1,777-795).
caagttcagattcgtattt

SEQ ID NO: 142376 - DNA, 19 bp, Homo sapiens
  siRNA target sequence for DSG2 (NM_001943.1,876-894).
gttacgcgcataaaagtgt

SEQ ID NO: 142377 - DNA, 19 bp, Homo sapiens
  siRNA target sequence for DSG2 (NM_001943.1,896-914).
cgatgcagatgaaataggt

SEQ ID NO: 142378 - DNA, 19 bp, Homo sapiens
  siRNA target sequence for DSG2 (NM_001943.1,918-936).
gataattggctggcaaatt

SEQ ID NO: 142379 - DNA, 19 bp, Homo sapiens
  siRNA target sequence for DSG2 (NM_001943.1,963-981).
ggttatttccacatagaaa

SEQ ID NO: 142380 - DNA, 19 bp, Homo sapiens
  siRNA target sequence for DSG2 (NM_001943.1,978-996).
gaaacagatgctcaaacta

SEQ ID NO: 142381 - DNA, 19 bp, Homo sapiens
  siRNA target sequence for DSG2 (NM_001943.1,1002-1020).
ggaattgtgacccttatta

SEQ ID NO: 142382 - DNA, 19 bp, Homo sapiens
  siRNA target sequence for DSG2 (NM_001943.1,1003-1021).
gaattgtgacccttattaa

SEQ ID NO: 142383 - DNA, 19 bp, Homo sapiens
  siRNA target sequence for DSG2 (NM_001943.1,1012-1030).
cccttattaaggaagtaga

SEQ ID NO: 142384 - DNA, 19 bp, Homo sapiens
  siRNA target sequence for DSG2 (NM_001943.1,1013-1031).
ccttattaaggaagtagat

SEQ ID NO: 142385 - DNA, 19 bp, Homo sapiens
  siRNA target sequence for DSG2 (NM_001943.1,1014-1032).
cttattaaggaagtagatt

SEQ ID NO: 142386 - DNA, 19 bp, Homo sapiens
  siRNA target sequence for DSG2 (NM_001943.1,1083-1101).
gcttttcacaagtcgatta

SEQ ID NO: 142387 - DNA, 19 bp, Homo sapiens
  siRNA target sequence for DSG2 (NM_001943.1,1177-1195).
gcagcgtcatctcaattta

SEQ ID NO: 142388 - DNA, 19 bp, Homo sapiens
  siRNA target sequence for DSG2 (NM_001943.1,1178-1196).
cagcgtcatctcaatttat

SEQ ID NO: 142389 - DNA, 19 bp, Homo sapiens
  siRNA target sequence for DSG2 (NM_001943.1,1180-1198).
gcgtcatctcaatttatgt

SEQ ID NO: 142390 - DNA, 19 bp, Homo sapiens
  siRNA target sequence for DSG2 (NM_001943.1,1181-1199).
cgtcatctcaatttatgtt

SEQ ID NO: 142391 - DNA, 19 bp, Homo sapiens
  siRNA target sequence for DSG2 (NM_001943.1,1182-1200).
gtcatctcaatttatgtta

SEQ ID NO: 142392 - DNA, 19 bp, Homo sapiens
  siRNA target sequence for DSG2 (NM_001943.1,1197-1215).
gttagcgagagcatggata

SEQ ID NO: 142393 - DNA, 19 bp, Homo sapiens
  siRNA target sequence for DSG2 (NM_001943.1,1202-1220).
cgagagcatggatagatca

SEQ ID NO: 142394 - DNA, 19 bp, Homo sapiens
  siRNA target sequence for DSG2 (NM_001943.1,1278-1296).
gcccatgcaagatatgtaa

SEQ ID NO: 142395 - DNA, 19 bp, Homo sapiens
  siRNA target sequence for DSG2 (NM_001943.1,1279-1297).
cccatgcaagatatgtaaa

SEQ ID NO: 142396 - DNA, 19 bp, Homo sapiens
  siRNA target sequence for DSG2 (NM_001943.1,1318-1336).
ggatctctgtggattctgt

SEQ ID NO: 142397 - DNA, 19 bp, Homo sapiens
  siRNA target sequence for DSG2 (NM_001943.1,1329-1347).
gattctgtcacatctgaaa

SEQ ID NO: 142398 - DNA, 19 bp, Homo sapiens
  siRNA target sequence for DSG2 (NM_001943.1,1362-1380).
cttcctgattttgaatcta

SEQ ID NO: 142399 - DNA, 19 bp, Homo sapiens
  siRNA target sequence for DSG2 (NM_001943.1,1365-1383).
cctgattttgaatctagat

SEQ ID NO: 142400 - DNA, 19 bp, Homo sapiens
  siRNA target sequence for DSG2 (NM_001943.1,1399-1417).
catacactgtaaagattgt

SEQ ID NO: 142401 - DNA, 19 bp, Homo sapiens
  siRNA target sequence for DSG2 (NM_001943.1,1416-1434).
gtggccatatcagaagatt

SEQ ID NO: 142402 - DNA, 19 bp, Homo sapiens
  siRNA target sequence for DSG2 (NM_001943.1,1418-1436).
ggccatatcagaagattat

SEQ ID NO: 142403 - DNA, 19 bp, Homo sapiens
  siRNA target sequence for DSG2 (NM_001943.1,1490-1508).
caactgtcccacactgata

SEQ ID NO: 142404 - DNA, 19 bp, Homo sapiens
  siRNA target sequence for DSG2 (NM_001943.1,1526-1544).
ctgtcacgatgcagagtat

SEQ ID NO: 142405 - DNA, 19 bp, Homo sapiens
  siRNA target sequence for DSG2 (NM_001943.1,1528-1546).
gtcacgatgcagagtatgt

SEQ ID NO: 142406 - DNA, 19 bp, Homo sapiens
  siRNA target sequence for DSG2 (NM_001943.1,1530-1548).
cacgatgcagagtatgtga

SEQ ID NO: 142407 - DNA, 19 bp, Homo sapiens
  siRNA target sequence for DSG2 (NM_001943.1,1532-1550).
cgatgcagagtatgtgaat

SEQ ID NO: 142408 - DNA, 19 bp, Homo sapiens
  siRNA target sequence for DSG2 (NM_001943.1,1536-1554).
gcagagtatgtgaatgtta

SEQ ID NO: 142409 - DNA, 19 bp, Homo sapiens
  siRNA target sequence for DSG2 (NM_001943.1,1568-1586).
ggatggacacccaaacagt

SEQ ID NO: 142410 - DNA, 19 bp, Homo sapiens
  siRNA target sequence for DSG2 (NM_001943.1,1597-1615).
gtttctccgtcattgacaa

SEQ ID NO: 142411 - DNA, 19 bp, Homo sapiens
  siRNA target sequence for DSG2 (NM_001943.1,1728-1746).
gacaatcagggttttagtt

SEQ ID NO: 142412 - DNA, 19 bp, Homo sapiens
  siRNA target sequence for DSG2 (NM_001943.1,1730-1748).
caatcagggttttagttgt

SEQ ID NO: 142413 - DNA, 19 bp, Homo sapiens
  siRNA target sequence for DSG2 (NM_001943.1,1761-1779).
gtccttacactcacagttt

SEQ ID NO: 142414 - DNA, 19 bp, Homo sapiens
  siRNA target sequence for DSG2 (NM_001943.1,1763-1781).
ccttacactcacagtttgt

SEQ ID NO: 142415 - DNA, 19 bp, Homo sapiens
  siRNA target sequence for DSG2 (NM_001943.1,1846-1864).
cagcaattgcgctcatgat

SEQ ID NO: 142416 - DNA, 19 bp, Homo sapiens
  siRNA target sequence for DSG2 (NM_001943.1,1848-1866).
gcaattgcgctcatgattt

SEQ ID NO: 142417 - DNA, 19 bp, Homo sapiens
  siRNA target sequence for DSG2 (NM_001943.1,1849-1867).
caattgcgctcatgatttt

SEQ ID NO: 142418 - DNA, 19 bp, Homo sapiens
  siRNA target sequence for DSG2 (NM_001943.1,1970-1988).
gcatccttggaataatgaa

SEQ ID NO: 142419 - DNA, 19 bp, Homo sapiens
  siRNA target sequence for DSG2 (NM_001943.1,2187-2205).
ggtagagctacccagttta

SEQ ID NO: 142420 - DNA, 19 bp, Homo sapiens
  siRNA target sequence for DSG2 (NM_001943.1,2209-2227).
gggccacaggcgctatcat

SEQ ID NO: 142421 - DNA, 19 bp, Homo sapiens
  siRNA target sequence for DSG2 (NM_001943.1,2211-2229).
gccacaggcgctatcatga

SEQ ID NO: 142422 - DNA, 19 bp, Homo sapiens
  siRNA target sequence for DSG2 (NM_001943.1,2220-2238).
gctatcatgaccactgaaa

SEQ ID NO: 142423 - DNA, 19 bp, Homo sapiens
  siRNA target sequence for DSG2 (NM_001943.1,2304-2322).
gcactgaacgaagaattct

SEQ ID NO: 142424 - DNA, 19 bp, Homo sapiens
  siRNA target sequence for DSG2 (NM_001943.1,2307-2325).
ctgaacgaagaattcttaa

SEQ ID NO: 142425 - DNA, 19 bp, Homo sapiens
  siRNA target sequence for DSG2 (NM_001943.1,2340-2358).
gataaagcggcctcttaca

SEQ ID NO: 142426 - DNA, 19 bp, Homo sapiens
  siRNA target sequence for DSG2 (NM_001943.1,2468-2486).
gctagatgaccgcttctta

SEQ ID NO: 142427 - DNA, 19 bp, Homo sapiens
  siRNA target sequence for DSG2 (NM_001943.1,2490-2508).
gatttgggacttaaattca

SEQ ID NO: 142428 - DNA, 19 bp, Homo sapiens
  siRNA target sequence for DSG2 (NM_001943.1,2531-2549).
gggtcaaaaaatagatata

SEQ ID NO: 142429 - DNA, 19 bp, Homo sapiens
  siRNA target sequence for DSG2 (NM_001943.1,2614-2632).
cactctgtgagcaaactat

SEQ ID NO: 142430 - DNA, 19 bp, Homo sapiens
  siRNA target sequence for DSG2 (NM_001943.1,2620-2638).
gtgagcaaactatggttaa

SEQ ID NO: 142431 - DNA, 19 bp, Homo sapiens
  siRNA target sequence for DSG2 (NM_001943.1,2622-2640).
gagcaaactatggttaatt

SEQ ID NO: 142432 - DNA, 19 bp, Homo sapiens
  siRNA target sequence for DSG2 (NM_001943.1,2712-2730).
gtaactcaggaaatagtca

SEQ ID NO: 142433 - DNA, 19 bp, Homo sapiens
  siRNA target sequence for DSG2 (NM_001943.1,2749-2767).
ctaggcaggcgcaaaaggt

SEQ ID NO: 142434 - DNA, 19 bp, Homo sapiens
  siRNA target sequence for DSG2 (NM_001943.1,2880-2898).
ccacagagccttattgtga

SEQ ID NO: 142435 - DNA, 19 bp, Homo sapiens
  siRNA target sequence for DSG2 (NM_001943.1,2920-2938).
cttctaccttggtagatca

SEQ ID NO: 142436 - DNA, 19 bp, Homo sapiens
  siRNA target sequence for DSG2 (NM_001943.1,2930-2948).
ggtagatcagccttatgct

SEQ ID NO: 142437 - DNA, 19 bp, Homo sapiens
  siRNA target sequence for DSG2 (NM_001943.1,2931-2949).
gtagatcagccttatgcta

SEQ ID NO: 142438 - DNA, 19 bp, Homo sapiens
  siRNA target sequence for DSG2 (NM_001943.1,2966-2984).
ggtcactgaaagagtaata

SEQ ID NO: 142439 - DNA, 19 bp, Homo sapiens
  siRNA target sequence for DSG2 (NM_001943.1,3253-3271).
ctggccctctgccagattt

SEQ ID NO: 142440 - DNA, 19 bp, Homo sapiens
  siRNA target sequence for DSG2 (NM_001943.1,3257-3275).
ccctctgccagattttggt

SEQ ID NO: 142441 - DNA, 19 bp, Homo sapiens
  siRNA target sequence for DSG2 (NM_001943.1,3258-3276).
cctctgccagattttggtt

SEQ ID NO: 142442 - DNA, 19 bp, Homo sapiens
  siRNA target sequence for DSG2 (NM_001943.1,3281-3299).
ggaatctggtcattctaat

SEQ ID NO: 142443 - DNA, 19 bp, Homo sapiens
  siRNA target sequence for DSG2 (NM_001943.1,3340-3358).
gcactgtacagcattctta

SEQ ID NO: 142444 - DNA, 19 bp, Homo sapiens
  siRNA target sequence for DSG3 (NM_001944.1,128-146).
cgtggtggtcatattggtt

SEQ ID NO: 142445 - DNA, 19 bp, Homo sapiens
  siRNA target sequence for DSG3 (NM_001944.1,150-168).
ggagaattgcgaatagaga

SEQ ID NO: 142446 - DNA, 19 bp, Homo sapiens
  siRNA target sequence for DSG3 (NM_001944.1,158-176).
gcgaatagagactaaaggt

SEQ ID NO: 142447 - DNA, 19 bp, Homo sapiens
  siRNA target sequence for DSG3 (NM_001944.1,167-185).
gactaaaggtcaatatgat

SEQ ID NO: 142448 - DNA, 19 bp, Homo sapiens
  siRNA target sequence for DSG3 (NM_001944.1,287-305).
cccaattgccaagattact

SEQ ID NO: 142449 - DNA, 19 bp, Homo sapiens
  siRNA target sequence for DSG3 (NM_001944.1,376-394).
gaatctttgttgttgacaa

SEQ ID NO: 142450 - DNA, 19 bp, Homo sapiens
  siRNA target sequence for DSG3 (NM_001944.1,458-476).
cacatgtcgggctctaaat

SEQ ID NO: 142451 - DNA, 19 bp, Homo sapiens
  siRNA target sequence for DSG3 (NM_001944.1,504-522).
cttatactaacggttaaaa

SEQ ID NO: 142452 - DNA, 19 bp, Homo sapiens
  siRNA target sequence for DSG3 (NM_001944.1,514-532).
cggttaaaattttggatat

SEQ ID NO: 142453 - DNA, 19 bp, Homo sapiens
  siRNA target sequence for DSG3 (NM_001944.1,585-603).
gaaaatagtgcctcaaact

SEQ ID NO: 142454 - DNA, 19 bp, Homo sapiens
  siRNA target sequence for DSG3 (NM_001944.1,639-657).
gaaccaaaccacttgaatt

SEQ ID NO: 142455 - DNA, 19 bp, Homo sapiens
  siRNA target sequence for DSG3 (NM_001944.1,642-660).
ccaaaccacttgaattcta

SEQ ID NO: 142456 - DNA, 19 bp, Homo sapiens
  siRNA target sequence for DSG3 (NM_001944.1,727-745).
ctggggaagtccgtacttt

SEQ ID NO: 142457 - DNA, 19 bp, Homo sapiens
  siRNA target sequence for DSG3 (NM_001944.1,729-747).
ggggaagtccgtactttga

SEQ ID NO: 142458 - DNA, 19 bp, Homo sapiens
  siRNA target sequence for DSG3 (NM_001944.1,735-753).
gtccgtactttgaccaatt

SEQ ID NO: 142459 - DNA, 19 bp, Homo sapiens
  siRNA target sequence for DSG3 (NM_001944.1,737-755).
ccgtactttgaccaattct

SEQ ID NO: 142460 - DNA, 19 bp, Homo sapiens
  siRNA target sequence for DSG3 (NM_001944.1,816-834).
gaaggactatcaactcaat

SEQ ID NO: 142461 - DNA, 19 bp, Homo sapiens
  siRNA target sequence for DSG3 (NM_001944.1,903-921).
gcacgtattgaagaaaata

SEQ ID NO: 142462 - DNA, 19 bp, Homo sapiens
  siRNA target sequence for DSG3 (NM_001944.1,904-922).
cacgtattgaagaaaatat

SEQ ID NO: 142463 - DNA, 19 bp, Homo sapiens
  siRNA target sequence for DSG3 (NM_001944.1,928-946).
gttctgaattacttcgatt

SEQ ID NO: 142464 - DNA, 19 bp, Homo sapiens
  siRNA target sequence for DSG3 (NM_001944.1,955-973).
cagatttggatgaagagta

SEQ ID NO: 142465 - DNA, 19 bp, Homo sapiens
  siRNA target sequence for DSG3 (NM_001944.1,1038-1056).
caaactgatcctagaacta

SEQ ID NO: 142466 - DNA, 19 bp, Homo sapiens
  siRNA target sequence for DSG3 (NM_001944.1,1074-1092).
gtggtgaaggctctagatt

SEQ ID NO: 142467 - DNA, 19 bp, Homo sapiens
  siRNA target sequence for DSG3 (NM_001944.1,1082-1100).
ggctctagattatgaacaa

SEQ ID NO: 142468 - DNA, 19 bp, Homo sapiens
  siRNA target sequence for DSG3 (NM_001944.1,1101-1119).
ctacaaagcgtgaaactta

SEQ ID NO: 142469 - DNA, 19 bp, Homo sapiens
  siRNA target sequence for DSG3 (NM_001944.1,1104-1122).
caaagcgtgaaacttagta

SEQ ID NO: 142470 - DNA, 19 bp, Homo sapiens
  siRNA target sequence for DSG3 (NM_001944.1,1109-1127).
cgtgaaacttagtattgct

SEQ ID NO: 142471 - DNA, 19 bp, Homo sapiens
  siRNA target sequence for DSG3 (NM_001944.1,1181-1199).
gtcaaccccagtcacaatt

SEQ ID NO: 142472 - DNA, 19 bp, Homo sapiens
  siRNA target sequence for DSG3 (NM_001944.1,1233-1251).
cgtcctgcttccaagacat

SEQ ID NO: 142473 - DNA, 19 bp, Homo sapiens
  siRNA target sequence for DSG3 (NM_001944.1,1257-1275).
gtgcaaaaaggcataagta

SEQ ID NO: 142474 - DNA, 19 bp, Homo sapiens
  siRNA target sequence for DSG3 (NM_001944.1,1266-1284).
ggcataagtagcaaaaaat

SEQ ID NO: 142475 - DNA, 19 bp, Homo sapiens
  siRNA target sequence for DSG3 (NM_001944.1,1267-1285).
gcataagtagcaaaaaatt

SEQ ID NO: 142476 - DNA, 19 bp, Homo sapiens
  siRNA target sequence for DSG3 (NM_001944.1,1378-1396).
gtggatacctaatgattga

SEQ ID NO: 142477 - DNA, 19 bp, Homo sapiens
  siRNA target sequence for DSG3 (NM_001944.1,1405-1423).
ctgctgaaatcaaatttgt

SEQ ID NO: 142478 - DNA, 19 bp, Homo sapiens
  siRNA target sequence for DSG3 (NM_001944.1,1407-1425).
gctgaaatcaaatttgtca

SEQ ID NO: 142479 - DNA, 19 bp, Homo sapiens
  siRNA target sequence for DSG3 (NM_001944.1,1436-1454).
ccgagattctactttcata

SEQ ID NO: 142480 - DNA, 19 bp, Homo sapiens
  siRNA target sequence for DSG3 (NM_001944.1,1478-1496).
ggttctggccatagatgaa

SEQ ID NO: 142481 - DNA, 19 bp, Homo sapiens
  siRNA target sequence for DSG3 (NM_001944.1,1494-1512).
gaatacacgggtaaaactt

SEQ ID NO: 142482 - DNA, 19 bp, Homo sapiens
  siRNA target sequence for DSG3 (NM_001944.1,1513-1531).
ctacaggcacggtatatgt

SEQ ID NO: 142483 - DNA, 19 bp, Homo sapiens
  siRNA target sequence for DSG3 (NM_001944.1,1519-1537).
gcacggtatatgttagagt

SEQ ID NO: 142484 - DNA, 19 bp, Homo sapiens
  siRNA target sequence for DSG3 (NM_001944.1,1520-1538).
cacggtatatgttagagta

SEQ ID NO: 142485 - DNA, 19 bp, Homo sapiens
  siRNA target sequence for DSG3 (NM_001944.1,1530-1548).
gttagagtacccgatttca

SEQ ID NO: 142486 - DNA, 19 bp, Homo sapiens
  siRNA target sequence for DSG3 (NM_001944.1,1534-1552).
gagtacccgatttcaatga

SEQ ID NO: 142487 - DNA, 19 bp, Homo sapiens
  siRNA target sequence for DSG3 (NM_001944.1,1536-1554).
gtacccgatttcaatgaca

SEQ ID NO: 142488 - DNA, 19 bp, Homo sapiens
  siRNA target sequence for DSG3 (NM_001944.1,1539-1557).
cccgatttcaatgacaatt

SEQ ID NO: 142489 - DNA, 19 bp, Homo sapiens
  siRNA target sequence for DSG3 (NM_001944.1,1541-1559).
cgatttcaatgacaattgt

SEQ ID NO: 142490 - DNA, 19 bp, Homo sapiens
  siRNA target sequence for DSG3 (NM_001944.1,1561-1579).
caacagctgtcctcgaaaa

SEQ ID NO: 142491 - DNA, 19 bp, Homo sapiens
  siRNA target sequence for DSG3 (NM_001944.1,1610-1628).
ggttgtctccgctagaaca

SEQ ID NO: 142492 - DNA, 19 bp, Homo sapiens
  siRNA target sequence for DSG3 (NM_001944.1,1616-1634).
ctccgctagaacactgaat

SEQ ID NO: 142493 - DNA, 19 bp, Homo sapiens
  siRNA target sequence for DSG3 (NM_001944.1,1689-1707).
cctgccgtatggagtatca

SEQ ID NO: 142494 - DNA, 19 bp, Homo sapiens
  siRNA target sequence for DSG3 (NM_001944.1,1692-1710).
gccgtatggagtatcacaa

SEQ ID NO: 142495 - DNA, 19 bp, Homo sapiens
  siRNA target sequence for DSG3 (NM_001944.1,1772-1790).
catctccctggtacttaca

SEQ ID NO: 142496 - DNA, 19 bp, Homo sapiens
  siRNA target sequence for DSG3 (NM_001944.1,1861-1879).
gcatctgtggaacttctta

SEQ ID NO: 142497 - DNA, 19 bp, Homo sapiens
  siRNA target sequence for DSG3 (NM_001944.1,2065-2083).
gctcagaaggaacaattca

SEQ ID NO: 142498 - DNA, 19 bp, Homo sapiens
  siRNA target sequence for DSG3 (NM_001944.1,2154-2172).
gccaatggagccgatttca

SEQ ID NO: 142499 - DNA, 19 bp, Homo sapiens
  siRNA target sequence for DSG3 (NM_001944.1,2155-2173).
ccaatggagccgatttcat

SEQ ID NO: 142500 - DNA, 19 bp, Homo sapiens
  siRNA target sequence for DSG3 (NM_001944.1,2160-2178).
ggagccgatttcatggaaa

SEQ ID NO: 142501 - DNA, 19 bp, Homo sapiens
  siRNA target sequence for DSG3 (NM_001944.1,2163-2181).
gccgatttcatggaaagtt

SEQ ID NO: 142502 - DNA, 19 bp, Homo sapiens
  siRNA target sequence for DSG3 (NM_001944.1,2165-2183).
cgatttcatggaaagttct

SEQ ID NO: 142503 - DNA, 19 bp, Homo sapiens
  siRNA target sequence for DSG3 (NM_001944.1,2227-2245).
gcacttcaggaatggaaat

SEQ ID NO: 142504 - DNA, 19 bp, Homo sapiens
  siRNA target sequence for DSG3 (NM_001944.1,2421-2439).
gctgatggggcgataagca

SEQ ID NO: 142505 - DNA, 19 bp, Homo sapiens
  siRNA target sequence for DSG3 (NM_001944.1,2422-2440).
ctgatggggcgataagcat

SEQ ID NO: 142506 - DNA, 19 bp, Homo sapiens
  siRNA target sequence for DSG3 (NM_001944.1,2427-2445).
ggggcgataagcatgaatt

SEQ ID NO: 142507 - DNA, 19 bp, Homo sapiens
  siRNA target sequence for DSG3 (NM_001944.1,2428-2446).
gggcgataagcatgaattt

SEQ ID NO: 142508 - DNA, 19 bp, Homo sapiens
  siRNA target sequence for DSG3 (NM_001944.1,2429-2447).
ggcgataagcatgaatttt

SEQ ID NO: 142509 - DNA, 19 bp, Homo sapiens
  siRNA target sequence for DSG3 (NM_001944.1,2431-2449).
cgataagcatgaattttct

SEQ ID NO: 142510 - DNA, 19 bp, Homo sapiens
  siRNA target sequence for DSG3 (NM_001944.1,2509-2527).
caaatgactgcttgttgat

SEQ ID NO: 142511 - DNA, 19 bp, Homo sapiens
  siRNA target sequence for DSG3 (NM_001944.1,2516-2534).
ctgcttgttgatctatgat

SEQ ID NO: 142512 - DNA, 19 bp, Homo sapiens
  siRNA target sequence for DSG3 (NM_001944.1,2518-2536).
gcttgttgatctatgataa

SEQ ID NO: 142513 - DNA, 19 bp, Homo sapiens
  siRNA target sequence for DSG3 (NM_001944.1,2573-2591).
cgtgggttgttgcagtttt

SEQ ID NO: 142514 - DNA, 19 bp, Homo sapiens
  siRNA target sequence for DSG3 (NM_001944.1,2624-2642).
ctcacttggacccaaattt

SEQ ID NO: 142515 - DNA, 19 bp, Homo sapiens
  siRNA target sequence for DSG3 (NM_001944.1,2626-2644).
cacttggacccaaatttaa

SEQ ID NO: 142516 - DNA, 19 bp, Homo sapiens
  siRNA target sequence for DSG3 (NM_001944.1,2711-2729).
cagcggttatgggattgaa

SEQ ID NO: 142517 - DNA, 19 bp, Homo sapiens
  siRNA target sequence for DSG3 (NM_001944.1,2732-2750).
ctgtggccatcccatagaa

SEQ ID NO: 142518 - DNA, 19 bp, Homo sapiens
  siRNA target sequence for DSG3 (NM_001944.1,2780-2798).
gactttgtcaggaagtcaa

SEQ ID NO: 142519 - DNA, 19 bp, Homo sapiens
  siRNA target sequence for DSG3 (NM_001944.1,2859-2877).
ctgcagcatggtaactatt

SEQ ID NO: 142520 - DNA, 19 bp, Homo sapiens
  siRNA target sequence for DSG3 (NM_001944.1,2861-2879).
gcagcatggtaactattta

SEQ ID NO: 142521 - DNA, 19 bp, Homo sapiens
  siRNA target sequence for DSG3 (NM_001944.1,2864-2882).
gcatggtaactatttagta

SEQ ID NO: 142522 - DNA, 19 bp, Homo sapiens
  siRNA target sequence for DSG3 (NM_001944.1,2865-2883).
catggtaactatttagtaa

SEQ ID NO: 142523 - DNA, 19 bp, Homo sapiens
  siRNA target sequence for DSG3 (NM_001944.1,2937-2955).
gatccacttctcacacaaa

SEQ ID NO: 142524 - DNA, 19 bp, Homo sapiens
  siRNA target sequence for DSG3 (NM_001944.1,3026-3044).
gctacgagggtcacatact

SEQ ID NO: 142525 - DNA, 19 bp, Homo sapiens
  siRNA target sequence for DSG3 (NM_001944.1,3027-3045).
ctacgagggtcacatacta

SEQ ID NO: 142526 - DNA, 19 bp, Homo sapiens
  siRNA target sequence for DSG3 (NM_001944.1,3063-3081).
ccttgctcccgtctaatat

SEQ ID NO: 142527 - DNA, 19 bp, Homo sapiens
  siRNA target sequence for DSG4 (NM_177986.2,164-182).
gccttttgatcattctaat

SEQ ID NO: 142528 - DNA, 19 bp, Homo sapiens
  siRNA target sequence for DSG4 (NM_177986.2,184-202).
gtggtgatggaagtaaaca

SEQ ID NO: 142529 - DNA, 19 bp, Homo sapiens
  siRNA target sequence for DSG4 (NM_177986.2,186-204).
ggtgatggaagtaaacagt

SEQ ID NO: 142530 - DNA, 19 bp, Homo sapiens
  siRNA target sequence for DSG4 (NM_177986.2,217-235).
gaggtgaaggaatttgaca

SEQ ID NO: 142531 - DNA, 19 bp, Homo sapiens
  siRNA target sequence for DSG4 (NM_177986.2,238-256).
gaaaatggcactacaaaat

SEQ ID NO: 142532 - DNA, 19 bp, Homo sapiens
  siRNA target sequence for DSG4 (NM_177986.2,279-297).
gcgggagtggatcaagttt

SEQ ID NO: 142533 - DNA, 19 bp, Homo sapiens
  siRNA target sequence for DSG4 (NM_177986.2,356-374).
gatcagactgcgaatcgaa

SEQ ID NO: 142534 - DNA, 19 bp, Homo sapiens
  siRNA target sequence for DSG4 (NM_177986.2,365-383).
gcgaatcgaaccagaagat

SEQ ID NO: 142535 - DNA, 19 bp, Homo sapiens
  siRNA target sequence for DSG4 (NM_177986.2,366-384).
cgaatcgaaccagaagata

SEQ ID NO: 142536 - DNA, 19 bp, Homo sapiens
  siRNA target sequence for DSG4 (NM_177986.2,371-389).
cgaaccagaagataacata

SEQ ID NO: 142537 - DNA, 19 bp, Homo sapiens
  siRNA target sequence for DSG4 (NM_177986.2,381-399).
gataacataccggatttct

SEQ ID NO: 142538 - DNA, 19 bp, Homo sapiens
  siRNA target sequence for DSG4 (NM_177986.2,408-426).
gattgatcgaccaccatat

SEQ ID NO: 142539 - DNA, 19 bp, Homo sapiens
  siRNA target sequence for DSG4 (NM_177986.2,429-447).
ggtattcaccattaatcct

SEQ ID NO: 142540 - DNA, 19 bp, Homo sapiens
  siRNA target sequence for DSG4 (NM_177986.2,448-466).
cgcactggggaaattaaca

SEQ ID NO: 142541 - DNA, 19 bp, Homo sapiens
  siRNA target sequence for DSG4 (NM_177986.2,454-472).
ggggaaattaacatcactt

SEQ ID NO: 142542 - DNA, 19 bp, Homo sapiens
  siRNA target sequence for DSG4 (NM_177986.2,477-495).
ggtagacagagaaataact

SEQ ID NO: 142543 - DNA, 19 bp, Homo sapiens
  siRNA target sequence for DSG4 (NM_177986.2,494-512).
ctccacttttcttgatcta

SEQ ID NO: 142544 - DNA, 19 bp, Homo sapiens
  siRNA target sequence for DSG4 (NM_177986.2,532-550).
cggggtgaagatttagaaa

SEQ ID NO: 142545 - DNA, 19 bp, Homo sapiens
  siRNA target sequence for DSG4 (NM_177986.2,570-588).
caaagttatggacataaat

SEQ ID NO: 142546 - DNA, 19 bp, Homo sapiens
  siRNA target sequence for DSG4 (NM_177986.2,574-592).
gttatggacataaatgata

SEQ ID NO: 142547 - DNA, 19 bp, Homo sapiens
  siRNA target sequence for DSG4 (NM_177986.2,589-607).
gataacgctccagtctttt

SEQ ID NO: 142548 - DNA, 19 bp, Homo sapiens
  siRNA target sequence for DSG4 (NM_177986.2,599-617).
cagtcttttcgcaaagtgt

SEQ ID NO: 142549 - DNA, 19 bp, Homo sapiens
  siRNA target sequence for DSG4 (NM_177986.2,649-667).
gccaatacattggtagtaa

SEQ ID NO: 142550 - DNA, 19 bp, Homo sapiens
  siRNA target sequence for DSG4 (NM_177986.2,650-668).
ccaatacattggtagtaaa

SEQ ID NO: 142551 - DNA, 19 bp, Homo sapiens
  siRNA target sequence for DSG4 (NM_177986.2,746-764).
caggtgcacccatgttcat

SEQ ID NO: 142552 - DNA, 19 bp, Homo sapiens
  siRNA target sequence for DSG4 (NM_177986.2,815-833).
gagagcaacacagtatgta

SEQ ID NO: 142553 - DNA, 19 bp, Homo sapiens
  siRNA target sequence for DSG4 (NM_177986.2,895-913).
gactgtagaatcaaggttt

SEQ ID NO: 142554 - DNA, 19 bp, Homo sapiens
  siRNA target sequence for DSG4 (NM_177986.2,910-928).
gttttagacgtcaacgata

SEQ ID NO: 142555 - DNA, 19 bp, Homo sapiens
  siRNA target sequence for DSG4 (NM_177986.2,936-954).
caccttagagaaaacttca

SEQ ID NO: 142556 - DNA, 19 bp, Homo sapiens
  siRNA target sequence for DSG4 (NM_177986.2,980-998).
gtttaagttcggaactgat

SEQ ID NO: 142557 - DNA, 19 bp, Homo sapiens
  siRNA target sequence for DSG4 (NM_177986.2,986-1004).
gttcggaactgatacgatt

SEQ ID NO: 142558 - DNA, 19 bp, Homo sapiens
  siRNA target sequence for DSG4 (NM_177986.2,989-1007).
cggaactgatacgattaca

SEQ ID NO: 142559 - DNA, 19 bp, Homo sapiens
  siRNA target sequence for DSG4 (NM_177986.2,990-1008).
ggaactgatacgattacaa

SEQ ID NO: 142560 - DNA, 19 bp, Homo sapiens
  siRNA target sequence for DSG4 (NM_177986.2,996-1014).
gatacgattacaagcaatt

SEQ ID NO: 142561 - DNA, 19 bp, Homo sapiens
  siRNA target sequence for DSG4 (NM_177986.2,1075-1093).
gatgggaattggttcgata

SEQ ID NO: 142562 - DNA, 19 bp, Homo sapiens
  siRNA target sequence for DSG4 (NM_177986.2,1079-1097).
ggaattggttcgatattca

SEQ ID NO: 142563 - DNA, 19 bp, Homo sapiens
  siRNA target sequence for DSG4 (NM_177986.2,1080-1098).
gaattggttcgatattcaa

SEQ ID NO: 142564 - DNA, 19 bp, Homo sapiens
  siRNA target sequence for DSG4 (NM_177986.2,1085-1103).
ggttcgatattcaaacaga

SEQ ID NO: 142565 - DNA, 19 bp, Homo sapiens
  siRNA target sequence for DSG4 (NM_177986.2,1086-1104).
gttcgatattcaaacagat

SEQ ID NO: 142566 - DNA, 19 bp, Homo sapiens
  siRNA target sequence for DSG4 (NM_177986.2,1162-1180).
cctaacattcagcttagta

SEQ ID NO: 142567 - DNA, 19 bp, Homo sapiens
  siRNA target sequence for DSG4 (NM_177986.2,1173-1191).
gcttagtatcggagttaaa

SEQ ID NO: 142568 - DNA, 19 bp, Homo sapiens
  siRNA target sequence for DSG4 (NM_177986.2,1174-1192).
cttagtatcggagttaaaa

SEQ ID NO: 142569 - DNA, 19 bp, Homo sapiens
  siRNA target sequence for DSG4 (NM_177986.2,1178-1196).
gtatcggagttaaaaacca

SEQ ID NO: 142570 - DNA, 19 bp, Homo sapiens
  siRNA target sequence for DSG4 (NM_177986.2,1209-1227).
ctactccgttgcttctcaa

SEQ ID NO: 142571 - DNA, 19 bp, Homo sapiens
  siRNA target sequence for DSG4 (NM_177986.2,1214-1232).
ccgttgcttctcaattcca

SEQ ID NO: 142572 - DNA, 19 bp, Homo sapiens
  siRNA target sequence for DSG4 (NM_177986.2,1241-1259).
caacccctgtgagaattca

SEQ ID NO: 142573 - DNA, 19 bp, Homo sapiens
  siRNA target sequence for DSG4 (NM_177986.2,1286-1304).
catttcatccaagtactat

SEQ ID NO: 142574 - DNA, 19 bp, Homo sapiens
  siRNA target sequence for DSG4 (NM_177986.2,1313-1331).
gtgtgcgggaaggaataaa

SEQ ID NO: 142575 - DNA, 19 bp, Homo sapiens
  siRNA target sequence for DSG4 (NM_177986.2,1364-1382).
catatacagccatagattt

SEQ ID NO: 142576 - DNA, 19 bp, Homo sapiens
  siRNA target sequence for DSG4 (NM_177986.2,1429-1447).
gatgcaggcagctggttaa

SEQ ID NO: 142577 - DNA, 19 bp, Homo sapiens
  siRNA target sequence for DSG4 (NM_177986.2,1437-1455).
cagctggttaaaaattgat

SEQ ID NO: 142578 - DNA, 19 bp, Homo sapiens
  siRNA target sequence for DSG4 (NM_177986.2,1457-1475).
caagaactggtgagataca

SEQ ID NO: 142579 - DNA, 19 bp, Homo sapiens
  siRNA target sequence for DSG4 (NM_177986.2,1460-1478).
gaactggtgagatacaatt

SEQ ID NO: 142580 - DNA, 19 bp, Homo sapiens
  siRNA target sequence for DSG4 (NM_177986.2,1465-1483).
ggtgagatacaattttcta

SEQ ID NO: 142581 - DNA, 19 bp, Homo sapiens
  siRNA target sequence for DSG4 (NM_177986.2,1486-1504).
gaatttgataagaagtcaa

SEQ ID NO: 142582 - DNA, 19 bp, Homo sapiens
  siRNA target sequence for DSG4 (NM_177986.2,1532-1550).
cagagatcctggctataga

SEQ ID NO: 142583 - DNA, 19 bp, Homo sapiens
  siRNA target sequence for DSG4 (NM_177986.2,1594-1612).
gttcctgatatcaatgatt

SEQ ID NO: 142584 - DNA, 19 bp, Homo sapiens
  siRNA target sequence for DSG4 (NM_177986.2,1751-1769).
gggatgtcagatcaacaaa

SEQ ID NO: 142585 - DNA, 19 bp, Homo sapiens
  siRNA target sequence for DSG4 (NM_177986.2,1752-1770).
ggatgtcagatcaacaaat

SEQ ID NO: 142586 - DNA, 19 bp, Homo sapiens
  siRNA target sequence for DSG4 (NM_177986.2,1756-1774).
gtcagatcaacaaatgcta

SEQ ID NO: 142587 - DNA, 19 bp, Homo sapiens
  siRNA target sequence for DSG4 (NM_177986.2,1771-1789).
gctacctcggcaatcctta

SEQ ID NO: 142588 - DNA, 19 bp, Homo sapiens
  siRNA target sequence for DSG4 (NM_177986.2,1791-1809).
ggctaagcaggttttatct

SEQ ID NO: 142589 - DNA, 19 bp, Homo sapiens
  siRNA target sequence for DSG4 (NM_177986.2,1800-1818).
ggttttatctccaggattt

SEQ ID NO: 142590 - DNA, 19 bp, Homo sapiens
  siRNA target sequence for DSG4 (NM_177986.2,1839-1857).
gaaggacagctataacaga

SEQ ID NO: 142591 - DNA, 19 bp, Homo sapiens
  siRNA target sequence for DSG4 (NM_177986.2,1892-1910).
cctgtgattgcgatgacaa

SEQ ID NO: 142592 - DNA, 19 bp, Homo sapiens
  siRNA target sequence for DSG4 (NM_177986.2,2050-2068).
ggcatcctgctactgattt

SEQ ID NO: 142593 - DNA, 19 bp, Homo sapiens
  siRNA target sequence for DSG4 (NM_177986.2,2051-2069).
gcatcctgctactgatttt

SEQ ID NO: 142594 - DNA, 19 bp, Homo sapiens
  siRNA target sequence for DSG4 (NM_177986.2,2166-2184).
gatgcagtcttggagaatt

SEQ ID NO: 142595 - DNA, 19 bp, Homo sapiens
  siRNA target sequence for DSG4 (NM_177986.2,2169-2187).
gcagtcttggagaattgaa

SEQ ID NO: 142596 - DNA, 19 bp, Homo sapiens
  siRNA target sequence for DSG4 (NM_177986.2,2202-2220).
ggacagggatgtgtcaaat

SEQ ID NO: 142597 - DNA, 19 bp, Homo sapiens
  siRNA target sequence for DSG4 (NM_177986.2,2203-2221).
gacagggatgtgtcaaata

SEQ ID NO: 142598 - DNA, 19 bp, Homo sapiens
  siRNA target sequence for DSG4 (NM_177986.2,2205-2223).
cagggatgtgtcaaatata

SEQ ID NO: 142599 - DNA, 19 bp, Homo sapiens
  siRNA target sequence for DSG4 (NM_177986.2,2208-2226).
ggatgtgtcaaatatatgt

SEQ ID NO: 142600 - DNA, 19 bp, Homo sapiens
  siRNA target sequence for DSG4 (NM_177986.2,2230-2248).
cccatgacagcctcaaata

SEQ ID NO: 142601 - DNA, 19 bp, Homo sapiens
  siRNA target sequence for DSG4 (NM_177986.2,2257-2275).
cggatggattcctctgaaa

SEQ ID NO: 142602 - DNA, 19 bp, Homo sapiens
  siRNA target sequence for DSG4 (NM_177986.2,2258-2276).
ggatggattcctctgaaat

SEQ ID NO: 142603 - DNA, 19 bp, Homo sapiens
  siRNA target sequence for DSG4 (NM_177986.2,2486-2504).
cggagaaagcgtatgctta

SEQ ID NO: 142604 - DNA, 19 bp, Homo sapiens
  siRNA target sequence for DSG4 (NM_177986.2,2487-2505).
ggagaaagcgtatgcttat

SEQ ID NO: 142605 - DNA, 19 bp, Homo sapiens
  siRNA target sequence for DSG4 (NM_177986.2,2521-2539).
ggtcgaccagccaatgact

SEQ ID NO: 142606 - DNA, 19 bp, Homo sapiens
  siRNA target sequence for DSG4 (NM_177986.2,2575-2593).
cccgtaggctctattggtt

SEQ ID NO: 142607 - DNA, 19 bp, Homo sapiens
  siRNA target sequence for DSG4 (NM_177986.2,2604-2622).
gattgtggatgacttagat

SEQ ID NO: 142608 - DNA, 19 bp, Homo sapiens
  siRNA target sequence for DSG4 (NM_177986.2,2662-2680).
cttgctgagatctgcttaa

SEQ ID NO: 142609 - DNA, 19 bp, Homo sapiens
  siRNA target sequence for DSG4 (NM_177986.2,2707-2725).
caccaggcttgtataccaa

SEQ ID NO: 142610 - DNA, 19 bp, Homo sapiens
  siRNA target sequence for DSG4 (NM_177986.2,2712-2730).
ggcttgtataccaatcagt

SEQ ID NO: 142611 - DNA, 19 bp, Homo sapiens
  siRNA target sequence for DSG4 (NM_177986.2,2713-2731).
gcttgtataccaatcagta

SEQ ID NO: 142612 - DNA, 19 bp, Homo sapiens
  siRNA target sequence for DSG4 (NM_177986.2,2740-2758).
cctttgctcggacctaatt

SEQ ID NO: 142613 - DNA, 19 bp, Homo sapiens
  siRNA target sequence for DSG4 (NM_177986.2,2741-2759).
ctttgctcggacctaatta

SEQ ID NO: 142614 - DNA, 19 bp, Homo sapiens
  siRNA target sequence for DSG4 (NM_177986.2,2745-2763).
gctcggacctaattacttt

SEQ ID NO: 142615 - DNA, 19 bp, Homo sapiens
  siRNA target sequence for DSG4 (NM_177986.2,2748-2766).
cggacctaattactttgtt

SEQ ID NO: 142616 - DNA, 19 bp, Homo sapiens
  siRNA target sequence for DSG4 (NM_177986.2,2750-2768).
gacctaattactttgttaa

SEQ ID NO: 142617 - DNA, 19 bp, Homo sapiens
  siRNA target sequence for DSG4 (NM_177986.2,2833-2851).
gtggtccatggggatatta

SEQ ID NO: 142618 - DNA, 19 bp, Homo sapiens
  siRNA target sequence for DSG4 (NM_177986.2,2839-2857).
catggggatattattgtga

SEQ ID NO: 142619 - DNA, 19 bp, Homo sapiens
  siRNA target sequence for DSG4 (NM_177986.2,2885-2903).
gtgtgcaacccactacaat

SEQ ID NO: 142620 - DNA, 19 bp, Homo sapiens
  siRNA target sequence for DSG4 (NM_177986.2,2887-2905).
gtgcaacccactacaatta

SEQ ID NO: 142621 - DNA, 19 bp, Homo sapiens
  siRNA target sequence for DSG4 (NM_177986.2,2889-2907).
gcaacccactacaattatt

SEQ ID NO: 142622 - DNA, 19 bp, Homo sapiens
  siRNA target sequence for DSG4 (NM_177986.2,2957-2975).
cacctgtctatgatattca

SEQ ID NO: 142623 - DNA, 19 bp, Homo sapiens
  siRNA target sequence for DSG4 (NM_177986.2,3000-3018).
gttagcagattacaacaat

SEQ ID NO: 142624 - DNA, 19 bp, Homo sapiens
  siRNA target sequence for DSG4 (NM_177986.2,3077-3095).
gcacgactgagggttgtat

SEQ ID NO: 142625 - DNA, 19 bp, Homo sapiens
  siRNA target sequence for DSG4 (NM_177986.2,3101-3119).
ctgtgatgagcggcaatat

SEQ ID NO: 142626 - DNA, 19 bp, Homo sapiens
  siRNA target sequence for DSG4 (NM_177986.2,3103-3121).
gtgatgagcggcaatattt

SEQ ID NO: 142627 - DNA, 19 bp, Homo sapiens
  siRNA target sequence for DSG4 (NM_177986.2,3105-3123).
gatgagcggcaatatttta

SEQ ID NO: 142628 - DNA, 19 bp, Homo sapiens
  siRNA target sequence for DSG4 (NM_177986.2,3139-3157).
caagtgatgcaaatgatga

SEQ ID NO: 142629 - DNA, 19 bp, Homo sapiens
  siRNA target sequence for DSG4 (NM_177986.2,3216-3234).
cagagtaacacgatacagt

SEQ ID NO: 142630 - DNA, 19 bp, Homo sapiens
  siRNA target sequence for DSG4 (NM_177986.2,3218-3236).
gagtaacacgatacagtaa

SEQ ID NO: 142631 - DNA, 19 bp, Homo sapiens
  siRNA target sequence for DSG4 (NM_177986.2,3220-3238).
gtaacacgatacagtaaca

SEQ ID NO: 142632 - DNA, 19 bp, Homo sapiens
  siRNA target sequence for DSG4 (NM_177986.2,3224-3242).
cacgatacagtaacataca

SEQ ID NO: 142633 - DNA, 19 bp, Homo sapiens
  siRNA target sequence for DSG4 (NM_177986.2,3227-3245).
gatacagtaacatacatta

SEQ ID NO: 142634 - DNA, 19 bp, Homo sapiens
  siRNA target sequence for DUOX1 (NM_017434.3,578-596).
cttagcaacaccatctcaa

SEQ ID NO: 142635 - DNA, 19 bp, Homo sapiens
  siRNA target sequence for DUOX1 (NM_017434.3,654-672).
gctatcacgtgctttcaga

SEQ ID NO: 142636 - DNA, 19 bp, Homo sapiens
  siRNA target sequence for DUOX1 (NM_017434.3,1384-1402).
cttccagggggtcatcaat

SEQ ID NO: 142637 - DNA, 19 bp, Homo sapiens
  siRNA target sequence for DUOX1 (NM_017434.3,1394-1412).
gtcatcaatcggaactcaa

SEQ ID NO: 142638 - DNA, 19 bp, Homo sapiens
  siRNA target sequence for DUOX1 (NM_017434.3,1537-1555).
ccatgtgttggttgaagat

SEQ ID NO: 142639 - DNA, 19 bp, Homo sapiens
  siRNA target sequence for DUOX1 (NM_017434.3,1550-1568).
gaagatgtgcgggatttct

SEQ ID NO: 142640 - DNA, 19 bp, Homo sapiens
  siRNA target sequence for DUOX1 (NM_017434.3,1842-1860).
ccatcgtccttgaacaatt

SEQ ID NO: 142641 - DNA, 19 bp, Homo sapiens
  siRNA target sequence for DUOX1 (NM_017434.3,2091-2109).
ctgttgttcgtgactattt

SEQ ID NO: 142642 - DNA, 19 bp, Homo sapiens
  siRNA target sequence for DUOX1 (NM_017434.3,2198-2216).
cggctccggatgagaaatt

SEQ ID NO: 142643 - DNA, 19 bp, Homo sapiens
  siRNA target sequence for DUOX1 (NM_017434.3,2199-2217).
ggctccggatgagaaattt

SEQ ID NO: 142644 - DNA, 19 bp, Homo sapiens
  siRNA target sequence for DUOX1 (NM_017434.3,2204-2222).
cggatgagaaatttcaaga

SEQ ID NO: 142645 - DNA, 19 bp, Homo sapiens
  siRNA target sequence for DUOX1 (NM_017434.3,2400-2418).
ctccacagaaggtcaactt

SEQ ID NO: 142646 - DNA, 19 bp, Homo sapiens
  siRNA target sequence for DUOX1 (NM_017434.3,2942-2960).
gatgggaatggcctcattt

SEQ ID NO: 142647 - DNA, 19 bp, Homo sapiens
  siRNA target sequence for DUOX1 (NM_017434.3,2946-2964).
ggaatggcctcatttccaa

SEQ ID NO: 142648 - DNA, 19 bp, Homo sapiens
  siRNA target sequence for DUOX1 (NM_017434.3,3261-3279).
gttcccgcagcgacattga

SEQ ID NO: 142649 - DNA, 19 bp, Homo sapiens
  siRNA target sequence for DUOX1 (NM_017434.3,3483-3501).
gctgcgtggccgtgttcta

SEQ ID NO: 142650 - DNA, 19 bp, Homo sapiens
  siRNA target sequence for DUOX1 (NM_017434.3,3524-3542).
ctggagagggcctactact

SEQ ID NO: 142651 - DNA, 19 bp, Homo sapiens
  siRNA target sequence for DUOX1 (NM_017434.3,4575-4593).
gccaagtgttctgtaagaa

SEQ ID NO: 142652 - DNA, 19 bp, Homo sapiens
  siRNA target sequence for DUOX1 (NM_017434.3,4980-4998).
cccaccattatgagaactt

SEQ ID NO: 142653 - DNA, 19 bp, Homo sapiens
  siRNA target sequence for DUOX2 (NM_014080.3,312-330).
cgctatgacggctggttta

SEQ ID NO: 142654 - DNA, 19 bp, Homo sapiens
  siRNA target sequence for DUOX2 (NM_014080.3,313-331).
gctatgacggctggtttaa

SEQ ID NO: 142655 - DNA, 19 bp, Homo sapiens
  siRNA target sequence for DUOX2 (NM_014080.3,508-526).
ccgtactgggggtcttctt

SEQ ID NO: 142656 - DNA, 19 bp, Homo sapiens
  siRNA target sequence for DUOX2 (NM_014080.3,509-527).
cgtactgggggtcttcttt

SEQ ID NO: 142657 - DNA, 19 bp, Homo sapiens
  siRNA target sequence for DUOX2 (NM_014080.3,2050-2068).
ctggagtggtggcctattt

SEQ ID NO: 142658 - DNA, 19 bp, Homo sapiens
  siRNA target sequence for DUOX2 (NM_014080.3,2176-2194).
ggagcagtcccatcatcat

SEQ ID NO: 142659 - DNA, 19 bp, Homo sapiens
  siRNA target sequence for DUOX2 (NM_014080.3,2775-2793).
gataagtcccgtctaatgt

SEQ ID NO: 142660 - DNA, 19 bp, Homo sapiens
  siRNA target sequence for DUOX2 (NM_014080.3,3268-3286).
gcttcctagcccaaaagct

SEQ ID NO: 142661 - DNA, 19 bp, Homo sapiens
  siRNA target sequence for DUOX2 (NM_014080.3,3548-3566).
ccgctatgtgccttttgat

SEQ ID NO: 142662 - DNA, 19 bp, Homo sapiens
  siRNA target sequence for DUOX2 (NM_014080.3,3631-3649).
ctggccacgcagtcaatgt

SEQ ID NO: 142663 - DNA, 19 bp, Homo sapiens
  siRNA target sequence for DUOX2 (NM_014080.3,3633-3651).
ggccacgcagtcaatgtct

SEQ ID NO: 142664 - DNA, 19 bp, Homo sapiens
  siRNA target sequence for DUOX2 (NM_014080.3,3634-3652).
gccacgcagtcaatgtcta

SEQ ID NO: 142665 - DNA, 19 bp, Homo sapiens
  siRNA target sequence for DUOX2 (NM_014080.3,3695-3713).
ccccaacgtctttgtgaat

SEQ ID NO: 142666 - DNA, 19 bp, Homo sapiens
  siRNA target sequence for DUOX2 (NM_014080.3,3698-3716).
caacgtctttgtgaatgat

SEQ ID NO: 142667 - DNA, 19 bp, Homo sapiens
  siRNA target sequence for DUOX2 (NM_014080.3,3729-3747).
ccccagaagttctattggt

SEQ ID NO: 142668 - DNA, 19 bp, Homo sapiens
  siRNA target sequence for DUOX2 (NM_014080.3,3758-3776).
gaccgtcccaggtatgaca

SEQ ID NO: 142669 - DNA, 19 bp, Homo sapiens
  siRNA target sequence for DUOX2 (NM_014080.3,4051-4069).
gagtgacctacctgcaatt

SEQ ID NO: 142670 - DNA, 19 bp, Homo sapiens
  siRNA target sequence for DUOX2 (NM_014080.3,4420-4438).
gcagccaaatgctgtgtaa

SEQ ID NO: 142671 - DNA, 19 bp, Homo sapiens
  siRNA target sequence for EDEM1 (NM_014674.1,561-579).
gggacccttcaaatctgaa

SEQ ID NO: 142672 - DNA, 19 bp, Homo sapiens
  siRNA target sequence for EDEM1 (NM_014674.1,577-595).
gaacatcaatgatgtacta

SEQ ID NO: 142673 - DNA, 19 bp, Homo sapiens
  siRNA target sequence for EDEM1 (NM_014674.1,587-605).
gatgtactagggaactact

SEQ ID NO: 142674 - DNA, 19 bp, Homo sapiens
  siRNA target sequence for EDEM1 (NM_014674.1,590-608).
gtactagggaactactcat

SEQ ID NO: 142675 - DNA, 19 bp, Homo sapiens
  siRNA target sequence for EDEM1 (NM_014674.1,593-611).
ctagggaactactcattga

SEQ ID NO: 142676 - DNA, 19 bp, Homo sapiens
  siRNA target sequence for EDEM1 (NM_014674.1,601-619).
ctactcattgactcttgtt

SEQ ID NO: 142677 - DNA, 19 bp, Homo sapiens
  siRNA target sequence for EDEM1 (NM_014674.1,604-622).
ctcattgactcttgttgat

SEQ ID NO: 142678 - DNA, 19 bp, Homo sapiens
  siRNA target sequence for EDEM1 (NM_014674.1,683-701).
gtgatcaacacagtttcat

SEQ ID NO: 142679 - DNA, 19 bp, Homo sapiens
  siRNA target sequence for EDEM1 (NM_014674.1,714-732).
ccaccgtccaagtctttga

SEQ ID NO: 142680 - DNA, 19 bp, Homo sapiens
  siRNA target sequence for EDEM1 (NM_014674.1,799-817).
ctttggtgacatgacaatt

SEQ ID NO: 142681 - DNA, 19 bp, Homo sapiens
  siRNA target sequence for EDEM1 (NM_014674.1,804-822).
gtgacatgacaattaagga

SEQ ID NO: 142682 - DNA, 19 bp, Homo sapiens
  siRNA target sequence for EDEM1 (NM_014674.1,811-829).
gacaattaaggactatgat

SEQ ID NO: 142683 - DNA, 19 bp, Homo sapiens
  siRNA target sequence for EDEM1 (NM_014674.1,813-831).
caattaaggactatgataa

SEQ ID NO: 142684 - DNA, 19 bp, Homo sapiens
  siRNA target sequence for EDEM1 (NM_014674.1,892-910).
caagacagggattccatat

SEQ ID NO: 142685 - DNA, 19 bp, Homo sapiens
  siRNA target sequence for EDEM1 (NM_014674.1,895-913).
gacagggattccatatcct

SEQ ID NO: 142686 - DNA, 19 bp, Homo sapiens
  siRNA target sequence for EDEM1 (NM_014674.1,906-924).
catatcctcgggtgaatct

SEQ ID NO: 142687 - DNA, 19 bp, Homo sapiens
  siRNA target sequence for EDEM1 (NM_014674.1,911-929).
cctcgggtgaatctaaaga

SEQ ID NO: 142688 - DNA, 19 bp, Homo sapiens
  siRNA target sequence for EDEM1 (NM_014674.1,939-957).
ctcctgacaccaataatga

SEQ ID NO: 142689 - DNA, 19 bp, Homo sapiens
  siRNA target sequence for EDEM1 (NM_014674.1,1042-1060).
ggccagacgagcagtgaaa

SEQ ID NO: 142690 - DNA, 19 bp, Homo sapiens
  siRNA target sequence for EDEM1 (NM_014674.1,1069-1087).
gaacctccggagcaatgat

SEQ ID NO: 142691 - DNA, 19 bp, Homo sapiens
  siRNA target sequence for EDEM1 (NM_014674.1,1072-1090).
cctccggagcaatgataca

SEQ ID NO: 142692 - DNA, 19 bp, Homo sapiens
  siRNA target sequence for EDEM1 (NM_014674.1,1078-1096).
gagcaatgatacaggatta

SEQ ID NO: 142693 - DNA, 19 bp, Homo sapiens
  siRNA target sequence for EDEM1 (NM_014674.1,1080-1098).
gcaatgatacaggattact

SEQ ID NO: 142694 - DNA, 19 bp, Homo sapiens
  siRNA target sequence for EDEM1 (NM_014674.1,1081-1099).
caatgatacaggattacta

SEQ ID NO: 142695 - DNA, 19 bp, Homo sapiens
  siRNA target sequence for EDEM1 (NM_014674.1,1101-1119).
gcaatgtcgtgaacattca

SEQ ID NO: 142696 - DNA, 19 bp, Homo sapiens
  siRNA target sequence for EDEM1 (NM_014674.1,1122-1140).
cgggccactgggttggaaa

SEQ ID NO: 142697 - DNA, 19 bp, Homo sapiens
  siRNA target sequence for EDEM1 (NM_014674.1,1174-1192).
ctatgaatacctcttgaaa

SEQ ID NO: 142698 - DNA, 19 bp, Homo sapiens
  siRNA target sequence for EDEM1 (NM_014674.1,1241-1259).
gcatatcagagtattcaga

SEQ ID NO: 142699 - DNA, 19 bp, Homo sapiens
  siRNA target sequence for EDEM1 (NM_014674.1,1249-1267).
gagtattcagaactactta

SEQ ID NO: 142700 - DNA, 19 bp, Homo sapiens
  siRNA target sequence for EDEM1 (NM_014674.1,1302-1320).
gagaccctccactctatgt

SEQ ID NO: 142701 - DNA, 19 bp, Homo sapiens
  siRNA target sequence for EDEM1 (NM_014674.1,1319-1337).
gtcaacgtgaacatgttca

SEQ ID NO: 142702 - DNA, 19 bp, Homo sapiens
  siRNA target sequence for EDEM1 (NM_014674.1,1469-1487).
gccctccctgagagatata

SEQ ID NO: 142703 - DNA, 19 bp, Homo sapiens
  siRNA target sequence for EDEM1 (NM_014674.1,1470-1488).
ccctccctgagagatataa

SEQ ID NO: 142704 - DNA, 19 bp, Homo sapiens
  siRNA target sequence for EDEM1 (NM_014674.1,1472-1490).
ctccctgagagatataact

SEQ ID NO: 142705 - DNA, 19 bp, Homo sapiens
  siRNA target sequence for EDEM1 (NM_014674.1,1503-1521).
cccctgacgttctcttcta

SEQ ID NO: 142706 - DNA, 19 bp, Homo sapiens
  siRNA target sequence for EDEM1 (NM_014674.1,1588-1606).
cctccatgtaggaatggat

SEQ ID NO: 142707 - DNA, 19 bp, Homo sapiens
  siRNA target sequence for EDEM1 (NM_014674.1,1589-1607).
ctccatgtaggaatggata

SEQ ID NO: 142708 - DNA, 19 bp, Homo sapiens
  siRNA target sequence for EDEM1 (NM_014674.1,1656-1674).
cgctgcatcacgtcattga

SEQ ID NO: 142709 - DNA, 19 bp, Homo sapiens
  siRNA target sequence for EDEM1 (NM_014674.1,1658-1676).
ctgcatcacgtcattgaca

SEQ ID NO: 142710 - DNA, 19 bp, Homo sapiens
  siRNA target sequence for EDEM1 (NM_014674.1,1690-1708).
ccggatggagagcttcttt

SEQ ID NO: 142711 - DNA, 19 bp, Homo sapiens
  siRNA target sequence for EDEM1 (NM_014674.1,1715-1733).
gagacctgtaaatatttgt

SEQ ID NO: 142712 - DNA, 19 bp, Homo sapiens
  siRNA target sequence for EDEM1 (NM_014674.1,1772-1790).
ggaaccagatacatgttca

SEQ ID NO: 142713 - DNA, 19 bp, Homo sapiens
  siRNA target sequence for EDEM1 (NM_014674.1,1899-1917).
ggccgaaacctcatgagtt

SEQ ID NO: 142714 - DNA, 19 bp, Homo sapiens
  siRNA target sequence for EDEM1 (NM_014674.1,1900-1918).
gccgaaacctcatgagtta

SEQ ID NO: 142715 - DNA, 19 bp, Homo sapiens
  siRNA target sequence for EDEM1 (NM_014674.1,1907-1925).
cctcatgagttaaaagtca

SEQ ID NO: 142716 - DNA, 19 bp, Homo sapiens
  siRNA target sequence for EDEM1 (NM_014674.1,1913-1931).
gagttaaaagtcatcaact

SEQ ID NO: 142717 - DNA, 19 bp, Homo sapiens
  siRNA target sequence for EDEM1 (NM_014674.1,1990-2008).
catctacatgcgacagatt

SEQ ID NO: 142718 - DNA, 19 bp, Homo sapiens
  siRNA target sequence for EDIL3 (NM_005711.3,479-497).
cggcaaaggtgatatttgt

SEQ ID NO: 142719 - DNA, 19 bp, Homo sapiens
  siRNA target sequence for EDIL3 (NM_005711.3,481-499).
gcaaaggtgatatttgtga

SEQ ID NO: 142720 - DNA, 19 bp, Homo sapiens
  siRNA target sequence for EDIL3 (NM_005711.3,543-561).
gctgatggttccttttcct

SEQ ID NO: 142721 - DNA, 19 bp, Homo sapiens
  siRNA target sequence for EDIL3 (NM_005711.3,608-626).
ggaggttgcatcagatgaa

SEQ ID NO: 142722 - DNA, 19 bp, Homo sapiens
  siRNA target sequence for EDIL3 (NM_005711.3,675-693).
ggaggaacctgtgaaataa

SEQ ID NO: 142723 - DNA, 19 bp, Homo sapiens
  siRNA target sequence for EDIL3 (NM_005711.3,699-717).
gcataccgaggggatacat

SEQ ID NO: 142724 - DNA, 19 bp, Homo sapiens
  siRNA target sequence for EDIL3 (NM_005711.3,700-718).
cataccgaggggatacatt

SEQ ID NO: 142725 - DNA, 19 bp, Homo sapiens
  siRNA target sequence for EDIL3 (NM_005711.3,704-722).
ccgaggggatacattcata

SEQ ID NO: 142726 - DNA, 19 bp, Homo sapiens
  siRNA target sequence for EDIL3 (NM_005711.3,719-737).
cataggctatgtttgtaaa

SEQ ID NO: 142727 - DNA, 19 bp, Homo sapiens
  siRNA target sequence for EDIL3 (NM_005711.3,766-784).
gtcagcacaacataaatga

SEQ ID NO: 142728 - DNA, 19 bp, Homo sapiens
  siRNA target sequence for EDIL3 (NM_005711.3,788-806).
cgaagttgagccttgcaaa

SEQ ID NO: 142729 - DNA, 19 bp, Homo sapiens
  siRNA target sequence for EDIL3 (NM_005711.3,814-832).
gaatatgtacagatcttgt

SEQ ID NO: 142730 - DNA, 19 bp, Homo sapiens
  siRNA target sequence for EDIL3 (NM_005711.3,825-843).
gatcttgttgctaactatt

SEQ ID NO: 142731 - DNA, 19 bp, Homo sapiens
  siRNA target sequence for EDIL3 (NM_005711.3,849-867).
gagtgcccaggcgaattta

SEQ ID NO: 142732 - DNA, 19 bp, Homo sapiens
  siRNA target sequence for EDIL3 (NM_005711.3,952-970).
ctactcaccgagctctttt

SEQ ID NO: 142733 - DNA, 19 bp, Homo sapiens
  siRNA target sequence for EDIL3 (NM_005711.3,964-982).
ctctttttggactccaaaa

SEQ ID NO: 142734 - DNA, 19 bp, Homo sapiens
  siRNA target sequence for EDIL3 (NM_005711.3,991-1009).
cctactatgcacgtcttaa

SEQ ID NO: 142735 - DNA, 19 bp, Homo sapiens
  siRNA target sequence for EDIL3 (NM_005711.3,992-1010).
ctactatgcacgtcttaat

SEQ ID NO: 142736 - DNA, 19 bp, Homo sapiens
  siRNA target sequence for EDIL3 (NM_005711.3,1030-1048).
cgtggacagctgcagaaaa

SEQ ID NO: 142737 - DNA, 19 bp, Homo sapiens
  siRNA target sequence for EDIL3 (NM_005711.3,1057-1075).
ggccgtggattcagataaa

SEQ ID NO: 142738 - DNA, 19 bp, Homo sapiens
  siRNA target sequence for EDIL3 (NM_005711.3,1058-1076).
gccgtggattcagataaat

SEQ ID NO: 142739 - DNA, 19 bp, Homo sapiens
  siRNA target sequence for EDIL3 (NM_005711.3,1059-1077).
ccgtggattcagataaatt

SEQ ID NO: 142740 - DNA, 19 bp, Homo sapiens
  siRNA target sequence for EDIL3 (NM_005711.3,1060-1078).
cgtggattcagataaattt

SEQ ID NO: 142741 - DNA, 19 bp, Homo sapiens
  siRNA target sequence for EDIL3 (NM_005711.3,1137-1155).
ccagagtatataaaatcct

SEQ ID NO: 142742 - DNA, 19 bp, Homo sapiens
  siRNA target sequence for EDIL3 (NM_005711.3,1180-1198).
gaaagacttgggcaatgta

SEQ ID NO: 142743 - DNA, 19 bp, Homo sapiens
  siRNA target sequence for EDIL3 (NM_005711.3,1184-1202).
gacttgggcaatgtacaaa

SEQ ID NO: 142744 - DNA, 19 bp, Homo sapiens
  siRNA target sequence for EDIL3 (NM_005711.3,1186-1204).
cttgggcaatgtacaaagt

SEQ ID NO: 142745 - DNA, 19 bp, Homo sapiens
  siRNA target sequence for EDIL3 (NM_005711.3,1229-1247).
gtttcgtggaaacattgat

SEQ ID NO: 142746 - DNA, 19 bp, Homo sapiens
  siRNA target sequence for EDIL3 (NM_005711.3,1233-1251).
cgtggaaacattgataaca

SEQ ID NO: 142747 - DNA, 19 bp, Homo sapiens
  siRNA target sequence for EDIL3 (NM_005711.3,1236-1254).
ggaaacattgataacaaca

SEQ ID NO: 142748 - DNA, 19 bp, Homo sapiens
  siRNA target sequence for EDIL3 (NM_005711.3,1253-1271).
cactccatatgctaactct

SEQ ID NO: 142749 - DNA, 19 bp, Homo sapiens
  siRNA target sequence for EDIL3 (NM_005711.3,1257-1275).
ccatatgctaactctttca

SEQ ID NO: 142750 - DNA, 19 bp, Homo sapiens
  siRNA target sequence for EDIL3 (NM_005711.3,1270-1288).
ctttcacaccccccataaa

SEQ ID NO: 142751 - DNA, 19 bp, Homo sapiens
  siRNA target sequence for EDIL3 (NM_005711.3,1280-1298).
ccccataaaagctcagtat

SEQ ID NO: 142752 - DNA, 19 bp, Homo sapiens
  siRNA target sequence for EDIL3 (NM_005711.3,1282-1300).
ccataaaagctcagtatgt

SEQ ID NO: 142753 - DNA, 19 bp, Homo sapiens
  siRNA target sequence for EDIL3 (NM_005711.3,1313-1331).
ccaagtttgtcgaagacat

SEQ ID NO: 142754 - DNA, 19 bp, Homo sapiens
  siRNA target sequence for EDIL3 (NM_005711.3,1336-1354).
ctttgcgaatggaacttct

SEQ ID NO: 142755 - DNA, 19 bp, Homo sapiens
  siRNA target sequence for EDIL3 (NM_005711.3,1380-1398).
gagcctctgggtatgaaat

SEQ ID NO: 142756 - DNA, 19 bp, Homo sapiens
  siRNA target sequence for EDIL3 (NM_005711.3,1399-1417).
caggacatatacaagacta

SEQ ID NO: 142757 - DNA, 19 bp, Homo sapiens
  siRNA target sequence for EDIL3 (NM_005711.3,1530-1548).
cacaatgaccagtcacaat

SEQ ID NO: 142758 - DNA, 19 bp, Homo sapiens
  siRNA target sequence for EDIL3 (NM_005711.3,1566-1584).
cttgttccaaccaaagtga

SEQ ID NO: 142759 - DNA, 19 bp, Homo sapiens
  siRNA target sequence for EDIL3 (NM_005711.3,1597-1615).
cacaaggagctaaagattt

SEQ ID NO: 142760 - DNA, 19 bp, Homo sapiens
  siRNA target sequence for EDIL3 (NM_005711.3,1665-1683).
ggagaacactggactgtat

SEQ ID NO: 142761 - DNA, 19 bp, Homo sapiens
  siRNA target sequence for EDIL3 (NM_005711.3,1757-1775).
catcgaccctcccatctat

SEQ ID NO: 142762 - DNA, 19 bp, Homo sapiens
  siRNA target sequence for EDIL3 (NM_005711.3,1772-1790).
ctatgcacgacacataaga

SEQ ID NO: 142763 - DNA, 19 bp, Homo sapiens
  siRNA target sequence for EDIL3 (NM_005711.3,1807-1825).
ggtacgggaggatcacatt

SEQ ID NO: 142764 - DNA, 19 bp, Homo sapiens
  siRNA target sequence for EFCBP1 (NM_022351.2,369-387).
cgatcttcctcgacatact

SEQ ID NO: 142765 - DNA, 19 bp, Homo sapiens
  siRNA target sequence for EFCBP1 (NM_022351.2,491-509).
cataccattgatacacata

SEQ ID NO: 142766 - DNA, 19 bp, Homo sapiens
  siRNA target sequence for EFCBP1 (NM_022351.2,500-518).
gatacacataatactaata

SEQ ID NO: 142767 - DNA, 19 bp, Homo sapiens
  siRNA target sequence for EFCBP1 (NM_022351.2,557-575).
cacttgggcgagtatgaga

SEQ ID NO: 142768 - DNA, 19 bp, Homo sapiens
  siRNA target sequence for EFCBP1 (NM_022351.2,564-582).
gcgagtatgagaatgtact

SEQ ID NO: 142769 - DNA, 19 bp, Homo sapiens
  siRNA target sequence for EFCBP1 (NM_022351.2,588-606).
cacttgaagacctgaatct

SEQ ID NO: 142770 - DNA, 19 bp, Homo sapiens
  siRNA target sequence for EFCBP1 (NM_022351.2,616-634).
gaaggcaatgggcaaaaca

SEQ ID NO: 142771 - DNA, 19 bp, Homo sapiens
  siRNA target sequence for EFCBP1 (NM_022351.2,658-676).
caatttggaacaattcgta

SEQ ID NO: 142772 - DNA, 19 bp, Homo sapiens
  siRNA target sequence for EFCBP1 (NM_022351.2,664-682).
ggaacaattcgtaactaga

SEQ ID NO: 142773 - DNA, 19 bp, Homo sapiens
  siRNA target sequence for EFCBP1 (NM_022351.2,665-683).
gaacaattcgtaactagat

SEQ ID NO: 142774 - DNA, 19 bp, Homo sapiens
  siRNA target sequence for EFCBP1 (NM_022351.2,710-728).
ctgcagtctctccagaatt

SEQ ID NO: 142775 - DNA, 19 bp, Homo sapiens
  siRNA target sequence for EFCBP1 (NM_022351.2,867-885).
caaacagccctcagtttaa

SEQ ID NO: 142776 - DNA, 19 bp, Homo sapiens
  siRNA target sequence for EFCBP1 (NM_022351.2,889-907).
cagcggtccaggcttatta

SEQ ID NO: 142777 - DNA, 19 bp, Homo sapiens
  siRNA target sequence for EFCBP1 (NM_022351.2,891-909).
gcggtccaggcttattaga

SEQ ID NO: 142778 - DNA, 19 bp, Homo sapiens
  siRNA target sequence for EFCBP1 (NM_022351.2,892-910).
cggtccaggcttattagaa

SEQ ID NO: 142779 - DNA, 19 bp, Homo sapiens
  siRNA target sequence for EFCBP1 (NM_022351.2,988-1006).
cgaaccaccagaagaagaa

SEQ ID NO: 142780 - DNA, 19 bp, Homo sapiens
  siRNA target sequence for EFCBP1 (NM_022351.2,1048-1066).
gcggcagatgtctgtgata

SEQ ID NO: 142781 - DNA, 19 bp, Homo sapiens
  siRNA target sequence for EFCBP1 (NM_022351.2,1050-1068).
ggcagatgtctgtgataga

SEQ ID NO: 142782 - DNA, 19 bp, Homo sapiens
  siRNA target sequence for EFCBP1 (NM_022351.2,1134-1152).
gatgcttgcgtatttctat

SEQ ID NO: 142783 - DNA, 19 bp, Homo sapiens
  siRNA target sequence for EFCBP1 (NM_022351.2,1137-1155).
gcttgcgtatttctataca

SEQ ID NO: 142784 - DNA, 19 bp, Homo sapiens
  siRNA target sequence for EFCBP1 (NM_022351.2,1169-1187).
gaatctcgctacatgatct

SEQ ID NO: 142785 - DNA, 19 bp, Homo sapiens
  siRNA target sequence for EFCBP1 (NM_022351.2,1173-1191).
ctcgctacatgatctatga

SEQ ID NO: 142786 - DNA, 19 bp, Homo sapiens
  siRNA target sequence for EFCBP1 (NM_022351.2,1175-1193).
cgctacatgatctatgagt

SEQ ID NO: 142787 - DNA, 19 bp, Homo sapiens
  siRNA target sequence for EFCBP1 (NM_022351.2,1176-1194).
gctacatgatctatgagtt

SEQ ID NO: 142788 - DNA, 19 bp, Homo sapiens
  siRNA target sequence for EFCBP1 (NM_022351.2,1195-1213).
ctgggagaatagtagtgta

SEQ ID NO: 142789 - DNA, 19 bp, Homo sapiens
  siRNA target sequence for EFCBP1 (NM_022351.2,1201-1219).
gaatagtagtgtatggaat

SEQ ID NO: 142790 - DNA, 19 bp, Homo sapiens
  siRNA target sequence for EFCBP1 (NM_022351.2,1221-1239).
gccaccttcagacaaatta

SEQ ID NO: 142791 - DNA, 19 bp, Homo sapiens
  siRNA target sequence for EFCBP1 (NM_022351.2,1223-1241).
caccttcagacaaattata

SEQ ID NO: 142792 - DNA, 19 bp, Homo sapiens
  siRNA target sequence for EFEMP1 (NM_004105.2,152-170).
gttgaaagcccttttccta

SEQ ID NO: 142793 - DNA, 19 bp, Homo sapiens
  siRNA target sequence for EFEMP1 (NM_004105.2,265-283).
gacagcaatgcaaagatat

SEQ ID NO: 142794 - DNA, 19 bp, Homo sapiens
  siRNA target sequence for EFEMP1 (NM_004105.2,302-320).
cccagacgcttgtaaaggt

SEQ ID NO: 142795 - DNA, 19 bp, Homo sapiens
  siRNA target sequence for EFEMP1 (NM_004105.2,353-371).
cctctgccttccgaaaaca

SEQ ID NO: 142796 - DNA, 19 bp, Homo sapiens
  siRNA target sequence for EFEMP1 (NM_004105.2,363-381).
ccgaaaacagcccagatta

SEQ ID NO: 142797 - DNA, 19 bp, Homo sapiens
  siRNA target sequence for EFEMP1 (NM_004105.2,364-382).
cgaaaacagcccagattat

SEQ ID NO: 142798 - DNA, 19 bp, Homo sapiens
  siRNA target sequence for EFEMP1 (NM_004105.2,373-391).
cccagattattgtcaataa

SEQ ID NO: 142799 - DNA, 19 bp, Homo sapiens
  siRNA target sequence for EFEMP1 (NM_004105.2,374-392).
ccagattattgtcaataat

SEQ ID NO: 142800 - DNA, 19 bp, Homo sapiens
  siRNA target sequence for EFEMP1 (NM_004105.2,540-558).
cagactggccgaaataact

SEQ ID NO: 142801 - DNA, 19 bp, Homo sapiens
  siRNA target sequence for EFEMP1 (NM_004105.2,542-560).
gactggccgaaataacttt

SEQ ID NO: 142802 - DNA, 19 bp, Homo sapiens
  siRNA target sequence for EFEMP1 (NM_004105.2,544-562).
ctggccgaaataactttgt

SEQ ID NO: 142803 - DNA, 19 bp, Homo sapiens
  siRNA target sequence for EFEMP1 (NM_004105.2,546-564).
ggccgaaataactttgtca

SEQ ID NO: 142804 - DNA, 19 bp, Homo sapiens
  siRNA target sequence for EFEMP1 (NM_004105.2,547-565).
gccgaaataactttgtcat

SEQ ID NO: 142805 - DNA, 19 bp, Homo sapiens
  siRNA target sequence for EFEMP1 (NM_004105.2,631-649).
caggctacgagcaaagtga

SEQ ID NO: 142806 - DNA, 19 bp, Homo sapiens
  siRNA target sequence for EFEMP1 (NM_004105.2,708-726).
gaccaagtgtgcatcaatt

SEQ ID NO: 142807 - DNA, 19 bp, Homo sapiens
  siRNA target sequence for EFEMP1 (NM_004105.2,779-797).
gcagtgcgtagacatagat

SEQ ID NO: 142808 - DNA, 19 bp, Homo sapiens
  siRNA target sequence for EFEMP1 (NM_004105.2,813-831).
ccatattgccaccaaagat

SEQ ID NO: 142809 - DNA, 19 bp, Homo sapiens
  siRNA target sequence for EFEMP1 (NM_004105.2,822-840).
caccaaagatgcgtgaata

SEQ ID NO: 142810 - DNA, 19 bp, Homo sapiens
  siRNA target sequence for EFEMP1 (NM_004105.2,824-842).
ccaaagatgcgtgaataca

SEQ ID NO: 142811 - DNA, 19 bp, Homo sapiens
  siRNA target sequence for EFEMP1 (NM_004105.2,863-881).
gtgcagtcctgggtttcaa

SEQ ID NO: 142812 - DNA, 19 bp, Homo sapiens
  siRNA target sequence for EFEMP1 (NM_004105.2,879-897).
caattggcagcaaacaact

SEQ ID NO: 142813 - DNA, 19 bp, Homo sapiens
  siRNA target sequence for EFEMP1 (NM_004105.2,896-914).
ctatacctgcgtagatata

SEQ ID NO: 142814 - DNA, 19 bp, Homo sapiens
  siRNA target sequence for EFEMP1 (NM_004105.2,943-961).
ctcagcagtgctacaacat

SEQ ID NO: 142815 - DNA, 19 bp, Homo sapiens
  siRNA target sequence for EFEMP1 (NM_004105.2,1051-1069).
caagctacctgtgtcaata

SEQ ID NO: 142816 - DNA, 19 bp, Homo sapiens
  siRNA target sequence for EFEMP1 (NM_004105.2,1106-1124).
gtgcccccagggataccaa

SEQ ID NO: 142817 - DNA, 19 bp, Homo sapiens
  siRNA target sequence for EFEMP1 (NM_004105.2,1121-1139).
ccaagtggtgagaagtaga

SEQ ID NO: 142818 - DNA, 19 bp, Homo sapiens
  siRNA target sequence for EFEMP1 (NM_004105.2,1130-1148).
gagaagtagaacatgtcaa

SEQ ID NO: 142819 - DNA, 19 bp, Homo sapiens
  siRNA target sequence for EFEMP1 (NM_004105.2,1160-1178).
gtgtgagaccacaaatgaa

SEQ ID NO: 142820 - DNA, 19 bp, Homo sapiens
  siRNA target sequence for EFEMP1 (NM_004105.2,1176-1194).
gaatgccgggaggatgaaa

SEQ ID NO: 142821 - DNA, 19 bp, Homo sapiens
  siRNA target sequence for EFEMP1 (NM_004105.2,1214-1232).
cggcttccgttgttatcca

SEQ ID NO: 142822 - DNA, 19 bp, Homo sapiens
  siRNA target sequence for EFEMP1 (NM_004105.2,1220-1238).
ccgttgttatccacgaaat

SEQ ID NO: 142823 - DNA, 19 bp, Homo sapiens
  siRNA target sequence for EFEMP1 (NM_004105.2,1279-1297).
gtgtttgcccagtctcaaa

SEQ ID NO: 142824 - DNA, 19 bp, Homo sapiens
  siRNA target sequence for EFEMP1 (NM_004105.2,1314-1332).
ctgccccagtcaatagtct

SEQ ID NO: 142825 - DNA, 19 bp, Homo sapiens
  siRNA target sequence for EFEMP1 (NM_004105.2,1340-1358).
catgagcatccgatctgat

SEQ ID NO: 142826 - DNA, 19 bp, Homo sapiens
  siRNA target sequence for EFEMP1 (NM_004105.2,1363-1381).
ctgtgccatcagacatctt

SEQ ID NO: 142827 - DNA, 19 bp, Homo sapiens
  siRNA target sequence for EFEMP1 (NM_004105.2,1383-1401).
cagatacaggccacaacta

SEQ ID NO: 142828 - DNA, 19 bp, Homo sapiens
  siRNA target sequence for EFEMP1 (NM_004105.2,1385-1403).
gatacaggccacaactatt

SEQ ID NO: 142829 - DNA, 19 bp, Homo sapiens
  siRNA target sequence for EFEMP1 (NM_004105.2,1418-1436).
caatacttttcggattaaa

SEQ ID NO: 142830 - DNA, 19 bp, Homo sapiens
  siRNA target sequence for EFEMP1 (NM_004105.2,1457-1475).
gttctacctacgacaaaca

SEQ ID NO: 142831 - DNA, 19 bp, Homo sapiens
  siRNA target sequence for EFEMP1 (NM_004105.2,1494-1512).
cttgtgctcgtgaagtcat

SEQ ID NO: 142832 - DNA, 19 bp, Homo sapiens
  siRNA target sequence for EFEMP1 (NM_004105.2,1550-1568).
gctgacagtcagcagtata

SEQ ID NO: 142833 - DNA, 19 bp, Homo sapiens
  siRNA target sequence for EFEMP1 (NM_004105.2,1577-1595).
ccgcacaagctctgtgtta

SEQ ID NO: 142834 - DNA, 19 bp, Homo sapiens
  siRNA target sequence for EFEMP1 (NM_004105.2,1580-1598).
cacaagctctgtgttaaga

SEQ ID NO: 142835 - DNA, 19 bp, Homo sapiens
  siRNA target sequence for EFEMP1 (NM_004105.2,1586-1604).
ctctgtgttaagattgaca

SEQ ID NO: 142836 - DNA, 19 bp, Homo sapiens
  siRNA target sequence for EFEMP1 (NM_004105.2,1588-1606).
ctgtgttaagattgacaat

SEQ ID NO: 142837 - DNA, 19 bp, Homo sapiens
  siRNA target sequence for EFEMP2 (NM_016938.1,678-696).
caaccgctcctgtgttgat

SEQ ID NO: 142838 - DNA, 19 bp, Homo sapiens
  siRNA target sequence for EFEMP2 (NM_016938.1,920-938).
cacgcctctgccaagacat

SEQ ID NO: 142839 - DNA, 19 bp, Homo sapiens
  siRNA target sequence for EFEMP2 (NM_016938.1,1191-1209).
ctaccccggtgcctacaat

SEQ ID NO: 142840 - DNA, 19 bp, Homo sapiens
  siRNA target sequence for EFEMP2 (NM_016938.1,1201-1219).
gcctacaatgcctttcaga

SEQ ID NO: 142841 - DNA, 19 bp, Homo sapiens
  siRNA target sequence for EFEMP2 (NM_016938.1,1235-1253).
cgcagggggacttttacat

SEQ ID NO: 142842 - DNA, 19 bp, Homo sapiens
  siRNA target sequence for EFEMP2 (NM_016938.1,1236-1254).
gcagggggacttttacatt

SEQ ID NO: 142843 - DNA, 19 bp, Homo sapiens
  siRNA target sequence for EFEMP2 (NM_016938.1,1333-1351).
gagatggtcaccatgaatt

SEQ ID NO: 142844 - DNA, 19 bp, Homo sapiens
  siRNA target sequence for EFHC1 (NM_018100.1,135-153).
cttccgggcacgtccttta

SEQ ID NO: 142845 - DNA, 19 bp, Homo sapiens
  siRNA target sequence for EFHC1 (NM_018100.1,139-157).
cgggcacgtcctttaagga

SEQ ID NO: 142846 - DNA, 19 bp, Homo sapiens
  siRNA target sequence for EFHC1 (NM_018100.1,149-167).
ctttaaggactctacgaaa

SEQ ID NO: 142847 - DNA, 19 bp, Homo sapiens
  siRNA target sequence for EFHC1 (NM_018100.1,200-218).
caggaacggctatgcaatt

SEQ ID NO: 142848 - DNA, 19 bp, Homo sapiens
  siRNA target sequence for EFHC1 (NM_018100.1,202-220).
ggaacggctatgcaattgt

SEQ ID NO: 142849 - DNA, 19 bp, Homo sapiens
  siRNA target sequence for EFHC1 (NM_018100.1,203-221).
gaacggctatgcaattgtt

SEQ ID NO: 142850 - DNA, 19 bp, Homo sapiens
  siRNA target sequence for EFHC1 (NM_018100.1,299-317).
cagtaaggcaccagtctta

SEQ ID NO: 142851 - DNA, 19 bp, Homo sapiens
  siRNA target sequence for EFHC1 (NM_018100.1,319-337).
cttatggccaacctaaaca

SEQ ID NO: 142852 - DNA, 19 bp, Homo sapiens
  siRNA target sequence for EFHC1 (NM_018100.1,339-357).
gccccacctgcggatttta

SEQ ID NO: 142853 - DNA, 19 bp, Homo sapiens
  siRNA target sequence for EFHC1 (NM_018100.1,340-358).
ccccacctgcggattttat

SEQ ID NO: 142854 - DNA, 19 bp, Homo sapiens
  siRNA target sequence for EFHC1 (NM_018100.1,341-359).
cccacctgcggattttatt

SEQ ID NO: 142855 - DNA, 19 bp, Homo sapiens
  siRNA target sequence for EFHC1 (NM_018100.1,363-381).
gcgcatgtggcctttgaca

SEQ ID NO: 142856 - DNA, 19 bp, Homo sapiens
  siRNA target sequence for EFHC1 (NM_018100.1,403-421).
cctatttccaagaagatgt

SEQ ID NO: 142857 - DNA, 19 bp, Homo sapiens
  siRNA target sequence for EFHC1 (NM_018100.1,448-466).
ggatccgtcaggtgaacat

SEQ ID NO: 142858 - DNA, 19 bp, Homo sapiens
  siRNA target sequence for EFHC1 (NM_018100.1,449-467).
gatccgtcaggtgaacatt

SEQ ID NO: 142859 - DNA, 19 bp, Homo sapiens
  siRNA target sequence for EFHC1 (NM_018100.1,453-471).
cgtcaggtgaacatttact

SEQ ID NO: 142860 - DNA, 19 bp, Homo sapiens
  siRNA target sequence for EFHC1 (NM_018100.1,575-593).
ccggggtgaccattaccat

SEQ ID NO: 142861 - DNA, 19 bp, Homo sapiens
  siRNA target sequence for EFHC1 (NM_018100.1,580-598).
gtgaccattaccattggaa

SEQ ID NO: 142862 - DNA, 19 bp, Homo sapiens
  siRNA target sequence for EFHC1 (NM_018100.1,590-608).
ccattggaaagacctaaat

SEQ ID NO: 142863 - DNA, 19 bp, Homo sapiens
  siRNA target sequence for EFHC1 (NM_018100.1,600-618).
gacctaaatcgaggaataa

SEQ ID NO: 142864 - DNA, 19 bp, Homo sapiens
  siRNA target sequence for EFHC1 (NM_018100.1,603-621).
ctaaatcgaggaataaaca

SEQ ID NO: 142865 - DNA, 19 bp, Homo sapiens
  siRNA target sequence for EFHC1 (NM_018100.1,609-627).
cgaggaataaacatcacaa

SEQ ID NO: 142866 - DNA, 19 bp, Homo sapiens
  siRNA target sequence for EFHC1 (NM_018100.1,623-641).
cacaatttatggcaaaact

SEQ ID NO: 142867 - DNA, 19 bp, Homo sapiens
  siRNA target sequence for EFHC1 (NM_018100.1,748-766).
gaaaacagcctcttcgtaa

SEQ ID NO: 142868 - DNA, 19 bp, Homo sapiens
  siRNA target sequence for EFHC1 (NM_018100.1,756-774).
cctcttcgtaagtatgtca

SEQ ID NO: 142869 - DNA, 19 bp, Homo sapiens
  siRNA target sequence for EFHC1 (NM_018100.1,775-793).
ccccatcagactttgatca

SEQ ID NO: 142870 - DNA, 19 bp, Homo sapiens
  siRNA target sequence for EFHC1 (NM_018100.1,776-794).
cccatcagactttgatcaa

SEQ ID NO: 142871 - DNA, 19 bp, Homo sapiens
  siRNA target sequence for EFHC1 (NM_018100.1,825-843).
gtccttcgattctatgcaa

SEQ ID NO: 142872 - DNA, 19 bp, Homo sapiens
  siRNA target sequence for EFHC1 (NM_018100.1,873-891).
gaatgtcggacctacatca

SEQ ID NO: 142873 - DNA, 19 bp, Homo sapiens
  siRNA target sequence for EFHC1 (NM_018100.1,877-895).
gtcggacctacatcattca

SEQ ID NO: 142874 - DNA, 19 bp, Homo sapiens
  siRNA target sequence for EFHC1 (NM_018100.1,879-897).
cggacctacatcattcatt

SEQ ID NO: 142875 - DNA, 19 bp, Homo sapiens
  siRNA target sequence for EFHC1 (NM_018100.1,880-898).
ggacctacatcattcatta

SEQ ID NO: 142876 - DNA, 19 bp, Homo sapiens
  siRNA target sequence for EFHC1 (NM_018100.1,884-902).
ctacatcattcattactat

SEQ ID NO: 142877 - DNA, 19 bp, Homo sapiens
  siRNA target sequence for EFHC1 (NM_018100.1,932-950).
ggtccacgaacggaatgat

SEQ ID NO: 142878 - DNA, 19 bp, Homo sapiens
  siRNA target sequence for EFHC1 (NM_018100.1,983-1001).
ccagcgtgtgcccaaagtt

SEQ ID NO: 142879 - DNA, 19 bp, Homo sapiens
  siRNA target sequence for EFHC1 (NM_018100.1,984-1002).
cagcgtgtgcccaaagttt

SEQ ID NO: 142880 - DNA, 19 bp, Homo sapiens
  siRNA target sequence for EFHC1 (NM_018100.1,988-1006).
gtgtgcccaaagttttggt

SEQ ID NO: 142881 - DNA, 19 bp, Homo sapiens
  siRNA target sequence for EFHC1 (NM_018100.1,1050-1068).
gaccaagaagtgttggaat

SEQ ID NO: 142882 - DNA, 19 bp, Homo sapiens
  siRNA target sequence for EFHC1 (NM_018100.1,1056-1074).
gaagtgttggaatggtata

SEQ ID NO: 142883 - DNA, 19 bp, Homo sapiens
  siRNA target sequence for EFHC1 (NM_018100.1,1064-1082).
ggaatggtatactgctaaa

SEQ ID NO: 142884 - DNA, 19 bp, Homo sapiens
  siRNA target sequence for EFHC1 (NM_018100.1,1069-1087).
ggtatactgctaaagactt

SEQ ID NO: 142885 - DNA, 19 bp, Homo sapiens
  siRNA target sequence for EFHC1 (NM_018100.1,1097-1115).
gaagtcactcactatcctt

SEQ ID NO: 142886 - DNA, 19 bp, Homo sapiens
  siRNA target sequence for EFHC1 (NM_018100.1,1118-1136).
gagaactttcttcatttat

SEQ ID NO: 142887 - DNA, 19 bp, Homo sapiens
  siRNA target sequence for EFHC1 (NM_018100.1,1147-1165).
catttactcgacggtatta

SEQ ID NO: 142888 - DNA, 19 bp, Homo sapiens
  siRNA target sequence for EFHC1 (NM_018100.1,1153-1171).
ctcgacggtattacaaaga

SEQ ID NO: 142889 - DNA, 19 bp, Homo sapiens
  siRNA target sequence for EFHC1 (NM_018100.1,1155-1173).
cgacggtattacaaagaga

SEQ ID NO: 142890 - DNA, 19 bp, Homo sapiens
  siRNA target sequence for EFHC1 (NM_018100.1,1184-1202).
cactgatttaccacgtatt

SEQ ID NO: 142891 - DNA, 19 bp, Homo sapiens
  siRNA target sequence for EFHC1 (NM_018100.1,1217-1235).
ggaaccacctccagtaaaa

SEQ ID NO: 142892 - DNA, 19 bp, Homo sapiens
  siRNA target sequence for EFHC1 (NM_018100.1,1275-1293).
gattctgctcagaattgtt

SEQ ID NO: 142893 - DNA, 19 bp, Homo sapiens
  siRNA target sequence for EFHC1 (NM_018100.1,1407-1425).
cgcagatttgtcttctctt

SEQ ID NO: 142894 - DNA, 19 bp, Homo sapiens
  siRNA target sequence for EFHC1 (NM_018100.1,1439-1457).
cgacatgatcagtatcttt

SEQ ID NO: 142895 - DNA, 19 bp, Homo sapiens
  siRNA target sequence for EFHC1 (NM_018100.1,1460-1478).
gcctcctgttcgcaattct

SEQ ID NO: 142896 - DNA, 19 bp, Homo sapiens
  siRNA target sequence for EFHC1 (NM_018100.1,1496-1514).
gtaccttggcaggactaaa

SEQ ID NO: 142897 - DNA, 19 bp, Homo sapiens
  siRNA target sequence for EFHC1 (NM_018100.1,1499-1517).
ccttggcaggactaaagtt

SEQ ID NO: 142898 - DNA, 19 bp, Homo sapiens
  siRNA target sequence for EFHC1 (NM_018100.1,1504-1522).
gcaggactaaagttgttaa

SEQ ID NO: 142899 - DNA, 19 bp, Homo sapiens
  siRNA target sequence for EFHC1 (NM_018100.1,1515-1533).
gttgttaaaccatactcta

SEQ ID NO: 142900 - DNA, 19 bp, Homo sapiens
  siRNA target sequence for EFHC1 (NM_018100.1,1538-1556).
ggacaaccctgtctactat

SEQ ID NO: 142901 - DNA, 19 bp, Homo sapiens
  siRNA target sequence for EFHC1 (NM_018100.1,1605-1623).
cggttcatcatccttgata

SEQ ID NO: 142902 - DNA, 19 bp, Homo sapiens
  siRNA target sequence for EFHC1 (NM_018100.1,1607-1625).
gttcatcatccttgataca

SEQ ID NO: 142903 - DNA, 19 bp, Homo sapiens
  siRNA target sequence for EFHC1 (NM_018100.1,1626-1644).
gacgagtatgttttgaaat

SEQ ID NO: 142904 - DNA, 19 bp, Homo sapiens
  siRNA target sequence for EFHC1 (NM_018100.1,1655-1673).
caacgctgcccagtattca

SEQ ID NO: 142905 - DNA, 19 bp, Homo sapiens
  siRNA target sequence for EFHC1 (NM_018100.1,1680-1698).
gcactcgcgtcaattcaga

SEQ ID NO: 142906 - DNA, 19 bp, Homo sapiens
  siRNA target sequence for EFHC1 (NM_018100.1,1681-1699).
cactcgcgtcaattcagaa

SEQ ID NO: 142907 - DNA, 19 bp, Homo sapiens
  siRNA target sequence for EFHC1 (NM_018100.1,1762-1780).
caggcgtgcaggaattgga

SEQ ID NO: 142908 - DNA, 19 bp, Homo sapiens
  siRNA target sequence for EFHC1 (NM_018100.1,1769-1787).
gcaggaattggaagcatta

SEQ ID NO: 142909 - DNA, 19 bp, Homo sapiens
  siRNA target sequence for EFHC1 (NM_018100.1,1783-1801).
cattaatagacacaattca

SEQ ID NO: 142910 - DNA, 19 bp, Homo sapiens
  siRNA target sequence for EFHC1 (NM_018100.1,1815-1833).
gatcactcatgcaaagaca

SEQ ID NO: 142911 - DNA, 19 bp, Homo sapiens
  siRNA target sequence for EFHC1 (NM_018100.1,1835-1853).
cattcgtgaggcatttcaa

SEQ ID NO: 142912 - DNA, 19 bp, Homo sapiens
  siRNA target sequence for EFHC1 (NM_018100.1,1881-1899).
gtggacagagacatgttct

SEQ ID NO: 142913 - DNA, 19 bp, Homo sapiens
  siRNA target sequence for EFHC1 (NM_018100.1,1883-1901).
ggacagagacatgttcttt

SEQ ID NO: 142914 - DNA, 19 bp, Homo sapiens
  siRNA target sequence for EFHC1 (NM_018100.1,1884-1902).
gacagagacatgttcttta

SEQ ID NO: 142915 - DNA, 19 bp, Homo sapiens
  siRNA target sequence for EGF (NM_001963.2,464-482).
ctgttgccagtagtttcaa

SEQ ID NO: 142916 - DNA, 19 bp, Homo sapiens
  siRNA target sequence for EGF (NM_001963.2,570-588).
gtcctgcacccttcttaat

SEQ ID NO: 142917 - DNA, 19 bp, Homo sapiens
  siRNA target sequence for EGF (NM_001963.2,594-612).
cccatggaaatagtatctt

SEQ ID NO: 142918 - DNA, 19 bp, Homo sapiens
  siRNA target sequence for EGF (NM_001963.2,669-687).
cagtgatcatggattttca

SEQ ID NO: 142919 - DNA, 19 bp, Homo sapiens
  siRNA target sequence for EGF (NM_001963.2,706-724).
ctattgggtggatttagaa

SEQ ID NO: 142920 - DNA, 19 bp, Homo sapiens
  siRNA target sequence for EGF (NM_001963.2,763-781).
gcaagagagagtatgtaat

SEQ ID NO: 142921 - DNA, 19 bp, Homo sapiens
  siRNA target sequence for EGF (NM_001963.2,851-869).
gaaggaatcattacagtaa

SEQ ID NO: 142922 - DNA, 19 bp, Homo sapiens
  siRNA target sequence for EGF (NM_001963.2,932-950).
gcagttgatccagtagaaa

SEQ ID NO: 142923 - DNA, 19 bp, Homo sapiens
  siRNA target sequence for EGF (NM_001963.2,974-992).
gtggctggaagcctttata

SEQ ID NO: 142924 - DNA, 19 bp, Homo sapiens
  siRNA target sequence for EGF (NM_001963.2,1073-1091).
gataagcggctgttttgga

SEQ ID NO: 142925 - DNA, 19 bp, Homo sapiens
  siRNA target sequence for EGF (NM_001963.2,1080-1098).
ggctgttttggattcagta

SEQ ID NO: 142926 - DNA, 19 bp, Homo sapiens
  siRNA target sequence for EGF (NM_001963.2,1145-1163).
ggaggttctgtccacatta

SEQ ID NO: 142927 - DNA, 19 bp, Homo sapiens
  siRNA target sequence for EGF (NM_001963.2,1148-1166).
ggttctgtccacattagta

SEQ ID NO: 142928 - DNA, 19 bp, Homo sapiens
  siRNA target sequence for EGF (NM_001963.2,1149-1167).
gttctgtccacattagtaa

SEQ ID NO: 142929 - DNA, 19 bp, Homo sapiens
  siRNA target sequence for EGF (NM_001963.2,1208-1226).
ggtgaccgtatcttctatt

SEQ ID NO: 142930 - DNA, 19 bp, Homo sapiens
  siRNA target sequence for EGF (NM_001963.2,1213-1231).
ccgtatcttctattcaaca

SEQ ID NO: 142931 - DNA, 19 bp, Homo sapiens
  siRNA target sequence for EGF (NM_001963.2,1214-1232).
cgtatcttctattcaacat

SEQ ID NO: 142932 - DNA, 19 bp, Homo sapiens
  siRNA target sequence for EGF (NM_001963.2,1294-1312).
cctccattcatcatttgta

SEQ ID NO: 142933 - DNA, 19 bp, Homo sapiens
  siRNA target sequence for EGF (NM_001963.2,1314-1332).
cacttggtgaactgaaagt

SEQ ID NO: 142934 - DNA, 19 bp, Homo sapiens
  siRNA target sequence for EGF (NM_001963.2,1376-1394).
gagcctgagcagaaacttt

SEQ ID NO: 142935 - DNA, 19 bp, Homo sapiens
  siRNA target sequence for EGF (NM_001963.2,1380-1398).
ctgagcagaaactttgcaa

SEQ ID NO: 142936 - DNA, 19 bp, Homo sapiens
  siRNA target sequence for EGF (NM_001963.2,1540-1558).
ctgtactcttgggtgtaaa

SEQ ID NO: 142937 - DNA, 19 bp, Homo sapiens
  siRNA target sequence for EGF (NM_001963.2,1581-1599).
gcacgtgccctgtaggatt

SEQ ID NO: 142938 - DNA, 19 bp, Homo sapiens
  siRNA target sequence for EGF (NM_001963.2,1582-1600).
cacgtgccctgtaggattt

SEQ ID NO: 142939 - DNA, 19 bp, Homo sapiens
  siRNA target sequence for EGF (NM_001963.2,1584-1602).
cgtgccctgtaggatttgt

SEQ ID NO: 142940 - DNA, 19 bp, Homo sapiens
  siRNA target sequence for EGF (NM_001963.2,1585-1603).
gtgccctgtaggatttgtt

SEQ ID NO: 142941 - DNA, 19 bp, Homo sapiens
  siRNA target sequence for EGF (NM_001963.2,1617-1635).
ggaaacgatgtcatcaact

SEQ ID NO: 142942 - DNA, 19 bp, Homo sapiens
  siRNA target sequence for EGF (NM_001963.2,1618-1636).
gaaacgatgtcatcaactt

SEQ ID NO: 142943 - DNA, 19 bp, Homo sapiens
  siRNA target sequence for EGF (NM_001963.2,1622-1640).
cgatgtcatcaacttgttt

SEQ ID NO: 142944 - DNA, 19 bp, Homo sapiens
  siRNA target sequence for EGF (NM_001963.2,1646-1664).
ccacgcaatgtgtctgaat

SEQ ID NO: 142945 - DNA, 19 bp, Homo sapiens
  siRNA target sequence for EGF (NM_001963.2,1689-1707).
cagaaggtcccttatgttt

SEQ ID NO: 142946 - DNA, 19 bp, Homo sapiens
  siRNA target sequence for EGF (NM_001963.2,1732-1750).
gagagatgggaaaacatgt

SEQ ID NO: 142947 - DNA, 19 bp, Homo sapiens
  siRNA target sequence for EGF (NM_001963.2,1836-1854).
ctgggtatgacctacaact

SEQ ID NO: 142948 - DNA, 19 bp, Homo sapiens
  siRNA target sequence for EGF (NM_001963.2,1844-1862).
gacctacaactggatgaaa

SEQ ID NO: 142949 - DNA, 19 bp, Homo sapiens
  siRNA target sequence for EGF (NM_001963.2,1850-1868).
caactggatgaaaaaagct

SEQ ID NO: 142950 - DNA, 19 bp, Homo sapiens
  siRNA target sequence for EGF (NM_001963.2,1875-1893).
cttcaggaccacaaccatt

SEQ ID NO: 142951 - DNA, 19 bp, Homo sapiens
  siRNA target sequence for EGF (NM_001963.2,1881-1899).
gaccacaaccatttttgct

SEQ ID NO: 142952 - DNA, 19 bp, Homo sapiens
  siRNA target sequence for EGF (NM_001963.2,1900-1918).
gtttgccaattctcaagat

SEQ ID NO: 142953 - DNA, 19 bp, Homo sapiens
  siRNA target sequence for EGF (NM_001963.2,1906-1924).
caattctcaagatattcga

SEQ ID NO: 142954 - DNA, 19 bp, Homo sapiens
  siRNA target sequence for EGF (NM_001963.2,1916-1934).
gatattcgacacatgcatt

SEQ ID NO: 142955 - DNA, 19 bp, Homo sapiens
  siRNA target sequence for EGF (NM_001963.2,1969-1987).
gcagatgggaatggtttat

SEQ ID NO: 142956 - DNA, 19 bp, Homo sapiens
  siRNA target sequence for EGF (NM_001963.2,1981-1999).
ggtttatgccctagatcat

SEQ ID NO: 142957 - DNA, 19 bp, Homo sapiens
  siRNA target sequence for EGF (NM_001963.2,2000-2018).
gaccctgtggaaaataaga

SEQ ID NO: 142958 - DNA, 19 bp, Homo sapiens
  siRNA target sequence for EGF (NM_001963.2,2004-2022).
ctgtggaaaataagatata

SEQ ID NO: 142959 - DNA, 19 bp, Homo sapiens
  siRNA target sequence for EGF (NM_001963.2,2044-2062).
gtggatagagagagctaat

SEQ ID NO: 142960 - DNA, 19 bp, Homo sapiens
  siRNA target sequence for EGF (NM_001963.2,2046-2064).
ggatagagagagctaatat

SEQ ID NO: 142961 - DNA, 19 bp, Homo sapiens
  siRNA target sequence for EGF (NM_001963.2,2074-2092).
ccagcgagaaaggcttatt

SEQ ID NO: 142962 - DNA, 19 bp, Homo sapiens
  siRNA target sequence for EGF (NM_001963.2,2133-2151).
ggattggccgtagattcta

SEQ ID NO: 142963 - DNA, 19 bp, Homo sapiens
  siRNA target sequence for EGF (NM_001963.2,2134-2152).
gattggccgtagattctat

SEQ ID NO: 142964 - DNA, 19 bp, Homo sapiens
  siRNA target sequence for EGF (NM_001963.2,2174-2192).
ctgattggaaggagtgatt

SEQ ID NO: 142965 - DNA, 19 bp, Homo sapiens
  siRNA target sequence for EGF (NM_001963.2,2189-2207).
gatttaaatgggaaacgtt

SEQ ID NO: 142966 - DNA, 19 bp, Homo sapiens
  siRNA target sequence for EGF (NM_001963.2,2258-2276).
catccaatggccaagagat

SEQ ID NO: 142967 - DNA, 19 bp, Homo sapiens
  siRNA target sequence for EGF (NM_001963.2,2283-2301).
ggactgatacagggattaa

SEQ ID NO: 142968 - DNA, 19 bp, Homo sapiens
  siRNA target sequence for EGF (NM_001963.2,2295-2313).
ggattaatccacgaattga

SEQ ID NO: 142969 - DNA, 19 bp, Homo sapiens
  siRNA target sequence for EGF (NM_001963.2,2296-2314).
gattaatccacgaattgaa

SEQ ID NO: 142970 - DNA, 19 bp, Homo sapiens
  siRNA target sequence for EGF (NM_001963.2,2331-2349).
gccttggccgtctggttat

SEQ ID NO: 142971 - DNA, 19 bp, Homo sapiens
  siRNA target sequence for EGF (NM_001963.2,2370-2388).
ggcccagtggaataacgat

SEQ ID NO: 142972 - DNA, 19 bp, Homo sapiens
  siRNA target sequence for EGF (NM_001963.2,2376-2394).
gtggaataacgattgactt

SEQ ID NO: 142973 - DNA, 19 bp, Homo sapiens
  siRNA target sequence for EGF (NM_001963.2,2547-2565).
gggctatgccatcagtaat

SEQ ID NO: 142974 - DNA, 19 bp, Homo sapiens
  siRNA target sequence for EGF (NM_001963.2,2575-2593).
caagaggactggcaaagat

SEQ ID NO: 142975 - DNA, 19 bp, Homo sapiens
  siRNA target sequence for EGF (NM_001963.2,2580-2598).
ggactggcaaagatagagt

SEQ ID NO: 142976 - DNA, 19 bp, Homo sapiens
  siRNA target sequence for EGF (NM_001963.2,2581-2599).
gactggcaaagatagagta

SEQ ID NO: 142977 - DNA, 19 bp, Homo sapiens
  siRNA target sequence for EGF (NM_001963.2,2664-2682).
gagcagatccctgcttata

SEQ ID NO: 142978 - DNA, 19 bp, Homo sapiens
  siRNA target sequence for EGF (NM_001963.2,2669-2687).
gatccctgcttatatcaaa

SEQ ID NO: 142979 - DNA, 19 bp, Homo sapiens
  siRNA target sequence for EGF (NM_001963.2,2695-2713).
ctgtgaacatatttgcaaa

SEQ ID NO: 142980 - DNA, 19 bp, Homo sapiens
  siRNA target sequence for EGF (NM_001963.2,2736-2754).
gttcgtgtcgtgaaggttt

SEQ ID NO: 142981 - DNA, 19 bp, Homo sapiens
  siRNA target sequence for EGF (NM_001963.2,2739-2757).
cgtgtcgtgaaggttttat

SEQ ID NO: 142982 - DNA, 19 bp, Homo sapiens
  siRNA target sequence for EGF (NM_001963.2,2813-2831).
ggtggtgaagttgatctaa

SEQ ID NO: 142983 - DNA, 19 bp, Homo sapiens
  siRNA target sequence for EGF (NM_001963.2,2814-2832).
gtggtgaagttgatctaaa

SEQ ID NO: 142984 - DNA, 19 bp, Homo sapiens
  siRNA target sequence for EGF (NM_001963.2,2816-2834).
ggtgaagttgatctaaaga

SEQ ID NO: 142985 - DNA, 19 bp, Homo sapiens
  siRNA target sequence for EGF (NM_001963.2,2825-2843).
gatctaaagaaccaagtaa

SEQ ID NO: 142986 - DNA, 19 bp, Homo sapiens
  siRNA target sequence for EGF (NM_001963.2,2866-2884).
gactagagtgtcagaagat

SEQ ID NO: 142987 - DNA, 19 bp, Homo sapiens
  siRNA target sequence for EGF (NM_001963.2,2965-2983).
catgtatgctcggtgtatt

SEQ ID NO: 142988 - DNA, 19 bp, Homo sapiens
  siRNA target sequence for EGF (NM_001963.2,2999-3017).
gccacatgtcagtgtttga

SEQ ID NO: 142989 - DNA, 19 bp, Homo sapiens
  siRNA target sequence for EGF (NM_001963.2,3001-3019).
cacatgtcagtgtttgaaa

SEQ ID NO: 142990 - DNA, 19 bp, Homo sapiens
  siRNA target sequence for EGF (NM_001963.2,3026-3044).
gctggggatggaaaactat

SEQ ID NO: 142991 - DNA, 19 bp, Homo sapiens
  siRNA target sequence for EGF (NM_001963.2,3029-3047).
ggggatggaaaactatgtt

SEQ ID NO: 142992 - DNA, 19 bp, Homo sapiens
  siRNA target sequence for EGF (NM_001963.2,3109-3127).
caacaccgaaggtggttat

SEQ ID NO: 142993 - DNA, 19 bp, Homo sapiens
  siRNA target sequence for EGF (NM_001963.2,3335-3353).
caccactattccgtaagaa

SEQ ID NO: 142994 - DNA, 19 bp, Homo sapiens
  siRNA target sequence for EGF (NM_001963.2,3340-3358).
ctattccgtaagaaatagt

SEQ ID NO: 142995 - DNA, 19 bp, Homo sapiens
  siRNA target sequence for EGF (NM_001963.2,3425-3443).
gcattggacaagtatgcat

SEQ ID NO: 142996 - DNA, 19 bp, Homo sapiens
  siRNA target sequence for EGF (NM_001963.2,3618-3636).
ctcagaagctgctatcgaa

SEQ ID NO: 142997 - DNA, 19 bp, Homo sapiens
  siRNA target sequence for EGF (NM_001963.2,3620-3638).
cagaagctgctatcgaaaa

SEQ ID NO: 142998 - DNA, 19 bp, Homo sapiens
  siRNA target sequence for EGF (NM_001963.2,3909-3927).
cctgtccccaggtaatgga

SEQ ID NO: 142999 - DNA, 19 bp, Homo sapiens
  siRNA target sequence for EGF (NM_001963.2,3998-4016).
ctatcagctaacccattat

SEQ ID NO: 143000 - DNA, 19 bp, Homo sapiens
  siRNA target sequence for EGFL6 (NM_015507.2,351-369).
gcctggggtctgtcactat

SEQ ID NO: 143001 - DNA, 19 bp, Homo sapiens
  siRNA target sequence for EGFL6 (NM_015507.2,360-378).
ctgtcactatggaactaaa

SEQ ID NO: 143002 - DNA, 19 bp, Homo sapiens
  siRNA target sequence for EGFL6 (NM_015507.2,362-380).
gtcactatggaactaaact

SEQ ID NO: 143003 - DNA, 19 bp, Homo sapiens
  siRNA target sequence for EGFL6 (NM_015507.2,431-449).
catgcgaacctggatgtaa

SEQ ID NO: 143004 - DNA, 19 bp, Homo sapiens
  siRNA target sequence for EGFL6 (NM_015507.2,434-452).
gcgaacctggatgtaagtt

SEQ ID NO: 143005 - DNA, 19 bp, Homo sapiens
  siRNA target sequence for EGFL6 (NM_015507.2,459-477).
gtgcgtgggaccaaacaaa

SEQ ID NO: 143006 - DNA, 19 bp, Homo sapiens
  siRNA target sequence for EGFL6 (NM_015507.2,463-481).
gtgggaccaaacaaatgca

SEQ ID NO: 143007 - DNA, 19 bp, Homo sapiens
  siRNA target sequence for EGFL6 (NM_015507.2,509-527).
cctgcagtcaagatgtgaa

SEQ ID NO: 143008 - DNA, 19 bp, Homo sapiens
  siRNA target sequence for EGFL6 (NM_015507.2,510-528).
ctgcagtcaagatgtgaat

SEQ ID NO: 143009 - DNA, 19 bp, Homo sapiens
  siRNA target sequence for EGFL6 (NM_015507.2,555-573).
ccaacacagatgtgtgaat

SEQ ID NO: 143010 - DNA, 19 bp, Homo sapiens
  siRNA target sequence for EGFL6 (NM_015507.2,556-574).
caacacagatgtgtgaata

SEQ ID NO: 143011 - DNA, 19 bp, Homo sapiens
  siRNA target sequence for EGFL6 (NM_015507.2,580-598).
ggaagctacaagtgctttt

SEQ ID NO: 143012 - DNA, 19 bp, Homo sapiens
  siRNA target sequence for EGFL6 (NM_015507.2,628-646).
gctacgtgtgtgaactcta

SEQ ID NO: 143013 - DNA, 19 bp, Homo sapiens
  siRNA target sequence for EGFL6 (NM_015507.2,647-665).
ggacatgtgccatgataaa

SEQ ID NO: 143014 - DNA, 19 bp, Homo sapiens
  siRNA target sequence for EGFL6 (NM_015507.2,746-764).
gaagagactgtctagatat

SEQ ID NO: 143015 - DNA, 19 bp, Homo sapiens
  siRNA target sequence for EGFL6 (NM_015507.2,749-767).
gagactgtctagatattga

SEQ ID NO: 143016 - DNA, 19 bp, Homo sapiens
  siRNA target sequence for EGFL6 (NM_015507.2,773-791).
gtgcctctggtaaagtcat

SEQ ID NO: 143017 - DNA, 19 bp, Homo sapiens
  siRNA target sequence for EGFL6 (NM_015507.2,853-871).
ggtttcgaactgcaatata

SEQ ID NO: 143018 - DNA, 19 bp, Homo sapiens
  siRNA target sequence for EGFL6 (NM_015507.2,854-872).
gtttcgaactgcaatatat

SEQ ID NO: 143019 - DNA, 19 bp, Homo sapiens
  siRNA target sequence for EGFL6 (NM_015507.2,875-893).
gtggacgatatgactgtat

SEQ ID NO: 143020 - DNA, 19 bp, Homo sapiens
  siRNA target sequence for EGFL6 (NM_015507.2,878-896).
gacgatatgactgtataga

SEQ ID NO: 143021 - DNA, 19 bp, Homo sapiens
  siRNA target sequence for EGFL6 (NM_015507.2,880-898).
cgatatgactgtatagata

SEQ ID NO: 143022 - DNA, 19 bp, Homo sapiens
  siRNA target sequence for EGFL6 (NM_015507.2,958-976).
caagggtccttcaagtgta

SEQ ID NO: 143023 - DNA, 19 bp, Homo sapiens
  siRNA target sequence for EGFL6 (NM_015507.2,1061-1079).
gtaccatcaaagacagaat

SEQ ID NO: 143024 - DNA, 19 bp, Homo sapiens
  siRNA target sequence for EGFL6 (NM_015507.2,1160-1178).
ctacccctaaggtgaactt

SEQ ID NO: 143025 - DNA, 19 bp, Homo sapiens
  siRNA target sequence for EGFL6 (NM_015507.2,1179-1197).
gcagcccttcaactatgaa

SEQ ID NO: 143026 - DNA, 19 bp, Homo sapiens
  siRNA target sequence for EGFL6 (NM_015507.2,1185-1203).
cttcaactatgaagagata

SEQ ID NO: 143027 - DNA, 19 bp, Homo sapiens
  siRNA target sequence for EGFL6 (NM_015507.2,1188-1206).
caactatgaagagatagtt

SEQ ID NO: 143028 - DNA, 19 bp, Homo sapiens
  siRNA target sequence for EGFL6 (NM_015507.2,1221-1239).
ctctcatggaggtaaaaaa

SEQ ID NO: 143029 - DNA, 19 bp, Homo sapiens
  siRNA target sequence for EGFL6 (NM_015507.2,1322-1340).
gcctgcgaggagatgtgtt

SEQ ID NO: 143030 - DNA, 19 bp, Homo sapiens
  siRNA target sequence for EGFL6 (NM_015507.2,1323-1341).
cctgcgaggagatgtgttt

SEQ ID NO: 143031 - DNA, 19 bp, Homo sapiens
  siRNA target sequence for EGFL6 (NM_015507.2,1364-1382).
gtgaattcggcctgattct

SEQ ID NO: 143032 - DNA, 19 bp, Homo sapiens
  siRNA target sequence for EGFL6 (NM_015507.2,1392-1410).
gaaagcgctaacttccaaa

SEQ ID NO: 143033 - DNA, 19 bp, Homo sapiens
  siRNA target sequence for EGFL6 (NM_015507.2,1510-1528).
gctgatcgagataatgcta

SEQ ID NO: 143034 - DNA, 19 bp, Homo sapiens
  siRNA target sequence for EGFL6 (NM_015507.2,1511-1529).
ctgatcgagataatgctat

SEQ ID NO: 143035 - DNA, 19 bp, Homo sapiens
  siRNA target sequence for EGFL6 (NM_015507.2,1609-1627).
caaccccaaagcaacttct

SEQ ID NO: 143036 - DNA, 19 bp, Homo sapiens
  siRNA target sequence for EGFL6 (NM_015507.2,1665-1683).
cgggaaacttcgagtgttt

SEQ ID NO: 143037 - DNA, 19 bp, Homo sapiens
  siRNA target sequence for EGFL6 (NM_015507.2,1721-1739).
ccacgagtgaggatgaaaa

SEQ ID NO: 143038 - DNA, 19 bp, Homo sapiens
  siRNA target sequence for EGFL6 (NM_015507.2,1775-1793).
ctgatgctaccaaaagcat

SEQ ID NO: 143039 - DNA, 19 bp, Homo sapiens
  siRNA target sequence for EGFL6 (NM_015507.2,1854-1872).
gcttgtttcaggcttatgt

SEQ ID NO: 143040 - DNA, 19 bp, Homo sapiens
  siRNA target sequence for EGFL7 (NM_016215.2,504-522).
cacctaccgaaccatctat

SEQ ID NO: 143041 - DNA, 19 bp, Homo sapiens
  siRNA target sequence for EGFL7 (NM_016215.2,615-633).
ggcctgtggagcagcaata

SEQ ID NO: 143042 - DNA, 19 bp, Homo sapiens
  siRNA target sequence for EGFL9 (NM_023932.1,547-565).
cctgccttgacggcataaa

SEQ ID NO: 143043 - DNA, 19 bp, Homo sapiens
  siRNA target sequence for EGFL9 (NM_023932.1,719-737).
gacctgtgagcttgtctta

SEQ ID NO: 143044 - DNA, 19 bp, Homo sapiens
  siRNA target sequence for ELA1 (NM_001971.3,71-89).
ggaccttccggaaaccaat

SEQ ID NO: 143045 - DNA, 19 bp, Homo sapiens
  siRNA target sequence for ELA1 (NM_001971.3,162-180).
ggaggttcccggtatcaca

SEQ ID NO: 143046 - DNA, 19 bp, Homo sapiens
  siRNA target sequence for ELA1 (NM_001971.3,223-241).
ctgctcactgcgtggatta

SEQ ID NO: 143047 - DNA, 19 bp, Homo sapiens
  siRNA target sequence for ELA1 (NM_001971.3,226-244).
ctcactgcgtggattacca

SEQ ID NO: 143048 - DNA, 19 bp, Homo sapiens
  siRNA target sequence for ELA1 (NM_001971.3,234-252).
gtggattaccagaagactt

SEQ ID NO: 143049 - DNA, 19 bp, Homo sapiens
  siRNA target sequence for ELA1 (NM_001971.3,357-375).
gtggctgccggctatgaca

SEQ ID NO: 143050 - DNA, 19 bp, Homo sapiens
  siRNA target sequence for ELA1 (NM_001971.3,396-414).
cagagcgttaccctcaata

SEQ ID NO: 143051 - DNA, 19 bp, Homo sapiens
  siRNA target sequence for ELA1 (NM_001971.3,400-418).
gcgttaccctcaatagcta

SEQ ID NO: 143052 - DNA, 19 bp, Homo sapiens
  siRNA target sequence for ELA1 (NM_001971.3,401-419).
cgttaccctcaatagctat

SEQ ID NO: 143053 - DNA, 19 bp, Homo sapiens
  siRNA target sequence for ELA1 (NM_001971.3,677-695).
cttggtgaatggcaagtat

SEQ ID NO: 143054 - DNA, 19 bp, Homo sapiens
  siRNA target sequence for ELA1 (NM_001971.3,680-698).
ggtgaatggcaagtattct

SEQ ID NO: 143055 - DNA, 19 bp, Homo sapiens
  siRNA target sequence for ELA1 (NM_001971.3,777-795).
gcttacatctcctggataa

SEQ ID NO: 143056 - DNA, 19 bp, Homo sapiens
  siRNA target sequence for ELA1 (NM_001971.3,778-796).
cttacatctcctggataaa

SEQ ID NO: 143057 - DNA, 19 bp, Homo sapiens
  siRNA target sequence for EML2 (NM_012155.1,84-102).
gaggatggctccgtgaaaa

SEQ ID NO: 143058 - DNA, 19 bp, Homo sapiens
  siRNA target sequence for EML2 (NM_012155.1,87-105).
gatggctccgtgaaaatgt

SEQ ID NO: 143059 - DNA, 19 bp, Homo sapiens
  siRNA target sequence for EML2 (NM_012155.1,265-283).
ccggggagatagtgtactt

SEQ ID NO: 143060 - DNA, 19 bp, Homo sapiens
  siRNA target sequence for EML2 (NM_012155.1,266-284).
cggggagatagtgtacttt

SEQ ID NO: 143061 - DNA, 19 bp, Homo sapiens
  siRNA target sequence for EML2 (NM_012155.1,289-307).
cctccgtagccgtgctata

SEQ ID NO: 143062 - DNA, 19 bp, Homo sapiens
  siRNA target sequence for EML2 (NM_012155.1,343-361).
gacacaacgatgacatcaa

SEQ ID NO: 143063 - DNA, 19 bp, Homo sapiens
  siRNA target sequence for EML2 (NM_012155.1,345-363).
cacaacgatgacatcaaat

SEQ ID NO: 143064 - DNA, 19 bp, Homo sapiens
  siRNA target sequence for EML2 (NM_012155.1,410-428).
ggcgggaaccactaaggaa

SEQ ID NO: 143065 - DNA, 19 bp, Homo sapiens
  siRNA target sequence for EML2 (NM_012155.1,495-513).
ggcttgggggtgtttgaca

SEQ ID NO: 143066 - DNA, 19 bp, Homo sapiens
  siRNA target sequence for EML2 (NM_012155.1,643-661).
gctccaatgaggctgtatt

SEQ ID NO: 143067 - DNA, 19 bp, Homo sapiens
  siRNA target sequence for EML2 (NM_012155.1,684-702).
gaccccactgtgcttatca

SEQ ID NO: 143068 - DNA, 19 bp, Homo sapiens
  siRNA target sequence for EML2 (NM_012155.1,706-724).
gcgggaaatctcacatcta

SEQ ID NO: 143069 - DNA, 19 bp, Homo sapiens
  siRNA target sequence for EML2 (NM_012155.1,847-865).
ctggggggaacctctatgt

SEQ ID NO: 143070 - DNA, 19 bp, Homo sapiens
  siRNA target sequence for EML2 (NM_012155.1,849-867).
ggggggaacctctatgttt

SEQ ID NO: 143071 - DNA, 19 bp, Homo sapiens
  siRNA target sequence for EML2 (NM_012155.1,1096-1114).
ggaccacccgcaattccat

SEQ ID NO: 143072 - DNA, 19 bp, Homo sapiens
  siRNA target sequence for EML2 (NM_012155.1,1227-1245).
gataagctggtgcatctat

SEQ ID NO: 143073 - DNA, 19 bp, Homo sapiens
  siRNA target sequence for EML2 (NM_012155.1,1239-1257).
catctatggagctcagatt

SEQ ID NO: 143074 - DNA, 19 bp, Homo sapiens
  siRNA target sequence for EML2 (NM_012155.1,1543-1561).
cgggccattccagttttat

SEQ ID NO: 143075 - DNA, 19 bp, Homo sapiens
  siRNA target sequence for EML2 (NM_012155.1,1746-1764).
gcggacggcactgatatca

SEQ ID NO: 143076 - DNA, 19 bp, Homo sapiens
  siRNA target sequence for EML2 (NM_012155.1,1747-1765).
cggacggcactgatatcaa

SEQ ID NO: 143077 - DNA, 19 bp, Homo sapiens
  siRNA target sequence for EML2 (NM_012155.1,1799-1817).
ggcttcagctgatgacttt

SEQ ID NO: 143078 - DNA, 19 bp, Homo sapiens
  siRNA target sequence for EML2 (NM_012155.1,1858-1876).
gagccctcagccacaagta

SEQ ID NO: 143079 - DNA, 19 bp, Homo sapiens
  siRNA target sequence for EMR1 (NM_001974.3,62-80).
cttctggggatgttgtgtt

SEQ ID NO: 143080 - DNA, 19 bp, Homo sapiens
  siRNA target sequence for EMR1 (NM_001974.3,67-85).
ggggatgttgtgttatgca

SEQ ID NO: 143081 - DNA, 19 bp, Homo sapiens
  siRNA target sequence for EMR1 (NM_001974.3,200-218).
ctattgcgcttgcaaacaa

SEQ ID NO: 143082 - DNA, 19 bp, Homo sapiens
  siRNA target sequence for EMR1 (NM_001974.3,261-279).
ggagtgcgatgcaaagata

SEQ ID NO: 143083 - DNA, 19 bp, Homo sapiens
  siRNA target sequence for EMR1 (NM_001974.3,262-280).
gagtgcgatgcaaagatat

SEQ ID NO: 143084 - DNA, 19 bp, Homo sapiens
  siRNA target sequence for EMR1 (NM_001974.3,305-323).
gccctgtggtcctaactca

SEQ ID NO: 143085 - DNA, 19 bp, Homo sapiens
  siRNA target sequence for EMR1 (NM_001974.3,306-324).
ccctgtggtcctaactcat

SEQ ID NO: 143086 - DNA, 19 bp, Homo sapiens
  siRNA target sequence for EMR1 (NM_001974.3,336-354).
ctgtcagggaggtacaagt

SEQ ID NO: 143087 - DNA, 19 bp, Homo sapiens
  siRNA target sequence for EMR1 (NM_001974.3,350-368).
caagtgcagctgtttagat

SEQ ID NO: 143088 - DNA, 19 bp, Homo sapiens
  siRNA target sequence for EMR1 (NM_001974.3,359-377).
ctgtttagatggtttctct

SEQ ID NO: 143089 - DNA, 19 bp, Homo sapiens
  siRNA target sequence for EMR1 (NM_001974.3,416-434).
caatttctcctgtactgat

SEQ ID NO: 143090 - DNA, 19 bp, Homo sapiens
  siRNA target sequence for EMR1 (NM_001974.3,503-521).
cagttgcagctgtcaagtt

SEQ ID NO: 143091 - DNA, 19 bp, Homo sapiens
  siRNA target sequence for EMR1 (NM_001974.3,508-526).
gcagctgtcaagttggatt

SEQ ID NO: 143092 - DNA, 19 bp, Homo sapiens
  siRNA target sequence for EMR1 (NM_001974.3,586-604).
cagagcatgcaacttgtaa

SEQ ID NO: 143093 - DNA, 19 bp, Homo sapiens
  siRNA target sequence for EMR1 (NM_001974.3,588-606).
gagcatgcaacttgtaata

SEQ ID NO: 143094 - DNA, 19 bp, Homo sapiens
  siRNA target sequence for EMR1 (NM_001974.3,717-735).
gaaatgtgccccatcaatt

SEQ ID NO: 143095 - DNA, 19 bp, Homo sapiens
  siRNA target sequence for EMR1 (NM_001974.3,722-740).
gtgccccatcaattcaaca

SEQ ID NO: 143096 - DNA, 19 bp, Homo sapiens
  siRNA target sequence for EMR1 (NM_001974.3,749-767).
cactcctgggagctacttt

SEQ ID NO: 143097 - DNA, 19 bp, Homo sapiens
  siRNA target sequence for EMR1 (NM_001974.3,821-839).
ccaaggagtggaatgtaga

SEQ ID NO: 143098 - DNA, 19 bp, Homo sapiens
  siRNA target sequence for EMR1 (NM_001974.3,871-889).
cctgtggtcctaattctat

SEQ ID NO: 143099 - DNA, 19 bp, Homo sapiens
  siRNA target sequence for EMR1 (NM_001974.3,988-1006).
gggttctcttcaaatgtaa

SEQ ID NO: 143100 - DNA, 19 bp, Homo sapiens
  siRNA target sequence for EMR1 (NM_001974.3,1011-1029).
gatgtgatacccgataata

SEQ ID NO: 143101 - DNA, 19 bp, Homo sapiens
  siRNA target sequence for EMR1 (NM_001974.3,1062-1080).
gtgaaacctgcatatgtct

SEQ ID NO: 143102 - DNA, 19 bp, Homo sapiens
  siRNA target sequence for EMR1 (NM_001974.3,1068-1086).
cctgcatatgtctcctttt

SEQ ID NO: 143103 - DNA, 19 bp, Homo sapiens
  siRNA target sequence for EMR1 (NM_001974.3,1144-1162).
ccgtagtttctctgaagaa

SEQ ID NO: 143104 - DNA, 19 bp, Homo sapiens
  siRNA target sequence for EMR1 (NM_001974.3,1145-1163).
cgtagtttctctgaagaat

SEQ ID NO: 143105 - DNA, 19 bp, Homo sapiens
  siRNA target sequence for EMR1 (NM_001974.3,1317-1335).
gctgttcggacggaatact

SEQ ID NO: 143106 - DNA, 19 bp, Homo sapiens
  siRNA target sequence for EMR1 (NM_001974.3,1318-1336).
ctgttcggacggaatactt

SEQ ID NO: 143107 - DNA, 19 bp, Homo sapiens
  siRNA target sequence for EMR1 (NM_001974.3,1324-1342).
ggacggaatacttagacat

SEQ ID NO: 143108 - DNA, 19 bp, Homo sapiens
  siRNA target sequence for EMR1 (NM_001974.3,1327-1345).
cggaatacttagacattga

SEQ ID NO: 143109 - DNA, 19 bp, Homo sapiens
  siRNA target sequence for EMR1 (NM_001974.3,1398-1416).
gtagccaagggggataaga

SEQ ID NO: 143110 - DNA, 19 bp, Homo sapiens
  siRNA target sequence for EMR1 (NM_001974.3,1401-1419).
gccaagggggataagatga

SEQ ID NO: 143111 - DNA, 19 bp, Homo sapiens
  siRNA target sequence for EMR1 (NM_001974.3,1402-1420).
ccaagggggataagatgaa

SEQ ID NO: 143112 - DNA, 19 bp, Homo sapiens
  siRNA target sequence for EMR1 (NM_001974.3,1421-1439).
gatcgggtgttccacaatt

SEQ ID NO: 143113 - DNA, 19 bp, Homo sapiens
  siRNA target sequence for EMR1 (NM_001974.3,1490-1508).
gggcatggaatcggtttta

SEQ ID NO: 143114 - DNA, 19 bp, Homo sapiens
  siRNA target sequence for EMR1 (NM_001974.3,1491-1509).
ggcatggaatcggttttaa

SEQ ID NO: 143115 - DNA, 19 bp, Homo sapiens
  siRNA target sequence for EMR1 (NM_001974.3,1492-1510).
gcatggaatcggttttaaa

SEQ ID NO: 143116 - DNA, 19 bp, Homo sapiens
  siRNA target sequence for EMR1 (NM_001974.3,1493-1511).
catggaatcggttttaaat

SEQ ID NO: 143117 - DNA, 19 bp, Homo sapiens
  siRNA target sequence for EMR1 (NM_001974.3,1579-1597).
gagtcgttgggggcataat

SEQ ID NO: 143118 - DNA, 19 bp, Homo sapiens
  siRNA target sequence for EMR1 (NM_001974.3,1581-1599).
gtcgttgggggcataatga

SEQ ID NO: 143119 - DNA, 19 bp, Homo sapiens
  siRNA target sequence for EMR1 (NM_001974.3,1583-1601).
cgttgggggcataatgact

SEQ ID NO: 143120 - DNA, 19 bp, Homo sapiens
  siRNA target sequence for EMR1 (NM_001974.3,1752-1770).
gcttctgagacatatacca

SEQ ID NO: 143121 - DNA, 19 bp, Homo sapiens
  siRNA target sequence for EMR1 (NM_001974.3,1753-1771).
cttctgagacatataccat

SEQ ID NO: 143122 - DNA, 19 bp, Homo sapiens
  siRNA target sequence for EMR1 (NM_001974.3,1792-1810).
caaatcttgccgttatcat

SEQ ID NO: 143123 - DNA, 19 bp, Homo sapiens
  siRNA target sequence for EMR1 (NM_001974.3,1855-1873).
gccatgtaggcattatcat

SEQ ID NO: 143124 - DNA, 19 bp, Homo sapiens
  siRNA target sequence for EMR1 (NM_001974.3,1918-1936).
gtcgctccatccgaaatca

SEQ ID NO: 143125 - DNA, 19 bp, Homo sapiens
  siRNA target sequence for EMR1 (NM_001974.3,1920-1938).
cgctccatccgaaatcaca

SEQ ID NO: 143126 - DNA, 19 bp, Homo sapiens
  siRNA target sequence for EMR1 (NM_001974.3,1921-1939).
gctccatccgaaatcacaa

SEQ ID NO: 143127 - DNA, 19 bp, Homo sapiens
  siRNA target sequence for EMR1 (NM_001974.3,2007-2025).
cacaagactgacaacaaga

SEQ ID NO: 143128 - DNA, 19 bp, Homo sapiens
  siRNA target sequence for EMR1 (NM_001974.3,2046-2064).
ggcttcctgcactaccttt

SEQ ID NO: 143129 - DNA, 19 bp, Homo sapiens
  siRNA target sequence for EMR1 (NM_001974.3,2149-2167).
gctctcgcaacatcaagat

SEQ ID NO: 143130 - DNA, 19 bp, Homo sapiens
  siRNA target sequence for EMR1 (NM_001974.3,2238-2256).
cagggctatggaatgcata

SEQ ID NO: 143131 - DNA, 19 bp, Homo sapiens
  siRNA target sequence for EMR1 (NM_001974.3,2240-2258).
gggctatggaatgcataat

SEQ ID NO: 143132 - DNA, 19 bp, Homo sapiens
  siRNA target sequence for EMR1 (NM_001974.3,2304-2322).
gggccagtttgcacagtta

SEQ ID NO: 143133 - DNA, 19 bp, Homo sapiens
  siRNA target sequence for EMR1 (NM_001974.3,2306-2324).
gccagtttgcacagttata

SEQ ID NO: 143134 - DNA, 19 bp, Homo sapiens
  siRNA target sequence for EMR1 (NM_001974.3,2308-2326).
cagtttgcacagttatagt

SEQ ID NO: 143135 - DNA, 19 bp, Homo sapiens
  siRNA target sequence for EMR1 (NM_001974.3,2310-2328).
gtttgcacagttatagtga

SEQ ID NO: 143136 - DNA, 19 bp, Homo sapiens
  siRNA target sequence for EMR1 (NM_001974.3,2314-2332).
gcacagttatagtgatcaa

SEQ ID NO: 143137 - DNA, 19 bp, Homo sapiens
  siRNA target sequence for EMR1 (NM_001974.3,2370-2388).
cagaggctttccagtgtta

SEQ ID NO: 143138 - DNA, 19 bp, Homo sapiens
  siRNA target sequence for EMR1 (NM_001974.3,2393-2411).
cgaagtctcaacgctaaaa

SEQ ID NO: 143139 - DNA, 19 bp, Homo sapiens
  siRNA target sequence for EMR1 (NM_001974.3,2397-2415).
gtctcaacgctaaaagaca

SEQ ID NO: 143140 - DNA, 19 bp, Homo sapiens
  siRNA target sequence for EMR1 (NM_001974.3,2470-2488).
gggtgctgggcatttttca

SEQ ID NO: 143141 - DNA, 19 bp, Homo sapiens
  siRNA target sequence for EMR1 (NM_001974.3,2583-2601).
ggccaggtacgagaagaat

SEQ ID NO: 143142 - DNA, 19 bp, Homo sapiens
  siRNA target sequence for EMR1 (NM_001974.3,2586-2604).
caggtacgagaagaataca

SEQ ID NO: 143143 - DNA, 19 bp, Homo sapiens
  siRNA target sequence for EMR2 (NM_013447.2,467-485).
gcgtctttctcgtctttct

SEQ ID NO: 143144 - DNA, 19 bp, Homo sapiens
  siRNA target sequence for EMR2 (NM_013447.2,1507-1525).
gggctgttgaacttcagtt

SEQ ID NO: 143145 - DNA, 19 bp, Homo sapiens
  siRNA target sequence for EMR2 (NM_013447.2,1508-1526).
ggctgttgaacttcagtta

SEQ ID NO: 143146 - DNA, 19 bp, Homo sapiens
  siRNA target sequence for EMR2 (NM_013447.2,1528-1546).
cctgcaggcacagaattgt

SEQ ID NO: 143147 - DNA, 19 bp, Homo sapiens
  siRNA target sequence for EMR2 (NM_013447.2,2214-2232).
cctcgtggcaattgatcaa

SEQ ID NO: 143148 - DNA, 19 bp, Homo sapiens
  siRNA target sequence for EMR2 (NM_013447.2,2215-2233).
ctcgtggcaattgatcaaa

SEQ ID NO: 143149 - DNA, 19 bp, Homo sapiens
  siRNA target sequence for EMR2 (NM_013447.2,2805-2823).
gcaggtccgggagcaatat

SEQ ID NO: 143150 - DNA, 19 bp, Homo sapiens
  siRNA target sequence for EMR2 (NM_152918.1,803-821).
cgtgtcaagatatgacttt

SEQ ID NO: 143151 - DNA, 19 bp, Homo sapiens
  siRNA target sequence for EMR3 (NM_032571.2,363-381).
caaccatggatatacttct

SEQ ID NO: 143152 - DNA, 19 bp, Homo sapiens
  siRNA target sequence for EMR3 (NM_032571.2,415-433).
gagacatgtaacgacatta

SEQ ID NO: 143153 - DNA, 19 bp, Homo sapiens
  siRNA target sequence for EMR3 (NM_032571.2,417-435).
gacatgtaacgacattaat

SEQ ID NO: 143154 - DNA, 19 bp, Homo sapiens
  siRNA target sequence for EMR3 (NM_032571.2,419-437).
catgtaacgacattaatga

SEQ ID NO: 143155 - DNA, 19 bp, Homo sapiens
  siRNA target sequence for EMR3 (NM_032571.2,426-444).
cgacattaatgaatgtaca

SEQ ID NO: 143156 - DNA, 19 bp, Homo sapiens
  siRNA target sequence for EMR3 (NM_032571.2,440-458).
gtacaccaccctatagtgt

SEQ ID NO: 143157 - DNA, 19 bp, Homo sapiens
  siRNA target sequence for EMR3 (NM_032571.2,455-473).
gtgtatattgtggatttaa

SEQ ID NO: 143158 - DNA, 19 bp, Homo sapiens
  siRNA target sequence for EMR3 (NM_032571.2,467-485).
gatttaacgctgtgtgtta

SEQ ID NO: 143159 - DNA, 19 bp, Homo sapiens
  siRNA target sequence for EMR3 (NM_032571.2,515-533).
gtgtcccaggatatagact

SEQ ID NO: 143160 - DNA, 19 bp, Homo sapiens
  siRNA target sequence for EMR3 (NM_032571.2,534-552).
gcattctgggaatgaacaa

SEQ ID NO: 143161 - DNA, 19 bp, Homo sapiens
  siRNA target sequence for EMR3 (NM_032571.2,535-553).
cattctgggaatgaacaat

SEQ ID NO: 143162 - DNA, 19 bp, Homo sapiens
  siRNA target sequence for EMR3 (NM_032571.2,547-565).
gaacaattcagtaattcca

SEQ ID NO: 143163 - DNA, 19 bp, Homo sapiens
  siRNA target sequence for EMR3 (NM_032571.2,655-673).
ctcaccaatcagactttat

SEQ ID NO: 143164 - DNA, 19 bp, Homo sapiens
  siRNA target sequence for EMR3 (NM_032571.2,685-703).
gggagacaagaaatctcat

SEQ ID NO: 143165 - DNA, 19 bp, Homo sapiens
  siRNA target sequence for EMR3 (NM_032571.2,726-744).
ggatgtggaatcgaaagtt

SEQ ID NO: 143166 - DNA, 19 bp, Homo sapiens
  siRNA target sequence for EMR3 (NM_032571.2,795-813).
cgatagtgtagctattgaa

SEQ ID NO: 143167 - DNA, 19 bp, Homo sapiens
  siRNA target sequence for EMR3 (NM_032571.2,817-835).
caagcgattacagacaatt

SEQ ID NO: 143168 - DNA, 19 bp, Homo sapiens
  siRNA target sequence for EMR3 (NM_032571.2,935-953).
ccattgcctttatctcata

SEQ ID NO: 143169 - DNA, 19 bp, Homo sapiens
  siRNA target sequence for EMR3 (NM_032571.2,1045-1063).
gctattggacccaaaagga

SEQ ID NO: 143170 - DNA, 19 bp, Homo sapiens
  siRNA target sequence for EMR3 (NM_032571.2,1094-1112).
ctttccagcacgtgaagat

SEQ ID NO: 143171 - DNA, 19 bp, Homo sapiens
  siRNA target sequence for EMR3 (NM_032571.2,1195-1213).
ctgatacacgtgaacaaga

SEQ ID NO: 143172 - DNA, 19 bp, Homo sapiens
  siRNA target sequence for EMR3 (NM_032571.2,1212-1230).
gagtcacaccatgtgtaat

SEQ ID NO: 143173 - DNA, 19 bp, Homo sapiens
  siRNA target sequence for EMR3 (NM_032571.2,1216-1234).
cacaccatgtgtaattgca

SEQ ID NO: 143174 - DNA, 19 bp, Homo sapiens
  siRNA target sequence for EMR3 (NM_032571.2,1452-1470).
ggggattgatcgaactgaa

SEQ ID NO: 143175 - DNA, 19 bp, Homo sapiens
  siRNA target sequence for EMR3 (NM_032571.2,2037-2055).
gcaggtccagaaacaatat

SEQ ID NO: 143176 - DNA, 19 bp, Homo sapiens
  siRNA target sequence for EMR3 (NM_032571.2,2063-2081).
ggtttagagagatcgtaaa

SEQ ID NO: 143177 - DNA, 19 bp, Homo sapiens
  siRNA target sequence for EMR3 (NM_032571.2,2064-2082).
gtttagagagatcgtaaaa

SEQ ID NO: 143178 - DNA, 19 bp, Homo sapiens
  siRNA target sequence for EMR3 (NM_032571.2,2069-2087).
gagagatcgtaaaatcaaa

SEQ ID NO: 143179 - DNA, 19 bp, Homo sapiens
  siRNA target sequence for EMR3 (NM_032571.2,2121-2139).
gatgggtcctgactcaaaa

SEQ ID NO: 143180 - DNA, 19 bp, Homo sapiens
  siRNA target sequence for EMR3 (NM_032571.2,2140-2158).
cccagtgagggggatgttt

SEQ ID NO: 143181 - DNA, 19 bp, Homo sapiens
  siRNA target sequence for EMR3 (NM_152939.1,576-594).
ctgtcatgcaaaagattgt

SEQ ID NO: 143182 - DNA, 19 bp, Homo sapiens
  siRNA target sequence for EPS15 (NM_001981.1,110-128).
gctctctctgacacagtta

SEQ ID NO: 143183 - DNA, 19 bp, Homo sapiens
  siRNA target sequence for EPS15 (NM_001981.1,111-129).
ctctctctgacacagttat

SEQ ID NO: 143184 - DNA, 19 bp, Homo sapiens
  siRNA target sequence for EPS15 (NM_001981.1,130-148).
caagtgggaatcctgtata

SEQ ID NO: 143185 - DNA, 19 bp, Homo sapiens
  siRNA target sequence for EPS15 (NM_001981.1,158-176).
ctatagacaggttgataca

SEQ ID NO: 143186 - DNA, 19 bp, Homo sapiens
  siRNA target sequence for EPS15 (NM_001981.1,229-247).
cagggcttccagacttgat

SEQ ID NO: 143187 - DNA, 19 bp, Homo sapiens
  siRNA target sequence for EPS15 (NM_001981.1,233-251).
gcttccagacttgatactt

SEQ ID NO: 143188 - DNA, 19 bp, Homo sapiens
  siRNA target sequence for EPS15 (NM_001981.1,284-302).
caaaggtatcctgaacaaa

SEQ ID NO: 143189 - DNA, 19 bp, Homo sapiens
  siRNA target sequence for EPS15 (NM_001981.1,334-352).
catgtgcccagaatggatt

SEQ ID NO: 143190 - DNA, 19 bp, Homo sapiens
  siRNA target sequence for EPS15 (NM_001981.1,353-371).
ggaagtttcactaagtagt

SEQ ID NO: 143191 - DNA, 19 bp, Homo sapiens
  siRNA target sequence for EPS15 (NM_001981.1,354-372).
gaagtttcactaagtagtt

SEQ ID NO: 143192 - DNA, 19 bp, Homo sapiens
  siRNA target sequence for EPS15 (NM_001981.1,357-375).
gtttcactaagtagtttga

SEQ ID NO: 143193 - DNA, 19 bp, Homo sapiens
  siRNA target sequence for EPS15 (NM_001981.1,382-400).
ctgttcctccaccaagatt

SEQ ID NO: 143194 - DNA, 19 bp, Homo sapiens
  siRNA target sequence for EPS15 (NM_001981.1,390-408).
ccaccaagatttcatgata

SEQ ID NO: 143195 - DNA, 19 bp, Homo sapiens
  siRNA target sequence for EPS15 (NM_001981.1,449-467).
gctcccatgggctgtaaaa

SEQ ID NO: 143196 - DNA, 19 bp, Homo sapiens
  siRNA target sequence for EPS15 (NM_001981.1,452-470).
cccatgggctgtaaaacct

SEQ ID NO: 143197 - DNA, 19 bp, Homo sapiens
  siRNA target sequence for EPS15 (NM_001981.1,479-497).
ggccaaatatgatgcaata

SEQ ID NO: 143198 - DNA, 19 bp, Homo sapiens
  siRNA target sequence for EPS15 (NM_001981.1,523-541).
gatttctgtctggtgataa

SEQ ID NO: 143199 - DNA, 19 bp, Homo sapiens
  siRNA target sequence for EPS15 (NM_001981.1,528-546).
ctgtctggtgataaagtga

SEQ ID NO: 143200 - DNA, 19 bp, Homo sapiens
  siRNA target sequence for EPS15 (NM_001981.1,550-568).
cagtgttgctcaactctaa

SEQ ID NO: 143201 - DNA, 19 bp, Homo sapiens
  siRNA target sequence for EPS15 (NM_001981.1,594-612).
gtttgggagttgagtgata

SEQ ID NO: 143202 - DNA, 19 bp, Homo sapiens
  siRNA target sequence for EPS15 (NM_001981.1,649-667).
cagttgccatgtttttggt

SEQ ID NO: 143203 - DNA, 19 bp, Homo sapiens
  siRNA target sequence for EPS15 (NM_001981.1,654-672).
gccatgtttttggtatact

SEQ ID NO: 143204 - DNA, 19 bp, Homo sapiens
  siRNA target sequence for EPS15 (NM_001981.1,656-674).
catgtttttggtatactgt

SEQ ID NO: 143205 - DNA, 19 bp, Homo sapiens
  siRNA target sequence for EPS15 (NM_001981.1,715-733).
ccttggtgccaccatctaa

SEQ ID NO: 143206 - DNA, 19 bp, Homo sapiens
  siRNA target sequence for EPS15 (NM_001981.1,719-737).
ggtgccaccatctaagaga

SEQ ID NO: 143207 - DNA, 19 bp, Homo sapiens
  siRNA target sequence for EPS15 (NM_001981.1,720-738).
gtgccaccatctaagagaa

SEQ ID NO: 143208 - DNA, 19 bp, Homo sapiens
  siRNA target sequence for EPS15 (NM_001981.1,837-855).
cgtgaaatattcttgaaaa

SEQ ID NO: 143209 - DNA, 19 bp, Homo sapiens
  siRNA target sequence for EPS15 (NM_001981.1,848-866).
cttgaaaacaggtttacct

SEQ ID NO: 143210 - DNA, 19 bp, Homo sapiens
  siRNA target sequence for EPS15 (NM_001981.1,879-897).
gcccatatatggtcattat

SEQ ID NO: 143211 - DNA, 19 bp, Homo sapiens
  siRNA target sequence for EPS15 (NM_001981.1,889-907).
ggtcattatgcgacacaaa

SEQ ID NO: 143212 - DNA, 19 bp, Homo sapiens
  siRNA target sequence for EPS15 (NM_001981.1,944-962).
ggcttttcacttaatcagt

SEQ ID NO: 143213 - DNA, 19 bp, Homo sapiens
  siRNA target sequence for EPS15 (NM_001981.1,968-986).
gttaatcaagggcattgat

SEQ ID NO: 143214 - DNA, 19 bp, Homo sapiens
  siRNA target sequence for EPS15 (NM_001981.1,984-1002).
gatcctcctcacgttctta

SEQ ID NO: 143215 - DNA, 19 bp, Homo sapiens
  siRNA target sequence for EPS15 (NM_001981.1,1024-1042).
cagacagggccagtttaca

SEQ ID NO: 143216 - DNA, 19 bp, Homo sapiens
  siRNA target sequence for EPS15 (NM_001981.1,1041-1059).
caaaagaacatcataggat

SEQ ID NO: 143217 - DNA, 19 bp, Homo sapiens
  siRNA target sequence for EPS15 (NM_001981.1,1046-1064).
gaacatcataggatcaagt

SEQ ID NO: 143218 - DNA, 19 bp, Homo sapiens
  siRNA target sequence for EPS15 (NM_001981.1,1102-1120).
ctcttaacaatgaaatagt

SEQ ID NO: 143219 - DNA, 19 bp, Homo sapiens
  siRNA target sequence for EPS15 (NM_001981.1,1195-1213).
gtgaggttcaggatcttca

SEQ ID NO: 143220 - DNA, 19 bp, Homo sapiens
  siRNA target sequence for EPS15 (NM_001981.1,1237-1255).
ctaatctgcaaaaactaca

SEQ ID NO: 143221 - DNA, 19 bp, Homo sapiens
  siRNA target sequence for EPS15 (NM_001981.1,1379-1397).
gaaagctgaattaactagt

SEQ ID NO: 143222 - DNA, 19 bp, Homo sapiens
  siRNA target sequence for EPS15 (NM_001981.1,1532-1550).
gcacctacaagattcacaa

SEQ ID NO: 143223 - DNA, 19 bp, Homo sapiens
  siRNA target sequence for EPS15 (NM_001981.1,1633-1651).
gcccacacagcattcttgt

SEQ ID NO: 143224 - DNA, 19 bp, Homo sapiens
  siRNA target sequence for EPS15 (NM_001981.1,1650-1668).
gtaaacggagctacagatt

SEQ ID NO: 143225 - DNA, 19 bp, Homo sapiens
  siRNA target sequence for EPS15 (NM_001981.1,1693-1711).
gtgaaacagccaaccttaa

SEQ ID NO: 143226 - DNA, 19 bp, Homo sapiens
  siRNA target sequence for EPS15 (NM_001981.1,1761-1779).
gaatctccagcaagaagta

SEQ ID NO: 143227 - DNA, 19 bp, Homo sapiens
  siRNA target sequence for EPS15 (NM_001981.1,1774-1792).
gaagtagtcctgaactact

SEQ ID NO: 143228 - DNA, 19 bp, Homo sapiens
  siRNA target sequence for EPS15 (NM_001981.1,1823-1841).
gactacagctgttactgaa

SEQ ID NO: 143229 - DNA, 19 bp, Homo sapiens
  siRNA target sequence for EPS15 (NM_001981.1,1849-1867).
gttctgaactcgacaataa

SEQ ID NO: 143230 - DNA, 19 bp, Homo sapiens
  siRNA target sequence for EPS15 (NM_001981.1,1952-1970).
ccagtctgatccttttgtt

SEQ ID NO: 143231 - DNA, 19 bp, Homo sapiens
  siRNA target sequence for EPS15 (NM_001981.1,2014-2032).
catttggtggtgatccttt

SEQ ID NO: 143232 - DNA, 19 bp, Homo sapiens
  siRNA target sequence for EPS15 (NM_001981.1,2037-2055).
ggttcagatccatttgcat

SEQ ID NO: 143233 - DNA, 19 bp, Homo sapiens
  siRNA target sequence for EPS15 (NM_001981.1,2052-2070).
gcatcagactgtttcttca

SEQ ID NO: 143234 - DNA, 19 bp, Homo sapiens
  siRNA target sequence for EPS15 (NM_001981.1,2071-2089).
ggcaatctactgatccttt

SEQ ID NO: 143235 - DNA, 19 bp, Homo sapiens
  siRNA target sequence for EPS15 (NM_001981.1,2072-2090).
gcaatctactgatcctttt

SEQ ID NO: 143236 - DNA, 19 bp, Homo sapiens
  siRNA target sequence for EPS15 (NM_001981.1,2159-2177).
gcacaatgatccttttgct

SEQ ID NO: 143237 - DNA, 19 bp, Homo sapiens
  siRNA target sequence for EPS15 (NM_001981.1,2268-2286).
gacttcagcacattgtcaa

SEQ ID NO: 143238 - DNA, 19 bp, Homo sapiens
  siRNA target sequence for EPS15 (NM_001981.1,2294-2312).
caatgaagatccttttcgt

SEQ ID NO: 143239 - DNA, 19 bp, Homo sapiens
  siRNA target sequence for EPS15 (NM_001981.1,2331-2349).
gtcagcaacgtagtgatta

SEQ ID NO: 143240 - DNA, 19 bp, Homo sapiens
  siRNA target sequence for EPS15 (NM_001981.1,2335-2353).
gcaacgtagtgattacaaa

SEQ ID NO: 143241 - DNA, 19 bp, Homo sapiens
  siRNA target sequence for EPS15 (NM_001981.1,2336-2354).
caacgtagtgattacaaaa

SEQ ID NO: 143242 - DNA, 19 bp, Homo sapiens
  siRNA target sequence for EPS15 (NM_001981.1,2339-2357).
cgtagtgattacaaaaaat

SEQ ID NO: 143243 - DNA, 19 bp, Homo sapiens
  siRNA target sequence for EPS15 (NM_001981.1,2374-2392).
cggtcaaaagtgaagatga

SEQ ID NO: 143244 - DNA, 19 bp, Homo sapiens
  siRNA target sequence for EPS15 (NM_001981.1,2375-2393).
ggtcaaaagtgaagatgaa

SEQ ID NO: 143245 - DNA, 19 bp, Homo sapiens
  siRNA target sequence for EPS15 (NM_001981.1,2398-2416).
cagcactgccaccaaagat

SEQ ID NO: 143246 - DNA, 19 bp, Homo sapiens
  siRNA target sequence for EPS15 (NM_001981.1,2414-2432).
gatcggaactccaacaaga

SEQ ID NO: 143247 - DNA, 19 bp, Homo sapiens
  siRNA target sequence for EPS15 (NM_001981.1,2452-2470).
ggaaaagatccatcaacaa

SEQ ID NO: 143248 - DNA, 19 bp, Homo sapiens
  siRNA target sequence for EPS15 (NM_001981.1,2514-2532).
cctttcccaggcaacgata

SEQ ID NO: 143249 - DNA, 19 bp, Homo sapiens
  siRNA target sequence for EPS15 (NM_001981.1,2580-2598).
gctactaccactaccaata

SEQ ID NO: 143250 - DNA, 19 bp, Homo sapiens
  siRNA target sequence for EPS15 (NM_001981.1,2601-2619).
gaggctgatccaagcaatt

SEQ ID NO: 143251 - DNA, 19 bp, Homo sapiens
  siRNA target sequence for EPS15 (NM_001981.1,2603-2621).
ggctgatccaagcaatttt

SEQ ID NO: 143252 - DNA, 19 bp, Homo sapiens
  siRNA target sequence for EPS15 (NM_001981.1,2646-2664).
gaagaagatatgatcgaat

SEQ ID NO: 143253 - DNA, 19 bp, Homo sapiens
  siRNA target sequence for EPS15 (NM_001981.1,2699-2717).
gaggcttgcccgactaaat

SEQ ID NO: 143254 - DNA, 19 bp, Homo sapiens
  siRNA target sequence for EPS15 (NM_001981.1,2701-2719).
ggcttgcccgactaaatca

SEQ ID NO: 143255 - DNA, 19 bp, Homo sapiens
  siRNA target sequence for EPS15 (NM_001981.1,2720-2738).
gcaggaacaagaagactta

SEQ ID NO: 143256 - DNA, 19 bp, Homo sapiens
  siRNA target sequence for EPS15 (NM_001981.1,2745-2763).
gctattgcactcagcaaat

SEQ ID NO: 143257 - DNA, 19 bp, Homo sapiens
  siRNA target sequence for EPS15 (NM_001981.1,2759-2777).
caaatctgagatatcagaa

SEQ ID NO: 143258 - DNA, 19 bp, Homo sapiens
  siRNA target sequence for EPS15R (NM_021235.1,49-67).
ggaaattcgttgtatgaat

SEQ ID NO: 143259 - DNA, 19 bp, Homo sapiens
  siRNA target sequence for EPS15R (NM_021235.1,81-99).
ggtcgatccggcatacaca

SEQ ID NO: 143260 - DNA, 19 bp, Homo sapiens
  siRNA target sequence for EPS15R (NM_021235.1,118-136).
gaagctgcgctttttctaa

SEQ ID NO: 143261 - DNA, 19 bp, Homo sapiens
  siRNA target sequence for EPS15R (NM_021235.1,143-161).
ctggcctctcggacattat

SEQ ID NO: 143262 - DNA, 19 bp, Homo sapiens
  siRNA target sequence for EPS15R (NM_021235.1,146-164).
gcctctcggacattatcct

SEQ ID NO: 143263 - DNA, 19 bp, Homo sapiens
  siRNA target sequence for EPS15R (NM_021235.1,156-174).
cattatccttgggaagata

SEQ ID NO: 143264 - DNA, 19 bp, Homo sapiens
  siRNA target sequence for EPS15R (NM_021235.1,183-201).
ggccgatccagaaggtaaa

SEQ ID NO: 143265 - DNA, 19 bp, Homo sapiens
  siRNA target sequence for EPS15R (NM_021235.1,210-228).
ggacaaacagggtttctat

SEQ ID NO: 143266 - DNA, 19 bp, Homo sapiens
  siRNA target sequence for EPS15R (NM_021235.1,260-278).
gtggccatgaagttacctt

SEQ ID NO: 143267 - DNA, 19 bp, Homo sapiens
  siRNA target sequence for EPS15R (NM_021235.1,296-314).
gcatgccaccgcctaaatt

SEQ ID NO: 143268 - DNA, 19 bp, Homo sapiens
  siRNA target sequence for EPS15R (NM_021235.1,297-315).
catgccaccgcctaaattt

SEQ ID NO: 143269 - DNA, 19 bp, Homo sapiens
  siRNA target sequence for EPS15R (NM_021235.1,439-457).
ctctctggagacaaagtca

SEQ ID NO: 143270 - DNA, 19 bp, Homo sapiens
  siRNA target sequence for EPS15R (NM_021235.1,936-954).
gaaccttctagcacacata

SEQ ID NO: 143271 - DNA, 19 bp, Homo sapiens
  siRNA target sequence for EPS15R (NM_021235.1,997-1015).
gaccaattcgcgttagcta

SEQ ID NO: 143272 - DNA, 19 bp, Homo sapiens
  siRNA target sequence for EPS15R (NM_021235.1,1006-1024).
gcgttagctatgtatttca

SEQ ID NO: 143273 - DNA, 19 bp, Homo sapiens
  siRNA target sequence for EPS15R (NM_021235.1,1007-1025).
cgttagctatgtatttcat

SEQ ID NO: 143274 - DNA, 19 bp, Homo sapiens
  siRNA target sequence for EPS15R (NM_021235.1,1129-1147).
ctcggctccggggagttta

SEQ ID NO: 143275 - DNA, 19 bp, Homo sapiens
  siRNA target sequence for EPS15R (NM_021235.1,1131-1149).
cggctccggggagtttact

SEQ ID NO: 143276 - DNA, 19 bp, Homo sapiens
  siRNA target sequence for EPS15R (NM_021235.1,1262-1280).
gcgaggtgcaggaattaca

SEQ ID NO: 143277 - DNA, 19 bp, Homo sapiens
  siRNA target sequence for EPS15R (NM_021235.1,1484-1502).
cccaggaagacgatctgaa

SEQ ID NO: 143278 - DNA, 19 bp, Homo sapiens
  siRNA target sequence for EPS15R (NM_021235.1,1610-1628).
caacgcaagacgaaatcaa

SEQ ID NO: 143279 - DNA, 19 bp, Homo sapiens
  siRNA target sequence for EPS15R (NM_021235.1,1832-1850).
gcaacaacacgcaagagtt

SEQ ID NO: 143280 - DNA, 19 bp, Homo sapiens
  siRNA target sequence for EPS15R (NM_021235.1,1922-1940).
gcgacccgttccagaatga

SEQ ID NO: 143281 - DNA, 19 bp, Homo sapiens
  siRNA target sequence for EPS15R (NM_021235.1,2023-2041).
gccactgacgacttcttca

SEQ ID NO: 143282 - DNA, 19 bp, Homo sapiens
  siRNA target sequence for EPS15R (NM_021235.1,2106-2124).
gaagctcgacccctttgaa

SEQ ID NO: 143283 - DNA, 19 bp, Homo sapiens
  siRNA target sequence for EPS15R (NM_021235.1,2148-2166).
cagtgtctcctcaaaagga

SEQ ID NO: 143284 - DNA, 19 bp, Homo sapiens
  siRNA target sequence for EPS15R (NM_021235.1,2154-2172).
ctcctcaaaaggatcagat

SEQ ID NO: 143285 - DNA, 19 bp, Homo sapiens
  siRNA target sequence for EPS15R (NM_021235.1,2164-2182).
ggatcagatccctttggaa

SEQ ID NO: 143286 - DNA, 19 bp, Homo sapiens
  siRNA target sequence for EPS15R (NM_021235.1,2196-2214).
cggaagtgggtccttcaat

SEQ ID NO: 143287 - DNA, 19 bp, Homo sapiens
  siRNA target sequence for EPS15R (NM_021235.1,2197-2215).
ggaagtgggtccttcaata

SEQ ID NO: 143288 - DNA, 19 bp, Homo sapiens
  siRNA target sequence for EPS15R (NM_021235.1,2301-2319).
ctcagatgacccctttaaa

SEQ ID NO: 143289 - DNA, 19 bp, Homo sapiens
  siRNA target sequence for EPS15R (NM_021235.1,2305-2323).
gatgacccctttaaaagta

SEQ ID NO: 143290 - DNA, 19 bp, Homo sapiens
  siRNA target sequence for EPS15R (NM_021235.1,2377-2395).
ccgcccagcggtaaaagta

SEQ ID NO: 143291 - DNA, 19 bp, Homo sapiens
  siRNA target sequence for EPS15R (NM_021235.1,2379-2397).
gcccagcggtaaaagtaca

SEQ ID NO: 143292 - DNA, 19 bp, Homo sapiens
  siRNA target sequence for EPS15R (NM_021235.1,2409-2427).
gcttggttccgcagacttt

SEQ ID NO: 143293 - DNA, 19 bp, Homo sapiens
  siRNA target sequence for EPS15R (NM_021235.1,2496-2514).
gtttggggacccgtttagt

SEQ ID NO: 143294 - DNA, 19 bp, Homo sapiens
  siRNA target sequence for EPS15R (NM_021235.1,2513-2531).
gtggaaaagacccatttgt

SEQ ID NO: 143295 - DNA, 19 bp, Homo sapiens
  siRNA target sequence for ERO1L (NM_014584.1,336-354).
gccaggttagtggttactt

SEQ ID NO: 143296 - DNA, 19 bp, Homo sapiens
  siRNA target sequence for ERO1L (NM_014584.1,347-365).
ggttacttggatgattgta

SEQ ID NO: 143297 - DNA, 19 bp, Homo sapiens
  siRNA target sequence for ERO1L (NM_014584.1,366-384).
cctgtgatgttgaaaccat

SEQ ID NO: 143298 - DNA, 19 bp, Homo sapiens
  siRNA target sequence for ERO1L (NM_014584.1,367-385).
ctgtgatgttgaaaccatt

SEQ ID NO: 143299 - DNA, 19 bp, Homo sapiens
  siRNA target sequence for ERO1L (NM_014584.1,381-399).
ccattgatagatttaataa

SEQ ID NO: 143300 - DNA, 19 bp, Homo sapiens
  siRNA target sequence for ERO1L (NM_014584.1,407-425).
cttttcccaagactacaaa

SEQ ID NO: 143301 - DNA, 19 bp, Homo sapiens
  siRNA target sequence for ERO1L (NM_014584.1,438-456).
gtgactactttaggtatta

SEQ ID NO: 143302 - DNA, 19 bp, Homo sapiens
  siRNA target sequence for ERO1L (NM_014584.1,450-468).
ggtattacaaggtaaacct

SEQ ID NO: 143303 - DNA, 19 bp, Homo sapiens
  siRNA target sequence for ERO1L (NM_014584.1,524-542).
gctgtcaaaccatgtcaat

SEQ ID NO: 143304 - DNA, 19 bp, Homo sapiens
  siRNA target sequence for ERO1L (NM_014584.1,551-569).
gttcctgatggaattaaat

SEQ ID NO: 143305 - DNA, 19 bp, Homo sapiens
  siRNA target sequence for ERO1L (NM_014584.1,573-591).
cgagctacaagtattctga

SEQ ID NO: 143306 - DNA, 19 bp, Homo sapiens
  siRNA target sequence for ERO1L (NM_014584.1,694-712).
caagcatgatgattcttca

SEQ ID NO: 143307 - DNA, 19 bp, Homo sapiens
  siRNA target sequence for ERO1L (NM_014584.1,744-762).
cccctgaagctgaatatgt

SEQ ID NO: 143308 - DNA, 19 bp, Homo sapiens
  siRNA target sequence for ERO1L (NM_014584.1,753-771).
ctgaatatgtagatttgct

SEQ ID NO: 143309 - DNA, 19 bp, Homo sapiens
  siRNA target sequence for ERO1L (NM_014584.1,809-827).
gatgcttggaaaatatgga

SEQ ID NO: 143310 - DNA, 19 bp, Homo sapiens
  siRNA target sequence for ERO1L (NM_014584.1,816-834).
ggaaaatatggaatgtcat

SEQ ID NO: 143311 - DNA, 19 bp, Homo sapiens
  siRNA target sequence for ERO1L (NM_014584.1,830-848).
gtcatctacgaagaaaact

SEQ ID NO: 143312 - DNA, 19 bp, Homo sapiens
  siRNA target sequence for ERO1L (NM_014584.1,856-874).
gccacagacaattaaaaga

SEQ ID NO: 143313 - DNA, 19 bp, Homo sapiens
  siRNA target sequence for ERO1L (NM_014584.1,983-1001).
ggcctacatgcaagcatta

SEQ ID NO: 143314 - DNA, 19 bp, Homo sapiens
  siRNA target sequence for ERO1L (NM_014584.1,984-1002).
gcctacatgcaagcattaa

SEQ ID NO: 143315 - DNA, 19 bp, Homo sapiens
  siRNA target sequence for ERO1L (NM_014584.1,985-1003).
cctacatgcaagcattaat

SEQ ID NO: 143316 - DNA, 19 bp, Homo sapiens
  siRNA target sequence for ERO1L (NM_014584.1,1006-1024).
gcatttgagtgcaagatat

SEQ ID NO: 143317 - DNA, 19 bp, Homo sapiens
  siRNA target sequence for ERO1L (NM_014584.1,1012-1030).
gagtgcaagatatctttta

SEQ ID NO: 143318 - DNA, 19 bp, Homo sapiens
  siRNA target sequence for ERO1L (NM_014584.1,1014-1032).
gtgcaagatatcttttaca

SEQ ID NO: 143319 - DNA, 19 bp, Homo sapiens
  siRNA target sequence for ERO1L (NM_014584.1,1017-1035).
caagatatcttttacaaga

SEQ ID NO: 143320 - DNA, 19 bp, Homo sapiens
  siRNA target sequence for ERO1L (NM_014584.1,1051-1069).
gaaatggggacacaacatt

SEQ ID NO: 143321 - DNA, 19 bp, Homo sapiens
  siRNA target sequence for ERO1L (NM_014584.1,1082-1100).
cagcgatttgatggaattt

SEQ ID NO: 143322 - DNA, 19 bp, Homo sapiens
  siRNA target sequence for ERO1L (NM_014584.1,1085-1103).
cgatttgatggaattttga

SEQ ID NO: 143323 - DNA, 19 bp, Homo sapiens
  siRNA target sequence for ERO1L (NM_014584.1,1119-1137).
caagaaggcttaagaactt

SEQ ID NO: 143324 - DNA, 19 bp, Homo sapiens
  siRNA target sequence for ERO1L (NM_014584.1,1125-1143).
ggcttaagaacttgtattt

SEQ ID NO: 143325 - DNA, 19 bp, Homo sapiens
  siRNA target sequence for ERO1L (NM_014584.1,1126-1144).
gcttaagaacttgtatttt

SEQ ID NO: 143326 - DNA, 19 bp, Homo sapiens
  siRNA target sequence for ERO1L (NM_014584.1,1145-1163).
ctctacttaatagaactaa

SEQ ID NO: 143327 - DNA, 19 bp, Homo sapiens
  siRNA target sequence for ERO1L (NM_014584.1,1164-1182).
gggctttatccaaagtgtt

SEQ ID NO: 143328 - DNA, 19 bp, Homo sapiens
  siRNA target sequence for ERO1L (NM_014584.1,1173-1191).
ccaaagtgttaccattctt

SEQ ID NO: 143329 - DNA, 19 bp, Homo sapiens
  siRNA target sequence for ERO1L (NM_014584.1,1192-1210).
cgagcgcccagattttcaa

SEQ ID NO: 143330 - DNA, 19 bp, Homo sapiens
  siRNA target sequence for ERO1L (NM_014584.1,1208-1226).
caactctttactggaaata

SEQ ID NO: 143331 - DNA, 19 bp, Homo sapiens
  siRNA target sequence for ERO1L (NM_014584.1,1354-1372).
ggactttcgactgcatttt

SEQ ID NO: 143332 - DNA, 19 bp, Homo sapiens
  siRNA target sequence for ERO1L (NM_014584.1,1355-1373).
gactttcgactgcatttta

SEQ ID NO: 143333 - DNA, 19 bp, Homo sapiens
  siRNA target sequence for ERO1L (NM_014584.1,1452-1470).
gcactgctctgaagatctt

SEQ ID NO: 143334 - DNA, 19 bp, Homo sapiens
  siRNA target sequence for ERO1L (NM_014584.1,1558-1576).
caacgcatttggaagaatt

SEQ ID NO: 143335 - DNA, 19 bp, Homo sapiens
  siRNA target sequence for ERO1L (NM_014584.1,1612-1630).
cttgttacagaatattcat

SEQ ID NO: 143336 - DNA, 19 bp, Homo sapiens
  siRNA target sequence for F10 (NM_000504.2,137-155).
gtcacgagggccaattcct

SEQ ID NO: 143337 - DNA, 19 bp, Homo sapiens
  siRNA target sequence for F10 (NM_000504.2,139-157).
cacgagggccaattccttt

SEQ ID NO: 143338 - DNA, 19 bp, Homo sapiens
  siRNA target sequence for F10 (NM_000504.2,244-262).
cagcgacaagacgaatgaa

SEQ ID NO: 143339 - DNA, 19 bp, Homo sapiens
  siRNA target sequence for F10 (NM_000504.2,246-264).
gcgacaagacgaatgaatt

SEQ ID NO: 143340 - DNA, 19 bp, Homo sapiens
  siRNA target sequence for F10 (NM_000504.2,248-266).
gacaagacgaatgaattct

SEQ ID NO: 143341 - DNA, 19 bp, Homo sapiens
  siRNA target sequence for F10 (NM_000504.2,255-273).
cgaatgaattctggaataa

SEQ ID NO: 143342 - DNA, 19 bp, Homo sapiens
  siRNA target sequence for F10 (NM_000504.2,332-350).
gacggcctcggggaataca

SEQ ID NO: 143343 - DNA, 19 bp, Homo sapiens
  siRNA target sequence for F10 (NM_000504.2,354-372).
gcacctgtttagaaggatt

SEQ ID NO: 143344 - DNA, 19 bp, Homo sapiens
  siRNA target sequence for F10 (NM_000504.2,358-376).
ctgtttagaaggattcgaa

SEQ ID NO: 143345 - DNA, 19 bp, Homo sapiens
  siRNA target sequence for F10 (NM_000504.2,816-834).
ccattctgagcgagttcta

SEQ ID NO: 143346 - DNA, 19 bp, Homo sapiens
  siRNA target sequence for F10 (NM_000504.2,1468-1486).
cataacgtcctctccatta

SEQ ID NO: 143347 - DNA, 19 bp, Homo sapiens
  siRNA target sequence for F12 (NM_000505.2,85-103).
gagcttggagtcaacactt

SEQ ID NO: 143348 - DNA, 19 bp, Homo sapiens
  siRNA target sequence for F12 (NM_000505.2,91-109).
ggagtcaacactttcgatt

SEQ ID NO: 143349 - DNA, 19 bp, Homo sapiens
  siRNA target sequence for F12 (NM_000505.2,122-140).
gcccccaaggagcataagt

SEQ ID NO: 143350 - DNA, 19 bp, Homo sapiens
  siRNA target sequence for F12 (NM_000505.2,125-143).
cccaaggagcataagtaca

SEQ ID NO: 143351 - DNA, 19 bp, Homo sapiens
  siRNA target sequence for F12 (NM_000505.2,212-230).
cggcagctgtaccacaaat

SEQ ID NO: 143352 - DNA, 19 bp, Homo sapiens
  siRNA target sequence for F12 (NM_000505.2,214-232).
gcagctgtaccacaaatgt

SEQ ID NO: 143353 - DNA, 19 bp, Homo sapiens
  siRNA target sequence for F12 (NM_000505.2,215-233).
cagctgtaccacaaatgta

SEQ ID NO: 143354 - DNA, 19 bp, Homo sapiens
  siRNA target sequence for F12 (NM_000505.2,474-492).
ggtttttccacaagaatga

SEQ ID NO: 143355 - DNA, 19 bp, Homo sapiens
  siRNA target sequence for F12 (NM_000505.2,688-706).
caaggcaagctgctatgat

SEQ ID NO: 143356 - DNA, 19 bp, Homo sapiens
  siRNA target sequence for F13A1 (NM_000129.2,144-162).
gttccacccaataactcta

SEQ ID NO: 143357 - DNA, 19 bp, Homo sapiens
  siRNA target sequence for F13A1 (NM_000129.2,217-235).
gcgtcaacctgcaagagtt

SEQ ID NO: 143358 - DNA, 19 bp, Homo sapiens
  siRNA target sequence for F13A1 (NM_000129.2,218-236).
cgtcaacctgcaagagttt

SEQ ID NO: 143359 - DNA, 19 bp, Homo sapiens
  siRNA target sequence for F13A1 (NM_000129.2,247-265).
cgagcgttcacctgttcaa

SEQ ID NO: 143360 - DNA, 19 bp, Homo sapiens
  siRNA target sequence for F13A1 (NM_000129.2,334-352).
gcagagggcagtctttcta

SEQ ID NO: 143361 - DNA, 19 bp, Homo sapiens
  siRNA target sequence for F13A1 (NM_000129.2,335-353).
cagagggcagtctttctat

SEQ ID NO: 143362 - DNA, 19 bp, Homo sapiens
  siRNA target sequence for F13A1 (NM_000129.2,337-355).
gagggcagtctttctatgt

SEQ ID NO: 143363 - DNA, 19 bp, Homo sapiens
  siRNA target sequence for F13A1 (NM_000129.2,543-561).
cagtcttcccccaaatgta

SEQ ID NO: 143364 - DNA, 19 bp, Homo sapiens
  siRNA target sequence for F13A1 (NM_000129.2,545-563).
gtcttcccccaaatgtatt

SEQ ID NO: 143365 - DNA, 19 bp, Homo sapiens
  siRNA target sequence for F13A1 (NM_000129.2,547-565).
cttcccccaaatgtattgt

SEQ ID NO: 143366 - DNA, 19 bp, Homo sapiens
  siRNA target sequence for F13A1 (NM_000129.2,566-584).
ggggaaattccgcatgtat

SEQ ID NO: 143367 - DNA, 19 bp, Homo sapiens
  siRNA target sequence for F13A1 (NM_000129.2,568-586).
ggaaattccgcatgtatgt

SEQ ID NO: 143368 - DNA, 19 bp, Homo sapiens
  siRNA target sequence for F13A1 (NM_000129.2,569-587).
gaaattccgcatgtatgtt

SEQ ID NO: 143369 - DNA, 19 bp, Homo sapiens
  siRNA target sequence for F13A1 (NM_000129.2,641-659).
cacgtacattctcttcaat

SEQ ID NO: 143370 - DNA, 19 bp, Homo sapiens
  siRNA target sequence for F13A1 (NM_000129.2,656-674).
caatccttggtgtgaagat

SEQ ID NO: 143371 - DNA, 19 bp, Homo sapiens
  siRNA target sequence for F13A1 (NM_000129.2,681-699).
gtgtatctggacaatgaga

SEQ ID NO: 143372 - DNA, 19 bp, Homo sapiens
  siRNA target sequence for F13A1 (NM_000129.2,810-828).
gacacttgcctgtatgtga

SEQ ID NO: 143373 - DNA, 19 bp, Homo sapiens
  siRNA target sequence for F13A1 (NM_000129.2,859-877).
gagggaatcccatcaaagt

SEQ ID NO: 143374 - DNA, 19 bp, Homo sapiens
  siRNA target sequence for F13A1 (NM_000129.2,861-879).
gggaatcccatcaaagtca

SEQ ID NO: 143375 - DNA, 19 bp, Homo sapiens
  siRNA target sequence for F13A1 (NM_000129.2,930-948).
gttggatcctgggacaata

SEQ ID NO: 143376 - DNA, 19 bp, Homo sapiens
  siRNA target sequence for F13A1 (NM_000129.2,934-952).
gatcctgggacaatatcta

SEQ ID NO: 143377 - DNA, 19 bp, Homo sapiens
  siRNA target sequence for F13A1 (NM_000129.2,980-998).
gactggaagcgttgacatt

SEQ ID NO: 143378 - DNA, 19 bp, Homo sapiens
  siRNA target sequence for F13A1 (NM_000129.2,982-1000).
ctggaagcgttgacattct

SEQ ID NO: 143379 - DNA, 19 bp, Homo sapiens
  siRNA target sequence for F13A1 (NM_000129.2,984-1002).
ggaagcgttgacattctat

SEQ ID NO: 143380 - DNA, 19 bp, Homo sapiens
  siRNA target sequence for F13A1 (NM_000129.2,985-1003).
gaagcgttgacattctatt

SEQ ID NO: 143381 - DNA, 19 bp, Homo sapiens
  siRNA target sequence for F13A1 (NM_000129.2,988-1006).
gcgttgacattctattgga

SEQ ID NO: 143382 - DNA, 19 bp, Homo sapiens
  siRNA target sequence for F13A1 (NM_000129.2,989-1007).
cgttgacattctattggaa

SEQ ID NO: 143383 - DNA, 19 bp, Homo sapiens
  siRNA target sequence for F13A1 (NM_000129.2,990-1008).
gttgacattctattggaat

SEQ ID NO: 143384 - DNA, 19 bp, Homo sapiens
  siRNA target sequence for F13A1 (NM_000129.2,1090-1108).
gaataccagcaagaattgt

SEQ ID NO: 143385 - DNA, 19 bp, Homo sapiens
  siRNA target sequence for F13A1 (NM_000129.2,1121-1139).
ctctgcccatgataatgat

SEQ ID NO: 143386 - DNA, 19 bp, Homo sapiens
  siRNA target sequence for F13A1 (NM_000129.2,1415-1433).
cgacctcatttacattaca

SEQ ID NO: 143387 - DNA, 19 bp, Homo sapiens
  siRNA target sequence for F13A1 (NM_000129.2,1447-1465).
gcactcatgtggtggaaaa

SEQ ID NO: 143388 - DNA, 19 bp, Homo sapiens
  siRNA target sequence for F13A1 (NM_000129.2,1448-1466).
cactcatgtggtggaaaat

SEQ ID NO: 143389 - DNA, 19 bp, Homo sapiens
  siRNA target sequence for F13A1 (NM_000129.2,1474-1492).
ccacccacattgggaaatt

SEQ ID NO: 143390 - DNA, 19 bp, Homo sapiens
  siRNA target sequence for F13A1 (NM_000129.2,1475-1493).
cacccacattgggaaatta

SEQ ID NO: 143391 - DNA, 19 bp, Homo sapiens
  siRNA target sequence for F13A1 (NM_000129.2,1537-1555).
ctgatacttacaaattcca

SEQ ID NO: 143392 - DNA, 19 bp, Homo sapiens
  siRNA target sequence for F13A1 (NM_000129.2,1572-1590).
gagagattggccctagaaa

SEQ ID NO: 143393 - DNA, 19 bp, Homo sapiens
  siRNA target sequence for F13A1 (NM_000129.2,1574-1592).
gagattggccctagaaact

SEQ ID NO: 143394 - DNA, 19 bp, Homo sapiens
  siRNA target sequence for F13A1 (NM_000129.2,1595-1613).
cctgatgtacggagctaaa

SEQ ID NO: 143395 - DNA, 19 bp, Homo sapiens
  siRNA target sequence for F13A1 (NM_000129.2,1596-1614).
ctgatgtacggagctaaaa

SEQ ID NO: 143396 - DNA, 19 bp, Homo sapiens
  siRNA target sequence for F13A1 (NM_000129.2,1956-1974).
gttctggccaagcaaaagt

SEQ ID NO: 143397 - DNA, 19 bp, Homo sapiens
  siRNA target sequence for F13A1 (NM_000129.2,2057-2075).
gtttaccaatcctttaaaa

SEQ ID NO: 143398 - DNA, 19 bp, Homo sapiens
  siRNA target sequence for F13A1 (NM_000129.2,2076-2094).
gaaaccctgcgaaatgtct

SEQ ID NO: 143399 - DNA, 19 bp, Homo sapiens
  siRNA target sequence for F13A1 (NM_000129.2,2105-2123).
ggatggtcctggagtaaca

SEQ ID NO: 143400 - DNA, 19 bp, Homo sapiens
  siRNA target sequence for F13A1 (NM_000129.2,2240-2258).
ctccctgagacatgtgtat

SEQ ID NO: 143401 - DNA, 19 bp, Homo sapiens
  siRNA target sequence for F2 (NM_000506.2,275-293).
gtgttctgggccaagtaca

SEQ ID NO: 143402 - DNA, 19 bp, Homo sapiens
  siRNA target sequence for F2 (NM_000506.2,312-330).
ggacgcctcgagataagct

SEQ ID NO: 143403 - DNA, 19 bp, Homo sapiens
  siRNA target sequence for F2 (NM_000506.2,313-331).
gacgcctcgagataagctt

SEQ ID NO: 143404 - DNA, 19 bp, Homo sapiens
  siRNA target sequence for F2 (NM_000506.2,429-447).
ggagtcgctacccacataa

SEQ ID NO: 143405 - DNA, 19 bp, Homo sapiens
  siRNA target sequence for F2 (NM_000506.2,443-461).
cataagcctgaaatcaact

SEQ ID NO: 143406 - DNA, 19 bp, Homo sapiens
  siRNA target sequence for F2 (NM_000506.2,482-500).
gacctacaggagaatttct

SEQ ID NO: 143407 - DNA, 19 bp, Homo sapiens
  siRNA target sequence for F2 (NM_000506.2,882-900).
ggtactgcgacctcaacta

SEQ ID NO: 143408 - DNA, 19 bp, Homo sapiens
  siRNA target sequence for F2 (NM_000506.2,883-901).
gtactgcgacctcaactat

SEQ ID NO: 143409 - DNA, 19 bp, Homo sapiens
  siRNA target sequence for F2 (NM_000506.2,886-904).
ctgcgacctcaactattgt

SEQ ID NO: 143410 - DNA, 19 bp, Homo sapiens
  siRNA target sequence for F2 (NM_000506.2,888-906).
gcgacctcaactattgtga

SEQ ID NO: 143411 - DNA, 19 bp, Homo sapiens
  siRNA target sequence for F2 (NM_000506.2,986-1004).
gagtaccagactttcttca

SEQ ID NO: 143412 - DNA, 19 bp, Homo sapiens
  siRNA target sequence for F2 (NM_000506.2,1089-1107).
gagagctcctggaatccta

SEQ ID NO: 143413 - DNA, 19 bp, Homo sapiens
  siRNA target sequence for F2 (NM_000506.2,1329-1347).
ggtacgagcgaaacattga

SEQ ID NO: 143414 - DNA, 19 bp, Homo sapiens
  siRNA target sequence for F2 (NM_000506.2,1330-1348).
gtacgagcgaaacattgaa

SEQ ID NO: 143415 - DNA, 19 bp, Homo sapiens
  siRNA target sequence for F2 (NM_000506.2,1563-1581).
ggacagccaacgttggtaa

SEQ ID NO: 143416 - DNA, 19 bp, Homo sapiens
  siRNA target sequence for F2 (NM_000506.2,1658-1676).
cgcatcactgacaacatgt

SEQ ID NO: 143417 - DNA, 19 bp, Homo sapiens
  siRNA target sequence for F2 (NM_000506.2,1734-1752).
gtgggggaccctttgtcat

SEQ ID NO: 143418 - DNA, 19 bp, Homo sapiens
  siRNA target sequence for F2 (NM_000506.2,1737-1755).
ggggaccctttgtcatgaa

SEQ ID NO: 143419 - DNA, 19 bp, Homo sapiens
  siRNA target sequence for F7 (NM_000131.2,172-190).
cctcacagagtcttcgtaa

SEQ ID NO: 143420 - DNA, 19 bp, Homo sapiens
  siRNA target sequence for F7 (NM_000131.2,348-366).
gttctggatttcttacagt

SEQ ID NO: 143421 - DNA, 19 bp, Homo sapiens
  siRNA target sequence for F7 (NM_000131.2,418-436).
gaccagctccagtcctata

SEQ ID NO: 143422 - DNA, 19 bp, Homo sapiens
  siRNA target sequence for F7 (NM_000131.2,631-649).
ccatgtggaaaaataccta

SEQ ID NO: 143423 - DNA, 19 bp, Homo sapiens
  siRNA target sequence for F7 (NM_000131.2,632-650).
catgtggaaaaatacctat

SEQ ID NO: 143424 - DNA, 19 bp, Homo sapiens
  siRNA target sequence for F7 (NM_000131.2,805-823).
gcccactgtttcgacaaaa

SEQ ID NO: 143425 - DNA, 19 bp, Homo sapiens
  siRNA target sequence for F7 (NM_000131.2,806-824).
cccactgtttcgacaaaat

SEQ ID NO: 143426 - DNA, 19 bp, Homo sapiens
  siRNA target sequence for F7 (NM_000131.2,812-830).
gtttcgacaaaatcaagaa

SEQ ID NO: 143427 - DNA, 19 bp, Homo sapiens
  siRNA target sequence for F7 (NM_000131.2,1051-1069).
gccttcgtgcgcttctcat

SEQ ID NO: 143428 - DNA, 19 bp, Homo sapiens
  siRNA target sequence for F7 (NM_000131.2,1052-1070).
ccttcgtgcgcttctcatt

SEQ ID NO: 143429 - DNA, 19 bp, Homo sapiens
  siRNA target sequence for F7 (NM_000131.2,1183-1201).
ggagactccccaaatatca

SEQ ID NO: 143430 - DNA, 19 bp, Homo sapiens
  siRNA target sequence for F7 (NM_000131.2,1193-1211).
caaatatcacggagtacat

SEQ ID NO: 143431 - DNA, 19 bp, Homo sapiens
  siRNA target sequence for F7 (NM_000131.2,1364-1382).
ccagggtctcccagtacat

SEQ ID NO: 143432 - DNA, 19 bp, Homo sapiens
  siRNA target sequence for F9 (NM_000133.2,33-51).
cagcgcgtgaacatgatca

SEQ ID NO: 143433 - DNA, 19 bp, Homo sapiens
  siRNA target sequence for F9 (NM_000133.2,76-94).
ccatctgccttttaggata

SEQ ID NO: 143434 - DNA, 19 bp, Homo sapiens
  siRNA target sequence for F9 (NM_000133.2,77-95).
catctgccttttaggatat

SEQ ID NO: 143435 - DNA, 19 bp, Homo sapiens
  siRNA target sequence for F9 (NM_000133.2,82-100).
gccttttaggatatctact

SEQ ID NO: 143436 - DNA, 19 bp, Homo sapiens
  siRNA target sequence for F9 (NM_000133.2,96-114).
ctactcagtgctgaatgta

SEQ ID NO: 143437 - DNA, 19 bp, Homo sapiens
  siRNA target sequence for F9 (NM_000133.2,129-147).
catgaaaacgccaacaaaa

SEQ ID NO: 143438 - DNA, 19 bp, Homo sapiens
  siRNA target sequence for F9 (NM_000133.2,137-155).
cgccaacaaaattctgaat

SEQ ID NO: 143439 - DNA, 19 bp, Homo sapiens
  siRNA target sequence for F9 (NM_000133.2,158-176).
gccaaagaggtataattca

SEQ ID NO: 143440 - DNA, 19 bp, Homo sapiens
  siRNA target sequence for F9 (NM_000133.2,166-184).
ggtataattcaggtaaatt

SEQ ID NO: 143441 - DNA, 19 bp, Homo sapiens
  siRNA target sequence for F9 (NM_000133.2,203-221).
gaaccttgagagagaatgt

SEQ ID NO: 143442 - DNA, 19 bp, Homo sapiens
  siRNA target sequence for F9 (NM_000133.2,315-333).
cagtgtgagtccaatccat

SEQ ID NO: 143443 - DNA, 19 bp, Homo sapiens
  siRNA target sequence for F9 (NM_000133.2,323-341).
gtccaatccatgtttaaat

SEQ ID NO: 143444 - DNA, 19 bp, Homo sapiens
  siRNA target sequence for F9 (NM_000133.2,410-428).
ctgtgaattagatgtaaca

SEQ ID NO: 143445 - DNA, 19 bp, Homo sapiens
  siRNA target sequence for F9 (NM_000133.2,420-438).
gatgtaacatgtaacatta

SEQ ID NO: 143446 - DNA, 19 bp, Homo sapiens
  siRNA target sequence for F9 (NM_000133.2,497-515).
ctgtactgagggatatcga

SEQ ID NO: 143447 - DNA, 19 bp, Homo sapiens
  siRNA target sequence for F9 (NM_000133.2,618-636).
cctgatgtggactatgtaa

SEQ ID NO: 143448 - DNA, 19 bp, Homo sapiens
  siRNA target sequence for F9 (NM_000133.2,626-644).
ggactatgtaaattctact

SEQ ID NO: 143449 - DNA, 19 bp, Homo sapiens
  siRNA target sequence for F9 (NM_000133.2,629-647).
ctatgtaaattctactgaa

SEQ ID NO: 143450 - DNA, 19 bp, Homo sapiens
  siRNA target sequence for F9 (NM_000133.2,675-693).
caaagcacccaatcattta

SEQ ID NO: 143451 - DNA, 19 bp, Homo sapiens
  siRNA target sequence for F9 (NM_000133.2,682-700).
cccaatcatttaatgactt

SEQ ID NO: 143452 - DNA, 19 bp, Homo sapiens
  siRNA target sequence for F9 (NM_000133.2,784-802).
gtggaggctctatcgttaa

SEQ ID NO: 143453 - DNA, 19 bp, Homo sapiens
  siRNA target sequence for F9 (NM_000133.2,787-805).
gaggctctatcgttaatga

SEQ ID NO: 143454 - DNA, 19 bp, Homo sapiens
  siRNA target sequence for F9 (NM_000133.2,789-807).
ggctctatcgttaatgaaa

SEQ ID NO: 143455 - DNA, 19 bp, Homo sapiens
  siRNA target sequence for F9 (NM_000133.2,790-808).
gctctatcgttaatgaaaa

SEQ ID NO: 143456 - DNA, 19 bp, Homo sapiens
  siRNA target sequence for F9 (NM_000133.2,797-815).
cgttaatgaaaaatggatt

SEQ ID NO: 143457 - DNA, 19 bp, Homo sapiens
  siRNA target sequence for F9 (NM_000133.2,841-859).
ctggtgttaaaattacagt

SEQ ID NO: 143458 - DNA, 19 bp, Homo sapiens
  siRNA target sequence for F9 (NM_000133.2,858-876).
gttgtcgcaggtgaacata

SEQ ID NO: 143459 - DNA, 19 bp, Homo sapiens
  siRNA target sequence for F9 (NM_000133.2,861-879).
gtcgcaggtgaacataata

SEQ ID NO: 143460 - DNA, 19 bp, Homo sapiens
  siRNA target sequence for F9 (NM_000133.2,863-881).
cgcaggtgaacataatatt

SEQ ID NO: 143461 - DNA, 19 bp, Homo sapiens
  siRNA target sequence for F9 (NM_000133.2,898-916).
cagagcaaaagcgaaatgt

SEQ ID NO: 143462 - DNA, 19 bp, Homo sapiens
  siRNA target sequence for F9 (NM_000133.2,908-926).
gcgaaatgtgattcgaatt

SEQ ID NO: 143463 - DNA, 19 bp, Homo sapiens
  siRNA target sequence for F9 (NM_000133.2,909-927).
cgaaatgtgattcgaatta

SEQ ID NO: 143464 - DNA, 19 bp, Homo sapiens
  siRNA target sequence for F9 (NM_000133.2,910-928).
gaaatgtgattcgaattat

SEQ ID NO: 143465 - DNA, 19 bp, Homo sapiens
  siRNA target sequence for F9 (NM_000133.2,938-956).
caactacaatgcagctatt

SEQ ID NO: 143466 - DNA, 19 bp, Homo sapiens
  siRNA target sequence for F9 (NM_000133.2,941-959).
ctacaatgcagctattaat

SEQ ID NO: 143467 - DNA, 19 bp, Homo sapiens
  siRNA target sequence for F9 (NM_000133.2,1013-1031).
cagctacgttacacctatt

SEQ ID NO: 143468 - DNA, 19 bp, Homo sapiens
  siRNA target sequence for F9 (NM_000133.2,1019-1037).
cgttacacctatttgcatt

SEQ ID NO: 143469 - DNA, 19 bp, Homo sapiens
  siRNA target sequence for F9 (NM_000133.2,1176-1194).
cttcgatctacaaagttca

SEQ ID NO: 143470 - DNA, 19 bp, Homo sapiens
  siRNA target sequence for F9 (NM_000133.2,1186-1204).
caaagttcaccatctataa

SEQ ID NO: 143471 - DNA, 19 bp, Homo sapiens
  siRNA target sequence for F9 (NM_000133.2,1284-1302).
gtggaagggaccagtttct

SEQ ID NO: 143472 - DNA, 19 bp, Homo sapiens
  siRNA target sequence for F9 (NM_000133.2,1353-1371).
ggaatatataccaaggtat

SEQ ID NO: 143473 - DNA, 19 bp, Homo sapiens
  siRNA target sequence for F9 (NM_000133.2,1374-1392).
cggtatgtcaactggatta

SEQ ID NO: 143474 - DNA, 19 bp, Homo sapiens
  siRNA target sequence for F9 (NM_000133.2,1375-1393).
ggtatgtcaactggattaa

SEQ ID NO: 143475 - DNA, 19 bp, Homo sapiens
  siRNA target sequence for FAT (NM_005245.1,271-289).
cagactcctctgcagttta

SEQ ID NO: 143476 - DNA, 19 bp, Homo sapiens
  siRNA target sequence for FAT (NM_005245.1,321-339).
gaactctgcagctaagact

SEQ ID NO: 143477 - DNA, 19 bp, Homo sapiens
  siRNA target sequence for FAT (NM_005245.1,355-373).
gtcaagatgggtgtttaca

SEQ ID NO: 143478 - DNA, 19 bp, Homo sapiens
  siRNA target sequence for FAT (NM_005245.1,357-375).
caagatgggtgtttacatt

SEQ ID NO: 143479 - DNA, 19 bp, Homo sapiens
  siRNA target sequence for FAT (NM_005245.1,413-431).
ccggagacagtgaaaacct

SEQ ID NO: 143480 - DNA, 19 bp, Homo sapiens
  siRNA target sequence for FAT (NM_005245.1,447-465).
gtacattctcggagacttt

SEQ ID NO: 143481 - DNA, 19 bp, Homo sapiens
  siRNA target sequence for FAT (NM_005245.1,491-509).
gaggaaatacagctattct

SEQ ID NO: 143482 - DNA, 19 bp, Homo sapiens
  siRNA target sequence for FAT (NM_005245.1,493-511).
ggaaatacagctattctta

SEQ ID NO: 143483 - DNA, 19 bp, Homo sapiens
  siRNA target sequence for FAT (NM_005245.1,494-512).
gaaatacagctattcttaa

SEQ ID NO: 143484 - DNA, 19 bp, Homo sapiens
  siRNA target sequence for FAT (NM_005245.1,500-518).
cagctattcttaatagaga

SEQ ID NO: 143485 - DNA, 19 bp, Homo sapiens
  siRNA target sequence for FAT (NM_005245.1,525-543).
ggatcactacacattgata

SEQ ID NO: 143486 - DNA, 19 bp, Homo sapiens
  siRNA target sequence for FAT (NM_005245.1,529-547).
cactacacattgatagtga

SEQ ID NO: 143487 - DNA, 19 bp, Homo sapiens
  siRNA target sequence for FAT (NM_005245.1,540-558).
gatagtgaaagcacttgaa

SEQ ID NO: 143488 - DNA, 19 bp, Homo sapiens
  siRNA target sequence for FAT (NM_005245.1,616-634).
gacttgagaccgttattct

SEQ ID NO: 143489 - DNA, 19 bp, Homo sapiens
  siRNA target sequence for FAT (NM_005245.1,641-659).
cctcatacagcgtttcttt

SEQ ID NO: 143490 - DNA, 19 bp, Homo sapiens
  siRNA target sequence for FAT (NM_005245.1,664-682).
gaaaacacagctataagga

SEQ ID NO: 143491 - DNA, 19 bp, Homo sapiens
  siRNA target sequence for FAT (NM_005245.1,702-720).
cgccacggatgcagacata

SEQ ID NO: 143492 - DNA, 19 bp, Homo sapiens
  siRNA target sequence for FAT (NM_005245.1,722-740).
gaaccaacggggaatttta

SEQ ID NO: 143493 - DNA, 19 bp, Homo sapiens
  siRNA target sequence for FAT (NM_005245.1,725-743).
ccaacggggaattttacta

SEQ ID NO: 143494 - DNA, 19 bp, Homo sapiens
  siRNA target sequence for FAT (NM_005245.1,757-775).
cgaacagatatgtttgcta

SEQ ID NO: 143495 - DNA, 19 bp, Homo sapiens
  siRNA target sequence for FAT (NM_005245.1,780-798).
cccaaccagtggtgtgata

SEQ ID NO: 143496 - DNA, 19 bp, Homo sapiens
  siRNA target sequence for FAT (NM_005245.1,786-804).
cagtggtgtgatagtgtta

SEQ ID NO: 143497 - DNA, 19 bp, Homo sapiens
  siRNA target sequence for FAT (NM_005245.1,801-819).
gttaactggtagacttgat

SEQ ID NO: 143498 - DNA, 19 bp, Homo sapiens
  siRNA target sequence for FAT (NM_005245.1,806-824).
ctggtagacttgattacct

SEQ ID NO: 143499 - DNA, 19 bp, Homo sapiens
  siRNA target sequence for FAT (NM_005245.1,864-882).
ccgtggcatgaagttgtat

SEQ ID NO: 143500 - DNA, 19 bp, Homo sapiens
  siRNA target sequence for FAT (NM_005245.1,924-942).
catcgaacaggccaatgaa

SEQ ID NO: 143501 - DNA, 19 bp, Homo sapiens
  siRNA target sequence for FAT (NM_005245.1,927-945).
cgaacaggccaatgaatgt

SEQ ID NO: 143502 - DNA, 19 bp, Homo sapiens
  siRNA target sequence for FAT (NM_005245.1,966-984).
gacattgtcaccatcagaa

SEQ ID NO: 143503 - DNA, 19 bp, Homo sapiens
  siRNA target sequence for FAT (NM_005245.1,992-1010).
gggacccagcatatgcaat

SEQ ID NO: 143504 - DNA, 19 bp, Homo sapiens
  siRNA target sequence for FAT (NM_005245.1,1039-1057).
gccaatggtgacatagcat

SEQ ID NO: 143505 - DNA, 19 bp, Homo sapiens
  siRNA target sequence for FAT (NM_005245.1,1121-1139).
gtaaggagtataaagtcaa

SEQ ID NO: 143506 - DNA, 19 bp, Homo sapiens
  siRNA target sequence for FAT (NM_005245.1,1171-1189).
cctttcggctacaatctca

SEQ ID NO: 143507 - DNA, 19 bp, Homo sapiens
  siRNA target sequence for FAT (NM_005245.1,1190-1208).
cactacaggctaaagataa

SEQ ID NO: 143508 - DNA, 19 bp, Homo sapiens
  siRNA target sequence for FAT (NM_005245.1,1274-1292).
ggccagtcaagtttgaaaa

SEQ ID NO: 143509 - DNA, 19 bp, Homo sapiens
  siRNA target sequence for FAT (NM_005245.1,1373-1391).
cccatttgaggtatgtttt

SEQ ID NO: 143510 - DNA, 19 bp, Homo sapiens
  siRNA target sequence for FAT (NM_005245.1,1545-1563).
cttaggtgcaaatagcaat

SEQ ID NO: 143511 - DNA, 19 bp, Homo sapiens
  siRNA target sequence for FAT (NM_005245.1,1606-1624).
gagaacgtgcccattggta

SEQ ID NO: 143512 - DNA, 19 bp, Homo sapiens
  siRNA target sequence for FAT (NM_005245.1,1611-1629).
cgtgcccattggtactact

SEQ ID NO: 143513 - DNA, 19 bp, Homo sapiens
  siRNA target sequence for FAT (NM_005245.1,1672-1690).
gggtacgtgacatacagta

SEQ ID NO: 143514 - DNA, 19 bp, Homo sapiens
  siRNA target sequence for FAT (NM_005245.1,1673-1691).
ggtacgtgacatacagtat

SEQ ID NO: 143515 - DNA, 19 bp, Homo sapiens
  siRNA target sequence for FAT (NM_005245.1,1682-1700).
catacagtatcgcaaattt

SEQ ID NO: 143516 - DNA, 19 bp, Homo sapiens
  siRNA target sequence for FAT (NM_005245.1,1686-1704).
cagtatcgcaaatttaaat

SEQ ID NO: 143517 - DNA, 19 bp, Homo sapiens
  siRNA target sequence for FAT (NM_005245.1,1712-1730).
cgtttgcgattgaccattt

SEQ ID NO: 143518 - DNA, 19 bp, Homo sapiens
  siRNA target sequence for FAT (NM_005245.1,1738-1756).
gccgtgagtacgtcagaaa

SEQ ID NO: 143519 - DNA, 19 bp, Homo sapiens
  siRNA target sequence for FAT (NM_005245.1,1739-1757).
ccgtgagtacgtcagaaaa

SEQ ID NO: 143520 - DNA, 19 bp, Homo sapiens
  siRNA target sequence for FAT (NM_005245.1,1771-1789).
ctgatgcctcgggtttata

SEQ ID NO: 143521 - DNA, 19 bp, Homo sapiens
  siRNA target sequence for FAT (NM_005245.1,1773-1791).
gatgcctcgggtttatact

SEQ ID NO: 143522 - DNA, 19 bp, Homo sapiens
  siRNA target sequence for FAT (NM_005245.1,1839-1857).
cgaagtccttgctacaatt

SEQ ID NO: 143523 - DNA, 19 bp, Homo sapiens
  siRNA target sequence for FAT (NM_005245.1,1859-1877).
ctctcaataacttgaatga

SEQ ID NO: 143524 - DNA, 19 bp, Homo sapiens
  siRNA target sequence for FAT (NM_005245.1,1914-1932).
gacaattcccagagatcta

SEQ ID NO: 143525 - DNA, 19 bp, Homo sapiens
  siRNA target sequence for FAT (NM_005245.1,1933-1951).
ggcgtgggagagcaaataa

SEQ ID NO: 143526 - DNA, 19 bp, Homo sapiens
  siRNA target sequence for FAT (NM_005245.1,1952-1970).
ccactgtttctgctattga

SEQ ID NO: 143527 - DNA, 19 bp, Homo sapiens
  siRNA target sequence for FAT (NM_005245.1,1964-1982).
ctattgatgcagatgaact

SEQ ID NO: 143528 - DNA, 19 bp, Homo sapiens
  siRNA target sequence for FAT (NM_005245.1,2041-2059).
cccaactcgggggtattgt

SEQ ID NO: 143529 - DNA, 19 bp, Homo sapiens
  siRNA target sequence for FAT (NM_005245.1,2043-2061).
caactcgggggtattgtca

SEQ ID NO: 143530 - DNA, 19 bp, Homo sapiens
  siRNA target sequence for FAT (NM_005245.1,2046-2064).
ctcgggggtattgtcatta

SEQ ID NO: 143531 - DNA, 19 bp, Homo sapiens
  siRNA target sequence for FAT (NM_005245.1,2048-2066).
cgggggtattgtcattaaa

SEQ ID NO: 143532 - DNA, 19 bp, Homo sapiens
  siRNA target sequence for FAT (NM_005245.1,2115-2133).
gagaatcacagctacagat

SEQ ID NO: 143533 - DNA, 19 bp, Homo sapiens
  siRNA target sequence for FAT (NM_005245.1,2125-2143).
gctacagatggagaaaatt

SEQ ID NO: 143534 - DNA, 19 bp, Homo sapiens
  siRNA target sequence for FAT (NM_005245.1,2150-2168).
caccattatatatcaacat

SEQ ID NO: 143535 - DNA, 19 bp, Homo sapiens
  siRNA target sequence for FAT (NM_005245.1,2180-2198).
ccagtcacaagctggtaaa

SEQ ID NO: 143536 - DNA, 19 bp, Homo sapiens
  siRNA target sequence for FAT (NM_005245.1,2183-2201).
gtcacaagctggtaaactt

SEQ ID NO: 143537 - DNA, 19 bp, Homo sapiens
  siRNA target sequence for FAT (NM_005245.1,2216-2234).
ctggtgttgccaaaatgct

SEQ ID NO: 143538 - DNA, 19 bp, Homo sapiens
  siRNA target sequence for FAT (NM_005245.1,2298-2316).
cgattctcactctgtcaat

SEQ ID NO: 143539 - DNA, 19 bp, Homo sapiens
  siRNA target sequence for FAT (NM_005245.1,2317-2335).
gctcacataccgcagttta

SEQ ID NO: 143540 - DNA, 19 bp, Homo sapiens
  siRNA target sequence for FAT (NM_005245.1,2320-2338).
cacataccgcagtttagaa

SEQ ID NO: 143541 - DNA, 19 bp, Homo sapiens
  siRNA target sequence for FAT (NM_005245.1,2340-2358).
cactcttccgactggtatt

SEQ ID NO: 143542 - DNA, 19 bp, Homo sapiens
  siRNA target sequence for FAT (NM_005245.1,2342-2360).
ctcttccgactggtattca

SEQ ID NO: 143543 - DNA, 19 bp, Homo sapiens
  siRNA target sequence for FAT (NM_005245.1,2348-2366).
cgactggtattcaggtaaa

SEQ ID NO: 143544 - DNA, 19 bp, Homo sapiens
  siRNA target sequence for FAT (NM_005245.1,2351-2369).
ctggtattcaggtaaagga

SEQ ID NO: 143545 - DNA, 19 bp, Homo sapiens
  siRNA target sequence for FAT (NM_005245.1,2377-2395).
cctgtgggttccagtgtaa

SEQ ID NO: 143546 - DNA, 19 bp, Homo sapiens
  siRNA target sequence for FAT (NM_005245.1,2380-2398).
gtgggttccagtgtaattt

SEQ ID NO: 143547 - DNA, 19 bp, Homo sapiens
  siRNA target sequence for FAT (NM_005245.1,2474-2492).
gttgcttcatgattgatat

SEQ ID NO: 143548 - DNA, 19 bp, Homo sapiens
  siRNA target sequence for FAT (NM_005245.1,2477-2495).
gcttcatgattgatatgga

SEQ ID NO: 143549 - DNA, 19 bp, Homo sapiens
  siRNA target sequence for FAT (NM_005245.1,2542-2560).
gacaaatacaccctgaata

SEQ ID NO: 143550 - DNA, 19 bp, Homo sapiens
  siRNA target sequence for FAT (NM_005245.1,2592-2610).
ggctgcgtggcgtcttcta

SEQ ID NO: 143551 - DNA, 19 bp, Homo sapiens
  siRNA target sequence for FAT (NM_005245.1,2597-2615).
cgtggcgtcttctacatgt

SEQ ID NO: 143552 - DNA, 19 bp, Homo sapiens
  siRNA target sequence for FAT (NM_005245.1,2749-2767).
ggacacgtgacgtactcaa

SEQ ID NO: 143553 - DNA, 19 bp, Homo sapiens
  siRNA target sequence for FAT (NM_005245.1,2750-2768).
gacacgtgacgtactcaat

SEQ ID NO: 143554 - DNA, 19 bp, Homo sapiens
  siRNA target sequence for FAT (NM_005245.1,2799-2817).
cagcgtgacgggtgttgtt

SEQ ID NO: 143555 - DNA, 19 bp, Homo sapiens
  siRNA target sequence for FAT (NM_005245.1,2801-2819).
gcgtgacgggtgttgttaa

SEQ ID NO: 143556 - DNA, 19 bp, Homo sapiens
  siRNA target sequence for FAT (NM_005245.1,2803-2821).
gtgacgggtgttgttaaca

SEQ ID NO: 143557 - DNA, 19 bp, Homo sapiens
  siRNA target sequence for FAT (NM_005245.1,2851-2869).
catgagcactccttaaaga

SEQ ID NO: 143558 - DNA, 19 bp, Homo sapiens
  siRNA target sequence for FAT (NM_005245.1,2912-2930).
ccactgtcgttgtgaaagt

SEQ ID NO: 143559 - DNA, 19 bp, Homo sapiens
  siRNA target sequence for FAT (NM_005245.1,2913-2931).
cactgtcgttgtgaaagta

SEQ ID NO: 143560 - DNA, 19 bp, Homo sapiens
  siRNA target sequence for FAT (NM_005245.1,2952-2970).
caacccacctacatttatt

SEQ ID NO: 143561 - DNA, 19 bp, Homo sapiens
  siRNA target sequence for FAT (NM_005245.1,2955-2973).
cccacctacatttattcca

SEQ ID NO: 143562 - DNA, 19 bp, Homo sapiens
  siRNA target sequence for FAT (NM_005245.1,3018-3036).
cgtcatcatgtggttagaa

SEQ ID NO: 143563 - DNA, 19 bp, Homo sapiens
  siRNA target sequence for FAT (NM_005245.1,3039-3057).
ccacgatcctgatttaggt

SEQ ID NO: 143564 - DNA, 19 bp, Homo sapiens
  siRNA target sequence for FAT (NM_005245.1,3224-3242).
cttctacttgctatgttga

SEQ ID NO: 143565 - DNA, 19 bp, Homo sapiens
  siRNA target sequence for FAT (NM_005245.1,3227-3245).
ctacttgctatgttgaagt

SEQ ID NO: 143566 - DNA, 19 bp, Homo sapiens
  siRNA target sequence for FAT (NM_005245.1,3271-3289).
ctgcacccacccgtgtttt

SEQ ID NO: 143567 - DNA, 19 bp, Homo sapiens
  siRNA target sequence for FAT (NM_005245.1,3328-3346).
cctgttggttcattggtaa

SEQ ID NO: 143568 - DNA, 19 bp, Homo sapiens
  siRNA target sequence for FAT (NM_005245.1,3331-3349).
gttggttcattggtaatga

SEQ ID NO: 143569 - DNA, 19 bp, Homo sapiens
  siRNA target sequence for FAT (NM_005245.1,3348-3366).
gacggtgtcggctcatgat

SEQ ID NO: 143570 - DNA, 19 bp, Homo sapiens
  siRNA target sequence for FAT (NM_005245.1,3388-3406).
gagatccgatactccatta

SEQ ID NO: 143571 - DNA, 19 bp, Homo sapiens
  siRNA target sequence for FAT (NM_005245.1,3390-3408).
gatccgatactccattaga

SEQ ID NO: 143572 - DNA, 19 bp, Homo sapiens
  siRNA target sequence for FAT (NM_005245.1,3393-3411).
ccgatactccattagagat

SEQ ID NO: 143573 - DNA, 19 bp, Homo sapiens
  siRNA target sequence for FAT (NM_005245.1,3416-3434).
ctggcgttggtgttttcaa

SEQ ID NO: 143574 - DNA, 19 bp, Homo sapiens
  siRNA target sequence for FAT (NM_005245.1,3418-3436).
ggcgttggtgttttcaaaa

SEQ ID NO: 143575 - DNA, 19 bp, Homo sapiens
  siRNA target sequence for FAT (NM_005245.1,3484-3502).
gaatcgacctcccattatt

SEQ ID NO: 143576 - DNA, 19 bp, Homo sapiens
  siRNA target sequence for FAT (NM_005245.1,3494-3512).
cccattattggctaacagt

SEQ ID NO: 143577 - DNA, 19 bp, Homo sapiens
  siRNA target sequence for FAT (NM_005245.1,3537-3555).
gcctctttcatcgttcata

SEQ ID NO: 143578 - DNA, 19 bp, Homo sapiens
  siRNA target sequence for FAT (NM_005245.1,3539-3557).
ctctttcatcgttcataga

SEQ ID NO: 143579 - DNA, 19 bp, Homo sapiens
  siRNA target sequence for FAT (NM_005245.1,3548-3566).
cgttcatagagatctacat

SEQ ID NO: 143580 - DNA, 19 bp, Homo sapiens
  siRNA target sequence for FAT (NM_005245.1,3600-3618).
gacatcagagcctgtttat

SEQ ID NO: 143581 - DNA, 19 bp, Homo sapiens
  siRNA target sequence for FAT (NM_005245.1,3611-3629).
ctgtttattacccagaaat

SEQ ID NO: 143582 - DNA, 19 bp, Homo sapiens
  siRNA target sequence for FAT (NM_005245.1,3630-3648).
catggaaaattctcctaaa

SEQ ID NO: 143583 - DNA, 19 bp, Homo sapiens
  siRNA target sequence for FAT (NM_005245.1,3663-3681).
ccagatcgaggcatttgat

SEQ ID NO: 143584 - DNA, 19 bp, Homo sapiens
  siRNA target sequence for FAT (NM_005245.1,3683-3701).
cagattcgagctctaatga

SEQ ID NO: 143585 - DNA, 19 bp, Homo sapiens
  siRNA target sequence for FAT (NM_005245.1,3685-3703).
gattcgagctctaatgaca

SEQ ID NO: 143586 - DNA, 19 bp, Homo sapiens
  siRNA target sequence for FAT (NM_005245.1,3695-3713).
ctaatgacaagctcatgta

SEQ ID NO: 143587 - DNA, 19 bp, Homo sapiens
  siRNA target sequence for FAT (NM_005245.1,3705-3723).
gctcatgtacaaaattaca

SEQ ID NO: 143588 - DNA, 19 bp, Homo sapiens
  siRNA target sequence for FAT (NM_005245.1,3706-3724).
ctcatgtacaaaattacaa

SEQ ID NO: 143589 - DNA, 19 bp, Homo sapiens
  siRNA target sequence for FAT (NM_005245.1,3725-3743).
gtggaaatccacaaggatt

SEQ ID NO: 143590 - DNA, 19 bp, Homo sapiens
  siRNA target sequence for FAT (NM_005245.1,3805-3823).
cagcaagatgaacacatat

SEQ ID NO: 143591 - DNA, 19 bp, Homo sapiens
  siRNA target sequence for FAT (NM_005245.1,3828-3846).
ggttactgtgacagacaat

SEQ ID NO: 143592 - DNA, 19 bp, Homo sapiens
  siRNA target sequence for FAT (NM_005245.1,3866-3884).
ccattgcaagagtcattgt

SEQ ID NO: 143593 - DNA, 19 bp, Homo sapiens
  siRNA target sequence for FAT (NM_005245.1,3875-3893).
gagtcattgtgaaaatcct

SEQ ID NO: 143594 - DNA, 19 bp, Homo sapiens
  siRNA target sequence for FAT (NM_005245.1,3963-3981).
gccagaccgagaaagaaat

SEQ ID NO: 143595 - DNA, 19 bp, Homo sapiens
  siRNA target sequence for FAT (NM_005245.1,4132-4150).
gcagctggagaatatgata

SEQ ID NO: 143596 - DNA, 19 bp, Homo sapiens
  siRNA target sequence for FAT (NM_005245.1,4133-4151).
cagctggagaatatgatat

SEQ ID NO: 143597 - DNA, 19 bp, Homo sapiens
  siRNA target sequence for FAT (NM_005245.1,4180-4198).
cgccctcaaaagtcatcaa

SEQ ID NO: 143598 - DNA, 19 bp, Homo sapiens
  siRNA target sequence for FAT (NM_005245.1,4199-4217).
ccaccagactccatattga

SEQ ID NO: 143599 - DNA, 19 bp, Homo sapiens
  siRNA target sequence for FAT (NM_005245.1,4200-4218).
caccagactccatattgaa

SEQ ID NO: 143600 - DNA, 19 bp, Homo sapiens
  siRNA target sequence for FAT (NM_005245.1,4239-4257).
gtccctggagcccatttca

SEQ ID NO: 143601 - DNA, 19 bp, Homo sapiens
  siRNA target sequence for FAT (NM_005245.1,4245-4263).
ggagcccatttcatttgaa

SEQ ID NO: 143602 - DNA, 19 bp, Homo sapiens
  siRNA target sequence for FAT (NM_005245.1,4248-4266).
gcccatttcatttgaagaa

SEQ ID NO: 143603 - DNA, 19 bp, Homo sapiens
  siRNA target sequence for FAT (NM_005245.1,4249-4267).
cccatttcatttgaagaat

SEQ ID NO: 143604 - DNA, 19 bp, Homo sapiens
  siRNA target sequence for FAT (NM_005245.1,4268-4286).
cattttttacctttactgt

SEQ ID NO: 143605 - DNA, 19 bp, Homo sapiens
  siRNA target sequence for FAT (NM_005245.1,4299-4317).
ccccgttgctcacatgatt

SEQ ID NO: 143606 - DNA, 19 bp, Homo sapiens
  siRNA target sequence for FAT (NM_005245.1,4406-4424).
gaactggaaccatcattgt

SEQ ID NO: 143607 - DNA, 19 bp, Homo sapiens
  siRNA target sequence for FAT (NM_005245.1,4467-4485).
cacagtcgaggctacagat

SEQ ID NO: 143608 - DNA, 19 bp, Homo sapiens
  siRNA target sequence for FAT (NM_005245.1,4539-4557).
ccatcgtcctcagttttct

SEQ ID NO: 143609 - DNA, 19 bp, Homo sapiens
  siRNA target sequence for FAT (NM_005245.1,4540-4558).
catcgtcctcagttttcta

SEQ ID NO: 143610 - DNA, 19 bp, Homo sapiens
  siRNA target sequence for FAT (NM_005245.1,4546-4564).
cctcagttttctacatcaa

SEQ ID NO: 143611 - DNA, 19 bp, Homo sapiens
  siRNA target sequence for FAT (NM_005245.1,4566-4584).
gtatgaagttgttattcct

SEQ ID NO: 143612 - DNA, 19 bp, Homo sapiens
  siRNA target sequence for FAT (NM_005245.1,4594-4612).
gcgccagaaacagaaattt

SEQ ID NO: 143613 - DNA, 19 bp, Homo sapiens
  siRNA target sequence for FAT (NM_005245.1,4595-4613).
cgccagaaacagaaatttt

SEQ ID NO: 143614 - DNA, 19 bp, Homo sapiens
  siRNA target sequence for FAT (NM_005245.1,4681-4699).
ccactgagtctcaagaaat

SEQ ID NO: 143615 - DNA, 19 bp, Homo sapiens
  siRNA target sequence for FAT (NM_005245.1,4686-4704).
gagtctcaagaaatttcgt

SEQ ID NO: 143616 - DNA, 19 bp, Homo sapiens
  siRNA target sequence for FAT (NM_005245.1,4719-4737).
cggctctctctatacttct

SEQ ID NO: 143617 - DNA, 19 bp, Homo sapiens
  siRNA target sequence for FAT (NM_005245.1,4779-4797).
ggtcatggtacgagatcaa

SEQ ID NO: 143618 - DNA, 19 bp, Homo sapiens
  siRNA target sequence for FAT (NM_005245.1,4782-4800).
catggtacgagatcaagat

SEQ ID NO: 143619 - DNA, 19 bp, Homo sapiens
  siRNA target sequence for FAT (NM_005245.1,5038-5056).
gtcttgggctctattaaaa

SEQ ID NO: 143620 - DNA, 19 bp, Homo sapiens
  siRNA target sequence for FAT (NM_005245.1,5040-5058).
cttgggctctattaaaact

SEQ ID NO: 143621 - DNA, 19 bp, Homo sapiens
  siRNA target sequence for FAT (NM_005245.1,5078-5096).
gtaaccaagcggagtatga

SEQ ID NO: 143622 - DNA, 19 bp, Homo sapiens
  siRNA target sequence for FAT (NM_005245.1,5083-5101).
caagcggagtatgatttaa

SEQ ID NO: 143623 - DNA, 19 bp, Homo sapiens
  siRNA target sequence for FAT (NM_005245.1,5087-5105).
cggagtatgatttaatggt

SEQ ID NO: 143624 - DNA, 19 bp, Homo sapiens
  siRNA target sequence for FAT (NM_005245.1,5089-5107).
gagtatgatttaatggtaa

SEQ ID NO: 143625 - DNA, 19 bp, Homo sapiens
  siRNA target sequence for FAT (NM_005245.1,5121-5139).
gggcagtccaccaatgagt

SEQ ID NO: 143626 - DNA, 19 bp, Homo sapiens
  siRNA target sequence for FAT (NM_005245.1,5154-5172).
gcgtatctttgtcacaatt

SEQ ID NO: 143627 - DNA, 19 bp, Homo sapiens
  siRNA target sequence for FAT (NM_005245.1,5178-5196).
caacgcctctccgaagttt

SEQ ID NO: 143628 - DNA, 19 bp, Homo sapiens
  siRNA target sequence for FAT (NM_005245.1,5181-5199).
cgcctctccgaagtttaca

SEQ ID NO: 143629 - DNA, 19 bp, Homo sapiens
  siRNA target sequence for FAT (NM_005245.1,5182-5200).
gcctctccgaagtttacat

SEQ ID NO: 143630 - DNA, 19 bp, Homo sapiens
  siRNA target sequence for FAT (NM_005245.1,5184-5202).
ctctccgaagtttacatca

SEQ ID NO: 143631 - DNA, 19 bp, Homo sapiens
  siRNA target sequence for FAT (NM_005245.1,5186-5204).
ctccgaagtttacatcaaa

SEQ ID NO: 143632 - DNA, 19 bp, Homo sapiens
  siRNA target sequence for FAT (NM_005245.1,5189-5207).
cgaagtttacatcaaaaga

SEQ ID NO: 143633 - DNA, 19 bp, Homo sapiens
  siRNA target sequence for FAT (NM_005245.1,5260-5278).
gttacagcccatagtcaat

SEQ ID NO: 143634 - DNA, 19 bp, Homo sapiens
  siRNA target sequence for FAT (NM_005245.1,5335-5353).
ccacattctggaactatca

SEQ ID NO: 143635 - DNA, 19 bp, Homo sapiens
  siRNA target sequence for FAT (NM_005245.1,5336-5354).
cacattctggaactatcat

SEQ ID NO: 143636 - DNA, 19 bp, Homo sapiens
  siRNA target sequence for FAT (NM_005245.1,5338-5356).
cattctggaactatcatca

SEQ ID NO: 143637 - DNA, 19 bp, Homo sapiens
  siRNA target sequence for FAT (NM_005245.1,5421-5439).
ggctggtttgtccactaat

SEQ ID NO: 143638 - DNA, 19 bp, Homo sapiens
  siRNA target sequence for FAT (NM_005245.1,5422-5440).
gctggtttgtccactaata

SEQ ID NO: 143639 - DNA, 19 bp, Homo sapiens
  siRNA target sequence for FAT (NM_005245.1,5425-5443).
ggtttgtccactaatacaa

SEQ ID NO: 143640 - DNA, 19 bp, Homo sapiens
  siRNA target sequence for FAT (NM_005245.1,5435-5453).
ctaatacaacggttctagt

SEQ ID NO: 143641 - DNA, 19 bp, Homo sapiens
  siRNA target sequence for FAT (NM_005245.1,5441-5459).
caacggttctagttcactt

SEQ ID NO: 143642 - DNA, 19 bp, Homo sapiens
  siRNA target sequence for FAT (NM_005245.1,5613-5631).
gcttgtatatcacattgtt

SEQ ID NO: 143643 - DNA, 19 bp, Homo sapiens
  siRNA target sequence for FAT (NM_005245.1,5625-5643).
cattgttgaaccatctgta

SEQ ID NO: 143644 - DNA, 19 bp, Homo sapiens
  siRNA target sequence for FAT (NM_005245.1,5641-5659).
gtacacacatattttgcta

SEQ ID NO: 143645 - DNA, 19 bp, Homo sapiens
  siRNA target sequence for FAT (NM_005245.1,5646-5664).
cacatattttgctattgat

SEQ ID NO: 143646 - DNA, 19 bp, Homo sapiens
  siRNA target sequence for FAT (NM_005245.1,5677-5695).
gctattcatacagtactaa

SEQ ID NO: 143647 - DNA, 19 bp, Homo sapiens
  siRNA target sequence for FAT (NM_005245.1,5732-5750).
ccgtccaagtgcatgacat

SEQ ID NO: 143648 - DNA, 19 bp, Homo sapiens
  siRNA target sequence for FAT (NM_005245.1,5748-5766).
catgggaaccccacgttta

SEQ ID NO: 143649 - DNA, 19 bp, Homo sapiens
  siRNA target sequence for FAT (NM_005245.1,5751-5769).
gggaaccccacgtttattt

SEQ ID NO: 143650 - DNA, 19 bp, Homo sapiens
  siRNA target sequence for FAT (NM_005245.1,5773-5791).
gagtatgcagcgaatgtaa

SEQ ID NO: 143651 - DNA, 19 bp, Homo sapiens
  siRNA target sequence for FAT (NM_005245.1,5775-5793).
gtatgcagcgaatgtaaca

SEQ ID NO: 143652 - DNA, 19 bp, Homo sapiens
  siRNA target sequence for FAT (NM_005245.1,5783-5801).
cgaatgtaacagtacatgt

SEQ ID NO: 143653 - DNA, 19 bp, Homo sapiens
  siRNA target sequence for FAT (NM_005245.1,5784-5802).
gaatgtaacagtacatgta

SEQ ID NO: 143654 - DNA, 19 bp, Homo sapiens
  siRNA target sequence for FAT (NM_005245.1,5792-5810).
cagtacatgtaattgacat

SEQ ID NO: 143655 - DNA, 19 bp, Homo sapiens
  siRNA target sequence for FAT (NM_005245.1,5867-5885).
caacatacaaaggagtaaa

SEQ ID NO: 143656 - DNA, 19 bp, Homo sapiens
  siRNA target sequence for FAT (NM_005245.1,5921-5939).
gtgcattctcacagttgat

SEQ ID NO: 143657 - DNA, 19 bp, Homo sapiens
  siRNA target sequence for FAT (NM_005245.1,5923-5941).
gcattctcacagttgattt

SEQ ID NO: 143658 - DNA, 19 bp, Homo sapiens
  siRNA target sequence for FAT (NM_005245.1,5996-6014).
gtgctctcactgtccaaaa

SEQ ID NO: 143659 - DNA, 19 bp, Homo sapiens
  siRNA target sequence for FAT (NM_005245.1,5998-6016).
gctctcactgtccaaaaca

SEQ ID NO: 143660 - DNA, 19 bp, Homo sapiens
  siRNA target sequence for FAT (NM_005245.1,6077-6095).
gccttacctctgtcaaaat

SEQ ID NO: 143661 - DNA, 19 bp, Homo sapiens
  siRNA target sequence for FAT (NM_005245.1,6110-6128).
gcaaagaaagtcacctaaa

SEQ ID NO: 143662 - DNA, 19 bp, Homo sapiens
  siRNA target sequence for FAT (NM_005245.1,6149-6167).
ctgcggtagtgaaagagaa

SEQ ID NO: 143663 - DNA, 19 bp, Homo sapiens
  siRNA target sequence for FAT (NM_005245.1,6151-6169).
gcggtagtgaaagagaatt

SEQ ID NO: 143664 - DNA, 19 bp, Homo sapiens
  siRNA target sequence for FAT (NM_005245.1,6170-6188).
ccaccgaggccgaaacatt

SEQ ID NO: 143665 - DNA, 19 bp, Homo sapiens
  siRNA target sequence for FAT (NM_005245.1,6171-6189).
caccgaggccgaaacatta

SEQ ID NO: 143666 - DNA, 19 bp, Homo sapiens
  siRNA target sequence for FAT (NM_005245.1,6246-6264).
caacccagatcgcagattt

SEQ ID NO: 143667 - DNA, 19 bp, Homo sapiens
  siRNA target sequence for FAT (NM_005245.1,6249-6267).
cccagatcgcagatttaaa

SEQ ID NO: 143668 - DNA, 19 bp, Homo sapiens
  siRNA target sequence for FAT (NM_005245.1,6250-6268).
ccagatcgcagatttaaaa

SEQ ID NO: 143669 - DNA, 19 bp, Homo sapiens
  siRNA target sequence for FAT (NM_005245.1,6332-6350).
cgtttgatgtggttgtaga

SEQ ID NO: 143670 - DNA, 19 bp, Homo sapiens
  siRNA target sequence for FAT (NM_005245.1,6393-6411).
cgtgaaggtcattgtagaa

SEQ ID NO: 143671 - DNA, 19 bp, Homo sapiens
  siRNA target sequence for FAT (NM_005245.1,6402-6420).
cattgtagaagaccaaaat

SEQ ID NO: 143672 - DNA, 19 bp, Homo sapiens
  siRNA target sequence for FAT (NM_005245.1,6448-6466).
ccctactacgccgttgtta

SEQ ID NO: 143673 - DNA, 19 bp, Homo sapiens
  siRNA target sequence for FAT (NM_005245.1,6449-6467).
cctactacgccgttgttaa

SEQ ID NO: 143674 - DNA, 19 bp, Homo sapiens
  siRNA target sequence for FAT (NM_005245.1,6450-6468).
ctactacgccgttgttaaa

SEQ ID NO: 143675 - DNA, 19 bp, Homo sapiens
  siRNA target sequence for FAT (NM_005245.1,6487-6505).
catgtcattcgctatgtca

SEQ ID NO: 143676 - DNA, 19 bp, Homo sapiens
  siRNA target sequence for FAT (NM_005245.1,6558-6576).
ggaacatcatgaacacttt

SEQ ID NO: 143677 - DNA, 19 bp, Homo sapiens
  siRNA target sequence for FAT (NM_005245.1,6583-6601).
ggacccttgggtgaaattt

SEQ ID NO: 143678 - DNA, 19 bp, Homo sapiens
  siRNA target sequence for FAT (NM_005245.1,6587-6605).
ccttgggtgaaatttcact

SEQ ID NO: 143679 - DNA, 19 bp, Homo sapiens
  siRNA target sequence for FAT (NM_005245.1,6591-6609).
gggtgaaatttcactgaaa

SEQ ID NO: 143680 - DNA, 19 bp, Homo sapiens
  siRNA target sequence for FAT (NM_005245.1,6621-6639).
gcttgacaccttaaataaa

SEQ ID NO: 143681 - DNA, 19 bp, Homo sapiens
  siRNA target sequence for FAT (NM_005245.1,6625-6643).
gacaccttaaataaagaat

SEQ ID NO: 143682 - DNA, 19 bp, Homo sapiens
  siRNA target sequence for FAT (NM_005245.1,6682-6700).
gccttttcagcggaagtta

SEQ ID NO: 143683 - DNA, 19 bp, Homo sapiens
  siRNA target sequence for FAT (NM_005245.1,6683-6701).
ccttttcagcggaagttat

SEQ ID NO: 143684 - DNA, 19 bp, Homo sapiens
  siRNA target sequence for FAT (NM_005245.1,6707-6725).
cgatcactgtcatgaataa

SEQ ID NO: 143685 - DNA, 19 bp, Homo sapiens
  siRNA target sequence for FAT (NM_005245.1,6708-6726).
gatcactgtcatgaataaa

SEQ ID NO: 143686 - DNA, 19 bp, Homo sapiens
  siRNA target sequence for FAT (NM_005245.1,6818-6836).
gcccggaaggcctgaaagt

SEQ ID NO: 143687 - DNA, 19 bp, Homo sapiens
  siRNA target sequence for FAT (NM_005245.1,6821-6839).
cggaaggcctgaaagtgtt

SEQ ID NO: 143688 - DNA, 19 bp, Homo sapiens
  siRNA target sequence for FAT (NM_005245.1,6862-6880).
cctttcagccagttcacta

SEQ ID NO: 143689 - DNA, 19 bp, Homo sapiens
  siRNA target sequence for FAT (NM_005245.1,6863-6881).
ctttcagccagttcactat

SEQ ID NO: 143690 - DNA, 19 bp, Homo sapiens
  siRNA target sequence for FAT (NM_005245.1,6869-6887).
gccagttcactattaactt

SEQ ID NO: 143691 - DNA, 19 bp, Homo sapiens
  siRNA target sequence for FAT (NM_005245.1,6873-6891).
gttcactattaacttcaat

SEQ ID NO: 143692 - DNA, 19 bp, Homo sapiens
  siRNA target sequence for FAT (NM_005245.1,6928-6946).
gaggcccacccggcatata

SEQ ID NO: 143693 - DNA, 19 bp, Homo sapiens
  siRNA target sequence for FAT (NM_005245.1,7008-7026).
catagtagacgacatcaat

SEQ ID NO: 143694 - DNA, 19 bp, Homo sapiens
  siRNA target sequence for FAT (NM_005245.1,7091-7109).
gaacgtctgttgttcaagt

SEQ ID NO: 143695 - DNA, 19 bp, Homo sapiens
  siRNA target sequence for FAT (NM_005245.1,7095-7113).
gtctgttgttcaagttaga

SEQ ID NO: 143696 - DNA, 19 bp, Homo sapiens
  siRNA target sequence for FAT (NM_005245.1,7145-7163).
gaatctcataccagatgtt

SEQ ID NO: 143697 - DNA, 19 bp, Homo sapiens
  siRNA target sequence for FAT (NM_005245.1,7175-7193).
gcaagagtcatgatcattt

SEQ ID NO: 143698 - DNA, 19 bp, Homo sapiens
  siRNA target sequence for FAT (NM_005245.1,7176-7194).
caagagtcatgatcatttt

SEQ ID NO: 143699 - DNA, 19 bp, Homo sapiens
  siRNA target sequence for FAT (NM_005245.1,7253-7271).
cccggcagcacacgatttt

SEQ ID NO: 143700 - DNA, 19 bp, Homo sapiens
  siRNA target sequence for FAT (NM_005245.1,7254-7272).
ccggcagcacacgattttt

SEQ ID NO: 143701 - DNA, 19 bp, Homo sapiens
  siRNA target sequence for FAT (NM_005245.1,7256-7274).
ggcagcacacgatttttgt

SEQ ID NO: 143702 - DNA, 19 bp, Homo sapiens
  siRNA target sequence for FAT (NM_005245.1,7464-7482).
caagttgcagtattccatt

SEQ ID NO: 143703 - DNA, 19 bp, Homo sapiens
  siRNA target sequence for FAT (NM_005245.1,7483-7501).
ctgtctggcaatgatcata

SEQ ID NO: 143704 - DNA, 19 bp, Homo sapiens
  siRNA target sequence for FAT (NM_005245.1,7485-7503).
gtctggcaatgatcataaa

SEQ ID NO: 143705 - DNA, 19 bp, Homo sapiens
  siRNA target sequence for FAT (NM_005245.1,7616-7634).
gttccacccaggttcatgt

SEQ ID NO: 143706 - DNA, 19 bp, Homo sapiens
  siRNA target sequence for FAT (NM_005245.1,7620-7638).
cacccaggttcatgtaact

SEQ ID NO: 143707 - DNA, 19 bp, Homo sapiens
  siRNA target sequence for FAT (NM_005245.1,7623-7641).
ccaggttcatgtaactgta

SEQ ID NO: 143708 - DNA, 19 bp, Homo sapiens
  siRNA target sequence for FAT (NM_005245.1,7624-7642).
caggttcatgtaactgtaa

SEQ ID NO: 143709 - DNA, 19 bp, Homo sapiens
  siRNA target sequence for FAT (NM_005245.1,7702-7720).
gaaaacgctcccctacata

SEQ ID NO: 143710 - DNA, 19 bp, Homo sapiens
  siRNA target sequence for FAT (NM_005245.1,7768-7786).
ggtcacgttacttaccata

SEQ ID NO: 143711 - DNA, 19 bp, Homo sapiens
  siRNA target sequence for FAT (NM_005245.1,7773-7791).
cgttacttaccatattgta

SEQ ID NO: 143712 - DNA, 19 bp, Homo sapiens
  siRNA target sequence for FAT (NM_005245.1,7882-7900).
gtgatctcagtccgtttaa

SEQ ID NO: 143713 - DNA, 19 bp, Homo sapiens
  siRNA target sequence for FAT (NM_005245.1,7893-7911).
ccgtttaatggctaaggat

SEQ ID NO: 143714 - DNA, 19 bp, Homo sapiens
  siRNA target sequence for FAT (NM_005245.1,7968-7986).
caatgcaccacaatttcga

SEQ ID NO: 143715 - DNA, 19 bp, Homo sapiens
  siRNA target sequence for FAT (NM_005245.1,7978-7996).
caatttcgagcaaccaaat

SEQ ID NO: 143716 - DNA, 19 bp, Homo sapiens
  siRNA target sequence for FAT (NM_005245.1,8010-8028).
cgggtccagtgctgctaaa

SEQ ID NO: 143717 - DNA, 19 bp, Homo sapiens
  siRNA target sequence for FAT (NM_005245.1,8143-8161).
ctgtccggcgtaatcacta

SEQ ID NO: 143718 - DNA, 19 bp, Homo sapiens
  siRNA target sequence for FAT (NM_005245.1,8147-8165).
ccggcgtaatcactacaaa

SEQ ID NO: 143719 - DNA, 19 bp, Homo sapiens
  siRNA target sequence for FAT (NM_005245.1,8171-8189).
gcctcattggcttggaaaa

SEQ ID NO: 143720 - DNA, 19 bp, Homo sapiens
  siRNA target sequence for FAT (NM_005245.1,8227-8245).
gggtctccatcaaaagaat

SEQ ID NO: 143721 - DNA, 19 bp, Homo sapiens
  siRNA target sequence for FAT (NM_005245.1,8229-8247).
gtctccatcaaaagaatct

SEQ ID NO: 143722 - DNA, 19 bp, Homo sapiens
  siRNA target sequence for FAT (NM_005245.1,8364-8382).
catccgagcagaacatagt

SEQ ID NO: 143723 - DNA, 19 bp, Homo sapiens
  siRNA target sequence for FAT (NM_005245.1,8432-8450).
gggatgagtcctttgtgat

SEQ ID NO: 143724 - DNA, 19 bp, Homo sapiens
  siRNA target sequence for FAT (NM_005245.1,8488-8506).
cttgatcatgagacaacta

SEQ ID NO: 143725 - DNA, 19 bp, Homo sapiens
  siRNA target sequence for FAT (NM_005245.1,8491-8509).
gatcatgagacaactaagt

SEQ ID NO: 143726 - DNA, 19 bp, Homo sapiens
  siRNA target sequence for FAT (NM_005245.1,8529-8547).
ggccaggtgcactcaagat

SEQ ID NO: 143727 - DNA, 19 bp, Homo sapiens
  siRNA target sequence for FAT (NM_005245.1,8531-8549).
ccaggtgcactcaagatga

SEQ ID NO: 143728 - DNA, 19 bp, Homo sapiens
  siRNA target sequence for FAT (NM_005245.1,8559-8577).
ggtggcttctgtagatgtt

SEQ ID NO: 143729 - DNA, 19 bp, Homo sapiens
  siRNA target sequence for FAT (NM_005245.1,8562-8580).
ggcttctgtagatgttagt

SEQ ID NO: 143730 - DNA, 19 bp, Homo sapiens
  siRNA target sequence for FAT (NM_005245.1,8563-8581).
gcttctgtagatgttagta

SEQ ID NO: 143731 - DNA, 19 bp, Homo sapiens
  siRNA target sequence for FAT (NM_005245.1,8607-8625).
cagcccggtctttgaatct

SEQ ID NO: 143732 - DNA, 19 bp, Homo sapiens
  siRNA target sequence for FAT (NM_005245.1,8635-8653).
gaggcattcattgttgaaa

SEQ ID NO: 143733 - DNA, 19 bp, Homo sapiens
  siRNA target sequence for FAT (NM_005245.1,8659-8677).
ccagggggaagtagagtaa

SEQ ID NO: 143734 - DNA, 19 bp, Homo sapiens
  siRNA target sequence for FAT (NM_005245.1,8660-8678).
cagggggaagtagagtaat

SEQ ID NO: 143735 - DNA, 19 bp, Homo sapiens
  siRNA target sequence for FAT (NM_005245.1,8663-8681).
ggggaagtagagtaattca

SEQ ID NO: 143736 - DNA, 19 bp, Homo sapiens
  siRNA target sequence for FAT (NM_005245.1,8666-8684).
gaagtagagtaattcagat

SEQ ID NO: 143737 - DNA, 19 bp, Homo sapiens
  siRNA target sequence for FAT (NM_005245.1,8708-8726).
gaaccaacggccaagttat

SEQ ID NO: 143738 - DNA, 19 bp, Homo sapiens
  siRNA target sequence for FAT (NM_005245.1,8733-8751).
cctggatcagtcacaaagt

SEQ ID NO: 143739 - DNA, 19 bp, Homo sapiens
  siRNA target sequence for FAT (NM_005245.1,8784-8802).
ggaaacaggctggattaca

SEQ ID NO: 143740 - DNA, 19 bp, Homo sapiens
  siRNA target sequence for FAT (NM_005245.1,8789-8807).
caggctggattacaacttt

SEQ ID NO: 143741 - DNA, 19 bp, Homo sapiens
  siRNA target sequence for FAT (NM_005245.1,8792-8810).
gctggattacaactttaaa

SEQ ID NO: 143742 - DNA, 19 bp, Homo sapiens
  siRNA target sequence for FAT (NM_005245.1,8942-8960).
gattcacggccgagatcta

SEQ ID NO: 143743 - DNA, 19 bp, Homo sapiens
  siRNA target sequence for FAT (NM_005245.1,8995-9013).
ggggtgattgccatcttaa

SEQ ID NO: 143744 - DNA, 19 bp, Homo sapiens
  siRNA target sequence for FAT (NM_005245.1,9018-9036).
cacggatgctgattctgaa

SEQ ID NO: 143745 - DNA, 19 bp, Homo sapiens
  siRNA target sequence for FAT (NM_005245.1,9037-9055).
gagatcaacagacaagtta

SEQ ID NO: 143746 - DNA, 19 bp, Homo sapiens
  siRNA target sequence for FAT (NM_005245.1,9042-9060).
caacagacaagttacatat

SEQ ID NO: 143747 - DNA, 19 bp, Homo sapiens
  siRNA target sequence for FAT (NM_005245.1,9047-9065).
gacaagttacatatttcat

SEQ ID NO: 143748 - DNA, 19 bp, Homo sapiens
  siRNA target sequence for FAT (NM_005245.1,9075-9093).
ggatcctttaggacagttt

SEQ ID NO: 143749 - DNA, 19 bp, Homo sapiens
  siRNA target sequence for FAT (NM_005245.1,9085-9103).
ggacagtttgccgttgaaa

SEQ ID NO: 143750 - DNA, 19 bp, Homo sapiens
  siRNA target sequence for FAT (NM_005245.1,9088-9106).
cagtttgccgttgaaacta

SEQ ID NO: 143751 - DNA, 19 bp, Homo sapiens
  siRNA target sequence for FAT (NM_005245.1,9094-9112).
gccgttgaaactatacaga

SEQ ID NO: 143752 - DNA, 19 bp, Homo sapiens
  siRNA target sequence for FAT (NM_005245.1,9095-9113).
ccgttgaaactatacagaa

SEQ ID NO: 143753 - DNA, 19 bp, Homo sapiens
  siRNA target sequence for FAT (NM_005245.1,9096-9114).
cgttgaaactatacagaat

SEQ ID NO: 143754 - DNA, 19 bp, Homo sapiens
  siRNA target sequence for FAT (NM_005245.1,9100-9118).
gaaactatacagaatgaat

SEQ ID NO: 143755 - DNA, 19 bp, Homo sapiens
  siRNA target sequence for FAT (NM_005245.1,9160-9178).
gacaattaccttcttacta

SEQ ID NO: 143756 - DNA, 19 bp, Homo sapiens
  siRNA target sequence for FAT (NM_005245.1,9203-9221).
catcaaaagcgatagttga

SEQ ID NO: 143757 - DNA, 19 bp, Homo sapiens
  siRNA target sequence for FAT (NM_005245.1,9295-9313).
gacgtccttcctggaaaat

SEQ ID NO: 143758 - DNA, 19 bp, Homo sapiens
  siRNA target sequence for FAT (NM_005245.1,9298-9316).
gtccttcctggaaaattga

SEQ ID NO: 143759 - DNA, 19 bp, Homo sapiens
  siRNA target sequence for FAT (NM_005245.1,9349-9367).
cgctctaacgctgaaatta

SEQ ID NO: 143760 - DNA, 19 bp, Homo sapiens
  siRNA target sequence for FAT (NM_005245.1,9351-9369).
ctctaacgctgaaattact

SEQ ID NO: 143761 - DNA, 19 bp, Homo sapiens
  siRNA target sequence for FAT (NM_005245.1,9535-9553).
ctagaagatgtgaacgata

SEQ ID NO: 143762 - DNA, 19 bp, Homo sapiens
  siRNA target sequence for FAT (NM_005245.1,9643-9661).
gatgccgacgcaggattaa

SEQ ID NO: 143763 - DNA, 19 bp, Homo sapiens
  siRNA target sequence for FAT (NM_005245.1,9697-9715).
gatgggcagttctccatta

SEQ ID NO: 143764 - DNA, 19 bp, Homo sapiens
  siRNA target sequence for FAT (NM_005245.1,9701-9719).
ggcagttctccattaacga

SEQ ID NO: 143765 - DNA, 19 bp, Homo sapiens
  siRNA target sequence for FAT (NM_005245.1,9702-9720).
gcagttctccattaacgaa

SEQ ID NO: 143766 - DNA, 19 bp, Homo sapiens
  siRNA target sequence for FAT (NM_005245.1,9703-9721).
cagttctccattaacgaat

SEQ ID NO: 143767 - DNA, 19 bp, Homo sapiens
  siRNA target sequence for FAT (NM_005245.1,9705-9723).
gttctccattaacgaatta

SEQ ID NO: 143768 - DNA, 19 bp, Homo sapiens
  siRNA target sequence for FAT (NM_005245.1,9708-9726).
ctccattaacgaattatct

SEQ ID NO: 143769 - DNA, 19 bp, Homo sapiens
  siRNA target sequence for FAT (NM_005245.1,9758-9776).
gagaactccaggcagtata

SEQ ID NO: 143770 - DNA, 19 bp, Homo sapiens
  siRNA target sequence for FAT (NM_005245.1,9879-9897).
gtttgagtaccgtgaatat

SEQ ID NO: 143771 - DNA, 19 bp, Homo sapiens
  siRNA target sequence for FAT (NM_005245.1,9906-9924).
cgtgtctgaggacattctt

SEQ ID NO: 143772 - DNA, 19 bp, Homo sapiens
  siRNA target sequence for FAT (NM_005245.1,9953-9971).
cagcaagtcgggatattga

SEQ ID NO: 143773 - DNA, 19 bp, Homo sapiens
  siRNA target sequence for FAT (NM_005245.1,9959-9977).
gtcgggatattgaagcaaa

SEQ ID NO: 143774 - DNA, 19 bp, Homo sapiens
  siRNA target sequence for FAT (NM_005245.1,9980-9998).
cagaaatcacctactcaat

SEQ ID NO: 143775 - DNA, 19 bp, Homo sapiens
  siRNA target sequence for FAT (NM_005245.1,10026-10044).
cagcatagattctaaaaca

SEQ ID NO: 143776 - DNA, 19 bp, Homo sapiens
  siRNA target sequence for FAT (NM_005245.1,10048-10066).
gccgtatttatcattgaga

SEQ ID NO: 143777 - DNA, 19 bp, Homo sapiens
  siRNA target sequence for FAT (NM_005245.1,10049-10067).
ccgtatttatcattgagaa

SEQ ID NO: 143778 - DNA, 19 bp, Homo sapiens
  siRNA target sequence for FAT (NM_005245.1,10050-10068).
cgtatttatcattgagaat

SEQ ID NO: 143779 - DNA, 19 bp, Homo sapiens
  siRNA target sequence for FAT (NM_005245.1,10082-10100).
gctctcatgagtattacct

SEQ ID NO: 143780 - DNA, 19 bp, Homo sapiens
  siRNA target sequence for FAT (NM_005245.1,10083-10101).
ctctcatgagtattaccta

SEQ ID NO: 143781 - DNA, 19 bp, Homo sapiens
  siRNA target sequence for FAT (NM_005245.1,10144-10162).
gttgccactgtgaacgtta

SEQ ID NO: 143782 - DNA, 19 bp, Homo sapiens
  siRNA target sequence for FAT (NM_005245.1,10148-10166).
ccactgtgaacgttaatgt

SEQ ID NO: 143783 - DNA, 19 bp, Homo sapiens
  siRNA target sequence for FAT (NM_005245.1,10296-10314).
ccacatccactactcaatt

SEQ ID NO: 143784 - DNA, 19 bp, Homo sapiens
  siRNA target sequence for FAT (NM_005245.1,10297-10315).
cacatccactactcaatta

SEQ ID NO: 143785 - DNA, 19 bp, Homo sapiens
  siRNA target sequence for FAT (NM_005245.1,10302-10320).
ccactactcaattatagat

SEQ ID NO: 143786 - DNA, 19 bp, Homo sapiens
  siRNA target sequence for FAT (NM_005245.1,10327-10345).
caaggaagctcgttcacaa

SEQ ID NO: 143787 - DNA, 19 bp, Homo sapiens
  siRNA target sequence for FAT (NM_005245.1,10352-10370).
ccgtcaggggagaagtcaa

SEQ ID NO: 143788 - DNA, 19 bp, Homo sapiens
  siRNA target sequence for FAT (NM_005245.1,10353-10371).
cgtcaggggagaagtcaaa

SEQ ID NO: 143789 - DNA, 19 bp, Homo sapiens
  siRNA target sequence for FAT (NM_005245.1,10384-10402).
ctcgaccgagaaacgattt

SEQ ID NO: 143790 - DNA, 19 bp, Homo sapiens
  siRNA target sequence for FAT (NM_005245.1,10386-10404).
cgaccgagaaacgatttca

SEQ ID NO: 143791 - DNA, 19 bp, Homo sapiens
  siRNA target sequence for FAT (NM_005245.1,10416-10434).
cacggttcaagcttctgat

SEQ ID NO: 143792 - DNA, 19 bp, Homo sapiens
  siRNA target sequence for FAT (NM_005245.1,10419-10437).
ggttcaagcttctgataat

SEQ ID NO: 143793 - DNA, 19 bp, Homo sapiens
  siRNA target sequence for FAT (NM_005245.1,10476-10494).
cgatgtgtccgatgtcaat

SEQ ID NO: 143794 - DNA, 19 bp, Homo sapiens
  siRNA target sequence for FAT (NM_005245.1,10518-10536).
gggaaactacagtgtcatt

SEQ ID NO: 143795 - DNA, 19 bp, Homo sapiens
  siRNA target sequence for FAT (NM_005245.1,10519-10537).
ggaaactacagtgtcatta

SEQ ID NO: 143796 - DNA, 19 bp, Homo sapiens
  siRNA target sequence for FAT (NM_005245.1,10529-10547).
gtgtcattatccaggaaaa

SEQ ID NO: 143797 - DNA, 19 bp, Homo sapiens
  siRNA target sequence for FAT (NM_005245.1,10753-10771).
ggaaagcctcagttgtcat

SEQ ID NO: 143798 - DNA, 19 bp, Homo sapiens
  siRNA target sequence for FAT (NM_005245.1,10769-10787).
catctttgacatacattga

SEQ ID NO: 143799 - DNA, 19 bp, Homo sapiens
  siRNA target sequence for FAT (NM_005245.1,10782-10800).
cattgacattagggtaatt

SEQ ID NO: 143800 - DNA, 19 bp, Homo sapiens
  siRNA target sequence for FAT (NM_005245.1,10901-10919).
cagaccaggacgtgtatga

SEQ ID NO: 143801 - DNA, 19 bp, Homo sapiens
  siRNA target sequence for FAT (NM_005245.1,10903-10921).
gaccaggacgtgtatgata

SEQ ID NO: 143802 - DNA, 19 bp, Homo sapiens
  siRNA target sequence for FAT (NM_005245.1,10905-10923).
ccaggacgtgtatgatact

SEQ ID NO: 143803 - DNA, 19 bp, Homo sapiens
  siRNA target sequence for FAT (NM_005245.1,10908-10926).
ggacgtgtatgatactcta

SEQ ID NO: 143804 - DNA, 19 bp, Homo sapiens
  siRNA target sequence for FAT (NM_005245.1,10909-10927).
gacgtgtatgatactctaa

SEQ ID NO: 143805 - DNA, 19 bp, Homo sapiens
  siRNA target sequence for FAT (NM_005245.1,10983-11001).
caagctgatagcacacaaa

SEQ ID NO: 143806 - DNA, 19 bp, Homo sapiens
  siRNA target sequence for FAT (NM_005245.1,10989-11007).
gatagcacacaaaaagcta

SEQ ID NO: 143807 - DNA, 19 bp, Homo sapiens
  siRNA target sequence for FAT (NM_005245.1,11038-11056).
gtaacagatgggaagttca

SEQ ID NO: 143808 - DNA, 19 bp, Homo sapiens
  siRNA target sequence for FAT (NM_005245.1,11066-11084).
ccgacatcacagtgcatat

SEQ ID NO: 143809 - DNA, 19 bp, Homo sapiens
  siRNA target sequence for FAT (NM_005245.1,11142-11160).
cactccggaagaattcgtt

SEQ ID NO: 143810 - DNA, 19 bp, Homo sapiens
  siRNA target sequence for FAT (NM_005245.1,11216-11234).
ggaacgacatacagattgt

SEQ ID NO: 143811 - DNA, 19 bp, Homo sapiens
  siRNA target sequence for FAT (NM_005245.1,11220-11238).
cgacatacagattgttagt

SEQ ID NO: 143812 - DNA, 19 bp, Homo sapiens
  siRNA target sequence for FAT (NM_005245.1,11261-11279).
cacatctggacgtcttact

SEQ ID NO: 143813 - DNA, 19 bp, Homo sapiens
  siRNA target sequence for FAT (NM_005245.1,11268-11286).
ggacgtcttactttttgta

SEQ ID NO: 143814 - DNA, 19 bp, Homo sapiens
  siRNA target sequence for FAT (NM_005245.1,11307-11325).
gatctcaacaaaacaactt

SEQ ID NO: 143815 - DNA, 19 bp, Homo sapiens
  siRNA target sequence for FAT (NM_005245.1,11320-11338).
caacttctgcacaagatta

SEQ ID NO: 143816 - DNA, 19 bp, Homo sapiens
  siRNA target sequence for FAT (NM_005245.1,11340-11358).
ctcttccgtgactgacatt

SEQ ID NO: 143817 - DNA, 19 bp, Homo sapiens
  siRNA target sequence for FAT (NM_005245.1,11342-11360).
cttccgtgactgacattga

SEQ ID NO: 143818 - DNA, 19 bp, Homo sapiens
  siRNA target sequence for FAT (NM_005245.1,11372-11390).
gagttaggatactgaatgt

SEQ ID NO: 143819 - DNA, 19 bp, Homo sapiens
  siRNA target sequence for FAT (NM_005245.1,11374-11392).
gttaggatactgaatgtat

SEQ ID NO: 143820 - DNA, 19 bp, Homo sapiens
  siRNA target sequence for FAT (NM_005245.1,11591-11609).
ctgagggatccgaatgtgt

SEQ ID NO: 143821 - DNA, 19 bp, Homo sapiens
  siRNA target sequence for FAT (NM_005245.1,11671-11689).
ccagggagttcatctatga

SEQ ID NO: 143822 - DNA, 19 bp, Homo sapiens
  siRNA target sequence for FAT (NM_005245.1,11699-11717).
gaaacagctacgtgaaata

SEQ ID NO: 143823 - DNA, 19 bp, Homo sapiens
  siRNA target sequence for FAT (NM_005245.1,11719-11737).
cgtctgacggaaaatgaaa

SEQ ID NO: 143824 - DNA, 19 bp, Homo sapiens
  siRNA target sequence for FAT (NM_005245.1,11720-11738).
gtctgacggaaaatgaaaa

SEQ ID NO: 143825 - DNA, 19 bp, Homo sapiens
  siRNA target sequence for FAT (NM_005245.1,11722-11740).
ctgacggaaaatgaaaaca

SEQ ID NO: 143826 - DNA, 19 bp, Homo sapiens
  siRNA target sequence for FAT (NM_005245.1,11759-11777).
ccatgaggctcagaacata

SEQ ID NO: 143827 - DNA, 19 bp, Homo sapiens
  siRNA target sequence for FAT (NM_005245.1,11760-11778).
catgaggctcagaacatat

SEQ ID NO: 143828 - DNA, 19 bp, Homo sapiens
  siRNA target sequence for FAT (NM_005245.1,11780-11798).
ccacgcatgcggttgtcat

SEQ ID NO: 143829 - DNA, 19 bp, Homo sapiens
  siRNA target sequence for FAT (NM_005245.1,11783-11801).
cgcatgcggttgtcatgta

SEQ ID NO: 143830 - DNA, 19 bp, Homo sapiens
  siRNA target sequence for FAT (NM_005245.1,11784-11802).
gcatgcggttgtcatgtat

SEQ ID NO: 143831 - DNA, 19 bp, Homo sapiens
  siRNA target sequence for FAT (NM_005245.1,11803-11821).
gctcgaggaactgactata

SEQ ID NO: 143832 - DNA, 19 bp, Homo sapiens
  siRNA target sequence for FAT (NM_005245.1,11806-11824).
cgaggaactgactatagca

SEQ ID NO: 143833 - DNA, 19 bp, Homo sapiens
  siRNA target sequence for FAT (NM_005245.1,11807-11825).
gaggaactgactatagcat

SEQ ID NO: 143834 - DNA, 19 bp, Homo sapiens
  siRNA target sequence for FAT (NM_005245.1,11822-11840).
gcatcttggagattcatca

SEQ ID NO: 143835 - DNA, 19 bp, Homo sapiens
  siRNA target sequence for FAT (NM_005245.1,11870-11888).
gaagtggccctggaattgt

SEQ ID NO: 143836 - DNA, 19 bp, Homo sapiens
  siRNA target sequence for FAT (NM_005245.1,11967-11985).
ggttctagaccaagttcat

SEQ ID NO: 143837 - DNA, 19 bp, Homo sapiens
  siRNA target sequence for FAT (NM_005245.1,11968-11986).
gttctagaccaagttcata

SEQ ID NO: 143838 - DNA, 19 bp, Homo sapiens
  siRNA target sequence for FAT (NM_005245.1,12020-12038).
ccctgaacctggataacta

SEQ ID NO: 143839 - DNA, 19 bp, Homo sapiens
  siRNA target sequence for FAT (NM_005245.1,12021-12039).
cctgaacctggataactat

SEQ ID NO: 143840 - DNA, 19 bp, Homo sapiens
  siRNA target sequence for FAT (NM_005245.1,12028-12046).
ctggataactatgtgtttt

SEQ ID NO: 143841 - DNA, 19 bp, Homo sapiens
  siRNA target sequence for FAT (NM_005245.1,12086-12104).
gaagtcctcaagttggtaa

SEQ ID NO: 143842 - DNA, 19 bp, Homo sapiens
  siRNA target sequence for FAT (NM_005245.1,12091-12109).
cctcaagttggtaatggtt

SEQ ID NO: 143843 - DNA, 19 bp, Homo sapiens
  siRNA target sequence for FAT (NM_005245.1,12092-12110).
ctcaagttggtaatggttt

SEQ ID NO: 143844 - DNA, 19 bp, Homo sapiens
  siRNA target sequence for FAT (NM_005245.1,12115-12133).
ggttgtatggactccattt

SEQ ID NO: 143845 - DNA, 19 bp, Homo sapiens
  siRNA target sequence for FAT (NM_005245.1,12116-12134).
gttgtatggactccattta

SEQ ID NO: 143846 - DNA, 19 bp, Homo sapiens
  siRNA target sequence for FAT (NM_005245.1,12190-12208).
gaagagtcggtggatgtat

SEQ ID NO: 143847 - DNA, 19 bp, Homo sapiens
  siRNA target sequence for FAT (NM_005245.1,12261-12279).
gaatggaggcgtttgcaat

SEQ ID NO: 143848 - DNA, 19 bp, Homo sapiens
  siRNA target sequence for FAT (NM_005245.1,12286-12304).
cctgctggaggttattact

SEQ ID NO: 143849 - DNA, 19 bp, Homo sapiens
  siRNA target sequence for FAT (NM_005245.1,12421-12439).
cagtgtagaggattatata

SEQ ID NO: 143850 - DNA, 19 bp, Homo sapiens
  siRNA target sequence for FAT (NM_005245.1,12423-12441).
gtgtagaggattatatact

SEQ ID NO: 143851 - DNA, 19 bp, Homo sapiens
  siRNA target sequence for FAT (NM_005245.1,12461-12479).
gtccatactgcaaagatga

SEQ ID NO: 143852 - DNA, 19 bp, Homo sapiens
  siRNA target sequence for FAT (NM_005245.1,12489-12507).
gaatggcggaacatgcttt

SEQ ID NO: 143853 - DNA, 19 bp, Homo sapiens
  siRNA target sequence for FAT (NM_005245.1,12493-12511).
ggcggaacatgctttgaca

SEQ ID NO: 143854 - DNA, 19 bp, Homo sapiens
  siRNA target sequence for FAT (NM_005245.1,12532-12550).
cagtgtgattcgggtttta

SEQ ID NO: 143855 - DNA, 19 bp, Homo sapiens
  siRNA target sequence for FAT (NM_005245.1,12560-12578).
ggtgtcagagtgatatcga

SEQ ID NO: 143856 - DNA, 19 bp, Homo sapiens
  siRNA target sequence for FAT (NM_005245.1,12686-12704).
ctgcgcccaaccagtatgt

SEQ ID NO: 143857 - DNA, 19 bp, Homo sapiens
  siRNA target sequence for FAT (NM_005245.1,12737-12755).
gaattggaatcgttgtgtt

SEQ ID NO: 143858 - DNA, 19 bp, Homo sapiens
  siRNA target sequence for FAT (NM_005245.1,12795-12813).
ctgccgtaagatgattagt

SEQ ID NO: 143859 - DNA, 19 bp, Homo sapiens
  siRNA target sequence for FAT (NM_005245.1,12829-12847).
caggctgaacctaaagaca

SEQ ID NO: 143860 - DNA, 19 bp, Homo sapiens
  siRNA target sequence for FAT (NM_005245.1,12857-12875).
gacccgctacggctttctt

SEQ ID NO: 143861 - DNA, 19 bp, Homo sapiens
  siRNA target sequence for FAT (NM_005245.1,12873-12891).
cttgcaaagaccgtatttt

SEQ ID NO: 143862 - DNA, 19 bp, Homo sapiens
  siRNA target sequence for FAT (NM_005245.1,12881-12899).
gaccgtattttgattccaa

SEQ ID NO: 143863 - DNA, 19 bp, Homo sapiens
  siRNA target sequence for FAT (NM_005245.1,12941-12959).
ctgtccggcctatttccta

SEQ ID NO: 143864 - DNA, 19 bp, Homo sapiens
  siRNA target sequence for FAT (NM_005245.1,12957-12975).
ctacaccccgagtattcca

SEQ ID NO: 143865 - DNA, 19 bp, Homo sapiens
  siRNA target sequence for FAT (NM_005245.1,12977-12995).
gtgactcaagaaacaatct

SEQ ID NO: 143866 - DNA, 19 bp, Homo sapiens
  siRNA target sequence for FAT (NM_005245.1,13068-13086).
gcacgggcaccgaaaagca

SEQ ID NO: 143867 - DNA, 19 bp, Homo sapiens
  siRNA target sequence for FAT (NM_005245.1,13169-13187).
ctagctgggactttgacta

SEQ ID NO: 143868 - DNA, 19 bp, Homo sapiens
  siRNA target sequence for FAT (NM_005245.1,13172-13190).
gctgggactttgactatga

SEQ ID NO: 143869 - DNA, 19 bp, Homo sapiens
  siRNA target sequence for FAT (NM_005245.1,13310-13328).
ccgaatcgtgcgatgacaa

SEQ ID NO: 143870 - DNA, 19 bp, Homo sapiens
  siRNA target sequence for FAT (NM_005245.1,13311-13329).
cgaatcgtgcgatgacaat

SEQ ID NO: 143871 - DNA, 19 bp, Homo sapiens
  siRNA target sequence for FAT (NM_005245.1,13321-13339).
gatgacaatgggtatcact

SEQ ID NO: 143872 - DNA, 19 bp, Homo sapiens
  siRNA target sequence for FAT (NM_005245.1,13330-13348).
gggtatcactgggatacat

SEQ ID NO: 143873 - DNA, 19 bp, Homo sapiens
  siRNA target sequence for FAT (NM_005245.1,13332-13350).
gtatcactgggatacatca

SEQ ID NO: 143874 - DNA, 19 bp, Homo sapiens
  siRNA target sequence for FAT (NM_005245.1,13340-13358).
gggatacatcagattggat

SEQ ID NO: 143875 - DNA, 19 bp, Homo sapiens
  siRNA target sequence for FAT (NM_005245.1,13438-13456).
gatccaaacgccatcgata

SEQ ID NO: 143876 - DNA, 19 bp, Homo sapiens
  siRNA target sequence for FAT (NM_005245.1,13447-13465).
gccatcgatacggactatt

SEQ ID NO: 143877 - DNA, 19 bp, Homo sapiens
  siRNA target sequence for FAT (NM_005245.1,13471-13489).
ggaggctacgacatcgaaa

SEQ ID NO: 143878 - DNA, 19 bp, Homo sapiens
  siRNA target sequence for FAT (NM_005245.1,13475-13493).
gctacgacatcgaaagtga

SEQ ID NO: 143879 - DNA, 19 bp, Homo sapiens
  siRNA target sequence for FAT (NM_005245.1,13476-13494).
ctacgacatcgaaagtgat

SEQ ID NO: 143880 - DNA, 19 bp, Homo sapiens
  siRNA target sequence for FAT (NM_005245.1,13550-13568).
ccgaattcagcaatcagtt

SEQ ID NO: 143881 - DNA, 19 bp, Homo sapiens
  siRNA target sequence for FAT (NM_005245.1,13633-13651).
cggcagaggttcaacttga

SEQ ID NO: 143882 - DNA, 19 bp, Homo sapiens
  siRNA target sequence for FAT (NM_005245.1,13635-13653).
gcagaggttcaacttgaat

SEQ ID NO: 143883 - DNA, 19 bp, Homo sapiens
  siRNA target sequence for FAT (NM_005245.1,13640-13658).
ggttcaacttgaatcagta

SEQ ID NO: 143884 - DNA, 19 bp, Homo sapiens
  siRNA target sequence for FAT (NM_005245.1,13641-13659).
gttcaacttgaatcagtat

SEQ ID NO: 143885 - DNA, 19 bp, Homo sapiens
  siRNA target sequence for FAT (NM_005245.1,13686-13704).
gtctgaacctcaaacaaaa

SEQ ID NO: 143886 - DNA, 19 bp, Homo sapiens
  siRNA target sequence for FAT (NM_005245.1,13707-13725).
cactggtgagaatagtact

SEQ ID NO: 143887 - DNA, 19 bp, Homo sapiens
  siRNA target sequence for FAT (NM_005245.1,13711-13729).
ggtgagaatagtacttgta

SEQ ID NO: 143888 - DNA, 19 bp, Homo sapiens
  siRNA target sequence for FAT (NM_005245.1,13716-13734).
gaatagtacttgtagagaa

SEQ ID NO: 143889 - DNA, 19 bp, Homo sapiens
  siRNA target sequence for FAT (NM_005245.1,13751-13769).
cgccagggtatcaaagaca

SEQ ID NO: 143890 - DNA, 19 bp, Homo sapiens
  siRNA target sequence for FAT (NM_005245.1,13866-13884).
ggtcatgatgagtgactat

SEQ ID NO: 143891 - DNA, 19 bp, Homo sapiens
  siRNA target sequence for FAT2 (NM_001447.1,218-236).
gtgaggtaccggatcatct

SEQ ID NO: 143892 - DNA, 19 bp, Homo sapiens
  siRNA target sequence for FAT2 (NM_001447.1,239-257).
ggggatgtggccaatgtat

SEQ ID NO: 143893 - DNA, 19 bp, Homo sapiens
  siRNA target sequence for FAT2 (NM_001447.1,241-259).
ggatgtggccaatgtattt

SEQ ID NO: 143894 - DNA, 19 bp, Homo sapiens
  siRNA target sequence for FAT2 (NM_001447.1,550-568).
gaatgctgagttctattat

SEQ ID NO: 143895 - DNA, 19 bp, Homo sapiens
  siRNA target sequence for FAT2 (NM_001447.1,686-704).
gaccgcatgcggaaaatct

SEQ ID NO: 143896 - DNA, 19 bp, Homo sapiens
  siRNA target sequence for FAT2 (NM_001447.1,688-706).
ccgcatgcggaaaatctct

SEQ ID NO: 143897 - DNA, 19 bp, Homo sapiens
  siRNA target sequence for FAT2 (NM_001447.1,834-852).
ctgtactggtcgatgcaaa

SEQ ID NO: 143898 - DNA, 19 bp, Homo sapiens
  siRNA target sequence for FAT2 (NM_001447.1,836-854).
gtactggtcgatgcaaata

SEQ ID NO: 143899 - DNA, 19 bp, Homo sapiens
  siRNA target sequence for FAT2 (NM_001447.1,839-857).
ctggtcgatgcaaatagct

SEQ ID NO: 143900 - DNA, 19 bp, Homo sapiens
  siRNA target sequence for FAT2 (NM_001447.1,908-926).
cacttcaaagccatcaagt

SEQ ID NO: 143901 - DNA, 19 bp, Homo sapiens
  siRNA target sequence for FAT2 (NM_001447.1,935-953).
cggagcaatgagttcagtt

SEQ ID NO: 143902 - DNA, 19 bp, Homo sapiens
  siRNA target sequence for FAT2 (NM_001447.1,949-967).
cagtttggtgtctgtcaaa

SEQ ID NO: 143903 - DNA, 19 bp, Homo sapiens
  siRNA target sequence for FAT2 (NM_001447.1,951-969).
gtttggtgtctgtcaaaga

SEQ ID NO: 143904 - DNA, 19 bp, Homo sapiens
  siRNA target sequence for FAT2 (NM_001447.1,1067-1085).
ctaccaccttccaaactgt

SEQ ID NO: 143905 - DNA, 19 bp, Homo sapiens
  siRNA target sequence for FAT2 (NM_001447.1,1183-1201).
ccccaacctgcagtatgtt

SEQ ID NO: 143906 - DNA, 19 bp, Homo sapiens
  siRNA target sequence for FAT2 (NM_001447.1,1185-1203).
ccaacctgcagtatgttct

SEQ ID NO: 143907 - DNA, 19 bp, Homo sapiens
  siRNA target sequence for FAT2 (NM_001447.1,1219-1237).
gaatgtaggatttaaactt

SEQ ID NO: 143908 - DNA, 19 bp, Homo sapiens
  siRNA target sequence for FAT2 (NM_001447.1,1241-1259).
gctcgaactgggttgatca

SEQ ID NO: 143909 - DNA, 19 bp, Homo sapiens
  siRNA target sequence for FAT2 (NM_001447.1,1293-1311).
cccactatcagctacacat

SEQ ID NO: 143910 - DNA, 19 bp, Homo sapiens
  siRNA target sequence for FAT2 (NM_001447.1,1484-1502).
ggatatgtcacctattcca

SEQ ID NO: 143911 - DNA, 19 bp, Homo sapiens
  siRNA target sequence for FAT2 (NM_001447.1,1485-1503).
gatatgtcacctattccat

SEQ ID NO: 143912 - DNA, 19 bp, Homo sapiens
  siRNA target sequence for FAT2 (NM_001447.1,1698-1716).
ctatgtttgaagaagtcaa

SEQ ID NO: 143913 - DNA, 19 bp, Homo sapiens
  siRNA target sequence for FAT2 (NM_001447.1,1743-1761).
ggccagtagggaaatcgat

SEQ ID NO: 143914 - DNA, 19 bp, Homo sapiens
  siRNA target sequence for FAT2 (NM_001447.1,1744-1762).
gccagtagggaaatcgata

SEQ ID NO: 143915 - DNA, 19 bp, Homo sapiens
  siRNA target sequence for FAT2 (NM_001447.1,1745-1763).
ccagtagggaaatcgataa

SEQ ID NO: 143916 - DNA, 19 bp, Homo sapiens
  siRNA target sequence for FAT2 (NM_001447.1,1746-1764).
cagtagggaaatcgataat

SEQ ID NO: 143917 - DNA, 19 bp, Homo sapiens
  siRNA target sequence for FAT2 (NM_001447.1,1748-1766).
gtagggaaatcgataatga

SEQ ID NO: 143918 - DNA, 19 bp, Homo sapiens
  siRNA target sequence for FAT2 (NM_001447.1,1751-1769).
gggaaatcgataatgacta

SEQ ID NO: 143919 - DNA, 19 bp, Homo sapiens
  siRNA target sequence for FAT2 (NM_001447.1,1752-1770).
ggaaatcgataatgactat

SEQ ID NO: 143920 - DNA, 19 bp, Homo sapiens
  siRNA target sequence for FAT2 (NM_001447.1,1765-1783).
gactatgtcagccatagat

SEQ ID NO: 143921 - DNA, 19 bp, Homo sapiens
  siRNA target sequence for FAT2 (NM_001447.1,1767-1785).
ctatgtcagccatagatgt

SEQ ID NO: 143922 - DNA, 19 bp, Homo sapiens
  siRNA target sequence for FAT2 (NM_001447.1,1801-1819).
cctaaaatacgagattgta

SEQ ID NO: 143923 - DNA, 19 bp, Homo sapiens
  siRNA target sequence for FAT2 (NM_001447.1,1802-1820).
ctaaaatacgagattgtat

SEQ ID NO: 143924 - DNA, 19 bp, Homo sapiens
  siRNA target sequence for FAT2 (NM_001447.1,1821-1839).
caggcaatgaactagagta

SEQ ID NO: 143925 - DNA, 19 bp, Homo sapiens
  siRNA target sequence for FAT2 (NM_001447.1,1853-1871).
catttctccggagtgatat

SEQ ID NO: 143926 - DNA, 19 bp, Homo sapiens
  siRNA target sequence for FAT2 (NM_001447.1,1872-1890).
ccctcaaacgcccttttat

SEQ ID NO: 143927 - DNA, 19 bp, Homo sapiens
  siRNA target sequence for FAT2 (NM_001447.1,1882-1900).
cccttttatcaatcttact

SEQ ID NO: 143928 - DNA, 19 bp, Homo sapiens
  siRNA target sequence for FAT2 (NM_001447.1,1960-1978).
ctcacccacaactttgaat

SEQ ID NO: 143929 - DNA, 19 bp, Homo sapiens
  siRNA target sequence for FAT2 (NM_001447.1,1964-1982).
cccacaactttgaatatta

SEQ ID NO: 143930 - DNA, 19 bp, Homo sapiens
  siRNA target sequence for FAT2 (NM_001447.1,1993-2011).
ggaccctcattttgaagtt

SEQ ID NO: 143931 - DNA, 19 bp, Homo sapiens
  siRNA target sequence for FAT2 (NM_001447.1,2009-2027).
gttcctgtaacatgtgata

SEQ ID NO: 143932 - DNA, 19 bp, Homo sapiens
  siRNA target sequence for FAT2 (NM_001447.1,2012-2030).
cctgtaacatgtgataaaa

SEQ ID NO: 143933 - DNA, 19 bp, Homo sapiens
  siRNA target sequence for FAT2 (NM_001447.1,2035-2053).
ggtattgacacaattcaca

SEQ ID NO: 143934 - DNA, 19 bp, Homo sapiens
  siRNA target sequence for FAT2 (NM_001447.1,2110-2128).
cacttctttaagcacatat

SEQ ID NO: 143935 - DNA, 19 bp, Homo sapiens
  siRNA target sequence for FAT2 (NM_001447.1,2115-2133).
ctttaagcacatatcagat

SEQ ID NO: 143936 - DNA, 19 bp, Homo sapiens
  siRNA target sequence for FAT2 (NM_001447.1,2124-2142).
catatcagattaatcatta

SEQ ID NO: 143937 - DNA, 19 bp, Homo sapiens
  siRNA target sequence for FAT2 (NM_001447.1,2255-2273).
ggcaaactggtctatgtga

SEQ ID NO: 143938 - DNA, 19 bp, Homo sapiens
  siRNA target sequence for FAT2 (NM_001447.1,2256-2274).
gcaaactggtctatgtgat

SEQ ID NO: 143939 - DNA, 19 bp, Homo sapiens
  siRNA target sequence for FAT2 (NM_001447.1,2374-2392).
cctcaatgtaacagtatat

SEQ ID NO: 143940 - DNA, 19 bp, Homo sapiens
  siRNA target sequence for FAT2 (NM_001447.1,2458-2476).
caacgcacccagatttcct

SEQ ID NO: 143941 - DNA, 19 bp, Homo sapiens
  siRNA target sequence for FAT2 (NM_001447.1,2477-2495).
cccggtgggtaccagttaa

SEQ ID NO: 143942 - DNA, 19 bp, Homo sapiens
  siRNA target sequence for FAT2 (NM_001447.1,2480-2498).
ggtgggtaccagttaacca

SEQ ID NO: 143943 - DNA, 19 bp, Homo sapiens
  siRNA target sequence for FAT2 (NM_001447.1,2481-2499).
gtgggtaccagttaaccat

SEQ ID NO: 143944 - DNA, 19 bp, Homo sapiens
  siRNA target sequence for FAT2 (NM_001447.1,2733-2751).
ctgtcactgacctgataat

SEQ ID NO: 143945 - DNA, 19 bp, Homo sapiens
  siRNA target sequence for FAT2 (NM_001447.1,2739-2757).
ctgacctgataatcacatt

SEQ ID NO: 143946 - DNA, 19 bp, Homo sapiens
  siRNA target sequence for FAT2 (NM_001447.1,2883-2901).
caggtgaagtgcgatatgt

SEQ ID NO: 143947 - DNA, 19 bp, Homo sapiens
  siRNA target sequence for FAT2 (NM_001447.1,2983-3001).
gaggcgagctgggtacaat

SEQ ID NO: 143948 - DNA, 19 bp, Homo sapiens
  siRNA target sequence for FAT2 (NM_001447.1,2985-3003).
ggcgagctgggtacaatct

SEQ ID NO: 143949 - DNA, 19 bp, Homo sapiens
  siRNA target sequence for FAT2 (NM_001447.1,3153-3171).
cgggaactcaggtgattgt

SEQ ID NO: 143950 - DNA, 19 bp, Homo sapiens
  siRNA target sequence for FAT2 (NM_001447.1,3154-3172).
gggaactcaggtgattgta

SEQ ID NO: 143951 - DNA, 19 bp, Homo sapiens
  siRNA target sequence for FAT2 (NM_001447.1,3266-3284).
gatacaggaatgattcaga

SEQ ID NO: 143952 - DNA, 19 bp, Homo sapiens
  siRNA target sequence for FAT2 (NM_001447.1,3291-3309).
cacccctggaccgagaatt

SEQ ID NO: 143953 - DNA, 19 bp, Homo sapiens
  siRNA target sequence for FAT2 (NM_001447.1,3295-3313).
cctggaccgagaatttgca

SEQ ID NO: 143954 - DNA, 19 bp, Homo sapiens
  siRNA target sequence for FAT2 (NM_001447.1,3296-3314).
ctggaccgagaatttgcat

SEQ ID NO: 143955 - DNA, 19 bp, Homo sapiens
  siRNA target sequence for FAT2 (NM_001447.1,3322-3340).
ctggttgacggtattagca

SEQ ID NO: 143956 - DNA, 19 bp, Homo sapiens
  siRNA target sequence for FAT2 (NM_001447.1,3369-3387).
ctgtaactgaagtctacat

SEQ ID NO: 143957 - DNA, 19 bp, Homo sapiens
  siRNA target sequence for FAT2 (NM_001447.1,3550-3568).
gaactacatgggattcttt

SEQ ID NO: 143958 - DNA, 19 bp, Homo sapiens
  siRNA target sequence for FAT2 (NM_001447.1,3581-3599).
gttacaggtctcctatcta

SEQ ID NO: 143959 - DNA, 19 bp, Homo sapiens
  siRNA target sequence for FAT2 (NM_001447.1,3705-3723).
gcatcttggacgtcaatga

SEQ ID NO: 143960 - DNA, 19 bp, Homo sapiens
  siRNA target sequence for FAT2 (NM_001447.1,3722-3740).
gacaatccacctatattct

SEQ ID NO: 143961 - DNA, 19 bp, Homo sapiens
  siRNA target sequence for FAT2 (NM_001447.1,3739-3757).
ctcccacaagctcttcaat

SEQ ID NO: 143962 - DNA, 19 bp, Homo sapiens
  siRNA target sequence for FAT2 (NM_001447.1,3741-3759).
cccacaagctcttcaatgt

SEQ ID NO: 143963 - DNA, 19 bp, Homo sapiens
  siRNA target sequence for FAT2 (NM_001447.1,3842-3860).
ggcagagtcacctacagta

SEQ ID NO: 143964 - DNA, 19 bp, Homo sapiens
  siRNA target sequence for FAT2 (NM_001447.1,3899-3917).
gtcacaggtgtggtttcat

SEQ ID NO: 143965 - DNA, 19 bp, Homo sapiens
  siRNA target sequence for FAT2 (NM_001447.1,3933-3951).
cagctggagagtacaacat

SEQ ID NO: 143966 - DNA, 19 bp, Homo sapiens
  siRNA target sequence for FAT2 (NM_001447.1,3938-3956).
ggagagtacaacatcctaa

SEQ ID NO: 143967 - DNA, 19 bp, Homo sapiens
  siRNA target sequence for FAT2 (NM_001447.1,4222-4240).
cattgccaggcctcttgat

SEQ ID NO: 143968 - DNA, 19 bp, Homo sapiens
  siRNA target sequence for FAT2 (NM_001447.1,4243-4261).
caggagaaggtcgaactat

SEQ ID NO: 143969 - DNA, 19 bp, Homo sapiens
  siRNA target sequence for FAT2 (NM_001447.1,4245-4263).
ggagaaggtcgaactataa

SEQ ID NO: 143970 - DNA, 19 bp, Homo sapiens
  siRNA target sequence for FAT2 (NM_001447.1,4248-4266).
gaaggtcgaactataactt

SEQ ID NO: 143971 - DNA, 19 bp, Homo sapiens
  siRNA target sequence for FAT2 (NM_001447.1,4318-4336).
cttcatgattgccaacatt

SEQ ID NO: 143972 - DNA, 19 bp, Homo sapiens
  siRNA target sequence for FAT2 (NM_001447.1,4417-4435).
gcgagtccaggccatagat

SEQ ID NO: 143973 - DNA, 19 bp, Homo sapiens
  siRNA target sequence for FAT2 (NM_001447.1,4419-4437).
gagtccaggccatagatca

SEQ ID NO: 143974 - DNA, 19 bp, Homo sapiens
  siRNA target sequence for FAT2 (NM_001447.1,4529-4547).
ctggtaacggtgggaaaat

SEQ ID NO: 143975 - DNA, 19 bp, Homo sapiens
  siRNA target sequence for FAT2 (NM_001447.1,4591-4609).
ggtccgagaccaggaaata

SEQ ID NO: 143976 - DNA, 19 bp, Homo sapiens
  siRNA target sequence for FAT2 (NM_001447.1,4594-4612).
ccgagaccaggaaatacct

SEQ ID NO: 143977 - DNA, 19 bp, Homo sapiens
  siRNA target sequence for FAT2 (NM_001447.1,4595-4613).
cgagaccaggaaataccta

SEQ ID NO: 143978 - DNA, 19 bp, Homo sapiens
  siRNA target sequence for FAT2 (NM_001447.1,4627-4645).
cgtgtgggtgaccattcat

SEQ ID NO: 143979 - DNA, 19 bp, Homo sapiens
  siRNA target sequence for FAT2 (NM_001447.1,4687-4705).
ccattatgaggcaagtgtt

SEQ ID NO: 143980 - DNA, 19 bp, Homo sapiens
  siRNA target sequence for FAT2 (NM_001447.1,4803-4821).
ggaacagcgaaggtttctt

SEQ ID NO: 143981 - DNA, 19 bp, Homo sapiens
  siRNA target sequence for FAT2 (NM_001447.1,4832-4850).
gccctgctaggcatcatta

SEQ ID NO: 143982 - DNA, 19 bp, Homo sapiens
  siRNA target sequence for FAT2 (NM_001447.1,4834-4852).
cctgctaggcatcattact

SEQ ID NO: 143983 - DNA, 19 bp, Homo sapiens
  siRNA target sequence for FAT2 (NM_001447.1,4837-4855).
gctaggcatcattactcta

SEQ ID NO: 143984 - DNA, 19 bp, Homo sapiens
  siRNA target sequence for FAT2 (NM_001447.1,4958-4976).
catgtctatccctcagata

SEQ ID NO: 143985 - DNA, 19 bp, Homo sapiens
  siRNA target sequence for FAT2 (NM_001447.1,4978-4996).
gagtgcccccatcttttca

SEQ ID NO: 143986 - DNA, 19 bp, Homo sapiens
  siRNA target sequence for FAT2 (NM_001447.1,4982-5000).
gcccccatcttttcaaaat

SEQ ID NO: 143987 - DNA, 19 bp, Homo sapiens
  siRNA target sequence for FAT2 (NM_001447.1,5012-5030).
gtagagatccctgaatcaa

SEQ ID NO: 143988 - DNA, 19 bp, Homo sapiens
  siRNA target sequence for FAT2 (NM_001447.1,5076-5094).
ctgaagttacctatgagtt

SEQ ID NO: 143989 - DNA, 19 bp, Homo sapiens
  siRNA target sequence for FAT2 (NM_001447.1,5122-5140).
ctctatgaactcatattct

SEQ ID NO: 143990 - DNA, 19 bp, Homo sapiens
  siRNA target sequence for FAT2 (NM_001447.1,5212-5230).
caatatggcaggtgcattt

SEQ ID NO: 143991 - DNA, 19 bp, Homo sapiens
  siRNA target sequence for FAT2 (NM_001447.1,5218-5236).
ggcaggtgcatttactgat

SEQ ID NO: 143992 - DNA, 19 bp, Homo sapiens
  siRNA target sequence for FAT2 (NM_001447.1,5223-5241).
gtgcatttactgatgtcat

SEQ ID NO: 143993 - DNA, 19 bp, Homo sapiens
  siRNA target sequence for FAT2 (NM_001447.1,5239-5257).
catggtggtggttgacata

SEQ ID NO: 143994 - DNA, 19 bp, Homo sapiens
  siRNA target sequence for FAT2 (NM_001447.1,5276-5294).
gctcctatgttcttaaagt

SEQ ID NO: 143995 - DNA, 19 bp, Homo sapiens
  siRNA target sequence for FAT2 (NM_001447.1,5279-5297).
cctatgttcttaaagtcaa

SEQ ID NO: 143996 - DNA, 19 bp, Homo sapiens
  siRNA target sequence for FAT2 (NM_001447.1,5327-5345).
ccactgtatagcatgatca

SEQ ID NO: 143997 - DNA, 19 bp, Homo sapiens
  siRNA target sequence for FAT2 (NM_001447.1,5328-5346).
cactgtatagcatgatcat

SEQ ID NO: 143998 - DNA, 19 bp, Homo sapiens
  siRNA target sequence for FAT2 (NM_001447.1,5337-5355).
gcatgatcatggataaaaa

SEQ ID NO: 143999 - DNA, 19 bp, Homo sapiens
  siRNA target sequence for FAT2 (NM_001447.1,5356-5374).
caacaacccctttgtgatt

SEQ ID NO: 144000 - DNA, 19 bp, Homo sapiens
  siRNA target sequence for FAT2 (NM_001447.1,5407-5425).
cttgttggtctataaaatt

SEQ ID NO: 144001 - DNA, 19 bp, Homo sapiens
  siRNA target sequence for FAT2 (NM_001447.1,5429-5447).
gagccggaggccttgaagt

SEQ ID NO: 144002 - DNA, 19 bp, Homo sapiens
  siRNA target sequence for FAT2 (NM_001447.1,5431-5449).
gccggaggccttgaagttt

SEQ ID NO: 144003 - DNA, 19 bp, Homo sapiens
  siRNA target sequence for FAT2 (NM_001447.1,5432-5450).
ccggaggccttgaagtttt

SEQ ID NO: 144004 - DNA, 19 bp, Homo sapiens
  siRNA target sequence for FAT2 (NM_001447.1,5467-5485).
catgggaaccctaaccatt

SEQ ID NO: 144005 - DNA, 19 bp, Homo sapiens
  siRNA target sequence for FAT2 (NM_001447.1,5470-5488).
gggaaccctaaccattgta

SEQ ID NO: 144006 - DNA, 19 bp, Homo sapiens
  siRNA target sequence for FAT2 (NM_001447.1,5471-5489).
ggaaccctaaccattgtat

SEQ ID NO: 144007 - DNA, 19 bp, Homo sapiens
  siRNA target sequence for FAT2 (NM_001447.1,5475-5493).
ccctaaccattgtatcaga

SEQ ID NO: 144008 - DNA, 19 bp, Homo sapiens
  siRNA target sequence for FAT2 (NM_001447.1,5597-5615).
gtcagagatgtgaatgatt

SEQ ID NO: 144009 - DNA, 19 bp, Homo sapiens
  siRNA target sequence for FAT2 (NM_001447.1,5625-5643).
gattctcagaacagatata

SEQ ID NO: 144010 - DNA, 19 bp, Homo sapiens
  siRNA target sequence for FAT2 (NM_001447.1,5638-5656).
gatatatgaggtagcaata

SEQ ID NO: 144011 - DNA, 19 bp, Homo sapiens
  siRNA target sequence for FAT2 (NM_001447.1,5722-5740).
caattatagcatcaaaact

SEQ ID NO: 144012 - DNA, 19 bp, Homo sapiens
  siRNA target sequence for FAT2 (NM_001447.1,5771-5789).
cctgtcactggtagcatat

SEQ ID NO: 144013 - DNA, 19 bp, Homo sapiens
  siRNA target sequence for FAT2 (NM_001447.1,5830-5848).
caccatcagggcttctgat

SEQ ID NO: 144014 - DNA, 19 bp, Homo sapiens
  siRNA target sequence for FAT2 (NM_001447.1,5839-5857).
ggcttctgatggcttgtat

SEQ ID NO: 144015 - DNA, 19 bp, Homo sapiens
  siRNA target sequence for FAT2 (NM_001447.1,5841-5859).
cttctgatggcttgtatca

SEQ ID NO: 144016 - DNA, 19 bp, Homo sapiens
  siRNA target sequence for FAT2 (NM_001447.1,5861-5879).
gacactgcgctggtaaaaa

SEQ ID NO: 144017 - DNA, 19 bp, Homo sapiens
  siRNA target sequence for FAT2 (NM_001447.1,5867-5885).
gcgctggtaaaaatttctt

SEQ ID NO: 144018 - DNA, 19 bp, Homo sapiens
  siRNA target sequence for FAT2 (NM_001447.1,5868-5886).
cgctggtaaaaatttcttt

SEQ ID NO: 144019 - DNA, 19 bp, Homo sapiens
  siRNA target sequence for FAT2 (NM_001447.1,5887-5905).
gacccaagtgcttgacaaa

SEQ ID NO: 144020 - DNA, 19 bp, Homo sapiens
  siRNA target sequence for FAT2 (NM_001447.1,5985-6003).
gtgcccagggcaatcattt

SEQ ID NO: 144021 - DNA, 19 bp, Homo sapiens
  siRNA target sequence for FAT2 (NM_001447.1,5993-6011).
ggcaatcatttgaatgaca

SEQ ID NO: 144022 - DNA, 19 bp, Homo sapiens
  siRNA target sequence for FAT2 (NM_001447.1,6189-6207).
ctattgaggatgtcaatga

SEQ ID NO: 144023 - DNA, 19 bp, Homo sapiens
  siRNA target sequence for FAT2 (NM_001447.1,6226-6244).
gcatctgccctattacaca

SEQ ID NO: 144024 - DNA, 19 bp, Homo sapiens
  siRNA target sequence for FAT2 (NM_001447.1,6230-6248).
ctgccctattacacaatca

SEQ ID NO: 144025 - DNA, 19 bp, Homo sapiens
  siRNA target sequence for FAT2 (NM_001447.1,6267-6285).
caggggatgtcctctttca

SEQ ID NO: 144026 - DNA, 19 bp, Homo sapiens
  siRNA target sequence for FAT2 (NM_001447.1,6321-6339).
gggctgttacatatgaatt

SEQ ID NO: 144027 - DNA, 19 bp, Homo sapiens
  siRNA target sequence for FAT2 (NM_001447.1,6361-6379).
ccgaattgacccctatctt

SEQ ID NO: 144028 - DNA, 19 bp, Homo sapiens
  siRNA target sequence for FAT2 (NM_001447.1,6371-6389).
ccctatcttggggacatat

SEQ ID NO: 144029 - DNA, 19 bp, Homo sapiens
  siRNA target sequence for FAT2 (NM_001447.1,6381-6399).
gggacatatcactcaagaa

SEQ ID NO: 144030 - DNA, 19 bp, Homo sapiens
  siRNA target sequence for FAT2 (NM_001447.1,6397-6415).
gaaaccctttgattatcaa

SEQ ID NO: 144031 - DNA, 19 bp, Homo sapiens
  siRNA target sequence for FAT2 (NM_001447.1,6477-6495).
gtgaggaagaggtacttgt

SEQ ID NO: 144032 - DNA, 19 bp, Homo sapiens
  siRNA target sequence for FAT2 (NM_001447.1,6557-6575).
gaaaatatcaccctctata

SEQ ID NO: 144033 - DNA, 19 bp, Homo sapiens
  siRNA target sequence for FAT2 (NM_001447.1,6611-6629).
ggactccggctcatctaca

SEQ ID NO: 144034 - DNA, 19 bp, Homo sapiens
  siRNA target sequence for FAT2 (NM_001447.1,6612-6630).
gactccggctcatctacaa

SEQ ID NO: 144035 - DNA, 19 bp, Homo sapiens
  siRNA target sequence for FAT2 (NM_001447.1,6696-6714).
cagggcctttggactatga

SEQ ID NO: 144036 - DNA, 19 bp, Homo sapiens
  siRNA target sequence for FAT2 (NM_001447.1,6717-6735).
ccaagaccaaacatgtgtt

SEQ ID NO: 144037 - DNA, 19 bp, Homo sapiens
  siRNA target sequence for FAT2 (NM_001447.1,6921-6939).
ggaaccgtgacgtctctta

SEQ ID NO: 144038 - DNA, 19 bp, Homo sapiens
  siRNA target sequence for FAT2 (NM_001447.1,6922-6940).
gaaccgtgacgtctcttat

SEQ ID NO: 144039 - DNA, 19 bp, Homo sapiens
  siRNA target sequence for FAT2 (NM_001447.1,6927-6945).
gtgacgtctcttatcagat

SEQ ID NO: 144040 - DNA, 19 bp, Homo sapiens
  siRNA target sequence for FAT2 (NM_001447.1,6949-6967).
ggaggatggctcagatgtt

SEQ ID NO: 144041 - DNA, 19 bp, Homo sapiens
  siRNA target sequence for FAT2 (NM_001447.1,6950-6968).
gaggatggctcagatgttt

SEQ ID NO: 144042 - DNA, 19 bp, Homo sapiens
  siRNA target sequence for FAT2 (NM_001447.1,7000-7018).
ggagatgtccacagttcaa

SEQ ID NO: 144043 - DNA, 19 bp, Homo sapiens
  siRNA target sequence for FAT2 (NM_001447.1,7109-7127).
gttgtcaatgtgtctgata

SEQ ID NO: 144044 - DNA, 19 bp, Homo sapiens
  siRNA target sequence for FAT2 (NM_001447.1,7194-7212).
gtggacacctggttcttaa

SEQ ID NO: 144045 - DNA, 19 bp, Homo sapiens
  siRNA target sequence for FAT2 (NM_001447.1,7197-7215).
gacacctggttcttaaagt

SEQ ID NO: 144046 - DNA, 19 bp, Homo sapiens
  siRNA target sequence for FAT2 (NM_001447.1,7252-7270).
cctggagtacctgattctt

SEQ ID NO: 144047 - DNA, 19 bp, Homo sapiens
  siRNA target sequence for FAT2 (NM_001447.1,7303-7321).
cagctcatcgggaataatt

SEQ ID NO: 144048 - DNA, 19 bp, Homo sapiens
  siRNA target sequence for FAT2 (NM_001447.1,7311-7329).
cgggaataatttctatgtt

SEQ ID NO: 144049 - DNA, 19 bp, Homo sapiens
  siRNA target sequence for FAT2 (NM_001447.1,7323-7341).
ctatgttcaacctttgcaa

SEQ ID NO: 144050 - DNA, 19 bp, Homo sapiens
  siRNA target sequence for FAT2 (NM_001447.1,7348-7366).
cctggactcttcttacaat

SEQ ID NO: 144051 - DNA, 19 bp, Homo sapiens
  siRNA target sequence for FAT2 (NM_001447.1,7409-7427).
cctgtgtacatcaacacta

SEQ ID NO: 144052 - DNA, 19 bp, Homo sapiens
  siRNA target sequence for FAT2 (NM_001447.1,7412-7430).
gtgtacatcaacactacaa

SEQ ID NO: 144053 - DNA, 19 bp, Homo sapiens
  siRNA target sequence for FAT2 (NM_001447.1,7414-7432).
gtacatcaacactacaaat

SEQ ID NO: 144054 - DNA, 19 bp, Homo sapiens
  siRNA target sequence for FAT2 (NM_001447.1,7506-7524).
ccaaggtgattgatttgct

SEQ ID NO: 144055 - DNA, 19 bp, Homo sapiens
  siRNA target sequence for FAT2 (NM_001447.1,7507-7525).
caaggtgattgatttgcta

SEQ ID NO: 144056 - DNA, 19 bp, Homo sapiens
  siRNA target sequence for FAT2 (NM_001447.1,7517-7535).
gatttgctagccatagaca

SEQ ID NO: 144057 - DNA, 19 bp, Homo sapiens
  siRNA target sequence for FAT2 (NM_001447.1,7522-7540).
gctagccatagacaaagat

SEQ ID NO: 144058 - DNA, 19 bp, Homo sapiens
  siRNA target sequence for FAT2 (NM_001447.1,7523-7541).
ctagccatagacaaagata

SEQ ID NO: 144059 - DNA, 19 bp, Homo sapiens
  siRNA target sequence for FAT2 (NM_001447.1,7547-7565).
ccctatggcactatagatt

SEQ ID NO: 144060 - DNA, 19 bp, Homo sapiens
  siRNA target sequence for FAT2 (NM_001447.1,7548-7566).
cctatggcactatagatta

SEQ ID NO: 144061 - DNA, 19 bp, Homo sapiens
  siRNA target sequence for FAT2 (NM_001447.1,7549-7567).
ctatggcactatagattat

SEQ ID NO: 144062 - DNA, 19 bp, Homo sapiens
  siRNA target sequence for FAT2 (NM_001447.1,7661-7679).
gagagagtcattgctatta

SEQ ID NO: 144063 - DNA, 19 bp, Homo sapiens
  siRNA target sequence for FAT2 (NM_001447.1,7729-7747).
gatcatcctcacagatgaa

SEQ ID NO: 144064 - DNA, 19 bp, Homo sapiens
  siRNA target sequence for FAT2 (NM_001447.1,7757-7775).
cccccacagttcaaagcat

SEQ ID NO: 144065 - DNA, 19 bp, Homo sapiens
  siRNA target sequence for FAT2 (NM_001447.1,7785-7803).
cagtatccattcaatccaa

SEQ ID NO: 144066 - DNA, 19 bp, Homo sapiens
  siRNA target sequence for FAT2 (NM_001447.1,7888-7906).
cccagaggacctagttaaa

SEQ ID NO: 144067 - DNA, 19 bp, Homo sapiens
  siRNA target sequence for FAT2 (NM_001447.1,7935-7953).
gtgtggtcaaggtgaaaga

SEQ ID NO: 144068 - DNA, 19 bp, Homo sapiens
  siRNA target sequence for FAT2 (NM_001447.1,7954-7972).
cagcctggtgggattggaa

SEQ ID NO: 144069 - DNA, 19 bp, Homo sapiens
  siRNA target sequence for FAT2 (NM_001447.1,7957-7975).
cctggtgggattggaaaat

SEQ ID NO: 144070 - DNA, 19 bp, Homo sapiens
  siRNA target sequence for FAT2 (NM_001447.1,8046-8064).
gacttcaggtggttcctaa

SEQ ID NO: 144071 - DNA, 19 bp, Homo sapiens
  siRNA target sequence for FAT2 (NM_001447.1,8053-8071).
ggtggttcctaaaaaagta

SEQ ID NO: 144072 - DNA, 19 bp, Homo sapiens
  siRNA target sequence for FAT2 (NM_001447.1,8090-8108).
gaacctttgtatactttct

SEQ ID NO: 144073 - DNA, 19 bp, Homo sapiens
  siRNA target sequence for FAT2 (NM_001447.1,8123-8141).
cttccagaggggtctgaaa

SEQ ID NO: 144074 - DNA, 19 bp, Homo sapiens
  siRNA target sequence for FAT2 (NM_001447.1,8134-8152).
gtctgaaattgggattgtt

SEQ ID NO: 144075 - DNA, 19 bp, Homo sapiens
  siRNA target sequence for FAT2 (NM_001447.1,8243-8261).
ccagacacaggggtcataa

SEQ ID NO: 144076 - DNA, 19 bp, Homo sapiens
  siRNA target sequence for FAT2 (NM_001447.1,8244-8262).
cagacacaggggtcataaa

SEQ ID NO: 144077 - DNA, 19 bp, Homo sapiens
  siRNA target sequence for FAT2 (NM_001447.1,8282-8300).
cacgaatccaccaaattgt

SEQ ID NO: 144078 - DNA, 19 bp, Homo sapiens
  siRNA target sequence for FAT2 (NM_001447.1,8292-8310).
ccaaattgtaccagattga

SEQ ID NO: 144079 - DNA, 19 bp, Homo sapiens
  siRNA target sequence for FAT2 (NM_001447.1,8349-8367).
ccttggtctctgtcaacat

SEQ ID NO: 144080 - DNA, 19 bp, Homo sapiens
  siRNA target sequence for FAT2 (NM_001447.1,8375-8393).
ggagacgtcaatgacaata

SEQ ID NO: 144081 - DNA, 19 bp, Homo sapiens
  siRNA target sequence for FAT2 (NM_001447.1,8616-8634).
gccagacttatcattttca

SEQ ID NO: 144082 - DNA, 19 bp, Homo sapiens
  siRNA target sequence for FAT2 (NM_001447.1,8684-8702).
ctggttcaggtctccatta

SEQ ID NO: 144083 - DNA, 19 bp, Homo sapiens
  siRNA target sequence for FAT2 (NM_001447.1,8716-8734).
caatgctccccgatttgct

SEQ ID NO: 144084 - DNA, 19 bp, Homo sapiens
  siRNA target sequence for FAT2 (NM_001447.1,8727-8745).
gatttgcttctgaagagta

SEQ ID NO: 144085 - DNA, 19 bp, Homo sapiens
  siRNA target sequence for FAT2 (NM_001447.1,8780-8798).
gaactggtggcgactctaa

SEQ ID NO: 144086 - DNA, 19 bp, Homo sapiens
  siRNA target sequence for FAT2 (NM_001447.1,8936-8954).
gagcatacagccaagtact

SEQ ID NO: 144087 - DNA, 19 bp, Homo sapiens
  siRNA target sequence for FAT2 (NM_001447.1,9043-9061).
gtgttcacagcttctctat

SEQ ID NO: 144088 - DNA, 19 bp, Homo sapiens
  siRNA target sequence for FAT2 (NM_001447.1,9144-9162).
ctcagatcacatattctct

SEQ ID NO: 144089 - DNA, 19 bp, Homo sapiens
  siRNA target sequence for FAT2 (NM_001447.1,9402-9420).
cccctgtggctgtagtatt

SEQ ID NO: 144090 - DNA, 19 bp, Homo sapiens
  siRNA target sequence for FAT2 (NM_001447.1,9480-9498).
ccgaaggccacttttccat

SEQ ID NO: 144091 - DNA, 19 bp, Homo sapiens
  siRNA target sequence for FAT2 (NM_001447.1,9633-9651).
cggtggtgggcctagaaga

SEQ ID NO: 144092 - DNA, 19 bp, Homo sapiens
  siRNA target sequence for FAT2 (NM_001447.1,9857-9875).
gagacaagccccaagtact

SEQ ID NO: 144093 - DNA, 19 bp, Homo sapiens
  siRNA target sequence for FAT2 (NM_001447.1,9993-10011).
gcacaagggtcttagagaa

SEQ ID NO: 144094 - DNA, 19 bp, Homo sapiens
  siRNA target sequence for FAT2 (NM_001447.1,10039-10057).
ggtatcagcgactgatgaa

SEQ ID NO: 144095 - DNA, 19 bp, Homo sapiens
  siRNA target sequence for FAT2 (NM_001447.1,10064-10082).
cccctaaatagtgacatta

SEQ ID NO: 144096 - DNA, 19 bp, Homo sapiens
  siRNA target sequence for FAT2 (NM_001447.1,10170-10188).
gggaacaggcctctagtta

SEQ ID NO: 144097 - DNA, 19 bp, Homo sapiens
  siRNA target sequence for FAT2 (NM_001447.1,10171-10189).
ggaacaggcctctagttat

SEQ ID NO: 144098 - DNA, 19 bp, Homo sapiens
  siRNA target sequence for FAT2 (NM_001447.1,10172-10190).
gaacaggcctctagttatt

SEQ ID NO: 144099 - DNA, 19 bp, Homo sapiens
  siRNA target sequence for FAT2 (NM_001447.1,10240-10258).
cacagacatcgctatccaa

SEQ ID NO: 144100 - DNA, 19 bp, Homo sapiens
  siRNA target sequence for FAT2 (NM_001447.1,10274-10292).
gataacccaccgagattct

SEQ ID NO: 144101 - DNA, 19 bp, Homo sapiens
  siRNA target sequence for FAT2 (NM_001447.1,10485-10503).
ggagggctcaggaatggta

SEQ ID NO: 144102 - DNA, 19 bp, Homo sapiens
  siRNA target sequence for FAT2 (NM_001447.1,10605-10623).
ctctcccactggagatctt

SEQ ID NO: 144103 - DNA, 19 bp, Homo sapiens
  siRNA target sequence for FAT2 (NM_001447.1,10653-10671).
gtggcatggtgggtaagat

SEQ ID NO: 144104 - DNA, 19 bp, Homo sapiens
  siRNA target sequence for FAT2 (NM_001447.1,10757-10775).
gcgcctgatggcaagatta

SEQ ID NO: 144105 - DNA, 19 bp, Homo sapiens
  siRNA target sequence for FAT2 (NM_001447.1,10758-10776).
cgcctgatggcaagattat

SEQ ID NO: 144106 - DNA, 19 bp, Homo sapiens
  siRNA target sequence for FAT2 (NM_001447.1,10980-10998).
gccataagctggacatcaa

SEQ ID NO: 144107 - DNA, 19 bp, Homo sapiens
  siRNA target sequence for FAT2 (NM_001447.1,10981-10999).
ccataagctggacatcaaa

SEQ ID NO: 144108 - DNA, 19 bp, Homo sapiens
  siRNA target sequence for FAT2 (NM_001447.1,10993-11011).
catcaaacgggctaacatt

SEQ ID NO: 144109 - DNA, 19 bp, Homo sapiens
  siRNA target sequence for FAT2 (NM_001447.1,11085-11103).
gaaccttctacgagtttca

SEQ ID NO: 144110 - DNA, 19 bp, Homo sapiens
  siRNA target sequence for FAT2 (NM_001447.1,11105-11123).
gagctagcatccatcatca

SEQ ID NO: 144111 - DNA, 19 bp, Homo sapiens
  siRNA target sequence for FAT2 (NM_001447.1,11213-11231).
ggtcaaatctgccataaca

SEQ ID NO: 144112 - DNA, 19 bp, Homo sapiens
  siRNA target sequence for FAT2 (NM_001447.1,11387-11405).
cggaactggcacatccatt

SEQ ID NO: 144113 - DNA, 19 bp, Homo sapiens
  siRNA target sequence for FAT2 (NM_001447.1,11392-11410).
ctggcacatccatttctat

SEQ ID NO: 144114 - DNA, 19 bp, Homo sapiens
  siRNA target sequence for FAT2 (NM_001447.1,11394-11412).
ggcacatccatttctatct

SEQ ID NO: 144115 - DNA, 19 bp, Homo sapiens
  siRNA target sequence for FAT2 (NM_001447.1,11401-11419).
ccatttctatctgaaaaca

SEQ ID NO: 144116 - DNA, 19 bp, Homo sapiens
  siRNA target sequence for FAT2 (NM_001447.1,11438-11456).
cttctattcaccaatgaaa

SEQ ID NO: 144117 - DNA, 19 bp, Homo sapiens
  siRNA target sequence for FAT2 (NM_001447.1,11509-11527).
ctgtctgggtggtttctat

SEQ ID NO: 144118 - DNA, 19 bp, Homo sapiens
  siRNA target sequence for FAT2 (NM_001447.1,11539-11557).
ctcccagcgccatgtgaat

SEQ ID NO: 144119 - DNA, 19 bp, Homo sapiens
  siRNA target sequence for FAT2 (NM_001447.1,11696-11714).
ggcctcattctgttgcatt

SEQ ID NO: 144120 - DNA, 19 bp, Homo sapiens
  siRNA target sequence for FAT2 (NM_001447.1,11711-11729).
cattcttcctcgaatgtct

SEQ ID NO: 144121 - DNA, 19 bp, Homo sapiens
  siRNA target sequence for FAT2 (NM_001447.1,11767-11785).
caacgaagaggctctagat

SEQ ID NO: 144122 - DNA, 19 bp, Homo sapiens
  siRNA target sequence for FAT2 (NM_001447.1,11915-11933).
gcaggctatgtctgcaaat

SEQ ID NO: 144123 - DNA, 19 bp, Homo sapiens
  siRNA target sequence for FAT2 (NM_001447.1,11969-11987).
ggaagggagaactgtactt

SEQ ID NO: 144124 - DNA, 19 bp, Homo sapiens
  siRNA target sequence for FAT2 (NM_001447.1,12063-12081).
caggagacaggtgtgaaat

SEQ ID NO: 144125 - DNA, 19 bp, Homo sapiens
  siRNA target sequence for FAT2 (NM_001447.1,12082-12100).
ggaggcgaggggttgttca

SEQ ID NO: 144126 - DNA, 19 bp, Homo sapiens
  siRNA target sequence for FAT2 (NM_001447.1,12085-12103).
ggcgaggggttgttcagaa

SEQ ID NO: 144127 - DNA, 19 bp, Homo sapiens
  siRNA target sequence for FAT2 (NM_001447.1,12116-12134).
gtcactcccgagatccaaa

SEQ ID NO: 144128 - DNA, 19 bp, Homo sapiens
  siRNA target sequence for FAT2 (NM_001447.1,12144-12162).
gggggcagcaggagttact

SEQ ID NO: 144129 - DNA, 19 bp, Homo sapiens
  siRNA target sequence for FAT2 (NM_001447.1,12147-12165).
ggcagcaggagttactgat

SEQ ID NO: 144130 - DNA, 19 bp, Homo sapiens
  siRNA target sequence for FAT2 (NM_001447.1,12152-12170).
caggagttactgatcatca

SEQ ID NO: 144131 - DNA, 19 bp, Homo sapiens
  siRNA target sequence for FAT2 (NM_001447.1,12177-12195).
ccgtggcgttcattatcat

SEQ ID NO: 144132 - DNA, 19 bp, Homo sapiens
  siRNA target sequence for FAT2 (NM_001447.1,12178-12196).
cgtggcgttcattatcata

SEQ ID NO: 144133 - DNA, 19 bp, Homo sapiens
  siRNA target sequence for FAT2 (NM_001447.1,12179-12197).
gtggcgttcattatcataa

SEQ ID NO: 144134 - DNA, 19 bp, Homo sapiens
  siRNA target sequence for FAT2 (NM_001447.1,12485-12503).
gacaatgagcctgtcatta

SEQ ID NO: 144135 - DNA, 19 bp, Homo sapiens
  siRNA target sequence for FAT2 (NM_001447.1,12491-12509).
gagcctgtcattaagagaa

SEQ ID NO: 144136 - DNA, 19 bp, Homo sapiens
  siRNA target sequence for FAT2 (NM_001447.1,12807-12825).
ccccctgtctcaatgagta

SEQ ID NO: 144137 - DNA, 19 bp, Homo sapiens
  siRNA target sequence for FAT2 (NM_001447.1,13018-13036).
catggtggagagtgattat

SEQ ID NO: 144138 - DNA, 19 bp, Homo sapiens
  siRNA target sequence for FBLN1 (NM_001996.2,272-290).
ggatggccactcatcagaa

SEQ ID NO: 144139 - DNA, 19 bp, Homo sapiens
  siRNA target sequence for FBLN1 (NM_001996.2,305-323).
catatgctacggaatccaa

SEQ ID NO: 144140 - DNA, 19 bp, Homo sapiens
  siRNA target sequence for FBLN1 (NM_001996.2,310-328).
gctacggaatccaaagaat

SEQ ID NO: 144141 - DNA, 19 bp, Homo sapiens
  siRNA target sequence for FBLN1 (NM_001996.2,444-462).
cagcctggaggccacattt

SEQ ID NO: 144142 - DNA, 19 bp, Homo sapiens
  siRNA target sequence for FBLN1 (NM_001996.2,591-609).
ggagaccggagatttggat

SEQ ID NO: 144143 - DNA, 19 bp, Homo sapiens
  siRNA target sequence for FBLN1 (NM_001996.2,619-637).
ctccaagaaacggataaga

SEQ ID NO: 144144 - DNA, 19 bp, Homo sapiens
  siRNA target sequence for FBLN1 (NM_001996.2,835-853).
ggagaatcctgcatcaaca

SEQ ID NO: 144145 - DNA, 19 bp, Homo sapiens
  siRNA target sequence for FBLN1 (NM_001996.2,939-957).
cgagtgtgagagtggtatt

SEQ ID NO: 144146 - DNA, 19 bp, Homo sapiens
  siRNA target sequence for FBLN1 (NM_001996.2,942-960).
gtgtgagagtggtattcat

SEQ ID NO: 144147 - DNA, 19 bp, Homo sapiens
  siRNA target sequence for FBLN1 (NM_001996.2,946-964).
gagagtggtattcataact

SEQ ID NO: 144148 - DNA, 19 bp, Homo sapiens
  siRNA target sequence for FBLN1 (NM_001996.2,966-984).
cctccccgattttatctgt

SEQ ID NO: 144149 - DNA, 19 bp, Homo sapiens
  siRNA target sequence for FBLN1 (NM_001996.2,972-990).
cgattttatctgtcagaat

SEQ ID NO: 144150 - DNA, 19 bp, Homo sapiens
  siRNA target sequence for FBLN1 (NM_001996.2,1054-1072).
ctaggcaactgtattgata

SEQ ID NO: 144151 - DNA, 19 bp, Homo sapiens
  siRNA target sequence for FBLN1 (NM_001996.2,1111-1129).
gggcatacatgcatcaaca

SEQ ID NO: 144152 - DNA, 19 bp, Homo sapiens
  siRNA target sequence for FBLN1 (NM_001996.2,1283-1301).
gtttccgctgcgaatgcaa

SEQ ID NO: 144153 - DNA, 19 bp, Homo sapiens
  siRNA target sequence for FBLN1 (NM_001996.2,1449-1467).
ggatggcaggtcatgtgaa

SEQ ID NO: 144154 - DNA, 19 bp, Homo sapiens
  siRNA target sequence for FBLN1 (NM_001996.2,1574-1592).
gagtcacctgtgaagacat

SEQ ID NO: 144155 - DNA, 19 bp, Homo sapiens
  siRNA target sequence for FBLN1 (NM_001996.2,1631-1649).
cctaccgctgcatcaacat

SEQ ID NO: 144156 - DNA, 19 bp, Homo sapiens
  siRNA target sequence for FBLN1 (NM_001996.2,1706-1724).
gccgcaactgccaagacat

SEQ ID NO: 144157 - DNA, 19 bp, Homo sapiens
  siRNA target sequence for FBLN1 (NM_001996.2,1707-1725).
ccgcaactgccaagacatt

SEQ ID NO: 144158 - DNA, 19 bp, Homo sapiens
  siRNA target sequence for FBLN1 (NM_001996.2,1856-1874).
gcttgccttgccatgagaa

SEQ ID NO: 144159 - DNA, 19 bp, Homo sapiens
  siRNA target sequence for FBLN1 (NM_006485.2,1872-1890).
caccccagcgggatcaagt

SEQ ID NO: 144160 - DNA, 19 bp, Homo sapiens
  siRNA target sequence for FBLN1 (NM_006485.2,1874-1892).
ccccagcgggatcaagtaa

SEQ ID NO: 144161 - DNA, 19 bp, Homo sapiens
  siRNA target sequence for FBLN1 (NM_006485.2,1875-1893).
cccagcgggatcaagtaaa

SEQ ID NO: 144162 - DNA, 19 bp, Homo sapiens
  siRNA target sequence for FBLN1 (NM_006486.2,2063-2081).
ggaacctgcgggactcttt

SEQ ID NO: 144163 - DNA, 19 bp, Homo sapiens
  siRNA target sequence for FBLN1 (NM_006486.2,2064-2082).
gaacctgcgggactctttt

SEQ ID NO: 144164 - DNA, 19 bp, Homo sapiens
  siRNA target sequence for FBLN1 (NM_006486.2,2068-2086).
ctgcgggactcttttgaca

SEQ ID NO: 144165 - DNA, 19 bp, Homo sapiens
  siRNA target sequence for FBLN2 (NM_001998.1,263-281).
gcgagggctaccagtacta

SEQ ID NO: 144166 - DNA, 19 bp, Homo sapiens
  siRNA target sequence for FBLN2 (NM_001998.1,264-282).
cgagggctaccagtactat

SEQ ID NO: 144167 - DNA, 19 bp, Homo sapiens
  siRNA target sequence for FBLN2 (NM_001998.1,268-286).
ggctaccagtactatgact

SEQ ID NO: 144168 - DNA, 19 bp, Homo sapiens
  siRNA target sequence for FBLN2 (NM_001998.1,1007-1025).
ctggacccagtcttcctat

SEQ ID NO: 144169 - DNA, 19 bp, Homo sapiens
  siRNA target sequence for FBLN2 (NM_001998.1,1286-1304).
ccaggaagccgcaagttct

SEQ ID NO: 144170 - DNA, 19 bp, Homo sapiens
  siRNA target sequence for FBLN2 (NM_001998.1,1336-1354).
cccaactctgtccattcta

SEQ ID NO: 144171 - DNA, 19 bp, Homo sapiens
  siRNA target sequence for FBLN2 (NM_001998.1,1337-1355).
ccaactctgtccattctat

SEQ ID NO: 144172 - DNA, 19 bp, Homo sapiens
  siRNA target sequence for FBLN2 (NM_001998.1,1417-1435).
cagcagtgggccattgaca

SEQ ID NO: 144173 - DNA, 19 bp, Homo sapiens
  siRNA target sequence for FBLN2 (NM_001998.1,1670-1688).
cgtgtgagtccaatcctaa

SEQ ID NO: 144174 - DNA, 19 bp, Homo sapiens
  siRNA target sequence for FBLN2 (NM_001998.1,1694-1712).
gctatccctgcaatcatgt

SEQ ID NO: 144175 - DNA, 19 bp, Homo sapiens
  siRNA target sequence for FBLN2 (NM_001998.1,1733-1751).
gtgaagagcctctcatagt

SEQ ID NO: 144176 - DNA, 19 bp, Homo sapiens
  siRNA target sequence for FBLN2 (NM_001998.1,1783-1801).
gctgcaccacggagagttt

SEQ ID NO: 144177 - DNA, 19 bp, Homo sapiens
  siRNA target sequence for FBLN2 (NM_001998.1,1787-1805).
caccacggagagtttcaga

SEQ ID NO: 144178 - DNA, 19 bp, Homo sapiens
  siRNA target sequence for FBLN2 (NM_001998.1,1920-1938).
gcacctttgcatcaatact

SEQ ID NO: 144179 - DNA, 19 bp, Homo sapiens
  siRNA target sequence for FBLN2 (NM_001998.1,2109-2127).
caatacctgcaaagacaat

SEQ ID NO: 144180 - DNA, 19 bp, Homo sapiens
  siRNA target sequence for FBLN2 (NM_001998.1,2210-2228).
gcgtgtcctgtgaagacat

SEQ ID NO: 144181 - DNA, 19 bp, Homo sapiens
  siRNA target sequence for FBLN2 (NM_001998.1,2486-2504).
gcaactgtgtggacatcaa

SEQ ID NO: 144182 - DNA, 19 bp, Homo sapiens
  siRNA target sequence for FBLN2 (NM_001998.1,2762-2780).
gctgcatcgacgtgaatga

SEQ ID NO: 144183 - DNA, 19 bp, Homo sapiens
  siRNA target sequence for FBLN2 (NM_001998.1,3231-3249).
cgagtgtcctcccaactat

SEQ ID NO: 144184 - DNA, 19 bp, Homo sapiens
  siRNA target sequence for FBLN2 (NM_001998.1,3250-3268).
gtccaagtctccaaaacga

SEQ ID NO: 144185 - DNA, 19 bp, Homo sapiens
  siRNA target sequence for FBLN2 (NM_001998.1,3329-3347).
cgcactaccagctcaactt

SEQ ID NO: 144186 - DNA, 19 bp, Homo sapiens
  siRNA target sequence for FBLN2 (NM_001998.1,3416-3434).
ccatcgccctgaacatcat

SEQ ID NO: 144187 - DNA, 19 bp, Homo sapiens
  siRNA target sequence for FBLN5 (NM_006329.2,617-635).
cctgccgaggagacatgat

SEQ ID NO: 144188 - DNA, 19 bp, Homo sapiens
  siRNA target sequence for FBLN5 (NM_006329.2,625-643).
ggagacatgatgtgtgtta

SEQ ID NO: 144189 - DNA, 19 bp, Homo sapiens
  siRNA target sequence for FBLN5 (NM_006329.2,645-663).
ccaaaatggcgggtattta

SEQ ID NO: 144190 - DNA, 19 bp, Homo sapiens
  siRNA target sequence for FBLN5 (NM_006329.2,646-664).
caaaatggcgggtatttat

SEQ ID NO: 144191 - DNA, 19 bp, Homo sapiens
  siRNA target sequence for FBLN5 (NM_006329.2,672-690).
ccggacaaaccctgtgtat

SEQ ID NO: 144192 - DNA, 19 bp, Homo sapiens
  siRNA target sequence for FBLN5 (NM_006329.2,755-773).
cactctcagctccaaacta

SEQ ID NO: 144193 - DNA, 19 bp, Homo sapiens
  siRNA target sequence for FBLN5 (NM_006329.2,779-797).
cgatctccaggcctcttat

SEQ ID NO: 144194 - DNA, 19 bp, Homo sapiens
  siRNA target sequence for FBLN5 (NM_006329.2,793-811).
cttatatgccgctttggat

SEQ ID NO: 144195 - DNA, 19 bp, Homo sapiens
  siRNA target sequence for FBLN5 (NM_006329.2,846-864).
ggacgagtgtgcaacagat

SEQ ID NO: 144196 - DNA, 19 bp, Homo sapiens
  siRNA target sequence for FBLN5 (NM_006329.2,847-865).
gacgagtgtgcaacagatt

SEQ ID NO: 144197 - DNA, 19 bp, Homo sapiens
  siRNA target sequence for FBLN5 (NM_006329.2,882-900).
cacccagatctgcatcaat

SEQ ID NO: 144198 - DNA, 19 bp, Homo sapiens
  siRNA target sequence for FBLN5 (NM_006329.2,888-906).
gatctgcatcaatactgaa

SEQ ID NO: 144199 - DNA, 19 bp, Homo sapiens
  siRNA target sequence for FBLN5 (NM_006329.2,949-967).
gaaggccagtgcttagaca

SEQ ID NO: 144200 - DNA, 19 bp, Homo sapiens
  siRNA target sequence for FBLN5 (NM_006329.2,953-971).
gccagtgcttagacattga

SEQ ID NO: 144201 - DNA, 19 bp, Homo sapiens
  siRNA target sequence for FBLN5 (NM_006329.2,954-972).
ccagtgcttagacattgat

SEQ ID NO: 144202 - DNA, 19 bp, Homo sapiens
  siRNA target sequence for FBLN5 (NM_006329.2,970-988).
gatgaatgtcgctatggtt

SEQ ID NO: 144203 - DNA, 19 bp, Homo sapiens
  siRNA target sequence for FBLN5 (NM_006329.2,1008-1026).
gaatgttcctggatcctat

SEQ ID NO: 144204 - DNA, 19 bp, Homo sapiens
  siRNA target sequence for FBLN5 (NM_006329.2,1012-1030).
gttcctggatcctattctt

SEQ ID NO: 144205 - DNA, 19 bp, Homo sapiens
  siRNA target sequence for FBLN5 (NM_006329.2,1018-1036).
ggatcctattcttgtacat

SEQ ID NO: 144206 - DNA, 19 bp, Homo sapiens
  siRNA target sequence for FBLN5 (NM_006329.2,1177-1195).
gaggaagatggcgttcatt

SEQ ID NO: 144207 - DNA, 19 bp, Homo sapiens
  siRNA target sequence for FBLN5 (NM_006329.2,1186-1204).
ggcgttcattgcagtgata

SEQ ID NO: 144208 - DNA, 19 bp, Homo sapiens
  siRNA target sequence for FBLN5 (NM_006329.2,1187-1205).
gcgttcattgcagtgatat

SEQ ID NO: 144209 - DNA, 19 bp, Homo sapiens
  siRNA target sequence for FBLN5 (NM_006329.2,1368-1386).
gcagacgtgctacaattta

SEQ ID NO: 144210 - DNA, 19 bp, Homo sapiens
  siRNA target sequence for FBLN5 (NM_006329.2,1371-1389).
gacgtgctacaatttacaa

SEQ ID NO: 144211 - DNA, 19 bp, Homo sapiens
  siRNA target sequence for FBLN5 (NM_006329.2,1387-1405).
caagggggcttcaaatgca

SEQ ID NO: 144212 - DNA, 19 bp, Homo sapiens
  siRNA target sequence for FBLN5 (NM_006329.2,1550-1568).
ctgacatcttccaaatgca

SEQ ID NO: 144213 - DNA, 19 bp, Homo sapiens
  siRNA target sequence for FBLN5 (NM_006329.2,1580-1598).
gctaccctggggcctatta

SEQ ID NO: 144214 - DNA, 19 bp, Homo sapiens
  siRNA target sequence for FBLN5 (NM_006329.2,1584-1602).
ccctggggcctattacatt

SEQ ID NO: 144215 - DNA, 19 bp, Homo sapiens
  siRNA target sequence for FBLN5 (NM_006329.2,1585-1603).
cctggggcctattacattt

SEQ ID NO: 144216 - DNA, 19 bp, Homo sapiens
  siRNA target sequence for FBLN5 (NM_006329.2,1586-1604).
ctggggcctattacatttt

SEQ ID NO: 144217 - DNA, 19 bp, Homo sapiens
  siRNA target sequence for FBLN5 (NM_006329.2,1589-1607).
gggcctattacattttcca

SEQ ID NO: 144218 - DNA, 19 bp, Homo sapiens
  siRNA target sequence for FBLN5 (NM_006329.2,1599-1617).
cattttccagatcaaatct

SEQ ID NO: 144219 - DNA, 19 bp, Homo sapiens
  siRNA target sequence for FBLN5 (NM_006329.2,1624-1642).
gagggcagagaattttaca

SEQ ID NO: 144220 - DNA, 19 bp, Homo sapiens
  siRNA target sequence for FBLN5 (NM_006329.2,1735-1753).
gtcaacactgtcatcaact

SEQ ID NO: 144221 - DNA, 19 bp, Homo sapiens
  siRNA target sequence for FBLN5 (NM_006329.2,1770-1788).
gatccgactgcggatatat

SEQ ID NO: 144222 - DNA, 19 bp, Homo sapiens
  siRNA target sequence for FBLN5 (NM_006329.2,1774-1792).
cgactgcggatatatgtgt

SEQ ID NO: 144223 - DNA, 19 bp, Homo sapiens
  siRNA target sequence for FBN1 (NM_000138.2,166-184).
gggatttaccgtgctttta

SEQ ID NO: 144224 - DNA, 19 bp, Homo sapiens
  siRNA target sequence for FBN1 (NM_000138.2,305-323).
gtctgtggatcacgttata

SEQ ID NO: 144225 - DNA, 19 bp, Homo sapiens
  siRNA target sequence for FBN1 (NM_000138.2,311-329).
ggatcacgttataatgctt

SEQ ID NO: 144226 - DNA, 19 bp, Homo sapiens
  siRNA target sequence for FBN1 (NM_000138.2,312-330).
gatcacgttataatgctta

SEQ ID NO: 144227 - DNA, 19 bp, Homo sapiens
  siRNA target sequence for FBN1 (NM_000138.2,351-369).
ccttacctggcggaaatca

SEQ ID NO: 144228 - DNA, 19 bp, Homo sapiens
  siRNA target sequence for FBN1 (NM_000138.2,357-375).
ctggcggaaatcagtgtat

SEQ ID NO: 144229 - DNA, 19 bp, Homo sapiens
  siRNA target sequence for FBN1 (NM_000138.2,360-378).
gcggaaatcagtgtattgt

SEQ ID NO: 144230 - DNA, 19 bp, Homo sapiens
  siRNA target sequence for FBN1 (NM_000138.2,468-486).
gctccagatccatacaaca

SEQ ID NO: 144231 - DNA, 19 bp, Homo sapiens
  siRNA target sequence for FBN1 (NM_000138.2,477-495).
ccatacaacactgcaatat

SEQ ID NO: 144232 - DNA, 19 bp, Homo sapiens
  siRNA target sequence for FBN1 (NM_000138.2,478-496).
catacaacactgcaatatt

SEQ ID NO: 144233 - DNA, 19 bp, Homo sapiens
  siRNA target sequence for FBN1 (NM_000138.2,489-507).
gcaatattcgctgtatgaa

SEQ ID NO: 144234 - DNA, 19 bp, Homo sapiens
  siRNA target sequence for FBN1 (NM_000138.2,610-628).
gtgtgtggccccaaatcga

SEQ ID NO: 144235 - DNA, 19 bp, Homo sapiens
  siRNA target sequence for FBN1 (NM_000138.2,632-650).
gcatgcacttacggattta

SEQ ID NO: 144236 - DNA, 19 bp, Homo sapiens
  siRNA target sequence for FBN1 (NM_000138.2,932-950).
gggtcttttgagtgcaaat

SEQ ID NO: 144237 - DNA, 19 bp, Homo sapiens
  siRNA target sequence for FBN1 (NM_000138.2,1072-1090).
caaatgtccccctggtttt

SEQ ID NO: 144238 - DNA, 19 bp, Homo sapiens
  siRNA target sequence for FBN1 (NM_000138.2,1107-1125).
gtaccagatgcatagatgt

SEQ ID NO: 144239 - DNA, 19 bp, Homo sapiens
  siRNA target sequence for FBN1 (NM_000138.2,1124-1142).
gttcgcccaggatactgtt

SEQ ID NO: 144240 - DNA, 19 bp, Homo sapiens
  siRNA target sequence for FBN1 (NM_000138.2,1127-1145).
cgcccaggatactgttaca

SEQ ID NO: 144241 - DNA, 19 bp, Homo sapiens
  siRNA target sequence for FBN1 (NM_000138.2,1140-1158).
gttacacagctctgacaaa

SEQ ID NO: 144242 - DNA, 19 bp, Homo sapiens
  siRNA target sequence for FBN1 (NM_000138.2,1178-1196).
ctgccacagtccataacca

SEQ ID NO: 144243 - DNA, 19 bp, Homo sapiens
  siRNA target sequence for FBN1 (NM_000138.2,1180-1198).
gccacagtccataaccaaa

SEQ ID NO: 144244 - DNA, 19 bp, Homo sapiens
  siRNA target sequence for FBN1 (NM_000138.2,1181-1199).
ccacagtccataaccaaaa

SEQ ID NO: 144245 - DNA, 19 bp, Homo sapiens
  siRNA target sequence for FBN1 (NM_000138.2,1272-1290).
gagcaaccgaggatttcaa

SEQ ID NO: 144246 - DNA, 19 bp, Homo sapiens
  siRNA target sequence for FBN1 (NM_000138.2,1274-1292).
gcaaccgaggatttcaaca

SEQ ID NO: 144247 - DNA, 19 bp, Homo sapiens
  siRNA target sequence for FBN1 (NM_000138.2,1416-1434).
ctcgaccaccagtggaata

SEQ ID NO: 144248 - DNA, 19 bp, Homo sapiens
  siRNA target sequence for FBN1 (NM_000138.2,1419-1437).
gaccaccagtggaatatct

SEQ ID NO: 144249 - DNA, 19 bp, Homo sapiens
  siRNA target sequence for FBN1 (NM_000138.2,1461-1479).
gggtgctgccagtaaacgt

SEQ ID NO: 144250 - DNA, 19 bp, Homo sapiens
  siRNA target sequence for FBN1 (NM_000138.2,1462-1480).
ggtgctgccagtaaacgtt

SEQ ID NO: 144251 - DNA, 19 bp, Homo sapiens
  siRNA target sequence for FBN1 (NM_000138.2,1463-1481).
gtgctgccagtaaacgtta

SEQ ID NO: 144252 - DNA, 19 bp, Homo sapiens
  siRNA target sequence for FBN1 (NM_000138.2,1468-1486).
gccagtaaacgttactgat

SEQ ID NO: 144253 - DNA, 19 bp, Homo sapiens
  siRNA target sequence for FBN1 (NM_000138.2,1469-1487).
ccagtaaacgttactgatt

SEQ ID NO: 144254 - DNA, 19 bp, Homo sapiens
  siRNA target sequence for FBN1 (NM_000138.2,1472-1490).
gtaaacgttactgattact

SEQ ID NO: 144255 - DNA, 19 bp, Homo sapiens
  siRNA target sequence for FBN1 (NM_000138.2,1493-1511).
cagttggtccgctatctct

SEQ ID NO: 144256 - DNA, 19 bp, Homo sapiens
  siRNA target sequence for FBN1 (NM_000138.2,1501-1519).
ccgctatctctgtcaaaat

SEQ ID NO: 144257 - DNA, 19 bp, Homo sapiens
  siRNA target sequence for FBN1 (NM_000138.2,1549-1567).
ccggtgtgagtgcaacaaa

SEQ ID NO: 144258 - DNA, 19 bp, Homo sapiens
  siRNA target sequence for FBN1 (NM_000138.2,1582-1600).
cctccgtggggagtgtatt

SEQ ID NO: 144259 - DNA, 19 bp, Homo sapiens
  siRNA target sequence for FBN1 (NM_000138.2,1590-1608).
gggagtgtattgatgttga

SEQ ID NO: 144260 - DNA, 19 bp, Homo sapiens
  siRNA target sequence for FBN1 (NM_000138.2,1747-1765).
ccggatctgcaataatgga

SEQ ID NO: 144261 - DNA, 19 bp, Homo sapiens
  siRNA target sequence for FBN1 (NM_000138.2,1788-1806).
gttttcattgcgtgtgtaa

SEQ ID NO: 144262 - DNA, 19 bp, Homo sapiens
  siRNA target sequence for FBN1 (NM_000138.2,1801-1819).
gtgtaatgcgggctttcat

SEQ ID NO: 144263 - DNA, 19 bp, Homo sapiens
  siRNA target sequence for FBN1 (NM_000138.2,1803-1821).
gtaatgcgggctttcatgt

SEQ ID NO: 144264 - DNA, 19 bp, Homo sapiens
  siRNA target sequence for FBN1 (NM_000138.2,1870-1888).
gaacatgtgccttaatgga

SEQ ID NO: 144265 - DNA, 19 bp, Homo sapiens
  siRNA target sequence for FBN1 (NM_000138.2,1880-1898).
cttaatggaatgtgtatca

SEQ ID NO: 144266 - DNA, 19 bp, Homo sapiens
  siRNA target sequence for FBN1 (NM_000138.2,1945-1963).
ggcatcagatggacgttat

SEQ ID NO: 144267 - DNA, 19 bp, Homo sapiens
  siRNA target sequence for FBN1 (NM_000138.2,1950-1968).
cagatggacgttattgcaa

SEQ ID NO: 144268 - DNA, 19 bp, Homo sapiens
  siRNA target sequence for FBN1 (NM_000138.2,1955-1973).
ggacgttattgcaaagaca

SEQ ID NO: 144269 - DNA, 19 bp, Homo sapiens
  siRNA target sequence for FBN1 (NM_000138.2,1956-1974).
gacgttattgcaaagacat

SEQ ID NO: 144270 - DNA, 19 bp, Homo sapiens
  siRNA target sequence for FBN1 (NM_000138.2,2112-2130).
catgctatggtggatacaa

SEQ ID NO: 144271 - DNA, 19 bp, Homo sapiens
  siRNA target sequence for FBN1 (NM_000138.2,2189-2207).
gccagcactgagtatgcat

SEQ ID NO: 144272 - DNA, 19 bp, Homo sapiens
  siRNA target sequence for FBN1 (NM_000138.2,2190-2208).
ccagcactgagtatgcatt

SEQ ID NO: 144273 - DNA, 19 bp, Homo sapiens
  siRNA target sequence for FBN1 (NM_000138.2,2286-2304).
cgtcagcaggcagtgatat

SEQ ID NO: 144274 - DNA, 19 bp, Homo sapiens
  siRNA target sequence for FBN1 (NM_000138.2,2287-2305).
gtcagcaggcagtgatata

SEQ ID NO: 144275 - DNA, 19 bp, Homo sapiens
  siRNA target sequence for FBN1 (NM_000138.2,2315-2333).
gcactagatcctgatattt

SEQ ID NO: 144276 - DNA, 19 bp, Homo sapiens
  siRNA target sequence for FBN1 (NM_000138.2,2356-2374).
ccttcgtgggacctataaa

SEQ ID NO: 144277 - DNA, 19 bp, Homo sapiens
  siRNA target sequence for FBN1 (NM_000138.2,2357-2375).
cttcgtgggacctataaat

SEQ ID NO: 144278 - DNA, 19 bp, Homo sapiens
  siRNA target sequence for FBN1 (NM_000138.2,2360-2378).
cgtgggacctataaatgta

SEQ ID NO: 144279 - DNA, 19 bp, Homo sapiens
  siRNA target sequence for FBN1 (NM_000138.2,2361-2379).
gtgggacctataaatgtat

SEQ ID NO: 144280 - DNA, 19 bp, Homo sapiens
  siRNA target sequence for FBN1 (NM_000138.2,2363-2381).
gggacctataaatgtatat

SEQ ID NO: 144281 - DNA, 19 bp, Homo sapiens
  siRNA target sequence for FBN1 (NM_000138.2,2478-2496).
gaaatactcctggaagttt

SEQ ID NO: 144282 - DNA, 19 bp, Homo sapiens
  siRNA target sequence for FBN1 (NM_000138.2,2505-2523).
cctgccccaagggatttat

SEQ ID NO: 144283 - DNA, 19 bp, Homo sapiens
  siRNA target sequence for FBN1 (NM_000138.2,2508-2526).
gccccaagggatttatcta

SEQ ID NO: 144284 - DNA, 19 bp, Homo sapiens
  siRNA target sequence for FBN1 (NM_000138.2,2510-2528).
cccaagggatttatctaca

SEQ ID NO: 144285 - DNA, 19 bp, Homo sapiens
  siRNA target sequence for FBN1 (NM_000138.2,2524-2542).
ctacaaacctgatctaaaa

SEQ ID NO: 144286 - DNA, 19 bp, Homo sapiens
  siRNA target sequence for FBN1 (NM_000138.2,2566-2584).
cgaatcaagtccttgcatt

SEQ ID NO: 144287 - DNA, 19 bp, Homo sapiens
  siRNA target sequence for FBN1 (NM_000138.2,2567-2585).
gaatcaagtccttgcatta

SEQ ID NO: 144288 - DNA, 19 bp, Homo sapiens
  siRNA target sequence for FBN1 (NM_000138.2,2602-2620).
cagcccaggctcttttatt

SEQ ID NO: 144289 - DNA, 19 bp, Homo sapiens
  siRNA target sequence for FBN1 (NM_000138.2,2605-2623).
cccaggctcttttatttgt

SEQ ID NO: 144290 - DNA, 19 bp, Homo sapiens
  siRNA target sequence for FBN1 (NM_000138.2,2607-2625).
caggctcttttatttgtga

SEQ ID NO: 144291 - DNA, 19 bp, Homo sapiens
  siRNA target sequence for FBN1 (NM_000138.2,2640-2658).
gtactttggatccaacaaa

SEQ ID NO: 144292 - DNA, 19 bp, Homo sapiens
  siRNA target sequence for FBN1 (NM_000138.2,2711-2729).
gggcgatgtgagatcaaca

SEQ ID NO: 144293 - DNA, 19 bp, Homo sapiens
  siRNA target sequence for FBN1 (NM_000138.2,2712-2730).
ggcgatgtgagatcaacat

SEQ ID NO: 144294 - DNA, 19 bp, Homo sapiens
  siRNA target sequence for FBN1 (NM_000138.2,2714-2732).
cgatgtgagatcaacatca

SEQ ID NO: 144295 - DNA, 19 bp, Homo sapiens
  siRNA target sequence for FBN1 (NM_000138.2,2793-2811).
gcaccctatgccaagttga

SEQ ID NO: 144296 - DNA, 19 bp, Homo sapiens
  siRNA target sequence for FBN1 (NM_000138.2,2803-2821).
ccaagttgatcccatatgt

SEQ ID NO: 144297 - DNA, 19 bp, Homo sapiens
  siRNA target sequence for FBN1 (NM_000138.2,2823-2841).
gtaaagggtactcaagaat

SEQ ID NO: 144298 - DNA, 19 bp, Homo sapiens
  siRNA target sequence for FBN1 (NM_000138.2,2830-2848).
gtactcaagaattaaagga

SEQ ID NO: 144299 - DNA, 19 bp, Homo sapiens
  siRNA target sequence for FBN1 (NM_000138.2,2903-2921).
ggcctgtgtgttaacacta

SEQ ID NO: 144300 - DNA, 19 bp, Homo sapiens
  siRNA target sequence for FBN1 (NM_000138.2,2943-2961).
gtcccagtggaatgacttt

SEQ ID NO: 144301 - DNA, 19 bp, Homo sapiens
  siRNA target sequence for FBN1 (NM_000138.2,3031-3049).
gtgcaccctgcctattgct

SEQ ID NO: 144302 - DNA, 19 bp, Homo sapiens
  siRNA target sequence for FBN1 (NM_000138.2,3254-3272).
cacggcaagtgcagaaaca

SEQ ID NO: 144303 - DNA, 19 bp, Homo sapiens
  siRNA target sequence for FBN1 (NM_000138.2,3304-3322).
cggctttgctcttgattct

SEQ ID NO: 144304 - DNA, 19 bp, Homo sapiens
  siRNA target sequence for FBN1 (NM_000138.2,3402-3420).
ctggggactttgaatgcaa

SEQ ID NO: 144305 - DNA, 19 bp, Homo sapiens
  siRNA target sequence for FBN1 (NM_000138.2,3585-3603).
ccgcgtgtatcgacatcaa

SEQ ID NO: 144306 - DNA, 19 bp, Homo sapiens
  siRNA target sequence for FBN1 (NM_000138.2,3586-3604).
cgcgtgtatcgacatcaat

SEQ ID NO: 144307 - DNA, 19 bp, Homo sapiens
  siRNA target sequence for FBN1 (NM_000138.2,3588-3606).
cgtgtatcgacatcaatga

SEQ ID NO: 144308 - DNA, 19 bp, Homo sapiens
  siRNA target sequence for FBN1 (NM_000138.2,3649-3667).
gaacctcatagggaagtat

SEQ ID NO: 144309 - DNA, 19 bp, Homo sapiens
  siRNA target sequence for FBN1 (NM_000138.2,3682-3700).
ccctggctaccattcaact

SEQ ID NO: 144310 - DNA, 19 bp, Homo sapiens
  siRNA target sequence for FBN1 (NM_000138.2,3702-3720).
ccgataggctattttgtgt

SEQ ID NO: 144311 - DNA, 19 bp, Homo sapiens
  siRNA target sequence for FBN1 (NM_000138.2,3709-3727).
gctattttgtgttgacatt

SEQ ID NO: 144312 - DNA, 19 bp, Homo sapiens
  siRNA target sequence for FBN1 (NM_000138.2,3799-3817).
ctgtcagccgggatttgca

SEQ ID NO: 144313 - DNA, 19 bp, Homo sapiens
  siRNA target sequence for FBN1 (NM_000138.2,3860-3878).
gaagataatcccaatatct

SEQ ID NO: 144314 - DNA, 19 bp, Homo sapiens
  siRNA target sequence for FBN1 (NM_000138.2,3884-3902).
ggtggtcagtgcacaaata

SEQ ID NO: 144315 - DNA, 19 bp, Homo sapiens
  siRNA target sequence for FBN1 (NM_000138.2,3911-3929).
gagtacaggtgcttgtgtt

SEQ ID NO: 144316 - DNA, 19 bp, Homo sapiens
  siRNA target sequence for FBN1 (NM_000138.2,3921-3939).
gcttgtgttatgatggatt

SEQ ID NO: 144317 - DNA, 19 bp, Homo sapiens
  siRNA target sequence for FBN1 (NM_000138.2,3961-3979).
gacttgtgtagatgtcaat

SEQ ID NO: 144318 - DNA, 19 bp, Homo sapiens
  siRNA target sequence for FBN1 (NM_000138.2,4007-4025).
ctaagtgggacctgtgaaa

SEQ ID NO: 144319 - DNA, 19 bp, Homo sapiens
  siRNA target sequence for FBN1 (NM_000138.2,4060-4078).
gggctactccggcaaaaaa

SEQ ID NO: 144320 - DNA, 19 bp, Homo sapiens
  siRNA target sequence for FBN1 (NM_000138.2,4089-4107).
gctgtacagacatcaatga

SEQ ID NO: 144321 - DNA, 19 bp, Homo sapiens
  siRNA target sequence for FBN1 (NM_000138.2,4090-4108).
ctgtacagacatcaatgaa

SEQ ID NO: 144322 - DNA, 19 bp, Homo sapiens
  siRNA target sequence for FBN1 (NM_000138.2,4669-4687).
ctgcccacctgattttgaa

SEQ ID NO: 144323 - DNA, 19 bp, Homo sapiens
  siRNA target sequence for FBN1 (NM_000138.2,4674-4692).
cacctgattttgaactgaa

SEQ ID NO: 144324 - DNA, 19 bp, Homo sapiens
  siRNA target sequence for FBN1 (NM_000138.2,4715-4733).
gatacccgctctggaaatt

SEQ ID NO: 144325 - DNA, 19 bp, Homo sapiens
  siRNA target sequence for FBN1 (NM_000138.2,4719-4737).
cccgctctggaaattgcta

SEQ ID NO: 144326 - DNA, 19 bp, Homo sapiens
  siRNA target sequence for FBN1 (NM_000138.2,4720-4738).
ccgctctggaaattgctat

SEQ ID NO: 144327 - DNA, 19 bp, Homo sapiens
  siRNA target sequence for FBN1 (NM_000138.2,4878-4896).
catccgagtacaaaattct

SEQ ID NO: 144328 - DNA, 19 bp, Homo sapiens
  siRNA target sequence for FBN1 (NM_000138.2,4913-4931).
ggtttccgaccaaatccta

SEQ ID NO: 144329 - DNA, 19 bp, Homo sapiens
  siRNA target sequence for FBN1 (NM_000138.2,4914-4932).
gtttccgaccaaatcctat

SEQ ID NO: 144330 - DNA, 19 bp, Homo sapiens
  siRNA target sequence for FBN1 (NM_000138.2,4935-4953).
ccgttatattggaagatat

SEQ ID NO: 144331 - DNA, 19 bp, Homo sapiens
  siRNA target sequence for FBN1 (NM_000138.2,4936-4954).
cgttatattggaagatatt

SEQ ID NO: 144332 - DNA, 19 bp, Homo sapiens
  siRNA target sequence for FBN1 (NM_000138.2,5061-5079).
cacgagtgtgtgatgatgt

SEQ ID NO: 144333 - DNA, 19 bp, Homo sapiens
  siRNA target sequence for FBN1 (NM_000138.2,5108-5126).
ggtccagggacatgttaca

SEQ ID NO: 144334 - DNA, 19 bp, Homo sapiens
  siRNA target sequence for FBN1 (NM_000138.2,5109-5127).
gtccagggacatgttacaa

SEQ ID NO: 144335 - DNA, 19 bp, Homo sapiens
  siRNA target sequence for FBN1 (NM_000138.2,5111-5129).
ccagggacatgttacaaca

SEQ ID NO: 144336 - DNA, 19 bp, Homo sapiens
  siRNA target sequence for FBN1 (NM_000138.2,5137-5155).
caactacacctgtatctgt

SEQ ID NO: 144337 - DNA, 19 bp, Homo sapiens
  siRNA target sequence for FBN1 (NM_000138.2,5160-5178).
cagactacatgcaagtgaa

SEQ ID NO: 144338 - DNA, 19 bp, Homo sapiens
  siRNA target sequence for FBN1 (NM_000138.2,5171-5189).
caagtgaatgggggaaata

SEQ ID NO: 144339 - DNA, 19 bp, Homo sapiens
  siRNA target sequence for FBN1 (NM_000138.2,5256-5274).
gagaattgttattcaacat

SEQ ID NO: 144340 - DNA, 19 bp, Homo sapiens
  siRNA target sequence for FBN1 (NM_000138.2,5338-5356).
gtgtcccatcccaagtaca

SEQ ID NO: 144341 - DNA, 19 bp, Homo sapiens
  siRNA target sequence for FBN1 (NM_000138.2,5395-5413).
ctttgtcatcgacatttat

SEQ ID NO: 144342 - DNA, 19 bp, Homo sapiens
  siRNA target sequence for FBN1 (NM_000138.2,5415-5433).
ccggtttacccgttgatat

SEQ ID NO: 144343 - DNA, 19 bp, Homo sapiens
  siRNA target sequence for FBN1 (NM_000138.2,5416-5434).
cggtttacccgttgatatt

SEQ ID NO: 144344 - DNA, 19 bp, Homo sapiens
  siRNA target sequence for FBN1 (NM_000138.2,5418-5436).
gtttacccgttgatattga

SEQ ID NO: 144345 - DNA, 19 bp, Homo sapiens
  siRNA target sequence for FBN1 (NM_000138.2,5536-5554).
caagttgttggtttgtgaa

SEQ ID NO: 144346 - DNA, 19 bp, Homo sapiens
  siRNA target sequence for FBN1 (NM_000138.2,5667-5685).
gacagtgcaatgatcgtaa

SEQ ID NO: 144347 - DNA, 19 bp, Homo sapiens
  siRNA target sequence for FBN1 (NM_000138.2,5671-5689).
gtgcaatgatcgtaatgaa

SEQ ID NO: 144348 - DNA, 19 bp, Homo sapiens
  siRNA target sequence for FBN1 (NM_000138.2,5691-5709).
gtcaagaaatccccaatat

SEQ ID NO: 144349 - DNA, 19 bp, Homo sapiens
  siRNA target sequence for FBN1 (NM_000138.2,5696-5714).
gaaatccccaatatatgca

SEQ ID NO: 144350 - DNA, 19 bp, Homo sapiens
  siRNA target sequence for FBN1 (NM_000138.2,5717-5735).
catgggcagtgcattgaca

SEQ ID NO: 144351 - DNA, 19 bp, Homo sapiens
  siRNA target sequence for FBN1 (NM_000138.2,5793-5811).
ccatgtgcttggacataaa

SEQ ID NO: 144352 - DNA, 19 bp, Homo sapiens
  siRNA target sequence for FBN1 (NM_000138.2,5794-5812).
catgtgcttggacataaat

SEQ ID NO: 144353 - DNA, 19 bp, Homo sapiens
  siRNA target sequence for FBN1 (NM_000138.2,5840-5858).
ggaacttgccggaacacaa

SEQ ID NO: 144354 - DNA, 19 bp, Homo sapiens
  siRNA target sequence for FBN1 (NM_000138.2,5841-5859).
gaacttgccggaacacaat

SEQ ID NO: 144355 - DNA, 19 bp, Homo sapiens
  siRNA target sequence for FBN1 (NM_000138.2,5869-5887).
caactgccgctgcaatcat

SEQ ID NO: 144356 - DNA, 19 bp, Homo sapiens
  siRNA target sequence for FBN1 (NM_000138.2,5877-5895).
gctgcaatcatggtttcat

SEQ ID NO: 144357 - DNA, 19 bp, Homo sapiens
  siRNA target sequence for FBN1 (NM_000138.2,5905-5923).
caacaatgactgtatagat

SEQ ID NO: 144358 - DNA, 19 bp, Homo sapiens
  siRNA target sequence for FBN1 (NM_000138.2,5908-5926).
caatgactgtatagatgtt

SEQ ID NO: 144359 - DNA, 19 bp, Homo sapiens
  siRNA target sequence for FBN1 (NM_000138.2,6039-6057).
ggacctgtgtggatatcaa

SEQ ID NO: 144360 - DNA, 19 bp, Homo sapiens
  siRNA target sequence for FBN1 (NM_000138.2,6040-6058).
gacctgtgtggatatcaat

SEQ ID NO: 144361 - DNA, 19 bp, Homo sapiens
  siRNA target sequence for FBN1 (NM_000138.2,6055-6073).
caatgaatgtcttctagaa

SEQ ID NO: 144362 - DNA, 19 bp, Homo sapiens
  siRNA target sequence for FBN1 (NM_000138.2,6086-6104).
gcaccaggtacctgtcaaa

SEQ ID NO: 144363 - DNA, 19 bp, Homo sapiens
  siRNA target sequence for FBN1 (NM_000138.2,6087-6105).
caccaggtacctgtcaaaa

SEQ ID NO: 144364 - DNA, 19 bp, Homo sapiens
  siRNA target sequence for FBN1 (NM_000138.2,6183-6201).
gtgtcgaagagccagaaat

SEQ ID NO: 144365 - DNA, 19 bp, Homo sapiens
  siRNA target sequence for FBN1 (NM_000138.2,6187-6205).
cgaagagccagaaatttgt

SEQ ID NO: 144366 - DNA, 19 bp, Homo sapiens
  siRNA target sequence for FBN1 (NM_000138.2,6252-6270).
gtccagaagggttttcctt

SEQ ID NO: 144367 - DNA, 19 bp, Homo sapiens
  siRNA target sequence for FBN1 (NM_000138.2,6282-6300).
gaagaaggtgccaagattt

SEQ ID NO: 144368 - DNA, 19 bp, Homo sapiens
  siRNA target sequence for FBN1 (NM_000138.2,6301-6319).
gcgaatgagctactgttat

SEQ ID NO: 144369 - DNA, 19 bp, Homo sapiens
  siRNA target sequence for FBN1 (NM_000138.2,6310-6328).
ctactgttatgcgaagttt

SEQ ID NO: 144370 - DNA, 19 bp, Homo sapiens
  siRNA target sequence for FBN1 (NM_000138.2,6313-6331).
ctgttatgcgaagtttgaa

SEQ ID NO: 144371 - DNA, 19 bp, Homo sapiens
  siRNA target sequence for FBN1 (NM_000138.2,6348-6366).
cacccaaatccagaaatca

SEQ ID NO: 144372 - DNA, 19 bp, Homo sapiens
  siRNA target sequence for FBN1 (NM_000138.2,6446-6464).
gaggccttccgccagatat

SEQ ID NO: 144373 - DNA, 19 bp, Homo sapiens
  siRNA target sequence for FBN1 (NM_000138.2,6448-6466).
ggccttccgccagatatgt

SEQ ID NO: 144374 - DNA, 19 bp, Homo sapiens
  siRNA target sequence for FBN1 (NM_000138.2,6454-6472).
ccgccagatatgtccttat

SEQ ID NO: 144375 - DNA, 19 bp, Homo sapiens
  siRNA target sequence for FBN1 (NM_000138.2,6457-6475).
ccagatatgtccttatgga

SEQ ID NO: 144376 - DNA, 19 bp, Homo sapiens
  siRNA target sequence for FBN1 (NM_000138.2,6484-6502).
catcgtgggacctgatgat

SEQ ID NO: 144377 - DNA, 19 bp, Homo sapiens
  siRNA target sequence for FBN1 (NM_000138.2,6487-6505).
cgtgggacctgatgattca

SEQ ID NO: 144378 - DNA, 19 bp, Homo sapiens
  siRNA target sequence for FBN1 (NM_000138.2,6552-6570).
gacagtgcatcaatacaga

SEQ ID NO: 144379 - DNA, 19 bp, Homo sapiens
  siRNA target sequence for FBN1 (NM_000138.2,6562-6580).
caatacagatggttcctat

SEQ ID NO: 144380 - DNA, 19 bp, Homo sapiens
  siRNA target sequence for FBN1 (NM_000138.2,6668-6686).
ggaacctgcaagaatgtga

SEQ ID NO: 144381 - DNA, 19 bp, Homo sapiens
  siRNA target sequence for FBN1 (NM_000138.2,6683-6701).
gtgattggaggttttgaat

SEQ ID NO: 144382 - DNA, 19 bp, Homo sapiens
  siRNA target sequence for FBN1 (NM_000138.2,6790-6808).
ccgatgtgtgaacacttat

SEQ ID NO: 144383 - DNA, 19 bp, Homo sapiens
  siRNA target sequence for FBN1 (NM_000138.2,6856-6874).
ccgtaggatgtgcaaagat

SEQ ID NO: 144384 - DNA, 19 bp, Homo sapiens
  siRNA target sequence for FBN1 (NM_000138.2,7071-7089).
gctacacctgtgagtgtaa

SEQ ID NO: 144385 - DNA, 19 bp, Homo sapiens
  siRNA target sequence for FBN1 (NM_000138.2,7072-7090).
ctacacctgtgagtgtaat

SEQ ID NO: 144386 - DNA, 19 bp, Homo sapiens
  siRNA target sequence for FBN1 (NM_000138.2,7117-7135).
ggacgagtgccttgacaat

SEQ ID NO: 144387 - DNA, 19 bp, Homo sapiens
  siRNA target sequence for FBN1 (NM_000138.2,7157-7175).
gaggtgctacaaaacatgt

SEQ ID NO: 144388 - DNA, 19 bp, Homo sapiens
  siRNA target sequence for FBN1 (NM_000138.2,7327-7345).
caatggagcagatatcgat

SEQ ID NO: 144389 - DNA, 19 bp, Homo sapiens
  siRNA target sequence for FBN1 (NM_000138.2,7404-7422).
catatcattgcatttgtaa

SEQ ID NO: 144390 - DNA, 19 bp, Homo sapiens
  siRNA target sequence for FBN1 (NM_000138.2,7425-7443).
ctgggtacactccagatat

SEQ ID NO: 144391 - DNA, 19 bp, Homo sapiens
  siRNA target sequence for FBN1 (NM_000138.2,7427-7445).
gggtacactccagatataa

SEQ ID NO: 144392 - DNA, 19 bp, Homo sapiens
  siRNA target sequence for FBN1 (NM_000138.2,7429-7447).
gtacactccagatataact

SEQ ID NO: 144393 - DNA, 19 bp, Homo sapiens
  siRNA target sequence for FBN1 (NM_000138.2,7452-7470).
cttcctgtgtagatctgaa

SEQ ID NO: 144394 - DNA, 19 bp, Homo sapiens
  siRNA target sequence for FBN1 (NM_000138.2,7487-7505).
cccaaaccctgcaatttta

SEQ ID NO: 144395 - DNA, 19 bp, Homo sapiens
  siRNA target sequence for FBN1 (NM_000138.2,7572-7590).
gaaggagctgcaaagatct

SEQ ID NO: 144396 - DNA, 19 bp, Homo sapiens
  siRNA target sequence for FBN1 (NM_000138.2,7687-7705).
ccatacgtcctgcattgat

SEQ ID NO: 144397 - DNA, 19 bp, Homo sapiens
  siRNA target sequence for FBN1 (NM_000138.2,7688-7706).
catacgtcctgcattgata

SEQ ID NO: 144398 - DNA, 19 bp, Homo sapiens
  siRNA target sequence for FBN1 (NM_000138.2,7792-7810).
gcggggattctcacttgat

SEQ ID NO: 144399 - DNA, 19 bp, Homo sapiens
  siRNA target sequence for FBN1 (NM_000138.2,8040-8058).
gcttccagtatgaacagtt

SEQ ID NO: 144400 - DNA, 19 bp, Homo sapiens
  siRNA target sequence for FBN1 (NM_000138.2,8151-8169).
gctgtccacctggttactt

SEQ ID NO: 144401 - DNA, 19 bp, Homo sapiens
  siRNA target sequence for FBN1 (NM_000138.2,8229-8247).
cacctgtcagtggtgaaat

SEQ ID NO: 144402 - DNA, 19 bp, Homo sapiens
  siRNA target sequence for FBN1 (NM_000138.2,8273-8291).
gcttgttacgagtgtaaga

SEQ ID NO: 144403 - DNA, 19 bp, Homo sapiens
  siRNA target sequence for FBN1 (NM_000138.2,8394-8412).
caagttgggatgttgagaa

SEQ ID NO: 144404 - DNA, 19 bp, Homo sapiens
  siRNA target sequence for FBN1 (NM_000138.2,8492-8510).
ctgacgaatcacaacagat

SEQ ID NO: 144405 - DNA, 19 bp, Homo sapiens
  siRNA target sequence for FBN1 (NM_000138.2,8512-8530).
cttgatcgaatctggaaat

SEQ ID NO: 144406 - DNA, 19 bp, Homo sapiens
  siRNA target sequence for FBN1 (NM_000138.2,8518-8536).
cgaatctggaaatgaagat

SEQ ID NO: 144407 - DNA, 19 bp, Homo sapiens
  siRNA target sequence for FBN1 (NM_000138.2,8596-8614).
gccagtggctggaacctat

SEQ ID NO: 144408 - DNA, 19 bp, Homo sapiens
  siRNA target sequence for FBN1 (NM_000138.2,8600-8618).
gtggctggaacctattcat

SEQ ID NO: 144409 - DNA, 19 bp, Homo sapiens
  siRNA target sequence for FBN1 (NM_000138.2,8602-8620).
ggctggaacctattcatta

SEQ ID NO: 144410 - DNA, 19 bp, Homo sapiens
  siRNA target sequence for FBN1 (NM_000138.2,8604-8622).
ctggaacctattcattaca

SEQ ID NO: 144411 - DNA, 19 bp, Homo sapiens
  siRNA target sequence for FBN1 (NM_000138.2,8628-8646).
gtagtactccactttataa

SEQ ID NO: 144412 - DNA, 19 bp, Homo sapiens
  siRNA target sequence for FBN1 (NM_000138.2,8631-8649).
gtactccactttataaaaa

SEQ ID NO: 144413 - DNA, 19 bp, Homo sapiens
  siRNA target sequence for FBN1 (NM_000138.2,8700-8718).
gtgaactgggtgataatct

SEQ ID NO: 144414 - DNA, 19 bp, Homo sapiens
  siRNA target sequence for FBN1 (NM_000138.2,8702-8720).
gaactgggtgataatctga

SEQ ID NO: 144415 - DNA, 19 bp, Homo sapiens
  siRNA target sequence for FBN1 (NM_000138.2,8708-8726).
ggtgataatctgaagatga

SEQ ID NO: 144416 - DNA, 19 bp, Homo sapiens
  siRNA target sequence for FBN2 (NM_001999.2,159-177).
ctctgaaggcgggtttcta

SEQ ID NO: 144417 - DNA, 19 bp, Homo sapiens
  siRNA target sequence for FBN2 (NM_001999.2,327-345).
gtgcattgtcccgatttgt

SEQ ID NO: 144418 - DNA, 19 bp, Homo sapiens
  siRNA target sequence for FBN2 (NM_001999.2,334-352).
gtcccgatttgtagaaata

SEQ ID NO: 144419 - DNA, 19 bp, Homo sapiens
  siRNA target sequence for FBN2 (NM_001999.2,337-355).
ccgatttgtagaaatagtt

SEQ ID NO: 144420 - DNA, 19 bp, Homo sapiens
  siRNA target sequence for FBN2 (NM_001999.2,399-417).
cagtgggcaaatatcatca

SEQ ID NO: 144421 - DNA, 19 bp, Homo sapiens
  siRNA target sequence for FBN2 (NM_001999.2,420-438).
ctgtggatcaaaatcaatt

SEQ ID NO: 144422 - DNA, 19 bp, Homo sapiens
  siRNA target sequence for FBN2 (NM_001999.2,493-511).
cagtgccagaaaggatata

SEQ ID NO: 144423 - DNA, 19 bp, Homo sapiens
  siRNA target sequence for FBN2 (NM_001999.2,495-513).
gtgccagaaaggatatatt

SEQ ID NO: 144424 - DNA, 19 bp, Homo sapiens
  siRNA target sequence for FBN2 (NM_001999.2,776-794).
cctgccgacggggtttcat

SEQ ID NO: 144425 - DNA, 19 bp, Homo sapiens
  siRNA target sequence for FBN2 (NM_001999.2,913-931).
ggtcacaaacagagtgaaa

SEQ ID NO: 144426 - DNA, 19 bp, Homo sapiens
  siRNA target sequence for FBN2 (NM_001999.2,916-934).
cacaaacagagtgaaacta

SEQ ID NO: 144427 - DNA, 19 bp, Homo sapiens
  siRNA target sequence for FBN2 (NM_001999.2,966-984).
catcattcctgggatatgt

SEQ ID NO: 144428 - DNA, 19 bp, Homo sapiens
  siRNA target sequence for FBN2 (NM_001999.2,1078-1096).
cagagaacaggcatgtgtt

SEQ ID NO: 144429 - DNA, 19 bp, Homo sapiens
  siRNA target sequence for FBN2 (NM_001999.2,1228-1246).
gaggaatatcgcagacttt

SEQ ID NO: 144430 - DNA, 19 bp, Homo sapiens
  siRNA target sequence for FBN2 (NM_001999.2,1433-1451).
ggggacagggacctatcat

SEQ ID NO: 144431 - DNA, 19 bp, Homo sapiens
  siRNA target sequence for FBN2 (NM_001999.2,1449-1467).
catcactggactaacaatt

SEQ ID NO: 144432 - DNA, 19 bp, Homo sapiens
  siRNA target sequence for FBN2 (NM_001999.2,1463-1481).
caattctgaaccagacaat

SEQ ID NO: 144433 - DNA, 19 bp, Homo sapiens
  siRNA target sequence for FBN2 (NM_001999.2,1468-1486).
ctgaaccagacaatagata

SEQ ID NO: 144434 - DNA, 19 bp, Homo sapiens
  siRNA target sequence for FBN2 (NM_001999.2,1495-1513).
catcatgctaacctttgtt

SEQ ID NO: 144435 - DNA, 19 bp, Homo sapiens
  siRNA target sequence for FBN2 (NM_001999.2,1539-1557).
ctcaagctaccgatgtgaa

SEQ ID NO: 144436 - DNA, 19 bp, Homo sapiens
  siRNA target sequence for FBN2 (NM_001999.2,1544-1562).
gctaccgatgtgaatgcaa

SEQ ID NO: 144437 - DNA, 19 bp, Homo sapiens
  siRNA target sequence for FBN2 (NM_001999.2,1568-1586).
gttataagcaggatgcaaa

SEQ ID NO: 144438 - DNA, 19 bp, Homo sapiens
  siRNA target sequence for FBN2 (NM_001999.2,1603-1621).
gttgatgaatgcacatcaa

SEQ ID NO: 144439 - DNA, 19 bp, Homo sapiens
  siRNA target sequence for FBN2 (NM_001999.2,1626-1644).
ctgcactaatggagattgt

SEQ ID NO: 144440 - DNA, 19 bp, Homo sapiens
  siRNA target sequence for FBN2 (NM_001999.2,1704-1722).
caagcaagcatgcattgat

SEQ ID NO: 144441 - DNA, 19 bp, Homo sapiens
  siRNA target sequence for FBN2 (NM_001999.2,1738-1756).
cagaatggggttctttgta

SEQ ID NO: 144442 - DNA, 19 bp, Homo sapiens
  siRNA target sequence for FBN2 (NM_001999.2,1740-1758).
gaatggggttctttgtaaa

SEQ ID NO: 144443 - DNA, 19 bp, Homo sapiens
  siRNA target sequence for FBN2 (NM_001999.2,1787-1805).
gtttccagtgcatttgcaa

SEQ ID NO: 144444 - DNA, 19 bp, Homo sapiens
  siRNA target sequence for FBN2 (NM_001999.2,1802-1820).
gcaatgccggctttgaatt

SEQ ID NO: 144445 - DNA, 19 bp, Homo sapiens
  siRNA target sequence for FBN2 (NM_001999.2,1803-1821).
caatgccggctttgaatta

SEQ ID NO: 144446 - DNA, 19 bp, Homo sapiens
  siRNA target sequence for FBN2 (NM_001999.2,1807-1825).
gccggctttgaattaacta

SEQ ID NO: 144447 - DNA, 19 bp, Homo sapiens
  siRNA target sequence for FBN2 (NM_001999.2,1809-1827).
cggctttgaattaactaca

SEQ ID NO: 144448 - DNA, 19 bp, Homo sapiens
  siRNA target sequence for FBN2 (NM_001999.2,1843-1861).
gttgatcatgatgaatgta

SEQ ID NO: 144449 - DNA, 19 bp, Homo sapiens
  siRNA target sequence for FBN2 (NM_001999.2,1846-1864).
gatcatgatgaatgtacaa

SEQ ID NO: 144450 - DNA, 19 bp, Homo sapiens
  siRNA target sequence for FBN2 (NM_001999.2,1862-1880).
caactaccaacatgtgttt

SEQ ID NO: 144451 - DNA, 19 bp, Homo sapiens
  siRNA target sequence for FBN2 (NM_001999.2,1948-1966).
ccaaatgggcgttactgta

SEQ ID NO: 144452 - DNA, 19 bp, Homo sapiens
  siRNA target sequence for FBN2 (NM_001999.2,1956-1974).
gcgttactgtactgatgtt

SEQ ID NO: 144453 - DNA, 19 bp, Homo sapiens
  siRNA target sequence for FBN2 (NM_001999.2,2111-2129).
cctgctatggaggaatcaa

SEQ ID NO: 144454 - DNA, 19 bp, Homo sapiens
  siRNA target sequence for FBN2 (NM_001999.2,2188-2206).
gccaatccagactatggtt

SEQ ID NO: 144455 - DNA, 19 bp, Homo sapiens
  siRNA target sequence for FBN2 (NM_001999.2,2189-2207).
ccaatccagactatggttt

SEQ ID NO: 144456 - DNA, 19 bp, Homo sapiens
  siRNA target sequence for FBN2 (NM_001999.2,2224-2242).
ccatgccctgcaaaaaatt

SEQ ID NO: 144457 - DNA, 19 bp, Homo sapiens
  siRNA target sequence for FBN2 (NM_001999.2,2285-2303).
ctgtggatggaagagatat

SEQ ID NO: 144458 - DNA, 19 bp, Homo sapiens
  siRNA target sequence for FBN2 (NM_001999.2,2304-2322).
caatgaatgtgctttggat

SEQ ID NO: 144459 - DNA, 19 bp, Homo sapiens
  siRNA target sequence for FBN2 (NM_001999.2,2360-2378).
gtggtagttaccgttgtaa

SEQ ID NO: 144460 - DNA, 19 bp, Homo sapiens
  siRNA target sequence for FBN2 (NM_001999.2,2362-2380).
ggtagttaccgttgtaatt

SEQ ID NO: 144461 - DNA, 19 bp, Homo sapiens
  siRNA target sequence for FBN2 (NM_001999.2,2366-2384).
gttaccgttgtaattgcaa

SEQ ID NO: 144462 - DNA, 19 bp, Homo sapiens
  siRNA target sequence for FBN2 (NM_001999.2,2410-2428).
ggaagaaactgtattgaca

SEQ ID NO: 144463 - DNA, 19 bp, Homo sapiens
  siRNA target sequence for FBN2 (NM_001999.2,2477-2495).
gaaacacgccaggaagtta

SEQ ID NO: 144464 - DNA, 19 bp, Homo sapiens
  siRNA target sequence for FBN2 (NM_001999.2,2507-2525).
gcccaccagggtatgtgtt

SEQ ID NO: 144465 - DNA, 19 bp, Homo sapiens
  siRNA target sequence for FBN2 (NM_001999.2,2539-2557).
gagacctgtgaagatataa

SEQ ID NO: 144466 - DNA, 19 bp, Homo sapiens
  siRNA target sequence for FBN2 (NM_001999.2,2654-2672).
caggattgatctgtattga

SEQ ID NO: 144467 - DNA, 19 bp, Homo sapiens
  siRNA target sequence for FBN2 (NM_001999.2,2656-2674).
ggattgatctgtattgaca

SEQ ID NO: 144468 - DNA, 19 bp, Homo sapiens
  siRNA target sequence for FBN2 (NM_001999.2,2735-2753).
gagccactctgaaatctga

SEQ ID NO: 144469 - DNA, 19 bp, Homo sapiens
  siRNA target sequence for FBN2 (NM_001999.2,2794-2812).
gagcggtgtgaactagata

SEQ ID NO: 144470 - DNA, 19 bp, Homo sapiens
  siRNA target sequence for FBN2 (NM_001999.2,2796-2814).
gcggtgtgaactagataca

SEQ ID NO: 144471 - DNA, 19 bp, Homo sapiens
  siRNA target sequence for FBN2 (NM_001999.2,2829-2847).
gcttgccaggattaaaggt

SEQ ID NO: 144472 - DNA, 19 bp, Homo sapiens
  siRNA target sequence for FBN2 (NM_001999.2,2883-2901).
ccctggcgtttgtccaaat

SEQ ID NO: 144473 - DNA, 19 bp, Homo sapiens
  siRNA target sequence for FBN2 (NM_001999.2,2942-2960).
gccctgaaggccttacgtt

SEQ ID NO: 144474 - DNA, 19 bp, Homo sapiens
  siRNA target sequence for FBN2 (NM_001999.2,2965-2983).
gggactggccgtgtatgtt

SEQ ID NO: 144475 - DNA, 19 bp, Homo sapiens
  siRNA target sequence for FBN2 (NM_001999.2,2966-2984).
ggactggccgtgtatgttt

SEQ ID NO: 144476 - DNA, 19 bp, Homo sapiens
  siRNA target sequence for FBN2 (NM_001999.2,2971-2989).
ggccgtgtatgtttggata

SEQ ID NO: 144477 - DNA, 19 bp, Homo sapiens
  siRNA target sequence for FBN2 (NM_001999.2,2972-2990).
gccgtgtatgtttggatat

SEQ ID NO: 144478 - DNA, 19 bp, Homo sapiens
  siRNA target sequence for FBN2 (NM_001999.2,2973-2991).
ccgtgtatgtttggatatt

SEQ ID NO: 144479 - DNA, 19 bp, Homo sapiens
  siRNA target sequence for FBN2 (NM_001999.2,3173-3191).
ctaaccgaggggatgttct

SEQ ID NO: 144480 - DNA, 19 bp, Homo sapiens
  siRNA target sequence for FBN2 (NM_001999.2,3177-3195).
ccgaggggatgttcttact

SEQ ID NO: 144481 - DNA, 19 bp, Homo sapiens
  siRNA target sequence for FBN2 (NM_001999.2,3285-3303).
caaatgccgttgcaatagt

SEQ ID NO: 144482 - DNA, 19 bp, Homo sapiens
  siRNA target sequence for FBN2 (NM_001999.2,3423-3441).
cttcgaaggctatgaaagt

SEQ ID NO: 144483 - DNA, 19 bp, Homo sapiens
  siRNA target sequence for FBN2 (NM_001999.2,3487-3505).
cgtaaccctctcctttgta

SEQ ID NO: 144484 - DNA, 19 bp, Homo sapiens
  siRNA target sequence for FBN2 (NM_001999.2,3583-3601).
gaggactgtgtggatatta

SEQ ID NO: 144485 - DNA, 19 bp, Homo sapiens
  siRNA target sequence for FBN2 (NM_001999.2,3608-3626).
gctccctgagtgacaatct

SEQ ID NO: 144486 - DNA, 19 bp, Homo sapiens
  siRNA target sequence for FBN2 (NM_001999.2,3648-3666).
gaacatgattggaacctat

SEQ ID NO: 144487 - DNA, 19 bp, Homo sapiens
  siRNA target sequence for FBN2 (NM_001999.2,3663-3681).
ctatcagtgctcttgcaat

SEQ ID NO: 144488 - DNA, 19 bp, Homo sapiens
  siRNA target sequence for FBN2 (NM_001999.2,3674-3692).
cttgcaatcctggatatca

SEQ ID NO: 144489 - DNA, 19 bp, Homo sapiens
  siRNA target sequence for FBN2 (NM_001999.2,3706-3724).
cgccagggctgtacagata

SEQ ID NO: 144490 - DNA, 19 bp, Homo sapiens
  siRNA target sequence for FBN2 (NM_001999.2,3761-3779).
cccagtgcacaaattcaga

SEQ ID NO: 144491 - DNA, 19 bp, Homo sapiens
  siRNA target sequence for FBN2 (NM_001999.2,3831-3849).
gagatcgtgtgcagacatt

SEQ ID NO: 144492 - DNA, 19 bp, Homo sapiens
  siRNA target sequence for FBN2 (NM_001999.2,3833-3851).
gatcgtgtgcagacattga

SEQ ID NO: 144493 - DNA, 19 bp, Homo sapiens
  siRNA target sequence for FBN2 (NM_001999.2,3857-3875).
gtgaaaacaatcctgatat

SEQ ID NO: 144494 - DNA, 19 bp, Homo sapiens
  siRNA target sequence for FBN2 (NM_001999.2,3859-3877).
gaaaacaatcctgatatct

SEQ ID NO: 144495 - DNA, 19 bp, Homo sapiens
  siRNA target sequence for FBN2 (NM_001999.2,4012-4030).
ggggaatgtgagaacacaa

SEQ ID NO: 144496 - DNA, 19 bp, Homo sapiens
  siRNA target sequence for FBN2 (NM_001999.2,4111-4129).
gaaattggtgctcataact

SEQ ID NO: 144497 - DNA, 19 bp, Homo sapiens
  siRNA target sequence for FBN2 (NM_001999.2,4137-4155).
gcatgcctcatgtctgaat

SEQ ID NO: 144498 - DNA, 19 bp, Homo sapiens
  siRNA target sequence for FBN2 (NM_001999.2,4138-4156).
catgcctcatgtctgaata

SEQ ID NO: 144499 - DNA, 19 bp, Homo sapiens
  siRNA target sequence for FBN2 (NM_001999.2,4198-4216).
ggaaacggcatcaagtgta

SEQ ID NO: 144500 - DNA, 19 bp, Homo sapiens
  siRNA target sequence for FBN2 (NM_001999.2,4199-4217).
gaaacggcatcaagtgtat

SEQ ID NO: 144501 - DNA, 19 bp, Homo sapiens
  siRNA target sequence for FBN2 (NM_001999.2,4203-4221).
cggcatcaagtgtattgat

SEQ ID NO: 144502 - DNA, 19 bp, Homo sapiens
  siRNA target sequence for FBN2 (NM_001999.2,4205-4223).
gcatcaagtgtattgatct

SEQ ID NO: 144503 - DNA, 19 bp, Homo sapiens
  siRNA target sequence for FBN2 (NM_001999.2,4245-4263).
ccaccagtgtagcatcaat

SEQ ID NO: 144504 - DNA, 19 bp, Homo sapiens
  siRNA target sequence for FBN2 (NM_001999.2,4260-4278).
caatgctcagtgtgtaaat

SEQ ID NO: 144505 - DNA, 19 bp, Homo sapiens
  siRNA target sequence for FBN2 (NM_001999.2,4298-4316).
gtgcctgctccgaaggttt

SEQ ID NO: 144506 - DNA, 19 bp, Homo sapiens
  siRNA target sequence for FBN2 (NM_001999.2,4302-4320).
ctgctccgaaggtttcact

SEQ ID NO: 144507 - DNA, 19 bp, Homo sapiens
  siRNA target sequence for FBN2 (NM_001999.2,4334-4352).
cctgctcagatgttgatga

SEQ ID NO: 144508 - DNA, 19 bp, Homo sapiens
  siRNA target sequence for FBN2 (NM_001999.2,4454-4472).
gcagatcctgccaagatat

SEQ ID NO: 144509 - DNA, 19 bp, Homo sapiens
  siRNA target sequence for FBN2 (NM_001999.2,4455-4473).
cagatcctgccaagatatt

SEQ ID NO: 144510 - DNA, 19 bp, Homo sapiens
  siRNA target sequence for FBN2 (NM_001999.2,4457-4475).
gatcctgccaagatattga

SEQ ID NO: 144511 - DNA, 19 bp, Homo sapiens
  siRNA target sequence for FBN2 (NM_001999.2,4484-4502).
ccttccaaaacatttgtgt

SEQ ID NO: 144512 - DNA, 19 bp, Homo sapiens
  siRNA target sequence for FBN2 (NM_001999.2,4541-4559).
gcatctgcgatgatggtta

SEQ ID NO: 144513 - DNA, 19 bp, Homo sapiens
  siRNA target sequence for FBN2 (NM_001999.2,4547-4565).
gcgatgatggttatgaatt

SEQ ID NO: 144514 - DNA, 19 bp, Homo sapiens
  siRNA target sequence for FBN2 (NM_001999.2,4622-4640).
gtgtcaatggcctatgtgt

SEQ ID NO: 144515 - DNA, 19 bp, Homo sapiens
  siRNA target sequence for FBN2 (NM_001999.2,4651-4669).
ggtcgctatgagtgtaact

SEQ ID NO: 144516 - DNA, 19 bp, Homo sapiens
  siRNA target sequence for FBN2 (NM_001999.2,4670-4688).
gcccacccgattttcagtt

SEQ ID NO: 144517 - DNA, 19 bp, Homo sapiens
  siRNA target sequence for FBN2 (NM_001999.2,4673-4691).
cacccgattttcagttgaa

SEQ ID NO: 144518 - DNA, 19 bp, Homo sapiens
  siRNA target sequence for FBN2 (NM_001999.2,4700-4718).
gtgtgggttgtgttgacaa

SEQ ID NO: 144519 - DNA, 19 bp, Homo sapiens
  siRNA target sequence for FBN2 (NM_001999.2,4727-4745).
gcaactgctacctgaagtt

SEQ ID NO: 144520 - DNA, 19 bp, Homo sapiens
  siRNA target sequence for FBN2 (NM_001999.2,4728-4746).
caactgctacctgaagttt

SEQ ID NO: 144521 - DNA, 19 bp, Homo sapiens
  siRNA target sequence for FBN2 (NM_001999.2,4795-4813).
ggcgtcagtcgctcttcat

SEQ ID NO: 144522 - DNA, 19 bp, Homo sapiens
  siRNA target sequence for FBN2 (NM_001999.2,4864-4882).
cctgtcaatagcactgaat

SEQ ID NO: 144523 - DNA, 19 bp, Homo sapiens
  siRNA target sequence for FBN2 (NM_001999.2,4865-4883).
ctgtcaatagcactgaata

SEQ ID NO: 144524 - DNA, 19 bp, Homo sapiens
  siRNA target sequence for FBN2 (NM_001999.2,4988-5006).
gaaactgcatcaacacttt

SEQ ID NO: 144525 - DNA, 19 bp, Homo sapiens
  siRNA target sequence for FBN2 (NM_001999.2,5108-5126).
ggcctgggacctgctataa

SEQ ID NO: 144526 - DNA, 19 bp, Homo sapiens
  siRNA target sequence for FBN2 (NM_001999.2,5211-5229).
cttttgctaccgaagctat

SEQ ID NO: 144527 - DNA, 19 bp, Homo sapiens
  siRNA target sequence for FBN2 (NM_001999.2,5217-5235).
ctaccgaagctataatgga

SEQ ID NO: 144528 - DNA, 19 bp, Homo sapiens
  siRNA target sequence for FBN2 (NM_001999.2,5234-5252).
gaaccacttgtgagaatga

SEQ ID NO: 144529 - DNA, 19 bp, Homo sapiens
  siRNA target sequence for FBN2 (NM_001999.2,5251-5269).
gagttgcctttcaatgtga

SEQ ID NO: 144530 - DNA, 19 bp, Homo sapiens
  siRNA target sequence for FBN2 (NM_001999.2,5341-5359).
ccaggaacagctgacttta

SEQ ID NO: 144531 - DNA, 19 bp, Homo sapiens
  siRNA target sequence for FBN2 (NM_001999.2,5384-5402).
gattcacctttgacattca

SEQ ID NO: 144532 - DNA, 19 bp, Homo sapiens
  siRNA target sequence for FBN2 (NM_001999.2,5408-5426).
gaaaagctgttgacattga

SEQ ID NO: 144533 - DNA, 19 bp, Homo sapiens
  siRNA target sequence for FBN2 (NM_001999.2,5501-5519).
gccctacaggattcagtta

SEQ ID NO: 144534 - DNA, 19 bp, Homo sapiens
  siRNA target sequence for FBN2 (NM_001999.2,5503-5521).
cctacaggattcagttaca

SEQ ID NO: 144535 - DNA, 19 bp, Homo sapiens
  siRNA target sequence for FBN2 (NM_001999.2,5655-5673).
caatggggcctgtgtagat

SEQ ID NO: 144536 - DNA, 19 bp, Homo sapiens
  siRNA target sequence for FBN2 (NM_001999.2,5664-5682).
ctgtgtagatcgcaatgaa

SEQ ID NO: 144537 - DNA, 19 bp, Homo sapiens
  siRNA target sequence for FBN2 (NM_001999.2,5786-5804).
ccatgtgcatggatgttga

SEQ ID NO: 144538 - DNA, 19 bp, Homo sapiens
  siRNA target sequence for FBN2 (NM_001999.2,5787-5805).
catgtgcatggatgttgat

SEQ ID NO: 144539 - DNA, 19 bp, Homo sapiens
  siRNA target sequence for FBN2 (NM_001999.2,5850-5868).
cgttggatcctataactgt

SEQ ID NO: 144540 - DNA, 19 bp, Homo sapiens
  siRNA target sequence for FBN2 (NM_001999.2,5871-5889).
gtgctacccagggtttgaa

SEQ ID NO: 144541 - DNA, 19 bp, Homo sapiens
  siRNA target sequence for FBN2 (NM_001999.2,5873-5891).
gctacccagggtttgaact

SEQ ID NO: 144542 - DNA, 19 bp, Homo sapiens
  siRNA target sequence for FBN2 (NM_001999.2,5881-5899).
gggtttgaactcactcata

SEQ ID NO: 144543 - DNA, 19 bp, Homo sapiens
  siRNA target sequence for FBN2 (NM_001999.2,5883-5901).
gtttgaactcactcataat

SEQ ID NO: 144544 - DNA, 19 bp, Homo sapiens
  siRNA target sequence for FBN2 (NM_001999.2,5920-5938).
gatgagtgcagttcctttt

SEQ ID NO: 144545 - DNA, 19 bp, Homo sapiens
  siRNA target sequence for FBN2 (NM_001999.2,5925-5943).
gtgcagttccttttttggt

SEQ ID NO: 144546 - DNA, 19 bp, Homo sapiens
  siRNA target sequence for FBN2 (NM_001999.2,5951-5969).
gcagaaatggacgttgttt

SEQ ID NO: 144547 - DNA, 19 bp, Homo sapiens
  siRNA target sequence for FBN2 (NM_001999.2,5988-6006).
caagtgtctatgtaacgaa

SEQ ID NO: 144548 - DNA, 19 bp, Homo sapiens
  siRNA target sequence for FBN2 (NM_001999.2,5993-6011).
gtctatgtaacgaaggtta

SEQ ID NO: 144549 - DNA, 19 bp, Homo sapiens
  siRNA target sequence for FBN2 (NM_001999.2,5999-6017).
gtaacgaaggttatgaact

SEQ ID NO: 144550 - DNA, 19 bp, Homo sapiens
  siRNA target sequence for FBN2 (NM_001999.2,6129-6147).
cccagggtatgaagtaaaa

SEQ ID NO: 144551 - DNA, 19 bp, Homo sapiens
  siRNA target sequence for FBN2 (NM_001999.2,6130-6148).
ccagggtatgaagtaaaaa

SEQ ID NO: 144552 - DNA, 19 bp, Homo sapiens
  siRNA target sequence for FBN2 (NM_001999.2,6150-6168).
cgagaactgcattgatata

SEQ ID NO: 144553 - DNA, 19 bp, Homo sapiens
  siRNA target sequence for FBN2 (NM_001999.2,6151-6169).
gagaactgcattgatataa

SEQ ID NO: 144554 - DNA, 19 bp, Homo sapiens
  siRNA target sequence for FBN2 (NM_001999.2,6178-6196).
gatgaagatcccaacattt

SEQ ID NO: 144555 - DNA, 19 bp, Homo sapiens
  siRNA target sequence for FBN2 (NM_001999.2,6249-6267).
ccctggctttgtactatct

SEQ ID NO: 144556 - DNA, 19 bp, Homo sapiens
  siRNA target sequence for FBN2 (NM_001999.2,6253-6271).
ggctttgtactatctgata

SEQ ID NO: 144557 - DNA, 19 bp, Homo sapiens
  siRNA target sequence for FBN2 (NM_001999.2,6254-6272).
gctttgtactatctgataa

SEQ ID NO: 144558 - DNA, 19 bp, Homo sapiens
  siRNA target sequence for FBN2 (NM_001999.2,6255-6273).
ctttgtactatctgataat

SEQ ID NO: 144559 - DNA, 19 bp, Homo sapiens
  siRNA target sequence for FBN2 (NM_001999.2,6274-6292).
ggacggagatgctttgata

SEQ ID NO: 144560 - DNA, 19 bp, Homo sapiens
  siRNA target sequence for FBN2 (NM_001999.2,6335-6353).
gttctgtacccaaagcttt

SEQ ID NO: 144561 - DNA, 19 bp, Homo sapiens
  siRNA target sequence for FBN2 (NM_001999.2,6561-6579).
caacaccgacggatctttt

SEQ ID NO: 144562 - DNA, 19 bp, Homo sapiens
  siRNA target sequence for FBN2 (NM_001999.2,6734-6752).
ggcccatgatgaattgtga

SEQ ID NO: 144563 - DNA, 19 bp, Homo sapiens
  siRNA target sequence for FBN2 (NM_001999.2,6898-6916).
gggttacacgactgtgaat

SEQ ID NO: 144564 - DNA, 19 bp, Homo sapiens
  siRNA target sequence for FBN2 (NM_001999.2,6913-6931).
gaatctaggggcatgatgt

SEQ ID NO: 144565 - DNA, 19 bp, Homo sapiens
  siRNA target sequence for FBN2 (NM_001999.2,6917-6935).
ctaggggcatgatgtgtaa

SEQ ID NO: 144566 - DNA, 19 bp, Homo sapiens
  siRNA target sequence for FBN2 (NM_001999.2,6920-6938).
ggggcatgatgtgtaagaa

SEQ ID NO: 144567 - DNA, 19 bp, Homo sapiens
  siRNA target sequence for FBN2 (NM_001999.2,7051-7069).
ggacgttgtgttaacatta

SEQ ID NO: 144568 - DNA, 19 bp, Homo sapiens
  siRNA target sequence for FBN2 (NM_001999.2,7052-7070).
gacgttgtgttaacattat

SEQ ID NO: 144569 - DNA, 19 bp, Homo sapiens
  siRNA target sequence for FBN2 (NM_001999.2,7065-7083).
cattattggaagctataga

SEQ ID NO: 144570 - DNA, 19 bp, Homo sapiens
  siRNA target sequence for FBN2 (NM_001999.2,7077-7095).
ctatagatgtgagtgtaat

SEQ ID NO: 144571 - DNA, 19 bp, Homo sapiens
  siRNA target sequence for FBN2 (NM_001999.2,7122-7140).
cactgaatgccttgacaat

SEQ ID NO: 144572 - DNA, 19 bp, Homo sapiens
  siRNA target sequence for FBN2 (NM_001999.2,7160-7178).
cagaggtactgcagacaat

SEQ ID NO: 144573 - DNA, 19 bp, Homo sapiens
  siRNA target sequence for FBN2 (NM_001999.2,7162-7180).
gaggtactgcagacaatat

SEQ ID NO: 144574 - DNA, 19 bp, Homo sapiens
  siRNA target sequence for FBN2 (NM_001999.2,7199-7217).
gtcgcaatctcgtcactaa

SEQ ID NO: 144575 - DNA, 19 bp, Homo sapiens
  siRNA target sequence for FBN2 (NM_001999.2,7201-7219).
cgcaatctcgtcactaagt

SEQ ID NO: 144576 - DNA, 19 bp, Homo sapiens
  siRNA target sequence for FBN2 (NM_001999.2,7203-7221).
caatctcgtcactaagtca

SEQ ID NO: 144577 - DNA, 19 bp, Homo sapiens
  siRNA target sequence for FBN2 (NM_001999.2,7317-7335).
cccaggatatacaactgat

SEQ ID NO: 144578 - DNA, 19 bp, Homo sapiens
  siRNA target sequence for FBN2 (NM_001999.2,7385-7403).
gtcagtgcatcaataccat

SEQ ID NO: 144579 - DNA, 19 bp, Homo sapiens
  siRNA target sequence for FBN2 (NM_001999.2,7449-7467).
cagtggaacctcttgtata

SEQ ID NO: 144580 - DNA, 19 bp, Homo sapiens
  siRNA target sequence for FBN2 (NM_001999.2,7451-7469).
gtggaacctcttgtataga

SEQ ID NO: 144581 - DNA, 19 bp, Homo sapiens
  siRNA target sequence for FBN2 (NM_001999.2,7492-7510).
ccgaaaccatgcaactaca

SEQ ID NO: 144582 - DNA, 19 bp, Homo sapiens
  siRNA target sequence for FBN2 (NM_001999.2,7493-7511).
cgaaaccatgcaactacat

SEQ ID NO: 144583 - DNA, 19 bp, Homo sapiens
  siRNA target sequence for FBN2 (NM_001999.2,7518-7536).
gaacactgaggggagttat

SEQ ID NO: 144584 - DNA, 19 bp, Homo sapiens
  siRNA target sequence for FBN2 (NM_001999.2,7653-7671).
ggggtttacctgtaaatgt

SEQ ID NO: 144585 - DNA, 19 bp, Homo sapiens
  siRNA target sequence for FBN2 (NM_001999.2,7697-7715).
ctgcttgtatcgacaacaa

SEQ ID NO: 144586 - DNA, 19 bp, Homo sapiens
  siRNA target sequence for FBN2 (NM_001999.2,8072-8090).
cctgccacgacgtgaatga

SEQ ID NO: 144587 - DNA, 19 bp, Homo sapiens
  siRNA target sequence for FBN2 (NM_001999.2,8279-8297).
catgctacgagtgcaaaat

SEQ ID NO: 144588 - DNA, 19 bp, Homo sapiens
  siRNA target sequence for FBN2 (NM_001999.2,8322-8340).
caggcagaagagaagtatt

SEQ ID NO: 144589 - DNA, 19 bp, Homo sapiens
  siRNA target sequence for FBN2 (NM_001999.2,8615-8633).
ctagcatccctctctacaa

SEQ ID NO: 144590 - DNA, 19 bp, Homo sapiens
  siRNA target sequence for FBN2 (NM_001999.2,8618-8636).
gcatccctctctacaagaa

SEQ ID NO: 144591 - DNA, 19 bp, Homo sapiens
  siRNA target sequence for FBN3 (NM_032447.2,418-436).
gactctggagggtctgtat

SEQ ID NO: 144592 - DNA, 19 bp, Homo sapiens
  siRNA target sequence for FBN3 (NM_032447.2,910-928).
ccgctgcgcctgtgtgtat

SEQ ID NO: 144593 - DNA, 19 bp, Homo sapiens
  siRNA target sequence for FBN3 (NM_032447.2,1422-1440).
ctcggggctccaatgaatt

SEQ ID NO: 144594 - DNA, 19 bp, Homo sapiens
  siRNA target sequence for FBN3 (NM_032447.2,1425-1443).
ggggctccaatgaattcca

SEQ ID NO: 144595 - DNA, 19 bp, Homo sapiens
  siRNA target sequence for FBN3 (NM_032447.2,1504-1522).
cctgggcttcggatccaat

SEQ ID NO: 144596 - DNA, 19 bp, Homo sapiens
  siRNA target sequence for FBN3 (NM_032447.2,1596-1614).
gccctggcaactctaatat

SEQ ID NO: 144597 - DNA, 19 bp, Homo sapiens
  siRNA target sequence for FBN3 (NM_032447.2,1749-1767).
gcgagtgcattgatgtaga

SEQ ID NO: 144598 - DNA, 19 bp, Homo sapiens
  siRNA target sequence for FBN3 (NM_032447.2,1883-1901).
gtggacgagtgcattgtca

SEQ ID NO: 144599 - DNA, 19 bp, Homo sapiens
  siRNA target sequence for FBN3 (NM_032447.2,2448-2466).
cggatggtcgagacatcaa

SEQ ID NO: 144600 - DNA, 19 bp, Homo sapiens
  siRNA target sequence for FBN3 (NM_032447.2,2695-2713).
cacggagatctgcaaagat

SEQ ID NO: 144601 - DNA, 19 bp, Homo sapiens
  siRNA target sequence for FBN3 (NM_032447.2,3006-3024).
gtgtcacctgcgatgatgt

SEQ ID NO: 144602 - DNA, 19 bp, Homo sapiens
  siRNA target sequence for FBN3 (NM_032447.2,3351-3369).
ctggccgaccattctataa

SEQ ID NO: 144603 - DNA, 19 bp, Homo sapiens
  siRNA target sequence for FBN3 (NM_032447.2,3354-3372).
gccgaccattctataaaga

SEQ ID NO: 144604 - DNA, 19 bp, Homo sapiens
  siRNA target sequence for FBN3 (NM_032447.2,3355-3373).
ccgaccattctataaagat

SEQ ID NO: 144605 - DNA, 19 bp, Homo sapiens
  siRNA target sequence for FBN3 (NM_032447.2,3794-3812).
ggccagtgtgtcaatgtca

SEQ ID NO: 144606 - DNA, 19 bp, Homo sapiens
  siRNA target sequence for FBN3 (NM_032447.2,3795-3813).
gccagtgtgtcaatgtcat

SEQ ID NO: 144607 - DNA, 19 bp, Homo sapiens
  siRNA target sequence for FBN3 (NM_032447.2,3910-3928).
gtgtgacgtgcactgtatt

SEQ ID NO: 144608 - DNA, 19 bp, Homo sapiens
  siRNA target sequence for FBN3 (NM_032447.2,3912-3930).
gtgacgtgcactgtattaa

SEQ ID NO: 144609 - DNA, 19 bp, Homo sapiens
  siRNA target sequence for FBN3 (NM_032447.2,3914-3932).
gacgtgcactgtattaaca

SEQ ID NO: 144610 - DNA, 19 bp, Homo sapiens
  siRNA target sequence for FBN3 (NM_032447.2,3916-3934).
cgtgcactgtattaacact

SEQ ID NO: 144611 - DNA, 19 bp, Homo sapiens
  siRNA target sequence for FBN3 (NM_032447.2,4111-4129).
catgaggacatgtgttgat

SEQ ID NO: 144612 - DNA, 19 bp, Homo sapiens
  siRNA target sequence for FBN3 (NM_032447.2,4180-4198).
gaacacgaagggttccttt

SEQ ID NO: 144613 - DNA, 19 bp, Homo sapiens
  siRNA target sequence for FBN3 (NM_032447.2,4356-4374).
gggatggcttcgaatgtca

SEQ ID NO: 144614 - DNA, 19 bp, Homo sapiens
  siRNA target sequence for FBN3 (NM_032447.2,4564-4582).
cgggtaccgctgtgaatgt

SEQ ID NO: 144615 - DNA, 19 bp, Homo sapiens
  siRNA target sequence for FBN3 (NM_032447.2,5316-5334).
cagagtacctccaagtcaa

SEQ ID NO: 144616 - DNA, 19 bp, Homo sapiens
  siRNA target sequence for FBN3 (NM_032447.2,5369-5387).
gtctgcttccggcactata

SEQ ID NO: 144617 - DNA, 19 bp, Homo sapiens
  siRNA target sequence for FBN3 (NM_032447.2,5383-5401).
ctataacggcacatgtcaa

SEQ ID NO: 144618 - DNA, 19 bp, Homo sapiens
  siRNA target sequence for FBN3 (NM_032447.2,5562-5580).
cggggaagccccttgacat

SEQ ID NO: 144619 - DNA, 19 bp, Homo sapiens
  siRNA target sequence for FBN3 (NM_032447.2,5787-5805).
gcacccgagggtacaaact

SEQ ID NO: 144620 - DNA, 19 bp, Homo sapiens
  siRNA target sequence for FBN3 (NM_032447.2,5843-5861).
cgggagatcccgaatgtct

SEQ ID NO: 144621 - DNA, 19 bp, Homo sapiens
  siRNA target sequence for FBN3 (NM_032447.2,6040-6058).
ctttgtggtgacacacaat

SEQ ID NO: 144622 - DNA, 19 bp, Homo sapiens
  siRNA target sequence for FBN3 (NM_032447.2,6051-6069).
cacacaatggggattgtgt

SEQ ID NO: 144623 - DNA, 19 bp, Homo sapiens
  siRNA target sequence for FBN3 (NM_032447.2,6060-6078).
gggattgtgtggattttga

SEQ ID NO: 144624 - DNA, 19 bp, Homo sapiens
  siRNA target sequence for FBN3 (NM_032447.2,6061-6079).
ggattgtgtggattttgat

SEQ ID NO: 144625 - DNA, 19 bp, Homo sapiens
  siRNA target sequence for FBN3 (NM_032447.2,6304-6322).
gagtgaccactgcattgat

SEQ ID NO: 144626 - DNA, 19 bp, Homo sapiens
  siRNA target sequence for FBN3 (NM_032447.2,6306-6324).
gtgaccactgcattgatat

SEQ ID NO: 144627 - DNA, 19 bp, Homo sapiens
  siRNA target sequence for FBN3 (NM_032447.2,6431-6449).
gggcaccgttgctttgaca

SEQ ID NO: 144628 - DNA, 19 bp, Homo sapiens
  siRNA target sequence for FBN3 (NM_032447.2,6492-6510).
gctcggtgcccaaagcttt

SEQ ID NO: 144629 - DNA, 19 bp, Homo sapiens
  siRNA target sequence for FBN3 (NM_032447.2,6767-6785).
gacttcactggcatcaact

SEQ ID NO: 144630 - DNA, 19 bp, Homo sapiens
  siRNA target sequence for FBN3 (NM_032447.2,6845-6863).
gtcatcggaggcttcgaat

SEQ ID NO: 144631 - DNA, 19 bp, Homo sapiens
  siRNA target sequence for FBN3 (NM_032447.2,6947-6965).
gccttccgctgccacaata

SEQ ID NO: 144632 - DNA, 19 bp, Homo sapiens
  siRNA target sequence for FBN3 (NM_032447.2,7159-7177).
gggctgcacagatgacaat

SEQ ID NO: 144633 - DNA, 19 bp, Homo sapiens
  siRNA target sequence for FBN3 (NM_032447.2,7495-7513).
gggccgagatgtagatgaa

SEQ ID NO: 144634 - DNA, 19 bp, Homo sapiens
  siRNA target sequence for FBN3 (NM_032447.2,7858-7876).
ggcctgcttcgacaatgat

SEQ ID NO: 144635 - DNA, 19 bp, Homo sapiens
  siRNA target sequence for FBN3 (NM_032447.2,8643-8661).
gcggaaacgagcaaggttt

SEQ ID NO: 144636 - DNA, 19 bp, Homo sapiens
  siRNA target sequence for FBN3 (NM_032447.2,8646-8664).
gaaacgagcaaggtttctt

SEQ ID NO: 144637 - DNA, 19 bp, Homo sapiens
  siRNA target sequence for FCN1 (NM_002003.2,815-833).
gggcagtgcgggtaattct

SEQ ID NO: 144638 - DNA, 19 bp, Homo sapiens
  siRNA target sequence for FCN1 (NM_002003.2,817-835).
gcagtgcgggtaattctct

SEQ ID NO: 144639 - DNA, 19 bp, Homo sapiens
  siRNA target sequence for FCN1 (NM_002003.2,818-836).
cagtgcgggtaattctcta

SEQ ID NO: 144640 - DNA, 19 bp, Homo sapiens
  siRNA target sequence for FCN1 (NM_002003.2,832-850).
ctctaacgggccacaacaa

SEQ ID NO: 144641 - DNA, 19 bp, Homo sapiens
  siRNA target sequence for FCN1 (NM_002003.2,882-900).
gatgtgagttcttcgaatt

SEQ ID NO: 144642 - DNA, 19 bp, Homo sapiens
  siRNA target sequence for FCN1 (NM_002003.2,895-913).
cgaattgtgctgagaagtt

SEQ ID NO: 144643 - DNA, 19 bp, Homo sapiens
  siRNA target sequence for FCN1 (NM_002003.2,934-952).
ccgactgtcatgcttcaaa

SEQ ID NO: 144644 - DNA, 19 bp, Homo sapiens
  siRNA target sequence for FCN1 (NM_002003.2,988-1006).
gctatgccaatggtatcaa

SEQ ID NO: 144645 - DNA, 19 bp, Homo sapiens
  siRNA target sequence for FCN1 (NM_002003.2,1014-1032).
gcggcgaaggggtacaaat

SEQ ID NO: 144646 - DNA, 19 bp, Homo sapiens
  siRNA target sequence for FCN1 (NM_002003.2,1015-1033).
cggcgaaggggtacaaata

SEQ ID NO: 144647 - DNA, 19 bp, Homo sapiens
  siRNA target sequence for FCN1 (NM_002003.2,1016-1034).
ggcgaaggggtacaaatat

SEQ ID NO: 144648 - DNA, 19 bp, Homo sapiens
  siRNA target sequence for FCN2 (NM_004108.1,749-767).
gaccaggacaatgatctta

SEQ ID NO: 144649 - DNA, 19 bp, Homo sapiens
  siRNA target sequence for FCN2 (NM_004108.1,761-779).
gatcttaacaccggaaatt

SEQ ID NO: 144650 - DNA, 19 bp, Homo sapiens
  siRNA target sequence for FCN2 (NM_004108.1,894-912).
cggggaaaggatacaatta

SEQ ID NO: 144651 - DNA, 19 bp, Homo sapiens
  siRNA target sequence for FIBL-6 (NM_031935.1,241-259).
ggaagttgtccatacagta

SEQ ID NO: 144652 - DNA, 19 bp, Homo sapiens
  siRNA target sequence for FIBL-6 (NM_031935.1,242-260).
gaagttgtccatacagtat

SEQ ID NO: 144653 - DNA, 19 bp, Homo sapiens
  siRNA target sequence for FIBL-6 (NM_031935.1,316-334).
gatcagagctgaggaaatt

SEQ ID NO: 144654 - DNA, 19 bp, Homo sapiens
  siRNA target sequence for FIBL-6 (NM_031935.1,345-363).
cctccacgttggcttttgt

SEQ ID NO: 144655 - DNA, 19 bp, Homo sapiens
  siRNA target sequence for FIBL-6 (NM_031935.1,377-395).
ggttctatgtatgatgatt

SEQ ID NO: 144656 - DNA, 19 bp, Homo sapiens
  siRNA target sequence for FIBL-6 (NM_031935.1,381-399).
ctatgtatgatgatttagt

SEQ ID NO: 144657 - DNA, 19 bp, Homo sapiens
  siRNA target sequence for FIBL-6 (NM_031935.1,520-538).
cacagatcccaagaaattt

SEQ ID NO: 144658 - DNA, 19 bp, Homo sapiens
  siRNA target sequence for FIBL-6 (NM_031935.1,524-542).
gatcccaagaaatttcaat

SEQ ID NO: 144659 - DNA, 19 bp, Homo sapiens
  siRNA target sequence for FIBL-6 (NM_031935.1,528-546).
ccaagaaatttcaatatga

SEQ ID NO: 144660 - DNA, 19 bp, Homo sapiens
  siRNA target sequence for FIBL-6 (NM_031935.1,592-610).
gagtattggagctataaaa

SEQ ID NO: 144661 - DNA, 19 bp, Homo sapiens
  siRNA target sequence for FIBL-6 (NM_031935.1,659-677).
gatgctcggtccaaagatt

SEQ ID NO: 144662 - DNA, 19 bp, Homo sapiens
  siRNA target sequence for FIBL-6 (NM_031935.1,689-707).
catgaggtgctgcaactta

SEQ ID NO: 144663 - DNA, 19 bp, Homo sapiens
  siRNA target sequence for FIBL-6 (NM_031935.1,694-712).
ggtgctgcaacttatccaa

SEQ ID NO: 144664 - DNA, 19 bp, Homo sapiens
  siRNA target sequence for FIBL-6 (NM_031935.1,721-739).
gtcacaagtcgtatttgtt

SEQ ID NO: 144665 - DNA, 19 bp, Homo sapiens
  siRNA target sequence for FIBL-6 (NM_031935.1,760-778).
caggacccatattggatat

SEQ ID NO: 144666 - DNA, 19 bp, Homo sapiens
  siRNA target sequence for FIBL-6 (NM_031935.1,762-780).
ggacccatattggatataa

SEQ ID NO: 144667 - DNA, 19 bp, Homo sapiens
  siRNA target sequence for FIBL-6 (NM_031935.1,765-783).
cccatattggatataaagt

SEQ ID NO: 144668 - DNA, 19 bp, Homo sapiens
  siRNA target sequence for FIBL-6 (NM_031935.1,767-785).
catattggatataaagtct

SEQ ID NO: 144669 - DNA, 19 bp, Homo sapiens
  siRNA target sequence for FIBL-6 (NM_031935.1,818-836).
gtgttccatctggacaaaa

SEQ ID NO: 144670 - DNA, 19 bp, Homo sapiens
  siRNA target sequence for FIBL-6 (NM_031935.1,839-857).
caagttaatgaggtattaa

SEQ ID NO: 144671 - DNA, 19 bp, Homo sapiens
  siRNA target sequence for FIBL-6 (NM_031935.1,883-901).
ctccaaagttcacctttta

SEQ ID NO: 144672 - DNA, 19 bp, Homo sapiens
  siRNA target sequence for FIBL-6 (NM_031935.1,965-983).
gaggtcactgtgtctttga

SEQ ID NO: 144673 - DNA, 19 bp, Homo sapiens
  siRNA target sequence for FIBL-6 (NM_031935.1,984-1002).
gtgggccttctccaatgat

SEQ ID NO: 144674 - DNA, 19 bp, Homo sapiens
  siRNA target sequence for FIBL-6 (NM_031935.1,1046-1064).
ggcctgcatgagctattaa

SEQ ID NO: 144675 - DNA, 19 bp, Homo sapiens
  siRNA target sequence for FIBL-6 (NM_031935.1,1049-1067).
ctgcatgagctattaaata

SEQ ID NO: 144676 - DNA, 19 bp, Homo sapiens
  siRNA target sequence for FIBL-6 (NM_031935.1,1055-1073).
gagctattaaatatccata

SEQ ID NO: 144677 - DNA, 19 bp, Homo sapiens
  siRNA target sequence for FIBL-6 (NM_031935.1,1069-1087).
ccataactctgccaaagta

SEQ ID NO: 144678 - DNA, 19 bp, Homo sapiens
  siRNA target sequence for FIBL-6 (NM_031935.1,1077-1095).
ctgccaaagtagtgaatgt

SEQ ID NO: 144679 - DNA, 19 bp, Homo sapiens
  siRNA target sequence for FIBL-6 (NM_031935.1,1079-1097).
gccaaagtagtgaatgtga

SEQ ID NO: 144680 - DNA, 19 bp, Homo sapiens
  siRNA target sequence for FIBL-6 (NM_031935.1,1147-1165).
gcactctgttcgcattact

SEQ ID NO: 144681 - DNA, 19 bp, Homo sapiens
  siRNA target sequence for FIBL-6 (NM_031935.1,1164-1182).
ctggcctcagtactattga

SEQ ID NO: 144682 - DNA, 19 bp, Homo sapiens
  siRNA target sequence for FIBL-6 (NM_031935.1,1167-1185).
gcctcagtactattgattt

SEQ ID NO: 144683 - DNA, 19 bp, Homo sapiens
  siRNA target sequence for FIBL-6 (NM_031935.1,1236-1254).
gcagaccagtgcaaggaat

SEQ ID NO: 144684 - DNA, 19 bp, Homo sapiens
  siRNA target sequence for FIBL-6 (NM_031935.1,1237-1255).
cagaccagtgcaaggaata

SEQ ID NO: 144685 - DNA, 19 bp, Homo sapiens
  siRNA target sequence for FIBL-6 (NM_031935.1,1246-1264).
gcaaggaatacctacctat

SEQ ID NO: 144686 - DNA, 19 bp, Homo sapiens
  siRNA target sequence for FIBL-6 (NM_031935.1,1251-1269).
gaatacctacctatgtact

SEQ ID NO: 144687 - DNA, 19 bp, Homo sapiens
  siRNA target sequence for FIBL-6 (NM_031935.1,1261-1279).
ctatgtactgctcaatact

SEQ ID NO: 144688 - DNA, 19 bp, Homo sapiens
  siRNA target sequence for FIBL-6 (NM_031935.1,1270-1288).
gctcaatacttctggaatt

SEQ ID NO: 144689 - DNA, 19 bp, Homo sapiens
  siRNA target sequence for FIBL-6 (NM_031935.1,1290-1308).
ccactccagctagaataga

SEQ ID NO: 144690 - DNA, 19 bp, Homo sapiens
  siRNA target sequence for FIBL-6 (NM_031935.1,1291-1309).
cactccagctagaatagat

SEQ ID NO: 144691 - DNA, 19 bp, Homo sapiens
  siRNA target sequence for FIBL-6 (NM_031935.1,1296-1314).
cagctagaatagatcttct

SEQ ID NO: 144692 - DNA, 19 bp, Homo sapiens
  siRNA target sequence for FIBL-6 (NM_031935.1,1324-1342).
gagtatctcaggaagttct

SEQ ID NO: 144693 - DNA, 19 bp, Homo sapiens
  siRNA target sequence for FIBL-6 (NM_031935.1,1334-1352).
ggaagttctcttaagacta

SEQ ID NO: 144694 - DNA, 19 bp, Homo sapiens
  siRNA target sequence for FIBL-6 (NM_031935.1,1369-1387).
cccacatcgaaaaccttat

SEQ ID NO: 144695 - DNA, 19 bp, Homo sapiens
  siRNA target sequence for FIBL-6 (NM_031935.1,1438-1456).
caaagtaacaggctatgat

SEQ ID NO: 144696 - DNA, 19 bp, Homo sapiens
  siRNA target sequence for FIBL-6 (NM_031935.1,1510-1528).
cccagatgctcccaaagtt

SEQ ID NO: 144697 - DNA, 19 bp, Homo sapiens
  siRNA target sequence for FIBL-6 (NM_031935.1,1511-1529).
ccagatgctcccaaagtta

SEQ ID NO: 144698 - DNA, 19 bp, Homo sapiens
  siRNA target sequence for FIBL-6 (NM_031935.1,1667-1685).
gccagtgtgaacttagata

SEQ ID NO: 144699 - DNA, 19 bp, Homo sapiens
  siRNA target sequence for FIBL-6 (NM_031935.1,1673-1691).
gtgaacttagatattgcaa

SEQ ID NO: 144700 - DNA, 19 bp, Homo sapiens
  siRNA target sequence for FIBL-6 (NM_031935.1,1698-1716).
ctttgtctgacgaaggttt

SEQ ID NO: 144701 - DNA, 19 bp, Homo sapiens
  siRNA target sequence for FIBL-6 (NM_031935.1,1749-1767).
ctggacgggcacagacatt

SEQ ID NO: 144702 - DNA, 19 bp, Homo sapiens
  siRNA target sequence for FIBL-6 (NM_031935.1,1751-1769).
ggacgggcacagacatttt

SEQ ID NO: 144703 - DNA, 19 bp, Homo sapiens
  siRNA target sequence for FIBL-6 (NM_031935.1,1798-1816).
ccaagtgcctaacaatgtt

SEQ ID NO: 144704 - DNA, 19 bp, Homo sapiens
  siRNA target sequence for FIBL-6 (NM_031935.1,1799-1817).
caagtgcctaacaatgtta

SEQ ID NO: 144705 - DNA, 19 bp, Homo sapiens
  siRNA target sequence for FIBL-6 (NM_031935.1,1863-1881).
gtgcggtggattacaatct

SEQ ID NO: 144706 - DNA, 19 bp, Homo sapiens
  siRNA target sequence for FIBL-6 (NM_031935.1,1949-1967).
ctgtcattggagctaaaga

SEQ ID NO: 144707 - DNA, 19 bp, Homo sapiens
  siRNA target sequence for FIBL-6 (NM_031935.1,1951-1969).
gtcattggagctaaagagt

SEQ ID NO: 144708 - DNA, 19 bp, Homo sapiens
  siRNA target sequence for FIBL-6 (NM_031935.1,1978-1996).
caacgatgctggagagtat

SEQ ID NO: 144709 - DNA, 19 bp, Homo sapiens
  siRNA target sequence for FIBL-6 (NM_031935.1,1981-1999).
cgatgctggagagtatcat

SEQ ID NO: 144710 - DNA, 19 bp, Homo sapiens
  siRNA target sequence for FIBL-6 (NM_031935.1,1985-2003).
gctggagagtatcattgta

SEQ ID NO: 144711 - DNA, 19 bp, Homo sapiens
  siRNA target sequence for FIBL-6 (NM_031935.1,2028-2046).
cagccgcttcagttttcct

SEQ ID NO: 144712 - DNA, 19 bp, Homo sapiens
  siRNA target sequence for FIBL-6 (NM_031935.1,2081-2099).
cccaagaatcagtctttca

SEQ ID NO: 144713 - DNA, 19 bp, Homo sapiens
  siRNA target sequence for FIBL-6 (NM_031935.1,2111-2129).
gaggtctccatcatgtgtt

SEQ ID NO: 144714 - DNA, 19 bp, Homo sapiens
  siRNA target sequence for FIBL-6 (NM_031935.1,2159-2177).
gcctggaccgttaacgata

SEQ ID NO: 144715 - DNA, 19 bp, Homo sapiens
  siRNA target sequence for FIBL-6 (NM_031935.1,2160-2178).
cctggaccgttaacgatat

SEQ ID NO: 144716 - DNA, 19 bp, Homo sapiens
  siRNA target sequence for FIBL-6 (NM_031935.1,2163-2181).
ggaccgttaacgatatgtt

SEQ ID NO: 144717 - DNA, 19 bp, Homo sapiens
  siRNA target sequence for FIBL-6 (NM_031935.1,2164-2182).
gaccgttaacgatatgttt

SEQ ID NO: 144718 - DNA, 19 bp, Homo sapiens
  siRNA target sequence for FIBL-6 (NM_031935.1,2166-2184).
ccgttaacgatatgtttat

SEQ ID NO: 144719 - DNA, 19 bp, Homo sapiens
  siRNA target sequence for FIBL-6 (NM_031935.1,2186-2204).
gtgggttcacacaggtata

SEQ ID NO: 144720 - DNA, 19 bp, Homo sapiens
  siRNA target sequence for FIBL-6 (NM_031935.1,2189-2207).
ggttcacacaggtatagga

SEQ ID NO: 144721 - DNA, 19 bp, Homo sapiens
  siRNA target sequence for FIBL-6 (NM_031935.1,2190-2208).
gttcacacaggtataggat

SEQ ID NO: 144722 - DNA, 19 bp, Homo sapiens
  siRNA target sequence for FIBL-6 (NM_031935.1,2211-2229).
cctcagatggtaccttatt

SEQ ID NO: 144723 - DNA, 19 bp, Homo sapiens
  siRNA target sequence for FIBL-6 (NM_031935.1,2212-2230).
ctcagatggtaccttattt

SEQ ID NO: 144724 - DNA, 19 bp, Homo sapiens
  siRNA target sequence for FIBL-6 (NM_031935.1,2248-2266).
caaagatgcagggatctat

SEQ ID NO: 144725 - DNA, 19 bp, Homo sapiens
  siRNA target sequence for FIBL-6 (NM_031935.1,2267-2285).
ggttgcctagcaagtaatt

SEQ ID NO: 144726 - DNA, 19 bp, Homo sapiens
  siRNA target sequence for FIBL-6 (NM_031935.1,2376-2394).
gggatataaccgttatgga

SEQ ID NO: 144727 - DNA, 19 bp, Homo sapiens
  siRNA target sequence for FIBL-6 (NM_031935.1,2398-2416).
caaaacctctggtattcct

SEQ ID NO: 144728 - DNA, 19 bp, Homo sapiens
  siRNA target sequence for FIBL-6 (NM_031935.1,2463-2481).
caacattcctcattattga

SEQ ID NO: 144729 - DNA, 19 bp, Homo sapiens
  siRNA target sequence for FIBL-6 (NM_031935.1,2491-2509).
gggacttttgaagattcaa

SEQ ID NO: 144730 - DNA, 19 bp, Homo sapiens
  siRNA target sequence for FIBL-6 (NM_031935.1,2525-2543).
gatgctggcgattatacct

SEQ ID NO: 144731 - DNA, 19 bp, Homo sapiens
  siRNA target sequence for FIBL-6 (NM_031935.1,2604-2622).
ctccagttttcatacaaga

SEQ ID NO: 144732 - DNA, 19 bp, Homo sapiens
  siRNA target sequence for FIBL-6 (NM_031935.1,2661-2679).
cattaccttgttatgttca

SEQ ID NO: 144733 - DNA, 19 bp, Homo sapiens
  siRNA target sequence for FIBL-6 (NM_031935.1,2682-2700).
gttatccagaaccaacaat

SEQ ID NO: 144734 - DNA, 19 bp, Homo sapiens
  siRNA target sequence for FIBL-6 (NM_031935.1,2687-2705).
ccagaaccaacaatcaaat

SEQ ID NO: 144735 - DNA, 19 bp, Homo sapiens
  siRNA target sequence for FIBL-6 (NM_031935.1,2697-2715).
caatcaaatggcgaagatt

SEQ ID NO: 144736 - DNA, 19 bp, Homo sapiens
  siRNA target sequence for FIBL-6 (NM_031935.1,2706-2724).
ggcgaagattagacaacat

SEQ ID NO: 144737 - DNA, 19 bp, Homo sapiens
  siRNA target sequence for FIBL-6 (NM_031935.1,2772-2790).
gaacaggagctctctttat

SEQ ID NO: 144738 - DNA, 19 bp, Homo sapiens
  siRNA target sequence for FIBL-6 (NM_031935.1,2797-2815).
cttatgggcaagtgataaa

SEQ ID NO: 144739 - DNA, 19 bp, Homo sapiens
  siRNA target sequence for FIBL-6 (NM_031935.1,2857-2875).
ccagtcagagacaacagta

SEQ ID NO: 144740 - DNA, 19 bp, Homo sapiens
  siRNA target sequence for FIBL-6 (NM_031935.1,2858-2876).
cagtcagagacaacagtaa

SEQ ID NO: 144741 - DNA, 19 bp, Homo sapiens
  siRNA target sequence for FIBL-6 (NM_031935.1,2886-2904).
gacttgttgctccacttat

SEQ ID NO: 144742 - DNA, 19 bp, Homo sapiens
  siRNA target sequence for FIBL-6 (NM_031935.1,2916-2934).
cttcagtggccaatgttat

SEQ ID NO: 144743 - DNA, 19 bp, Homo sapiens
  siRNA target sequence for FIBL-6 (NM_031935.1,2936-2954).
gaaggacagcagcttactt

SEQ ID NO: 144744 - DNA, 19 bp, Homo sapiens
  siRNA target sequence for FIBL-6 (NM_031935.1,2987-3005).
ccagaacgtcggtggatta

SEQ ID NO: 144745 - DNA, 19 bp, Homo sapiens
  siRNA target sequence for FIBL-6 (NM_031935.1,2988-3006).
cagaacgtcggtggattaa

SEQ ID NO: 144746 - DNA, 19 bp, Homo sapiens
  siRNA target sequence for FIBL-6 (NM_031935.1,2990-3008).
gaacgtcggtggattaaga

SEQ ID NO: 144747 - DNA, 19 bp, Homo sapiens
  siRNA target sequence for FIBL-6 (NM_031935.1,2993-3011).
cgtcggtggattaagaatt

SEQ ID NO: 144748 - DNA, 19 bp, Homo sapiens
  siRNA target sequence for FIBL-6 (NM_031935.1,3023-3041).
ctccaaaatccttacatca

SEQ ID NO: 144749 - DNA, 19 bp, Homo sapiens
  siRNA target sequence for FIBL-6 (NM_031935.1,3051-3069).
gtgatgggagcctccatat

SEQ ID NO: 144750 - DNA, 19 bp, Homo sapiens
  siRNA target sequence for FIBL-6 (NM_031935.1,3058-3076).
gagcctccatattgaaaga

SEQ ID NO: 144751 - DNA, 19 bp, Homo sapiens
  siRNA target sequence for FIBL-6 (NM_031935.1,3060-3078).
gcctccatattgaaagagt

SEQ ID NO: 144752 - DNA, 19 bp, Homo sapiens
  siRNA target sequence for FIBL-6 (NM_031935.1,3061-3079).
cctccatattgaaagagtt

SEQ ID NO: 144753 - DNA, 19 bp, Homo sapiens
  siRNA target sequence for FIBL-6 (NM_031935.1,3160-3178).
gcatgttctgccaaccatt

SEQ ID NO: 144754 - DNA, 19 bp, Homo sapiens
  siRNA target sequence for FIBL-6 (NM_031935.1,3209-3227).
gaaggcattccagtaactt

SEQ ID NO: 144755 - DNA, 19 bp, Homo sapiens
  siRNA target sequence for FIBL-6 (NM_031935.1,3294-3312).
caaccagcagtgctaagtt

SEQ ID NO: 144756 - DNA, 19 bp, Homo sapiens
  siRNA target sequence for FIBL-6 (NM_031935.1,3298-3316).
cagcagtgctaagttttca

SEQ ID NO: 144757 - DNA, 19 bp, Homo sapiens
  siRNA target sequence for FIBL-6 (NM_031935.1,3377-3395).
gtctgcactgccaccaata

SEQ ID NO: 144758 - DNA, 19 bp, Homo sapiens
  siRNA target sequence for FIBL-6 (NM_031935.1,3398-3416).
gccggctacgccaaaagga

SEQ ID NO: 144759 - DNA, 19 bp, Homo sapiens
  siRNA target sequence for FIBL-6 (NM_031935.1,3400-3418).
cggctacgccaaaaggaaa

SEQ ID NO: 144760 - DNA, 19 bp, Homo sapiens
  siRNA target sequence for FIBL-6 (NM_031935.1,3517-3535).
ggtaacacttccatgtgaa

SEQ ID NO: 144761 - DNA, 19 bp, Homo sapiens
  siRNA target sequence for FIBL-6 (NM_031935.1,3548-3566).
cctccacccataattactt

SEQ ID NO: 144762 - DNA, 19 bp, Homo sapiens
  siRNA target sequence for FIBL-6 (NM_031935.1,3659-3677).
gatagtgggatgtatcttt

SEQ ID NO: 144763 - DNA, 19 bp, Homo sapiens
  siRNA target sequence for FIBL-6 (NM_031935.1,3663-3681).
gtgggatgtatctttgtgt

SEQ ID NO: 144764 - DNA, 19 bp, Homo sapiens
  siRNA target sequence for FIBL-6 (NM_031935.1,3745-3763).
gatacagcgtggacctaaa

SEQ ID NO: 144765 - DNA, 19 bp, Homo sapiens
  siRNA target sequence for FIBL-6 (NM_031935.1,3756-3774).
gacctaaacatctcaaagt

SEQ ID NO: 144766 - DNA, 19 bp, Homo sapiens
  siRNA target sequence for FIBL-6 (NM_031935.1,3789-3807).
gagtggatattccatgtaa

SEQ ID NO: 144767 - DNA, 19 bp, Homo sapiens
  siRNA target sequence for FIBL-6 (NM_031935.1,3793-3811).
ggatattccatgtaatgct

SEQ ID NO: 144768 - DNA, 19 bp, Homo sapiens
  siRNA target sequence for FIBL-6 (NM_031935.1,3869-3887).
gatggagagcaccatgtta

SEQ ID NO: 144769 - DNA, 19 bp, Homo sapiens
  siRNA target sequence for FIBL-6 (NM_031935.1,3873-3891).
gagagcaccatgttagcaa

SEQ ID NO: 144770 - DNA, 19 bp, Homo sapiens
  siRNA target sequence for FIBL-6 (NM_031935.1,3888-3906).
gcaatccagacggaacttt

SEQ ID NO: 144771 - DNA, 19 bp, Homo sapiens
  siRNA target sequence for FIBL-6 (NM_031935.1,3889-3907).
caatccagacggaacttta

SEQ ID NO: 144772 - DNA, 19 bp, Homo sapiens
  siRNA target sequence for FIBL-6 (NM_031935.1,3893-3911).
ccagacggaactttaagca

SEQ ID NO: 144773 - DNA, 19 bp, Homo sapiens
  siRNA target sequence for FIBL-6 (NM_031935.1,3894-3912).
cagacggaactttaagcat

SEQ ID NO: 144774 - DNA, 19 bp, Homo sapiens
  siRNA target sequence for FIBL-6 (NM_031935.1,3984-4002).
cagagataacgctacatgt

SEQ ID NO: 144775 - DNA, 19 bp, Homo sapiens
  siRNA target sequence for FIBL-6 (NM_031935.1,4014-4032).
ccacagtggaagatctaga

SEQ ID NO: 144776 - DNA, 19 bp, Homo sapiens
  siRNA target sequence for FIBL-6 (NM_031935.1,4025-4043).
gatctagaacctccatata

SEQ ID NO: 144777 - DNA, 19 bp, Homo sapiens
  siRNA target sequence for FIBL-6 (NM_031935.1,4031-4049).
gaacctccatataacacta

SEQ ID NO: 144778 - DNA, 19 bp, Homo sapiens
  siRNA target sequence for FIBL-6 (NM_031935.1,4067-4085).
gccaatcaacgcattgaat

SEQ ID NO: 144779 - DNA, 19 bp, Homo sapiens
  siRNA target sequence for FIBL-6 (NM_031935.1,4068-4086).
ccaatcaacgcattgaatt

SEQ ID NO: 144780 - DNA, 19 bp, Homo sapiens
  siRNA target sequence for FIBL-6 (NM_031935.1,4069-4087).
caatcaacgcattgaattt

SEQ ID NO: 144781 - DNA, 19 bp, Homo sapiens
  siRNA target sequence for FIBL-6 (NM_031935.1,4073-4091).
caacgcattgaatttccat

SEQ ID NO: 144782 - DNA, 19 bp, Homo sapiens
  siRNA target sequence for FIBL-6 (NM_031935.1,4088-4106).
ccatgtcctgcaaaaggta

SEQ ID NO: 144783 - DNA, 19 bp, Homo sapiens
  siRNA target sequence for FIBL-6 (NM_031935.1,4223-4241).
gacaatggggagtacatct

SEQ ID NO: 144784 - DNA, 19 bp, Homo sapiens
  siRNA target sequence for FIBL-6 (NM_031935.1,4322-4340).
gaacaagttacaaatgtgt

SEQ ID NO: 144785 - DNA, 19 bp, Homo sapiens
  siRNA target sequence for FIBL-6 (NM_031935.1,4332-4350).
caaatgtgtcggtgttgtt

SEQ ID NO: 144786 - DNA, 19 bp, Homo sapiens
  siRNA target sequence for FIBL-6 (NM_031935.1,4446-4464).
ctattcagactgtgaacaa

SEQ ID NO: 144787 - DNA, 19 bp, Homo sapiens
  siRNA target sequence for FIBL-6 (NM_031935.1,4512-4530).
gatattcctgcaaagcaat

SEQ ID NO: 144788 - DNA, 19 bp, Homo sapiens
  siRNA target sequence for FIBL-6 (NM_031935.1,4522-4540).
caaagcaattaatattgca

SEQ ID NO: 144789 - DNA, 19 bp, Homo sapiens
  siRNA target sequence for FIBL-6 (NM_031935.1,4542-4560).
gcacttctcagaagtactt

SEQ ID NO: 144790 - DNA, 19 bp, Homo sapiens
  siRNA target sequence for FIBL-6 (NM_031935.1,4548-4566).
ctcagaagtactttaacat

SEQ ID NO: 144791 - DNA, 19 bp, Homo sapiens
  siRNA target sequence for FIBL-6 (NM_031935.1,4596-4614).
gtaccaacttcccaaatga

SEQ ID NO: 144792 - DNA, 19 bp, Homo sapiens
  siRNA target sequence for FIBL-6 (NM_031935.1,4634-4652).
cgtgacgtcgcccttgaat

SEQ ID NO: 144793 - DNA, 19 bp, Homo sapiens
  siRNA target sequence for FIBL-6 (NM_031935.1,4665-4683).
gcactccctttcctgatat

SEQ ID NO: 144794 - DNA, 19 bp, Homo sapiens
  siRNA target sequence for FIBL-6 (NM_031935.1,4666-4684).
cactccctttcctgatatt

SEQ ID NO: 144795 - DNA, 19 bp, Homo sapiens
  siRNA target sequence for FIBL-6 (NM_031935.1,4717-4735).
gggcgatcctaatgttgaa

SEQ ID NO: 144796 - DNA, 19 bp, Homo sapiens
  siRNA target sequence for FIBL-6 (NM_031935.1,4719-4737).
gcgatcctaatgttgaact

SEQ ID NO: 144797 - DNA, 19 bp, Homo sapiens
  siRNA target sequence for FIBL-6 (NM_031935.1,4720-4738).
cgatcctaatgttgaactt

SEQ ID NO: 144798 - DNA, 19 bp, Homo sapiens
  siRNA target sequence for FIBL-6 (NM_031935.1,4725-4743).
ctaatgttgaacttctaga

SEQ ID NO: 144799 - DNA, 19 bp, Homo sapiens
  siRNA target sequence for FIBL-6 (NM_031935.1,4798-4816).
ccaatgtactgtgtctaat

SEQ ID NO: 144800 - DNA, 19 bp, Homo sapiens
  siRNA target sequence for FIBL-6 (NM_031935.1,4823-4841).
ggcaaacaagccaaggata

SEQ ID NO: 144801 - DNA, 19 bp, Homo sapiens
  siRNA target sequence for FIBL-6 (NM_031935.1,4824-4842).
gcaaacaagccaaggatat

SEQ ID NO: 144802 - DNA, 19 bp, Homo sapiens
  siRNA target sequence for FIBL-6 (NM_031935.1,4825-4843).
caaacaagccaaggatata

SEQ ID NO: 144803 - DNA, 19 bp, Homo sapiens
  siRNA target sequence for FIBL-6 (NM_031935.1,4895-4913).
gacatatcagtattgatca

SEQ ID NO: 144804 - DNA, 19 bp, Homo sapiens
  siRNA target sequence for FIBL-6 (NM_031935.1,4957-4975).
gcctgccattacttggtat

SEQ ID NO: 144805 - DNA, 19 bp, Homo sapiens
  siRNA target sequence for FIBL-6 (NM_031935.1,4979-4997).
gacgggcagccaatcatgt

SEQ ID NO: 144806 - DNA, 19 bp, Homo sapiens
  siRNA target sequence for FIBL-6 (NM_031935.1,4998-5016).
ccagctcacaagcacttta

SEQ ID NO: 144807 - DNA, 19 bp, Homo sapiens
  siRNA target sequence for FIBL-6 (NM_031935.1,4999-5017).
cagctcacaagcactttat

SEQ ID NO: 144808 - DNA, 19 bp, Homo sapiens
  siRNA target sequence for FIBL-6 (NM_031935.1,5001-5019).
gctcacaagcactttatat

SEQ ID NO: 144809 - DNA, 19 bp, Homo sapiens
  siRNA target sequence for FIBL-6 (NM_031935.1,5048-5066).
cgagcacaggtctctgatt

SEQ ID NO: 144810 - DNA, 19 bp, Homo sapiens
  siRNA target sequence for FIBL-6 (NM_031935.1,5059-5077).
ctctgattcagcaacatat

SEQ ID NO: 144811 - DNA, 19 bp, Homo sapiens
  siRNA target sequence for FIBL-6 (NM_031935.1,5080-5098).
gtgtcacgtagccaatgtt

SEQ ID NO: 144812 - DNA, 19 bp, Homo sapiens
  siRNA target sequence for FIBL-6 (NM_031935.1,5102-5120).
ggaactgctgaaaaatcat

SEQ ID NO: 144813 - DNA, 19 bp, Homo sapiens
  siRNA target sequence for FIBL-6 (NM_031935.1,5134-5152).
ctatgttcctccaatgatt

SEQ ID NO: 144814 - DNA, 19 bp, Homo sapiens
  siRNA target sequence for FIBL-6 (NM_031935.1,5271-5289).
ctgtgaaagctaatgacaa

SEQ ID NO: 144815 - DNA, 19 bp, Homo sapiens
  siRNA target sequence for FIBL-6 (NM_031935.1,5309-5327).
gggaagaaactcgaaatca

SEQ ID NO: 144816 - DNA, 19 bp, Homo sapiens
  siRNA target sequence for FIBL-6 (NM_031935.1,5310-5328).
ggaagaaactcgaaatcat

SEQ ID NO: 144817 - DNA, 19 bp, Homo sapiens
  siRNA target sequence for FIBL-6 (NM_031935.1,5326-5344).
catgagtgcccaagaaatt

SEQ ID NO: 144818 - DNA, 19 bp, Homo sapiens
  siRNA target sequence for FIBL-6 (NM_031935.1,5329-5347).
gagtgcccaagaaattgat

SEQ ID NO: 144819 - DNA, 19 bp, Homo sapiens
  siRNA target sequence for FIBL-6 (NM_031935.1,5345-5363).
gatcgaggacagtacatat

SEQ ID NO: 144820 - DNA, 19 bp, Homo sapiens
  siRNA target sequence for FIBL-6 (NM_031935.1,5419-5437).
ggtgccaccagctatagaa

SEQ ID NO: 144821 - DNA, 19 bp, Homo sapiens
  siRNA target sequence for FIBL-6 (NM_031935.1,5444-5462).
gatgaaacatcttacttca

SEQ ID NO: 144822 - DNA, 19 bp, Homo sapiens
  siRNA target sequence for FIBL-6 (NM_031935.1,5479-5497).
cttactggagctagattgt

SEQ ID NO: 144823 - DNA, 19 bp, Homo sapiens
  siRNA target sequence for FIBL-6 (NM_031935.1,5508-5526).
gctctcccccaccaactat

SEQ ID NO: 144824 - DNA, 19 bp, Homo sapiens
  siRNA target sequence for FIBL-6 (NM_031935.1,5511-5529).
ctcccccaccaactatcat

SEQ ID NO: 144825 - DNA, 19 bp, Homo sapiens
  siRNA target sequence for FIBL-6 (NM_031935.1,5513-5531).
cccccaccaactatcatgt

SEQ ID NO: 144826 - DNA, 19 bp, Homo sapiens
  siRNA target sequence for FIBL-6 (NM_031935.1,5536-5554).
gaaggatggccagttaatt

SEQ ID NO: 144827 - DNA, 19 bp, Homo sapiens
  siRNA target sequence for FIBL-6 (NM_031935.1,5609-5627).
caggctcaagtgtcaaaca

SEQ ID NO: 144828 - DNA, 19 bp, Homo sapiens
  siRNA target sequence for FIBL-6 (NM_031935.1,5639-5657).
cggtgcatggcagcaaata

SEQ ID NO: 144829 - DNA, 19 bp, Homo sapiens
  siRNA target sequence for FIBL-6 (NM_031935.1,5641-5659).
gtgcatggcagcaaatact

SEQ ID NO: 144830 - DNA, 19 bp, Homo sapiens
  siRNA target sequence for FIBL-6 (NM_031935.1,5779-5797).
caatgggattccaaatcct

SEQ ID NO: 144831 - DNA, 19 bp, Homo sapiens
  siRNA target sequence for FIBL-6 (NM_031935.1,5795-5813).
ccttccattacatggttaa

SEQ ID NO: 144832 - DNA, 19 bp, Homo sapiens
  siRNA target sequence for FIBL-6 (NM_031935.1,5796-5814).
cttccattacatggttaaa

SEQ ID NO: 144833 - DNA, 19 bp, Homo sapiens
  siRNA target sequence for FIBL-6 (NM_031935.1,5835-5853).
ctgcccaaggaaaccttaa

SEQ ID NO: 144834 - DNA, 19 bp, Homo sapiens
  siRNA target sequence for FIBL-6 (NM_031935.1,5865-5883).
ctggtcgagttctacaaat

SEQ ID NO: 144835 - DNA, 19 bp, Homo sapiens
  siRNA target sequence for FIBL-6 (NM_031935.1,5949-5967).
cacaacagcacattcaact

SEQ ID NO: 144836 - DNA, 19 bp, Homo sapiens
  siRNA target sequence for FIBL-6 (NM_031935.1,5959-5977).
cattcaactgcatgttcat

SEQ ID NO: 144837 - DNA, 19 bp, Homo sapiens
  siRNA target sequence for FIBL-6 (NM_031935.1,6071-6089).
cctgtgcctgttattacat

SEQ ID NO: 144838 - DNA, 19 bp, Homo sapiens
  siRNA target sequence for FIBL-6 (NM_031935.1,6116-6134).
ggttccaccagcatgactt

SEQ ID NO: 144839 - DNA, 19 bp, Homo sapiens
  siRNA target sequence for FIBL-6 (NM_031935.1,6117-6135).
gttccaccagcatgacttt

SEQ ID NO: 144840 - DNA, 19 bp, Homo sapiens
  siRNA target sequence for FIBL-6 (NM_031935.1,6120-6138).
ccaccagcatgactttctt

SEQ ID NO: 144841 - DNA, 19 bp, Homo sapiens
  siRNA target sequence for FIBL-6 (NM_031935.1,6222-6240).
gagctacagagttatttta

SEQ ID NO: 144842 - DNA, 19 bp, Homo sapiens
  siRNA target sequence for FIBL-6 (NM_031935.1,6224-6242).
gctacagagttattttaca

SEQ ID NO: 144843 - DNA, 19 bp, Homo sapiens
  siRNA target sequence for FIBL-6 (NM_031935.1,6415-6433).
ctctggtggtcgaatccta

SEQ ID NO: 144844 - DNA, 19 bp, Homo sapiens
  siRNA target sequence for FIBL-6 (NM_031935.1,6435-6453).
cattgaccagtgcacaaat

SEQ ID NO: 144845 - DNA, 19 bp, Homo sapiens
  siRNA target sequence for FIBL-6 (NM_031935.1,6472-6490).
cacctgcgtggcagtgaat

SEQ ID NO: 144846 - DNA, 19 bp, Homo sapiens
  siRNA target sequence for FIBL-6 (NM_031935.1,6514-6532).
cattgacctccgagtatat

SEQ ID NO: 144847 - DNA, 19 bp, Homo sapiens
  siRNA target sequence for FIBL-6 (NM_031935.1,6583-6601).
ccaagctgtggaattacta

SEQ ID NO: 144848 - DNA, 19 bp, Homo sapiens
  siRNA target sequence for FIBL-6 (NM_031935.1,6584-6602).
caagctgtggaattactat

SEQ ID NO: 144849 - DNA, 19 bp, Homo sapiens
  siRNA target sequence for FIBL-6 (NM_031935.1,6620-6638).
cccccacctactcttactt

SEQ ID NO: 144850 - DNA, 19 bp, Homo sapiens
  siRNA target sequence for FIBL-6 (NM_031935.1,6626-6644).
cctactcttacttggttaa

SEQ ID NO: 144851 - DNA, 19 bp, Homo sapiens
  siRNA target sequence for FIBL-6 (NM_031935.1,6651-6669).
gccaccccttgctgaagaa

SEQ ID NO: 144852 - DNA, 19 bp, Homo sapiens
  siRNA target sequence for FIBL-6 (NM_031935.1,6652-6670).
ccaccccttgctgaagaaa

SEQ ID NO: 144853 - DNA, 19 bp, Homo sapiens
  siRNA target sequence for FIBL-6 (NM_031935.1,6731-6749).
gacactggtcgttacactt

SEQ ID NO: 144854 - DNA, 19 bp, Homo sapiens
  siRNA target sequence for FIBL-6 (NM_031935.1,6808-6826).
ggtccccccaaatattggt

SEQ ID NO: 144855 - DNA, 19 bp, Homo sapiens
  siRNA target sequence for FIBL-6 (NM_031935.1,6833-6851).
gatgaacttactcaactta

SEQ ID NO: 144856 - DNA, 19 bp, Homo sapiens
  siRNA target sequence for FIBL-6 (NM_031935.1,6954-6972).
ccatggggcgagttagaat

SEQ ID NO: 144857 - DNA, 19 bp, Homo sapiens
  siRNA target sequence for FIBL-6 (NM_031935.1,6955-6973).
catggggcgagttagaatt

SEQ ID NO: 144858 - DNA, 19 bp, Homo sapiens
  siRNA target sequence for FIBL-6 (NM_031935.1,6958-6976).
ggggcgagttagaatttta

SEQ ID NO: 144859 - DNA, 19 bp, Homo sapiens
  siRNA target sequence for FIBL-6 (NM_031935.1,6961-6979).
gcgagttagaattttatct

SEQ ID NO: 144860 - DNA, 19 bp, Homo sapiens
  siRNA target sequence for FIBL-6 (NM_031935.1,7015-7033).
gtctgatgcagcactctat

SEQ ID NO: 144861 - DNA, 19 bp, Homo sapiens
  siRNA target sequence for FIBL-6 (NM_031935.1,7019-7037).
gatgcagcactctattcat

SEQ ID NO: 144862 - DNA, 19 bp, Homo sapiens
  siRNA target sequence for FIBL-6 (NM_031935.1,7078-7096).
caatctgcaagtttacatt

SEQ ID NO: 144863 - DNA, 19 bp, Homo sapiens
  siRNA target sequence for FIBL-6 (NM_031935.1,7119-7137).
gcagccaccctactgaaat

SEQ ID NO: 144864 - DNA, 19 bp, Homo sapiens
  siRNA target sequence for FIBL-6 (NM_031935.1,7122-7140).
gccaccctactgaaattat

SEQ ID NO: 144865 - DNA, 19 bp, Homo sapiens
  siRNA target sequence for FIBL-6 (NM_031935.1,7123-7141).
ccaccctactgaaattatt

SEQ ID NO: 144866 - DNA, 19 bp, Homo sapiens
  siRNA target sequence for FIBL-6 (NM_031935.1,7142-7160).
gtgacccgagggaagagta

SEQ ID NO: 144867 - DNA, 19 bp, Homo sapiens
  siRNA target sequence for FIBL-6 (NM_031935.1,7217-7235).
gatggccaccccttgatca

SEQ ID NO: 144868 - DNA, 19 bp, Homo sapiens
  siRNA target sequence for FIBL-6 (NM_031935.1,7379-7397).
cctccaagcatcataggaa

SEQ ID NO: 144869 - DNA, 19 bp, Homo sapiens
  siRNA target sequence for FIBL-6 (NM_031935.1,7380-7398).
ctccaagcatcataggaaa

SEQ ID NO: 144870 - DNA, 19 bp, Homo sapiens
  siRNA target sequence for FIBL-6 (NM_031935.1,7400-7418).
cacaggtcacctgaaaata

SEQ ID NO: 144871 - DNA, 19 bp, Homo sapiens
  siRNA target sequence for FIBL-6 (NM_031935.1,7402-7420).
caggtcacctgaaaatatt

SEQ ID NO: 144872 - DNA, 19 bp, Homo sapiens
  siRNA target sequence for FIBL-6 (NM_031935.1,7427-7445).
gtagaaaagaactcagtat

SEQ ID NO: 144873 - DNA, 19 bp, Homo sapiens
  siRNA target sequence for FIBL-6 (NM_031935.1,7506-7524).
ggcctgtcagccttagcaa

SEQ ID NO: 144874 - DNA, 19 bp, Homo sapiens
  siRNA target sequence for FIBL-6 (NM_031935.1,7507-7525).
gcctgtcagccttagcaat

SEQ ID NO: 144875 - DNA, 19 bp, Homo sapiens
  siRNA target sequence for FIBL-6 (NM_031935.1,7508-7526).
cctgtcagccttagcaatt

SEQ ID NO: 144876 - DNA, 19 bp, Homo sapiens
  siRNA target sequence for FIBL-6 (NM_031935.1,7522-7540).
caattctgtgaggattctt

SEQ ID NO: 144877 - DNA, 19 bp, Homo sapiens
  siRNA target sequence for FIBL-6 (NM_031935.1,7583-7601).
gatgctggccaatatactt

SEQ ID NO: 144878 - DNA, 19 bp, Homo sapiens
  siRNA target sequence for FIBL-6 (NM_031935.1,7639-7657).
ctttgggctttcagtatta

SEQ ID NO: 144879 - DNA, 19 bp, Homo sapiens
  siRNA target sequence for FIBL-6 (NM_031935.1,7747-7765).
gaatccagtgccagaaatt

SEQ ID NO: 144880 - DNA, 19 bp, Homo sapiens
  siRNA target sequence for FIBL-6 (NM_031935.1,7799-7817).
gatgaagcccatcacatta

SEQ ID NO: 144881 - DNA, 19 bp, Homo sapiens
  siRNA target sequence for FIBL-6 (NM_031935.1,7802-7820).
gaagcccatcacattatat

SEQ ID NO: 144882 - DNA, 19 bp, Homo sapiens
  siRNA target sequence for FIBL-6 (NM_031935.1,7826-7844).
ggccgttttcttcaaatta

SEQ ID NO: 144883 - DNA, 19 bp, Homo sapiens
  siRNA target sequence for FIBL-6 (NM_031935.1,7912-7930).
caggagcttcagtcttaat

SEQ ID NO: 144884 - DNA, 19 bp, Homo sapiens
  siRNA target sequence for FIBL-6 (NM_031935.1,7914-7932).
ggagcttcagtcttaatgt

SEQ ID NO: 144885 - DNA, 19 bp, Homo sapiens
  siRNA target sequence for FIBL-6 (NM_031935.1,7996-8014).
ccttaacagccctacatct

SEQ ID NO: 144886 - DNA, 19 bp, Homo sapiens
  siRNA target sequence for FIBL-6 (NM_031935.1,8013-8031).
ctttggtctgtgaagctta

SEQ ID NO: 144887 - DNA, 19 bp, Homo sapiens
  siRNA target sequence for FIBL-6 (NM_031935.1,8017-8035).
ggtctgtgaagcttattca

SEQ ID NO: 144888 - DNA, 19 bp, Homo sapiens
  siRNA target sequence for FIBL-6 (NM_031935.1,8045-8063).
gctaccatcacctggttta

SEQ ID NO: 144889 - DNA, 19 bp, Homo sapiens
  siRNA target sequence for FIBL-6 (NM_031935.1,8046-8064).
ctaccatcacctggtttaa

SEQ ID NO: 144890 - DNA, 19 bp, Homo sapiens
  siRNA target sequence for FIBL-6 (NM_031935.1,8065-8083).
ggatggcactcctttagaa

SEQ ID NO: 144891 - DNA, 19 bp, Homo sapiens
  siRNA target sequence for FIBL-6 (NM_031935.1,8066-8084).
gatggcactcctttagaat

SEQ ID NO: 144892 - DNA, 19 bp, Homo sapiens
  siRNA target sequence for FIBL-6 (NM_031935.1,8085-8103).
ctaaccgaaatattcgtat

SEQ ID NO: 144893 - DNA, 19 bp, Homo sapiens
  siRNA target sequence for FIBL-6 (NM_031935.1,8224-8242).
cattccacccataatcaat

SEQ ID NO: 144894 - DNA, 19 bp, Homo sapiens
  siRNA target sequence for FIBL-6 (NM_031935.1,8271-8289).
cccctaaagaagtgaagat

SEQ ID NO: 144895 - DNA, 19 bp, Homo sapiens
  siRNA target sequence for FIBL-6 (NM_031935.1,8321-8339).
gaagcgtatgcaattcctt

SEQ ID NO: 144896 - DNA, 19 bp, Homo sapiens
  siRNA target sequence for FIBL-6 (NM_031935.1,8362-8380).
ggatggacagccccttaaa

SEQ ID NO: 144897 - DNA, 19 bp, Homo sapiens
  siRNA target sequence for FIBL-6 (NM_031935.1,8373-8391).
cccttaaatccgatgatca

SEQ ID NO: 144898 - DNA, 19 bp, Homo sapiens
  siRNA target sequence for FIBL-6 (NM_031935.1,8374-8392).
ccttaaatccgatgatcat

SEQ ID NO: 144899 - DNA, 19 bp, Homo sapiens
  siRNA target sequence for FIBL-6 (NM_031935.1,8382-8400).
ccgatgatcatgttaatat

SEQ ID NO: 144900 - DNA, 19 bp, Homo sapiens
  siRNA target sequence for FIBL-6 (NM_031935.1,8447-8465).
gacaccggacgatatactt

SEQ ID NO: 144901 - DNA, 19 bp, Homo sapiens
  siRNA target sequence for FIBL-6 (NM_031935.1,8449-8467).
caccggacgatatacttgt

SEQ ID NO: 144902 - DNA, 19 bp, Homo sapiens
  siRNA target sequence for FIBL-6 (NM_031935.1,8452-8470).
cggacgatatacttgtgta

SEQ ID NO: 144903 - DNA, 19 bp, Homo sapiens
  siRNA target sequence for FIBL-6 (NM_031935.1,8619-8637).
ctctttactgtgagacaaa

SEQ ID NO: 144904 - DNA, 19 bp, Homo sapiens
  siRNA target sequence for FIBL-6 (NM_031935.1,8686-8704).
gacctcaagtgataaagta

SEQ ID NO: 144905 - DNA, 19 bp, Homo sapiens
  siRNA target sequence for FIBL-6 (NM_031935.1,8688-8706).
cctcaagtgataaagtatt

SEQ ID NO: 144906 - DNA, 19 bp, Homo sapiens
  siRNA target sequence for FIBL-6 (NM_031935.1,8770-8788).
cacatgtgtggctgtgaat

SEQ ID NO: 144907 - DNA, 19 bp, Homo sapiens
  siRNA target sequence for FIBL-6 (NM_031935.1,8825-8843).
gtactcgtgccgccaatta

SEQ ID NO: 144908 - DNA, 19 bp, Homo sapiens
  siRNA target sequence for FIBL-6 (NM_031935.1,8828-8846).
ctcgtgccgccaattatca

SEQ ID NO: 144909 - DNA, 19 bp, Homo sapiens
  siRNA target sequence for FIBL-6 (NM_031935.1,8900-8918).
gcactgatagagtgtttat

SEQ ID NO: 144910 - DNA, 19 bp, Homo sapiens
  siRNA target sequence for FIBL-6 (NM_031935.1,8903-8921).
ctgatagagtgtttatcca

SEQ ID NO: 144911 - DNA, 19 bp, Homo sapiens
  siRNA target sequence for FIBL-6 (NM_031935.1,8981-8999).
gaccatcataaatttctat

SEQ ID NO: 144912 - DNA, 19 bp, Homo sapiens
  siRNA target sequence for FIBL-6 (NM_031935.1,9006-9024).
gacgaattctgcagattct

SEQ ID NO: 144913 - DNA, 19 bp, Homo sapiens
  siRNA target sequence for FIBL-6 (NM_031935.1,9008-9026).
cgaattctgcagattctga

SEQ ID NO: 144914 - DNA, 19 bp, Homo sapiens
  siRNA target sequence for FIBL-6 (NM_031935.1,9016-9034).
gcagattctgaatactcaa

SEQ ID NO: 144915 - DNA, 19 bp, Homo sapiens
  siRNA target sequence for FIBL-6 (NM_031935.1,9019-9037).
gattctgaatactcaaata

SEQ ID NO: 144916 - DNA, 19 bp, Homo sapiens
  siRNA target sequence for FIBL-6 (NM_031935.1,9025-9043).
gaatactcaaataacagat

SEQ ID NO: 144917 - DNA, 19 bp, Homo sapiens
  siRNA target sequence for FIBL-6 (NM_031935.1,9041-9059).
gatatcggcaggtatgtgt

SEQ ID NO: 144918 - DNA, 19 bp, Homo sapiens
  siRNA target sequence for FIBL-6 (NM_031935.1,9078-9096).
ctgggagtgccaaaaaata

SEQ ID NO: 144919 - DNA, 19 bp, Homo sapiens
  siRNA target sequence for FIBL-6 (NM_031935.1,9158-9176).
gtcgtggtgaacaatttca

SEQ ID NO: 144920 - DNA, 19 bp, Homo sapiens
  siRNA target sequence for FIBL-6 (NM_031935.1,9187-9205).
ctgtgaggtctctggtttt

SEQ ID NO: 144921 - DNA, 19 bp, Homo sapiens
  siRNA target sequence for FIBL-6 (NM_031935.1,9232-9250).
gaatgaacagcccatcaaa

SEQ ID NO: 144922 - DNA, 19 bp, Homo sapiens
  siRNA target sequence for FIBL-6 (NM_031935.1,9236-9254).
gaacagcccatcaaactga

SEQ ID NO: 144923 - DNA, 19 bp, Homo sapiens
  siRNA target sequence for FIBL-6 (NM_031935.1,9274-9292).
gcctggtggtcgaactcta

SEQ ID NO: 144924 - DNA, 19 bp, Homo sapiens
  siRNA target sequence for FIBL-6 (NM_031935.1,9279-9297).
gtggtcgaactctacagat

SEQ ID NO: 144925 - DNA, 19 bp, Homo sapiens
  siRNA target sequence for FIBL-6 (NM_031935.1,9281-9299).
ggtcgaactctacagatta

SEQ ID NO: 144926 - DNA, 19 bp, Homo sapiens
  siRNA target sequence for FIBL-6 (NM_031935.1,9282-9300).
gtcgaactctacagattat

SEQ ID NO: 144927 - DNA, 19 bp, Homo sapiens
  siRNA target sequence for FIBL-6 (NM_031935.1,9331-9349).
cacttgtatagctatcaat

SEQ ID NO: 144928 - DNA, 19 bp, Homo sapiens
  siRNA target sequence for FIBL-6 (NM_031935.1,9356-9374).
ggcgaaagcaagaaaaagt

SEQ ID NO: 144929 - DNA, 19 bp, Homo sapiens
  siRNA target sequence for FIBL-6 (NM_031935.1,9358-9376).
cgaaagcaagaaaaagttt

SEQ ID NO: 144930 - DNA, 19 bp, Homo sapiens
  siRNA target sequence for FIBL-6 (NM_031935.1,9422-9440).
gaatctctttctgtagtta

SEQ ID NO: 144931 - DNA, 19 bp, Homo sapiens
  siRNA target sequence for FIBL-6 (NM_031935.1,9497-9515).
ccagtcatcacttggtata

SEQ ID NO: 144932 - DNA, 19 bp, Homo sapiens
  siRNA target sequence for FIBL-6 (NM_031935.1,9498-9516).
cagtcatcacttggtataa

SEQ ID NO: 144933 - DNA, 19 bp, Homo sapiens
  siRNA target sequence for FIBL-6 (NM_031935.1,9500-9518).
gtcatcacttggtataaga

SEQ ID NO: 144934 - DNA, 19 bp, Homo sapiens
  siRNA target sequence for FIBL-6 (NM_031935.1,9502-9520).
catcacttggtataagaat

SEQ ID NO: 144935 - DNA, 19 bp, Homo sapiens
  siRNA target sequence for FIBL-6 (NM_031935.1,9517-9535).
gaatgggcggatgataaca

SEQ ID NO: 144936 - DNA, 19 bp, Homo sapiens
  siRNA target sequence for FIBL-6 (NM_031935.1,9540-9558).
ctactcatgtggagatttt

SEQ ID NO: 144937 - DNA, 19 bp, Homo sapiens
  siRNA target sequence for FIBL-6 (NM_031935.1,9602-9620).
gacacaggccagtatgtat

SEQ ID NO: 144938 - DNA, 19 bp, Homo sapiens
  siRNA target sequence for FIBL-6 (NM_031935.1,9613-9631).
gtatgtatgtagagctata

SEQ ID NO: 144939 - DNA, 19 bp, Homo sapiens
  siRNA target sequence for FIBL-6 (NM_031935.1,9635-9653).
gtagcaggacgggatgata

SEQ ID NO: 144940 - DNA, 19 bp, Homo sapiens
  siRNA target sequence for FIBL-6 (NM_031935.1,9638-9656).
gcaggacgggatgataaaa

SEQ ID NO: 144941 - DNA, 19 bp, Homo sapiens
  siRNA target sequence for FIBL-6 (NM_031935.1,9767-9785).
ccacctcccacgatagcat

SEQ ID NO: 144942 - DNA, 19 bp, Homo sapiens
  siRNA target sequence for FIBL-6 (NM_031935.1,9773-9791).
cccacgatagcatggttaa

SEQ ID NO: 144943 - DNA, 19 bp, Homo sapiens
  siRNA target sequence for FIBL-6 (NM_031935.1,9774-9792).
ccacgatagcatggttaaa

SEQ ID NO: 144944 - DNA, 19 bp, Homo sapiens
  siRNA target sequence for FIBL-6 (NM_031935.1,9777-9795).
cgatagcatggttaaagaa

SEQ ID NO: 144945 - DNA, 19 bp, Homo sapiens
  siRNA target sequence for FIBL-6 (NM_031935.1,9793-9811).
gaaccacaagcgcatagaa

SEQ ID NO: 144946 - DNA, 19 bp, Homo sapiens
  siRNA target sequence for FIBL-6 (NM_031935.1,9797-9815).
cacaagcgcatagaaaatt

SEQ ID NO: 144947 - DNA, 19 bp, Homo sapiens
  siRNA target sequence for FIBL-6 (NM_031935.1,9799-9817).
caagcgcatagaaaattct

SEQ ID NO: 144948 - DNA, 19 bp, Homo sapiens
  siRNA target sequence for FIBL-6 (NM_031935.1,9820-9838).
ctcactggaagttcgtatt

SEQ ID NO: 144949 - DNA, 19 bp, Homo sapiens
  siRNA target sequence for FIBL-6 (NM_031935.1,9826-9844).
ggaagttcgtattttgtct

SEQ ID NO: 144950 - DNA, 19 bp, Homo sapiens
  siRNA target sequence for FIBL-6 (NM_031935.1,9867-9885).
cccggtctcagcattcaga

SEQ ID NO: 144951 - DNA, 19 bp, Homo sapiens
  siRNA target sequence for FIBL-6 (NM_031935.1,9888-9906).
gtggaaactatacatgtat

SEQ ID NO: 144952 - DNA, 19 bp, Homo sapiens
  siRNA target sequence for FIBL-6 (NM_031935.1,9924-9942).
gaaaagcccagaaatatta

SEQ ID NO: 144953 - DNA, 19 bp, Homo sapiens
  siRNA target sequence for FIBL-6 (NM_031935.1,10047-10065).
gcattcctactccacttat

SEQ ID NO: 144954 - DNA, 19 bp, Homo sapiens
  siRNA target sequence for FIBL-6 (NM_031935.1,10052-10070).
cctactccacttattcaat

SEQ ID NO: 144955 - DNA, 19 bp, Homo sapiens
  siRNA target sequence for FIBL-6 (NM_031935.1,10090-10108).
catagctagtggtgaaaca

SEQ ID NO: 144956 - DNA, 19 bp, Homo sapiens
  siRNA target sequence for FIBL-6 (NM_031935.1,10127-10145).
gcaaatggcagcacattaa

SEQ ID NO: 144957 - DNA, 19 bp, Homo sapiens
  siRNA target sequence for FIBL-6 (NM_031935.1,10134-10152).
gcagcacattaaacattta

SEQ ID NO: 144958 - DNA, 19 bp, Homo sapiens
  siRNA target sequence for FIBL-6 (NM_031935.1,10211-10229).
gaagaagaccgaattttta

SEQ ID NO: 144959 - DNA, 19 bp, Homo sapiens
  siRNA target sequence for FIBL-6 (NM_031935.1,10217-10235).
gaccgaatttttaacttga

SEQ ID NO: 144960 - DNA, 19 bp, Homo sapiens
  siRNA target sequence for FIBL-6 (NM_031935.1,10231-10249).
cttgaatgtctatgttaca

SEQ ID NO: 144961 - DNA, 19 bp, Homo sapiens
  siRNA target sequence for FIBL-6 (NM_031935.1,10240-10258).
ctatgttacacctacaatt

SEQ ID NO: 144962 - DNA, 19 bp, Homo sapiens
  siRNA target sequence for FIBL-6 (NM_031935.1,10291-10309).
gactttagtggatacttca

SEQ ID NO: 144963 - DNA, 19 bp, Homo sapiens
  siRNA target sequence for FIBL-6 (NM_031935.1,10340-10358).
cctccaccacagataaact

SEQ ID NO: 144964 - DNA, 19 bp, Homo sapiens
  siRNA target sequence for FIBL-6 (NM_031935.1,10409-10427).
gcagcaggacaagttatca

SEQ ID NO: 144965 - DNA, 19 bp, Homo sapiens
  siRNA target sequence for FIBL-6 (NM_031935.1,10451-10469).
gatgtcgctgtgtatactt

SEQ ID NO: 144966 - DNA, 19 bp, Homo sapiens
  siRNA target sequence for FIBL-6 (NM_031935.1,10483-10501).
cagagctggggtggataat

SEQ ID NO: 144967 - DNA, 19 bp, Homo sapiens
  siRNA target sequence for FIBL-6 (NM_031935.1,10488-10506).
ctggggtggataataagca

SEQ ID NO: 144968 - DNA, 19 bp, Homo sapiens
  siRNA target sequence for FIBL-6 (NM_031935.1,10529-10547).
ccaccaaatatggacaatt

SEQ ID NO: 144969 - DNA, 19 bp, Homo sapiens
  siRNA target sequence for FIBL-6 (NM_031935.1,10591-10609).
ctctatggcatgcattact

SEQ ID NO: 144970 - DNA, 19 bp, Homo sapiens
  siRNA target sequence for FIBL-6 (NM_031935.1,10593-10611).
ctatggcatgcattactga

SEQ ID NO: 144971 - DNA, 19 bp, Homo sapiens
  siRNA target sequence for FIBL-6 (NM_031935.1,10772-10790).
gaagtcagcaagcacttta

SEQ ID NO: 144972 - DNA, 19 bp, Homo sapiens
  siRNA target sequence for FIBL-6 (NM_031935.1,10801-10819).
cctagaaccacctcacatt

SEQ ID NO: 144973 - DNA, 19 bp, Homo sapiens
  siRNA target sequence for FIBL-6 (NM_031935.1,10802-10820).
ctagaaccacctcacatta

SEQ ID NO: 144974 - DNA, 19 bp, Homo sapiens
  siRNA target sequence for FIBL-6 (NM_031935.1,10835-10853).
catgaagagatatcagtaa

SEQ ID NO: 144975 - DNA, 19 bp, Homo sapiens
  siRNA target sequence for FIBL-6 (NM_031935.1,10843-10861).
gatatcagtaattgttaat

SEQ ID NO: 144976 - DNA, 19 bp, Homo sapiens
  siRNA target sequence for FIBL-6 (NM_031935.1,10871-10889).
gaacttacctgcattgctt

SEQ ID NO: 144977 - DNA, 19 bp, Homo sapiens
  siRNA target sequence for FIBL-6 (NM_031935.1,10971-10989).
gaggagaggttcttcgaat

SEQ ID NO: 144978 - DNA, 19 bp, Homo sapiens
  siRNA target sequence for FIBL-6 (NM_031935.1,10973-10991).
ggagaggttcttcgaattt

SEQ ID NO: 144979 - DNA, 19 bp, Homo sapiens
  siRNA target sequence for FIBL-6 (NM_031935.1,10976-10994).
gaggttcttcgaatttcta

SEQ ID NO: 144980 - DNA, 19 bp, Homo sapiens
  siRNA target sequence for FIBL-6 (NM_031935.1,10978-10996).
ggttcttcgaatttctact

SEQ ID NO: 144981 - DNA, 19 bp, Homo sapiens
  siRNA target sequence for FIBL-6 (NM_031935.1,11008-11026).
ggatacaggaagatataca

SEQ ID NO: 144982 - DNA, 19 bp, Homo sapiens
  siRNA target sequence for FIBL-6 (NM_031935.1,11078-11096).
gtgcatgtacctcctaata

SEQ ID NO: 144983 - DNA, 19 bp, Homo sapiens
  siRNA target sequence for FIBL-6 (NM_031935.1,11080-11098).
gcatgtacctcctaatatt

SEQ ID NO: 144984 - DNA, 19 bp, Homo sapiens
  siRNA target sequence for FIBL-6 (NM_031935.1,11174-11192).
gtgcccccacctgtaatta

SEQ ID NO: 144985 - DNA, 19 bp, Homo sapiens
  siRNA target sequence for FIBL-6 (NM_031935.1,11176-11194).
gcccccacctgtaattact

SEQ ID NO: 144986 - DNA, 19 bp, Homo sapiens
  siRNA target sequence for FIBL-6 (NM_031935.1,11177-11195).
cccccacctgtaattactt

SEQ ID NO: 144987 - DNA, 19 bp, Homo sapiens
  siRNA target sequence for FIBL-6 (NM_031935.1,11228-11246).
cctcgagtgcgaatcctat

SEQ ID NO: 144988 - DNA, 19 bp, Homo sapiens
  siRNA target sequence for FIBL-6 (NM_031935.1,11250-11268).
gagggagatacttgcaaat

SEQ ID NO: 144989 - DNA, 19 bp, Homo sapiens
  siRNA target sequence for FIBL-6 (NM_031935.1,11253-11271).
ggagatacttgcaaatcaa

SEQ ID NO: 144990 - DNA, 19 bp, Homo sapiens
  siRNA target sequence for FIBL-6 (NM_031935.1,11332-11350).
gactacaagagaatttatt

SEQ ID NO: 144991 - DNA, 19 bp, Homo sapiens
  siRNA target sequence for FIBL-6 (NM_031935.1,11392-11410).
gagccttgtaattctttta

SEQ ID NO: 144992 - DNA, 19 bp, Homo sapiens
  siRNA target sequence for FIBL-6 (NM_031935.1,11495-11513).
gggaatcatgcaagatatt

SEQ ID NO: 144993 - DNA, 19 bp, Homo sapiens
  siRNA target sequence for FIBL-6 (NM_031935.1,11528-11546).
ggattccttcatattcaat

SEQ ID NO: 144994 - DNA, 19 bp, Homo sapiens
  siRNA target sequence for FIBL-6 (NM_031935.1,11559-11577).
ctgacactggacggtattt

SEQ ID NO: 144995 - DNA, 19 bp, Homo sapiens
  siRNA target sequence for FIBL-6 (NM_031935.1,11565-11583).
ctggacggtatttgtgtat

SEQ ID NO: 144996 - DNA, 19 bp, Homo sapiens
  siRNA target sequence for FIBL-6 (NM_031935.1,11604-11622).
cagatcgcaggcgaataga

SEQ ID NO: 144997 - DNA, 19 bp, Homo sapiens
  siRNA target sequence for FIBL-6 (NM_031935.1,11606-11624).
gatcgcaggcgaatagatt

SEQ ID NO: 144998 - DNA, 19 bp, Homo sapiens
  siRNA target sequence for FIBL-6 (NM_031935.1,11610-11628).
gcaggcgaatagatttaca

SEQ ID NO: 144999 - DNA, 19 bp, Homo sapiens
  siRNA target sequence for FIBL-6 (NM_031935.1,11654-11672).
ccgggtcctaccaacatga

SEQ ID NO: 145000 - DNA, 19 bp, Homo sapiens
  siRNA target sequence for FIBL-6 (NM_031935.1,11759-11777).
cttcttaatgtggatcaaa

SEQ ID NO: 145001 - DNA, 19 bp, Homo sapiens
  siRNA target sequence for FIBL-6 (NM_031935.1,11805-11823).
caggttcactagtaattat

SEQ ID NO: 145002 - DNA, 19 bp, Homo sapiens
  siRNA target sequence for FIBL-6 (NM_031935.1,11840-11858).
gacactgcaacctatgaat

SEQ ID NO: 145003 - DNA, 19 bp, Homo sapiens
  siRNA target sequence for FIBL-6 (NM_031935.1,11842-11860).
cactgcaacctatgaatgt

SEQ ID NO: 145004 - DNA, 19 bp, Homo sapiens
  siRNA target sequence for FIBL-6 (NM_031935.1,11872-11890).
cggtgctggagatgataaa

SEQ ID NO: 145005 - DNA, 19 bp, Homo sapiens
  siRNA target sequence for FIBL-6 (NM_031935.1,11930-11948).
gctgatgagcctacagatt

SEQ ID NO: 145006 - DNA, 19 bp, Homo sapiens
  siRNA target sequence for FIBL-6 (NM_031935.1,11963-11981).
catgccccagcagtaatta

SEQ ID NO: 145007 - DNA, 19 bp, Homo sapiens
  siRNA target sequence for FIBL-6 (NM_031935.1,11966-11984).
gccccagcagtaattacct

SEQ ID NO: 145008 - DNA, 19 bp, Homo sapiens
  siRNA target sequence for FIBL-6 (NM_031935.1,11988-12006).
ctgcttcgggagttccatt

SEQ ID NO: 145009 - DNA, 19 bp, Homo sapiens
  siRNA target sequence for FIBL-6 (NM_031935.1,12051-12069).
ggggagatggctatagaat

SEQ ID NO: 145010 - DNA, 19 bp, Homo sapiens
  siRNA target sequence for FIBL-6 (NM_031935.1,12056-12074).
gatggctatagaattctgt

SEQ ID NO: 145011 - DNA, 19 bp, Homo sapiens
  siRNA target sequence for FIBL-6 (NM_031935.1,12127-12145).
cacttgtgtcgctaggaat

SEQ ID NO: 145012 - DNA, 19 bp, Homo sapiens
  siRNA target sequence for FIBL-6 (NM_031935.1,12216-12234).
gtgaactacacgtcattct

SEQ ID NO: 145013 - DNA, 19 bp, Homo sapiens
  siRNA target sequence for FIBL-6 (NM_031935.1,12218-12236).
gaactacacgtcattctga

SEQ ID NO: 145014 - DNA, 19 bp, Homo sapiens
  siRNA target sequence for FIBL-6 (NM_031935.1,12233-12251).
ctgaacaatcctattttat

SEQ ID NO: 145015 - DNA, 19 bp, Homo sapiens
  siRNA target sequence for FIBL-6 (NM_031935.1,12347-12365).
cctagtggcggcttacaga

SEQ ID NO: 145016 - DNA, 19 bp, Homo sapiens
  siRNA target sequence for FIBL-6 (NM_031935.1,12348-12366).
ctagtggcggcttacagat

SEQ ID NO: 145017 - DNA, 19 bp, Homo sapiens
  siRNA target sequence for FIBL-6 (NM_031935.1,12432-12450).
ccttgggcaaaatcaagtt

SEQ ID NO: 145018 - DNA, 19 bp, Homo sapiens
  siRNA target sequence for FIBL-6 (NM_031935.1,12470-12488).
gtcattagccctcatctaa

SEQ ID NO: 145019 - DNA, 19 bp, Homo sapiens
  siRNA target sequence for FIBL-6 (NM_031935.1,12478-12496).
ccctcatctaaaggaatat

SEQ ID NO: 145020 - DNA, 19 bp, Homo sapiens
  siRNA target sequence for FIBL-6 (NM_031935.1,12509-12527).
gacaagcccatcacgttat

SEQ ID NO: 145021 - DNA, 19 bp, Homo sapiens
  siRNA target sequence for FIBL-6 (NM_031935.1,12547-12565).
ccctccgcctgacattaca

SEQ ID NO: 145022 - DNA, 19 bp, Homo sapiens
  siRNA target sequence for FIBL-6 (NM_031935.1,12548-12566).
cctccgcctgacattacat

SEQ ID NO: 145023 - DNA, 19 bp, Homo sapiens
  siRNA target sequence for FIBL-6 (NM_031935.1,12623-12641).
ggctctctgcaaatagcat

SEQ ID NO: 145024 - DNA, 19 bp, Homo sapiens
  siRNA target sequence for FIBL-6 (NM_031935.1,12759-12777).
gacactacacggtcaatga

SEQ ID NO: 145025 - DNA, 19 bp, Homo sapiens
  siRNA target sequence for FIBL-6 (NM_031935.1,12761-12779).
cactacacggtcaatgaga

SEQ ID NO: 145026 - DNA, 19 bp, Homo sapiens
  siRNA target sequence for FIBL-6 (NM_031935.1,12766-12784).
cacggtcaatgagaattca

SEQ ID NO: 145027 - DNA, 19 bp, Homo sapiens
  siRNA target sequence for FIBL-6 (NM_031935.1,12798-12816).
catgcgtagctgatggaat

SEQ ID NO: 145028 - DNA, 19 bp, Homo sapiens
  siRNA target sequence for FIBL-6 (NM_031935.1,12824-12842).
ccagcaattaactggaaaa

SEQ ID NO: 145029 - DNA, 19 bp, Homo sapiens
  siRNA target sequence for FIBL-6 (NM_031935.1,12845-12863).
gacaatgttcttttagcta

SEQ ID NO: 145030 - DNA, 19 bp, Homo sapiens
  siRNA target sequence for FIBL-6 (NM_031935.1,12860-12878).
gctaacttgttaggaaaat

SEQ ID NO: 145031 - DNA, 19 bp, Homo sapiens
  siRNA target sequence for FIBL-6 (NM_031935.1,12929-12947).
gattctggcttctatacct

SEQ ID NO: 145032 - DNA, 19 bp, Homo sapiens
  siRNA target sequence for FIBL-6 (NM_031935.1,12990-13008).
gcctgactgtgcatgttct

SEQ ID NO: 145033 - DNA, 19 bp, Homo sapiens
  siRNA target sequence for FIBL-6 (NM_031935.1,13028-13046).
cctggagacgtgtcattaa

SEQ ID NO: 145034 - DNA, 19 bp, Homo sapiens
  siRNA target sequence for FIBL-6 (NM_031935.1,13032-13050).
gagacgtgtcattaaataa

SEQ ID NO: 145035 - DNA, 19 bp, Homo sapiens
  siRNA target sequence for FIBL-6 (NM_031935.1,13055-13073).
gaacagctacgattaagct

SEQ ID NO: 145036 - DNA, 19 bp, Homo sapiens
  siRNA target sequence for FIBL-6 (NM_031935.1,13060-13078).
gctacgattaagctgtaaa

SEQ ID NO: 145037 - DNA, 19 bp, Homo sapiens
  siRNA target sequence for FIBL-6 (NM_031935.1,13064-13082).
cgattaagctgtaaagcta

SEQ ID NO: 145038 - DNA, 19 bp, Homo sapiens
  siRNA target sequence for FIBL-6 (NM_031935.1,13138-13156).
ccactttgacagtgtgaat

SEQ ID NO: 145039 - DNA, 19 bp, Homo sapiens
  siRNA target sequence for FIBL-6 (NM_031935.1,13153-13171).
gaatggacacagtgaactt

SEQ ID NO: 145040 - DNA, 19 bp, Homo sapiens
  siRNA target sequence for FIBL-6 (NM_031935.1,13162-13180).
cagtgaacttgttattgaa

SEQ ID NO: 145041 - DNA, 19 bp, Homo sapiens
  siRNA target sequence for FIBL-6 (NM_031935.1,13243-13261).
gaaggcaattggatttgtt

SEQ ID NO: 145042 - DNA, 19 bp, Homo sapiens
  siRNA target sequence for FIBL-6 (NM_031935.1,13316-13334).
ccacttggtgggaatgcaa

SEQ ID NO: 145043 - DNA, 19 bp, Homo sapiens
  siRNA target sequence for FIBL-6 (NM_031935.1,13317-13335).
cacttggtgggaatgcaat

SEQ ID NO: 145044 - DNA, 19 bp, Homo sapiens
  siRNA target sequence for FIBL-6 (NM_031935.1,13325-13343).
gggaatgcaatcctgaatt

SEQ ID NO: 145045 - DNA, 19 bp, Homo sapiens
  siRNA target sequence for FIBL-6 (NM_031935.1,13384-13402).
cagaaagggagtggatatt

SEQ ID NO: 145046 - DNA, 19 bp, Homo sapiens
  siRNA target sequence for FIBL-6 (NM_031935.1,13445-13463).
gccatctatggcactgtta

SEQ ID NO: 145047 - DNA, 19 bp, Homo sapiens
  siRNA target sequence for FIBL-6 (NM_031935.1,13446-13464).
ccatctatggcactgttaa

SEQ ID NO: 145048 - DNA, 19 bp, Homo sapiens
  siRNA target sequence for FIBL-6 (NM_031935.1,13466-13484).
gaagatgccggtgactata

SEQ ID NO: 145049 - DNA, 19 bp, Homo sapiens
  siRNA target sequence for FIBL-6 (NM_031935.1,13469-13487).
gatgccggtgactatacat

SEQ ID NO: 145050 - DNA, 19 bp, Homo sapiens
  siRNA target sequence for FIBL-6 (NM_031935.1,13474-13492).
cggtgactatacatgtgta

SEQ ID NO: 145051 - DNA, 19 bp, Homo sapiens
  siRNA target sequence for FIBL-6 (NM_031935.1,13565-13583).
gagccagtggaaactgtta

SEQ ID NO: 145052 - DNA, 19 bp, Homo sapiens
  siRNA target sequence for FIBL-6 (NM_031935.1,13567-13585).
gccagtggaaactgttatt

SEQ ID NO: 145053 - DNA, 19 bp, Homo sapiens
  siRNA target sequence for FIBL-6 (NM_031935.1,13589-13607).
gctggtggcaaaatcatat

SEQ ID NO: 145054 - DNA, 19 bp, Homo sapiens
  siRNA target sequence for FIBL-6 (NM_031935.1,13590-13608).
ctggtggcaaaatcatatt

SEQ ID NO: 145055 - DNA, 19 bp, Homo sapiens
  siRNA target sequence for FIBL-6 (NM_031935.1,13630-13648).
gcctcaaccaaccattaca

SEQ ID NO: 145056 - DNA, 19 bp, Homo sapiens
  siRNA target sequence for FIBL-6 (NM_031935.1,13631-13649).
cctcaaccaaccattacat

SEQ ID NO: 145057 - DNA, 19 bp, Homo sapiens
  siRNA target sequence for FIBL-6 (NM_031935.1,13653-13671).
cccgtcaagggcactctat

SEQ ID NO: 145058 - DNA, 19 bp, Homo sapiens
  siRNA target sequence for FIBL-6 (NM_031935.1,13654-13672).
ccgtcaagggcactctatt

SEQ ID NO: 145059 - DNA, 19 bp, Homo sapiens
  siRNA target sequence for FIBL-6 (NM_031935.1,13677-13695).
gggatgaccgggttaacgt

SEQ ID NO: 145060 - DNA, 19 bp, Homo sapiens
  siRNA target sequence for FIBL-6 (NM_031935.1,13694-13712).
gtgttgtccaacaactcat

SEQ ID NO: 145061 - DNA, 19 bp, Homo sapiens
  siRNA target sequence for FIBL-6 (NM_031935.1,13699-13717).
gtccaacaactcattatat

SEQ ID NO: 145062 - DNA, 19 bp, Homo sapiens
  siRNA target sequence for FIBL-6 (NM_031935.1,13701-13719).
ccaacaactcattatatat

SEQ ID NO: 145063 - DNA, 19 bp, Homo sapiens
  siRNA target sequence for FIBL-6 (NM_031935.1,13758-13776).
gtgttgctcgaaacttaat

SEQ ID NO: 145064 - DNA, 19 bp, Homo sapiens
  siRNA target sequence for FIBL-6 (NM_031935.1,13935-13953).
gccaaggttcagatttgga

SEQ ID NO: 145065 - DNA, 19 bp, Homo sapiens
  siRNA target sequence for FIBL-6 (NM_031935.1,13936-13954).
ccaaggttcagatttggaa

SEQ ID NO: 145066 - DNA, 19 bp, Homo sapiens
  siRNA target sequence for FIBL-6 (NM_031935.1,13952-13970).
gaaatgcgaaactgtcaaa

SEQ ID NO: 145067 - DNA, 19 bp, Homo sapiens
  siRNA target sequence for FIBL-6 (NM_031935.1,14059-14077).
gaccaggacttgcaataat

SEQ ID NO: 145068 - DNA, 19 bp, Homo sapiens
  siRNA target sequence for FIBL-6 (NM_031935.1,14062-14080).
caggacttgcaataatcca

SEQ ID NO: 145069 - DNA, 19 bp, Homo sapiens
  siRNA target sequence for FIBL-6 (NM_031935.1,14201-14219).
gaaagttgtgggaaaggta

SEQ ID NO: 145070 - DNA, 19 bp, Homo sapiens
  siRNA target sequence for FIBL-6 (NM_031935.1,14229-14247).
gagcaagactttgtaataa

SEQ ID NO: 145071 - DNA, 19 bp, Homo sapiens
  siRNA target sequence for FIBL-6 (NM_031935.1,14296-14314).
gatgcaagtttgcaatgaa

SEQ ID NO: 145072 - DNA, 19 bp, Homo sapiens
  siRNA target sequence for FIBL-6 (NM_031935.1,14299-14317).
gcaagtttgcaatgaaaga

SEQ ID NO: 145073 - DNA, 19 bp, Homo sapiens
  siRNA target sequence for FIBL-6 (NM_031935.1,14387-14405).
ggtgccagacagagaacaa

SEQ ID NO: 145074 - DNA, 19 bp, Homo sapiens
  siRNA target sequence for FIBL-6 (NM_031935.1,14429-14447).
cagtatggaggaaggaaat

SEQ ID NO: 145075 - DNA, 19 bp, Homo sapiens
  siRNA target sequence for FIBL-6 (NM_031935.1,14571-14589).
ggtaccgcacatgtgataa

SEQ ID NO: 145076 - DNA, 19 bp, Homo sapiens
  siRNA target sequence for FIBL-6 (NM_031935.1,14927-14945).
gatagccctaactctgata

SEQ ID NO: 145077 - DNA, 19 bp, Homo sapiens
  siRNA target sequence for FIBL-6 (NM_031935.1,14932-14950).
ccctaactctgatactaga

SEQ ID NO: 145078 - DNA, 19 bp, Homo sapiens
  siRNA target sequence for FIBL-6 (NM_031935.1,14934-14952).
ctaactctgatactagaat

SEQ ID NO: 145079 - DNA, 19 bp, Homo sapiens
  siRNA target sequence for FIBL-6 (NM_031935.1,14938-14956).
ctctgatactagaataata

SEQ ID NO: 145080 - DNA, 19 bp, Homo sapiens
  siRNA target sequence for FIBL-6 (NM_031935.1,14971-14989).
caatgtacctcgtagtctt

SEQ ID NO: 145081 - DNA, 19 bp, Homo sapiens
  siRNA target sequence for FIBL-6 (NM_031935.1,14987-15005).
cttggttcagcaatgagaa

SEQ ID NO: 145082 - DNA, 19 bp, Homo sapiens
  siRNA target sequence for FIBL-6 (NM_031935.1,15001-15019).
gagaaagatagtttctatt

SEQ ID NO: 145083 - DNA, 19 bp, Homo sapiens
  siRNA target sequence for FIBL-6 (NM_031935.1,15003-15021).
gaaagatagtttctattct

SEQ ID NO: 145084 - DNA, 19 bp, Homo sapiens
  siRNA target sequence for FIBL-6 (NM_031935.1,15136-15154).
cttgcagatgagtcatatt

SEQ ID NO: 145085 - DNA, 19 bp, Homo sapiens
  siRNA target sequence for FIBL-6 (NM_031935.1,15176-15194).
ggttctttgctgctagata

SEQ ID NO: 145086 - DNA, 19 bp, Homo sapiens
  siRNA target sequence for FIBL-6 (NM_031935.1,15177-15195).
gttctttgctgctagatat

SEQ ID NO: 145087 - DNA, 19 bp, Homo sapiens
  siRNA target sequence for FIBL-6 (NM_031935.1,15180-15198).
ctttgctgctagatatcgt

SEQ ID NO: 145088 - DNA, 19 bp, Homo sapiens
  siRNA target sequence for FIBL-6 (NM_031935.1,15241-15259).
cactgtaaaggattacaca

SEQ ID NO: 145089 - DNA, 19 bp, Homo sapiens
  siRNA target sequence for FIBL-6 (NM_031935.1,15328-15346).
catcagcatcccatacaca

SEQ ID NO: 145090 - DNA, 19 bp, Homo sapiens
  siRNA target sequence for FIBL-6 (NM_031935.1,15349-15367).
gaaccacaccgttttctat

SEQ ID NO: 145091 - DNA, 19 bp, Homo sapiens
  siRNA target sequence for FIBL-6 (NM_031935.1,15352-15370).
ccacaccgttttctatgat

SEQ ID NO: 145092 - DNA, 19 bp, Homo sapiens
  siRNA target sequence for FIBL-6 (NM_031935.1,15418-15436).
ctctgtggaatctgactat

SEQ ID NO: 145093 - DNA, 19 bp, Homo sapiens
  siRNA target sequence for FIBL-6 (NM_031935.1,15420-15438).
ctgtggaatctgactataa

SEQ ID NO: 145094 - DNA, 19 bp, Homo sapiens
  siRNA target sequence for FIBL-6 (NM_031935.1,15484-15502).
caaaggagatcgcagtaat

SEQ ID NO: 145095 - DNA, 19 bp, Homo sapiens
  siRNA target sequence for FIBL-6 (NM_031935.1,15488-15506).
ggagatcgcagtaatcagt

SEQ ID NO: 145096 - DNA, 19 bp, Homo sapiens
  siRNA target sequence for FIBL-6 (NM_031935.1,15507-15525).
gcccctccgggtttacctt

SEQ ID NO: 145097 - DNA, 19 bp, Homo sapiens
  siRNA target sequence for FIBL-6 (NM_031935.1,15508-15526).
cccctccgggtttacctta

SEQ ID NO: 145098 - DNA, 19 bp, Homo sapiens
  siRNA target sequence for FIBL-6 (NM_031935.1,15527-15545).
gactcagttggaccttttt

SEQ ID NO: 145099 - DNA, 19 bp, Homo sapiens
  siRNA target sequence for FIBL-6 (NM_031935.1,15529-15547).
ctcagttggacctttttgt

SEQ ID NO: 145100 - DNA, 19 bp, Homo sapiens
  siRNA target sequence for FIBL-6 (NM_031935.1,15602-15620).
gccatggggacttactact

SEQ ID NO: 145101 - DNA, 19 bp, Homo sapiens
  siRNA target sequence for FIBL-6 (NM_031935.1,15713-15731).
ggtcaggactgtgacaata

SEQ ID NO: 145102 - DNA, 19 bp, Homo sapiens
  siRNA target sequence for FIBL-6 (NM_031935.1,15716-15734).
caggactgtgacaatacga

SEQ ID NO: 145103 - DNA, 19 bp, Homo sapiens
  siRNA target sequence for FIBL-6 (NM_031935.1,15727-15745).
caatacgattggatcttat

SEQ ID NO: 145104 - DNA, 19 bp, Homo sapiens
  siRNA target sequence for FIBL-6 (NM_031935.1,15793-15811).
gctgagttgtcaagatatt

SEQ ID NO: 145105 - DNA, 19 bp, Homo sapiens
  siRNA target sequence for FIBL-6 (NM_031935.1,15857-15875).
gccataggaagtttccatt

SEQ ID NO: 145106 - DNA, 19 bp, Homo sapiens
  siRNA target sequence for FIBL-6 (NM_031935.1,15923-15941).
gtgaacgagtgtagacaaa

SEQ ID NO: 145107 - DNA, 19 bp, Homo sapiens
  siRNA target sequence for FIBL-6 (NM_031935.1,15928-15946).
cgagtgtagacaaaatgta

SEQ ID NO: 145108 - DNA, 19 bp, Homo sapiens
  siRNA target sequence for FIBL-6 (NM_031935.1,15984-16002).
gctataagtgcattgatct

SEQ ID NO: 145109 - DNA, 19 bp, Homo sapiens
  siRNA target sequence for FIBL-6 (NM_031935.1,16069-16087).
gacccatcagtgcagatat

SEQ ID NO: 145110 - DNA, 19 bp, Homo sapiens
  siRNA target sequence for FIBL-6 (NM_031935.1,16071-16089).
cccatcagtgcagatataa

SEQ ID NO: 145111 - DNA, 19 bp, Homo sapiens
  siRNA target sequence for FIBL-6 (NM_031935.1,16112-16130).
ggcagctatcgttgtgtat

SEQ ID NO: 145112 - DNA, 19 bp, Homo sapiens
  siRNA target sequence for FIBL-6 (NM_031935.1,16164-16182).
gaccctgcatggacattaa

SEQ ID NO: 145113 - DNA, 19 bp, Homo sapiens
  siRNA target sequence for FIBL-6 (NM_031935.1,16167-16185).
cctgcatggacattaatga

SEQ ID NO: 145114 - DNA, 19 bp, Homo sapiens
  siRNA target sequence for FIBL-6 (NM_031935.1,16190-16208).
gaacaagtgcctaaacctt

SEQ ID NO: 145115 - DNA, 19 bp, Homo sapiens
  siRNA target sequence for FIBL-6 (NM_031935.1,16254-16272).
gtccaccaggacaacattt

SEQ ID NO: 145116 - DNA, 19 bp, Homo sapiens
  siRNA target sequence for FIBL-6 (NM_031935.1,16313-16331).
ccaaattatggcactcaat

SEQ ID NO: 145117 - DNA, 19 bp, Homo sapiens
  siRNA target sequence for FIBL-6 (NM_031935.1,16314-16332).
caaattatggcactcaata

SEQ ID NO: 145118 - DNA, 19 bp, Homo sapiens
  siRNA target sequence for FIBL-6 (NM_031935.1,16324-16342).
cactcaatacagtagctat

SEQ ID NO: 145119 - DNA, 19 bp, Homo sapiens
  siRNA target sequence for FIBL-6 (NM_031935.1,16326-16344).
ctcaatacagtagctataa

SEQ ID NO: 145120 - DNA, 19 bp, Homo sapiens
  siRNA target sequence for FIBL-6 (NM_031935.1,16360-16378).
ccctgtgagaaacaactat

SEQ ID NO: 145121 - DNA, 19 bp, Homo sapiens
  siRNA target sequence for FIBL-6 (NM_031935.1,16362-16380).
ctgtgagaaacaactatca

SEQ ID NO: 145122 - DNA, 19 bp, Homo sapiens
  siRNA target sequence for FIBL-6 (NM_031935.1,16420-16438).
ctcctactcagagtataga

SEQ ID NO: 145123 - DNA, 19 bp, Homo sapiens
  siRNA target sequence for FIBL-6 (NM_031935.1,16459-16477).
caggactagaaggactatt

SEQ ID NO: 145124 - DNA, 19 bp, Homo sapiens
  siRNA target sequence for FIBL-6 (NM_031935.1,16753-16771).
ccaacgggatcctgtttca

SEQ ID NO: 145125 - DNA, 19 bp, Homo sapiens
  siRNA target sequence for FIBL-6 (NM_031935.1,16772-16790).
gggttctgcctcaagaact

SEQ ID NO: 145126 - DNA, 19 bp, Homo sapiens
  siRNA target sequence for FIBL-6 (NM_031935.1,16791-16809).
gtccacccaatgatttgga

SEQ ID NO: 145127 - DNA, 19 bp, Homo sapiens
  siRNA target sequence for FIBL-6 (NM_031935.1,16849-16867).
ctccctcccatttggaata

SEQ ID NO: 145128 - DNA, 19 bp, Homo sapiens
  siRNA target sequence for FIBL-6 (NM_031935.1,16993-17011).
gaaaggagtggtgtataca

SEQ ID NO: 145129 - DNA, 19 bp, Homo sapiens
  siRNA target sequence for FIBL-6 (NM_031935.1,17078-17096).
gggaccattgaatatcaga

SEQ ID NO: 145130 - DNA, 19 bp, Homo sapiens
  siRNA target sequence for FIBL-6 (NM_031935.1,17095-17113).
gaccacattcatagtttat

SEQ ID NO: 145131 - DNA, 19 bp, Homo sapiens
  siRNA target sequence for FIBL-6 (NM_031935.1,17098-17116).
cacattcatagtttatata

SEQ ID NO: 145132 - DNA, 19 bp, Homo sapiens
  siRNA target sequence for FIBL-6 (NM_031935.1,17117-17135).
gctgtgtccgcctatccat

SEQ ID NO: 145133 - DNA, 19 bp, Homo sapiens
  siRNA target sequence for FIBL-6 (NM_031935.1,17118-17136).
ctgtgtccgcctatccata

SEQ ID NO: 145134 - DNA, 19 bp, Homo sapiens
  siRNA target sequence for FKBP10 (NM_021939.2,290-308).
ctacaacggcacttttgaa

SEQ ID NO: 145135 - DNA, 19 bp, Homo sapiens
  siRNA target sequence for FKBP10 (NM_021939.2,317-335).
gaagtttgattcaagctat

SEQ ID NO: 145136 - DNA, 19 bp, Homo sapiens
  siRNA target sequence for FKBP10 (NM_021939.2,320-338).
gtttgattcaagctatgat

SEQ ID NO: 145137 - DNA, 19 bp, Homo sapiens
  siRNA target sequence for FKBP10 (NM_021939.2,950-968).
catgcgctaccactacaat

SEQ ID NO: 145138 - DNA, 19 bp, Homo sapiens
  siRNA target sequence for FKBP10 (NM_021939.2,1010-1028).
ccgcaaccacacctacaat

SEQ ID NO: 145139 - DNA, 19 bp, Homo sapiens
  siRNA target sequence for FKBP10 (NM_021939.2,1011-1029).
cgcaaccacacctacaata

SEQ ID NO: 145140 - DNA, 19 bp, Homo sapiens
  siRNA target sequence for FKBP10 (NM_021939.2,1091-1109).
gggggaacgccggagaatt

SEQ ID NO: 145141 - DNA, 19 bp, Homo sapiens
  siRNA target sequence for FKBP10 (NM_021939.2,1092-1110).
ggggaacgccggagaatta

SEQ ID NO: 145142 - DNA, 19 bp, Homo sapiens
  siRNA target sequence for FKBP10 (NM_021939.2,1095-1113).
gaacgccggagaattacca

SEQ ID NO: 145143 - DNA, 19 bp, Homo sapiens
  siRNA target sequence for FKBP10 (NM_021939.2,1168-1186).
ctgccgtgctaatcttcaa

SEQ ID NO: 145144 - DNA, 19 bp, Homo sapiens
  siRNA target sequence for FKBP10 (NM_021939.2,1215-1233).
gcggatgtggtggaaatca

SEQ ID NO: 145145 - DNA, 19 bp, Homo sapiens
  siRNA target sequence for FKBP10 (NM_021939.2,1283-1301).
ggactttgttcgataccat

SEQ ID NO: 145146 - DNA, 19 bp, Homo sapiens
  siRNA target sequence for FKBP10 (NM_021939.2,1284-1302).
gactttgttcgataccatt

SEQ ID NO: 145147 - DNA, 19 bp, Homo sapiens
  siRNA target sequence for FKBP10 (NM_021939.2,1290-1308).
gttcgataccattacaact

SEQ ID NO: 145148 - DNA, 19 bp, Homo sapiens
  siRNA target sequence for FKBP10 (NM_021939.2,1293-1311).
cgataccattacaactgtt

SEQ ID NO: 145149 - DNA, 19 bp, Homo sapiens
  siRNA target sequence for FKBP14 (NM_017946.1,270-288).
ccaaaggaggggatttgat

SEQ ID NO: 145150 - DNA, 19 bp, Homo sapiens
  siRNA target sequence for FKBP14 (NM_017946.1,295-313).
ccactatgaaggctactta

SEQ ID NO: 145151 - DNA, 19 bp, Homo sapiens
  siRNA target sequence for FKBP14 (NM_017946.1,298-316).
ctatgaaggctacttagaa

SEQ ID NO: 145152 - DNA, 19 bp, Homo sapiens
  siRNA target sequence for FKBP14 (NM_017946.1,314-332).
gaaaaggacggctccttat

SEQ ID NO: 145153 - DNA, 19 bp, Homo sapiens
  siRNA target sequence for FKBP14 (NM_017946.1,320-338).
gacggctccttatttcact

SEQ ID NO: 145154 - DNA, 19 bp, Homo sapiens
  siRNA target sequence for FKBP14 (NM_017946.1,335-353).
cactccactcacaaacata

SEQ ID NO: 145155 - DNA, 19 bp, Homo sapiens
  siRNA target sequence for FKBP14 (NM_017946.1,359-377).
ggtcagcccatttggttta

SEQ ID NO: 145156 - DNA, 19 bp, Homo sapiens
  siRNA target sequence for FKBP14 (NM_017946.1,464-482).
cctgctctgggctatggaa

SEQ ID NO: 145157 - DNA, 19 bp, Homo sapiens
  siRNA target sequence for FKBP14 (NM_017946.1,554-572).
ggaccaagatcccatgaat

SEQ ID NO: 145158 - DNA, 19 bp, Homo sapiens
  siRNA target sequence for FKBP14 (NM_017946.1,558-576).
caagatcccatgaatcatt

SEQ ID NO: 145159 - DNA, 19 bp, Homo sapiens
  siRNA target sequence for FKBP14 (NM_017946.1,577-595).
ccaagaaatggatcttaat

SEQ ID NO: 145160 - DNA, 19 bp, Homo sapiens
  siRNA target sequence for FKBP14 (NM_017946.1,610-628).
ctctaaagatgaggttaaa

SEQ ID NO: 145161 - DNA, 19 bp, Homo sapiens
  siRNA target sequence for FKBP14 (NM_017946.1,663-681).
cggtggtgaatgaaagtca

SEQ ID NO: 145162 - DNA, 19 bp, Homo sapiens
  siRNA target sequence for FKBP14 (NM_017946.1,664-682).
ggtggtgaatgaaagtcat

SEQ ID NO: 145163 - DNA, 19 bp, Homo sapiens
  siRNA target sequence for FKBP14 (NM_017946.1,725-743).
gacaaagatgggtttatat

SEQ ID NO: 145164 - DNA, 19 bp, Homo sapiens
  siRNA target sequence for FKBP14 (NM_017946.1,744-762).
ctgccagagaatttacata

SEQ ID NO: 145165 - DNA, 19 bp, Homo sapiens
  siRNA target sequence for FKBP14 (NM_017946.1,759-777).
catataaacacgatgagtt

SEQ ID NO: 145166 - DNA, 19 bp, Homo sapiens
  siRNA target sequence for FKBP7 (NM_016105.2,223-241).
ccagaaaactgctctaaga

SEQ ID NO: 145167 - DNA, 19 bp, Homo sapiens
  siRNA target sequence for FKBP7 (NM_016105.2,289-307).
gctaaagacggctcgaaat

SEQ ID NO: 145168 - DNA, 19 bp, Homo sapiens
  siRNA target sequence for FKBP7 (NM_016105.2,295-313).
gacggctcgaaattctact

SEQ ID NO: 145169 - DNA, 19 bp, Homo sapiens
  siRNA target sequence for FKBP7 (NM_016105.2,312-330).
ctgcagccggacacaaaat

SEQ ID NO: 145170 - DNA, 19 bp, Homo sapiens
  siRNA target sequence for FKBP7 (NM_016105.2,314-332).
gcagccggacacaaaatga

SEQ ID NO: 145171 - DNA, 19 bp, Homo sapiens
  siRNA target sequence for FKBP7 (NM_016105.2,336-354).
ccaccccaaatggtttgtt

SEQ ID NO: 145172 - DNA, 19 bp, Homo sapiens
  siRNA target sequence for FKBP7 (NM_016105.2,339-357).
ccccaaatggtttgttctt

SEQ ID NO: 145173 - DNA, 19 bp, Homo sapiens
  siRNA target sequence for FKBP7 (NM_016105.2,372-390).
cataaaaggcctagacatt

SEQ ID NO: 145174 - DNA, 19 bp, Homo sapiens
  siRNA target sequence for FKBP7 (NM_016105.2,381-399).
cctagacattgctatgaca

SEQ ID NO: 145175 - DNA, 19 bp, Homo sapiens
  siRNA target sequence for FKBP7 (NM_016105.2,385-403).
gacattgctatgacagata

SEQ ID NO: 145176 - DNA, 19 bp, Homo sapiens
  siRNA target sequence for FKBP7 (NM_016105.2,413-431).
gagaaaagcgaaaagtagt

SEQ ID NO: 145177 - DNA, 19 bp, Homo sapiens
  siRNA target sequence for FKBP7 (NM_016105.2,415-433).
gaaaagcgaaaagtagtta

SEQ ID NO: 145178 - DNA, 19 bp, Homo sapiens
  siRNA target sequence for FKBP7 (NM_016105.2,521-539).
gaacaaccctgcatgtctt

SEQ ID NO: 145179 - DNA, 19 bp, Homo sapiens
  siRNA target sequence for FKBP7 (NM_016105.2,529-547).
ctgcatgtcttgaaatgca

SEQ ID NO: 145180 - DNA, 19 bp, Homo sapiens
  siRNA target sequence for FKBP7 (NM_016105.2,595-613).
ccaccggatgctacattga

SEQ ID NO: 145181 - DNA, 19 bp, Homo sapiens
  siRNA target sequence for FKBP7 (NM_016105.2,596-614).
caccggatgctacattgat

SEQ ID NO: 145182 - DNA, 19 bp, Homo sapiens
  siRNA target sequence for FKBP7 (NM_016105.2,598-616).
ccggatgctacattgattt

SEQ ID NO: 145183 - DNA, 19 bp, Homo sapiens
  siRNA target sequence for FKBP7 (NM_016105.2,653-671).
ggagcattgagacatttaa

SEQ ID NO: 145184 - DNA, 19 bp, Homo sapiens
  siRNA target sequence for FKBP7 (NM_016105.2,700-718).
ctctctaaagccgagataa

SEQ ID NO: 145185 - DNA, 19 bp, Homo sapiens
  siRNA target sequence for FKBP7 (NM_016105.2,756-774).
gccacgtgacaagtcatat

SEQ ID NO: 145186 - DNA, 19 bp, Homo sapiens
  siRNA target sequence for FKBP7 (NM_016105.2,758-776).
cacgtgacaagtcatatca

SEQ ID NO: 145187 - DNA, 19 bp, Homo sapiens
  siRNA target sequence for FKBP7 (NM_016105.2,839-857).
ccaaggaatacaatgtata

SEQ ID NO: 145188 - DNA, 19 bp, Homo sapiens
  siRNA target sequence for FKBP9 (NM_007270.2,364-382).
gagactccactttcaatgt

SEQ ID NO: 145189 - DNA, 19 bp, Homo sapiens
  siRNA target sequence for FKBP9 (NM_007270.2,413-431).
gatggaccaggctcttgtt

SEQ ID NO: 145190 - DNA, 19 bp, Homo sapiens
  siRNA target sequence for FKBP9 (NM_007270.2,449-467).
gagacgtttcgtgaagatt

SEQ ID NO: 145191 - DNA, 19 bp, Homo sapiens
  siRNA target sequence for FKBP9 (NM_007270.2,476-494).
gcttgcctacggaaatgaa

SEQ ID NO: 145192 - DNA, 19 bp, Homo sapiens
  siRNA target sequence for FKBP9 (NM_007270.2,537-555).
gatgtacttctgatggata

SEQ ID NO: 145193 - DNA, 19 bp, Homo sapiens
  siRNA target sequence for FKBP9 (NM_007270.2,570-588).
gaccaggttcagattcaca

SEQ ID NO: 145194 - DNA, 19 bp, Homo sapiens
  siRNA target sequence for FKBP9 (NM_007270.2,619-637).
ccatccaggtgtctgattt

SEQ ID NO: 145195 - DNA, 19 bp, Homo sapiens
  siRNA target sequence for FKBP9 (NM_007270.2,624-642).
caggtgtctgattttgtga

SEQ ID NO: 145196 - DNA, 19 bp, Homo sapiens
  siRNA target sequence for FKBP9 (NM_007270.2,665-683).
cctggacggaactctgttt

SEQ ID NO: 145197 - DNA, 19 bp, Homo sapiens
  siRNA target sequence for FKBP9 (NM_007270.2,668-686).
ggacggaactctgtttgat

SEQ ID NO: 145198 - DNA, 19 bp, Homo sapiens
  siRNA target sequence for FKBP9 (NM_007270.2,669-687).
gacggaactctgtttgatt

SEQ ID NO: 145199 - DNA, 19 bp, Homo sapiens
  siRNA target sequence for FKBP9 (NM_007270.2,699-717).
cgcatgaaaacatatgaca

SEQ ID NO: 145200 - DNA, 19 bp, Homo sapiens
  siRNA target sequence for FKBP9 (NM_007270.2,780-798).
ggtgagaagcgcatcatca

SEQ ID NO: 145201 - DNA, 19 bp, Homo sapiens
  siRNA target sequence for FKBP9 (NM_007270.2,794-812).
catcaccattcctcctttt

SEQ ID NO: 145202 - DNA, 19 bp, Homo sapiens
  siRNA target sequence for FKBP9 (NM_007270.2,880-898).
cattattggacctccataa

SEQ ID NO: 145203 - DNA, 19 bp, Homo sapiens
  siRNA target sequence for FKBP9 (NM_007270.2,929-947).
ggtagtacctgaaaactgt

SEQ ID NO: 145204 - DNA, 19 bp, Homo sapiens
  siRNA target sequence for FKBP9 (NM_007270.2,944-962).
ctgtgagcggataagtcaa

SEQ ID NO: 145205 - DNA, 19 bp, Homo sapiens
  siRNA target sequence for FKBP9 (NM_007270.2,968-986).
ggactttctcaggtatcat

SEQ ID NO: 145206 - DNA, 19 bp, Homo sapiens
  siRNA target sequence for FKBP9 (NM_007270.2,1035-1053).
cggaaccgcacgtttgaca

SEQ ID NO: 145207 - DNA, 19 bp, Homo sapiens
  siRNA target sequence for FKBP9 (NM_007270.2,1043-1061).
cacgtttgacacgtacatt

SEQ ID NO: 145208 - DNA, 19 bp, Homo sapiens
  siRNA target sequence for FKBP9 (NM_007270.2,1085-1103).
gatggatgaaggtctactt

SEQ ID NO: 145209 - DNA, 19 bp, Homo sapiens
  siRNA target sequence for FKBP9 (NM_007270.2,1189-1207).
cggctgtgctggtgtttga

SEQ ID NO: 145210 - DNA, 19 bp, Homo sapiens
  siRNA target sequence for FKBP9 (NM_007270.2,1191-1209).
gctgtgctggtgtttgaca

SEQ ID NO: 145211 - DNA, 19 bp, Homo sapiens
  siRNA target sequence for FKBP9 (NM_007270.2,1279-1297).
gctcagtgctgagtaagaa

SEQ ID NO: 145212 - DNA, 19 bp, Homo sapiens
  siRNA target sequence for FKBP9 (NM_007270.2,1291-1309).
gtaagaagggagattacct

SEQ ID NO: 145213 - DNA, 19 bp, Homo sapiens
  siRNA target sequence for FKBP9 (NM_007270.2,1302-1320).
gattacctcaaatatcact

SEQ ID NO: 145214 - DNA, 19 bp, Homo sapiens
  siRNA target sequence for FKBP9 (NM_007270.2,1352-1370).
ggactccacgtggaattta

SEQ ID NO: 145215 - DNA, 19 bp, Homo sapiens
  siRNA target sequence for FLJ11767 (NM_024593.2,108-126).
gacggacaccttaaccaaa

SEQ ID NO: 145216 - DNA, 19 bp, Homo sapiens
  siRNA target sequence for FLJ11767 (NM_024593.2,110-128).
cggacaccttaaccaaaaa

SEQ ID NO: 145217 - DNA, 19 bp, Homo sapiens
  siRNA target sequence for FLJ11767 (NM_024593.2,111-129).
ggacaccttaaccaaaaat

SEQ ID NO: 145218 - DNA, 19 bp, Homo sapiens
  siRNA target sequence for FLJ11767 (NM_024593.2,220-238).
ggactggatcgtaatgcat

SEQ ID NO: 145219 - DNA, 19 bp, Homo sapiens
  siRNA target sequence for FLJ11767 (NM_024593.2,221-239).
gactggatcgtaatgcatt

SEQ ID NO: 145220 - DNA, 19 bp, Homo sapiens
  siRNA target sequence for FLJ11767 (NM_024593.2,225-243).
ggatcgtaatgcatttcga

SEQ ID NO: 145221 - DNA, 19 bp, Homo sapiens
  siRNA target sequence for FLJ11767 (NM_024593.2,226-244).
gatcgtaatgcatttcgaa

SEQ ID NO: 145222 - DNA, 19 bp, Homo sapiens
  siRNA target sequence for FLJ11767 (NM_024593.2,293-311).
gagtattccgaggttttga

SEQ ID NO: 145223 - DNA, 19 bp, Homo sapiens
  siRNA target sequence for FLJ11767 (NM_024593.2,326-344).
gctgtgtaaatgtattgga

SEQ ID NO: 145224 - DNA, 19 bp, Homo sapiens
  siRNA target sequence for FLJ11767 (NM_024593.2,347-365).
ggattcatggattatcact

SEQ ID NO: 145225 - DNA, 19 bp, Homo sapiens
  siRNA target sequence for FLJ11767 (NM_024593.2,427-445).
ggtgacggattcatttcaa

SEQ ID NO: 145226 - DNA, 19 bp, Homo sapiens
  siRNA target sequence for FLJ11767 (NM_024593.2,576-594).
gtcttttgcagactatgaa

SEQ ID NO: 145227 - DNA, 19 bp, Homo sapiens
  siRNA target sequence for FLJ11767 (NM_024593.2,578-596).
cttttgcagactatgaact

SEQ ID NO: 145228 - DNA, 19 bp, Homo sapiens
  siRNA target sequence for FLJ11767 (NM_024593.2,603-621).
gagagaagagactcttcta

SEQ ID NO: 145229 - DNA, 19 bp, Homo sapiens
  siRNA target sequence for FLJ11767 (NM_024593.2,605-623).
gagaagagactcttctact

SEQ ID NO: 145230 - DNA, 19 bp, Homo sapiens
  siRNA target sequence for FLJ11767 (NM_024593.2,652-670).
ccaaagagccagatggaat

SEQ ID NO: 145231 - DNA, 19 bp, Homo sapiens
  siRNA target sequence for FLJ12443 (NM_024830.3,758-776).
ggacctgcctaattacctt

SEQ ID NO: 145232 - DNA, 19 bp, Homo sapiens
  siRNA target sequence for FLJ12443 (NM_024830.3,762-780).
ctgcctaattaccttcaaa

SEQ ID NO: 145233 - DNA, 19 bp, Homo sapiens
  siRNA target sequence for FLJ12443 (NM_024830.3,807-825).
cgtccagcctgtggtttta

SEQ ID NO: 145234 - DNA, 19 bp, Homo sapiens
  siRNA target sequence for FLJ12443 (NM_024830.3,813-831).
gcctgtggttttacgatat

SEQ ID NO: 145235 - DNA, 19 bp, Homo sapiens
  siRNA target sequence for FLJ12443 (NM_024830.3,817-835).
gtggttttacgatatccaa

SEQ ID NO: 145236 - DNA, 19 bp, Homo sapiens
  siRNA target sequence for FLJ12443 (NM_024830.3,820-838).
gttttacgatatccaaata

SEQ ID NO: 145237 - DNA, 19 bp, Homo sapiens
  siRNA target sequence for FLJ12443 (NM_024830.3,872-890).
ctggagcgctggaaatcct

SEQ ID NO: 145238 - DNA, 19 bp, Homo sapiens
  siRNA target sequence for FLJ12443 (NM_024830.3,1101-1119).
cacttgccttttagaattt

SEQ ID NO: 145239 - DNA, 19 bp, Homo sapiens
  siRNA target sequence for FLJ12443 (NM_024830.3,1173-1191).
ggacagatactcagaaaga

SEQ ID NO: 145240 - DNA, 19 bp, Homo sapiens
  siRNA target sequence for FLJ12443 (NM_024830.3,1595-1613).
cggatcagacacatttcga

SEQ ID NO: 145241 - DNA, 19 bp, Homo sapiens
  siRNA target sequence for FLJ12443 (NM_024830.3,1597-1615).
gatcagacacatttcgaaa

SEQ ID NO: 145242 - DNA, 19 bp, Homo sapiens
  siRNA target sequence for FLJ12443 (NM_024830.3,1663-1681).
gatttcagcccggaaaact

SEQ ID NO: 145243 - DNA, 19 bp, Homo sapiens
  siRNA target sequence for FLJ13397 (NM_024948.1,279-297).
ggtctctcggacaccattt

SEQ ID NO: 145244 - DNA, 19 bp, Homo sapiens
  siRNA target sequence for FLJ13397 (NM_024948.1,307-325).
ggacgcaagggtttgtgtt

SEQ ID NO: 145245 - DNA, 19 bp, Homo sapiens
  siRNA target sequence for FLJ13397 (NM_024948.1,308-326).
gacgcaagggtttgtgttt

SEQ ID NO: 145246 - DNA, 19 bp, Homo sapiens
  siRNA target sequence for FLJ13397 (NM_024948.1,311-329).
gcaagggtttgtgtttagt

SEQ ID NO: 145247 - DNA, 19 bp, Homo sapiens
  siRNA target sequence for FLJ13397 (NM_024948.1,315-333).
gggtttgtgtttagtgaat

SEQ ID NO: 145248 - DNA, 19 bp, Homo sapiens
  siRNA target sequence for FLJ13397 (NM_024948.1,317-335).
gtttgtgtttagtgaatca

SEQ ID NO: 145249 - DNA, 19 bp, Homo sapiens
  siRNA target sequence for FLJ13397 (NM_024948.1,340-358).
gatctgcattagaacagtt

SEQ ID NO: 145250 - DNA, 19 bp, Homo sapiens
  siRNA target sequence for FLJ13397 (NM_024948.1,385-403).
cacctgttcaggcatttct

SEQ ID NO: 145251 - DNA, 19 bp, Homo sapiens
  siRNA target sequence for FLJ13397 (NM_024948.1,387-405).
cctgttcaggcatttcttt

SEQ ID NO: 145252 - DNA, 19 bp, Homo sapiens
  siRNA target sequence for FLJ13397 (NM_024948.1,388-406).
ctgttcaggcatttctttt

SEQ ID NO: 145253 - DNA, 19 bp, Homo sapiens
  siRNA target sequence for FLJ13397 (NM_024948.1,519-537).
gaccactctggatcatact

SEQ ID NO: 145254 - DNA, 19 bp, Homo sapiens
  siRNA target sequence for FLJ13397 (NM_024948.1,720-738).
gctgtcttggaccagtatt

SEQ ID NO: 145255 - DNA, 19 bp, Homo sapiens
  siRNA target sequence for FLJ13397 (NM_024948.1,743-761).
gtggggaaataaatttgga

SEQ ID NO: 145256 - DNA, 19 bp, Homo sapiens
  siRNA target sequence for FLJ13397 (NM_024948.1,841-859).
ccttgatagatcctgtata

SEQ ID NO: 145257 - DNA, 19 bp, Homo sapiens
  siRNA target sequence for FLJ13397 (NM_024948.1,842-860).
cttgatagatcctgtatat

SEQ ID NO: 145258 - DNA, 19 bp, Homo sapiens
  siRNA target sequence for FLJ13397 (NM_024948.1,862-880).
gacatggcagccaaagttt

SEQ ID NO: 145259 - DNA, 19 bp, Homo sapiens
  siRNA target sequence for FLJ13397 (NM_024948.1,864-882).
catggcagccaaagtttaa

SEQ ID NO: 145260 - DNA, 19 bp, Homo sapiens
  siRNA target sequence for FLJ13397 (NM_024948.1,867-885).
ggcagccaaagtttaatta

SEQ ID NO: 145261 - DNA, 19 bp, Homo sapiens
  siRNA target sequence for FLJ13397 (NM_024948.1,871-889).
gccaaagtttaattaatct

SEQ ID NO: 145262 - DNA, 19 bp, Homo sapiens
  siRNA target sequence for FLJ13397 (NM_024948.1,896-914).
gacgggacatgctgtttct

SEQ ID NO: 145263 - DNA, 19 bp, Homo sapiens
  siRNA target sequence for FLJ13397 (NM_024948.1,898-916).
cgggacatgctgtttctaa

SEQ ID NO: 145264 - DNA, 19 bp, Homo sapiens
  siRNA target sequence for FLJ13397 (NM_024948.1,899-917).
gggacatgctgtttctaat

SEQ ID NO: 145265 - DNA, 19 bp, Homo sapiens
  siRNA target sequence for FLJ13397 (NM_024948.1,901-919).
gacatgctgtttctaatgt

SEQ ID NO: 145266 - DNA, 19 bp, Homo sapiens
  siRNA target sequence for FLJ13397 (NM_024948.1,934-952).
gagagtgctcaggaatgaa

SEQ ID NO: 145267 - DNA, 19 bp, Homo sapiens
  siRNA target sequence for FLJ13397 (NM_024948.1,981-999).
gtaggatttttaacactaa

SEQ ID NO: 145268 - DNA, 19 bp, Homo sapiens
  siRNA target sequence for FLJ13397 (NM_024948.1,1018-1036).
gtaaggttggttcttactt

SEQ ID NO: 145269 - DNA, 19 bp, Homo sapiens
  siRNA target sequence for FLJ13397 (NM_024948.1,1022-1040).
ggttggttcttacttgaaa

SEQ ID NO: 145270 - DNA, 19 bp, Homo sapiens
  siRNA target sequence for FLJ13397 (NM_024948.1,1076-1094).
gactcacctcaccgtattt

SEQ ID NO: 145271 - DNA, 19 bp, Homo sapiens
  siRNA target sequence for FLJ13397 (NM_024948.1,1089-1107).
gtattttttgccaaggata

SEQ ID NO: 145272 - DNA, 19 bp, Homo sapiens
  siRNA target sequence for FLJ13397 (NM_024948.1,1099-1117).
ccaaggatatggctttagt

SEQ ID NO: 145273 - DNA, 19 bp, Homo sapiens
  siRNA target sequence for FLJ13397 (NM_024948.1,1147-1165).
gaagagtttttcaaaccta

SEQ ID NO: 145274 - DNA, 19 bp, Homo sapiens
  siRNA target sequence for FLJ13397 (NM_024948.1,1162-1180).
cctacgacccagaagataa

SEQ ID NO: 145275 - DNA, 19 bp, Homo sapiens
  siRNA target sequence for FLJ13397 (NM_024948.1,1163-1181).
ctacgacccagaagataat

SEQ ID NO: 145276 - DNA, 19 bp, Homo sapiens
  siRNA target sequence for FLJ13397 (NM_024948.1,1198-1216).
cacttctggaagatgtgat

SEQ ID NO: 145277 - DNA, 19 bp, Homo sapiens
  siRNA target sequence for FLJ13397 (NM_024948.1,1243-1261).
ctgaatatataaatctcat

SEQ ID NO: 145278 - DNA, 19 bp, Homo sapiens
  siRNA target sequence for FLJ13397 (NM_024948.1,1304-1322).
gggcccatttcttcaagaa

SEQ ID NO: 145279 - DNA, 19 bp, Homo sapiens
  siRNA target sequence for FLJ13397 (NM_024948.1,1306-1324).
gcccatttcttcaagaatt

SEQ ID NO: 145280 - DNA, 19 bp, Homo sapiens
  siRNA target sequence for FLJ13397 (NM_024948.1,1342-1360).
ccagtggtccagaatcttt

SEQ ID NO: 145281 - DNA, 19 bp, Homo sapiens
  siRNA target sequence for FLJ13397 (NM_024948.1,1365-1383).
gtctaccactacaatggat

SEQ ID NO: 145282 - DNA, 19 bp, Homo sapiens
  siRNA target sequence for FLJ13397 (NM_024948.1,1380-1398).
ggattgaagcagtcaaatt

SEQ ID NO: 145283 - DNA, 19 bp, Homo sapiens
  siRNA target sequence for FLJ13397 (NM_024948.1,1381-1399).
gattgaagcagtcaaatta

SEQ ID NO: 145284 - DNA, 19 bp, Homo sapiens
  siRNA target sequence for FLJ13397 (NM_024948.1,1388-1406).
gcagtcaaattataatgaa

SEQ ID NO: 145285 - DNA, 19 bp, Homo sapiens
  siRNA target sequence for FLJ13397 (NM_024948.1,1466-1484).
gacagatgacactcctatt

SEQ ID NO: 145286 - DNA, 19 bp, Homo sapiens
  siRNA target sequence for FLJ13397 (NM_024948.1,1468-1486).
cagatgacactcctattaa

SEQ ID NO: 145287 - DNA, 19 bp, Homo sapiens
  siRNA target sequence for FLJ13397 (NM_024948.1,1501-1519).
ccaaatggccatacattga

SEQ ID NO: 145288 - DNA, 19 bp, Homo sapiens
  siRNA target sequence for FLJ13397 (NM_024948.1,1536-1554).
gatcgctctccttcactaa

SEQ ID NO: 145289 - DNA, 19 bp, Homo sapiens
  siRNA target sequence for FLJ13612 (NM_025202.2,598-616).
gatggcgctggcaaagctt

SEQ ID NO: 145290 - DNA, 19 bp, Homo sapiens
  siRNA target sequence for FLJ13612 (NM_025202.2,688-706).
gtcatcggccagtaagttt

SEQ ID NO: 145291 - DNA, 19 bp, Homo sapiens
  siRNA target sequence for FLJ13612 (NM_025202.2,690-708).
catcggccagtaagtttga

SEQ ID NO: 145292 - DNA, 19 bp, Homo sapiens
  siRNA target sequence for FLJ13612 (NM_025202.2,788-806).
ctcaaggccaacttcaata

SEQ ID NO: 145293 - DNA, 19 bp, Homo sapiens
  siRNA target sequence for FLJ13612 (NM_025202.2,790-808).
caaggccaacttcaataca

SEQ ID NO: 145294 - DNA, 19 bp, Homo sapiens
  siRNA target sequence for FLJ20047 (NM_017639.1,181-199).
gagctgctcatccaaattt

SEQ ID NO: 145295 - DNA, 19 bp, Homo sapiens
  siRNA target sequence for FLJ20047 (NM_017639.1,186-204).
gctcatccaaatttctgat

SEQ ID NO: 145296 - DNA, 19 bp, Homo sapiens
  siRNA target sequence for FLJ20047 (NM_017639.1,265-283).
ccagtgttttctcaagatt

SEQ ID NO: 145297 - DNA, 19 bp, Homo sapiens
  siRNA target sequence for FLJ20047 (NM_017639.1,291-309).
ggtcacagttcctgaatca

SEQ ID NO: 145298 - DNA, 19 bp, Homo sapiens
  siRNA target sequence for FLJ20047 (NM_017639.1,380-398).
gaattctatcctcttctaa

SEQ ID NO: 145299 - DNA, 19 bp, Homo sapiens
  siRNA target sequence for FLJ20047 (NM_017639.1,424-442).
ggcacaatatttactatca

SEQ ID NO: 145300 - DNA, 19 bp, Homo sapiens
  siRNA target sequence for FLJ20047 (NM_017639.1,437-455).
ctatcagtcccgtattact

SEQ ID NO: 145301 - DNA, 19 bp, Homo sapiens
  siRNA target sequence for FLJ20047 (NM_017639.1,448-466).
gtattacttctggatacaa

SEQ ID NO: 145302 - DNA, 19 bp, Homo sapiens
  siRNA target sequence for FLJ20047 (NM_017639.1,583-601).
gtcaaatcctataatctta

SEQ ID NO: 145303 - DNA, 19 bp, Homo sapiens
  siRNA target sequence for FLJ20047 (NM_017639.1,622-640).
gttggaagcacgcttgtta

SEQ ID NO: 145304 - DNA, 19 bp, Homo sapiens
  siRNA target sequence for FLJ20047 (NM_017639.1,625-643).
ggaagcacgcttgttacat

SEQ ID NO: 145305 - DNA, 19 bp, Homo sapiens
  siRNA target sequence for FLJ20047 (NM_017639.1,626-644).
gaagcacgcttgttacatt

SEQ ID NO: 145306 - DNA, 19 bp, Homo sapiens
  siRNA target sequence for FLJ20047 (NM_017639.1,630-648).
cacgcttgttacattttca

SEQ ID NO: 145307 - DNA, 19 bp, Homo sapiens
  siRNA target sequence for FLJ20047 (NM_017639.1,632-650).
cgcttgttacattttcaaa

SEQ ID NO: 145308 - DNA, 19 bp, Homo sapiens
  siRNA target sequence for FLJ20047 (NM_017639.1,661-679).
gactggacccgtgaaaaca

SEQ ID NO: 145309 - DNA, 19 bp, Homo sapiens
  siRNA target sequence for FLJ20047 (NM_017639.1,663-681).
ctggacccgtgaaaacaca

SEQ ID NO: 145310 - DNA, 19 bp, Homo sapiens
  siRNA target sequence for FLJ20047 (NM_017639.1,665-683).
ggacccgtgaaaacacata

SEQ ID NO: 145311 - DNA, 19 bp, Homo sapiens
  siRNA target sequence for FLJ20047 (NM_017639.1,669-687).
ccgtgaaaacacatatgtt

SEQ ID NO: 145312 - DNA, 19 bp, Homo sapiens
  siRNA target sequence for FLJ20047 (NM_017639.1,696-714).
catcatcagtggtaattca

SEQ ID NO: 145313 - DNA, 19 bp, Homo sapiens
  siRNA target sequence for FLJ20047 (NM_017639.1,872-890).
ccacagctgtcatatcaat

SEQ ID NO: 145314 - DNA, 19 bp, Homo sapiens
  siRNA target sequence for FLJ20047 (NM_017639.1,910-928).
gacaatcccccaaacttca

SEQ ID NO: 145315 - DNA, 19 bp, Homo sapiens
  siRNA target sequence for FLJ20047 (NM_017639.1,943-961).
cacacccatgtcaaggaaa

SEQ ID NO: 145316 - DNA, 19 bp, Homo sapiens
  siRNA target sequence for FLJ20047 (NM_017639.1,1015-1033).
gggtcacatgcagaaatca

SEQ ID NO: 145317 - DNA, 19 bp, Homo sapiens
  siRNA target sequence for FLJ20047 (NM_017639.1,1016-1034).
ggtcacatgcagaaatcat

SEQ ID NO: 145318 - DNA, 19 bp, Homo sapiens
  siRNA target sequence for FLJ20047 (NM_017639.1,1021-1039).
catgcagaaatcatctaca

SEQ ID NO: 145319 - DNA, 19 bp, Homo sapiens
  siRNA target sequence for FLJ20047 (NM_017639.1,1062-1080).
gggacatttttacttagaa

SEQ ID NO: 145320 - DNA, 19 bp, Homo sapiens
  siRNA target sequence for FLJ20047 (NM_017639.1,1090-1108).
ggagttctttatttgatta

SEQ ID NO: 145321 - DNA, 19 bp, Homo sapiens
  siRNA target sequence for FLJ20047 (NM_017639.1,1131-1149).
gacaaaattcaccttaact

SEQ ID NO: 145322 - DNA, 19 bp, Homo sapiens
  siRNA target sequence for FLJ20047 (NM_017639.1,1133-1151).
caaaattcaccttaactgt

SEQ ID NO: 145323 - DNA, 19 bp, Homo sapiens
  siRNA target sequence for FLJ20047 (NM_017639.1,1205-1223).
gtgtcctggatgataacga

SEQ ID NO: 145324 - DNA, 19 bp, Homo sapiens
  siRNA target sequence for FLJ20047 (NM_017639.1,1221-1239).
cgaccatgcacctcagttt

SEQ ID NO: 145325 - DNA, 19 bp, Homo sapiens
  siRNA target sequence for FLJ20047 (NM_017639.1,1222-1240).
gaccatgcacctcagttta

SEQ ID NO: 145326 - DNA, 19 bp, Homo sapiens
  siRNA target sequence for FLJ20047 (NM_017639.1,1225-1243).
catgcacctcagtttatgt

SEQ ID NO: 145327 - DNA, 19 bp, Homo sapiens
  siRNA target sequence for FLJ20047 (NM_017639.1,1247-1265).
caagcttcagctgtattgt

SEQ ID NO: 145328 - DNA, 19 bp, Homo sapiens
  siRNA target sequence for FLJ20047 (NM_017639.1,1287-1305).
ctctaccatatgctctata

SEQ ID NO: 145329 - DNA, 19 bp, Homo sapiens
  siRNA target sequence for FLJ20047 (NM_017639.1,1289-1307).
ctaccatatgctctataaa

SEQ ID NO: 145330 - DNA, 19 bp, Homo sapiens
  siRNA target sequence for FLJ20047 (NM_017639.1,1325-1343).
ctggtccgtatggagaatt

SEQ ID NO: 145331 - DNA, 19 bp, Homo sapiens
  siRNA target sequence for FLJ20047 (NM_017639.1,1327-1345).
ggtccgtatggagaattga

SEQ ID NO: 145332 - DNA, 19 bp, Homo sapiens
  siRNA target sequence for FLJ20047 (NM_017639.1,1336-1354).
ggagaattgacctattcta

SEQ ID NO: 145333 - DNA, 19 bp, Homo sapiens
  siRNA target sequence for FLJ20047 (NM_017639.1,1337-1355).
gagaattgacctattctat

SEQ ID NO: 145334 - DNA, 19 bp, Homo sapiens
  siRNA target sequence for FLJ20047 (NM_017639.1,1416-1434).
ccctttgacaggggatatt

SEQ ID NO: 145335 - DNA, 19 bp, Homo sapiens
  siRNA target sequence for FLJ20047 (NM_017639.1,1418-1436).
ctttgacaggggatattca

SEQ ID NO: 145336 - DNA, 19 bp, Homo sapiens
  siRNA target sequence for FLJ20047 (NM_017639.1,1424-1442).
caggggatattcatgctaa

SEQ ID NO: 145337 - DNA, 19 bp, Homo sapiens
  siRNA target sequence for FLJ20047 (NM_017639.1,1439-1457).
ctaagcaaatccttgacta

SEQ ID NO: 145338 - DNA, 19 bp, Homo sapiens
  siRNA target sequence for FLJ20047 (NM_017639.1,1443-1461).
gcaaatccttgactatgaa

SEQ ID NO: 145339 - DNA, 19 bp, Homo sapiens
  siRNA target sequence for FLJ20047 (NM_017639.1,1572-1590).
cactcaagatcagtatttt

SEQ ID NO: 145340 - DNA, 19 bp, Homo sapiens
  siRNA target sequence for FLJ20047 (NM_017639.1,1593-1611).
caccctcccagaaaagaat

SEQ ID NO: 145341 - DNA, 19 bp, Homo sapiens
  siRNA target sequence for FLJ20047 (NM_017639.1,1800-1818).
gaaaataatcgctcatagt

SEQ ID NO: 145342 - DNA, 19 bp, Homo sapiens
  siRNA target sequence for FLJ20047 (NM_017639.1,1897-1915).
gtgttcgccagcagctttt

SEQ ID NO: 145343 - DNA, 19 bp, Homo sapiens
  siRNA target sequence for FLJ20047 (NM_017639.1,1899-1917).
gttcgccagcagcttttca

SEQ ID NO: 145344 - DNA, 19 bp, Homo sapiens
  siRNA target sequence for FLJ20047 (NM_017639.1,2025-2043).
gaaaacctcatctttagat

SEQ ID NO: 145345 - DNA, 19 bp, Homo sapiens
  siRNA target sequence for FLJ20047 (NM_017639.1,2079-2097).
caaagccttccagaaaact

SEQ ID NO: 145346 - DNA, 19 bp, Homo sapiens
  siRNA target sequence for FLJ20047 (NM_017639.1,2137-2155).
ccggaatggttgagtttaa

SEQ ID NO: 145347 - DNA, 19 bp, Homo sapiens
  siRNA target sequence for FLJ20047 (NM_017639.1,2138-2156).
cggaatggttgagtttaat

SEQ ID NO: 145348 - DNA, 19 bp, Homo sapiens
  siRNA target sequence for FLJ20047 (NM_017639.1,2139-2157).
ggaatggttgagtttaata

SEQ ID NO: 145349 - DNA, 19 bp, Homo sapiens
  siRNA target sequence for FLJ20047 (NM_017639.1,2144-2162).
ggttgagtttaataagtat

SEQ ID NO: 145350 - DNA, 19 bp, Homo sapiens
  siRNA target sequence for FLJ20047 (NM_017639.1,2520-2538).
cctggctgacgttagaaaa

SEQ ID NO: 145351 - DNA, 19 bp, Homo sapiens
  siRNA target sequence for FLJ20047 (NM_017639.1,2524-2542).
gctgacgttagaaaagagt

SEQ ID NO: 145352 - DNA, 19 bp, Homo sapiens
  siRNA target sequence for FLJ20047 (NM_017639.1,2614-2632).
ggaaaagacaactatcact

SEQ ID NO: 145353 - DNA, 19 bp, Homo sapiens
  siRNA target sequence for FLJ20047 (NM_017639.1,2622-2640).
caactatcactggaattat

SEQ ID NO: 145354 - DNA, 19 bp, Homo sapiens
  siRNA target sequence for FLJ20047 (NM_017639.1,2625-2643).
ctatcactggaattatctt

SEQ ID NO: 145355 - DNA, 19 bp, Homo sapiens
  siRNA target sequence for FLJ20047 (NM_017639.1,2648-2666).
gttgggagcccaaattcca

SEQ ID NO: 145356 - DNA, 19 bp, Homo sapiens
  siRNA target sequence for FLJ20047 (NM_017639.1,2813-2831).
caagaatgccggcagtaaa

SEQ ID NO: 145357 - DNA, 19 bp, Homo sapiens
  siRNA target sequence for FLJ20047 (NM_017639.1,2816-2834).
gaatgccggcagtaaacct

SEQ ID NO: 145358 - DNA, 19 bp, Homo sapiens
  siRNA target sequence for FLJ20047 (NM_017639.1,3002-3020).
gtggtacatgccatgaact

SEQ ID NO: 145359 - DNA, 19 bp, Homo sapiens
  siRNA target sequence for FLJ20047 (NM_017639.1,3004-3022).
ggtacatgccatgaactta

SEQ ID NO: 145360 - DNA, 19 bp, Homo sapiens
  siRNA target sequence for FLJ20047 (NM_017639.1,3005-3023).
gtacatgccatgaacttaa

SEQ ID NO: 145361 - DNA, 19 bp, Homo sapiens
  siRNA target sequence for FLJ20080 (NM_017657.2,318-336).
gagccagacatcattcgaa

SEQ ID NO: 145362 - DNA, 19 bp, Homo sapiens
  siRNA target sequence for FLJ20080 (NM_017657.2,408-426).
ggtgggttttcagaagtta

SEQ ID NO: 145363 - DNA, 19 bp, Homo sapiens
  siRNA target sequence for FLJ20080 (NM_017657.2,433-451).
ctggtgtagggtttgttga

SEQ ID NO: 145364 - DNA, 19 bp, Homo sapiens
  siRNA target sequence for FLJ20080 (NM_017657.2,435-453).
ggtgtagggtttgttgatt

SEQ ID NO: 145365 - DNA, 19 bp, Homo sapiens
  siRNA target sequence for FLJ20080 (NM_017657.2,441-459).
gggtttgttgatttcgata

SEQ ID NO: 145366 - DNA, 19 bp, Homo sapiens
  siRNA target sequence for FLJ20080 (NM_017657.2,455-473).
cgatacaccagattatact

SEQ ID NO: 145367 - DNA, 19 bp, Homo sapiens
  siRNA target sequence for FLJ20080 (NM_017657.2,472-490).
ctcgtcccaaggaagagtt

SEQ ID NO: 145368 - DNA, 19 bp, Homo sapiens
  siRNA target sequence for FLJ20080 (NM_017657.2,475-493).
gtcccaaggaagagtttgt

SEQ ID NO: 145369 - DNA, 19 bp, Homo sapiens
  siRNA target sequence for FLJ20080 (NM_017657.2,488-506).
gtttgtaccttcaaaccat

SEQ ID NO: 145370 - DNA, 19 bp, Homo sapiens
  siRNA target sequence for FLJ20080 (NM_017657.2,619-637).
gacagtctgatgttttact

SEQ ID NO: 145371 - DNA, 19 bp, Homo sapiens
  siRNA target sequence for FLJ20080 (NM_017657.2,643-661).
ccaccagcaaagaaataat

SEQ ID NO: 145372 - DNA, 19 bp, Homo sapiens
  siRNA target sequence for FLJ20080 (NM_017657.2,674-692).
gttagctacttccattgat

SEQ ID NO: 145373 - DNA, 19 bp, Homo sapiens
  siRNA target sequence for FLJ20080 (NM_017657.2,699-717).
gaaagaccaggaaatttaa

SEQ ID NO: 145374 - DNA, 19 bp, Homo sapiens
  siRNA target sequence for FLJ20080 (NM_017657.2,744-762).
gttggaacacttgaaagtt

SEQ ID NO: 145375 - DNA, 19 bp, Homo sapiens
  siRNA target sequence for FLJ20080 (NM_017657.2,841-859).
ctccttgtctggagattct

SEQ ID NO: 145376 - DNA, 19 bp, Homo sapiens
  siRNA target sequence for FLJ20080 (NM_017657.2,843-861).
ccttgtctggagattctaa

SEQ ID NO: 145377 - DNA, 19 bp, Homo sapiens
  siRNA target sequence for FLJ20080 (NM_017657.2,878-896).
gttggaaactgtaaatcct

SEQ ID NO: 145378 - DNA, 19 bp, Homo sapiens
  siRNA target sequence for FLJ20080 (NM_017657.2,914-932).
ggacaatgtagctgattca

SEQ ID NO: 145379 - DNA, 19 bp, Homo sapiens
  siRNA target sequence for FLJ20080 (NM_017657.2,961-979).
gcactgagtataatttaga

SEQ ID NO: 145380 - DNA, 19 bp, Homo sapiens
  siRNA target sequence for FLJ20080 (NM_017657.2,1089-1107).
ctaaccattcgggaaaaca

SEQ ID NO: 145381 - DNA, 19 bp, Homo sapiens
  siRNA target sequence for FLJ20080 (NM_017657.2,1158-1176).
ggtagaagcttggataaca

SEQ ID NO: 145382 - DNA, 19 bp, Homo sapiens
  siRNA target sequence for FLJ20080 (NM_017657.2,1229-1247).
gactaacagaggtttcagt

SEQ ID NO: 145383 - DNA, 19 bp, Homo sapiens
  siRNA target sequence for FLJ20080 (NM_017657.2,1325-1343).
ggtagactcagctgataat

SEQ ID NO: 145384 - DNA, 19 bp, Homo sapiens
  siRNA target sequence for FLJ20080 (NM_017657.2,1326-1344).
gtagactcagctgataatt

SEQ ID NO: 145385 - DNA, 19 bp, Homo sapiens
  siRNA target sequence for FLJ20080 (NM_017657.2,1386-1404).
cttgacttacttacttcta

SEQ ID NO: 145386 - DNA, 19 bp, Homo sapiens
  siRNA target sequence for FLJ20080 (NM_017657.2,1410-1428).
gctcacctatgcatggatt

SEQ ID NO: 145387 - DNA, 19 bp, Homo sapiens
  siRNA target sequence for FLJ20080 (NM_017657.2,1415-1433).
cctatgcatggattctgtt

SEQ ID NO: 145388 - DNA, 19 bp, Homo sapiens
  siRNA target sequence for FLJ20080 (NM_017657.2,1416-1434).
ctatgcatggattctgtta

SEQ ID NO: 145389 - DNA, 19 bp, Homo sapiens
  siRNA target sequence for FLJ20080 (NM_017657.2,1424-1442).
ggattctgttaaaacttct

SEQ ID NO: 145390 - DNA, 19 bp, Homo sapiens
  siRNA target sequence for FLJ20080 (NM_017657.2,1557-1575).
ggtgatagtagtaatgact

SEQ ID NO: 145391 - DNA, 19 bp, Homo sapiens
  siRNA target sequence for FLJ20080 (NM_017657.2,1558-1576).
gtgatagtagtaatgactt

SEQ ID NO: 145392 - DNA, 19 bp, Homo sapiens
  siRNA target sequence for FLJ20080 (NM_017657.2,1659-1677).
gttactggtactcaagatt

SEQ ID NO: 145393 - DNA, 19 bp, Homo sapiens
  siRNA target sequence for FLJ20080 (NM_017657.2,1781-1799).
ccaagaggagacaatatta

SEQ ID NO: 145394 - DNA, 19 bp, Homo sapiens
  siRNA target sequence for FLJ20080 (NM_017657.2,1782-1800).
caagaggagacaatattaa

SEQ ID NO: 145395 - DNA, 19 bp, Homo sapiens
  siRNA target sequence for FLJ20080 (NM_017657.2,1822-1840).
cttctgataatttatcaga

SEQ ID NO: 145396 - DNA, 19 bp, Homo sapiens
  siRNA target sequence for FLJ20080 (NM_017657.2,1827-1845).
gataatttatcagaagaat

SEQ ID NO: 145397 - DNA, 19 bp, Homo sapiens
  siRNA target sequence for FLJ20080 (NM_017657.2,1876-1894).
gcactgaacctgttgcaaa

SEQ ID NO: 145398 - DNA, 19 bp, Homo sapiens
  siRNA target sequence for FLJ20080 (NM_017657.2,2010-2028).
cctagccaagttgtagatt

SEQ ID NO: 145399 - DNA, 19 bp, Homo sapiens
  siRNA target sequence for FLJ20080 (NM_017657.2,2014-2032).
gccaagttgtagattggaa

SEQ ID NO: 145400 - DNA, 19 bp, Homo sapiens
  siRNA target sequence for FLJ20080 (NM_017657.2,2015-2033).
ccaagttgtagattggaat

SEQ ID NO: 145401 - DNA, 19 bp, Homo sapiens
  siRNA target sequence for FLJ20080 (NM_017657.2,2019-2037).
gttgtagattggaatgctt

SEQ ID NO: 145402 - DNA, 19 bp, Homo sapiens
  siRNA target sequence for FLJ20080 (NM_017657.2,2266-2284).
gcctggagcgaattttcga

SEQ ID NO: 145403 - DNA, 19 bp, Homo sapiens
  siRNA target sequence for FLJ20080 (NM_017657.2,2267-2285).
cctggagcgaattttcgaa

SEQ ID NO: 145404 - DNA, 19 bp, Homo sapiens
  siRNA target sequence for FLJ20080 (NM_017657.2,2356-2374).
caagcactttgccaataaa

SEQ ID NO: 145405 - DNA, 19 bp, Homo sapiens
  siRNA target sequence for FLJ20080 (NM_017657.2,2398-2416).
gtggggaattgctagatgt

SEQ ID NO: 145406 - DNA, 19 bp, Homo sapiens
  siRNA target sequence for FLJ20080 (NM_017657.2,2472-2490).
ggctcccatagcaacaaga

SEQ ID NO: 145407 - DNA, 19 bp, Homo sapiens
  siRNA target sequence for FLJ20080 (NM_017657.2,2473-2491).
gctcccatagcaacaagaa

SEQ ID NO: 145408 - DNA, 19 bp, Homo sapiens
  siRNA target sequence for FLJ20080 (NM_017657.2,2509-2527).
gaatagacacccgaaacat

SEQ ID NO: 145409 - DNA, 19 bp, Homo sapiens
  siRNA target sequence for FLJ20080 (NM_017657.2,2529-2547).
ctcttcacgggcaataaga

SEQ ID NO: 145410 - DNA, 19 bp, Homo sapiens
  siRNA target sequence for FLJ20080 (NM_017657.2,2575-2593).
cagcaggattgggtatgtt

SEQ ID NO: 145411 - DNA, 19 bp, Homo sapiens
  siRNA target sequence for FLJ20080 (NM_017657.2,2578-2596).
caggattgggtatgttaga

SEQ ID NO: 145412 - DNA, 19 bp, Homo sapiens
  siRNA target sequence for FLJ20080 (NM_017657.2,2662-2680).
ccaccatgtcaccagatat

SEQ ID NO: 145413 - DNA, 19 bp, Homo sapiens
  siRNA target sequence for FLJ20080 (NM_017657.2,2681-2699).
gaacacatgtacatctgat

SEQ ID NO: 145414 - DNA, 19 bp, Homo sapiens
  siRNA target sequence for FLJ20080 (NM_017657.2,2686-2704).
catgtacatctgatcagtt

SEQ ID NO: 145415 - DNA, 19 bp, Homo sapiens
  siRNA target sequence for FLJ20080 (NM_017657.2,2718-2736).
ccacccgtccagtttgact

SEQ ID NO: 145416 - DNA, 19 bp, Homo sapiens
  siRNA target sequence for FLJ20080 (NM_017657.2,2740-2758).
gtagcagtggccttactaa

SEQ ID NO: 145417 - DNA, 19 bp, Homo sapiens
  siRNA target sequence for FLJ20080 (NM_017657.2,2770-2788).
gtgtggatccggagttgta

SEQ ID NO: 145418 - DNA, 19 bp, Homo sapiens
  siRNA target sequence for FLJ20080 (NM_017657.2,2775-2793).
gatccggagttgtatgagt

SEQ ID NO: 145419 - DNA, 19 bp, Homo sapiens
  siRNA target sequence for FLJ20080 (NM_017657.2,2778-2796).
ccggagttgtatgagttaa

SEQ ID NO: 145420 - DNA, 19 bp, Homo sapiens
  siRNA target sequence for FLJ20080 (NM_017657.2,2835-2853).
gtgactgatgcatttgcaa

SEQ ID NO: 145421 - DNA, 19 bp, Homo sapiens
  siRNA target sequence for FLJ20080 (NM_017657.2,2949-2967).
ggccttcctgacttaacat

SEQ ID NO: 145422 - DNA, 19 bp, Homo sapiens
  siRNA target sequence for FLJ20080 (NM_017657.2,2990-3008).
gttcccagccacgttaaca

SEQ ID NO: 145423 - DNA, 19 bp, Homo sapiens
  siRNA target sequence for FLJ20254 (NM_017727.2,768-786).
cctcaccgagggactgaaa

SEQ ID NO: 145424 - DNA, 19 bp, Homo sapiens
  siRNA target sequence for FLJ20254 (NM_017727.2,868-886).
ctgatgcatcccaacctta

SEQ ID NO: 145425 - DNA, 19 bp, Homo sapiens
  siRNA target sequence for FLJ20254 (NM_017727.2,940-958).
gcctatatgccgaacaact

SEQ ID NO: 145426 - DNA, 19 bp, Homo sapiens
  siRNA target sequence for FLJ20254 (NM_017727.2,993-1011).
gctctacccccgactgaaa

SEQ ID NO: 145427 - DNA, 19 bp, Homo sapiens
  siRNA target sequence for FLJ20254 (NM_017727.2,1091-1109).
gtccccctgagatgaagaa

SEQ ID NO: 145428 - DNA, 19 bp, Homo sapiens
  siRNA target sequence for FLJ20254 (NM_017727.2,1316-1334).
ggaagggtagcagtaacaa

SEQ ID NO: 145429 - DNA, 19 bp, Homo sapiens
  siRNA target sequence for FLJ20254 (NM_017727.2,1500-1518).
ccggttgcttcgatcatct

SEQ ID NO: 145430 - DNA, 19 bp, Homo sapiens
  siRNA target sequence for FLJ20254 (NM_017727.2,1672-1690).
gccacagtcagcttccttt

SEQ ID NO: 145431 - DNA, 19 bp, Homo sapiens
  siRNA target sequence for FLJ20254 (NM_017727.2,1966-1984).
ctttgcctacaggacatta

SEQ ID NO: 145432 - DNA, 19 bp, Homo sapiens
  siRNA target sequence for FLJ20298 (NM_017752.2,303-321).
ggttgggactcttgattca

SEQ ID NO: 145433 - DNA, 19 bp, Homo sapiens
  siRNA target sequence for FLJ20298 (NM_017752.2,324-342).
cttggactctactgctaaa

SEQ ID NO: 145434 - DNA, 19 bp, Homo sapiens
  siRNA target sequence for FLJ20298 (NM_017752.2,327-345).
ggactctactgctaaagta

SEQ ID NO: 145435 - DNA, 19 bp, Homo sapiens
  siRNA target sequence for FLJ20298 (NM_017752.2,439-457).
gattggttggaacaaaata

SEQ ID NO: 145436 - DNA, 19 bp, Homo sapiens
  siRNA target sequence for FLJ20298 (NM_017752.2,443-461).
ggttggaacaaaatattat

SEQ ID NO: 145437 - DNA, 19 bp, Homo sapiens
  siRNA target sequence for FLJ20298 (NM_017752.2,465-483).
gaccttatctgtatttgat

SEQ ID NO: 145438 - DNA, 19 bp, Homo sapiens
  siRNA target sequence for FLJ20298 (NM_017752.2,468-486).
cttatctgtatttgattca

SEQ ID NO: 145439 - DNA, 19 bp, Homo sapiens
  siRNA target sequence for FLJ20298 (NM_017752.2,543-561).
gggaaaacattgttttgca

SEQ ID NO: 145440 - DNA, 19 bp, Homo sapiens
  siRNA target sequence for FLJ20298 (NM_017752.2,634-652).
gagaagttagtgacctatt

SEQ ID NO: 145441 - DNA, 19 bp, Homo sapiens
  siRNA target sequence for FLJ20298 (NM_017752.2,636-654).
gaagttagtgacctattat

SEQ ID NO: 145442 - DNA, 19 bp, Homo sapiens
  siRNA target sequence for FLJ20298 (NM_017752.2,639-657).
gttagtgacctattattca

SEQ ID NO: 145443 - DNA, 19 bp, Homo sapiens
  siRNA target sequence for FLJ20298 (NM_017752.2,648-666).
ctattattcatgcagttat

SEQ ID NO: 145444 - DNA, 19 bp, Homo sapiens
  siRNA target sequence for FLJ20298 (NM_017752.2,738-756).
gttgggatcagaaataaaa

SEQ ID NO: 145445 - DNA, 19 bp, Homo sapiens
  siRNA target sequence for FLJ20298 (NM_017752.2,742-760).
ggatcagaaataaaactca

SEQ ID NO: 145446 - DNA, 19 bp, Homo sapiens
  siRNA target sequence for FLJ20298 (NM_017752.2,768-786).
ctgggatgaagtctcaaaa

SEQ ID NO: 145447 - DNA, 19 bp, Homo sapiens
  siRNA target sequence for FLJ20298 (NM_017752.2,770-788).
gggatgaagtctcaaaact

SEQ ID NO: 145448 - DNA, 19 bp, Homo sapiens
  siRNA target sequence for FLJ20298 (NM_017752.2,831-849).
gtgttcccaaggagagaat

SEQ ID NO: 145449 - DNA, 19 bp, Homo sapiens
  siRNA target sequence for FLJ20298 (NM_017752.2,836-854).
cccaaggagagaatcacta

SEQ ID NO: 145450 - DNA, 19 bp, Homo sapiens
  siRNA target sequence for FLJ20298 (NM_017752.2,906-924).
ggcaaactatgccattaga

SEQ ID NO: 145451 - DNA, 19 bp, Homo sapiens
  siRNA target sequence for FLJ20298 (NM_017752.2,907-925).
gcaaactatgccattagaa

SEQ ID NO: 145452 - DNA, 19 bp, Homo sapiens
  siRNA target sequence for FLJ20298 (NM_017752.2,912-930).
ctatgccattagaagactt

SEQ ID NO: 145453 - DNA, 19 bp, Homo sapiens
  siRNA target sequence for FLJ20298 (NM_017752.2,1009-1027).
gcccacagtgagcaattta

SEQ ID NO: 145454 - DNA, 19 bp, Homo sapiens
  siRNA target sequence for FLJ20298 (NM_017752.2,1011-1029).
ccacagtgagcaatttaat

SEQ ID NO: 145455 - DNA, 19 bp, Homo sapiens
  siRNA target sequence for FLJ20298 (NM_017752.2,1093-1111).
ccattcagccacttcaata

SEQ ID NO: 145456 - DNA, 19 bp, Homo sapiens
  siRNA target sequence for FLJ20298 (NM_017752.2,1125-1143).
gtgcatctcagaaaattat

SEQ ID NO: 145457 - DNA, 19 bp, Homo sapiens
  siRNA target sequence for FLJ20298 (NM_017752.2,1192-1210).
ctacgagaggtcttagcta

SEQ ID NO: 145458 - DNA, 19 bp, Homo sapiens
  siRNA target sequence for FLJ20298 (NM_017752.2,1196-1214).
gagaggtcttagctataga

SEQ ID NO: 145459 - DNA, 19 bp, Homo sapiens
  siRNA target sequence for FLJ20298 (NM_017752.2,1201-1219).
gtcttagctatagataaga

SEQ ID NO: 145460 - DNA, 19 bp, Homo sapiens
  siRNA target sequence for FLJ20298 (NM_017752.2,1203-1221).
cttagctatagataagaca

SEQ ID NO: 145461 - DNA, 19 bp, Homo sapiens
  siRNA target sequence for FLJ20298 (NM_017752.2,1274-1292).
gcttccatgaagttaaaga

SEQ ID NO: 145462 - DNA, 19 bp, Homo sapiens
  siRNA target sequence for FLJ20298 (NM_017752.2,1278-1296).
ccatgaagttaaagacttt

SEQ ID NO: 145463 - DNA, 19 bp, Homo sapiens
  siRNA target sequence for FLJ20298 (NM_017752.2,1329-1347).
cggagcagcttcaactcaa

SEQ ID NO: 145464 - DNA, 19 bp, Homo sapiens
  siRNA target sequence for FLJ20298 (NM_017752.2,1331-1349).
gagcagcttcaactcaata

SEQ ID NO: 145465 - DNA, 19 bp, Homo sapiens
  siRNA target sequence for FLJ20298 (NM_017752.2,1334-1352).
cagcttcaactcaatatca

SEQ ID NO: 145466 - DNA, 19 bp, Homo sapiens
  siRNA target sequence for FLJ20298 (NM_017752.2,1337-1355).
cttcaactcaatatcatga

SEQ ID NO: 145467 - DNA, 19 bp, Homo sapiens
  siRNA target sequence for FLJ20298 (NM_017752.2,1391-1409).
cagagccatctgataattt

SEQ ID NO: 145468 - DNA, 19 bp, Homo sapiens
  siRNA target sequence for FLJ20298 (NM_017752.2,1411-1429).
gaggtgcaatctttgacaa

SEQ ID NO: 145469 - DNA, 19 bp, Homo sapiens
  siRNA target sequence for FLJ20298 (NM_017752.2,1432-1450).
cagagggaatgcagtaaaa

SEQ ID NO: 145470 - DNA, 19 bp, Homo sapiens
  siRNA target sequence for FLJ20298 (NM_017752.2,1436-1454).
gggaatgcagtaaaactgt

SEQ ID NO: 145471 - DNA, 19 bp, Homo sapiens
  siRNA target sequence for FLJ20298 (NM_017752.2,1462-1480).
gaagccttaatgacagtat

SEQ ID NO: 145472 - DNA, 19 bp, Homo sapiens
  siRNA target sequence for FLJ20298 (NM_017752.2,1570-1588).
ggacgtggtgttagtatgt

SEQ ID NO: 145473 - DNA, 19 bp, Homo sapiens
  siRNA target sequence for FLJ20298 (NM_017752.2,1576-1594).
ggtgttagtatgtttcgaa

SEQ ID NO: 145474 - DNA, 19 bp, Homo sapiens
  siRNA target sequence for FLJ20298 (NM_017752.2,1583-1601).
gtatgtttcgaaccaaaaa

SEQ ID NO: 145475 - DNA, 19 bp, Homo sapiens
  siRNA target sequence for FLJ20298 (NM_017752.2,1587-1605).
gtttcgaaccaaaaagact

SEQ ID NO: 145476 - DNA, 19 bp, Homo sapiens
  siRNA target sequence for FLJ20298 (NM_017752.2,1596-1614).
caaaaagactcgagatctt

SEQ ID NO: 145477 - DNA, 19 bp, Homo sapiens
  siRNA target sequence for FLJ20298 (NM_017752.2,1602-1620).
gactcgagatcttgttgta

SEQ ID NO: 145478 - DNA, 19 bp, Homo sapiens
  siRNA target sequence for FLJ20298 (NM_017752.2,1686-1704).
ggctactaatcctgactat

SEQ ID NO: 145479 - DNA, 19 bp, Homo sapiens
  siRNA target sequence for FLJ20298 (NM_017752.2,1687-1705).
gctactaatcctgactatt

SEQ ID NO: 145480 - DNA, 19 bp, Homo sapiens
  siRNA target sequence for FLJ20298 (NM_017752.2,1688-1706).
ctactaatcctgactatta

SEQ ID NO: 145481 - DNA, 19 bp, Homo sapiens
  siRNA target sequence for FLJ20298 (NM_017752.2,1836-1854).
ggtactcacagcttatgca

SEQ ID NO: 145482 - DNA, 19 bp, Homo sapiens
  siRNA target sequence for FLJ20298 (NM_017752.2,1837-1855).
gtactcacagcttatgcat

SEQ ID NO: 145483 - DNA, 19 bp, Homo sapiens
  siRNA target sequence for FLJ20298 (NM_017752.2,1906-1924).
gtgctgcttctatatgcaa

SEQ ID NO: 145484 - DNA, 19 bp, Homo sapiens
  siRNA target sequence for FLJ20298 (NM_017752.2,1966-1984).
cgaatgttgcctgattatt

SEQ ID NO: 145485 - DNA, 19 bp, Homo sapiens
  siRNA target sequence for FLJ20298 (NM_017752.2,1974-1992).
gcctgattattttaatcgt

SEQ ID NO: 145486 - DNA, 19 bp, Homo sapiens
  siRNA target sequence for FLJ20298 (NM_017752.2,2019-2037).
ggcagtctttgaagaactt

SEQ ID NO: 145487 - DNA, 19 bp, Homo sapiens
  siRNA target sequence for FLJ20298 (NM_017752.2,2068-2086).
cacatgactgatatgacat

SEQ ID NO: 145488 - DNA, 19 bp, Homo sapiens
  siRNA target sequence for FLJ20298 (NM_017752.2,2210-2228).
gattggcaatacttgacta

SEQ ID NO: 145489 - DNA, 19 bp, Homo sapiens
  siRNA target sequence for FLJ20298 (NM_017752.2,2214-2232).
ggcaatacttgactataat

SEQ ID NO: 145490 - DNA, 19 bp, Homo sapiens
  siRNA target sequence for FLJ20298 (NM_017752.2,2215-2233).
gcaatacttgactataatt

SEQ ID NO: 145491 - DNA, 19 bp, Homo sapiens
  siRNA target sequence for FLJ20298 (NM_017752.2,2221-2239).
cttgactataatttagaca

SEQ ID NO: 145492 - DNA, 19 bp, Homo sapiens
  siRNA target sequence for FLJ20298 (NM_017752.2,2244-2262).
gctgacttgtaaagatgat

SEQ ID NO: 145493 - DNA, 19 bp, Homo sapiens
  siRNA target sequence for FLJ20298 (NM_017752.2,2269-2287).
gctgtgacagccttaaaca

SEQ ID NO: 145494 - DNA, 19 bp, Homo sapiens
  siRNA target sequence for FLJ20298 (NM_017752.2,2372-2390).
gtcatactagagtggatat

SEQ ID NO: 145495 - DNA, 19 bp, Homo sapiens
  siRNA target sequence for FLJ20298 (NM_017752.2,2374-2392).
catactagagtggatatta

SEQ ID NO: 145496 - DNA, 19 bp, Homo sapiens
  siRNA target sequence for FLJ20298 (NM_017752.2,2426-2444).
gtaatattcgctatgaaga

SEQ ID NO: 145497 - DNA, 19 bp, Homo sapiens
  siRNA target sequence for FLJ20298 (NM_017752.2,2460-2478).
ctgtcgaaataggttgtat

SEQ ID NO: 145498 - DNA, 19 bp, Homo sapiens
  siRNA target sequence for FLJ20298 (NM_017752.2,2462-2480).
gtcgaaataggttgtatgt

SEQ ID NO: 145499 - DNA, 19 bp, Homo sapiens
  siRNA target sequence for FLJ20298 (NM_017752.2,2464-2482).
cgaaataggttgtatgtga

SEQ ID NO: 145500 - DNA, 19 bp, Homo sapiens
  siRNA target sequence for FLJ20298 (NM_017752.2,2465-2483).
gaaataggttgtatgtgat

SEQ ID NO: 145501 - DNA, 19 bp, Homo sapiens
  siRNA target sequence for FLJ20298 (NM_017752.2,2487-2505).
gaccctagaggaaacaaca

SEQ ID NO: 145502 - DNA, 19 bp, Homo sapiens
  siRNA target sequence for FLJ20298 (NM_017752.2,2511-2529).
gaatgtgttgcgtgttgta

SEQ ID NO: 145503 - DNA, 19 bp, Homo sapiens
  siRNA target sequence for FLJ20298 (NM_017752.2,2517-2535).
gttgcgtgttgtatcacaa

SEQ ID NO: 145504 - DNA, 19 bp, Homo sapiens
  siRNA target sequence for FLJ20298 (NM_017752.2,2520-2538).
gcgtgttgtatcacaagat

SEQ ID NO: 145505 - DNA, 19 bp, Homo sapiens
  siRNA target sequence for FLJ20298 (NM_017752.2,2566-2584).
gaactttatgtcatcttta

SEQ ID NO: 145506 - DNA, 19 bp, Homo sapiens
  siRNA target sequence for FLJ20298 (NM_017752.2,2615-2633).
gtttgggttgcccagtatt

SEQ ID NO: 145507 - DNA, 19 bp, Homo sapiens
  siRNA target sequence for FLJ20298 (NM_017752.2,2644-2662).
gaccccagtctgccatatt

SEQ ID NO: 145508 - DNA, 19 bp, Homo sapiens
  siRNA target sequence for FLJ20298 (NM_017752.2,2655-2673).
gccatatttggaacagtat

SEQ ID NO: 145509 - DNA, 19 bp, Homo sapiens
  siRNA target sequence for FLJ20298 (NM_017752.2,2657-2675).
catatttggaacagtatca

SEQ ID NO: 145510 - DNA, 19 bp, Homo sapiens
  siRNA target sequence for FLJ20298 (NM_017752.2,2688-2706).
gcagttcagagcgttgtat

SEQ ID NO: 145511 - DNA, 19 bp, Homo sapiens
  siRNA target sequence for FLJ20298 (NM_017752.2,2696-2714).
gagcgttgtatcacttgtt

SEQ ID NO: 145512 - DNA, 19 bp, Homo sapiens
  siRNA target sequence for FLJ20298 (NM_017752.2,2698-2716).
gcgttgtatcacttgttga

SEQ ID NO: 145513 - DNA, 19 bp, Homo sapiens
  siRNA target sequence for FLJ20298 (NM_017752.2,2743-2761).
gactcactagctttatgga

SEQ ID NO: 145514 - DNA, 19 bp, Homo sapiens
  siRNA target sequence for FLJ20298 (NM_017752.2,2752-2770).
gctttatggacattcagat

SEQ ID NO: 145515 - DNA, 19 bp, Homo sapiens
  siRNA target sequence for FLJ20298 (NM_017752.2,2759-2777).
ggacattcagattgttaga

SEQ ID NO: 145516 - DNA, 19 bp, Homo sapiens
  siRNA target sequence for FLJ20298 (NM_017752.2,2762-2780).
cattcagattgttagatga

SEQ ID NO: 145517 - DNA, 19 bp, Homo sapiens
  siRNA target sequence for FLJ20298 (NM_017752.2,2786-2804).
ctgattgccttataaactt

SEQ ID NO: 145518 - DNA, 19 bp, Homo sapiens
  siRNA target sequence for FLJ20298 (NM_017752.2,2814-2832).
ctcctctgcaattgacata

SEQ ID NO: 145519 - DNA, 19 bp, Homo sapiens
  siRNA target sequence for FLJ20298 (NM_017752.2,2827-2845).
gacataatgtacaatggaa

SEQ ID NO: 145520 - DNA, 19 bp, Homo sapiens
  siRNA target sequence for FLJ20298 (NM_017752.2,2835-2853).
gtacaatggaagttttact

SEQ ID NO: 145521 - DNA, 19 bp, Homo sapiens
  siRNA target sequence for FLJ20298 (NM_017752.2,2966-2984).
gtcagctgcatgtttccaa

SEQ ID NO: 145522 - DNA, 19 bp, Homo sapiens
  siRNA target sequence for FLJ20298 (NM_017752.2,3014-3032).
caaaacacagccctgaaaa

SEQ ID NO: 145523 - DNA, 19 bp, Homo sapiens
  siRNA target sequence for FLJ20298 (NM_017752.2,3055-3073).
caagcatatctaagtcaat

SEQ ID NO: 145524 - DNA, 19 bp, Homo sapiens
  siRNA target sequence for FLJ20298 (NM_017752.2,3130-3148).
cagtctcagtttattcagt

SEQ ID NO: 145525 - DNA, 19 bp, Homo sapiens
  siRNA target sequence for FLJ20298 (NM_017752.2,3132-3150).
gtctcagtttattcagttt

SEQ ID NO: 145526 - DNA, 19 bp, Homo sapiens
  siRNA target sequence for FLJ20298 (NM_017752.2,3152-3170).
caaagaccctctataactt

SEQ ID NO: 145527 - DNA, 19 bp, Homo sapiens
  siRNA target sequence for FLJ20298 (NM_017752.2,3158-3176).
ccctctataacttatttca

SEQ ID NO: 145528 - DNA, 19 bp, Homo sapiens
  siRNA target sequence for FLJ20298 (NM_017752.2,3159-3177).
cctctataacttatttcat

SEQ ID NO: 145529 - DNA, 19 bp, Homo sapiens
  siRNA target sequence for FLJ20298 (NM_017752.2,3184-3202).
cctgaagaagaatcattat

SEQ ID NO: 145530 - DNA, 19 bp, Homo sapiens
  siRNA target sequence for FLJ20298 (NM_017752.2,3220-3238).
gtaaccagccttttactca

SEQ ID NO: 145531 - DNA, 19 bp, Homo sapiens
  siRNA target sequence for FLJ20298 (NM_017752.2,3354-3372).
gaaagatccttgttccttt

SEQ ID NO: 145532 - DNA, 19 bp, Homo sapiens
  siRNA target sequence for FLJ20298 (NM_017752.2,3433-3451).
ccagcattggtgaggtttt

SEQ ID NO: 145533 - DNA, 19 bp, Homo sapiens
  siRNA target sequence for FLJ20298 (NM_198881.1,2019-2037).
gccactagtaagaatccaa

SEQ ID NO: 145534 - DNA, 19 bp, Homo sapiens
  siRNA target sequence for FLJ20298 (NM_198881.1,2030-2048).
gaatccaaggacaatgtgt

SEQ ID NO: 145535 - DNA, 19 bp, Homo sapiens
  siRNA target sequence for FLJ22843 (NM_025184.2,162-180).
ggggcttttgcaacaatgt

SEQ ID NO: 145536 - DNA, 19 bp, Homo sapiens
  siRNA target sequence for FLJ22843 (NM_025184.2,227-245).
cttctggggcaaaagataa

SEQ ID NO: 145537 - DNA, 19 bp, Homo sapiens
  siRNA target sequence for FLJ22843 (NM_025184.2,294-312).
catgggtagcctttgataa

SEQ ID NO: 145538 - DNA, 19 bp, Homo sapiens
  siRNA target sequence for FLJ22843 (NM_025184.2,297-315).
gggtagcctttgataaaca

SEQ ID NO: 145539 - DNA, 19 bp, Homo sapiens
  siRNA target sequence for FLJ22843 (NM_025184.2,304-322).
ctttgataaacaggtatta

SEQ ID NO: 145540 - DNA, 19 bp, Homo sapiens
  siRNA target sequence for FLJ22843 (NM_025184.2,340-358).
ggaagaggaagtacttgat

SEQ ID NO: 145541 - DNA, 19 bp, Homo sapiens
  siRNA target sequence for FLJ22843 (NM_025184.2,365-383).
caaaccaactacagaataa

SEQ ID NO: 145542 - DNA, 19 bp, Homo sapiens
  siRNA target sequence for FLJ22843 (NM_025184.2,480-498).
ggcgtcatcggattactct

SEQ ID NO: 145543 - DNA, 19 bp, Homo sapiens
  siRNA target sequence for FLJ22843 (NM_025184.2,481-499).
gcgtcatcggattactctt

SEQ ID NO: 145544 - DNA, 19 bp, Homo sapiens
  siRNA target sequence for FLJ22843 (NM_025184.2,507-525).
ctgatgaggatcagtttta

SEQ ID NO: 145545 - DNA, 19 bp, Homo sapiens
  siRNA target sequence for FLJ22843 (NM_025184.2,569-587).
ggccggacattcaagattt

SEQ ID NO: 145546 - DNA, 19 bp, Homo sapiens
  siRNA target sequence for FLJ22843 (NM_025184.2,570-588).
gccggacattcaagattta

SEQ ID NO: 145547 - DNA, 19 bp, Homo sapiens
  siRNA target sequence for FLJ22843 (NM_025184.2,571-589).
ccggacattcaagatttat

SEQ ID NO: 145548 - DNA, 19 bp, Homo sapiens
  siRNA target sequence for FLJ22843 (NM_025184.2,594-612).
gtgatgcattcacaagaaa

SEQ ID NO: 145549 - DNA, 19 bp, Homo sapiens
  siRNA target sequence for FLJ22843 (NM_025184.2,596-614).
gatgcattcacaagaaact

SEQ ID NO: 145550 - DNA, 19 bp, Homo sapiens
  siRNA target sequence for FLJ22843 (NM_025184.2,599-617).
gcattcacaagaaactttt

SEQ ID NO: 145551 - DNA, 19 bp, Homo sapiens
  siRNA target sequence for FLJ22843 (NM_025184.2,660-678).
cagaagatccttacatgaa

SEQ ID NO: 145552 - DNA, 19 bp, Homo sapiens
  siRNA target sequence for FLJ22843 (NM_025184.2,684-702).
ggagagaggttgtagaaca

SEQ ID NO: 145553 - DNA, 19 bp, Homo sapiens
  siRNA target sequence for FLJ22843 (NM_025184.2,710-728).
cccttacgtccctacgaat

SEQ ID NO: 145554 - DNA, 19 bp, Homo sapiens
  siRNA target sequence for FLJ22843 (NM_025184.2,792-810).
gggatgactcagtctcaat

SEQ ID NO: 145555 - DNA, 19 bp, Homo sapiens
  siRNA target sequence for FLJ22843 (NM_025184.2,816-834).
gagaccgtagagaactcat

SEQ ID NO: 145556 - DNA, 19 bp, Homo sapiens
  siRNA target sequence for FLJ22843 (NM_025184.2,825-843).
gagaactcatcctgcatta

SEQ ID NO: 145557 - DNA, 19 bp, Homo sapiens
  siRNA target sequence for FLJ22843 (NM_025184.2,844-862).
cttcttgtgtgatgatact

SEQ ID NO: 145558 - DNA, 19 bp, Homo sapiens
  siRNA target sequence for FLJ22843 (NM_025184.2,847-865).
cttgtgtgatgatactatt

SEQ ID NO: 145559 - DNA, 19 bp, Homo sapiens
  siRNA target sequence for FLJ22843 (NM_025184.2,894-912).
caggccgagatgctctaaa

SEQ ID NO: 145560 - DNA, 19 bp, Homo sapiens
  siRNA target sequence for FLJ22843 (NM_025184.2,897-915).
gccgagatgctctaaaaat

SEQ ID NO: 145561 - DNA, 19 bp, Homo sapiens
  siRNA target sequence for FLJ22843 (NM_025184.2,899-917).
cgagatgctctaaaaatgt

SEQ ID NO: 145562 - DNA, 19 bp, Homo sapiens
  siRNA target sequence for FLJ22843 (NM_025184.2,919-937).
cctccggaggagtaagcta

SEQ ID NO: 145563 - DNA, 19 bp, Homo sapiens
  siRNA target sequence for FLJ22843 (NM_025184.2,928-946).
gagtaagctacccaagaat

SEQ ID NO: 145564 - DNA, 19 bp, Homo sapiens
  siRNA target sequence for FLJ22843 (NM_025184.2,948-966).
gcccacctagagtctatca

SEQ ID NO: 145565 - DNA, 19 bp, Homo sapiens
  siRNA target sequence for FLJ22843 (NM_025184.2,949-967).
cccacctagagtctatcaa

SEQ ID NO: 145566 - DNA, 19 bp, Homo sapiens
  siRNA target sequence for FLJ22843 (NM_025184.2,987-1005).
gagcagttctcaattcata

SEQ ID NO: 145567 - DNA, 19 bp, Homo sapiens
  siRNA target sequence for FLJ22843 (NM_025184.2,1035-1053).
gctacctgttcgatagata

SEQ ID NO: 145568 - DNA, 19 bp, Homo sapiens
  siRNA target sequence for FLJ22843 (NM_025184.2,1036-1054).
ctacctgttcgatagatat

SEQ ID NO: 145569 - DNA, 19 bp, Homo sapiens
  siRNA target sequence for FLJ22843 (NM_025184.2,1042-1060).
gttcgatagatataagcta

SEQ ID NO: 145570 - DNA, 19 bp, Homo sapiens
  siRNA target sequence for FLJ22843 (NM_025184.2,1067-1085).
gtagaccaagagttttaca

SEQ ID NO: 145571 - DNA, 19 bp, Homo sapiens
  siRNA target sequence for FLJ22843 (NM_025184.2,1128-1146).
gaagaaaagtgctccttta

SEQ ID NO: 145572 - DNA, 19 bp, Homo sapiens
  siRNA target sequence for FLJ22843 (NM_025184.2,1141-1159).
cctttatgactgtgatgaa

SEQ ID NO: 145573 - DNA, 19 bp, Homo sapiens
  siRNA target sequence for FLJ22843 (NM_025184.2,1148-1166).
gactgtgatgaatttacga

SEQ ID NO: 145574 - DNA, 19 bp, Homo sapiens
  siRNA target sequence for FLJ22843 (NM_025184.2,1165-1183).
gaagtcttattataagtct

SEQ ID NO: 145575 - DNA, 19 bp, Homo sapiens
  siRNA target sequence for FLJ22843 (NM_025184.2,1168-1186).
gtcttattataagtctaaa

SEQ ID NO: 145576 - DNA, 19 bp, Homo sapiens
  siRNA target sequence for FLJ22843 (NM_025184.2,1198-1216).
gaactttacctcagtttca

SEQ ID NO: 145577 - DNA, 19 bp, Homo sapiens
  siRNA target sequence for FLJ22843 (NM_025184.2,1251-1269).
ggaaatttccaccttacaa

SEQ ID NO: 145578 - DNA, 19 bp, Homo sapiens
  siRNA target sequence for FLJ22843 (NM_025184.2,1267-1285).
caacggttttggttctgaa

SEQ ID NO: 145579 - DNA, 19 bp, Homo sapiens
  siRNA target sequence for FLJ22843 (NM_025184.2,1326-1344).
ctcatcggaggaacttcaa

SEQ ID NO: 145580 - DNA, 19 bp, Homo sapiens
  siRNA target sequence for FLJ22843 (NM_025184.2,1365-1383).
gctatggctccaaaagcaa

SEQ ID NO: 145581 - DNA, 19 bp, Homo sapiens
  siRNA target sequence for FLJ22843 (NM_025184.2,1380-1398).
gcaatatactccgtttttt

SEQ ID NO: 145582 - DNA, 19 bp, Homo sapiens
  siRNA target sequence for FLJ22843 (NM_025184.2,1413-1431).
cagacaaatgtgttgactt

SEQ ID NO: 145583 - DNA, 19 bp, Homo sapiens
  siRNA target sequence for FLJ22843 (NM_025184.2,1481-1499).
gtgtttgaacctatagaga

SEQ ID NO: 145584 - DNA, 19 bp, Homo sapiens
  siRNA target sequence for FLJ22843 (NM_025184.2,1514-1532).
gctggtgggatgttcttga

SEQ ID NO: 145585 - DNA, 19 bp, Homo sapiens
  siRNA target sequence for FLJ22843 (NM_025184.2,1515-1533).
ctggtgggatgttcttgaa

SEQ ID NO: 145586 - DNA, 19 bp, Homo sapiens
  siRNA target sequence for FLJ22843 (NM_025184.2,1554-1572).
ctggacaagaagtctttaa

SEQ ID NO: 145587 - DNA, 19 bp, Homo sapiens
  siRNA target sequence for FLJ22843 (NM_025184.2,1597-1615).
ggccgaggagctgtacatt

SEQ ID NO: 145588 - DNA, 19 bp, Homo sapiens
  siRNA target sequence for FLJ22843 (NM_025184.2,1616-1634).
ggagtcacggtgaatgtga

SEQ ID NO: 145589 - DNA, 19 bp, Homo sapiens
  siRNA target sequence for FLJ22843 (NM_025184.2,1617-1635).
gagtcacggtgaatgtgaa

SEQ ID NO: 145590 - DNA, 19 bp, Homo sapiens
  siRNA target sequence for FLJ22843 (NM_025184.2,1623-1641).
cggtgaatgtgaatggtta

SEQ ID NO: 145591 - DNA, 19 bp, Homo sapiens
  siRNA target sequence for FLJ22843 (NM_025184.2,1627-1645).
gaatgtgaatggttaccta

SEQ ID NO: 145592 - DNA, 19 bp, Homo sapiens
  siRNA target sequence for FLJ22843 (NM_025184.2,1654-1672).
gctcaatgctgatgagtat

SEQ ID NO: 145593 - DNA, 19 bp, Homo sapiens
  siRNA target sequence for FLJ22843 (NM_025184.2,1667-1685).
gagtataccttaaactaca

SEQ ID NO: 145594 - DNA, 19 bp, Homo sapiens
  siRNA target sequence for FLJ22843 (NM_025184.2,1690-1708).
gcagaatacagataagtat

SEQ ID NO: 145595 - DNA, 19 bp, Homo sapiens
  siRNA target sequence for FLJ22843 (NM_025184.2,1700-1718).
gataagtatcctttcagta

SEQ ID NO: 145596 - DNA, 19 bp, Homo sapiens
  siRNA target sequence for FLJ22843 (NM_025184.2,1769-1787).
gagctcaagcaggtattta

SEQ ID NO: 145597 - DNA, 19 bp, Homo sapiens
  siRNA target sequence for FLJ22843 (NM_025184.2,1774-1792).
caagcaggtatttaaagct

SEQ ID NO: 145598 - DNA, 19 bp, Homo sapiens
  siRNA target sequence for FLJ22843 (NM_025184.2,1817-1835).
gtggattataatacattca

SEQ ID NO: 145599 - DNA, 19 bp, Homo sapiens
  siRNA target sequence for FLJ22843 (NM_025184.2,1838-1856).
gacatattgatgtctttga

SEQ ID NO: 145600 - DNA, 19 bp, Homo sapiens
  siRNA target sequence for FLJ22843 (NM_025184.2,1916-1934).
gagggcacatgttcagata

SEQ ID NO: 145601 - DNA, 19 bp, Homo sapiens
  siRNA target sequence for FLJ22843 (NM_025184.2,1920-1938).
gcacatgttcagatatgga

SEQ ID NO: 145602 - DNA, 19 bp, Homo sapiens
  siRNA target sequence for FLJ22843 (NM_025184.2,1921-1939).
cacatgttcagatatggat

SEQ ID NO: 145603 - DNA, 19 bp, Homo sapiens
  siRNA target sequence for FLJ22843 (NM_025184.2,1923-1941).
catgttcagatatggattt

SEQ ID NO: 145604 - DNA, 19 bp, Homo sapiens
  siRNA target sequence for FLJ22843 (NM_025184.2,1949-1967).
gcactggcccacgaaaagt

SEQ ID NO: 145605 - DNA, 19 bp, Homo sapiens
  siRNA target sequence for FLJ22843 (NM_025184.2,1950-1968).
cactggcccacgaaaagtt

SEQ ID NO: 145606 - DNA, 19 bp, Homo sapiens
  siRNA target sequence for FLJ22843 (NM_025184.2,1955-1973).
gcccacgaaaagttcaaga

SEQ ID NO: 145607 - DNA, 19 bp, Homo sapiens
  siRNA target sequence for FLJ22843 (NM_025184.2,1956-1974).
cccacgaaaagttcaagaa

SEQ ID NO: 145608 - DNA, 19 bp, Homo sapiens
  siRNA target sequence for FLJ22843 (NM_025184.2,1987-2005).
gaatttcgacactttcatt

SEQ ID NO: 145609 - DNA, 19 bp, Homo sapiens
  siRNA target sequence for FLJ22843 (NM_025184.2,2042-2060).
gtattacccaccaaagaca

SEQ ID NO: 145610 - DNA, 19 bp, Homo sapiens
  siRNA target sequence for FLJ22843 (NM_025184.2,2048-2066).
cccaccaaagacattaaaa

SEQ ID NO: 145611 - DNA, 19 bp, Homo sapiens
  siRNA target sequence for FLJ22843 (NM_025184.2,2071-2089).
gtgcaaatcctccagatta

SEQ ID NO: 145612 - DNA, 19 bp, Homo sapiens
  siRNA target sequence for FLJ22843 (NM_025184.2,2074-2092).
caaatcctccagattacct

SEQ ID NO: 145613 - DNA, 19 bp, Homo sapiens
  siRNA target sequence for FLJ22843 (NM_025184.2,2102-2120).
gatcttctagaatccttat

SEQ ID NO: 145614 - DNA, 19 bp, Homo sapiens
  siRNA target sequence for FLJ22843 (NM_025184.2,2116-2134).
cttattgtcaaggtttgaa

SEQ ID NO: 145615 - DNA, 19 bp, Homo sapiens
  siRNA target sequence for FLJ22843 (NM_025184.2,2147-2165).
caaatagattataagtcat

SEQ ID NO: 145616 - DNA, 19 bp, Homo sapiens
  siRNA target sequence for FLJ22843 (NM_025184.2,2209-2227).
gcaaccagcatcatacctt

SEQ ID NO: 145617 - DNA, 19 bp, Homo sapiens
  siRNA target sequence for FLJ22843 (NM_025184.2,2214-2232).
cagcatcataccttaaaga

SEQ ID NO: 145618 - DNA, 19 bp, Homo sapiens
  siRNA target sequence for FLJ22843 (NM_025184.2,2265-2283).
cacctattcctgcgaaata

SEQ ID NO: 145619 - DNA, 19 bp, Homo sapiens
  siRNA target sequence for FLJ22843 (NM_025184.2,2267-2285).
cctattcctgcgaaataca

SEQ ID NO: 145620 - DNA, 19 bp, Homo sapiens
  siRNA target sequence for FLJ22843 (NM_025184.2,2268-2286).
ctattcctgcgaaatacat

SEQ ID NO: 145621 - DNA, 19 bp, Homo sapiens
  siRNA target sequence for FLJ22843 (NM_025184.2,2274-2292).
ctgcgaaatacattgacta

SEQ ID NO: 145622 - DNA, 19 bp, Homo sapiens
  siRNA target sequence for FLJ23588 (NM_022785.2,254-272).
gcatcctcacacacgaaaa

SEQ ID NO: 145623 - DNA, 19 bp, Homo sapiens
  siRNA target sequence for FLJ23588 (NM_022785.2,258-276).
cctcacacacgaaaattta

SEQ ID NO: 145624 - DNA, 19 bp, Homo sapiens
  siRNA target sequence for FLJ23588 (NM_022785.2,263-281).
cacacgaaaatttacacat

SEQ ID NO: 145625 - DNA, 19 bp, Homo sapiens
  siRNA target sequence for FLJ23588 (NM_022785.2,267-285).
cgaaaatttacacattcaa

SEQ ID NO: 145626 - DNA, 19 bp, Homo sapiens
  siRNA target sequence for FLJ23588 (NM_022785.2,300-318).
ccgtgtagagtatattcaa

SEQ ID NO: 145627 - DNA, 19 bp, Homo sapiens
  siRNA target sequence for FLJ23588 (NM_022785.2,324-342).
ggttccccaaataagttca

SEQ ID NO: 145628 - DNA, 19 bp, Homo sapiens
  siRNA target sequence for FLJ23588 (NM_022785.2,376-394).
cactgtcctccttagatgt

SEQ ID NO: 145629 - DNA, 19 bp, Homo sapiens
  siRNA target sequence for FLJ23588 (NM_022785.2,378-396).
ctgtcctccttagatgtta

SEQ ID NO: 145630 - DNA, 19 bp, Homo sapiens
  siRNA target sequence for FLJ23588 (NM_022785.2,380-398).
gtcctccttagatgttaaa

SEQ ID NO: 145631 - DNA, 19 bp, Homo sapiens
  siRNA target sequence for FLJ23588 (NM_022785.2,390-408).
gatgttaaacggattttat

SEQ ID NO: 145632 - DNA, 19 bp, Homo sapiens
  siRNA target sequence for FLJ23588 (NM_022785.2,399-417).
cggattttatttcaaaaaa

SEQ ID NO: 145633 - DNA, 19 bp, Homo sapiens
  siRNA target sequence for FLJ23588 (NM_022785.2,421-439).
ccgacagaggggatgagtt

SEQ ID NO: 145634 - DNA, 19 bp, Homo sapiens
  siRNA target sequence for FLJ23588 (NM_022785.2,473-491).
gaacttgactgtgtcaaaa

SEQ ID NO: 145635 - DNA, 19 bp, Homo sapiens
  siRNA target sequence for FLJ23588 (NM_022785.2,529-547).
cgctcacacgagaacagtt

SEQ ID NO: 145636 - DNA, 19 bp, Homo sapiens
  siRNA target sequence for FLJ23588 (NM_022785.2,594-612).
ccgtaccttgcctttctgt

SEQ ID NO: 145637 - DNA, 19 bp, Homo sapiens
  siRNA target sequence for FLJ23588 (NM_022785.2,621-639).
ggtggaattgacctatata

SEQ ID NO: 145638 - DNA, 19 bp, Homo sapiens
  siRNA target sequence for FLJ23588 (NM_022785.2,622-640).
gtggaattgacctatatat

SEQ ID NO: 145639 - DNA, 19 bp, Homo sapiens
  siRNA target sequence for FLJ23588 (NM_022785.2,630-648).
gacctatatataaatggta

SEQ ID NO: 145640 - DNA, 19 bp, Homo sapiens
  siRNA target sequence for FLJ23588 (NM_022785.2,679-697).
gctgccgcacattaagaga

SEQ ID NO: 145641 - DNA, 19 bp, Homo sapiens
  siRNA target sequence for FLJ23588 (NM_022785.2,680-698).
ctgccgcacattaagagaa

SEQ ID NO: 145642 - DNA, 19 bp, Homo sapiens
  siRNA target sequence for FLJ23588 (NM_022785.2,683-701).
ccgcacattaagagaactt

SEQ ID NO: 145643 - DNA, 19 bp, Homo sapiens
  siRNA target sequence for FLJ23588 (NM_022785.2,685-703).
gcacattaagagaacttga

SEQ ID NO: 145644 - DNA, 19 bp, Homo sapiens
  siRNA target sequence for FLJ23588 (NM_022785.2,754-772).
cctttgagctcattgatgt

SEQ ID NO: 145645 - DNA, 19 bp, Homo sapiens
  siRNA target sequence for FLJ23588 (NM_022785.2,824-842).
cttctgtatgaagttaaga

SEQ ID NO: 145646 - DNA, 19 bp, Homo sapiens
  siRNA target sequence for FLJ23588 (NM_022785.2,845-863).
cgaggaatacgaaaagttt

SEQ ID NO: 145647 - DNA, 19 bp, Homo sapiens
  siRNA target sequence for FLJ23588 (NM_022785.2,846-864).
gaggaatacgaaaagtttt

SEQ ID NO: 145648 - DNA, 19 bp, Homo sapiens
  siRNA target sequence for FLJ23588 (NM_022785.2,849-867).
gaatacgaaaagttttcga

SEQ ID NO: 145649 - DNA, 19 bp, Homo sapiens
  siRNA target sequence for FLJ23588 (NM_022785.2,855-873).
gaaaagttttcgaaacact

SEQ ID NO: 145650 - DNA, 19 bp, Homo sapiens
  siRNA target sequence for FLJ23588 (NM_022785.2,884-902).
caaggatactgcagtagat

SEQ ID NO: 145651 - DNA, 19 bp, Homo sapiens
  siRNA target sequence for FLJ23588 (NM_022785.2,897-915).
gtagattacaacgtgtttt

SEQ ID NO: 145652 - DNA, 19 bp, Homo sapiens
  siRNA target sequence for FLJ23588 (NM_022785.2,938-956).
cgacttgaaccttagatat

SEQ ID NO: 145653 - DNA, 19 bp, Homo sapiens
  siRNA target sequence for FLJ23588 (NM_022785.2,952-970).
gatattgtatgggaaatca

SEQ ID NO: 145654 - DNA, 19 bp, Homo sapiens
  siRNA target sequence for FLJ23588 (NM_022785.2,1007-1025).
caaaaaggaacgtttgcta

SEQ ID NO: 145655 - DNA, 19 bp, Homo sapiens
  siRNA target sequence for FLJ23588 (NM_022785.2,1022-1040).
gctaggttctgcatcatct

SEQ ID NO: 145656 - DNA, 19 bp, Homo sapiens
  siRNA target sequence for FLJ23588 (NM_022785.2,1032-1050).
gcatcatctgaagatatct

SEQ ID NO: 145657 - DNA, 19 bp, Homo sapiens
  siRNA target sequence for FLJ23588 (NM_022785.2,1044-1062).
gatatctggagaaactact

SEQ ID NO: 145658 - DNA, 19 bp, Homo sapiens
  siRNA target sequence for FLJ23588 (NM_022785.2,1071-1089).
gaaattgagaggaactttt

SEQ ID NO: 145659 - DNA, 19 bp, Homo sapiens
  siRNA target sequence for FLJ23588 (NM_022785.2,1079-1097).
gaggaacttttgtctacaa

SEQ ID NO: 145660 - DNA, 19 bp, Homo sapiens
  siRNA target sequence for FLJ23588 (NM_022785.2,1082-1100).
gaacttttgtctacaactt

SEQ ID NO: 145661 - DNA, 19 bp, Homo sapiens
  siRNA target sequence for FLJ23588 (NM_022785.2,1092-1110).
ctacaactttcgaagtctt

SEQ ID NO: 145662 - DNA, 19 bp, Homo sapiens
  siRNA target sequence for FLJ23588 (NM_022785.2,1155-1173).
ggtggctacgtgtctttta

SEQ ID NO: 145663 - DNA, 19 bp, Homo sapiens
  siRNA target sequence for FLJ23588 (NM_022785.2,1156-1174).
gtggctacgtgtcttttaa

SEQ ID NO: 145664 - DNA, 19 bp, Homo sapiens
  siRNA target sequence for FLJ23588 (NM_022785.2,1159-1177).
gctacgtgtcttttaatta

SEQ ID NO: 145665 - DNA, 19 bp, Homo sapiens
  siRNA target sequence for FLJ23588 (NM_022785.2,1160-1178).
ctacgtgtcttttaattat

SEQ ID NO: 145666 - DNA, 19 bp, Homo sapiens
  siRNA target sequence for FLJ23588 (NM_022785.2,1163-1181).
cgtgtcttttaattatcta

SEQ ID NO: 145667 - DNA, 19 bp, Homo sapiens
  siRNA target sequence for FLJ23588 (NM_022785.2,1188-1206).
gtcctcgacacttttgtat

SEQ ID NO: 145668 - DNA, 19 bp, Homo sapiens
  siRNA target sequence for FLJ23588 (NM_022785.2,1193-1211).
cgacacttttgtataccaa

SEQ ID NO: 145669 - DNA, 19 bp, Homo sapiens
  siRNA target sequence for FLJ23588 (NM_022785.2,1260-1278).
gccaccactaaaatcaatt

SEQ ID NO: 145670 - DNA, 19 bp, Homo sapiens
  siRNA target sequence for FLJ23588 (NM_022785.2,1280-1298).
gaagcaatttctaacatca

SEQ ID NO: 145671 - DNA, 19 bp, Homo sapiens
  siRNA target sequence for FLJ23588 (NM_022785.2,1308-1326).
cctcaggggttgcaagtta

SEQ ID NO: 145672 - DNA, 19 bp, Homo sapiens
  siRNA target sequence for FLJ23588 (NM_022785.2,1316-1334).
gttgcaagttagcagtaaa

SEQ ID NO: 145673 - DNA, 19 bp, Homo sapiens
  siRNA target sequence for FLJ23588 (NM_022785.2,1330-1348).
gtaaaggtcccctgacaaa

SEQ ID NO: 145674 - DNA, 19 bp, Homo sapiens
  siRNA target sequence for FLJ23588 (NM_022785.2,1357-1375).
gcatcaactctagaaatga

SEQ ID NO: 145675 - DNA, 19 bp, Homo sapiens
  siRNA target sequence for FLJ23588 (NM_022785.2,1394-1412).
catcacaaagttatttaga

SEQ ID NO: 145676 - DNA, 19 bp, Homo sapiens
  siRNA target sequence for FLJ23588 (NM_022785.2,1470-1488).
cccgatggaccgataacaa

SEQ ID NO: 145677 - DNA, 19 bp, Homo sapiens
  siRNA target sequence for FLJ23588 (NM_022785.2,1472-1490).
cgatggaccgataacaaga

SEQ ID NO: 145678 - DNA, 19 bp, Homo sapiens
  siRNA target sequence for FLJ23588 (NM_022785.2,1489-1507).
gagaagaatttcgatatat

SEQ ID NO: 145679 - DNA, 19 bp, Homo sapiens
  siRNA target sequence for FLJ23588 (NM_022785.2,1501-1519).
gatatattctaaattgcat

SEQ ID NO: 145680 - DNA, 19 bp, Homo sapiens
  siRNA target sequence for FLJ23588 (NM_022785.2,1530-1548).
ctaagcgattcagaattca

SEQ ID NO: 145681 - DNA, 19 bp, Homo sapiens
  siRNA target sequence for FLJ23588 (NM_022785.2,1535-1553).
cgattcagaattcaaagaa

SEQ ID NO: 145682 - DNA, 19 bp, Homo sapiens
  siRNA target sequence for FLJ23588 (NM_022785.2,1592-1610).
caacaccagcatgtttatt

SEQ ID NO: 145683 - DNA, 19 bp, Homo sapiens
  siRNA target sequence for FLJ23588 (NM_022785.2,1687-1705).
gggattcagtggaagaaat

SEQ ID NO: 145684 - DNA, 19 bp, Homo sapiens
  siRNA target sequence for FLJ23588 (NM_022785.2,1701-1719).
gaaattgttcatgatacaa

SEQ ID NO: 145685 - DNA, 19 bp, Homo sapiens
  siRNA target sequence for FLJ23588 (NM_022785.2,1726-1744).
ggaacctacaagcttttta

SEQ ID NO: 145686 - DNA, 19 bp, Homo sapiens
  siRNA target sequence for FLJ23588 (NM_022785.2,1731-1749).
ctacaagctttttataaca

SEQ ID NO: 145687 - DNA, 19 bp, Homo sapiens
  siRNA target sequence for FLJ23588 (NM_022785.2,1779-1797).
gggcgcattggccgaaata

SEQ ID NO: 145688 - DNA, 19 bp, Homo sapiens
  siRNA target sequence for FLJ23588 (NM_022785.2,1780-1798).
ggcgcattggccgaaataa

SEQ ID NO: 145689 - DNA, 19 bp, Homo sapiens
  siRNA target sequence for FLJ23588 (NM_022785.2,1781-1799).
gcgcattggccgaaataat

SEQ ID NO: 145690 - DNA, 19 bp, Homo sapiens
  siRNA target sequence for FLJ23588 (NM_022785.2,1782-1800).
cgcattggccgaaataatt

SEQ ID NO: 145691 - DNA, 19 bp, Homo sapiens
  siRNA target sequence for FLJ23588 (NM_022785.2,1783-1801).
gcattggccgaaataattt

SEQ ID NO: 145692 - DNA, 19 bp, Homo sapiens
  siRNA target sequence for FLJ23588 (NM_022785.2,1837-1855).
cgaatgcacatttcataaa

SEQ ID NO: 145693 - DNA, 19 bp, Homo sapiens
  siRNA target sequence for FLJ23588 (NM_022785.2,1881-1899).
ggttcaggaagaatccttt

SEQ ID NO: 145694 - DNA, 19 bp, Homo sapiens
  siRNA target sequence for FLJ23588 (NM_022785.2,1888-1906).
gaagaatcctttacaagaa

SEQ ID NO: 145695 - DNA, 19 bp, Homo sapiens
  siRNA target sequence for FLJ23588 (NM_022785.2,1913-1931).
ggcatgcataggaattgat

SEQ ID NO: 145696 - DNA, 19 bp, Homo sapiens
  siRNA target sequence for FLJ23588 (NM_022785.2,1971-1989).
cagctgttaagtgaacatt

SEQ ID NO: 145697 - DNA, 19 bp, Homo sapiens
  siRNA target sequence for FLJ23588 (NM_022785.2,1973-1991).
gctgttaagtgaacattta

SEQ ID NO: 145698 - DNA, 19 bp, Homo sapiens
  siRNA target sequence for FLJ23588 (NM_022785.2,2032-2050).
ccaagctcacggaggataa

SEQ ID NO: 145699 - DNA, 19 bp, Homo sapiens
  siRNA target sequence for FLJ23588 (NM_022785.2,2117-2135).
gcaggacccggcattcaaa

SEQ ID NO: 145700 - DNA, 19 bp, Homo sapiens
  siRNA target sequence for FLJ23588 (NM_022785.2,2123-2141).
cccggcattcaaaaaacga

SEQ ID NO: 145701 - DNA, 19 bp, Homo sapiens
  siRNA target sequence for FLJ23588 (NM_022785.2,2124-2142).
ccggcattcaaaaaacgat

SEQ ID NO: 145702 - DNA, 19 bp, Homo sapiens
  siRNA target sequence for FLJ23588 (NM_022785.2,2125-2143).
cggcattcaaaaaacgatt

SEQ ID NO: 145703 - DNA, 19 bp, Homo sapiens
  siRNA target sequence for FLJ23588 (NM_022785.2,2126-2144).
ggcattcaaaaaacgattt

SEQ ID NO: 145704 - DNA, 19 bp, Homo sapiens
  siRNA target sequence for FLJ23588 (NM_022785.2,2164-2182).
ctaatggaaaaattaacgt

SEQ ID NO: 145705 - DNA, 19 bp, Homo sapiens
  siRNA target sequence for FLJ23588 (NM_022785.2,2221-2239).
ccatggacgatgatcagta

SEQ ID NO: 145706 - DNA, 19 bp, Homo sapiens
  siRNA target sequence for FLJ23588 (NM_022785.2,2222-2240).
catggacgatgatcagtat

SEQ ID NO: 145707 - DNA, 19 bp, Homo sapiens
  siRNA target sequence for FLJ23588 (NM_022785.2,2241-2259).
gccctgctgaccactaaaa

SEQ ID NO: 145708 - DNA, 19 bp, Homo sapiens
  siRNA target sequence for FLJ23588 (NM_022785.2,2273-2291).
ggaagggatgagctatctt

SEQ ID NO: 145709 - DNA, 19 bp, Homo sapiens
  siRNA target sequence for FLJ23588 (NM_022785.2,2279-2297).
gatgagctatcttgatttt

SEQ ID NO: 145710 - DNA, 19 bp, Homo sapiens
  siRNA target sequence for FLJ23588 (NM_022785.2,2282-2300).
gagctatcttgattttgca

SEQ ID NO: 145711 - DNA, 19 bp, Homo sapiens
  siRNA target sequence for FLJ23588 (NM_022785.2,2376-2394).
gtgaacagccactttatca

SEQ ID NO: 145712 - DNA, 19 bp, Homo sapiens
  siRNA target sequence for FLJ23588 (NM_022785.2,2400-2418).
gaagaatgcctgaagcttt

SEQ ID NO: 145713 - DNA, 19 bp, Homo sapiens
  siRNA target sequence for FLJ23588 (NM_022785.2,2425-2443).
ggaggctgaaggagtcatt

SEQ ID NO: 145714 - DNA, 19 bp, Homo sapiens
  siRNA target sequence for FLJ23588 (NM_022785.2,2479-2497).
ctgacagggatggcataat

SEQ ID NO: 145715 - DNA, 19 bp, Homo sapiens
  siRNA target sequence for FLJ23588 (NM_022785.2,2481-2499).
gacagggatggcataatca

SEQ ID NO: 145716 - DNA, 19 bp, Homo sapiens
  siRNA target sequence for FLJ23588 (NM_022785.2,2577-2595).
cttcttggcttgagactta

SEQ ID NO: 145717 - DNA, 19 bp, Homo sapiens
  siRNA target sequence for FLJ23588 (NM_022785.2,2590-2608).
gacttagtgtcactttaaa

SEQ ID NO: 145718 - DNA, 19 bp, Homo sapiens
  siRNA target sequence for FLJ23588 (NM_022785.2,2661-2679).
gcgcctcaaagactcatta

SEQ ID NO: 145719 - DNA, 19 bp, Homo sapiens
  siRNA target sequence for FLJ23588 (NM_022785.2,2663-2681).
gcctcaaagactcattaga

SEQ ID NO: 145720 - DNA, 19 bp, Homo sapiens
  siRNA target sequence for FLJ23588 (NM_022785.2,2673-2691).
ctcattagaccaaaacaga

SEQ ID NO: 145721 - DNA, 19 bp, Homo sapiens
  siRNA target sequence for FLJ23588 (NM_022785.2,2690-2708).
gaaggttgcggattcagaa

SEQ ID NO: 145722 - DNA, 19 bp, Homo sapiens
  siRNA target sequence for FLJ23588 (NM_022785.2,2693-2711).
ggttgcggattcagaacta

SEQ ID NO: 145723 - DNA, 19 bp, Homo sapiens
  siRNA target sequence for FLJ23588 (NM_022785.2,2716-2734).
gtgagcaggctcatcagta

SEQ ID NO: 145724 - DNA, 19 bp, Homo sapiens
  siRNA target sequence for FLJ23588 (NM_022785.2,2764-2782).
cagacttgtctaagaattt

SEQ ID NO: 145725 - DNA, 19 bp, Homo sapiens
  siRNA target sequence for FLJ23588 (NM_022785.2,2768-2786).
cttgtctaagaattttcta

SEQ ID NO: 145726 - DNA, 19 bp, Homo sapiens
  siRNA target sequence for FLJ23588 (NM_022785.2,2909-2927).
gggaaaagggcacattact

SEQ ID NO: 145727 - DNA, 19 bp, Homo sapiens
  siRNA target sequence for FLJ23588 (NM_022785.2,2911-2929).
gaaaagggcacattactta

SEQ ID NO: 145728 - DNA, 19 bp, Homo sapiens
  siRNA target sequence for FLJ23588 (NM_022785.2,2945-2963).
gaaattgggtattaactat

SEQ ID NO: 145729 - DNA, 19 bp, Homo sapiens
  siRNA target sequence for FLJ23588 (NM_022785.2,3083-3101).
ggcagccagggataagctt

SEQ ID NO: 145730 - DNA, 19 bp, Homo sapiens
  siRNA target sequence for FLJ23588 (NM_022785.2,3105-3123).
gaccgccatcaagatatca

SEQ ID NO: 145731 - DNA, 19 bp, Homo sapiens
  siRNA target sequence for FLJ23588 (NM_022785.2,3142-3160).
ctgatcaatccaaaaccaa

SEQ ID NO: 145732 - DNA, 19 bp, Homo sapiens
  siRNA target sequence for FLJ23588 (NM_022785.2,3198-3216).
gaatgtggatgttctctta

SEQ ID NO: 145733 - DNA, 19 bp, Homo sapiens
  siRNA target sequence for FLJ23588 (NM_022785.2,3253-3271).
gagtcagccggcatgataa

SEQ ID NO: 145734 - DNA, 19 bp, Homo sapiens
  siRNA target sequence for FLJ23588 (NM_022785.2,3257-3275).
cagccggcatgataatgct

SEQ ID NO: 145735 - DNA, 19 bp, Homo sapiens
  siRNA target sequence for FLJ23588 (NM_022785.2,3259-3277).
gccggcatgataatgctat

SEQ ID NO: 145736 - DNA, 19 bp, Homo sapiens
  siRNA target sequence for FLJ23588 (NM_022785.2,3264-3282).
catgataatgctatcaatt

SEQ ID NO: 145737 - DNA, 19 bp, Homo sapiens
  siRNA target sequence for FLJ23588 (NM_022785.2,3348-3366).
gagagcatgccaatcaatt

SEQ ID NO: 145738 - DNA, 19 bp, Homo sapiens
  siRNA target sequence for FLJ23588 (NM_022785.2,3350-3368).
gagcatgccaatcaatttt

SEQ ID NO: 145739 - DNA, 19 bp, Homo sapiens
  siRNA target sequence for FLJ23588 (NM_022785.2,3490-3508).
cagaattcggacaagttct

SEQ ID NO: 145740 - DNA, 19 bp, Homo sapiens
  siRNA target sequence for FLJ23588 (NM_022785.2,3497-3515).
cggacaagttcttaaggat

SEQ ID NO: 145741 - DNA, 19 bp, Homo sapiens
  siRNA target sequence for FLJ23588 (NM_022785.2,3498-3516).
ggacaagttcttaaggatt

SEQ ID NO: 145742 - DNA, 19 bp, Homo sapiens
  siRNA target sequence for FLJ23588 (NM_022785.2,3499-3517).
gacaagttcttaaggattt

SEQ ID NO: 145743 - DNA, 19 bp, Homo sapiens
  siRNA target sequence for FLJ23588 (NM_022785.2,3512-3530).
ggatttctgttacaaacta

SEQ ID NO: 145744 - DNA, 19 bp, Homo sapiens
  siRNA target sequence for FLJ23588 (NM_022785.2,3532-3550).
cggacaatcagtatcatta

SEQ ID NO: 145745 - DNA, 19 bp, Homo sapiens
  siRNA target sequence for FLJ23588 (NM_022785.2,3560-3578).
gaaactaagaattcatcta

SEQ ID NO: 145746 - DNA, 19 bp, Homo sapiens
  siRNA target sequence for FLJ23588 (NM_022785.2,3573-3591).
catctaaccccctatataa

SEQ ID NO: 145747 - DNA, 19 bp, Homo sapiens
  siRNA target sequence for FLJ23588 (NM_022785.2,3576-3594).
ctaaccccctatataaatt

SEQ ID NO: 145748 - DNA, 19 bp, Homo sapiens
  siRNA target sequence for FLJ23588 (NM_022785.2,3733-3751).
cagtgacttcccattacca

SEQ ID NO: 145749 - DNA, 19 bp, Homo sapiens
  siRNA target sequence for FLJ23588 (NM_022785.2,3815-3833).
gtttagggccatttgtaat

SEQ ID NO: 145750 - DNA, 19 bp, Homo sapiens
  siRNA target sequence for FLJ23588 (NM_022785.2,3848-3866).
cctgacggacgaacagttt

SEQ ID NO: 145751 - DNA, 19 bp, Homo sapiens
  siRNA target sequence for FLJ23588 (NM_022785.2,3878-3896).
gaacgagatgccagtcaat

SEQ ID NO: 145752 - DNA, 19 bp, Homo sapiens
  siRNA target sequence for FLJ23588 (NM_022785.2,4191-4209).
cgccagctcctgaaagaat

SEQ ID NO: 145753 - DNA, 19 bp, Homo sapiens
  siRNA target sequence for FLJ23588 (NM_022785.2,4228-4246).
ccagacagggggacatcaa

SEQ ID NO: 145754 - DNA, 19 bp, Homo sapiens
  siRNA target sequence for FLJ23588 (NM_022785.2,4304-4322).
gtgtcagcagctcattata

SEQ ID NO: 145755 - DNA, 19 bp, Homo sapiens
  siRNA target sequence for FLJ23588 (NM_022785.2,4337-4355).
gagcaacgggaaatttgca

SEQ ID NO: 145756 - DNA, 19 bp, Homo sapiens
  siRNA target sequence for FLJ23588 (NM_022785.2,4339-4357).
gcaacgggaaatttgcata

SEQ ID NO: 145757 - DNA, 19 bp, Homo sapiens
  siRNA target sequence for FLJ23588 (NM_022785.2,4343-4361).
cgggaaatttgcatactgt

SEQ ID NO: 145758 - DNA, 19 bp, Homo sapiens
  siRNA target sequence for FLJ23588 (NM_022785.2,4354-4372).
catactgtgacttcattca

SEQ ID NO: 145759 - DNA, 19 bp, Homo sapiens
  siRNA target sequence for FLJ23588 (NM_022785.2,4431-4449).
cagaatgcacacaagatga

SEQ ID NO: 145760 - DNA, 19 bp, Homo sapiens
  siRNA target sequence for FLJ23588 (NM_022785.2,4461-4479).
gcggagacgccatcttttt

SEQ ID NO: 145761 - DNA, 19 bp, Homo sapiens
  siRNA target sequence for FLJ23588 (NM_022785.2,4462-4480).
cggagacgccatcttttta

SEQ ID NO: 145762 - DNA, 19 bp, Homo sapiens
  siRNA target sequence for FLJ23588 (NM_022785.2,4466-4484).
gacgccatctttttactct

SEQ ID NO: 145763 - DNA, 19 bp, Homo sapiens
  siRNA target sequence for FLJ23588 (NM_022785.2,4493-4511).
gcgtattcagcccaaaatt

SEQ ID NO: 145764 - DNA, 19 bp, Homo sapiens
  siRNA target sequence for FLJ23588 (NM_022785.2,4495-4513).
gtattcagcccaaaattgt

SEQ ID NO: 145765 - DNA, 19 bp, Homo sapiens
  siRNA target sequence for FLJ23588 (NM_022785.2,4535-4553).
gcgcacgttcaaaagctat

SEQ ID NO: 145766 - DNA, 19 bp, Homo sapiens
  siRNA target sequence for FLJ23588 (NM_022785.2,4538-4556).
cacgttcaaaagctatgat

SEQ ID NO: 145767 - DNA, 19 bp, Homo sapiens
  siRNA target sequence for FLJ23588 (NM_022785.2,4540-4558).
cgttcaaaagctatgatga

SEQ ID NO: 145768 - DNA, 19 bp, Homo sapiens
  siRNA target sequence for FLJ23588 (NM_022785.2,4575-4593).
ctaagcgtcgcagatttca

SEQ ID NO: 145769 - DNA, 19 bp, Homo sapiens
  siRNA target sequence for FLJ23588 (NM_022785.2,4662-4680).
gataagacgctgtcttcaa

SEQ ID NO: 145770 - DNA, 19 bp, Homo sapiens
  siRNA target sequence for FLJ25200 (NM_144715.2,824-842).
gccagtttgcccaacaaca

SEQ ID NO: 145771 - DNA, 19 bp, Homo sapiens
  siRNA target sequence for FLJ25200 (NM_144715.2,895-913).
cgcatcagacccatatact

SEQ ID NO: 145772 - DNA, 19 bp, Homo sapiens
  siRNA target sequence for FLJ25200 (NM_144715.2,897-915).
catcagacccatatactct

SEQ ID NO: 145773 - DNA, 19 bp, Homo sapiens
  siRNA target sequence for FLJ25200 (NM_144715.2,986-1004).
caacctgcttgactgaaaa

SEQ ID NO: 145774 - DNA, 19 bp, Homo sapiens
  siRNA target sequence for FLJ25200 (NM_144715.2,990-1008).
ctgcttgactgaaaaactt

SEQ ID NO: 145775 - DNA, 19 bp, Homo sapiens
  siRNA target sequence for FLJ25200 (NM_144715.2,1033-1051).
gcaaaaaagtatttcaact

SEQ ID NO: 145776 - DNA, 19 bp, Homo sapiens
  siRNA target sequence for FLJ25200 (NM_144715.2,1105-1123).
ccccagattgcaccttatt

SEQ ID NO: 145777 - DNA, 19 bp, Homo sapiens
  siRNA target sequence for FLJ25200 (NM_144715.2,1106-1124).
cccagattgcaccttattt

SEQ ID NO: 145778 - DNA, 19 bp, Homo sapiens
  siRNA target sequence for FLJ25200 (NM_144715.2,1110-1128).
gattgcaccttatttgaca

SEQ ID NO: 145779 - DNA, 19 bp, Homo sapiens
  siRNA target sequence for FLJ25200 (NM_144715.2,1132-1150).
ggaattagatctaaaattt

SEQ ID NO: 145780 - DNA, 19 bp, Homo sapiens
  siRNA target sequence for FLJ25200 (NM_144715.2,1239-1257).
caatcgacgagcaccatta

SEQ ID NO: 145781 - DNA, 19 bp, Homo sapiens
  siRNA target sequence for FLJ25200 (NM_144715.2,1243-1261).
cgacgagcaccattaggaa

SEQ ID NO: 145782 - DNA, 19 bp, Homo sapiens
  siRNA target sequence for FLJ25200 (NM_144715.2,1244-1262).
gacgagcaccattaggaaa

SEQ ID NO: 145783 - DNA, 19 bp, Homo sapiens
  siRNA target sequence for FLJ25200 (NM_144715.2,1246-1264).
cgagcaccattaggaaaat

SEQ ID NO: 145784 - DNA, 19 bp, Homo sapiens
  siRNA target sequence for FLJ25200 (NM_144715.2,1269-1287).
cgatcaagcaccaggatta

SEQ ID NO: 145785 - DNA, 19 bp, Homo sapiens
  siRNA target sequence for FLJ25200 (NM_144715.2,1327-1345).
gcagtcatcaaagaatact

SEQ ID NO: 145786 - DNA, 19 bp, Homo sapiens
  siRNA target sequence for FLJ25200 (NM_144715.2,1360-1378).
gtgaatccaccaaaatcct

SEQ ID NO: 145787 - DNA, 19 bp, Homo sapiens
  siRNA target sequence for FLJ25200 (NM_144715.2,1362-1380).
gaatccaccaaaatcctat

SEQ ID NO: 145788 - DNA, 19 bp, Homo sapiens
  siRNA target sequence for FLJ25200 (NM_144715.2,1419-1437).
gtatgttgtttctcacaat

SEQ ID NO: 145789 - DNA, 19 bp, Homo sapiens
  siRNA target sequence for FLJ25200 (NM_144715.2,1455-1473).
ggcaaagaaccgaaagtat

SEQ ID NO: 145790 - DNA, 19 bp, Homo sapiens
  siRNA target sequence for FLJ25200 (NM_144715.2,1456-1474).
gcaaagaaccgaaagtata

SEQ ID NO: 145791 - DNA, 19 bp, Homo sapiens
  siRNA target sequence for FLJ25200 (NM_144715.2,1457-1475).
caaagaaccgaaagtataa

SEQ ID NO: 145792 - DNA, 19 bp, Homo sapiens
  siRNA target sequence for FLJ25200 (NM_144715.2,1488-1506).
ccataggtgtagtgtgtat

SEQ ID NO: 145793 - DNA, 19 bp, Homo sapiens
  siRNA target sequence for FLJ25200 (NM_144715.2,1508-1526).
gagtaccaacaccacattt

SEQ ID NO: 145794 - DNA, 19 bp, Homo sapiens
  siRNA target sequence for FLJ25200 (NM_144715.2,1510-1528).
gtaccaacaccacatttta

SEQ ID NO: 145795 - DNA, 19 bp, Homo sapiens
  siRNA target sequence for FLJ25200 (NM_144715.2,1534-1552).
ggacgagccatggcaaaat

SEQ ID NO: 145796 - DNA, 19 bp, Homo sapiens
  siRNA target sequence for FLJ25200 (NM_144715.2,1538-1556).
gagccatggcaaaatctct

SEQ ID NO: 145797 - DNA, 19 bp, Homo sapiens
  siRNA target sequence for FLJ25200 (NM_144715.2,1562-1580).
ggctccatgaactacaaat

SEQ ID NO: 145798 - DNA, 19 bp, Homo sapiens
  siRNA target sequence for FLJ25200 (NM_144715.2,1589-1607).
gagctaagtttgtatccaa

SEQ ID NO: 145799 - DNA, 19 bp, Homo sapiens
  siRNA target sequence for FLJ25200 (NM_144715.2,1712-1730).
gtctccgtcctgaggaata

SEQ ID NO: 145800 - DNA, 19 bp, Homo sapiens
  siRNA target sequence for FLJ25200 (NM_144715.2,1735-1753).
gttggtgatctcatccata

SEQ ID NO: 145801 - DNA, 19 bp, Homo sapiens
  siRNA target sequence for FLJ25200 (NM_144715.2,1817-1835).
ggcatcacctgaagaaagt

SEQ ID NO: 145802 - DNA, 19 bp, Homo sapiens
  siRNA target sequence for FLJ25200 (NM_144715.2,1865-1883).
cagccttcaggcactatga

SEQ ID NO: 145803 - DNA, 19 bp, Homo sapiens
  siRNA target sequence for FLJ25200 (NM_144715.2,1887-1905).
gaagggagatgggatgata

SEQ ID NO: 145804 - DNA, 19 bp, Homo sapiens
  siRNA target sequence for FLJ25200 (NM_144715.2,1933-1951).
gaccaggccaacttgagtt

SEQ ID NO: 145805 - DNA, 19 bp, Homo sapiens
  siRNA target sequence for FLJ25200 (NM_144715.2,1940-1958).
ccaacttgagtttagatga

SEQ ID NO: 145806 - DNA, 19 bp, Homo sapiens
  siRNA target sequence for FLJ25200 (NM_144715.2,2074-2092).
gaagagagggtcattatta

SEQ ID NO: 145807 - DNA, 19 bp, Homo sapiens
  siRNA target sequence for FLJ25200 (NM_144715.2,2079-2097).
gagggtcattattaaaggt

SEQ ID NO: 145808 - DNA, 19 bp, Homo sapiens
  siRNA target sequence for FLJ25200 (NM_144715.2,2146-2164).
gaacaaactctcctcataa

SEQ ID NO: 145809 - DNA, 19 bp, Homo sapiens
  siRNA target sequence for FLJ25200 (NM_144715.2,2157-2175).
cctcataaagccagaagat

SEQ ID NO: 145810 - DNA, 19 bp, Homo sapiens
  siRNA target sequence for FLJ25200 (NM_144715.2,2158-2176).
ctcataaagccagaagata

SEQ ID NO: 145811 - DNA, 19 bp, Homo sapiens
  siRNA target sequence for FLJ25200 (NM_144715.2,2221-2239).
cttctgagaccaagtgata

SEQ ID NO: 145812 - DNA, 19 bp, Homo sapiens
  siRNA target sequence for FLJ25200 (NM_144715.2,2242-2260).
gtttccaactactataaga

SEQ ID NO: 145813 - DNA, 19 bp, Homo sapiens
  siRNA target sequence for FLJ25200 (NM_144715.2,2250-2268).
ctactataagacaacttct

SEQ ID NO: 145814 - DNA, 19 bp, Homo sapiens
  siRNA target sequence for FLJ25200 (NM_144715.2,2261-2279).
caacttcttctgagatcaa

SEQ ID NO: 145815 - DNA, 19 bp, Homo sapiens
  siRNA target sequence for FLJ25200 (NM_144715.2,2270-2288).
ctgagatcaatgcaattgt

SEQ ID NO: 145816 - DNA, 19 bp, Homo sapiens
  siRNA target sequence for FLJ25200 (NM_144715.2,2290-2308).
ggagccattccttctactt

SEQ ID NO: 145817 - DNA, 19 bp, Homo sapiens
  siRNA target sequence for FLJ25200 (NM_144715.2,2323-2341).
ggtgttccaaccattcgat

SEQ ID NO: 145818 - DNA, 19 bp, Homo sapiens
  siRNA target sequence for FLJ25200 (NM_144715.2,2416-2434).
ctactatatcctaccattt

SEQ ID NO: 145819 - DNA, 19 bp, Homo sapiens
  siRNA target sequence for FLJ25200 (NM_144715.2,2488-2506).
gagattgcagagatattgt

SEQ ID NO: 145820 - DNA, 19 bp, Homo sapiens
  siRNA target sequence for FLJ25200 (NM_144715.2,2494-2512).
gcagagatattgtgtaaca

SEQ ID NO: 145821 - DNA, 19 bp, Homo sapiens
  siRNA target sequence for FLJ25200 (NM_144715.2,2495-2513).
cagagatattgtgtaacat

SEQ ID NO: 145822 - DNA, 19 bp, Homo sapiens
  siRNA target sequence for FLJ25200 (NM_144715.2,2505-2523).
gtgtaacattggtgtcaaa

SEQ ID NO: 145823 - DNA, 19 bp, Homo sapiens
  siRNA target sequence for FLJ25200 (NM_144715.2,2629-2647).
catgcagaccggatcaagt

SEQ ID NO: 145824 - DNA, 19 bp, Homo sapiens
  siRNA target sequence for FLJ25200 (NM_144715.2,2632-2650).
gcagaccggatcaagtgta

SEQ ID NO: 145825 - DNA, 19 bp, Homo sapiens
  siRNA target sequence for FLJ25200 (NM_144715.2,2633-2651).
cagaccggatcaagtgtaa

SEQ ID NO: 145826 - DNA, 19 bp, Homo sapiens
  siRNA target sequence for FLJ25200 (NM_144715.2,2635-2653).
gaccggatcaagtgtaaaa

SEQ ID NO: 145827 - DNA, 19 bp, Homo sapiens
  siRNA target sequence for FLJ25200 (NM_144715.2,2637-2655).
ccggatcaagtgtaaaaca

SEQ ID NO: 145828 - DNA, 19 bp, Homo sapiens
  siRNA target sequence for FLJ25200 (NM_144715.2,2639-2657).
ggatcaagtgtaaaacact

SEQ ID NO: 145829 - DNA, 19 bp, Homo sapiens
  siRNA target sequence for FLJ25818 (NM_173503.1,90-108).
cagaaattaaaccaaaact

SEQ ID NO: 145830 - DNA, 19 bp, Homo sapiens
  siRNA target sequence for FLJ25818 (NM_173503.1,112-130).
gctgaatcctctaacaaaa

SEQ ID NO: 145831 - DNA, 19 bp, Homo sapiens
  siRNA target sequence for FLJ25818 (NM_173503.1,163-181).
cttaccaggatctcttcaa

SEQ ID NO: 145832 - DNA, 19 bp, Homo sapiens
  siRNA target sequence for FLJ25818 (NM_173503.1,205-223).
gaagctaagtgcttcacaa

SEQ ID NO: 145833 - DNA, 19 bp, Homo sapiens
  siRNA target sequence for FLJ25818 (NM_173503.1,239-257).
gatgcctacaacttcttct

SEQ ID NO: 145834 - DNA, 19 bp, Homo sapiens
  siRNA target sequence for FLJ25818 (NM_173503.1,265-283).
caaaactggctgtattgat

SEQ ID NO: 145835 - DNA, 19 bp, Homo sapiens
  siRNA target sequence for FLJ25818 (NM_173503.1,328-346).
gaccaagcatgatgtctat

SEQ ID NO: 145836 - DNA, 19 bp, Homo sapiens
  siRNA target sequence for FLJ25818 (NM_173503.1,330-348).
ccaagcatgatgtctataa

SEQ ID NO: 145837 - DNA, 19 bp, Homo sapiens
  siRNA target sequence for FLJ25818 (NM_173503.1,335-353).
catgatgtctataatgaat

SEQ ID NO: 145838 - DNA, 19 bp, Homo sapiens
  siRNA target sequence for FLJ25818 (NM_173503.1,338-356).
gatgtctataatgaattga

SEQ ID NO: 145839 - DNA, 19 bp, Homo sapiens
  siRNA target sequence for FLJ25818 (NM_173503.1,341-359).
gtctataatgaattgaaat

SEQ ID NO: 145840 - DNA, 19 bp, Homo sapiens
  siRNA target sequence for FLJ25818 (NM_173503.1,400-418).
ctttatcaaggttctaaca

SEQ ID NO: 145841 - DNA, 19 bp, Homo sapiens
  siRNA target sequence for FLJ25818 (NM_173503.1,413-431).
ctaacagataagaatctct

SEQ ID NO: 145842 - DNA, 19 bp, Homo sapiens
  siRNA target sequence for FLJ25818 (NM_173503.1,533-551).
gccctacccagaaagtcta

SEQ ID NO: 145843 - DNA, 19 bp, Homo sapiens
  siRNA target sequence for FLJ25818 (NM_173503.1,534-552).
ccctacccagaaagtctat

SEQ ID NO: 145844 - DNA, 19 bp, Homo sapiens
  siRNA target sequence for FLJ25818 (NM_173503.1,535-553).
cctacccagaaagtctata

SEQ ID NO: 145845 - DNA, 19 bp, Homo sapiens
  siRNA target sequence for FLJ25818 (NM_173503.1,685-703).
ggctgcctttgctaatgct

SEQ ID NO: 145846 - DNA, 19 bp, Homo sapiens
  siRNA target sequence for FLJ25818 (NM_173503.1,773-791).
ggttcagatagcccatatt

SEQ ID NO: 145847 - DNA, 19 bp, Homo sapiens
  siRNA target sequence for FLJ25818 (NM_173503.1,779-797).
gatagcccatattcaaaaa

SEQ ID NO: 145848 - DNA, 19 bp, Homo sapiens
  siRNA target sequence for FLJ25818 (NM_173503.1,947-965).
gcagcaaatataaagtcta

SEQ ID NO: 145849 - DNA, 19 bp, Homo sapiens
  siRNA target sequence for FLJ25818 (NM_173503.1,967-985).
ggaccctgcctcaggttat

SEQ ID NO: 145850 - DNA, 19 bp, Homo sapiens
  siRNA target sequence for FLJ25818 (NM_173503.1,971-989).
cctgcctcaggttattcaa

SEQ ID NO: 145851 - DNA, 19 bp, Homo sapiens
  siRNA target sequence for FLJ25818 (NM_173503.1,1042-1060).
ggccgatgcaactgctatt

SEQ ID NO: 145852 - DNA, 19 bp, Homo sapiens
  siRNA target sequence for FLJ25818 (NM_173503.1,1043-1061).
gccgatgcaactgctatta

SEQ ID NO: 145853 - DNA, 19 bp, Homo sapiens
  siRNA target sequence for FLJ25818 (NM_173503.1,1044-1062).
ccgatgcaactgctattaa

SEQ ID NO: 145854 - DNA, 19 bp, Homo sapiens
  siRNA target sequence for FLJ25818 (NM_173503.1,1045-1063).
cgatgcaactgctattaaa

SEQ ID NO: 145855 - DNA, 19 bp, Homo sapiens
  siRNA target sequence for FLJ25818 (NM_173503.1,1070-1088).
gtgaagagagctactgata

SEQ ID NO: 145856 - DNA, 19 bp, Homo sapiens
  siRNA target sequence for FLJ25818 (NM_173503.1,1080-1098).
ctactgatacctataattt

SEQ ID NO: 145857 - DNA, 19 bp, Homo sapiens
  siRNA target sequence for FLJ25818 (NM_173503.1,1107-1125).
cccttgaacaccgaaaaga

SEQ ID NO: 145858 - DNA, 19 bp, Homo sapiens
  siRNA target sequence for FLJ25818 (NM_173503.1,1109-1127).
cttgaacaccgaaaagaga

SEQ ID NO: 145859 - DNA, 19 bp, Homo sapiens
  siRNA target sequence for FLJ25818 (NM_173503.1,1147-1165).
gatccgaggggatttgatt

SEQ ID NO: 145860 - DNA, 19 bp, Homo sapiens
  siRNA target sequence for FLJ25818 (NM_173503.1,1196-1214).
gacaccttttctacttata

SEQ ID NO: 145861 - DNA, 19 bp, Homo sapiens
  siRNA target sequence for FLJ25818 (NM_173503.1,1248-1266).
ctcctaaggacttaaggtt

SEQ ID NO: 145862 - DNA, 19 bp, Homo sapiens
  siRNA target sequence for FLJ25818 (NM_173503.1,1250-1268).
cctaaggacttaaggttat

SEQ ID NO: 145863 - DNA, 19 bp, Homo sapiens
  siRNA target sequence for FLJ25818 (NM_173503.1,1251-1269).
ctaaggacttaaggttata

SEQ ID NO: 145864 - DNA, 19 bp, Homo sapiens
  siRNA target sequence for FLJ25818 (NM_173503.1,1255-1273).
ggacttaaggttatatgat

SEQ ID NO: 145865 - DNA, 19 bp, Homo sapiens
  siRNA target sequence for FLJ25818 (NM_173503.1,1271-1289).
gatgcctatgtgaatagaa

SEQ ID NO: 145866 - DNA, 19 bp, Homo sapiens
  siRNA target sequence for FLJ25818 (NM_173503.1,1274-1292).
gcctatgtgaatagaaatt

SEQ ID NO: 145867 - DNA, 19 bp, Homo sapiens
  siRNA target sequence for FLJ25818 (NM_173503.1,1325-1343).
gataccagtgaatgttaca

SEQ ID NO: 145868 - DNA, 19 bp, Homo sapiens
  siRNA target sequence for FLJ30681 (NM_133459.1,134-152).
gaggacggcgacagagaaa

SEQ ID NO: 145869 - DNA, 19 bp, Homo sapiens
  siRNA target sequence for FLJ30681 (NM_133459.1,137-155).
gacggcgacagagaaatct

SEQ ID NO: 145870 - DNA, 19 bp, Homo sapiens
  siRNA target sequence for FLJ30681 (NM_133459.1,166-184).
caaaatcgcgacgactaaa

SEQ ID NO: 145871 - DNA, 19 bp, Homo sapiens
  siRNA target sequence for FLJ30681 (NM_133459.1,316-334).
gcagtgcacggacaacttt

SEQ ID NO: 145872 - DNA, 19 bp, Homo sapiens
  siRNA target sequence for FLJ30681 (NM_133459.1,337-355).
ccgagtgctgtgtacttgt

SEQ ID NO: 145873 - DNA, 19 bp, Homo sapiens
  siRNA target sequence for FLJ30681 (NM_133459.1,394-412).
gcgggagaagccatactgt

SEQ ID NO: 145874 - DNA, 19 bp, Homo sapiens
  siRNA target sequence for FLJ30681 (NM_133459.1,403-421).
gccatactgtctggatatt

SEQ ID NO: 145875 - DNA, 19 bp, Homo sapiens
  siRNA target sequence for FLJ30681 (NM_133459.1,405-423).
catactgtctggatattga

SEQ ID NO: 145876 - DNA, 19 bp, Homo sapiens
  siRNA target sequence for FLJ30681 (NM_133459.1,507-525).
gctacatccgggaagatga

SEQ ID NO: 145877 - DNA, 19 bp, Homo sapiens
  siRNA target sequence for FLJ30681 (NM_133459.1,508-526).
ctacatccgggaagatgat

SEQ ID NO: 145878 - DNA, 19 bp, Homo sapiens
  siRNA target sequence for FLJ30681 (NM_133459.1,695-713).
gctgacctgggcaagtata

SEQ ID NO: 145879 - DNA, 19 bp, Homo sapiens
  siRNA target sequence for FLJ30681 (NM_133459.1,696-714).
ctgacctgggcaagtatat

SEQ ID NO: 145880 - DNA, 19 bp, Homo sapiens
  siRNA target sequence for FLJ30681 (NM_133459.1,1002-1020).
caggaccccctggttcttt

SEQ ID NO: 145881 - DNA, 19 bp, Homo sapiens
  siRNA target sequence for FLJ30681 (NM_133459.1,1175-1193).
gatgaccatccaagaagaa

SEQ ID NO: 145882 - DNA, 19 bp, Homo sapiens
  siRNA target sequence for FLJ31455 (NM_144964.1,441-459).
cactcaggaccaagactat

SEQ ID NO: 145883 - DNA, 19 bp, Homo sapiens
  siRNA target sequence for FLJ31455 (NM_144964.1,443-461).
ctcaggaccaagactatgt

SEQ ID NO: 145884 - DNA, 19 bp, Homo sapiens
  siRNA target sequence for FLJ31455 (NM_144964.1,450-468).
ccaagactatgtatcgatt

SEQ ID NO: 145885 - DNA, 19 bp, Homo sapiens
  siRNA target sequence for FLJ31455 (NM_144964.1,451-469).
caagactatgtatcgattt

SEQ ID NO: 145886 - DNA, 19 bp, Homo sapiens
  siRNA target sequence for FLJ31455 (NM_144964.1,456-474).
ctatgtatcgatttgagta

SEQ ID NO: 145887 - DNA, 19 bp, Homo sapiens
  siRNA target sequence for FLJ31455 (NM_144964.1,510-528).
ctggctggacagattcgaa

SEQ ID NO: 145888 - DNA, 19 bp, Homo sapiens
  siRNA target sequence for FLJ31455 (NM_144964.1,553-571).
ctgacaggccattttggat

SEQ ID NO: 145889 - DNA, 19 bp, Homo sapiens
  siRNA target sequence for FLJ31455 (NM_144964.1,647-665).
cctgttagacataacagaa

SEQ ID NO: 145890 - DNA, 19 bp, Homo sapiens
  siRNA target sequence for FLJ31455 (NM_144964.1,663-681).
gaagaagactgctttagtt

SEQ ID NO: 145891 - DNA, 19 bp, Homo sapiens
  siRNA target sequence for FLJ31455 (NM_144964.1,719-737).
ctcagaacacgctcttgaa

SEQ ID NO: 145892 - DNA, 19 bp, Homo sapiens
  siRNA target sequence for FLJ31455 (NM_144964.1,735-753).
gaagatgttgatctaaaca

SEQ ID NO: 145893 - DNA, 19 bp, Homo sapiens
  siRNA target sequence for FLJ31455 (NM_144964.1,741-759).
gttgatctaaacaaagttt

SEQ ID NO: 145894 - DNA, 19 bp, Homo sapiens
  siRNA target sequence for FLJ31455 (NM_144964.1,772-790).
ggcttgtggatgaaagcat

SEQ ID NO: 145895 - DNA, 19 bp, Homo sapiens
  siRNA target sequence for FLJ31455 (NM_144964.1,844-862).
gcttgccaatccaggaata

SEQ ID NO: 145896 - DNA, 19 bp, Homo sapiens
  siRNA target sequence for FLJ31455 (NM_144964.1,878-896).
gaatgggaaaaactatcat

SEQ ID NO: 145897 - DNA, 19 bp, Homo sapiens
  siRNA target sequence for FLJ31455 (NM_144964.1,902-920).
gatactggccatcaatcaa

SEQ ID NO: 145898 - DNA, 19 bp, Homo sapiens
  siRNA target sequence for FLJ31455 (NM_144964.1,908-926).
ggccatcaatcaagtgttt

SEQ ID NO: 145899 - DNA, 19 bp, Homo sapiens
  siRNA target sequence for FLJ31455 (NM_144964.1,927-945).
gatatcctgtccacttact

SEQ ID NO: 145900 - DNA, 19 bp, Homo sapiens
  siRNA target sequence for FLJ31455 (NM_144964.1,933-951).
ctgtccacttacttagaga

SEQ ID NO: 145901 - DNA, 19 bp, Homo sapiens
  siRNA target sequence for FLJ31455 (NM_144964.1,988-1006).
cttcaggaaaaggctatat

SEQ ID NO: 145902 - DNA, 19 bp, Homo sapiens
  siRNA target sequence for FLJ31455 (NM_144964.1,991-1009).
caggaaaaggctatattct

SEQ ID NO: 145903 - DNA, 19 bp, Homo sapiens
  siRNA target sequence for FLJ31614 (NM_152573.2,395-413).
ccgacgccgaggcagtatt

SEQ ID NO: 145904 - DNA, 19 bp, Homo sapiens
  siRNA target sequence for FLJ31614 (NM_152573.2,667-685).
ggggacgaagccaagttca

SEQ ID NO: 145905 - DNA, 19 bp, Homo sapiens
  siRNA target sequence for FLJ31614 (NM_152573.2,668-686).
gggacgaagccaagttcat

SEQ ID NO: 145906 - DNA, 19 bp, Homo sapiens
  siRNA target sequence for FLJ31614 (NM_152573.2,729-747).
ccttgtggagccaagatta

SEQ ID NO: 145907 - DNA, 19 bp, Homo sapiens
  siRNA target sequence for FLJ31614 (NM_152573.2,730-748).
cttgtggagccaagattaa

SEQ ID NO: 145908 - DNA, 19 bp, Homo sapiens
  siRNA target sequence for FLJ31614 (NM_152573.2,751-769).
cagccatatgaacatgtta

SEQ ID NO: 145909 - DNA, 19 bp, Homo sapiens
  siRNA target sequence for FLJ31614 (NM_152573.2,753-771).
gccatatgaacatgttata

SEQ ID NO: 145910 - DNA, 19 bp, Homo sapiens
  siRNA target sequence for FLJ31614 (NM_152573.2,783-801).
ccgtgagatcagacttcaa

SEQ ID NO: 145911 - DNA, 19 bp, Homo sapiens
  siRNA target sequence for FLJ31614 (NM_152573.2,784-802).
cgtgagatcagacttcaaa

SEQ ID NO: 145912 - DNA, 19 bp, Homo sapiens
  siRNA target sequence for FLJ31614 (NM_152573.2,897-915).
gattcaggctgcagaacat

SEQ ID NO: 145913 - DNA, 19 bp, Homo sapiens
  siRNA target sequence for FLJ31614 (NM_152573.2,901-919).
caggctgcagaacataaga

SEQ ID NO: 145914 - DNA, 19 bp, Homo sapiens
  siRNA target sequence for FLJ31614 (NM_152573.2,963-981).
cctcagacgtcagtatgaa

SEQ ID NO: 145915 - DNA, 19 bp, Homo sapiens
  siRNA target sequence for FLJ31614 (NM_152573.2,964-982).
ctcagacgtcagtatgaaa

SEQ ID NO: 145916 - DNA, 19 bp, Homo sapiens
  siRNA target sequence for FLJ31614 (NM_152573.2,966-984).
cagacgtcagtatgaaact

SEQ ID NO: 145917 - DNA, 19 bp, Homo sapiens
  siRNA target sequence for FLJ31614 (NM_152573.2,968-986).
gacgtcagtatgaaactga

SEQ ID NO: 145918 - DNA, 19 bp, Homo sapiens
  siRNA target sequence for FLJ31614 (NM_152573.2,994-1012).
gatctgcaggtgaccatta

SEQ ID NO: 145919 - DNA, 19 bp, Homo sapiens
  siRNA target sequence for FLJ31614 (NM_152573.2,1040-1058).
caaaacgcgtaagtcaaaa

SEQ ID NO: 145920 - DNA, 19 bp, Homo sapiens
  siRNA target sequence for FLJ31614 (NM_152573.2,1143-1161).
gacaaacatagcctttctt

SEQ ID NO: 145921 - DNA, 19 bp, Homo sapiens
  siRNA target sequence for FLJ31614 (NM_152573.2,1195-1213).
gctgatcagagtctgaata

SEQ ID NO: 145922 - DNA, 19 bp, Homo sapiens
  siRNA target sequence for FLJ31614 (NM_152573.2,1245-1263).
cacagaagatcgaaatagt

SEQ ID NO: 145923 - DNA, 19 bp, Homo sapiens
  siRNA target sequence for FLJ31614 (NM_152573.2,1295-1313).
ctaaccggaagctacatga

SEQ ID NO: 145924 - DNA, 19 bp, Homo sapiens
  siRNA target sequence for FLJ31614 (NM_152573.2,1301-1319).
ggaagctacatgacagtaa

SEQ ID NO: 145925 - DNA, 19 bp, Homo sapiens
  siRNA target sequence for FLJ31614 (NM_152573.2,1336-1354).
gcccttgaaaacagttata

SEQ ID NO: 145926 - DNA, 19 bp, Homo sapiens
  siRNA target sequence for FLJ31614 (NM_152573.2,1355-1373).
gcaagttcaacagatcttt

SEQ ID NO: 145927 - DNA, 19 bp, Homo sapiens
  siRNA target sequence for FLJ31614 (NM_152573.2,1359-1377).
gttcaacagatctttgcat

SEQ ID NO: 145928 - DNA, 19 bp, Homo sapiens
  siRNA target sequence for FLJ31614 (NM_152573.2,1409-1427).
ctagaagcagtcccaaatt

SEQ ID NO: 145929 - DNA, 19 bp, Homo sapiens
  siRNA target sequence for FLJ31614 (NM_152573.2,1412-1430).
gaagcagtcccaaattcat

SEQ ID NO: 145930 - DNA, 19 bp, Homo sapiens
  siRNA target sequence for FLJ31614 (NM_152573.2,1444-1462).
caacctctaggctatgaca

SEQ ID NO: 145931 - DNA, 19 bp, Homo sapiens
  siRNA target sequence for FLJ31614 (NM_152573.2,1464-1482).
gtcatcccgctcttcctat

SEQ ID NO: 145932 - DNA, 19 bp, Homo sapiens
  siRNA target sequence for FLJ31614 (NM_152573.2,1524-1542).
gcagaggacaaattgtgaa

SEQ ID NO: 145933 - DNA, 19 bp, Homo sapiens
  siRNA target sequence for FLJ31614 (NM_152573.2,1592-1610).
gagatcccaatgagtatga

SEQ ID NO: 145934 - DNA, 19 bp, Homo sapiens
  siRNA target sequence for FLJ31614 (NM_152573.2,1630-1648).
caccagaggggatttcaga

SEQ ID NO: 145935 - DNA, 19 bp, Homo sapiens
  siRNA target sequence for FLJ31614 (NM_152573.2,1741-1759).
gtggcttccgtcttagact

SEQ ID NO: 145936 - DNA, 19 bp, Homo sapiens
  siRNA target sequence for FLJ31614 (NM_152573.2,1764-1782).
gccccaagggtctgttagt

SEQ ID NO: 145937 - DNA, 19 bp, Homo sapiens
  siRNA target sequence for FLJ31614 (NM_152573.2,1766-1784).
cccaagggtctgttagtga

SEQ ID NO: 145938 - DNA, 19 bp, Homo sapiens
  siRNA target sequence for FLJ31614 (NM_152573.2,1783-1801).
gaaggcagcattgttagtt

SEQ ID NO: 145939 - DNA, 19 bp, Homo sapiens
  siRNA target sequence for FLJ31614 (NM_152573.2,1846-1864).
gtagatgacaacgctaaat

SEQ ID NO: 145940 - DNA, 19 bp, Homo sapiens
  siRNA target sequence for FLJ31614 (NM_152573.2,1909-1927).
gctgcagtggggaagtcta

SEQ ID NO: 145941 - DNA, 19 bp, Homo sapiens
  siRNA target sequence for FLJ31614 (NM_152573.2,1912-1930).
gcagtggggaagtctagtt

SEQ ID NO: 145942 - DNA, 19 bp, Homo sapiens
  siRNA target sequence for FLJ31614 (NM_152573.2,1913-1931).
cagtggggaagtctagttt

SEQ ID NO: 145943 - DNA, 19 bp, Homo sapiens
  siRNA target sequence for FLJ31614 (NM_152573.2,2072-2090).
gaagtattgccaagtctta

SEQ ID NO: 145944 - DNA, 19 bp, Homo sapiens
  siRNA target sequence for FLJ31614 (NM_152573.2,2075-2093).
gtattgccaagtcttactt

SEQ ID NO: 145945 - DNA, 19 bp, Homo sapiens
  siRNA target sequence for FLJ31614 (NM_152573.2,2096-2114).
gaaaggcagatggtgtttt

SEQ ID NO: 145946 - DNA, 19 bp, Homo sapiens
  siRNA target sequence for FLJ31614 (NM_152573.2,2118-2136).
gctgtatgatgttacatgt

SEQ ID NO: 145947 - DNA, 19 bp, Homo sapiens
  siRNA target sequence for FLJ31614 (NM_152573.2,2158-2176).
cgagaatgggtagatatga

SEQ ID NO: 145948 - DNA, 19 bp, Homo sapiens
  siRNA target sequence for FLJ31614 (NM_152573.2,2204-2222).
ccattatgctggtaggaaa

SEQ ID NO: 145949 - DNA, 19 bp, Homo sapiens
  siRNA target sequence for FLJ31614 (NM_152573.2,2248-2266).
gctacagagggacaaaaat

SEQ ID NO: 145950 - DNA, 19 bp, Homo sapiens
  siRNA target sequence for FLJ31614 (NM_152573.2,2308-2326).
ggggcattattctgtgaaa

SEQ ID NO: 145951 - DNA, 19 bp, Homo sapiens
  siRNA target sequence for FLJ31614 (NM_152573.2,2332-2350).
gccaaagatggttctaaca

SEQ ID NO: 145952 - DNA, 19 bp, Homo sapiens
  siRNA target sequence for FLJ31614 (NM_152573.2,2333-2351).
ccaaagatggttctaacat

SEQ ID NO: 145953 - DNA, 19 bp, Homo sapiens
  siRNA target sequence for FLJ31614 (NM_152573.2,2412-2430).
cagatccattaccaatcta

SEQ ID NO: 145954 - DNA, 19 bp, Homo sapiens
  siRNA target sequence for FLJ31614 (NM_152573.2,2428-2446).
ctaaccgggaccaattcca

SEQ ID NO: 145955 - DNA, 19 bp, Homo sapiens
  siRNA target sequence for FLJ31614 (NM_152573.2,2432-2450).
ccgggaccaattccaaaaa

SEQ ID NO: 145956 - DNA, 19 bp, Homo sapiens
  siRNA target sequence for FLJ32009 (NM_152718.1,603-621).
cctgtcagcagagatgtaa

SEQ ID NO: 145957 - DNA, 19 bp, Homo sapiens
  siRNA target sequence for FLJ32009 (NM_152718.1,604-622).
ctgtcagcagagatgtaaa

SEQ ID NO: 145958 - DNA, 19 bp, Homo sapiens
  siRNA target sequence for FLJ32009 (NM_152718.1,679-697).
ccggcactcctgtgtagat

SEQ ID NO: 145959 - DNA, 19 bp, Homo sapiens
  siRNA target sequence for FLJ32009 (NM_152718.1,1204-1222).
gggagccatgcatgaatca

SEQ ID NO: 145960 - DNA, 19 bp, Homo sapiens
  siRNA target sequence for FLJ32009 (NM_152718.1,1205-1223).
ggagccatgcatgaatcaa

SEQ ID NO: 145961 - DNA, 19 bp, Homo sapiens
  siRNA target sequence for FLJ32009 (NM_152718.1,1353-1371).
cgtgcacaggctgttttca

SEQ ID NO: 145962 - DNA, 19 bp, Homo sapiens
  siRNA target sequence for FLJ32009 (NM_152718.1,1388-1406).
gctgaaggggatgtgtttt

SEQ ID NO: 145963 - DNA, 19 bp, Homo sapiens
  siRNA target sequence for FLJ32009 (NM_152718.1,1507-1525).
gacggattgctgtacttgt

SEQ ID NO: 145964 - DNA, 19 bp, Homo sapiens
  siRNA target sequence for FLJ32009 (NM_152718.1,1526-1544).
gttccagtgagatgctatt

SEQ ID NO: 145965 - DNA, 19 bp, Homo sapiens
  siRNA target sequence for FLJ32009 (NM_152718.1,1750-1768).
cgacaacggggttgagttt

SEQ ID NO: 145966 - DNA, 19 bp, Homo sapiens
  siRNA target sequence for FLJ32009 (NM_152718.1,1930-1948).
cacaggcagaatcttctat

SEQ ID NO: 145967 - DNA, 19 bp, Homo sapiens
  siRNA target sequence for FLJ32009 (NM_152718.1,1934-1952).
ggcagaatcttctataaca

SEQ ID NO: 145968 - DNA, 19 bp, Homo sapiens
  siRNA target sequence for FLJ34588 (NM_152726.1,204-222).
gggatggcagttttacagt

SEQ ID NO: 145969 - DNA, 19 bp, Homo sapiens
  siRNA target sequence for FLJ34588 (NM_152726.1,219-237).
cagtctccgcacagaaaaa

SEQ ID NO: 145970 - DNA, 19 bp, Homo sapiens
  siRNA target sequence for FLJ34588 (NM_152726.1,225-243).
ccgcacagaaaaatgttga

SEQ ID NO: 145971 - DNA, 19 bp, Homo sapiens
  siRNA target sequence for FLJ34588 (NM_152726.1,287-305).
cgcttcatgcagttttctt

SEQ ID NO: 145972 - DNA, 19 bp, Homo sapiens
  siRNA target sequence for FLJ34588 (NM_152726.1,310-328).
cgaacatgaaggagaatat

SEQ ID NO: 145973 - DNA, 19 bp, Homo sapiens
  siRNA target sequence for FLJ34588 (NM_152726.1,357-375).
cagtgatgtttgagcaaat

SEQ ID NO: 145974 - DNA, 19 bp, Homo sapiens
  siRNA target sequence for FLJ34588 (NM_152726.1,370-388).
gcaaatggaacgtaaaact

SEQ ID NO: 145975 - DNA, 19 bp, Homo sapiens
  siRNA target sequence for FLJ34588 (NM_152726.1,449-467).
ggctgtggatcaacttttt

SEQ ID NO: 145976 - DNA, 19 bp, Homo sapiens
  siRNA target sequence for FLJ34588 (NM_152726.1,479-497).
ggcgataaagggctaattt

SEQ ID NO: 145977 - DNA, 19 bp, Homo sapiens
  siRNA target sequence for FLJ34588 (NM_152726.1,481-499).
cgataaagggctaatttca

SEQ ID NO: 145978 - DNA, 19 bp, Homo sapiens
  siRNA target sequence for FLJ34588 (NM_152726.1,520-538).
gcttacaatcctcactaaa

SEQ ID NO: 145979 - DNA, 19 bp, Homo sapiens
  siRNA target sequence for FLJ34588 (NM_152726.1,571-589).
gctggatacagatggtaat

SEQ ID NO: 145980 - DNA, 19 bp, Homo sapiens
  siRNA target sequence for FLJ34588 (NM_152726.1,622-640).
gcagaagatcataagtaaa

SEQ ID NO: 145981 - DNA, 19 bp, Homo sapiens
  siRNA target sequence for FLJ34588 (NM_152726.1,649-667).
cttgatgacagtgaaaact

SEQ ID NO: 145982 - DNA, 19 bp, Homo sapiens
  siRNA target sequence for FLJ34588 (NM_152726.1,720-738).
ctcttcagatgcgtttctt

SEQ ID NO: 145983 - DNA, 19 bp, Homo sapiens
  siRNA target sequence for FLJ34588 (NM_152726.1,727-745).
gatgcgtttctttggaaaa

SEQ ID NO: 145984 - DNA, 19 bp, Homo sapiens
  siRNA target sequence for FLJ34588 (NM_152726.1,832-850).
gttttctaaaggtttgagt

SEQ ID NO: 145985 - DNA, 19 bp, Homo sapiens
  siRNA target sequence for FLJ34588 (NM_152726.1,837-855).
ctaaaggtttgagtttcat

SEQ ID NO: 145986 - DNA, 19 bp, Homo sapiens
  siRNA target sequence for FLJ34588 (NM_152726.1,947-965).
gcaggagagagcattagtt

SEQ ID NO: 145987 - DNA, 19 bp, Homo sapiens
  siRNA target sequence for FLJ34588 (NM_152726.1,1027-1045).
gcagatgttcagtttagct

SEQ ID NO: 145988 - DNA, 19 bp, Homo sapiens
  siRNA target sequence for FLJ34588 (NM_152726.1,1097-1115).
ggacaagaactctcaaaca

SEQ ID NO: 145989 - DNA, 19 bp, Homo sapiens
  siRNA target sequence for FLJ34588 (NM_152726.1,1098-1116).
gacaagaactctcaaacaa

SEQ ID NO: 145990 - DNA, 19 bp, Homo sapiens
  siRNA target sequence for FLJ34588 (NM_152726.1,1155-1173).
gtgatgaatgtcttagtca

SEQ ID NO: 145991 - DNA, 19 bp, Homo sapiens
  siRNA target sequence for FLJ34588 (NM_152726.1,1164-1182).
gtcttagtcatgaagagtt

SEQ ID NO: 145992 - DNA, 19 bp, Homo sapiens
  siRNA target sequence for FLJ34588 (NM_152726.1,1178-1196).
gagtttcttggggtgttaa

SEQ ID NO: 145993 - DNA, 19 bp, Homo sapiens
  siRNA target sequence for FLJ37440 (NM_153214.1,532-550).
cgcagacggcagaaagttt

SEQ ID NO: 145994 - DNA, 19 bp, Homo sapiens
  siRNA target sequence for FLJ37440 (NM_153214.1,547-565).
gtttggaagcaagtactta

SEQ ID NO: 145995 - DNA, 19 bp, Homo sapiens
  siRNA target sequence for FLJ37440 (NM_153214.1,569-587).
gatcacgaagtccatttta

SEQ ID NO: 145996 - DNA, 19 bp, Homo sapiens
  siRNA target sequence for FLJ37440 (NM_153214.1,731-749).
ggagtcaaccagtacagat

SEQ ID NO: 145997 - DNA, 19 bp, Homo sapiens
  siRNA target sequence for FLJ37440 (NM_153214.1,1178-1196).
gagggcagcggcaatgtga

SEQ ID NO: 145998 - DNA, 19 bp, Homo sapiens
  siRNA target sequence for FLJ37440 (NM_153214.1,1443-1461).
ggcagactggggatctgat

SEQ ID NO: 145999 - DNA, 19 bp, Homo sapiens
  siRNA target sequence for FLJ37874 (NM_182603.1,331-349).
gatatcacacacgtaacaa

SEQ ID NO: 146000 - DNA, 19 bp, Homo sapiens
  siRNA target sequence for FLJ37874 (NM_182603.1,450-468).
ccggggatgcactccttta

SEQ ID NO: 146001 - DNA, 19 bp, Homo sapiens
  siRNA target sequence for FLJ37874 (NM_182603.1,452-470).
ggggatgcactcctttaca

SEQ ID NO: 146002 - DNA, 19 bp, Homo sapiens
  siRNA target sequence for FLJ37874 (NM_182603.1,529-547).
gatcccagtgtgactgata

SEQ ID NO: 146003 - DNA, 19 bp, Homo sapiens
  siRNA target sequence for FLJ37874 (NM_182603.1,538-556).
gtgactgataagagagaat

SEQ ID NO: 146004 - DNA, 19 bp, Homo sapiens
  siRNA target sequence for FLJ37874 (NM_182603.1,558-576).
gagacctgtgcattatgca

SEQ ID NO: 146005 - DNA, 19 bp, Homo sapiens
  siRNA target sequence for FLJ37874 (NM_182603.1,599-617).
gcttgcaacttcttgttaa

SEQ ID NO: 146006 - DNA, 19 bp, Homo sapiens
  siRNA target sequence for FLJ37874 (NM_182603.1,600-618).
cttgcaacttcttgttaaa

SEQ ID NO: 146007 - DNA, 19 bp, Homo sapiens
  siRNA target sequence for FLJ37874 (NM_182603.1,642-660).
ggactacaatggaaacctt

SEQ ID NO: 146008 - DNA, 19 bp, Homo sapiens
  siRNA target sequence for FLJ37874 (NM_182603.1,685-703).
ggccaccttcactgtttca

SEQ ID NO: 146009 - DNA, 19 bp, Homo sapiens
  siRNA target sequence for FLJ37874 (NM_182603.1,726-744).
cagtgcgacgcaagtttta

SEQ ID NO: 146010 - DNA, 19 bp, Homo sapiens
  siRNA target sequence for FLJ37874 (NM_182603.1,728-746).
gtgcgacgcaagttttaaa

SEQ ID NO: 146011 - DNA, 19 bp, Homo sapiens
  siRNA target sequence for FLJ37874 (NM_182603.1,828-846).
ggctgagtatgaaggaaaa

SEQ ID NO: 146012 - DNA, 19 bp, Homo sapiens
  siRNA target sequence for FLJ37874 (NM_182603.1,850-868).
ctagaggatcaggaaactt

SEQ ID NO: 146013 - DNA, 19 bp, Homo sapiens
  siRNA target sequence for FLJ37874 (NM_182603.1,855-873).
ggatcaggaaactttagca

SEQ ID NO: 146014 - DNA, 19 bp, Homo sapiens
  siRNA target sequence for FLJ37874 (NM_182603.1,856-874).
gatcaggaaactttagcat

SEQ ID NO: 146015 - DNA, 19 bp, Homo sapiens
  siRNA target sequence for FLJ37874 (NM_182603.1,909-927).
ggggatgcttaagaaatta

SEQ ID NO: 146016 - DNA, 19 bp, Homo sapiens
  siRNA target sequence for FLJ37874 (NM_182603.1,930-948).
ggaagatggagtaatcaat

SEQ ID NO: 146017 - DNA, 19 bp, Homo sapiens
  siRNA target sequence for FLJ37874 (NM_182603.1,938-956).
gagtaatcaatattaatga

SEQ ID NO: 146018 - DNA, 19 bp, Homo sapiens
  siRNA target sequence for FLJ37874 (NM_182603.1,955-973).
gagcgtgctgataatggat

SEQ ID NO: 146019 - DNA, 19 bp, Homo sapiens
  siRNA target sequence for FLJ37874 (NM_182603.1,970-988).
ggatcaactcctatgcata

SEQ ID NO: 146020 - DNA, 19 bp, Homo sapiens
  siRNA target sequence for FLJ37874 (NM_182603.1,971-989).
gatcaactcctatgcataa

SEQ ID NO: 146021 - DNA, 19 bp, Homo sapiens
  siRNA target sequence for FLJ37874 (NM_182603.1,995-1013).
ctggacaaggccacataga

SEQ ID NO: 146022 - DNA, 19 bp, Homo sapiens
  siRNA target sequence for FLJ37874 (NM_182603.1,1226-1244).
ccaaggatgatttatgtct

SEQ ID NO: 146023 - DNA, 19 bp, Homo sapiens
  siRNA target sequence for FLJ37874 (NM_182603.1,1311-1329).
cgactacgtagagaaaaat

SEQ ID NO: 146024 - DNA, 19 bp, Homo sapiens
  siRNA target sequence for FLJ37874 (NM_182603.1,1312-1330).
gactacgtagagaaaaatt

SEQ ID NO: 146025 - DNA, 19 bp, Homo sapiens
  siRNA target sequence for FLJ39116 (NM_152635.1,288-306).
ccttgttctgcttacatca

SEQ ID NO: 146026 - DNA, 19 bp, Homo sapiens
  siRNA target sequence for FLJ39116 (NM_152635.1,527-545).
ggcttgtgccagcttcaat

SEQ ID NO: 146027 - DNA, 19 bp, Homo sapiens
  siRNA target sequence for FLJ39116 (NM_152635.1,592-610).
ctggaggctactatgtgta

SEQ ID NO: 146028 - DNA, 19 bp, Homo sapiens
  siRNA target sequence for FLJ39116 (NM_152635.1,641-659).
cgtctactgtggtcatttt

SEQ ID NO: 146029 - DNA, 19 bp, Homo sapiens
  siRNA target sequence for FLJ39116 (NM_152635.1,746-764).
caggcagacatgctttgat

SEQ ID NO: 146030 - DNA, 19 bp, Homo sapiens
  siRNA target sequence for FLJ39116 (NM_152635.1,1231-1249).
ggagcagcggggacttcat

SEQ ID NO: 146031 - DNA, 19 bp, Homo sapiens
  siRNA target sequence for FLJ39116 (NM_152635.1,1293-1311).
ccacgcctgtacaccattt

SEQ ID NO: 146032 - DNA, 19 bp, Homo sapiens
  siRNA target sequence for FLJ39116 (NM_152635.1,1397-1415).
cttcaaggacaatgagttt

SEQ ID NO: 146033 - DNA, 19 bp, Homo sapiens
  siRNA target sequence for FLJ39116 (NM_152635.1,1551-1569).
gacgaggtcctgaaatact

SEQ ID NO: 146034 - DNA, 19 bp, Homo sapiens
  siRNA target sequence for FLJ39116 (NM_152635.1,1647-1665).
caggtccctgtcttcaagt

SEQ ID NO: 146035 - DNA, 19 bp, Homo sapiens
  siRNA target sequence for FLJ39155 (NM_152403.2,451-469).
ctgggcgcattgaactgta

SEQ ID NO: 146036 - DNA, 19 bp, Homo sapiens
  siRNA target sequence for FLJ39155 (NM_152403.2,542-560).
ctgaggttggcgcagataa

SEQ ID NO: 146037 - DNA, 19 bp, Homo sapiens
  siRNA target sequence for FLJ39155 (NM_152403.2,544-562).
gaggttggcgcagataaat

SEQ ID NO: 146038 - DNA, 19 bp, Homo sapiens
  siRNA target sequence for FLJ39155 (NM_152403.2,608-626).
cgaccacggaggaagtgat

SEQ ID NO: 146039 - DNA, 19 bp, Homo sapiens
  siRNA target sequence for FLJ39155 (NM_152403.2,709-727).
cggcatgtcaccactttgt

SEQ ID NO: 146040 - DNA, 19 bp, Homo sapiens
  siRNA target sequence for FLJ39155 (NM_152403.2,795-813).
ggtggccctgtcttggaaa

SEQ ID NO: 146041 - DNA, 19 bp, Homo sapiens
  siRNA target sequence for FLJ39155 (NM_152403.2,871-889).
ccagatttcgacaagaagt

SEQ ID NO: 146042 - DNA, 19 bp, Homo sapiens
  siRNA target sequence for FLJ39155 (NM_152403.2,885-903).
gaagtggacctcaatccat

SEQ ID NO: 146043 - DNA, 19 bp, Homo sapiens
  siRNA target sequence for FLJ39155 (NM_152403.2,967-985).
gccgtgagggcaatgaatt

SEQ ID NO: 146044 - DNA, 19 bp, Homo sapiens
  siRNA target sequence for FLJ39155 (NM_152403.2,1060-1078).
cgctatggaccccgttata

SEQ ID NO: 146045 - DNA, 19 bp, Homo sapiens
  siRNA target sequence for FLJ39155 (NM_152403.2,1061-1079).
gctatggaccccgttatat

SEQ ID NO: 146046 - DNA, 19 bp, Homo sapiens
  siRNA target sequence for FLJ39155 (NM_152403.2,1097-1115).
gtgaggatgatgaaggatt

SEQ ID NO: 146047 - DNA, 19 bp, Homo sapiens
  siRNA target sequence for FLJ39155 (NM_152403.2,1120-1138).
gacgacttagatttggata

SEQ ID NO: 146048 - DNA, 19 bp, Homo sapiens
  siRNA target sequence for FLJ39155 (NM_152403.2,1122-1140).
cgacttagatttggatatt

SEQ ID NO: 146049 - DNA, 19 bp, Homo sapiens
  siRNA target sequence for FLJ39155 (NM_152403.2,1123-1141).
gacttagatttggatattt

SEQ ID NO: 146050 - DNA, 19 bp, Homo sapiens
  siRNA target sequence for FLJ39155 (NM_152403.2,1206-1224).
caagaagatgtctatatct

SEQ ID NO: 146051 - DNA, 19 bp, Homo sapiens
  siRNA target sequence for FLJ39155 (NM_152403.2,1327-1345).
ggtgtggccataatgtcaa

SEQ ID NO: 146052 - DNA, 19 bp, Homo sapiens
  siRNA target sequence for FLJ39155 (NM_152403.2,1456-1474).
gagagctgctcagaagata

SEQ ID NO: 146053 - DNA, 19 bp, Homo sapiens
  siRNA target sequence for FLJ39155 (NM_152403.2,1466-1484).
cagaagatattgttatcca

SEQ ID NO: 146054 - DNA, 19 bp, Homo sapiens
  siRNA target sequence for FLJ39155 (NM_152403.2,1497-1515).
ctttggccactcctatgta

SEQ ID NO: 146055 - DNA, 19 bp, Homo sapiens
  siRNA target sequence for FLJ39155 (NM_152403.2,1502-1520).
gccactcctatgtaacgtt

SEQ ID NO: 146056 - DNA, 19 bp, Homo sapiens
  siRNA target sequence for FLJ39155 (NM_152403.2,1503-1521).
ccactcctatgtaacgttt

SEQ ID NO: 146057 - DNA, 19 bp, Homo sapiens
  siRNA target sequence for FLJ39155 (NM_152403.2,1506-1524).
ctcctatgtaacgtttgaa

SEQ ID NO: 146058 - DNA, 19 bp, Homo sapiens
  siRNA target sequence for FLJ39155 (NM_152403.2,1522-1540).
gaacctctgaagaattctt

SEQ ID NO: 146059 - DNA, 19 bp, Homo sapiens
  siRNA target sequence for FLJ39155 (NM_152403.2,1618-1636).
cacgggaggggggatttca

SEQ ID NO: 146060 - DNA, 19 bp, Homo sapiens
  siRNA target sequence for FLJ39155 (NM_152403.2,1621-1639).
gggaggggggatttcatgt

SEQ ID NO: 146061 - DNA, 19 bp, Homo sapiens
  siRNA target sequence for FLJ39155 (NM_152403.2,1663-1681).
ctgcagttcaggtttaatt

SEQ ID NO: 146062 - DNA, 19 bp, Homo sapiens
  siRNA target sequence for FLJ39155 (NM_152403.2,1665-1683).
gcagttcaggtttaattgt

SEQ ID NO: 146063 - DNA, 19 bp, Homo sapiens
  siRNA target sequence for FLJ39155 (NM_152403.2,1690-1708).
ggggttgccatcatcgtaa

SEQ ID NO: 146064 - DNA, 19 bp, Homo sapiens
  siRNA target sequence for FLJ39155 (NM_152403.2,1709-1727).
gtgagaccaaaatcaaact

SEQ ID NO: 146065 - DNA, 19 bp, Homo sapiens
  siRNA target sequence for FLJ39155 (NM_152403.2,1733-1751).
gttggcacacggttatgct

SEQ ID NO: 146066 - DNA, 19 bp, Homo sapiens
  siRNA target sequence for FLJ39155 (NM_152403.2,1810-1828).
cagtctcagggccaataca

SEQ ID NO: 146067 - DNA, 19 bp, Homo sapiens
  siRNA target sequence for FLJ39155 (NM_152403.2,1818-1836).
gggccaatacagtaaaatt

SEQ ID NO: 146068 - DNA, 19 bp, Homo sapiens
  siRNA target sequence for FLJ39155 (NM_152403.2,1821-1839).
ccaatacagtaaaattact

SEQ ID NO: 146069 - DNA, 19 bp, Homo sapiens
  siRNA target sequence for FLJ39155 (NM_152403.2,1842-1860).
ccggacacctctctatctt

SEQ ID NO: 146070 - DNA, 19 bp, Homo sapiens
  siRNA target sequence for FLJ39155 (NM_152403.2,1902-1920).
gacaaaccgaggctttcaa

SEQ ID NO: 146071 - DNA, 19 bp, Homo sapiens
  siRNA target sequence for FLJ39155 (NM_152403.2,1929-1947).
gcagtcgctcgctgtgaat

SEQ ID NO: 146072 - DNA, 19 bp, Homo sapiens
  siRNA target sequence for FLJ39155 (NM_152403.2,2162-2180).
gagagtctctgagatctta

SEQ ID NO: 146073 - DNA, 19 bp, Homo sapiens
  siRNA target sequence for FLJ39155 (NM_152403.2,2198-2216).
cactggagccccagcatta

SEQ ID NO: 146074 - DNA, 19 bp, Homo sapiens
  siRNA target sequence for FLJ39155 (NM_152403.2,2272-2290).
ctcctgtacagctatgaca

SEQ ID NO: 146075 - DNA, 19 bp, Homo sapiens
  siRNA target sequence for FLJ39155 (NM_152403.2,2409-2427).
gcacgagcttcgtgtatct

SEQ ID NO: 146076 - DNA, 19 bp, Homo sapiens
  siRNA target sequence for FLJ39155 (NM_152403.2,2428-2446).
cgcacagcaaagaatggaa

SEQ ID NO: 146077 - DNA, 19 bp, Homo sapiens
  siRNA target sequence for FLJ39155 (NM_152403.2,2454-2472).
ggtggataagcagaagata

SEQ ID NO: 146078 - DNA, 19 bp, Homo sapiens
  siRNA target sequence for FLJ39155 (NM_152403.2,2490-2508).
gggaggcttcacacagatt

SEQ ID NO: 146079 - DNA, 19 bp, Homo sapiens
  siRNA target sequence for FLJ39155 (NM_152403.2,2491-2509).
ggaggcttcacacagatta

SEQ ID NO: 146080 - DNA, 19 bp, Homo sapiens
  siRNA target sequence for FLJ39155 (NM_152403.2,2494-2512).
ggcttcacacagattaagt

SEQ ID NO: 146081 - DNA, 19 bp, Homo sapiens
  siRNA target sequence for FLJ39155 (NM_152403.2,2534-2552).
gcggagtccccaattatga

SEQ ID NO: 146082 - DNA, 19 bp, Homo sapiens
  siRNA target sequence for FLJ39155 (NM_152403.2,2535-2553).
cggagtccccaattatgat

SEQ ID NO: 146083 - DNA, 19 bp, Homo sapiens
  siRNA target sequence for FLJ39155 (NM_152403.2,2537-2555).
gagtccccaattatgatga

SEQ ID NO: 146084 - DNA, 19 bp, Homo sapiens
  siRNA target sequence for FLJ39155 (NM_152403.2,2646-2664).
cttcacctccggagtgaat

SEQ ID NO: 146085 - DNA, 19 bp, Homo sapiens
  siRNA target sequence for FLJ39155 (NM_152403.2,2780-2798).
gccagaaagcgatcataga

SEQ ID NO: 146086 - DNA, 19 bp, Homo sapiens
  siRNA target sequence for FLJ39155 (NM_152403.2,2831-2849).
gttacctgacgtatgacaa

SEQ ID NO: 146087 - DNA, 19 bp, Homo sapiens
  siRNA target sequence for FLJ39155 (NM_152403.2,2845-2863).
gacaacccagatatcttga

SEQ ID NO: 146088 - DNA, 19 bp, Homo sapiens
  siRNA target sequence for FLJ39155 (NM_152403.2,2865-2883).
gagggtgtcaggatcaaga

SEQ ID NO: 146089 - DNA, 19 bp, Homo sapiens
  siRNA target sequence for FLJ39155 (NM_152403.2,2869-2887).
gtgtcaggatcaagatcaa

SEQ ID NO: 146090 - DNA, 19 bp, Homo sapiens
  siRNA target sequence for FLJ39155 (NM_152403.2,2873-2891).
caggatcaagatcaaatgt

SEQ ID NO: 146091 - DNA, 19 bp, Homo sapiens
  siRNA target sequence for FLJ39155 (NM_152403.2,2957-2975).
gacccaacagcgacttcat

SEQ ID NO: 146092 - DNA, 19 bp, Homo sapiens
  siRNA target sequence for FLJ39155 (NM_152403.2,2998-3016).
gccctcgtgttcagctata

SEQ ID NO: 146093 - DNA, 19 bp, Homo sapiens
  siRNA target sequence for FLJ39155 (NM_152403.2,3068-3086).
gtcggtggcaccgagttaa

SEQ ID NO: 146094 - DNA, 19 bp, Homo sapiens
  siRNA target sequence for FLJ39155 (NM_152403.2,3114-3132).
gataaccgtggatgactat

SEQ ID NO: 146095 - DNA, 19 bp, Homo sapiens
  siRNA target sequence for FLJ39155 (NM_152403.2,3177-3195).
catcaatggagctctgtat

SEQ ID NO: 146096 - DNA, 19 bp, Homo sapiens
  siRNA target sequence for FLJ39155 (NM_152403.2,3222-3240).
gcacactaacaggcaatat

SEQ ID NO: 146097 - DNA, 19 bp, Homo sapiens
  siRNA target sequence for FLJ39155 (NM_152403.2,3223-3241).
cacactaacaggcaatata

SEQ ID NO: 146098 - DNA, 19 bp, Homo sapiens
  siRNA target sequence for FLJ39155 (NM_152403.2,3247-3265).
gggctcgtgggctgtatct

SEQ ID NO: 146099 - DNA, 19 bp, Homo sapiens
  siRNA target sequence for FLJ39155 (NM_152403.2,3316-3334).
gtggatgggaaaaacatca

SEQ ID NO: 146100 - DNA, 19 bp, Homo sapiens
  siRNA target sequence for FLJ40342 (NM_152347.3,435-453).
ctgccaggcagaggaaaat

SEQ ID NO: 146101 - DNA, 19 bp, Homo sapiens
  siRNA target sequence for FLJ40342 (NM_152347.3,472-490).
ggctctaattcttttgcaa

SEQ ID NO: 146102 - DNA, 19 bp, Homo sapiens
  siRNA target sequence for FLJ40342 (NM_152347.3,495-513).
cttgtcatcaggaactatt

SEQ ID NO: 146103 - DNA, 19 bp, Homo sapiens
  siRNA target sequence for FLJ40342 (NM_152347.3,500-518).
catcaggaactattaacca

SEQ ID NO: 146104 - DNA, 19 bp, Homo sapiens
  siRNA target sequence for FLJ40342 (NM_152347.3,506-524).
gaactattaaccacaagaa

SEQ ID NO: 146105 - DNA, 19 bp, Homo sapiens
  siRNA target sequence for FLJ40342 (NM_152347.3,509-527).
ctattaaccacaagaaata

SEQ ID NO: 146106 - DNA, 19 bp, Homo sapiens
  siRNA target sequence for FLJ40342 (NM_152347.3,519-537).
caagaaatacatcaagttt

SEQ ID NO: 146107 - DNA, 19 bp, Homo sapiens
  siRNA target sequence for FLJ40342 (NM_152347.3,555-573).
ggaaatttcaccggaaatt

SEQ ID NO: 146108 - DNA, 19 bp, Homo sapiens
  siRNA target sequence for FLJ40342 (NM_152347.3,556-574).
gaaatttcaccggaaatta

SEQ ID NO: 146109 - DNA, 19 bp, Homo sapiens
  siRNA target sequence for FLJ40342 (NM_152347.3,688-706).
gtacaacagcacagtaaaa

SEQ ID NO: 146110 - DNA, 19 bp, Homo sapiens
  siRNA target sequence for FLJ40342 (NM_152347.3,798-816).
cgttcacaagacttcatca

SEQ ID NO: 146111 - DNA, 19 bp, Homo sapiens
  siRNA target sequence for FLJ40342 (NM_152347.3,807-825).
gacttcatcacctctttgt

SEQ ID NO: 146112 - DNA, 19 bp, Homo sapiens
  siRNA target sequence for FLJ40342 (NM_152347.3,836-854).
caattactcgggaaaagga

SEQ ID NO: 146113 - DNA, 19 bp, Homo sapiens
  siRNA target sequence for FLJ40342 (NM_152347.3,859-877).
ctgtctaacctctacatga

SEQ ID NO: 146114 - DNA, 19 bp, Homo sapiens
  siRNA target sequence for FLJ40342 (NM_152347.3,867-885).
cctctacatgacattatat

SEQ ID NO: 146115 - DNA, 19 bp, Homo sapiens
  siRNA target sequence for FLJ40342 (NM_152347.3,902-920).
gatatttacactcaaaaga

SEQ ID NO: 146116 - DNA, 19 bp, Homo sapiens
  siRNA target sequence for FLJ40342 (NM_152347.3,941-959).
cctgtaaaatttttagtaa

SEQ ID NO: 146117 - DNA, 19 bp, Homo sapiens
  siRNA target sequence for FLJ40342 (NM_152347.3,1041-1059).
gcgacaggcactaaagact

SEQ ID NO: 146118 - DNA, 19 bp, Homo sapiens
  siRNA target sequence for FLJ40342 (NM_152347.3,1154-1172).
gcatgggtatccctataaa

SEQ ID NO: 146119 - DNA, 19 bp, Homo sapiens
  siRNA target sequence for FLJ40342 (NM_152347.3,1164-1182).
ccctataaaccgtgaaatt

SEQ ID NO: 146120 - DNA, 19 bp, Homo sapiens
  siRNA target sequence for FLJ40342 (NM_152347.3,1165-1183).
cctataaaccgtgaaattt

SEQ ID NO: 146121 - DNA, 19 bp, Homo sapiens
  siRNA target sequence for FLJ40342 (NM_152347.3,1166-1184).
ctataaaccgtgaaatttt

SEQ ID NO: 146122 - DNA, 19 bp, Homo sapiens
  siRNA target sequence for FLJ40342 (NM_152347.3,1192-1210).
gtgacaaaacatacctata

SEQ ID NO: 146123 - DNA, 19 bp, Homo sapiens
  siRNA target sequence for FLJ40342 (NM_152347.3,1217-1235).
gtaaccacatggtggatat

SEQ ID NO: 146124 - DNA, 19 bp, Homo sapiens
  siRNA target sequence for FLJ40342 (NM_152347.3,1227-1245).
ggtggatattggggatatt

SEQ ID NO: 146125 - DNA, 19 bp, Homo sapiens
  siRNA target sequence for FLJ40342 (NM_152347.3,1237-1255).
ggggatattatatttactt

SEQ ID NO: 146126 - DNA, 19 bp, Homo sapiens
  siRNA target sequence for FLJ40342 (NM_152347.3,1270-1288).
gaacagtatgaggatgttt

SEQ ID NO: 146127 - DNA, 19 bp, Homo sapiens
  siRNA target sequence for FLJ40342 (NM_152347.3,1281-1299).
ggatgtttcaattacagaa

SEQ ID NO: 146128 - DNA, 19 bp, Homo sapiens
  siRNA target sequence for FLJ40342 (NM_152347.3,1300-1318).
ggatcacctttgaatgaaa

SEQ ID NO: 146129 - DNA, 19 bp, Homo sapiens
  siRNA target sequence for FLJ40342 (NM_152347.3,1301-1319).
gatcacctttgaatgaaat

SEQ ID NO: 146130 - DNA, 19 bp, Homo sapiens
  siRNA target sequence for FLJ40342 (NM_152347.3,1306-1324).
cctttgaatgaaattactt

SEQ ID NO: 146131 - DNA, 19 bp, Homo sapiens
  siRNA target sequence for FLJ40342 (NM_152347.3,1348-1366).
gcaggatgctatctaaaat

SEQ ID NO: 146132 - DNA, 19 bp, Homo sapiens
  siRNA target sequence for FLJ40342 (NM_152347.3,1349-1367).
caggatgctatctaaaata

SEQ ID NO: 146133 - DNA, 19 bp, Homo sapiens
  siRNA target sequence for FLJ40342 (NM_152347.3,1351-1369).
ggatgctatctaaaatata

SEQ ID NO: 146134 - DNA, 19 bp, Homo sapiens
  siRNA target sequence for FLJ40342 (NM_152347.3,1355-1373).
gctatctaaaatataagaa

SEQ ID NO: 146135 - DNA, 19 bp, Homo sapiens
  siRNA target sequence for FLJ40342 (NM_152347.3,1396-1414).
ctccctgaaccttcaatat

SEQ ID NO: 146136 - DNA, 19 bp, Homo sapiens
  siRNA target sequence for FLJ40342 (NM_152347.3,1405-1423).
ccttcaatatccaaaaagt

SEQ ID NO: 146137 - DNA, 19 bp, Homo sapiens
  siRNA target sequence for FLJ40342 (NM_152347.3,1464-1482).
gaatgatgaccttgaatct

SEQ ID NO: 146138 - DNA, 19 bp, Homo sapiens
  siRNA target sequence for FLJ40342 (NM_152347.3,1526-1544).
gggttggcagcagtaatgt

SEQ ID NO: 146139 - DNA, 19 bp, Homo sapiens
  siRNA target sequence for FLJ40342 (NM_152347.3,1527-1545).
ggttggcagcagtaatgta

SEQ ID NO: 146140 - DNA, 19 bp, Homo sapiens
  siRNA target sequence for FLJ40342 (NM_152347.3,1549-1567).
gtccaagaaccatattcaa

SEQ ID NO: 146141 - DNA, 19 bp, Homo sapiens
  siRNA target sequence for FLJ40342 (NM_152347.3,1606-1624).
gaaattcatgactcaaagt

SEQ ID NO: 146142 - DNA, 19 bp, Homo sapiens
  siRNA target sequence for FLJ40342 (NM_152347.3,1633-1651).
caaagcttgaagagtagta

SEQ ID NO: 146143 - DNA, 19 bp, Homo sapiens
  siRNA target sequence for FLJ40342 (NM_152347.3,1646-1664).
gtagtacaagcctcagtaa

SEQ ID NO: 146144 - DNA, 19 bp, Homo sapiens
  siRNA target sequence for FLJ40342 (NM_152347.3,1659-1677).
cagtaagtctctggataaa

SEQ ID NO: 146145 - DNA, 19 bp, Homo sapiens
  siRNA target sequence for FLJ40342 (NM_152347.3,1791-1809).
ctgtgaagctatcagtaaa

SEQ ID NO: 146146 - DNA, 19 bp, Homo sapiens
  siRNA target sequence for FLJ40342 (NM_152347.3,1928-1946).
gaatggtggagttagatga

SEQ ID NO: 146147 - DNA, 19 bp, Homo sapiens
  siRNA target sequence for FLJ40342 (NM_152347.3,1932-1950).
ggtggagttagatgacttt

SEQ ID NO: 146148 - DNA, 19 bp, Homo sapiens
  siRNA target sequence for FLJ40342 (NM_152347.3,1938-1956).
gttagatgactttgtaaat

SEQ ID NO: 146149 - DNA, 19 bp, Homo sapiens
  siRNA target sequence for FLJ40342 (NM_152347.3,1965-1983).
caaggagcgaagttttcct

SEQ ID NO: 146150 - DNA, 19 bp, Homo sapiens
  siRNA target sequence for FLJ40342 (NM_152347.3,1994-2012).
cgttgcctggtgtcattaa

SEQ ID NO: 146151 - DNA, 19 bp, Homo sapiens
  siRNA target sequence for FLJ40342 (NM_152347.3,2041-2059).
gtggattatgaggatctaa

SEQ ID NO: 146152 - DNA, 19 bp, Homo sapiens
  siRNA target sequence for FLJ40342 (NM_152347.3,2088-2106).
cctttctaagccagaattt

SEQ ID NO: 146153 - DNA, 19 bp, Homo sapiens
  siRNA target sequence for FLJ40342 (NM_152347.3,2093-2111).
ctaagccagaatttaagaa

SEQ ID NO: 146154 - DNA, 19 bp, Homo sapiens
  siRNA target sequence for FLJ40342 (NM_152347.3,2149-2167).
gtgaattttaaagaattca

SEQ ID NO: 146155 - DNA, 19 bp, Homo sapiens
  siRNA target sequence for FLJ40342 (NM_152347.3,2161-2179).
gaattcattgatactatga

SEQ ID NO: 146156 - DNA, 19 bp, Homo sapiens
  siRNA target sequence for FLJ40342 (NM_152347.3,2196-2214).
cttctctgaaaaattagta

SEQ ID NO: 146157 - DNA, 19 bp, Homo sapiens
  siRNA target sequence for FLJ40342 (NM_152347.3,2234-2252).
ccctcgacgatctcagaaa

SEQ ID NO: 146158 - DNA, 19 bp, Homo sapiens
  siRNA target sequence for FLJ40342 (NM_152347.3,2287-2305).
ctgtctagtttgaatagta

SEQ ID NO: 146159 - DNA, 19 bp, Homo sapiens
  siRNA target sequence for FLJ40342 (NM_152347.3,2289-2307).
gtctagtttgaatagtaat

SEQ ID NO: 146160 - DNA, 19 bp, Homo sapiens
  siRNA target sequence for FLJ40342 (NM_152347.3,2337-2355).
ggaactagtgacagttgat

SEQ ID NO: 146161 - DNA, 19 bp, Homo sapiens
  siRNA target sequence for FLJ40342 (NM_152347.3,2417-2435).
ccaggttagaagagttaca

SEQ ID NO: 146162 - DNA, 19 bp, Homo sapiens
  siRNA target sequence for FLJ40342 (NM_152347.3,2430-2448).
gttacaggaagttgtctta

SEQ ID NO: 146163 - DNA, 19 bp, Homo sapiens
  siRNA target sequence for FLJ40342 (NM_152347.3,2460-2478).
gctggaaggtgacatgata

SEQ ID NO: 146164 - DNA, 19 bp, Homo sapiens
  siRNA target sequence for FLJ40342 (NM_152347.3,2517-2535).
gattaagtcacctaaagaa

SEQ ID NO: 146165 - DNA, 19 bp, Homo sapiens
  siRNA target sequence for FLJ40342 (NM_152347.3,2539-2557).
gtagagaaaattcttcaat

SEQ ID NO: 146166 - DNA, 19 bp, Homo sapiens
  siRNA target sequence for FLJ40342 (NM_152347.3,2575-2593).
gataacatggtgaacatta

SEQ ID NO: 146167 - DNA, 19 bp, Homo sapiens
  siRNA target sequence for FLJ40342 (NM_152347.3,2617-2635).
gacacccagaaattttcca

SEQ ID NO: 146168 - DNA, 19 bp, Homo sapiens
  siRNA target sequence for FLJ40342 (NM_152347.3,2619-2637).
cacccagaaattttccaat

SEQ ID NO: 146169 - DNA, 19 bp, Homo sapiens
  siRNA target sequence for FLJ40342 (NM_152347.3,2658-2676).
ggcttcaaatctaaaatta

SEQ ID NO: 146170 - DNA, 19 bp, Homo sapiens
  siRNA target sequence for FLJ40342 (NM_152347.3,2677-2695).
ccaaaggtaaacgagatta

SEQ ID NO: 146171 - DNA, 19 bp, Homo sapiens
  siRNA target sequence for FLJ40342 (NM_152347.3,2678-2696).
caaaggtaaacgagattaa

SEQ ID NO: 146172 - DNA, 19 bp, Homo sapiens
  siRNA target sequence for FLJ40342 (NM_152347.3,2682-2700).
ggtaaacgagattaaagaa

SEQ ID NO: 146173 - DNA, 19 bp, Homo sapiens
  siRNA target sequence for FLJ40342 (NM_152347.3,2712-2730).
cttgtcacatgtcgataat

SEQ ID NO: 146174 - DNA, 19 bp, Homo sapiens
  siRNA target sequence for FLJ40342 (NM_152347.3,2758-2776).
catgccttgaaatgtttga

SEQ ID NO: 146175 - DNA, 19 bp, Homo sapiens
  siRNA target sequence for FLJ40342 (NM_152347.3,2802-2820).
caatgaagcccttaactgt

SEQ ID NO: 146176 - DNA, 19 bp, Homo sapiens
  siRNA target sequence for FLJ40342 (NM_152347.3,2822-2840).
gtaacgtcagtgataatat

SEQ ID NO: 146177 - DNA, 19 bp, Homo sapiens
  siRNA target sequence for FLJ40342 (NM_152347.3,2940-2958).
ccagaatgatctagttgat

SEQ ID NO: 146178 - DNA, 19 bp, Homo sapiens
  siRNA target sequence for FLJ40342 (NM_152347.3,2961-2979).
ctctgacctcaagacatta

SEQ ID NO: 146179 - DNA, 19 bp, Homo sapiens
  siRNA target sequence for FLJ40342 (NM_152347.3,2963-2981).
ctgacctcaagacattatt

SEQ ID NO: 146180 - DNA, 19 bp, Homo sapiens
  siRNA target sequence for FLJ40342 (NM_152347.3,2965-2983).
gacctcaagacattattga

SEQ ID NO: 146181 - DNA, 19 bp, Homo sapiens
  siRNA target sequence for FLJ40342 (NM_152347.3,3005-3023).
ctaatgctatacttactgt

SEQ ID NO: 146182 - DNA, 19 bp, Homo sapiens
  siRNA target sequence for FLJ40342 (NM_152347.3,3034-3052).
catgtacctgaacatgaaa

SEQ ID NO: 146183 - DNA, 19 bp, Homo sapiens
  siRNA target sequence for FLJ40342 (NM_152347.3,3046-3064).
catgaaagtggcaaggtta

SEQ ID NO: 146184 - DNA, 19 bp, Homo sapiens
  siRNA target sequence for FLJ40342 (NM_152347.3,3081-3099).
gactaaattatccgatata

SEQ ID NO: 146185 - DNA, 19 bp, Homo sapiens
  siRNA target sequence for FLJ40342 (NM_152347.3,3083-3101).
ctaaattatccgatatatt

SEQ ID NO: 146186 - DNA, 19 bp, Homo sapiens
  siRNA target sequence for FLJ40342 (NM_152347.3,3093-3111).
cgatatattgacaattcct

SEQ ID NO: 146187 - DNA, 19 bp, Homo sapiens
  siRNA target sequence for FLJ40342 (NM_152347.3,3094-3112).
gatatattgacaattccta

SEQ ID NO: 146188 - DNA, 19 bp, Homo sapiens
  siRNA target sequence for FLJ40342 (NM_152347.3,3110-3128).
ctaaagctgcaggtaagtt

SEQ ID NO: 146189 - DNA, 19 bp, Homo sapiens
  siRNA target sequence for FLJ40342 (NM_152347.3,3164-3182).
ggcaagcagtggtttacat

SEQ ID NO: 146190 - DNA, 19 bp, Homo sapiens
  siRNA target sequence for FLJ40342 (NM_152347.3,3166-3184).
caagcagtggtttacatgt

SEQ ID NO: 146191 - DNA, 19 bp, Homo sapiens
  siRNA target sequence for FLJ40342 (NM_152347.3,3198-3216).
ggattcgatagttaaagca

SEQ ID NO: 146192 - DNA, 19 bp, Homo sapiens
  siRNA target sequence for FLJ40342 (NM_152347.3,3256-3274).
cacaagattagtttacata

SEQ ID NO: 146193 - DNA, 19 bp, Homo sapiens
  siRNA target sequence for FLRT1 (NM_013280.3,520-538).
gcgacaacggcttcatcta

SEQ ID NO: 146194 - DNA, 19 bp, Homo sapiens
  siRNA target sequence for FLRT1 (NM_013280.3,559-577).
catccatccccgcagatat

SEQ ID NO: 146195 - DNA, 19 bp, Homo sapiens
  siRNA target sequence for FLRT1 (NM_013280.3,663-681).
gtgcaggtcatctacctat

SEQ ID NO: 146196 - DNA, 19 bp, Homo sapiens
  siRNA target sequence for FLRT1 (NM_013280.3,1601-1619).
cctccccgactccaacatt

SEQ ID NO: 146197 - DNA, 19 bp, Homo sapiens
  siRNA target sequence for FLRT1 (NM_013280.3,1837-1855).
ccaagtccacctacatcat

SEQ ID NO: 146198 - DNA, 19 bp, Homo sapiens
  siRNA target sequence for FLRT1 (NM_013280.3,2334-2352).
ggcatccccgacatagact

SEQ ID NO: 146199 - DNA, 19 bp, Homo sapiens
  siRNA target sequence for FLRT1 (NM_013280.3,2335-2353).
gcatccccgacatagacta

SEQ ID NO: 146200 - DNA, 19 bp, Homo sapiens
  siRNA target sequence for FLRT3 (NM_013281.2,287-305).
cttcctcatcgggactaaa

SEQ ID NO: 146201 - DNA, 19 bp, Homo sapiens
  siRNA target sequence for FLRT3 (NM_013281.2,333-351).
ctatcagttatggctaaat

SEQ ID NO: 146202 - DNA, 19 bp, Homo sapiens
  siRNA target sequence for FLRT3 (NM_013281.2,370-388).
gctgcgatgcgggtttcat

SEQ ID NO: 146203 - DNA, 19 bp, Homo sapiens
  siRNA target sequence for FLRT3 (NM_013281.2,371-389).
ctgcgatgcgggtttcatt

SEQ ID NO: 146204 - DNA, 19 bp, Homo sapiens
  siRNA target sequence for FLRT3 (NM_013281.2,378-396).
gcgggtttcatttactgta

SEQ ID NO: 146205 - DNA, 19 bp, Homo sapiens
  siRNA target sequence for FLRT3 (NM_013281.2,379-397).
cgggtttcatttactgtaa

SEQ ID NO: 146206 - DNA, 19 bp, Homo sapiens
  siRNA target sequence for FLRT3 (NM_013281.2,483-501).
gggattccttcagatttga

SEQ ID NO: 146207 - DNA, 19 bp, Homo sapiens
  siRNA target sequence for FLRT3 (NM_013281.2,516-534).
gtagaaagaatatacctat

SEQ ID NO: 146208 - DNA, 19 bp, Homo sapiens
  siRNA target sequence for FLRT3 (NM_013281.2,542-560).
cagtttagatgaatttcct

SEQ ID NO: 146209 - DNA, 19 bp, Homo sapiens
  siRNA target sequence for FLRT3 (NM_013281.2,559-577).
ctaccaacctcccaaagta

SEQ ID NO: 146210 - DNA, 19 bp, Homo sapiens
  siRNA target sequence for FLRT3 (NM_013281.2,563-581).
caacctcccaaagtatgta

SEQ ID NO: 146211 - DNA, 19 bp, Homo sapiens
  siRNA target sequence for FLRT3 (NM_013281.2,575-593).
gtatgtaaaagagttacat

SEQ ID NO: 146212 - DNA, 19 bp, Homo sapiens
  siRNA target sequence for FLRT3 (NM_013281.2,647-665).
ctatctggaagaattacat

SEQ ID NO: 146213 - DNA, 19 bp, Homo sapiens
  siRNA target sequence for FLRT3 (NM_013281.2,776-794).
gggtttgcccaggactata

SEQ ID NO: 146214 - DNA, 19 bp, Homo sapiens
  siRNA target sequence for FLRT3 (NM_013281.2,778-796).
gtttgcccaggactataga

SEQ ID NO: 146215 - DNA, 19 bp, Homo sapiens
  siRNA target sequence for FLRT3 (NM_013281.2,782-800).
gcccaggactatagaagaa

SEQ ID NO: 146216 - DNA, 19 bp, Homo sapiens
  siRNA target sequence for FLRT3 (NM_013281.2,798-816).
gaactacgcttggatgata

SEQ ID NO: 146217 - DNA, 19 bp, Homo sapiens
  siRNA target sequence for FLRT3 (NM_013281.2,810-828).
gatgataatcgcatatcca

SEQ ID NO: 146218 - DNA, 19 bp, Homo sapiens
  siRNA target sequence for FLRT3 (NM_013281.2,819-837).
cgcatatccactatttcat

SEQ ID NO: 146219 - DNA, 19 bp, Homo sapiens
  siRNA target sequence for FLRT3 (NM_013281.2,821-839).
catatccactatttcatca

SEQ ID NO: 146220 - DNA, 19 bp, Homo sapiens
  siRNA target sequence for FLRT3 (NM_013281.2,849-867).
caaggtctcactagtctaa

SEQ ID NO: 146221 - DNA, 19 bp, Homo sapiens
  siRNA target sequence for FLRT3 (NM_013281.2,976-994).
ctgctgcaccagtaaacct

SEQ ID NO: 146222 - DNA, 19 bp, Homo sapiens
  siRNA target sequence for FLRT3 (NM_013281.2,1044-1062).
cgggtgcccccaaatgctt

SEQ ID NO: 146223 - DNA, 19 bp, Homo sapiens
  siRNA target sequence for FLRT3 (NM_013281.2,1051-1069).
ccccaaatgctttttctta

SEQ ID NO: 146224 - DNA, 19 bp, Homo sapiens
  siRNA target sequence for FLRT3 (NM_013281.2,1080-1098).
ctctatcgactggatatgt

SEQ ID NO: 146225 - DNA, 19 bp, Homo sapiens
  siRNA target sequence for FLRT3 (NM_013281.2,1086-1104).
cgactggatatgtccaata

SEQ ID NO: 146226 - DNA, 19 bp, Homo sapiens
  siRNA target sequence for FLRT3 (NM_013281.2,1100-1118).
caataataacctaagtaat

SEQ ID NO: 146227 - DNA, 19 bp, Homo sapiens
  siRNA target sequence for FLRT3 (NM_013281.2,1129-1147).
gtatctttgatgatttgga

SEQ ID NO: 146228 - DNA, 19 bp, Homo sapiens
  siRNA target sequence for FLRT3 (NM_013281.2,1137-1155).
gatgatttggacaatataa

SEQ ID NO: 146229 - DNA, 19 bp, Homo sapiens
  siRNA target sequence for FLRT3 (NM_013281.2,1148-1166).
caatataacacaactgatt

SEQ ID NO: 146230 - DNA, 19 bp, Homo sapiens
  siRNA target sequence for FLRT3 (NM_013281.2,1170-1188).
cgcaacaatccctggtatt

SEQ ID NO: 146231 - DNA, 19 bp, Homo sapiens
  siRNA target sequence for FLRT3 (NM_013281.2,1208-1226).
ggtacgtgactggttacaa

SEQ ID NO: 146232 - DNA, 19 bp, Homo sapiens
  siRNA target sequence for FLRT3 (NM_013281.2,1209-1227).
gtacgtgactggttacaat

SEQ ID NO: 146233 - DNA, 19 bp, Homo sapiens
  siRNA target sequence for FLRT3 (NM_013281.2,1213-1231).
gtgactggttacaatcact

SEQ ID NO: 146234 - DNA, 19 bp, Homo sapiens
  siRNA target sequence for FLRT3 (NM_013281.2,1281-1299).
gttcgtgggatggctatta

SEQ ID NO: 146235 - DNA, 19 bp, Homo sapiens
  siRNA target sequence for FLRT3 (NM_013281.2,1285-1303).
gtgggatggctattaagga

SEQ ID NO: 146236 - DNA, 19 bp, Homo sapiens
  siRNA target sequence for FLRT3 (NM_013281.2,1292-1310).
ggctattaaggatctcaat

SEQ ID NO: 146237 - DNA, 19 bp, Homo sapiens
  siRNA target sequence for FLRT3 (NM_013281.2,1307-1325).
caatgcagaactgtttgat

SEQ ID NO: 146238 - DNA, 19 bp, Homo sapiens
  siRNA target sequence for FLRT3 (NM_013281.2,1418-1436).
gaccaaacagccagatatt

SEQ ID NO: 146239 - DNA, 19 bp, Homo sapiens
  siRNA target sequence for FLRT3 (NM_013281.2,1517-1535).
cacctctgataccattcat

SEQ ID NO: 146240 - DNA, 19 bp, Homo sapiens
  siRNA target sequence for FLRT3 (NM_013281.2,1519-1537).
cctctgataccattcatat

SEQ ID NO: 146241 - DNA, 19 bp, Homo sapiens
  siRNA target sequence for FLRT3 (NM_013281.2,1524-1542).
gataccattcatatctctt

SEQ ID NO: 146242 - DNA, 19 bp, Homo sapiens
  siRNA target sequence for FLRT3 (NM_013281.2,1573-1591).
gactcagctggcttaaact

SEQ ID NO: 146243 - DNA, 19 bp, Homo sapiens
  siRNA target sequence for FLRT3 (NM_013281.2,1639-1657).
gggaacgcagtgagtactt

SEQ ID NO: 146244 - DNA, 19 bp, Homo sapiens
  siRNA target sequence for FLRT3 (NM_013281.2,1673-1691).
gcctgattcaccctataaa

SEQ ID NO: 146245 - DNA, 19 bp, Homo sapiens
  siRNA target sequence for FLRT3 (NM_013281.2,1677-1695).
gattcaccctataaagtat

SEQ ID NO: 146246 - DNA, 19 bp, Homo sapiens
  siRNA target sequence for FLRT3 (NM_013281.2,1714-1732).
ccagcaacctctacctatt

SEQ ID NO: 146247 - DNA, 19 bp, Homo sapiens
  siRNA target sequence for FLRT3 (NM_013281.2,1717-1735).
gcaacctctacctatttga

SEQ ID NO: 146248 - DNA, 19 bp, Homo sapiens
  siRNA target sequence for FLRT3 (NM_013281.2,1718-1736).
caacctctacctatttgat

SEQ ID NO: 146249 - DNA, 19 bp, Homo sapiens
  siRNA target sequence for FLRT3 (NM_013281.2,1721-1739).
cctctacctatttgatgaa

SEQ ID NO: 146250 - DNA, 19 bp, Homo sapiens
  siRNA target sequence for FLRT3 (NM_013281.2,1724-1742).
ctacctatttgatgaaact

SEQ ID NO: 146251 - DNA, 19 bp, Homo sapiens
  siRNA target sequence for FLRT3 (NM_013281.2,1765-1783).
ctgcaccccttcgaatgta

SEQ ID NO: 146252 - DNA, 19 bp, Homo sapiens
  siRNA target sequence for FLRT3 (NM_013281.2,1825-1843).
cttacaaaaaccccaattt

SEQ ID NO: 146253 - DNA, 19 bp, Homo sapiens
  siRNA target sequence for FLRT3 (NM_013281.2,1890-1908).
gcccttcttgctttagtgt

SEQ ID NO: 146254 - DNA, 19 bp, Homo sapiens
  siRNA target sequence for FLRT3 (NM_013281.2,1940-1958).
ctcaaggaactgtgcatat

SEQ ID NO: 146255 - DNA, 19 bp, Homo sapiens
  siRNA target sequence for FLRT3 (NM_013281.2,1946-1964).
gaactgtgcatatagcaaa

SEQ ID NO: 146256 - DNA, 19 bp, Homo sapiens
  siRNA target sequence for FLRT3 (NM_013281.2,1970-1988).
gagaagaaaggatgactat

SEQ ID NO: 146257 - DNA, 19 bp, Homo sapiens
  siRNA target sequence for FLRT3 (NM_013281.2,2032-2050).
gggaaacttcttttcagat

SEQ ID NO: 146258 - DNA, 19 bp, Homo sapiens
  siRNA target sequence for FLRT3 (NM_013281.2,2046-2064).
cagatgttaccaataagca

SEQ ID NO: 146259 - DNA, 19 bp, Homo sapiens
  siRNA target sequence for FLRT3 (NM_013281.2,2075-2093).
ctcgaaggaggagtttgta

SEQ ID NO: 146260 - DNA, 19 bp, Homo sapiens
  siRNA target sequence for FLRT3 (NM_013281.2,2077-2095).
cgaaggaggagtttgtaat

SEQ ID NO: 146261 - DNA, 19 bp, Homo sapiens
  siRNA target sequence for FLRT3 (NM_013281.2,2112-2130).
cctaatggaatgaatctgt

SEQ ID NO: 146262 - DNA, 19 bp, Homo sapiens
  siRNA target sequence for FLRT3 (NM_013281.2,2113-2131).
ctaatggaatgaatctgta

SEQ ID NO: 146263 - DNA, 19 bp, Homo sapiens
  siRNA target sequence for FLRT3 (NM_013281.2,2127-2145).
ctgtacaaaaacaatcaca

SEQ ID NO: 146264 - DNA, 19 bp, Homo sapiens
  siRNA target sequence for FRAS1 (NM_025074.2,63-81).
cctagcgttggcggaattt

SEQ ID NO: 146265 - DNA, 19 bp, Homo sapiens
  siRNA target sequence for FRAS1 (NM_025074.2,82-100).
gcagtattgcctcatcatt

SEQ ID NO: 146266 - DNA, 19 bp, Homo sapiens
  siRNA target sequence for FRAS1 (NM_025074.2,132-150).
gttggcggatgccacaatt

SEQ ID NO: 146267 - DNA, 19 bp, Homo sapiens
  siRNA target sequence for FRAS1 (NM_025074.2,136-154).
gcggatgccacaatttgga

SEQ ID NO: 146268 - DNA, 19 bp, Homo sapiens
  siRNA target sequence for FRAS1 (NM_025074.2,137-155).
cggatgccacaatttggaa

SEQ ID NO: 146269 - DNA, 19 bp, Homo sapiens
  siRNA target sequence for FRAS1 (NM_025074.2,177-195).
ccgttgccatggtgatatt

SEQ ID NO: 146270 - DNA, 19 bp, Homo sapiens
  siRNA target sequence for FRAS1 (NM_025074.2,226-244).
cctcaatgtgcctttgaga

SEQ ID NO: 146271 - DNA, 19 bp, Homo sapiens
  siRNA target sequence for FRAS1 (NM_025074.2,259-277).
caaatagctgccaaccaat

SEQ ID NO: 146272 - DNA, 19 bp, Homo sapiens
  siRNA target sequence for FRAS1 (NM_025074.2,308-326).
gatcttgccatcatgaaaa

SEQ ID NO: 146273 - DNA, 19 bp, Homo sapiens
  siRNA target sequence for FRAS1 (NM_025074.2,334-352).
catgagcatgggacagaat

SEQ ID NO: 146274 - DNA, 19 bp, Homo sapiens
  siRNA target sequence for FRAS1 (NM_025074.2,509-527).
cctatgaaggccatgtgtt

SEQ ID NO: 146275 - DNA, 19 bp, Homo sapiens
  siRNA target sequence for FRAS1 (NM_025074.2,510-528).
ctatgaaggccatgtgttt

SEQ ID NO: 146276 - DNA, 19 bp, Homo sapiens
  siRNA target sequence for FRAS1 (NM_025074.2,554-572).
gccggtgtgccaaatgtct

SEQ ID NO: 146277 - DNA, 19 bp, Homo sapiens
  siRNA target sequence for FRAS1 (NM_025074.2,562-580).
gccaaatgtctgtgtagaa

SEQ ID NO: 146278 - DNA, 19 bp, Homo sapiens
  siRNA target sequence for FRAS1 (NM_025074.2,742-760).
gcctgcaccacgtgtatat

SEQ ID NO: 146279 - DNA, 19 bp, Homo sapiens
  siRNA target sequence for FRAS1 (NM_025074.2,744-762).
ctgcaccacgtgtatatgt

SEQ ID NO: 146280 - DNA, 19 bp, Homo sapiens
  siRNA target sequence for FRAS1 (NM_025074.2,746-764).
gcaccacgtgtatatgtga

SEQ ID NO: 146281 - DNA, 19 bp, Homo sapiens
  siRNA target sequence for FRAS1 (NM_025074.2,1010-1028).
gggatgaagaattaattca

SEQ ID NO: 146282 - DNA, 19 bp, Homo sapiens
  siRNA target sequence for FRAS1 (NM_025074.2,1055-1073).
gcatttcaaggaatggtta

SEQ ID NO: 146283 - DNA, 19 bp, Homo sapiens
  siRNA target sequence for FRAS1 (NM_025074.2,1064-1082).
ggaatggttattgtgttta

SEQ ID NO: 146284 - DNA, 19 bp, Homo sapiens
  siRNA target sequence for FRAS1 (NM_025074.2,1093-1111).
ggagaatttatgtcatcaa

SEQ ID NO: 146285 - DNA, 19 bp, Homo sapiens
  siRNA target sequence for FRAS1 (NM_025074.2,1114-1132).
gctagtgaagttaaacgta

SEQ ID NO: 146286 - DNA, 19 bp, Homo sapiens
  siRNA target sequence for FRAS1 (NM_025074.2,1183-1201).
cgaggggctcaggtaactt

SEQ ID NO: 146287 - DNA, 19 bp, Homo sapiens
  siRNA target sequence for FRAS1 (NM_025074.2,1288-1306).
cattgccatccagattgtt

SEQ ID NO: 146288 - DNA, 19 bp, Homo sapiens
  siRNA target sequence for FRAS1 (NM_025074.2,1293-1311).
ccatccagattgtttgaca

SEQ ID NO: 146289 - DNA, 19 bp, Homo sapiens
  siRNA target sequence for FRAS1 (NM_025074.2,1833-1851).
cactggcaggtgcaaagtt

SEQ ID NO: 146290 - DNA, 19 bp, Homo sapiens
  siRNA target sequence for FRAS1 (NM_025074.2,1838-1856).
gcaggtgcaaagtttgtca

SEQ ID NO: 146291 - DNA, 19 bp, Homo sapiens
  siRNA target sequence for FRAS1 (NM_025074.2,1949-1967).
gctgtggagagggtttcta

SEQ ID NO: 146292 - DNA, 19 bp, Homo sapiens
  siRNA target sequence for FRAS1 (NM_025074.2,2035-2053).
cactgtactgggtgtaaga

SEQ ID NO: 146293 - DNA, 19 bp, Homo sapiens
  siRNA target sequence for FRAS1 (NM_025074.2,2126-2144).
gtagagcccatttttactt

SEQ ID NO: 146294 - DNA, 19 bp, Homo sapiens
  siRNA target sequence for FRAS1 (NM_025074.2,2430-2448).
caacctcgtgggatactgt

SEQ ID NO: 146295 - DNA, 19 bp, Homo sapiens
  siRNA target sequence for FRAS1 (NM_025074.2,2715-2733).
ccctgggcactatcttgat

SEQ ID NO: 146296 - DNA, 19 bp, Homo sapiens
  siRNA target sequence for FRAS1 (NM_025074.2,2721-2739).
gcactatcttgatgacaat

SEQ ID NO: 146297 - DNA, 19 bp, Homo sapiens
  siRNA target sequence for FRAS1 (NM_025074.2,2764-2782).
cactgtggaagctgtgatt

SEQ ID NO: 146298 - DNA, 19 bp, Homo sapiens
  siRNA target sequence for FRAS1 (NM_025074.2,2798-2816).
cctcctgccgagatccaaa

SEQ ID NO: 146299 - DNA, 19 bp, Homo sapiens
  siRNA target sequence for FRAS1 (NM_025074.2,2801-2819).
cctgccgagatccaaacaa

SEQ ID NO: 146300 - DNA, 19 bp, Homo sapiens
  siRNA target sequence for FRAS1 (NM_025074.2,2858-2876).
ccccacagtactatcttga

SEQ ID NO: 146301 - DNA, 19 bp, Homo sapiens
  siRNA target sequence for FRAS1 (NM_025074.2,3256-3274).
ggcctctgtgtttacaact

SEQ ID NO: 146302 - DNA, 19 bp, Homo sapiens
  siRNA target sequence for FRAS1 (NM_025074.2,3294-3312).
ccacacctctaatgaaaca

SEQ ID NO: 146303 - DNA, 19 bp, Homo sapiens
  siRNA target sequence for FRAS1 (NM_025074.2,3295-3313).
cacacctctaatgaaacat

SEQ ID NO: 146304 - DNA, 19 bp, Homo sapiens
  siRNA target sequence for FRAS1 (NM_025074.2,3297-3315).
cacctctaatgaaacatgt

SEQ ID NO: 146305 - DNA, 19 bp, Homo sapiens
  siRNA target sequence for FRAS1 (NM_025074.2,3311-3329).
catgttctggcaaaataca

SEQ ID NO: 146306 - DNA, 19 bp, Homo sapiens
  siRNA target sequence for FRAS1 (NM_025074.2,3333-3351).
ccctagtcttcatgtgaat

SEQ ID NO: 146307 - DNA, 19 bp, Homo sapiens
  siRNA target sequence for FRAS1 (NM_025074.2,3363-3381).
cctcccaattggttcaata

SEQ ID NO: 146308 - DNA, 19 bp, Homo sapiens
  siRNA target sequence for FRAS1 (NM_025074.2,3364-3382).
ctcccaattggttcaataa

SEQ ID NO: 146309 - DNA, 19 bp, Homo sapiens
  siRNA target sequence for FRAS1 (NM_025074.2,3428-3446).
gggtcgaagatctcctatt

SEQ ID NO: 146310 - DNA, 19 bp, Homo sapiens
  siRNA target sequence for FRAS1 (NM_025074.2,3432-3450).
cgaagatctcctatttcat

SEQ ID NO: 146311 - DNA, 19 bp, Homo sapiens
  siRNA target sequence for FRAS1 (NM_025074.2,3514-3532).
gacaaggctggccgtttta

SEQ ID NO: 146312 - DNA, 19 bp, Homo sapiens
  siRNA target sequence for FRAS1 (NM_025074.2,3527-3545).
gttttagctggaaagatgt

SEQ ID NO: 146313 - DNA, 19 bp, Homo sapiens
  siRNA target sequence for FRAS1 (NM_025074.2,3580-3598).
gaaaaactcaggaaaggtt

SEQ ID NO: 146314 - DNA, 19 bp, Homo sapiens
  siRNA target sequence for FRAS1 (NM_025074.2,3637-3655).
gagccacagctgatcaaca

SEQ ID NO: 146315 - DNA, 19 bp, Homo sapiens
  siRNA target sequence for FRAS1 (NM_025074.2,3648-3666).
gatcaacatacaagcattt

SEQ ID NO: 146316 - DNA, 19 bp, Homo sapiens
  siRNA target sequence for FRAS1 (NM_025074.2,3697-3715).
gaagttctccacattagca

SEQ ID NO: 146317 - DNA, 19 bp, Homo sapiens
  siRNA target sequence for FRAS1 (NM_025074.2,3737-3755).
ccacccagatgcttgacat

SEQ ID NO: 146318 - DNA, 19 bp, Homo sapiens
  siRNA target sequence for FRAS1 (NM_025074.2,3777-3795).
ggatgtggtcattgaaata

SEQ ID NO: 146319 - DNA, 19 bp, Homo sapiens
  siRNA target sequence for FRAS1 (NM_025074.2,3806-3824).
cacttcatggccaattgct

SEQ ID NO: 146320 - DNA, 19 bp, Homo sapiens
  siRNA target sequence for FRAS1 (NM_025074.2,3842-3860).
cggcaacccctatctatca

SEQ ID NO: 146321 - DNA, 19 bp, Homo sapiens
  siRNA target sequence for FRAS1 (NM_025074.2,3843-3861).
ggcaacccctatctatcaa

SEQ ID NO: 146322 - DNA, 19 bp, Homo sapiens
  siRNA target sequence for FRAS1 (NM_025074.2,3844-3862).
gcaacccctatctatcaat

SEQ ID NO: 146323 - DNA, 19 bp, Homo sapiens
  siRNA target sequence for FRAS1 (NM_025074.2,3848-3866).
cccctatctatcaattcca

SEQ ID NO: 146324 - DNA, 19 bp, Homo sapiens
  siRNA target sequence for FRAS1 (NM_025074.2,4018-4036).
cagcttgtggctaattcga

SEQ ID NO: 146325 - DNA, 19 bp, Homo sapiens
  siRNA target sequence for FRAS1 (NM_025074.2,4122-4140).
catctacaagattacacaa

SEQ ID NO: 146326 - DNA, 19 bp, Homo sapiens
  siRNA target sequence for FRAS1 (NM_025074.2,4161-4179).
ggtggtccttctagtgaat

SEQ ID NO: 146327 - DNA, 19 bp, Homo sapiens
  siRNA target sequence for FRAS1 (NM_025074.2,4162-4180).
gtggtccttctagtgaata

SEQ ID NO: 146328 - DNA, 19 bp, Homo sapiens
  siRNA target sequence for FRAS1 (NM_025074.2,4366-4384).
ctggagagccacatgttca

SEQ ID NO: 146329 - DNA, 19 bp, Homo sapiens
  siRNA target sequence for FRAS1 (NM_025074.2,4380-4398).
gttcaacatcgcgatctta

SEQ ID NO: 146330 - DNA, 19 bp, Homo sapiens
  siRNA target sequence for FRAS1 (NM_025074.2,4408-4426).
cctgaagcacctaaagtgt

SEQ ID NO: 146331 - DNA, 19 bp, Homo sapiens
  siRNA target sequence for FRAS1 (NM_025074.2,4443-4461).
ccatatgactgctagagaa

SEQ ID NO: 146332 - DNA, 19 bp, Homo sapiens
  siRNA target sequence for FRAS1 (NM_025074.2,4523-4541).
gaaagattgtctacaacat

SEQ ID NO: 146333 - DNA, 19 bp, Homo sapiens
  siRNA target sequence for FRAS1 (NM_025074.2,4616-4634).
cgcaagaggatattaacca

SEQ ID NO: 146334 - DNA, 19 bp, Homo sapiens
  siRNA target sequence for FRAS1 (NM_025074.2,4728-4746).
ccacttcacagtttcagat

SEQ ID NO: 146335 - DNA, 19 bp, Homo sapiens
  siRNA target sequence for FRAS1 (NM_025074.2,4770-4788).
ggtcctcaccattcactta

SEQ ID NO: 146336 - DNA, 19 bp, Homo sapiens
  siRNA target sequence for FRAS1 (NM_025074.2,4773-4791).
cctcaccattcacttactt

SEQ ID NO: 146337 - DNA, 19 bp, Homo sapiens
  siRNA target sequence for FRAS1 (NM_025074.2,5173-5191).
ggctcctctctgagcatta

SEQ ID NO: 146338 - DNA, 19 bp, Homo sapiens
  siRNA target sequence for FRAS1 (NM_025074.2,5233-5251).
cttgcttacgtggatgatt

SEQ ID NO: 146339 - DNA, 19 bp, Homo sapiens
  siRNA target sequence for FRAS1 (NM_025074.2,5264-5282).
cagagatctggattcagtt

SEQ ID NO: 146340 - DNA, 19 bp, Homo sapiens
  siRNA target sequence for FRAS1 (NM_025074.2,5295-5313).
ctcatatggtactctctta

SEQ ID NO: 146341 - DNA, 19 bp, Homo sapiens
  siRNA target sequence for FRAS1 (NM_025074.2,5361-5379).
cacaatggaagacatcaat

SEQ ID NO: 146342 - DNA, 19 bp, Homo sapiens
  siRNA target sequence for FRAS1 (NM_025074.2,5391-5409).
cagatactcagctgtgttt

SEQ ID NO: 146343 - DNA, 19 bp, Homo sapiens
  siRNA target sequence for FRAS1 (NM_025074.2,5393-5411).
gatactcagctgtgtttga

SEQ ID NO: 146344 - DNA, 19 bp, Homo sapiens
  siRNA target sequence for FRAS1 (NM_025074.2,5399-5417).
cagctgtgtttgaaactga

SEQ ID NO: 146345 - DNA, 19 bp, Homo sapiens
  siRNA target sequence for FRAS1 (NM_025074.2,5427-5445).
ggttactgatagcttctat

SEQ ID NO: 146346 - DNA, 19 bp, Homo sapiens
  siRNA target sequence for FRAS1 (NM_025074.2,5571-5589).
gagagcaccactctcattt

SEQ ID NO: 146347 - DNA, 19 bp, Homo sapiens
  siRNA target sequence for FRAS1 (NM_025074.2,5630-5648).
gagatgccatcattaaact

SEQ ID NO: 146348 - DNA, 19 bp, Homo sapiens
  siRNA target sequence for FRAS1 (NM_025074.2,5632-5650).
gatgccatcattaaactaa

SEQ ID NO: 146349 - DNA, 19 bp, Homo sapiens
  siRNA target sequence for FRAS1 (NM_025074.2,5720-5738).
gtgacctagaggcatcatt

SEQ ID NO: 146350 - DNA, 19 bp, Homo sapiens
  siRNA target sequence for FRAS1 (NM_025074.2,5749-5767).
gacgtcctggaaaactaca

SEQ ID NO: 146351 - DNA, 19 bp, Homo sapiens
  siRNA target sequence for FRAS1 (NM_025074.2,5751-5769).
cgtcctggaaaactacatt

SEQ ID NO: 146352 - DNA, 19 bp, Homo sapiens
  siRNA target sequence for FRAS1 (NM_025074.2,5752-5770).
gtcctggaaaactacattt

SEQ ID NO: 146353 - DNA, 19 bp, Homo sapiens
  siRNA target sequence for FRAS1 (NM_025074.2,5800-5818).
gagccaacccatgatattt

SEQ ID NO: 146354 - DNA, 19 bp, Homo sapiens
  siRNA target sequence for FRAS1 (NM_025074.2,5802-5820).
gccaacccatgatattttt

SEQ ID NO: 146355 - DNA, 19 bp, Homo sapiens
  siRNA target sequence for FRAS1 (NM_025074.2,5803-5821).
ccaacccatgatattttta

SEQ ID NO: 146356 - DNA, 19 bp, Homo sapiens
  siRNA target sequence for FRAS1 (NM_025074.2,5839-5857).
ggaaccagtcgttcagaaa

SEQ ID NO: 146357 - DNA, 19 bp, Homo sapiens
  siRNA target sequence for FRAS1 (NM_025074.2,5840-5858).
gaaccagtcgttcagaaat

SEQ ID NO: 146358 - DNA, 19 bp, Homo sapiens
  siRNA target sequence for FRAS1 (NM_025074.2,5843-5861).
ccagtcgttcagaaattca

SEQ ID NO: 146359 - DNA, 19 bp, Homo sapiens
  siRNA target sequence for FRAS1 (NM_025074.2,5942-5960).
cgggagtggtgataagcaa

SEQ ID NO: 146360 - DNA, 19 bp, Homo sapiens
  siRNA target sequence for FRAS1 (NM_025074.2,5943-5961).
gggagtggtgataagcaat

SEQ ID NO: 146361 - DNA, 19 bp, Homo sapiens
  siRNA target sequence for FRAS1 (NM_025074.2,5944-5962).
ggagtggtgataagcaatt

SEQ ID NO: 146362 - DNA, 19 bp, Homo sapiens
  siRNA target sequence for FRAS1 (NM_025074.2,5950-5968).
gtgataagcaattcttctt

SEQ ID NO: 146363 - DNA, 19 bp, Homo sapiens
  siRNA target sequence for FRAS1 (NM_025074.2,5982-6000).
cctggacaccccagataat

SEQ ID NO: 146364 - DNA, 19 bp, Homo sapiens
  siRNA target sequence for FRAS1 (NM_025074.2,6027-6045).
gcctgaccacggtcatgta

SEQ ID NO: 146365 - DNA, 19 bp, Homo sapiens
  siRNA target sequence for FRAS1 (NM_025074.2,6164-6182).
gcatggtcgtggatgagtt

SEQ ID NO: 146366 - DNA, 19 bp, Homo sapiens
  siRNA target sequence for FRAS1 (NM_025074.2,6320-6338).
cagaacagcacttgaaagt

SEQ ID NO: 146367 - DNA, 19 bp, Homo sapiens
  siRNA target sequence for FRAS1 (NM_025074.2,6358-6376).
gaccatcaggttatgtaca

SEQ ID NO: 146368 - DNA, 19 bp, Homo sapiens
  siRNA target sequence for FRAS1 (NM_025074.2,6451-6469).
ggccccatccgaagtttca

SEQ ID NO: 146369 - DNA, 19 bp, Homo sapiens
  siRNA target sequence for FRAS1 (NM_025074.2,6485-6503).
gccaaggtcagccagaata

SEQ ID NO: 146370 - DNA, 19 bp, Homo sapiens
  siRNA target sequence for FRAS1 (NM_025074.2,6491-6509).
gtcagccagaatatagtca

SEQ ID NO: 146371 - DNA, 19 bp, Homo sapiens
  siRNA target sequence for FRAS1 (NM_025074.2,6527-6545).
gagggagctttgcttttaa

SEQ ID NO: 146372 - DNA, 19 bp, Homo sapiens
  siRNA target sequence for FRAS1 (NM_025074.2,6562-6580).
ggagaaggcaacagattga

SEQ ID NO: 146373 - DNA, 19 bp, Homo sapiens
  siRNA target sequence for FRAS1 (NM_025074.2,6569-6587).
gcaacagattgattgacaa

SEQ ID NO: 146374 - DNA, 19 bp, Homo sapiens
  siRNA target sequence for FRAS1 (NM_025074.2,6626-6644).
cagtcatcaccaccaataa

SEQ ID NO: 146375 - DNA, 19 bp, Homo sapiens
  siRNA target sequence for FRAS1 (NM_025074.2,6649-6667).
ctggtcttggatgaaaact

SEQ ID NO: 146376 - DNA, 19 bp, Homo sapiens
  siRNA target sequence for FRAS1 (NM_025074.2,6716-6734).
gtgggcctacagaattgat

SEQ ID NO: 146377 - DNA, 19 bp, Homo sapiens
  siRNA target sequence for FRAS1 (NM_025074.2,6718-6736).
gggcctacagaattgatct

SEQ ID NO: 146378 - DNA, 19 bp, Homo sapiens
  siRNA target sequence for FRAS1 (NM_025074.2,6719-6737).
ggcctacagaattgatcta

SEQ ID NO: 146379 - DNA, 19 bp, Homo sapiens
  siRNA target sequence for FRAS1 (NM_025074.2,6725-6743).
cagaattgatctacagaat

SEQ ID NO: 146380 - DNA, 19 bp, Homo sapiens
  siRNA target sequence for FRAS1 (NM_025074.2,6795-6813).
ccagattagttcctttact

SEQ ID NO: 146381 - DNA, 19 bp, Homo sapiens
  siRNA target sequence for FRAS1 (NM_025074.2,6798-6816).
gattagttcctttactcaa

SEQ ID NO: 146382 - DNA, 19 bp, Homo sapiens
  siRNA target sequence for FRAS1 (NM_025074.2,6827-6845).
cttcacgaaatgttcagta

SEQ ID NO: 146383 - DNA, 19 bp, Homo sapiens
  siRNA target sequence for FRAS1 (NM_025074.2,6830-6848).
cacgaaatgttcagtatgt

SEQ ID NO: 146384 - DNA, 19 bp, Homo sapiens
  siRNA target sequence for FRAS1 (NM_025074.2,6911-6929).
gtgaggtgactcagacttt

SEQ ID NO: 146385 - DNA, 19 bp, Homo sapiens
  siRNA target sequence for FRAS1 (NM_025074.2,6963-6981).
gcccgtcgtacagaactta

SEQ ID NO: 146386 - DNA, 19 bp, Homo sapiens
  siRNA target sequence for FRAS1 (NM_025074.2,7219-7237).
cggttcaccttcactgttt

SEQ ID NO: 146387 - DNA, 19 bp, Homo sapiens
  siRNA target sequence for FRAS1 (NM_025074.2,7221-7239).
gttcaccttcactgtttct

SEQ ID NO: 146388 - DNA, 19 bp, Homo sapiens
  siRNA target sequence for FRAS1 (NM_025074.2,7320-7338).
catcctcccggtagatgat

SEQ ID NO: 146389 - DNA, 19 bp, Homo sapiens
  siRNA target sequence for FRAS1 (NM_025074.2,7452-7470).
ggacgcgcagcttgtctat

SEQ ID NO: 146390 - DNA, 19 bp, Homo sapiens
  siRNA target sequence for FRAS1 (NM_025074.2,7456-7474).
gcgcagcttgtctatgaga

SEQ ID NO: 146391 - DNA, 19 bp, Homo sapiens
  siRNA target sequence for FRAS1 (NM_025074.2,7564-7582).
gggttgattcgttatgtgt

SEQ ID NO: 146392 - DNA, 19 bp, Homo sapiens
  siRNA target sequence for FRAS1 (NM_025074.2,7565-7583).
ggttgattcgttatgtgtt

SEQ ID NO: 146393 - DNA, 19 bp, Homo sapiens
  siRNA target sequence for FRAS1 (NM_025074.2,7651-7669).
gtggtcagcgacaatgtct

SEQ ID NO: 146394 - DNA, 19 bp, Homo sapiens
  siRNA target sequence for FRAS1 (NM_025074.2,7658-7676).
gcgacaatgtcttccatat

SEQ ID NO: 146395 - DNA, 19 bp, Homo sapiens
  siRNA target sequence for FRAS1 (NM_025074.2,7683-7701).
gtcactcatcagctttaaa

SEQ ID NO: 146396 - DNA, 19 bp, Homo sapiens
  siRNA target sequence for FRAS1 (NM_025074.2,7760-7778).
ctgggaacctgaaccaata

SEQ ID NO: 146397 - DNA, 19 bp, Homo sapiens
  siRNA target sequence for FRAS1 (NM_025074.2,7835-7853).
ggcaacaggactatgtaga

SEQ ID NO: 146398 - DNA, 19 bp, Homo sapiens
  siRNA target sequence for FRAS1 (NM_025074.2,7978-7996).
gccctgttaggggaattca

SEQ ID NO: 146399 - DNA, 19 bp, Homo sapiens
  siRNA target sequence for FRAS1 (NM_025074.2,7997-8015).
cccaggcgaaggtcattat

SEQ ID NO: 146400 - DNA, 19 bp, Homo sapiens
  siRNA target sequence for FRAS1 (NM_025074.2,7999-8017).
caggcgaaggtcattatca

SEQ ID NO: 146401 - DNA, 19 bp, Homo sapiens
  siRNA target sequence for FRAS1 (NM_025074.2,8076-8094).
gagcgctggttttctgttt

SEQ ID NO: 146402 - DNA, 19 bp, Homo sapiens
  siRNA target sequence for FRAS1 (NM_025074.2,8145-8163).
ctacacagtccctaagtca

SEQ ID NO: 146403 - DNA, 19 bp, Homo sapiens
  siRNA target sequence for FRAS1 (NM_025074.2,8227-8245).
gccgcgagtcgtgtgatat

SEQ ID NO: 146404 - DNA, 19 bp, Homo sapiens
  siRNA target sequence for FRAS1 (NM_025074.2,8228-8246).
ccgcgagtcgtgtgatatt

SEQ ID NO: 146405 - DNA, 19 bp, Homo sapiens
  siRNA target sequence for FRAS1 (NM_025074.2,8424-8442).
gggcaacacggctttcact

SEQ ID NO: 146406 - DNA, 19 bp, Homo sapiens
  siRNA target sequence for FRAS1 (NM_025074.2,8449-8467).
gaggacgcaggcacagtaa

SEQ ID NO: 146407 - DNA, 19 bp, Homo sapiens
  siRNA target sequence for FRAS1 (NM_025074.2,8462-8480).
cagtaaagattccagttat

SEQ ID NO: 146408 - DNA, 19 bp, Homo sapiens
  siRNA target sequence for FRAS1 (NM_025074.2,8552-8570).
ccacaccaggagttgacta

SEQ ID NO: 146409 - DNA, 19 bp, Homo sapiens
  siRNA target sequence for FRAS1 (NM_025074.2,8600-8618).
ggcctggtgtcattgaaca

SEQ ID NO: 146410 - DNA, 19 bp, Homo sapiens
  siRNA target sequence for FRAS1 (NM_025074.2,8603-8621).
ctggtgtcattgaacagta

SEQ ID NO: 146411 - DNA, 19 bp, Homo sapiens
  siRNA target sequence for FRAS1 (NM_025074.2,8637-8655).
cttggatgacactcagtat

SEQ ID NO: 146412 - DNA, 19 bp, Homo sapiens
  siRNA target sequence for FRAS1 (NM_025074.2,8646-8664).
cactcagtatccggtaatt

SEQ ID NO: 146413 - DNA, 19 bp, Homo sapiens
  siRNA target sequence for FRAS1 (NM_025074.2,8648-8666).
ctcagtatccggtaattga

SEQ ID NO: 146414 - DNA, 19 bp, Homo sapiens
  siRNA target sequence for FRAS1 (NM_025074.2,8731-8749).
caggcagtcattgcaatta

SEQ ID NO: 146415 - DNA, 19 bp, Homo sapiens
  siRNA target sequence for FRAS1 (NM_025074.2,8848-8866).
ggagacctgagctatgagt

SEQ ID NO: 146416 - DNA, 19 bp, Homo sapiens
  siRNA target sequence for FRAS1 (NM_025074.2,8870-8888).
cagtgaggtgctatactca

SEQ ID NO: 146417 - DNA, 19 bp, Homo sapiens
  siRNA target sequence for FRAS1 (NM_025074.2,8942-8960).
cttcacggattacatttct

SEQ ID NO: 146418 - DNA, 19 bp, Homo sapiens
  siRNA target sequence for FRAS1 (NM_025074.2,8945-8963).
cacggattacatttctcaa

SEQ ID NO: 146419 - DNA, 19 bp, Homo sapiens
  siRNA target sequence for FRAS1 (NM_025074.2,8997-9015).
ccacgatgactccatgttt

SEQ ID NO: 146420 - DNA, 19 bp, Homo sapiens
  siRNA target sequence for FRAS1 (NM_025074.2,9076-9094).
gctagaattggaaagaata

SEQ ID NO: 146421 - DNA, 19 bp, Homo sapiens
  siRNA target sequence for FRAS1 (NM_025074.2,9077-9095).
ctagaattggaaagaataa

SEQ ID NO: 146422 - DNA, 19 bp, Homo sapiens
  siRNA target sequence for FRAS1 (NM_025074.2,9131-9149).
cccccaccattgagtttga

SEQ ID NO: 146423 - DNA, 19 bp, Homo sapiens
  siRNA target sequence for FRAS1 (NM_025074.2,9134-9152).
ccaccattgagtttgaaga

SEQ ID NO: 146424 - DNA, 19 bp, Homo sapiens
  siRNA target sequence for FRAS1 (NM_025074.2,9191-9209).
ccattgcgattctgaacat

SEQ ID NO: 146425 - DNA, 19 bp, Homo sapiens
  siRNA target sequence for FRAS1 (NM_025074.2,9278-9296).
cccagtctggtgtggatta

SEQ ID NO: 146426 - DNA, 19 bp, Homo sapiens
  siRNA target sequence for FRAS1 (NM_025074.2,9326-9344).
gtcccggtgtggatcatat

SEQ ID NO: 146427 - DNA, 19 bp, Homo sapiens
  siRNA target sequence for FRAS1 (NM_025074.2,9328-9346).
cccggtgtggatcatatct

SEQ ID NO: 146428 - DNA, 19 bp, Homo sapiens
  siRNA target sequence for FRAS1 (NM_025074.2,9329-9347).
ccggtgtggatcatatctt

SEQ ID NO: 146429 - DNA, 19 bp, Homo sapiens
  siRNA target sequence for FRAS1 (NM_025074.2,9330-9348).
cggtgtggatcatatcttt

SEQ ID NO: 146430 - DNA, 19 bp, Homo sapiens
  siRNA target sequence for FRAS1 (NM_025074.2,9376-9394).
gaccgggaatggcatgaat

SEQ ID NO: 146431 - DNA, 19 bp, Homo sapiens
  siRNA target sequence for FRAS1 (NM_025074.2,9378-9396).
ccgggaatggcatgaatct

SEQ ID NO: 146432 - DNA, 19 bp, Homo sapiens
  siRNA target sequence for FRAS1 (NM_025074.2,9379-9397).
cgggaatggcatgaatctt

SEQ ID NO: 146433 - DNA, 19 bp, Homo sapiens
  siRNA target sequence for FRAS1 (NM_025074.2,9380-9398).
gggaatggcatgaatcttt

SEQ ID NO: 146434 - DNA, 19 bp, Homo sapiens
  siRNA target sequence for FRAS1 (NM_025074.2,9423-9441).
cccagtggaagcagttctt

SEQ ID NO: 146435 - DNA, 19 bp, Homo sapiens
  siRNA target sequence for FRAS1 (NM_025074.2,9455-9473).
ctgccacggtgacaattct

SEQ ID NO: 146436 - DNA, 19 bp, Homo sapiens
  siRNA target sequence for FRAS1 (NM_025074.2,9458-9476).
ccacggtgacaattctaga

SEQ ID NO: 146437 - DNA, 19 bp, Homo sapiens
  siRNA target sequence for FRAS1 (NM_025074.2,9485-9503).
cagcagggagcctcatatt

SEQ ID NO: 146438 - DNA, 19 bp, Homo sapiens
  siRNA target sequence for FRAS1 (NM_025074.2,9522-9540).
ggtcacacttgctgactat

SEQ ID NO: 146439 - DNA, 19 bp, Homo sapiens
  siRNA target sequence for FRAS1 (NM_025074.2,9614-9632).
ccccctgcgaccctcattt

SEQ ID NO: 146440 - DNA, 19 bp, Homo sapiens
  siRNA target sequence for FRAS1 (NM_025074.2,9740-9758).
ggtctccctttgaaaccat

SEQ ID NO: 146441 - DNA, 19 bp, Homo sapiens
  siRNA target sequence for FRAS1 (NM_025074.2,9796-9814).
gtcctggacagcatttact

SEQ ID NO: 146442 - DNA, 19 bp, Homo sapiens
  siRNA target sequence for FRAS1 (NM_025074.2,9871-9889).
gtggggacccccttaagga

SEQ ID NO: 146443 - DNA, 19 bp, Homo sapiens
  siRNA target sequence for FRAS1 (NM_025074.2,9881-9899).
ccttaaggagcaacattgt

SEQ ID NO: 146444 - DNA, 19 bp, Homo sapiens
  siRNA target sequence for FRAS1 (NM_025074.2,9882-9900).
cttaaggagcaacattgtt

SEQ ID NO: 146445 - DNA, 19 bp, Homo sapiens
  siRNA target sequence for FRAS1 (NM_025074.2,9887-9905).
ggagcaacattgttaccat

SEQ ID NO: 146446 - DNA, 19 bp, Homo sapiens
  siRNA target sequence for FRAS1 (NM_025074.2,10089-10107).
gccgttgcacaacttacat

SEQ ID NO: 146447 - DNA, 19 bp, Homo sapiens
  siRNA target sequence for FRAS1 (NM_025074.2,10090-10108).
ccgttgcacaacttacatt

SEQ ID NO: 146448 - DNA, 19 bp, Homo sapiens
  siRNA target sequence for FRAS1 (NM_025074.2,10091-10109).
cgttgcacaacttacattt

SEQ ID NO: 146449 - DNA, 19 bp, Homo sapiens
  siRNA target sequence for FRAS1 (NM_025074.2,10095-10113).
gcacaacttacattttcta

SEQ ID NO: 146450 - DNA, 19 bp, Homo sapiens
  siRNA target sequence for FRAS1 (NM_025074.2,10114-10132).
ctgtctgagtccatctaca

SEQ ID NO: 146451 - DNA, 19 bp, Homo sapiens
  siRNA target sequence for FRAS1 (NM_025074.2,10138-10156).
cagcacgtctgctccaatt

SEQ ID NO: 146452 - DNA, 19 bp, Homo sapiens
  siRNA target sequence for FRAS1 (NM_025074.2,10140-10158).
gcacgtctgctccaattta

SEQ ID NO: 146453 - DNA, 19 bp, Homo sapiens
  siRNA target sequence for FRAS1 (NM_025074.2,10143-10161).
cgtctgctccaatttagtt

SEQ ID NO: 146454 - DNA, 19 bp, Homo sapiens
  siRNA target sequence for FRAS1 (NM_025074.2,10144-10162).
gtctgctccaatttagtta

SEQ ID NO: 146455 - DNA, 19 bp, Homo sapiens
  siRNA target sequence for FRAS1 (NM_025074.2,10323-10341).
ctgcgtgtggacctttgat

SEQ ID NO: 146456 - DNA, 19 bp, Homo sapiens
  siRNA target sequence for FRAS1 (NM_025074.2,10331-10349).
ggacctttgatgcttatta

SEQ ID NO: 146457 - DNA, 19 bp, Homo sapiens
  siRNA target sequence for FRAS1 (NM_025074.2,10433-10451).
cagtgcacgtgcctctata

SEQ ID NO: 146458 - DNA, 19 bp, Homo sapiens
  siRNA target sequence for FRAS1 (NM_025074.2,10504-10522).
cacaccgagatggagtttt

SEQ ID NO: 146459 - DNA, 19 bp, Homo sapiens
  siRNA target sequence for FRAS1 (NM_025074.2,10580-10598).
ctgcaaggcttcagataat

SEQ ID NO: 146460 - DNA, 19 bp, Homo sapiens
  siRNA target sequence for FRAS1 (NM_025074.2,10586-10604).
ggcttcagataataagaat

SEQ ID NO: 146461 - DNA, 19 bp, Homo sapiens
  siRNA target sequence for FRAS1 (NM_025074.2,10621-10639).
ggccgtcttgtcattgaat

SEQ ID NO: 146462 - DNA, 19 bp, Homo sapiens
  siRNA target sequence for FRAS1 (NM_025074.2,10622-10640).
gccgtcttgtcattgaatt

SEQ ID NO: 146463 - DNA, 19 bp, Homo sapiens
  siRNA target sequence for FRAS1 (NM_025074.2,10624-10642).
cgtcttgtcattgaattca

SEQ ID NO: 146464 - DNA, 19 bp, Homo sapiens
  siRNA target sequence for FRAS1 (NM_025074.2,10625-10643).
gtcttgtcattgaattcaa

SEQ ID NO: 146465 - DNA, 19 bp, Homo sapiens
  siRNA target sequence for FRAS1 (NM_025074.2,10644-10662).
gacccatgccaaattcaga

SEQ ID NO: 146466 - DNA, 19 bp, Homo sapiens
  siRNA target sequence for FRAS1 (NM_025074.2,10686-10704).
cactctcccagaagtgaaa

SEQ ID NO: 146467 - DNA, 19 bp, Homo sapiens
  siRNA target sequence for FRAS1 (NM_025074.2,10696-10714).
gaagtgaaatctttcgtat

SEQ ID NO: 146468 - DNA, 19 bp, Homo sapiens
  siRNA target sequence for FRAS1 (NM_025074.2,10728-10746).
cctaggaggaattgaattt

SEQ ID NO: 146469 - DNA, 19 bp, Homo sapiens
  siRNA target sequence for FRAS1 (NM_025074.2,10747-10765).
gacttgcagctattatgga

SEQ ID NO: 146470 - DNA, 19 bp, Homo sapiens
  siRNA target sequence for FRAS1 (NM_025074.2,10763-10781).
ggagcgctcagacttttga

SEQ ID NO: 146471 - DNA, 19 bp, Homo sapiens
  siRNA target sequence for FRAS1 (NM_025074.2,10764-10782).
gagcgctcagacttttgat

SEQ ID NO: 146472 - DNA, 19 bp, Homo sapiens
  siRNA target sequence for FRAS1 (NM_025074.2,10767-10785).
cgctcagacttttgattct

SEQ ID NO: 146473 - DNA, 19 bp, Homo sapiens
  siRNA target sequence for FRAS1 (NM_025074.2,10800-10818).
gagagccacaagctcttat

SEQ ID NO: 146474 - DNA, 19 bp, Homo sapiens
  siRNA target sequence for FRAS1 (NM_025074.2,10802-10820).
gagccacaagctcttataa

SEQ ID NO: 146475 - DNA, 19 bp, Homo sapiens
  siRNA target sequence for FRAS1 (NM_025074.2,10804-10822).
gccacaagctcttataaca

SEQ ID NO: 146476 - DNA, 19 bp, Homo sapiens
  siRNA target sequence for FRAS1 (NM_025074.2,10976-10994).
gccctgtgccagttgtgta

SEQ ID NO: 146477 - DNA, 19 bp, Homo sapiens
  siRNA target sequence for FRAS1 (NM_025074.2,10977-10995).
ccctgtgccagttgtgtat

SEQ ID NO: 146478 - DNA, 19 bp, Homo sapiens
  siRNA target sequence for FRAS1 (NM_025074.2,10978-10996).
cctgtgccagttgtgtatt

SEQ ID NO: 146479 - DNA, 19 bp, Homo sapiens
  siRNA target sequence for FRAS1 (NM_025074.2,10983-11001).
gccagttgtgtattcactt

SEQ ID NO: 146480 - DNA, 19 bp, Homo sapiens
  siRNA target sequence for FRAS1 (NM_025074.2,10985-11003).
cagttgtgtattcacttaa

SEQ ID NO: 146481 - DNA, 19 bp, Homo sapiens
  siRNA target sequence for FRAS1 (NM_025074.2,10987-11005).
gttgtgtattcacttaaca

SEQ ID NO: 146482 - DNA, 19 bp, Homo sapiens
  siRNA target sequence for FRAS1 (NM_025074.2,11046-11064).
ggatcccaatacatctgat

SEQ ID NO: 146483 - DNA, 19 bp, Homo sapiens
  siRNA target sequence for FRAS1 (NM_025074.2,11047-11065).
gatcccaatacatctgata

SEQ ID NO: 146484 - DNA, 19 bp, Homo sapiens
  siRNA target sequence for FRAS1 (NM_025074.2,11050-11068).
cccaatacatctgatatgt

SEQ ID NO: 146485 - DNA, 19 bp, Homo sapiens
  siRNA target sequence for FRAS1 (NM_025074.2,11067-11085).
gtcactagcagaaatggat

SEQ ID NO: 146486 - DNA, 19 bp, Homo sapiens
  siRNA target sequence for FRAS1 (NM_025074.2,11102-11120).
caaaaggtcaaatccttta

SEQ ID NO: 146487 - DNA, 19 bp, Homo sapiens
  siRNA target sequence for FRAS1 (NM_025074.2,11115-11133).
cctttatggccgagtactt

SEQ ID NO: 146488 - DNA, 19 bp, Homo sapiens
  siRNA target sequence for FRAS1 (NM_025074.2,11116-11134).
ctttatggccgagtacttt

SEQ ID NO: 146489 - DNA, 19 bp, Homo sapiens
  siRNA target sequence for FRAS1 (NM_025074.2,11227-11245).
gatcccacggggacaatct

SEQ ID NO: 146490 - DNA, 19 bp, Homo sapiens
  siRNA target sequence for FRAS1 (NM_025074.2,11230-11248).
cccacggggacaatctaca

SEQ ID NO: 146491 - DNA, 19 bp, Homo sapiens
  siRNA target sequence for FRAS1 (NM_025074.2,11231-11249).
ccacggggacaatctacaa

SEQ ID NO: 146492 - DNA, 19 bp, Homo sapiens
  siRNA target sequence for FRAS1 (NM_025074.2,11232-11250).
cacggggacaatctacaat

SEQ ID NO: 146493 - DNA, 19 bp, Homo sapiens
  siRNA target sequence for FRAS1 (NM_025074.2,11234-11252).
cggggacaatctacaatga

SEQ ID NO: 146494 - DNA, 19 bp, Homo sapiens
  siRNA target sequence for FRAS1 (NM_025074.2,11267-11285).
gatgcattcagccaaacaa

SEQ ID NO: 146495 - DNA, 19 bp, Homo sapiens
  siRNA target sequence for FRAS1 (NM_025074.2,11327-11345).
cagaggtaactgataagta

SEQ ID NO: 146496 - DNA, 19 bp, Homo sapiens
  siRNA target sequence for FRAS1 (NM_025074.2,11329-11347).
gaggtaactgataagtact

SEQ ID NO: 146497 - DNA, 19 bp, Homo sapiens
  siRNA target sequence for FRAS1 (NM_025074.2,11358-11376).
gccttttgaggctcacttt

SEQ ID NO: 146498 - DNA, 19 bp, Homo sapiens
  siRNA target sequence for FRAS1 (NM_025074.2,11381-11399).
ctgagttgcctgatttcca

SEQ ID NO: 146499 - DNA, 19 bp, Homo sapiens
  siRNA target sequence for FRAS1 (NM_025074.2,11415-11433).
gccaggtgtggatggattt

SEQ ID NO: 146500 - DNA, 19 bp, Homo sapiens
  siRNA target sequence for FRAS1 (NM_025074.2,11420-11438).
gtgtggatggatttactct

SEQ ID NO: 146501 - DNA, 19 bp, Homo sapiens
  siRNA target sequence for FRAS1 (NM_025074.2,11487-11505).
ccaggtcatctacatcatt

SEQ ID NO: 146502 - DNA, 19 bp, Homo sapiens
  siRNA target sequence for FRAS1 (NM_025074.2,11595-11613).
ccagctgatccttgatgat

SEQ ID NO: 146503 - DNA, 19 bp, Homo sapiens
  siRNA target sequence for FRAS1 (NM_025074.2,11596-11614).
cagctgatccttgatgatt

SEQ ID NO: 146504 - DNA, 19 bp, Homo sapiens
  siRNA target sequence for FRAS1 (NM_025074.2,11644-11662).
gtcaagaatggcaccaata

SEQ ID NO: 146505 - DNA, 19 bp, Homo sapiens
  siRNA target sequence for FRAS1 (NM_025074.2,11747-11765).
ctgcaatcatgcttctact

SEQ ID NO: 146506 - DNA, 19 bp, Homo sapiens
  siRNA target sequence for FRAS1 (NM_025074.2,11779-11797).
gtggcttgttttatcaaca

SEQ ID NO: 146507 - DNA, 19 bp, Homo sapiens
  siRNA target sequence for FRAS1 (NM_025074.2,11930-11948).
ctgtgcggaacgtcaacat

SEQ ID NO: 146508 - DNA, 19 bp, Homo sapiens
  siRNA target sequence for FRAS1 (NM_025074.2,11964-11982).
ggcggcttacacgttcaaa

SEQ ID NO: 146509 - DNA, 19 bp, Homo sapiens
  siRNA target sequence for FRAS1 (NM_025074.2,11973-11991).
cacgttcaaaggtgctaaa

SEQ ID NO: 146510 - DNA, 19 bp, Homo sapiens
  siRNA target sequence for FRAS1 (NM_025074.2,11984-12002).
gtgctaaagtcaaaagact

SEQ ID NO: 146511 - DNA, 19 bp, Homo sapiens
  siRNA target sequence for FRAS1 (NM_025074.2,11994-12012).
caaaagactgaatctagaa

SEQ ID NO: 146512 - DNA, 19 bp, Homo sapiens
  siRNA target sequence for FRAS1 (NM_025074.2,12017-12035).
gagttcacaacaatttaca

SEQ ID NO: 146513 - DNA, 19 bp, Homo sapiens
  siRNA target sequence for FREQ (NM_014286.2,231-249).
cagaagatctacaagcaat

SEQ ID NO: 146514 - DNA, 19 bp, Homo sapiens
  siRNA target sequence for FREQ (NM_014286.2,407-425).
ctacgacttggacaatgat

SEQ ID NO: 146515 - DNA, 19 bp, Homo sapiens
  siRNA target sequence for FREQ (NM_014286.2,527-545).
gagggtggaccggatcttt

SEQ ID NO: 146516 - DNA, 19 bp, Homo sapiens
  siRNA target sequence for FSTL1 (NM_007085.3,169-187).
gatctgtgccaatgtgttt

SEQ ID NO: 146517 - DNA, 19 bp, Homo sapiens
  siRNA target sequence for FSTL1 (NM_007085.3,241-259).
ctgcattgagcaatgcaaa

SEQ ID NO: 146518 - DNA, 19 bp, Homo sapiens
  siRNA target sequence for FSTL1 (NM_007085.3,405-423).
ccagcccagttgtttgcta

SEQ ID NO: 146519 - DNA, 19 bp, Homo sapiens
  siRNA target sequence for FSTL1 (NM_007085.3,511-529).
caactacagtgaaatccta

SEQ ID NO: 146520 - DNA, 19 bp, Homo sapiens
  siRNA target sequence for FSTL1 (NM_007085.3,530-548).
gacaagtattttaagaact

SEQ ID NO: 146521 - DNA, 19 bp, Homo sapiens
  siRNA target sequence for FSTL1 (NM_007085.3,744-762).
gcctcaacccatctttcaa

SEQ ID NO: 146522 - DNA, 19 bp, Homo sapiens
  siRNA target sequence for FSTL1 (NM_007085.3,783-801).
ccctggaggatgaaacgta

SEQ ID NO: 146523 - DNA, 19 bp, Homo sapiens
  siRNA target sequence for FSTL1 (NM_007085.3,877-895).
gacctgtgacggaaagaat

SEQ ID NO: 146524 - DNA, 19 bp, Homo sapiens
  siRNA target sequence for FSTL1 (NM_007085.3,879-897).
cctgtgacggaaagaatca

SEQ ID NO: 146525 - DNA, 19 bp, Homo sapiens
  siRNA target sequence for FSTL1 (NM_007085.3,922-940).
ggaggagatgaccagatat

SEQ ID NO: 146526 - DNA, 19 bp, Homo sapiens
  siRNA target sequence for GAS6 (NM_000820.1,377-395).
cgaccccgagacggattat

SEQ ID NO: 146527 - DNA, 19 bp, Homo sapiens
  siRNA target sequence for GAS6 (NM_000820.1,432-450).
gggtctccgtacaccaaaa

SEQ ID NO: 146528 - DNA, 19 bp, Homo sapiens
  siRNA target sequence for GAS6 (NM_000820.1,433-451).
ggtctccgtacaccaaaaa

SEQ ID NO: 146529 - DNA, 19 bp, Homo sapiens
  siRNA target sequence for GAS6 (NM_000820.1,463-481).
ccacctgcgtgcaaaacct

SEQ ID NO: 146530 - DNA, 19 bp, Homo sapiens
  siRNA target sequence for GAS6 (NM_000820.1,499-517).
ccaacccctgcgataggaa

SEQ ID NO: 146531 - DNA, 19 bp, Homo sapiens
  siRNA target sequence for GAS6 (NM_000820.1,1085-1103).
caggctggtagctgagttt

SEQ ID NO: 146532 - DNA, 19 bp, Homo sapiens
  siRNA target sequence for GAS6 (NM_000820.1,1265-1283).
catgtggcagacaatctct

SEQ ID NO: 146533 - DNA, 19 bp, Homo sapiens
  siRNA target sequence for GAS6 (NM_000820.1,1322-1340).
cagggatgctgtcatgaaa

SEQ ID NO: 146534 - DNA, 19 bp, Homo sapiens
  siRNA target sequence for GAS6 (NM_000820.1,1394-1412).
cctgaccgtgggaggtatt

SEQ ID NO: 146535 - DNA, 19 bp, Homo sapiens
  siRNA target sequence for GAS6 (NM_000820.1,1626-1644).
gacgtcgggactgaatcaa

SEQ ID NO: 146536 - DNA, 19 bp, Homo sapiens
  siRNA target sequence for GAS6 (NM_000820.1,1741-1759).
ctgtggcactggtagacta

SEQ ID NO: 146537 - DNA, 19 bp, Homo sapiens
  siRNA target sequence for GAS6 (NM_000820.1,1746-1764).
gcactggtagactatcact

SEQ ID NO: 146538 - DNA, 19 bp, Homo sapiens
  siRNA target sequence for GCA (NM_012198.2,135-153).
ggtttggaaattttagcat

SEQ ID NO: 146539 - DNA, 19 bp, Homo sapiens
  siRNA target sequence for GCA (NM_012198.2,136-154).
gtttggaaattttagcatt

SEQ ID NO: 146540 - DNA, 19 bp, Homo sapiens
  siRNA target sequence for GCA (NM_012198.2,204-222).
ctatactcctcgatggata

SEQ ID NO: 146541 - DNA, 19 bp, Homo sapiens
  siRNA target sequence for GCA (NM_012198.2,257-275).
gctggtgactccgtgtata

SEQ ID NO: 146542 - DNA, 19 bp, Homo sapiens
  siRNA target sequence for GCA (NM_012198.2,260-278).
ggtgactccgtgtatactt

SEQ ID NO: 146543 - DNA, 19 bp, Homo sapiens
  siRNA target sequence for GCA (NM_012198.2,261-279).
gtgactccgtgtatactta

SEQ ID NO: 146544 - DNA, 19 bp, Homo sapiens
  siRNA target sequence for GCA (NM_012198.2,263-281).
gactccgtgtatacttact

SEQ ID NO: 146545 - DNA, 19 bp, Homo sapiens
  siRNA target sequence for GCA (NM_012198.2,363-381).
cttactctcccttcagttt

SEQ ID NO: 146546 - DNA, 19 bp, Homo sapiens
  siRNA target sequence for GCA (NM_012198.2,513-531).
gaagtggcacagtagaaca

SEQ ID NO: 146547 - DNA, 19 bp, Homo sapiens
  siRNA target sequence for GCA (NM_012198.2,519-537).
gcacagtagaacatcatga

SEQ ID NO: 146548 - DNA, 19 bp, Homo sapiens
  siRNA target sequence for GCA (NM_012198.2,543-561).
gtcaagccattggtcttat

SEQ ID NO: 146549 - DNA, 19 bp, Homo sapiens
  siRNA target sequence for GCA (NM_012198.2,554-572).
ggtcttatgggttataggt

SEQ ID NO: 146550 - DNA, 19 bp, Homo sapiens
  siRNA target sequence for GCA (NM_012198.2,570-588).
ggttgagtcctcaaacatt

SEQ ID NO: 146551 - DNA, 19 bp, Homo sapiens
  siRNA target sequence for GCA (NM_012198.2,574-592).
gagtcctcaaacattaact

SEQ ID NO: 146552 - DNA, 19 bp, Homo sapiens
  siRNA target sequence for GCA (NM_012198.2,578-596).
cctcaaacattaactacta

SEQ ID NO: 146553 - DNA, 19 bp, Homo sapiens
  siRNA target sequence for GCA (NM_012198.2,579-597).
ctcaaacattaactactat

SEQ ID NO: 146554 - DNA, 19 bp, Homo sapiens
  siRNA target sequence for GCA (NM_012198.2,658-676).
gaagcttcgagcattgaca

SEQ ID NO: 146555 - DNA, 19 bp, Homo sapiens
  siRNA target sequence for GCA (NM_012198.2,665-683).
cgagcattgacagatttct

SEQ ID NO: 146556 - DNA, 19 bp, Homo sapiens
  siRNA target sequence for GCA (NM_012198.2,668-686).
gcattgacagatttcttta

SEQ ID NO: 146557 - DNA, 19 bp, Homo sapiens
  siRNA target sequence for GCA (NM_012198.2,710-728).
gggtctgcgaatttcatat

SEQ ID NO: 146558 - DNA, 19 bp, Homo sapiens
  siRNA target sequence for GCA (NM_012198.2,711-729).
ggtctgcgaatttcatata

SEQ ID NO: 146559 - DNA, 19 bp, Homo sapiens
  siRNA target sequence for GCA (NM_012198.2,712-730).
gtctgcgaatttcatatat

SEQ ID NO: 146560 - DNA, 19 bp, Homo sapiens
  siRNA target sequence for GCA (NM_012198.2,714-732).
ctgcgaatttcatatatga

SEQ ID NO: 146561 - DNA, 19 bp, Homo sapiens
  siRNA target sequence for GCA (NM_012198.2,743-761).
cagggcactatggcaattt

SEQ ID NO: 146562 - DNA, 19 bp, Homo sapiens
  siRNA target sequence for GPD2 (NM_000408.1,169-187).
ggtgctcttgcaactgttt

SEQ ID NO: 146563 - DNA, 19 bp, Homo sapiens
  siRNA target sequence for GPD2 (NM_000408.1,170-188).
gtgctcttgcaactgtttt

SEQ ID NO: 146564 - DNA, 19 bp, Homo sapiens
  siRNA target sequence for GPD2 (NM_000408.1,231-249).
cctggcctatgttaaagca

SEQ ID NO: 146565 - DNA, 19 bp, Homo sapiens
  siRNA target sequence for GPD2 (NM_000408.1,304-322).
ctactgactttgcaaaaca

SEQ ID NO: 146566 - DNA, 19 bp, Homo sapiens
  siRNA target sequence for GPD2 (NM_000408.1,449-467).
gcagaagcactaaattgat

SEQ ID NO: 146567 - DNA, 19 bp, Homo sapiens
  siRNA target sequence for GPD2 (NM_000408.1,496-514).
gccatcatgaagttggata

SEQ ID NO: 146568 - DNA, 19 bp, Homo sapiens
  siRNA target sequence for GPD2 (NM_000408.1,553-571).
cgtgccaacctgctagaaa

SEQ ID NO: 146569 - DNA, 19 bp, Homo sapiens
  siRNA target sequence for GPD2 (NM_000408.1,554-572).
gtgccaacctgctagaaat

SEQ ID NO: 146570 - DNA, 19 bp, Homo sapiens
  siRNA target sequence for GPD2 (NM_000408.1,590-608).
ctccattgcctataatgct

SEQ ID NO: 146571 - DNA, 19 bp, Homo sapiens
  siRNA target sequence for GPD2 (NM_000408.1,650-668).
gaatcaagctgtatgattt

SEQ ID NO: 146572 - DNA, 19 bp, Homo sapiens
  siRNA target sequence for GPD2 (NM_000408.1,753-771).
caaactggtaggagcaatt

SEQ ID NO: 146573 - DNA, 19 bp, Homo sapiens
  siRNA target sequence for GPD2 (NM_000408.1,757-775).
ctggtaggagcaattgtct

SEQ ID NO: 146574 - DNA, 19 bp, Homo sapiens
  siRNA target sequence for GPD2 (NM_000408.1,774-792).
ctactatgacggacaacat

SEQ ID NO: 146575 - DNA, 19 bp, Homo sapiens
  siRNA target sequence for GPD2 (NM_000408.1,871-889).
gtgagcttgctcaagaaga

SEQ ID NO: 146576 - DNA, 19 bp, Homo sapiens
  siRNA target sequence for GPD2 (NM_000408.1,964-982).
gtgagagccaaatgtgtta

SEQ ID NO: 146577 - DNA, 19 bp, Homo sapiens
  siRNA target sequence for GPD2 (NM_000408.1,968-986).
gagccaaatgtgttatcaa

SEQ ID NO: 146578 - DNA, 19 bp, Homo sapiens
  siRNA target sequence for GPD2 (NM_000408.1,1004-1022).
cggactctgtgcgcaaaat

SEQ ID NO: 146579 - DNA, 19 bp, Homo sapiens
  siRNA target sequence for GPD2 (NM_000408.1,1008-1026).
ctctgtgcgcaaaatggat

SEQ ID NO: 146580 - DNA, 19 bp, Homo sapiens
  siRNA target sequence for GPD2 (NM_000408.1,1012-1030).
gtgcgcaaaatggatgata

SEQ ID NO: 146581 - DNA, 19 bp, Homo sapiens
  siRNA target sequence for GPD2 (NM_000408.1,1014-1032).
gcgcaaaatggatgataaa

SEQ ID NO: 146582 - DNA, 19 bp, Homo sapiens
  siRNA target sequence for GPD2 (NM_000408.1,1055-1073).
caagtgctggtgtccatat

SEQ ID NO: 146583 - DNA, 19 bp, Homo sapiens
  siRNA target sequence for GPD2 (NM_000408.1,1058-1076).
gtgctggtgtccatattgt

SEQ ID NO: 146584 - DNA, 19 bp, Homo sapiens
  siRNA target sequence for GPD2 (NM_000408.1,1127-1145).
ccagtgatgggcgagttat

SEQ ID NO: 146585 - DNA, 19 bp, Homo sapiens
  siRNA target sequence for GPD2 (NM_000408.1,1128-1146).
cagtgatgggcgagttatt

SEQ ID NO: 146586 - DNA, 19 bp, Homo sapiens
  siRNA target sequence for GPD2 (NM_000408.1,1130-1148).
gtgatgggcgagttatttt

SEQ ID NO: 146587 - DNA, 19 bp, Homo sapiens
  siRNA target sequence for GPD2 (NM_000408.1,1132-1150).
gatgggcgagttattttct

SEQ ID NO: 146588 - DNA, 19 bp, Homo sapiens
  siRNA target sequence for GPD2 (NM_000408.1,1173-1191).
gatcgctggcactactgat

SEQ ID NO: 146589 - DNA, 19 bp, Homo sapiens
  siRNA target sequence for GPD2 (NM_000408.1,1176-1194).
cgctggcactactgatact

SEQ ID NO: 146590 - DNA, 19 bp, Homo sapiens
  siRNA target sequence for GPD2 (NM_000408.1,1321-1339).
ggaatccgtcctcttgtta

SEQ ID NO: 146591 - DNA, 19 bp, Homo sapiens
  siRNA target sequence for GPD2 (NM_000408.1,1365-1383).
gtctatctcccgaaatcat

SEQ ID NO: 146592 - DNA, 19 bp, Homo sapiens
  siRNA target sequence for GPD2 (NM_000408.1,1367-1385).
ctatctcccgaaatcatgt

SEQ ID NO: 146593 - DNA, 19 bp, Homo sapiens
  siRNA target sequence for GPD2 (NM_000408.1,1371-1389).
ctcccgaaatcatgttgtt

SEQ ID NO: 146594 - DNA, 19 bp, Homo sapiens
  siRNA target sequence for GPD2 (NM_000408.1,1373-1391).
cccgaaatcatgttgttga

SEQ ID NO: 146595 - DNA, 19 bp, Homo sapiens
  siRNA target sequence for GPD2 (NM_000408.1,1399-1417).
gagagtggccttattacta

SEQ ID NO: 146596 - DNA, 19 bp, Homo sapiens
  siRNA target sequence for GPD2 (NM_000408.1,1401-1419).
gagtggccttattactata

SEQ ID NO: 146597 - DNA, 19 bp, Homo sapiens
  siRNA target sequence for GPD2 (NM_000408.1,1444-1462).
cggtctatggcagaagata

SEQ ID NO: 146598 - DNA, 19 bp, Homo sapiens
  siRNA target sequence for GPD2 (NM_000408.1,1527-1545).
ccttcaagggggtaaagat

SEQ ID NO: 146599 - DNA, 19 bp, Homo sapiens
  siRNA target sequence for GPD2 (NM_000408.1,1528-1546).
cttcaagggggtaaagatt

SEQ ID NO: 146600 - DNA, 19 bp, Homo sapiens
  siRNA target sequence for GPD2 (NM_000408.1,1547-1565).
ggagccccacactctacat

SEQ ID NO: 146601 - DNA, 19 bp, Homo sapiens
  siRNA target sequence for GPD2 (NM_000408.1,1548-1566).
gagccccacactctacatt

SEQ ID NO: 146602 - DNA, 19 bp, Homo sapiens
  siRNA target sequence for GPD2 (NM_000408.1,1575-1593).
gcaggattatggacttgaa

SEQ ID NO: 146603 - DNA, 19 bp, Homo sapiens
  siRNA target sequence for GPD2 (NM_000408.1,1616-1634).
ccgccacctatggtgataa

SEQ ID NO: 146604 - DNA, 19 bp, Homo sapiens
  siRNA target sequence for GPD2 (NM_000408.1,1671-1689).
caaaaggtggcctattgtt

SEQ ID NO: 146605 - DNA, 19 bp, Homo sapiens
  siRNA target sequence for GPD2 (NM_000408.1,1829-1847).
ccctacccaggattgttga

SEQ ID NO: 146606 - DNA, 19 bp, Homo sapiens
  siRNA target sequence for GPD2 (NM_000408.1,1830-1848).
cctacccaggattgttgaa

SEQ ID NO: 146607 - DNA, 19 bp, Homo sapiens
  siRNA target sequence for GPD2 (NM_000408.1,1904-1922).
cagccaggaagtttctata

SEQ ID NO: 146608 - DNA, 19 bp, Homo sapiens
  siRNA target sequence for GPD2 (NM_000408.1,1907-1925).
ccaggaagtttctatatta

SEQ ID NO: 146609 - DNA, 19 bp, Homo sapiens
  siRNA target sequence for GPD2 (NM_000408.1,1991-2009).
cagacattgacaggtataa

SEQ ID NO: 146610 - DNA, 19 bp, Homo sapiens
  siRNA target sequence for GPD2 (NM_000408.1,2038-2056).
cagaaaggctttattacca

SEQ ID NO: 146611 - DNA, 19 bp, Homo sapiens
  siRNA target sequence for GPD2 (NM_000408.1,2040-2058).
gaaaggctttattaccatt

SEQ ID NO: 146612 - DNA, 19 bp, Homo sapiens
  siRNA target sequence for GPD2 (NM_000408.1,2045-2063).
gctttattaccattgttga

SEQ ID NO: 146613 - DNA, 19 bp, Homo sapiens
  siRNA target sequence for GPD2 (NM_000408.1,2046-2064).
ctttattaccattgttgat

SEQ ID NO: 146614 - DNA, 19 bp, Homo sapiens
  siRNA target sequence for GPD2 (NM_000408.1,2065-2083).
gttcagcgtgtattagaga

SEQ ID NO: 146615 - DNA, 19 bp, Homo sapiens
  siRNA target sequence for GPD2 (NM_000408.1,2071-2089).
cgtgtattagagagtatca

SEQ ID NO: 146616 - DNA, 19 bp, Homo sapiens
  siRNA target sequence for GPD2 (NM_000408.1,2072-2090).
gtgtattagagagtatcaa

SEQ ID NO: 146617 - DNA, 19 bp, Homo sapiens
  siRNA target sequence for GPD2 (NM_000408.1,2111-2129).
cactccatgaaattctaaa

SEQ ID NO: 146618 - DNA, 19 bp, Homo sapiens
  siRNA target sequence for GPD2 (NM_000408.1,2157-2175).
ggttgaactcaatgaattt

SEQ ID NO: 146619 - DNA, 19 bp, Homo sapiens
  siRNA target sequence for GPD2 (NM_000408.1,2187-2205).
gagtgctattcaaaaagga

SEQ ID NO: 146620 - DNA, 19 bp, Homo sapiens
  siRNA target sequence for GPD2 (NM_000408.1,2213-2231).
ctggaagccggcttgctat

SEQ ID NO: 146621 - DNA, 19 bp, Homo sapiens
  siRNA target sequence for GPD2 (NM_000408.1,2216-2234).
gaagccggcttgctatact

SEQ ID NO: 146622 - DNA, 19 bp, Homo sapiens
  siRNA target sequence for GPD2 (NM_000408.1,2219-2237).
gccggcttgctatactaat

SEQ ID NO: 146623 - DNA, 19 bp, Homo sapiens
  siRNA target sequence for GPD2 (NM_000408.1,2221-2239).
cggcttgctatactaatga

SEQ ID NO: 146624 - DNA, 19 bp, Homo sapiens
  siRNA target sequence for GPD2 (NM_000408.1,2253-2271).
gaacctcgacagaagagtt

SEQ ID NO: 146625 - DNA, 19 bp, Homo sapiens
  siRNA target sequence for GPD2 (NM_000408.1,2262-2280).
cagaagagttccaattcca

SEQ ID NO: 146626 - DNA, 19 bp, Homo sapiens
  siRNA target sequence for GRN (NM_002087.1,77-95).
gagctgggtggccttaaca

SEQ ID NO: 146627 - DNA, 19 bp, Homo sapiens
  siRNA target sequence for GRN (NM_002087.1,189-207).
cgtccccttctggacaaat

SEQ ID NO: 146628 - DNA, 19 bp, Homo sapiens
  siRNA target sequence for GRN (NM_002087.1,387-405).
gggcgatcctgcttccaaa

SEQ ID NO: 146629 - DNA, 19 bp, Homo sapiens
  siRNA target sequence for GRN (NM_002087.1,390-408).
cgatcctgcttccaaagat

SEQ ID NO: 146630 - DNA, 19 bp, Homo sapiens
  siRNA target sequence for GRN (NM_002087.1,441-459).
cctgatagtcagttcgaat

SEQ ID NO: 146631 - DNA, 19 bp, Homo sapiens
  siRNA target sequence for GRN (NM_002087.1,472-490).
ccacgtgctgtgttatggt

SEQ ID NO: 146632 - DNA, 19 bp, Homo sapiens
  siRNA target sequence for GRN (NM_002087.1,820-838).
gtgacctgatccagagtaa

SEQ ID NO: 146633 - DNA, 19 bp, Homo sapiens
  siRNA target sequence for GRN (NM_002087.1,1003-1021).
gctgtgaggaccacataca

SEQ ID NO: 146634 - DNA, 19 bp, Homo sapiens
  siRNA target sequence for GRN (NM_002087.1,1147-1165).
gagatgtcccctgtgataa

SEQ ID NO: 146635 - DNA, 19 bp, Homo sapiens
  siRNA target sequence for GRN (NM_002087.1,1152-1170).
gtcccctgtgataatgtca

SEQ ID NO: 146636 - DNA, 19 bp, Homo sapiens
  siRNA target sequence for GRN (NM_002087.1,1633-1651).
gacacttctgccatgataa

SEQ ID NO: 146637 - DNA, 19 bp, Homo sapiens
  siRNA target sequence for GRN (NM_002087.1,1762-1780).
ccaggggtaccaagtgttt

SEQ ID NO: 146638 - DNA, 19 bp, Homo sapiens
  siRNA target sequence for GUCA1B (NM_002098.2,66-84).
ggagtggtacaagaagttt

SEQ ID NO: 146639 - DNA, 19 bp, Homo sapiens
  siRNA target sequence for GUCA1B (NM_002098.2,96-114).
ccccagcggcacactcttt

SEQ ID NO: 146640 - DNA, 19 bp, Homo sapiens
  siRNA target sequence for GUCA1B (NM_002098.2,97-115).
cccagcggcacactcttta

SEQ ID NO: 146641 - DNA, 19 bp, Homo sapiens
  siRNA target sequence for GUCA1B (NM_002098.2,101-119).
gcggcacactctttatgca

SEQ ID NO: 146642 - DNA, 19 bp, Homo sapiens
  siRNA target sequence for GUCA1B (NM_002098.2,102-120).
cggcacactctttatgcat

SEQ ID NO: 146643 - DNA, 19 bp, Homo sapiens
  siRNA target sequence for GUCA1B (NM_002098.2,107-125).
cactctttatgcatgagtt

SEQ ID NO: 146644 - DNA, 19 bp, Homo sapiens
  siRNA target sequence for GUCA1B (NM_002098.2,109-127).
ctctttatgcatgagttta

SEQ ID NO: 146645 - DNA, 19 bp, Homo sapiens
  siRNA target sequence for GUCA1B (NM_002098.2,121-139).
gagtttaagcgcttcttca

SEQ ID NO: 146646 - DNA, 19 bp, Homo sapiens
  siRNA target sequence for GUCA1B (NM_002098.2,231-249).
gtacgtggcagctctgaat

SEQ ID NO: 146647 - DNA, 19 bp, Homo sapiens
  siRNA target sequence for HGF (NM_000601.3,201-219).
gcaaagactaccctaatca

SEQ ID NO: 146648 - DNA, 19 bp, Homo sapiens
  siRNA target sequence for HGF (NM_000601.3,206-224).
gactaccctaatcaaaata

SEQ ID NO: 146649 - DNA, 19 bp, Homo sapiens
  siRNA target sequence for HGF (NM_000601.3,225-243).
gatccagcactgaagataa

SEQ ID NO: 146650 - DNA, 19 bp, Homo sapiens
  siRNA target sequence for HGF (NM_000601.3,228-246).
ccagcactgaagataaaaa

SEQ ID NO: 146651 - DNA, 19 bp, Homo sapiens
  siRNA target sequence for HGF (NM_000601.3,264-282).
gcagaccaatgtgctaata

SEQ ID NO: 146652 - DNA, 19 bp, Homo sapiens
  siRNA target sequence for HGF (NM_000601.3,267-285).
gaccaatgtgctaatagat

SEQ ID NO: 146653 - DNA, 19 bp, Homo sapiens
  siRNA target sequence for HGF (NM_000601.3,270-288).
caatgtgctaatagatgta

SEQ ID NO: 146654 - DNA, 19 bp, Homo sapiens
  siRNA target sequence for HGF (NM_000601.3,292-310).
ggaataaaggacttccatt

SEQ ID NO: 146655 - DNA, 19 bp, Homo sapiens
  siRNA target sequence for HGF (NM_000601.3,363-381).
cccttcaatagcatgtcaa

SEQ ID NO: 146656 - DNA, 19 bp, Homo sapiens
  siRNA target sequence for HGF (NM_000601.3,374-392).
catgtcaagtggagtgaaa

SEQ ID NO: 146657 - DNA, 19 bp, Homo sapiens
  siRNA target sequence for HGF (NM_000601.3,470-488).
ctacaagggaacagtatct

SEQ ID NO: 146658 - DNA, 19 bp, Homo sapiens
  siRNA target sequence for HGF (NM_000601.3,476-494).
gggaacagtatctatcact

SEQ ID NO: 146659 - DNA, 19 bp, Homo sapiens
  siRNA target sequence for HGF (NM_000601.3,534-552).
ccacacgaacacagctttt

SEQ ID NO: 146660 - DNA, 19 bp, Homo sapiens
  siRNA target sequence for HGF (NM_000601.3,535-553).
cacacgaacacagcttttt

SEQ ID NO: 146661 - DNA, 19 bp, Homo sapiens
  siRNA target sequence for HGF (NM_000601.3,559-577).
cgagctatcggggtaaaga

SEQ ID NO: 146662 - DNA, 19 bp, Homo sapiens
  siRNA target sequence for HGF (NM_000601.3,576-594).
gacctacaggaaaactact

SEQ ID NO: 146663 - DNA, 19 bp, Homo sapiens
  siRNA target sequence for HGF (NM_000601.3,584-602).
ggaaaactactgtcgaaat

SEQ ID NO: 146664 - DNA, 19 bp, Homo sapiens
  siRNA target sequence for HGF (NM_000601.3,621-639).
ggaccctggtgtttcacaa

SEQ ID NO: 146665 - DNA, 19 bp, Homo sapiens
  siRNA target sequence for HGF (NM_000601.3,656-674).
ctacgaagtctgtgacatt

SEQ ID NO: 146666 - DNA, 19 bp, Homo sapiens
  siRNA target sequence for HGF (NM_000601.3,707-725).
caatggggagagttatcga

SEQ ID NO: 146667 - DNA, 19 bp, Homo sapiens
  siRNA target sequence for HGF (NM_000601.3,723-741).
cgaggtctcatggatcata

SEQ ID NO: 146668 - DNA, 19 bp, Homo sapiens
  siRNA target sequence for HGF (NM_000601.3,727-745).
gtctcatggatcatacaga

SEQ ID NO: 146669 - DNA, 19 bp, Homo sapiens
  siRNA target sequence for HGF (NM_000601.3,817-835).
ccgacaagggctttgatga

SEQ ID NO: 146670 - DNA, 19 bp, Homo sapiens
  siRNA target sequence for HGF (NM_000601.3,818-836).
cgacaagggctttgatgat

SEQ ID NO: 146671 - DNA, 19 bp, Homo sapiens
  siRNA target sequence for HGF (NM_000601.3,819-837).
gacaagggctttgatgata

SEQ ID NO: 146672 - DNA, 19 bp, Homo sapiens
  siRNA target sequence for HGF (NM_000601.3,824-842).
gggctttgatgataattat

SEQ ID NO: 146673 - DNA, 19 bp, Homo sapiens
  siRNA target sequence for HGF (NM_000601.3,864-882).
ccgaggccatggtgctata

SEQ ID NO: 146674 - DNA, 19 bp, Homo sapiens
  siRNA target sequence for HGF (NM_000601.3,904-922).
gggagtactgtgcaattaa

SEQ ID NO: 146675 - DNA, 19 bp, Homo sapiens
  siRNA target sequence for HGF (NM_000601.3,925-943).
catgcgctgacaatactat

SEQ ID NO: 146676 - DNA, 19 bp, Homo sapiens
  siRNA target sequence for HGF (NM_000601.3,928-946).
gcgctgacaatactatgaa

SEQ ID NO: 146677 - DNA, 19 bp, Homo sapiens
  siRNA target sequence for HGF (NM_000601.3,929-947).
cgctgacaatactatgaat

SEQ ID NO: 146678 - DNA, 19 bp, Homo sapiens
  siRNA target sequence for HGF (NM_000601.3,931-949).
ctgacaatactatgaatga

SEQ ID NO: 146679 - DNA, 19 bp, Homo sapiens
  siRNA target sequence for HGF (NM_000601.3,1001-1019).
ctacaggggcactgtcaat

SEQ ID NO: 146680 - DNA, 19 bp, Homo sapiens
  siRNA target sequence for HGF (NM_000601.3,1006-1024).
ggggcactgtcaataccat

SEQ ID NO: 146681 - DNA, 19 bp, Homo sapiens
  siRNA target sequence for HGF (NM_000601.3,1007-1025).
gggcactgtcaataccatt

SEQ ID NO: 146682 - DNA, 19 bp, Homo sapiens
  siRNA target sequence for HGF (NM_000601.3,1042-1060).
gtcagcgttgggattctca

SEQ ID NO: 146683 - DNA, 19 bp, Homo sapiens
  siRNA target sequence for HGF (NM_000601.3,1046-1064).
gcgttgggattctcagtat

SEQ ID NO: 146684 - DNA, 19 bp, Homo sapiens
  siRNA target sequence for HGF (NM_000601.3,1103-1121).
caaggacctacgagaaaat

SEQ ID NO: 146685 - DNA, 19 bp, Homo sapiens
  siRNA target sequence for HGF (NM_000601.3,1107-1125).
gacctacgagaaaattact

SEQ ID NO: 146686 - DNA, 19 bp, Homo sapiens
  siRNA target sequence for HGF (NM_000601.3,1220-1238).
gtcacatggacaagattgt

SEQ ID NO: 146687 - DNA, 19 bp, Homo sapiens
  siRNA target sequence for HGF (NM_000601.3,1222-1240).
cacatggacaagattgtta

SEQ ID NO: 146688 - DNA, 19 bp, Homo sapiens
  siRNA target sequence for HGF (NM_000601.3,1242-1260).
cgtgggaatggcaaaaatt

SEQ ID NO: 146689 - DNA, 19 bp, Homo sapiens
  siRNA target sequence for HGF (NM_000601.3,1246-1264).
ggaatggcaaaaattatat

SEQ ID NO: 146690 - DNA, 19 bp, Homo sapiens
  siRNA target sequence for HGF (NM_000601.3,1266-1284).
ggcaacttatcccaaacaa

SEQ ID NO: 146691 - DNA, 19 bp, Homo sapiens
  siRNA target sequence for HGF (NM_000601.3,1271-1289).
cttatcccaaacaagatct

SEQ ID NO: 146692 - DNA, 19 bp, Homo sapiens
  siRNA target sequence for HGF (NM_000601.3,1300-1318).
gttcaatgtgggacaagaa

SEQ ID NO: 146693 - DNA, 19 bp, Homo sapiens
  siRNA target sequence for HGF (NM_000601.3,1316-1334).
gaacatggaagacttacat

SEQ ID NO: 146694 - DNA, 19 bp, Homo sapiens
  siRNA target sequence for HGF (NM_000601.3,1385-1403).
ccgaaatccagatgatgat

SEQ ID NO: 146695 - DNA, 19 bp, Homo sapiens
  siRNA target sequence for HGF (NM_000601.3,1424-1442).
cacgggaaatccactcatt

SEQ ID NO: 146696 - DNA, 19 bp, Homo sapiens
  siRNA target sequence for HGF (NM_000601.3,1437-1455).
ctcattccttgggattatt

SEQ ID NO: 146697 - DNA, 19 bp, Homo sapiens
  siRNA target sequence for HGF (NM_000601.3,1448-1466).
ggattattgccctatttct

SEQ ID NO: 146698 - DNA, 19 bp, Homo sapiens
  siRNA target sequence for HGF (NM_000601.3,1457-1475).
ccctatttctcgttgtgaa

SEQ ID NO: 146699 - DNA, 19 bp, Homo sapiens
  siRNA target sequence for HGF (NM_000601.3,1477-1495).
gtgataccacacctacaat

SEQ ID NO: 146700 - DNA, 19 bp, Homo sapiens
  siRNA target sequence for HGF (NM_000601.3,1483-1501).
ccacacctacaatagtcaa

SEQ ID NO: 146701 - DNA, 19 bp, Homo sapiens
  siRNA target sequence for HGF (NM_000601.3,1484-1502).
cacacctacaatagtcaat

SEQ ID NO: 146702 - DNA, 19 bp, Homo sapiens
  siRNA target sequence for HGF (NM_000601.3,1506-1524).
gaccatcccgtaatatctt

SEQ ID NO: 146703 - DNA, 19 bp, Homo sapiens
  siRNA target sequence for HGF (NM_000601.3,1508-1526).
ccatcccgtaatatcttgt

SEQ ID NO: 146704 - DNA, 19 bp, Homo sapiens
  siRNA target sequence for HGF (NM_000601.3,1525-1543).
gtgccaaaacgaaacaatt

SEQ ID NO: 146705 - DNA, 19 bp, Homo sapiens
  siRNA target sequence for HGF (NM_000601.3,1535-1553).
gaaacaattgcgagttgta

SEQ ID NO: 146706 - DNA, 19 bp, Homo sapiens
  siRNA target sequence for HGF (NM_000601.3,1558-1576).
ggattccaacacgaacaaa

SEQ ID NO: 146707 - DNA, 19 bp, Homo sapiens
  siRNA target sequence for HGF (NM_000601.3,1589-1607).
ggttagtttgagatacaga

SEQ ID NO: 146708 - DNA, 19 bp, Homo sapiens
  siRNA target sequence for HGF (NM_000601.3,1621-1639).
gcggaggatcattgataaa

SEQ ID NO: 146709 - DNA, 19 bp, Homo sapiens
  siRNA target sequence for HGF (NM_000601.3,1640-1658).
ggagagttgggttcttact

SEQ ID NO: 146710 - DNA, 19 bp, Homo sapiens
  siRNA target sequence for HGF (NM_000601.3,1675-1693).
cttctcgagacttgaaaga

SEQ ID NO: 146711 - DNA, 19 bp, Homo sapiens
  siRNA target sequence for HGF (NM_000601.3,1732-1750).
gaggagatgagaaatgcaa

SEQ ID NO: 146712 - DNA, 19 bp, Homo sapiens
  siRNA target sequence for HGF (NM_000601.3,1747-1765).
gcaaacaggttctcaatgt

SEQ ID NO: 146713 - DNA, 19 bp, Homo sapiens
  siRNA target sequence for HGF (NM_000601.3,1849-1867).
gtacgattgatttacctaa

SEQ ID NO: 146714 - DNA, 19 bp, Homo sapiens
  siRNA target sequence for HGF (NM_000601.3,1852-1870).
cgattgatttacctaatta

SEQ ID NO: 146715 - DNA, 19 bp, Homo sapiens
  siRNA target sequence for HGF (NM_000601.3,1853-1871).
gattgatttacctaattat

SEQ ID NO: 146716 - DNA, 19 bp, Homo sapiens
  siRNA target sequence for HGF (NM_000601.3,1934-1952).
caactatgatggcctatta

SEQ ID NO: 146717 - DNA, 19 bp, Homo sapiens
  siRNA target sequence for HGF (NM_000601.3,1937-1955).
ctatgatggcctattacga

SEQ ID NO: 146718 - DNA, 19 bp, Homo sapiens
  siRNA target sequence for HGF (NM_000601.3,1953-1971).
cgagtggcacatctctata

SEQ ID NO: 146719 - DNA, 19 bp, Homo sapiens
  siRNA target sequence for HGF (NM_000601.3,1954-1972).
gagtggcacatctctatat

SEQ ID NO: 146720 - DNA, 19 bp, Homo sapiens
  siRNA target sequence for HGF (NM_000601.3,2021-2039).
gaatgagtctgaaatatgt

SEQ ID NO: 146721 - DNA, 19 bp, Homo sapiens
  siRNA target sequence for HGF (NM_000601.3,2094-2112).
cttgtttgtgagcaacata

SEQ ID NO: 146722 - DNA, 19 bp, Homo sapiens
  siRNA target sequence for HGF (NM_000601.3,2123-2141).
ggttcttggtgtcattgtt

SEQ ID NO: 146723 - DNA, 19 bp, Homo sapiens
  siRNA target sequence for HGF (NM_000601.3,2163-2181).
ccaaatcgtcctggtattt

SEQ ID NO: 146724 - DNA, 19 bp, Homo sapiens
  siRNA target sequence for HGF (NM_000601.3,2186-2204).
ccgagtagcatattatgca

SEQ ID NO: 146725 - DNA, 19 bp, Homo sapiens
  siRNA target sequence for HGF (NM_000601.3,2187-2205).
cgagtagcatattatgcaa

SEQ ID NO: 146726 - DNA, 19 bp, Homo sapiens
  siRNA target sequence for HGF (NM_000601.3,2188-2206).
gagtagcatattatgcaaa

SEQ ID NO: 146727 - DNA, 19 bp, Homo sapiens
  siRNA target sequence for HGF (NM_000601.3,2190-2208).
gtagcatattatgcaaaat

SEQ ID NO: 146728 - DNA, 19 bp, Homo sapiens
  siRNA target sequence for HPCAL4 (NM_016257.2,421-439).
ctcaactgggcctttgaga

SEQ ID NO: 146729 - DNA, 19 bp, Homo sapiens
  siRNA target sequence for HPCAL4 (NM_016257.2,565-583).
cagcgtgtggacaagatct

SEQ ID NO: 146730 - DNA, 19 bp, Homo sapiens
  siRNA target sequence for HPCAL4 (NM_016257.2,650-668).
gtgacccatccattgtgtt

SEQ ID NO: 146731 - DNA, 19 bp, Homo sapiens
  siRNA target sequence for HRC (NM_002152.1,682-700).
gtgagcatcaccatcatat

SEQ ID NO: 146732 - DNA, 19 bp, Homo sapiens
  siRNA target sequence for HRC (NM_002152.1,989-1007).
ccaaggccacgggattgaa

SEQ ID NO: 146733 - DNA, 19 bp, Homo sapiens
  siRNA target sequence for HRC (NM_002152.1,1277-1295).
ccaccatggccttgtagat

SEQ ID NO: 146734 - DNA, 19 bp, Homo sapiens
  siRNA target sequence for HRC (NM_002152.1,1363-1381).
gccacaagagtgatgaaga

SEQ ID NO: 146735 - DNA, 19 bp, Homo sapiens
  siRNA target sequence for HRC (NM_002152.1,1383-1401).
gacttccaagatgagtata

SEQ ID NO: 146736 - DNA, 19 bp, Homo sapiens
  siRNA target sequence for HRC (NM_002152.1,1534-1552).
gagggtccatcaaagagat

SEQ ID NO: 146737 - DNA, 19 bp, Homo sapiens
  siRNA target sequence for HRC (NM_002152.1,2069-2087).
caatcgatgcactgaatgt

SEQ ID NO: 146738 - DNA, 19 bp, Homo sapiens
  siRNA target sequence for HRC (NM_002152.1,2194-2212).
caggaagctacgttgacta

SEQ ID NO: 146739 - DNA, 19 bp, Homo sapiens
  siRNA target sequence for HUMMLC2B (NM_013292.2,173-191).
ccagaaccgtgatggtatt

SEQ ID NO: 146740 - DNA, 19 bp, Homo sapiens
  siRNA target sequence for HUMMLC2B (NM_013292.2,174-192).
cagaaccgtgatggtatta

SEQ ID NO: 146741 - DNA, 19 bp, Homo sapiens
  siRNA target sequence for HUMMLC2B (NM_013292.2,176-194).
gaaccgtgatggtattata

SEQ ID NO: 146742 - DNA, 19 bp, Homo sapiens
  siRNA target sequence for HUMMLC2B (NM_013292.2,279-297).
gccagcggtcccatcaact

SEQ ID NO: 146743 - DNA, 19 bp, Homo sapiens
  siRNA target sequence for HUMMLC2B (NM_013292.2,280-298).
ccagcggtcccatcaactt

SEQ ID NO: 146744 - DNA, 19 bp, Homo sapiens
  siRNA target sequence for HUMMLC2B (NM_013292.2,396-414).
ggcaccatcaagaagaagt

SEQ ID NO: 146745 - DNA, 19 bp, Homo sapiens
  siRNA target sequence for HUMMLC2B (NM_013292.2,503-521).
cggcaacgtcgactacaaa

SEQ ID NO: 146746 - DNA, 19 bp, Homo sapiens
  siRNA target sequence for HUMMLC2B (NM_013292.2,504-522).
ggcaacgtcgactacaaaa

SEQ ID NO: 146747 - DNA, 19 bp, Homo sapiens
  siRNA target sequence for HUMMLC2B (NM_013292.2,505-523).
gcaacgtcgactacaaaaa

SEQ ID NO: 146748 - DNA, 19 bp, Homo sapiens
  siRNA target sequence for HUMMLC2B (NM_013292.2,510-528).
gtcgactacaaaaacatct

SEQ ID NO: 146749 - DNA, 19 bp, Homo sapiens
  siRNA target sequence for IPO4 (NM_024658.2,260-278).
ggccctgcagagagaaaca

SEQ ID NO: 146750 - DNA, 19 bp, Homo sapiens
  siRNA target sequence for IPO4 (NM_024658.2,317-335).
caccatttttcgaaaggaa

SEQ ID NO: 146751 - DNA, 19 bp, Homo sapiens
  siRNA target sequence for IPO4 (NM_024658.2,520-538).
ctcctgggctgctcttcta

SEQ ID NO: 146752 - DNA, 19 bp, Homo sapiens
  siRNA target sequence for IPO4 (NM_024658.2,637-655).
ctctgatccccatagatga

SEQ ID NO: 146753 - DNA, 19 bp, Homo sapiens
  siRNA target sequence for IPO4 (NM_024658.2,751-769).
gcctggaggtagctagaaa

SEQ ID NO: 146754 - DNA, 19 bp, Homo sapiens
  siRNA target sequence for IPO4 (NM_024658.2,752-770).
cctggaggtagctagaaat

SEQ ID NO: 146755 - DNA, 19 bp, Homo sapiens
  siRNA target sequence for IPO4 (NM_024658.2,787-805).
cgatacgcatacgtattct

SEQ ID NO: 146756 - DNA, 19 bp, Homo sapiens
  siRNA target sequence for IPO4 (NM_024658.2,978-996).
ggggagactcccaagcatt

SEQ ID NO: 146757 - DNA, 19 bp, Homo sapiens
  siRNA target sequence for IPO4 (NM_024658.2,989-1007).
caagcatttcgctgtacaa

SEQ ID NO: 146758 - DNA, 19 bp, Homo sapiens
  siRNA target sequence for IPO4 (NM_024658.2,992-1010).
gcatttcgctgtacaagtt

SEQ ID NO: 146759 - DNA, 19 bp, Homo sapiens
  siRNA target sequence for IPO4 (NM_024658.2,1281-1299).
ccccatatcagcagctatt

SEQ ID NO: 146760 - DNA, 19 bp, Homo sapiens
  siRNA target sequence for IPO4 (NM_024658.2,1294-1312).
gctattcaagggaggtaat

SEQ ID NO: 146761 - DNA, 19 bp, Homo sapiens
  siRNA target sequence for IPO4 (NM_024658.2,1317-1335).
ctgctcctcgcctacttga

SEQ ID NO: 146762 - DNA, 19 bp, Homo sapiens
  siRNA target sequence for IPO4 (NM_024658.2,1320-1338).
ctcctcgcctacttgaagt

SEQ ID NO: 146763 - DNA, 19 bp, Homo sapiens
  siRNA target sequence for IPO4 (NM_024658.2,1426-1444).
cctaccttccggagcttat

SEQ ID NO: 146764 - DNA, 19 bp, Homo sapiens
  siRNA target sequence for IPO4 (NM_024658.2,1430-1448).
ccttccggagcttatggaa

SEQ ID NO: 146765 - DNA, 19 bp, Homo sapiens
  siRNA target sequence for IPO4 (NM_024658.2,1431-1449).
cttccggagcttatggaat

SEQ ID NO: 146766 - DNA, 19 bp, Homo sapiens
  siRNA target sequence for IPO4 (NM_024658.2,1509-1527).
gccctgggagccattgcta

SEQ ID NO: 146767 - DNA, 19 bp, Homo sapiens
  siRNA target sequence for IPO4 (NM_024658.2,1578-1596).
ctgcgggaattcctgttaa

SEQ ID NO: 146768 - DNA, 19 bp, Homo sapiens
  siRNA target sequence for IPO4 (NM_024658.2,1580-1598).
gcgggaattcctgttaaca

SEQ ID NO: 146769 - DNA, 19 bp, Homo sapiens
  siRNA target sequence for IPO4 (NM_024658.2,2868-2886).
cgtgtccgtgacaacatct

SEQ ID NO: 146770 - DNA, 19 bp, Homo sapiens
  siRNA target sequence for IPO4 (NM_024658.2,3037-3055).
gccctgaccaggttataga

SEQ ID NO: 146771 - DNA, 19 bp, Homo sapiens
  siRNA target sequence for IPO4 (NM_024658.2,3038-3056).
ccctgaccaggttatagat

SEQ ID NO: 146772 - DNA, 19 bp, Homo sapiens
  siRNA target sequence for IPO4 (NM_024658.2,3164-3182).
gcacaccgacagctttcaa

SEQ ID NO: 146773 - DNA, 19 bp, Homo sapiens
  siRNA target sequence for IPO4 (NM_024658.2,3193-3211).
gctcactgcctgttgacaa

SEQ ID NO: 146774 - DNA, 19 bp, Homo sapiens
  siRNA target sequence for ITIH1 (NM_002215.1,62-80).
gcatgtacctggtatctct

SEQ ID NO: 146775 - DNA, 19 bp, Homo sapiens
  siRNA target sequence for ITIH1 (NM_002215.1,175-193).
gtgttcatccggagtttga

SEQ ID NO: 146776 - DNA, 19 bp, Homo sapiens
  siRNA target sequence for ITIH1 (NM_002215.1,215-233).
ctcgcttcgcccactatgt

SEQ ID NO: 146777 - DNA, 19 bp, Homo sapiens
  siRNA target sequence for ITIH1 (NM_002215.1,335-353).
cagatggaaacgcatttat

SEQ ID NO: 146778 - DNA, 19 bp, Homo sapiens
  siRNA target sequence for ITIH1 (NM_002215.1,345-363).
cgcatttatcggagacata

SEQ ID NO: 146779 - DNA, 19 bp, Homo sapiens
  siRNA target sequence for ITIH1 (NM_002215.1,346-364).
gcatttatcggagacataa

SEQ ID NO: 146780 - DNA, 19 bp, Homo sapiens
  siRNA target sequence for ITIH1 (NM_002215.1,347-365).
catttatcggagacataaa

SEQ ID NO: 146781 - DNA, 19 bp, Homo sapiens
  siRNA target sequence for ITIH1 (NM_002215.1,434-452).
gggcctcggggagaactat

SEQ ID NO: 146782 - DNA, 19 bp, Homo sapiens
  siRNA target sequence for ITIH1 (NM_002215.1,443-461).
ggagaactatggagcaatt

SEQ ID NO: 146783 - DNA, 19 bp, Homo sapiens
  siRNA target sequence for ITIH1 (NM_002215.1,498-516).
cacgtttcagctgacttat

SEQ ID NO: 146784 - DNA, 19 bp, Homo sapiens
  siRNA target sequence for ITIH1 (NM_002215.1,500-518).
cgtttcagctgacttatga

SEQ ID NO: 146785 - DNA, 19 bp, Homo sapiens
  siRNA target sequence for ITIH1 (NM_002215.1,580-598).
ctggtgcatcattttgaga

SEQ ID NO: 146786 - DNA, 19 bp, Homo sapiens
  siRNA target sequence for ITIH1 (NM_002215.1,673-691).
gcagcccaaactatcaaga

SEQ ID NO: 146787 - DNA, 19 bp, Homo sapiens
  siRNA target sequence for ITIH1 (NM_002215.1,676-694).
gcccaaactatcaagaagt

SEQ ID NO: 146788 - DNA, 19 bp, Homo sapiens
  siRNA target sequence for ITIH1 (NM_002215.1,764-782).
gctctacatccttactgaa

SEQ ID NO: 146789 - DNA, 19 bp, Homo sapiens
  siRNA target sequence for ITIH1 (NM_002215.1,891-909).
gaacaagaacgtggttttt

SEQ ID NO: 146790 - DNA, 19 bp, Homo sapiens
  siRNA target sequence for ITIH1 (NM_002215.1,1142-1160).
gtttgctccggggaattga

SEQ ID NO: 146791 - DNA, 19 bp, Homo sapiens
  siRNA target sequence for ITIH1 (NM_002215.1,1150-1168).
cggggaattgagatcttga

SEQ ID NO: 146792 - DNA, 19 bp, Homo sapiens
  siRNA target sequence for ITIH1 (NM_002215.1,1151-1169).
ggggaattgagatcttgaa

SEQ ID NO: 146793 - DNA, 19 bp, Homo sapiens
  siRNA target sequence for ITIH1 (NM_002215.1,1256-1274).
cggaccgttcccaaatcct

SEQ ID NO: 146794 - DNA, 19 bp, Homo sapiens
  siRNA target sequence for ITIH1 (NM_002215.1,1301-1319).
gcaggttcccgctctacaa

SEQ ID NO: 146795 - DNA, 19 bp, Homo sapiens
  siRNA target sequence for ITIH1 (NM_002215.1,1511-1529).
cccagaaccaccataaaca

SEQ ID NO: 146796 - DNA, 19 bp, Homo sapiens
  siRNA target sequence for ITIH1 (NM_002215.1,1513-1531).
cagaaccaccataaacagt

SEQ ID NO: 146797 - DNA, 19 bp, Homo sapiens
  siRNA target sequence for ITIH1 (NM_002215.1,1563-1581).
gcgcattgctgacaacaaa

SEQ ID NO: 146798 - DNA, 19 bp, Homo sapiens
  siRNA target sequence for ITIH1 (NM_002215.1,1611-1629).
ccatggggagggacaagaa

SEQ ID NO: 146799 - DNA, 19 bp, Homo sapiens
  siRNA target sequence for ITIH1 (NM_002215.1,1612-1630).
catggggagggacaagaat

SEQ ID NO: 146800 - DNA, 19 bp, Homo sapiens
  siRNA target sequence for ITIH1 (NM_002215.1,1620-1638).
gggacaagaattcagtata

SEQ ID NO: 146801 - DNA, 19 bp, Homo sapiens
  siRNA target sequence for ITIH1 (NM_002215.1,1621-1639).
ggacaagaattcagtataa

SEQ ID NO: 146802 - DNA, 19 bp, Homo sapiens
  siRNA target sequence for ITIH1 (NM_002215.1,1624-1642).
caagaattcagtataacct

SEQ ID NO: 146803 - DNA, 19 bp, Homo sapiens
  siRNA target sequence for ITIH1 (NM_002215.1,2036-2054).
cagaccctcacttcatcat

SEQ ID NO: 146804 - DNA, 19 bp, Homo sapiens
  siRNA target sequence for ITIH1 (NM_002215.1,2236-2254).
cctgccacggactttcagt

SEQ ID NO: 146805 - DNA, 19 bp, Homo sapiens
  siRNA target sequence for ITIH1 (NM_002215.1,2622-2640).
ggtcaccaggggtttgcaa

SEQ ID NO: 146806 - DNA, 19 bp, Homo sapiens
  siRNA target sequence for ITIH1 (NM_002215.1,2681-2699).
cctgctggttcattcacaa

SEQ ID NO: 146807 - DNA, 19 bp, Homo sapiens
  siRNA target sequence for ITIH1 (NM_002215.1,2726-2744).
cctacactgattatatcgt

SEQ ID NO: 146808 - DNA, 19 bp, Homo sapiens
  siRNA target sequence for ITSN1 (NM_003024.1,142-160).
ggatatctgggccataact

SEQ ID NO: 146809 - DNA, 19 bp, Homo sapiens
  siRNA target sequence for ITSN1 (NM_003024.1,205-223).
gccaatatctggattcatt

SEQ ID NO: 146810 - DNA, 19 bp, Homo sapiens
  siRNA target sequence for ITSN1 (NM_003024.1,225-243).
ctggtgatcaagctagaaa

SEQ ID NO: 146811 - DNA, 19 bp, Homo sapiens
  siRNA target sequence for ITSN1 (NM_003024.1,228-246).
gtgatcaagctagaaactt

SEQ ID NO: 146812 - DNA, 19 bp, Homo sapiens
  siRNA target sequence for ITSN1 (NM_003024.1,294-312).
cactagctgacatgaataa

SEQ ID NO: 146813 - DNA, 19 bp, Homo sapiens
  siRNA target sequence for ITSN1 (NM_003024.1,326-344).
gatcaagtggagttttcca

SEQ ID NO: 146814 - DNA, 19 bp, Homo sapiens
  siRNA target sequence for ITSN1 (NM_003024.1,419-437).
caaccagttgctatttcta

SEQ ID NO: 146815 - DNA, 19 bp, Homo sapiens
  siRNA target sequence for ITSN1 (NM_003024.1,508-526).
gggatccattccagttgtt

SEQ ID NO: 146816 - DNA, 19 bp, Homo sapiens
  siRNA target sequence for ITSN1 (NM_003024.1,532-550).
gtctccaaccctagtatct

SEQ ID NO: 146817 - DNA, 19 bp, Homo sapiens
  siRNA target sequence for ITSN1 (NM_003024.1,589-607).
ggctccccctgttatacaa

SEQ ID NO: 146818 - DNA, 19 bp, Homo sapiens
  siRNA target sequence for ITSN1 (NM_003024.1,649-667).
gagttcttcctttagtaga

SEQ ID NO: 146819 - DNA, 19 bp, Homo sapiens
  siRNA target sequence for ITSN1 (NM_003024.1,671-689).
ggtccagggtcacaactaa

SEQ ID NO: 146820 - DNA, 19 bp, Homo sapiens
  siRNA target sequence for ITSN1 (NM_003024.1,672-690).
gtccagggtcacaactaaa

SEQ ID NO: 146821 - DNA, 19 bp, Homo sapiens
  siRNA target sequence for ITSN1 (NM_003024.1,674-692).
ccagggtcacaactaaaca

SEQ ID NO: 146822 - DNA, 19 bp, Homo sapiens
  siRNA target sequence for ITSN1 (NM_003024.1,752-770).
gctgttcctcagtcatcaa

SEQ ID NO: 146823 - DNA, 19 bp, Homo sapiens
  siRNA target sequence for ITSN1 (NM_003024.1,773-791).
ctgaaatacaggcaattat

SEQ ID NO: 146824 - DNA, 19 bp, Homo sapiens
  siRNA target sequence for ITSN1 (NM_003024.1,793-811).
caatagtcatgacaaaact

SEQ ID NO: 146825 - DNA, 19 bp, Homo sapiens
  siRNA target sequence for ITSN1 (NM_003024.1,830-848).
ggtccccaagcaagaacta

SEQ ID NO: 146826 - DNA, 19 bp, Homo sapiens
  siRNA target sequence for ITSN1 (NM_003024.1,831-849).
gtccccaagcaagaactat

SEQ ID NO: 146827 - DNA, 19 bp, Homo sapiens
  siRNA target sequence for ITSN1 (NM_003024.1,835-853).
ccaagcaagaactattctt

SEQ ID NO: 146828 - DNA, 19 bp, Homo sapiens
  siRNA target sequence for ITSN1 (NM_003024.1,878-896).
cagctggcttcaatatgga

SEQ ID NO: 146829 - DNA, 19 bp, Homo sapiens
  siRNA target sequence for ITSN1 (NM_003024.1,880-898).
gctggcttcaatatggaat

SEQ ID NO: 146830 - DNA, 19 bp, Homo sapiens
  siRNA target sequence for ITSN1 (NM_003024.1,883-901).
ggcttcaatatggaatctt

SEQ ID NO: 146831 - DNA, 19 bp, Homo sapiens
  siRNA target sequence for ITSN1 (NM_003024.1,961-979).
cattgatgtagctatgtct

SEQ ID NO: 146832 - DNA, 19 bp, Homo sapiens
  siRNA target sequence for ITSN1 (NM_003024.1,998-1016).
gtcctgcctccagaataca

SEQ ID NO: 146833 - DNA, 19 bp, Homo sapiens
  siRNA target sequence for ITSN1 (NM_003024.1,1040-1058).
cgatctggcagtggtatat

SEQ ID NO: 146834 - DNA, 19 bp, Homo sapiens
  siRNA target sequence for ITSN1 (NM_003024.1,1044-1062).
ctggcagtggtatatctgt

SEQ ID NO: 146835 - DNA, 19 bp, Homo sapiens
  siRNA target sequence for ITSN1 (NM_003024.1,1068-1086).
gctcaacatctgtagatca

SEQ ID NO: 146836 - DNA, 19 bp, Homo sapiens
  siRNA target sequence for ITSN1 (NM_003024.1,1138-1156).
gaaattacctgtaacgttt

SEQ ID NO: 146837 - DNA, 19 bp, Homo sapiens
  siRNA target sequence for ITSN1 (NM_003024.1,1193-1211).
ctggaactggagaaacgaa

SEQ ID NO: 146838 - DNA, 19 bp, Homo sapiens
  siRNA target sequence for ITSN1 (NM_003024.1,1448-1466).
gagtgggaacggaatcgaa

SEQ ID NO: 146839 - DNA, 19 bp, Homo sapiens
  siRNA target sequence for ITSN1 (NM_003024.1,1504-1522).
ggacatagttgtactgaaa

SEQ ID NO: 146840 - DNA, 19 bp, Homo sapiens
  siRNA target sequence for ITSN1 (NM_003024.1,1618-1636).
cacccaaaggcaagaaatt

SEQ ID NO: 146841 - DNA, 19 bp, Homo sapiens
  siRNA target sequence for ITSN1 (NM_003024.1,1631-1649).
gaaattgagagcacaaaca

SEQ ID NO: 146842 - DNA, 19 bp, Homo sapiens
  siRNA target sequence for ITSN1 (NM_003024.1,1637-1655).
gagagcacaaacaaatcta

SEQ ID NO: 146843 - DNA, 19 bp, Homo sapiens
  siRNA target sequence for ITSN1 (NM_003024.1,1680-1698).
cccatctacagcaacaatt

SEQ ID NO: 146844 - DNA, 19 bp, Homo sapiens
  siRNA target sequence for ITSN1 (NM_003024.1,1681-1699).
ccatctacagcaacaatta

SEQ ID NO: 146845 - DNA, 19 bp, Homo sapiens
  siRNA target sequence for ITSN1 (NM_003024.1,1717-1735).
gcttggaagacttattcca

SEQ ID NO: 146846 - DNA, 19 bp, Homo sapiens
  siRNA target sequence for ITSN1 (NM_003024.1,1766-1784).
caagttcagcagaacagtt

SEQ ID NO: 146847 - DNA, 19 bp, Homo sapiens
  siRNA target sequence for ITSN1 (NM_003024.1,1780-1798).
cagtttgcacagagattca

SEQ ID NO: 146848 - DNA, 19 bp, Homo sapiens
  siRNA target sequence for ITSN1 (NM_003024.1,1789-1807).
cagagattcacttgttaca

SEQ ID NO: 146849 - DNA, 19 bp, Homo sapiens
  siRNA target sequence for ITSN1 (NM_003024.1,1791-1809).
gagattcacttgttacact

SEQ ID NO: 146850 - DNA, 19 bp, Homo sapiens
  siRNA target sequence for ITSN1 (NM_003024.1,1793-1811).
gattcacttgttacactta

SEQ ID NO: 146851 - DNA, 19 bp, Homo sapiens
  siRNA target sequence for ITSN1 (NM_003024.1,1895-1913).
ctacaggagattgatattt

SEQ ID NO: 146852 - DNA, 19 bp, Homo sapiens
  siRNA target sequence for ITSN1 (NM_003024.1,1934-1952).
ctaagagaaatacacaata

SEQ ID NO: 146853 - DNA, 19 bp, Homo sapiens
  siRNA target sequence for ITSN1 (NM_003024.1,1938-1956).
gagaaatacacaataagca

SEQ ID NO: 146854 - DNA, 19 bp, Homo sapiens
  siRNA target sequence for ITSN1 (NM_003024.1,2012-2030).
gaacgaaagatcatagaat

SEQ ID NO: 146855 - DNA, 19 bp, Homo sapiens
  siRNA target sequence for ITSN1 (NM_003024.1,2016-2034).
gaaagatcatagaattaga

SEQ ID NO: 146856 - DNA, 19 bp, Homo sapiens
  siRNA target sequence for ITSN1 (NM_003024.1,2344-2362).
ggcactgtacccctttgaa

SEQ ID NO: 146857 - DNA, 19 bp, Homo sapiens
  siRNA target sequence for ITSN1 (NM_003024.1,2345-2363).
gcactgtacccctttgaat

SEQ ID NO: 146858 - DNA, 19 bp, Homo sapiens
  siRNA target sequence for ITSN1 (NM_003024.1,2370-2388).
gccatgatgaaatcactat

SEQ ID NO: 146859 - DNA, 19 bp, Homo sapiens
  siRNA target sequence for ITSN1 (NM_003024.1,2454-2472).
gctggcttggaggagaatt

SEQ ID NO: 146860 - DNA, 19 bp, Homo sapiens
  siRNA target sequence for ITSN1 (NM_003024.1,2530-2548).
ggttcccgctccagtgaaa

SEQ ID NO: 146861 - DNA, 19 bp, Homo sapiens
  siRNA target sequence for ITSN1 (NM_003024.1,2633-2651).
ccctccacgacccctaata

SEQ ID NO: 146862 - DNA, 19 bp, Homo sapiens
  siRNA target sequence for ITSN1 (NM_003024.1,2634-2652).
cctccacgacccctaataa

SEQ ID NO: 146863 - DNA, 19 bp, Homo sapiens
  siRNA target sequence for ITSN1 (NM_003024.1,2770-2788).
gcagaggtccgcctttact

SEQ ID NO: 146864 - DNA, 19 bp, Homo sapiens
  siRNA target sequence for ITSN1 (NM_003024.1,2858-2876).
gctcaagccctatatcctt

SEQ ID NO: 146865 - DNA, 19 bp, Homo sapiens
  siRNA target sequence for ITSN1 (NM_003024.1,2981-2999).
ggttggttccccaagtctt

SEQ ID NO: 146866 - DNA, 19 bp, Homo sapiens
  siRNA target sequence for ITSN1 (NM_003024.1,2995-3013).
gtcttacgtgaaactcatt

SEQ ID NO: 146867 - DNA, 19 bp, Homo sapiens
  siRNA target sequence for ITSN1 (NM_003024.1,3017-3035).
gggcccataaggaagtcta

SEQ ID NO: 146868 - DNA, 19 bp, Homo sapiens
  siRNA target sequence for ITSN1 (NM_003024.1,3106-3124).
ggtcgtttcgggagaagaa

SEQ ID NO: 146869 - DNA, 19 bp, Homo sapiens
  siRNA target sequence for ITSN1 (NM_003024.1,3107-3125).
gtcgtttcgggagaagaat

SEQ ID NO: 146870 - DNA, 19 bp, Homo sapiens
  siRNA target sequence for ITSN1 (NM_003024.1,3110-3128).
gtttcgggagaagaattta

SEQ ID NO: 146871 - DNA, 19 bp, Homo sapiens
  siRNA target sequence for ITSN1 (NM_003024.1,3155-3173).
gagcaaggagatttaacct

SEQ ID NO: 146872 - DNA, 19 bp, Homo sapiens
  siRNA target sequence for ITSN1 (NM_003024.1,3157-3175).
gcaaggagatttaaccttt

SEQ ID NO: 146873 - DNA, 19 bp, Homo sapiens
  siRNA target sequence for ITSN1 (NM_003024.1,3182-3200).
ggggatgtgattttggtta

SEQ ID NO: 146874 - DNA, 19 bp, Homo sapiens
  siRNA target sequence for ITSN1 (NM_003024.1,3248-3266).
ggagtcttcccttctaact

SEQ ID NO: 146875 - DNA, 19 bp, Homo sapiens
  siRNA target sequence for ITSN1 (NM_003024.1,3249-3267).
gagtcttcccttctaacta

SEQ ID NO: 146876 - DNA, 19 bp, Homo sapiens
  siRNA target sequence for ITSN1 (NM_003024.1,3333-3351).
ctgaaattgcccaggttat

SEQ ID NO: 146877 - DNA, 19 bp, Homo sapiens
  siRNA target sequence for ITSN1 (NM_003024.1,3344-3362).
caggttattgcctcataca

SEQ ID NO: 146878 - DNA, 19 bp, Homo sapiens
  siRNA target sequence for ITSN1 (NM_003024.1,3483-3501).
gctggttcccagctaatta

SEQ ID NO: 146879 - DNA, 19 bp, Homo sapiens
  siRNA target sequence for ITSN1 (NM_003024.1,3484-3502).
ctggttcccagctaattat

SEQ ID NO: 146880 - DNA, 19 bp, Homo sapiens
  siRNA target sequence for ITSN1 (NM_003024.1,3486-3504).
ggttcccagctaattatgt

SEQ ID NO: 146881 - DNA, 19 bp, Homo sapiens
  siRNA target sequence for ITSN1 (NM_003024.1,3492-3510).
cagctaattatgtaaagct

SEQ ID NO: 146882 - DNA, 19 bp, Homo sapiens
  siRNA target sequence for ITSN1 (NM_003024.1,3518-3536).
cctgggacgagcaaaatca

SEQ ID NO: 146883 - DNA, 19 bp, Homo sapiens
  siRNA target sequence for ITSN1 (NM_003024.1,3763-3781).
gcaatggtgttcagactta

SEQ ID NO: 146884 - DNA, 19 bp, Homo sapiens
  siRNA target sequence for ITSN1 (NM_003024.1,3771-3789).
gttcagacttacatctctt

SEQ ID NO: 146885 - DNA, 19 bp, Homo sapiens
  siRNA target sequence for ITSN1 (NM_003024.1,3796-3814).
gttgaccccaactgaaaga

SEQ ID NO: 146886 - DNA, 19 bp, Homo sapiens
  siRNA target sequence for ITSN1 (NM_003024.1,3877-3895).
gctggtcacagagattttt

SEQ ID NO: 146887 - DNA, 19 bp, Homo sapiens
  siRNA target sequence for ITSN1 (NM_003024.1,3880-3898).
ggtcacagagatttttcaa

SEQ ID NO: 146888 - DNA, 19 bp, Homo sapiens
  siRNA target sequence for ITSN1 (NM_003024.1,3965-3983).
gagctgattatgtgtaata

SEQ ID NO: 146889 - DNA, 19 bp, Homo sapiens
  siRNA target sequence for ITSN1 (NM_003024.1,3968-3986).
ctgattatgtgtaatatca

SEQ ID NO: 146890 - DNA, 19 bp, Homo sapiens
  siRNA target sequence for ITSN1 (NM_003024.1,4213-4231).
gccactctctagttttata

SEQ ID NO: 146891 - DNA, 19 bp, Homo sapiens
  siRNA target sequence for ITSN1 (NM_003024.1,4217-4235).
ctctctagttttatactga

SEQ ID NO: 146892 - DNA, 19 bp, Homo sapiens
  siRNA target sequence for ITSN1 (NM_003024.1,4238-4256).
cctatgcaacgggtaacaa

SEQ ID NO: 146893 - DNA, 19 bp, Homo sapiens
  siRNA target sequence for ITSN1 (NM_003024.1,4257-4275).
gatacccactgatcattaa

SEQ ID NO: 146894 - DNA, 19 bp, Homo sapiens
  siRNA target sequence for ITSN1 (NM_003024.1,4308-4326).
cggaccacagccacttgaa

SEQ ID NO: 146895 - DNA, 19 bp, Homo sapiens
  siRNA target sequence for ITSN1 (NM_003024.1,4447-4465).
gcaacttgtgttcaattca

SEQ ID NO: 146896 - DNA, 19 bp, Homo sapiens
  siRNA target sequence for ITSN1 (NM_003024.1,4602-4620).
ctggcaccgacaaagtctt

SEQ ID NO: 146897 - DNA, 19 bp, Homo sapiens
  siRNA target sequence for ITSN1 (NM_003024.1,4636-4654).
cctgcagtataaaatgtat

SEQ ID NO: 146898 - DNA, 19 bp, Homo sapiens
  siRNA target sequence for ITSN1 (NM_003024.1,4669-4687).
cctaaatgaggttctagta

SEQ ID NO: 146899 - DNA, 19 bp, Homo sapiens
  siRNA target sequence for ITSN1 (NM_003024.1,4736-4754).
cacattgaccgcgtctata

SEQ ID NO: 146900 - DNA, 19 bp, Homo sapiens
  siRNA target sequence for ITSN1 (NM_003024.1,4738-4756).
cattgaccgcgtctatact

SEQ ID NO: 146901 - DNA, 19 bp, Homo sapiens
  siRNA target sequence for ITSN1 (NM_003024.1,4757-4775).
ctccgagcagaaagcataa

SEQ ID NO: 146902 - DNA, 19 bp, Homo sapiens
  siRNA target sequence for ITSN1 (NM_003024.1,4759-4777).
ccgagcagaaagcataaat

SEQ ID NO: 146903 - DNA, 19 bp, Homo sapiens
  siRNA target sequence for ITSN1 (NM_003024.1,4935-4953).
cctgtcggtcacatggaaa

SEQ ID NO: 146904 - DNA, 19 bp, Homo sapiens
  siRNA target sequence for ITSN1 (NM_003024.1,5147-5165).
cgtgtggcggacatcaaga

SEQ ID NO: 146905 - DNA, 19 bp, Homo sapiens
  siRNA target sequence for ITSN1 (NM_003024.1,5241-5259).
gcttggacctgcagttgtt

SEQ ID NO: 146906 - DNA, 19 bp, Homo sapiens
  siRNA target sequence for ITSN2 (NM_006277.1,275-293).
ccaaacatgtgggctatta

SEQ ID NO: 146907 - DNA, 19 bp, Homo sapiens
  siRNA target sequence for ITSN2 (NM_006277.1,286-304).
ggctattacctctgaagaa

SEQ ID NO: 146908 - DNA, 19 bp, Homo sapiens
  siRNA target sequence for ITSN2 (NM_006277.1,341-359).
ccttcaggaggttacataa

SEQ ID NO: 146909 - DNA, 19 bp, Homo sapiens
  siRNA target sequence for ITSN2 (NM_006277.1,362-380).
ggtgatcaagcacgtaatt

SEQ ID NO: 146910 - DNA, 19 bp, Homo sapiens
  siRNA target sequence for ITSN2 (NM_006277.1,363-381).
gtgatcaagcacgtaattt

SEQ ID NO: 146911 - DNA, 19 bp, Homo sapiens
  siRNA target sequence for ITSN2 (NM_006277.1,374-392).
cgtaattttttcctacaat

SEQ ID NO: 146912 - DNA, 19 bp, Homo sapiens
  siRNA target sequence for ITSN2 (NM_006277.1,426-444).
gggctttatcagacctaaa

SEQ ID NO: 146913 - DNA, 19 bp, Homo sapiens
  siRNA target sequence for ITSN2 (NM_006277.1,428-446).
gctttatcagacctaaaca

SEQ ID NO: 146914 - DNA, 19 bp, Homo sapiens
  siRNA target sequence for ITSN2 (NM_006277.1,467-485).
caagagttctccatagcta

SEQ ID NO: 146915 - DNA, 19 bp, Homo sapiens
  siRNA target sequence for ITSN2 (NM_006277.1,527-545).
gtggttctccctcctatta

SEQ ID NO: 146916 - DNA, 19 bp, Homo sapiens
  siRNA target sequence for ITSN2 (NM_006277.1,530-548).
gttctccctcctattatga

SEQ ID NO: 146917 - DNA, 19 bp, Homo sapiens
  siRNA target sequence for ITSN2 (NM_006277.1,547-565).
gaagcaaccccctatgttt

SEQ ID NO: 146918 - DNA, 19 bp, Homo sapiens
  siRNA target sequence for ITSN2 (NM_006277.1,641-659).
gcacctataacatcattgt

SEQ ID NO: 146919 - DNA, 19 bp, Homo sapiens
  siRNA target sequence for ITSN2 (NM_006277.1,747-765).
gaaccgccagtctcattca

SEQ ID NO: 146920 - DNA, 19 bp, Homo sapiens
  siRNA target sequence for ITSN2 (NM_006277.1,764-782).
cagcctttacccattcctt

SEQ ID NO: 146921 - DNA, 19 bp, Homo sapiens
  siRNA target sequence for ITSN2 (NM_006277.1,810-828).
catcttatagtctgatgat

SEQ ID NO: 146922 - DNA, 19 bp, Homo sapiens
  siRNA target sequence for ITSN2 (NM_006277.1,856-874).
gaaagcgcagtctctgatt

SEQ ID NO: 146923 - DNA, 19 bp, Homo sapiens
  siRNA target sequence for ITSN2 (NM_006277.1,860-878).
gcgcagtctctgattgatt

SEQ ID NO: 146924 - DNA, 19 bp, Homo sapiens
  siRNA target sequence for ITSN2 (NM_006277.1,861-879).
cgcagtctctgattgattt

SEQ ID NO: 146925 - DNA, 19 bp, Homo sapiens
  siRNA target sequence for ITSN2 (NM_006277.1,862-880).
gcagtctctgattgattta

SEQ ID NO: 146926 - DNA, 19 bp, Homo sapiens
  siRNA target sequence for ITSN2 (NM_006277.1,865-883).
gtctctgattgatttagga

SEQ ID NO: 146927 - DNA, 19 bp, Homo sapiens
  siRNA target sequence for ITSN2 (NM_006277.1,871-889).
gattgatttaggatctagt

SEQ ID NO: 146928 - DNA, 19 bp, Homo sapiens
  siRNA target sequence for ITSN2 (NM_006277.1,956-974).
gttcctcagcctacaagat

SEQ ID NO: 146929 - DNA, 19 bp, Homo sapiens
  siRNA target sequence for ITSN2 (NM_006277.1,959-977).
cctcagcctacaagattaa

SEQ ID NO: 146930 - DNA, 19 bp, Homo sapiens
  siRNA target sequence for ITSN2 (NM_006277.1,964-982).
gcctacaagattaaaatat

SEQ ID NO: 146931 - DNA, 19 bp, Homo sapiens
  siRNA target sequence for ITSN2 (NM_006277.1,1020-1038).
gatatctctcaggttttca

SEQ ID NO: 146932 - DNA, 19 bp, Homo sapiens
  siRNA target sequence for ITSN2 (NM_006277.1,1127-1145).
ctaaaagcagaagagttta

SEQ ID NO: 146933 - DNA, 19 bp, Homo sapiens
  siRNA target sequence for ITSN2 (NM_006277.1,1186-1204).
gccattaccactgacttta

SEQ ID NO: 146934 - DNA, 19 bp, Homo sapiens
  siRNA target sequence for ITSN2 (NM_006277.1,1333-1351).
caaacggaaagccaactat

SEQ ID NO: 146935 - DNA, 19 bp, Homo sapiens
  siRNA target sequence for ITSN2 (NM_006277.1,1421-1439).
cgtaaagcccagaaagaaa

SEQ ID NO: 146936 - DNA, 19 bp, Homo sapiens
  siRNA target sequence for ITSN2 (NM_006277.1,1445-1463).
gagtgggaacgaaaacaga

SEQ ID NO: 146937 - DNA, 19 bp, Homo sapiens
  siRNA target sequence for ITSN2 (NM_006277.1,1604-1622).
cgacaacgtcgcttagaat

SEQ ID NO: 146938 - DNA, 19 bp, Homo sapiens
  siRNA target sequence for ITSN2 (NM_006277.1,1614-1632).
gcttagaatgggagagaat

SEQ ID NO: 146939 - DNA, 19 bp, Homo sapiens
  siRNA target sequence for ITSN2 (NM_006277.1,1635-1653).
ggcgacaggagcttctcaa

SEQ ID NO: 146940 - DNA, 19 bp, Homo sapiens
  siRNA target sequence for ITSN2 (NM_006277.1,1636-1654).
gcgacaggagcttctcaat

SEQ ID NO: 146941 - DNA, 19 bp, Homo sapiens
  siRNA target sequence for ITSN2 (NM_006277.1,1766-1784).
caggatgtccgactcaaaa

SEQ ID NO: 146942 - DNA, 19 bp, Homo sapiens
  siRNA target sequence for ITSN2 (NM_006277.1,1898-1916).
ctggtacctgagaagcaat

SEQ ID NO: 146943 - DNA, 19 bp, Homo sapiens
  siRNA target sequence for ITSN2 (NM_006277.1,1901-1919).
gtacctgagaagcaattat

SEQ ID NO: 146944 - DNA, 19 bp, Homo sapiens
  siRNA target sequence for ITSN2 (NM_006277.1,1939-1957).
catgcagttcagtaacaca

SEQ ID NO: 146945 - DNA, 19 bp, Homo sapiens
  siRNA target sequence for ITSN2 (NM_006277.1,1965-1983).
caggggtcagtttacttca

SEQ ID NO: 146946 - DNA, 19 bp, Homo sapiens
  siRNA target sequence for ITSN2 (NM_006277.1,1967-1985).
ggggtcagtttacttcata

SEQ ID NO: 146947 - DNA, 19 bp, Homo sapiens
  siRNA target sequence for ITSN2 (NM_006277.1,1968-1986).
gggtcagtttacttcataa

SEQ ID NO: 146948 - DNA, 19 bp, Homo sapiens
  siRNA target sequence for ITSN2 (NM_006277.1,2006-2024).
gaattatgccaaagactta

SEQ ID NO: 146949 - DNA, 19 bp, Homo sapiens
  siRNA target sequence for ITSN2 (NM_006277.1,2030-2048).
cagttagatgctcttgaaa

SEQ ID NO: 146950 - DNA, 19 bp, Homo sapiens
  siRNA target sequence for ITSN2 (NM_006277.1,2077-2095).
ggattcttttaacaatcaa

SEQ ID NO: 146951 - DNA, 19 bp, Homo sapiens
  siRNA target sequence for ITSN2 (NM_006277.1,2216-2234).
gcccttgaacagctttata

SEQ ID NO: 146952 - DNA, 19 bp, Homo sapiens
  siRNA target sequence for ITSN2 (NM_006277.1,2217-2235).
cccttgaacagctttataa

SEQ ID NO: 146953 - DNA, 19 bp, Homo sapiens
  siRNA target sequence for ITSN2 (NM_006277.1,2222-2240).
gaacagctttataagatca

SEQ ID NO: 146954 - DNA, 19 bp, Homo sapiens
  siRNA target sequence for ITSN2 (NM_006277.1,2243-2261).
cgtgacaagttgaaggaaa

SEQ ID NO: 146955 - DNA, 19 bp, Homo sapiens
  siRNA target sequence for ITSN2 (NM_006277.1,2244-2262).
gtgacaagttgaaggaaat

SEQ ID NO: 146956 - DNA, 19 bp, Homo sapiens
  siRNA target sequence for ITSN2 (NM_006277.1,2447-2465).
gagaaacaacgtaaggata

SEQ ID NO: 146957 - DNA, 19 bp, Homo sapiens
  siRNA target sequence for ITSN2 (NM_006277.1,2453-2471).
caacgtaaggataaggata

SEQ ID NO: 146958 - DNA, 19 bp, Homo sapiens
  siRNA target sequence for ITSN2 (NM_006277.1,2456-2474).
cgtaaggataaggatactt

SEQ ID NO: 146959 - DNA, 19 bp, Homo sapiens
  siRNA target sequence for ITSN2 (NM_006277.1,2461-2479).
ggataaggatactttgaaa

SEQ ID NO: 146960 - DNA, 19 bp, Homo sapiens
  siRNA target sequence for ITSN2 (NM_006277.1,2495-2513).
cgtgagacagctagtgttt

SEQ ID NO: 146961 - DNA, 19 bp, Homo sapiens
  siRNA target sequence for ITSN2 (NM_006277.1,2504-2522).
gctagtgttttggtgaatt

SEQ ID NO: 146962 - DNA, 19 bp, Homo sapiens
  siRNA target sequence for ITSN2 (NM_006277.1,2516-2534).
gtgaattatagagcattat

SEQ ID NO: 146963 - DNA, 19 bp, Homo sapiens
  siRNA target sequence for ITSN2 (NM_006277.1,2558-2576).
gatgagatgagttttaatt

SEQ ID NO: 146964 - DNA, 19 bp, Homo sapiens
  siRNA target sequence for ITSN2 (NM_006277.1,2618-2636).
cctggttggctttatggta

SEQ ID NO: 146965 - DNA, 19 bp, Homo sapiens
  siRNA target sequence for ITSN2 (NM_006277.1,2622-2640).
gttggctttatggtagttt

SEQ ID NO: 146966 - DNA, 19 bp, Homo sapiens
  siRNA target sequence for ITSN2 (NM_006277.1,2655-2673).
gctggtttccatgcaatta

SEQ ID NO: 146967 - DNA, 19 bp, Homo sapiens
  siRNA target sequence for ITSN2 (NM_006277.1,2656-2674).
ctggtttccatgcaattat

SEQ ID NO: 146968 - DNA, 19 bp, Homo sapiens
  siRNA target sequence for ITSN2 (NM_006277.1,2663-2681).
ccatgcaattatgtagaaa

SEQ ID NO: 146969 - DNA, 19 bp, Homo sapiens
  siRNA target sequence for ITSN2 (NM_006277.1,2686-2704).
gccatcaagtgaaaatgaa

SEQ ID NO: 146970 - DNA, 19 bp, Homo sapiens
  siRNA target sequence for ITSN2 (NM_006277.1,2795-2813).
ccagcatcagtgactgatt

SEQ ID NO: 146971 - DNA, 19 bp, Homo sapiens
  siRNA target sequence for ITSN2 (NM_006277.1,2978-2996).
gataaccacttgaacttct

SEQ ID NO: 146972 - DNA, 19 bp, Homo sapiens
  siRNA target sequence for ITSN2 (NM_006277.1,3068-3086).
ggatggtttcccaaatctt

SEQ ID NO: 146973 - DNA, 19 bp, Homo sapiens
  siRNA target sequence for ITSN2 (NM_006277.1,3069-3087).
gatggtttcccaaatctta

SEQ ID NO: 146974 - DNA, 19 bp, Homo sapiens
  siRNA target sequence for ITSN2 (NM_006277.1,3146-3164).
gctgtaaataagaaaccta

SEQ ID NO: 146975 - DNA, 19 bp, Homo sapiens
  siRNA target sequence for ITSN2 (NM_006277.1,3165-3183).
cctcggcagcctattcagt

SEQ ID NO: 146976 - DNA, 19 bp, Homo sapiens
  siRNA target sequence for ITSN2 (NM_006277.1,3223-3241).
ggaacctggagatttgact

SEQ ID NO: 146977 - DNA, 19 bp, Homo sapiens
  siRNA target sequence for ITSN2 (NM_006277.1,3306-3324).
gagatagaagtggaatttt

SEQ ID NO: 146978 - DNA, 19 bp, Homo sapiens
  siRNA target sequence for ITSN2 (NM_006277.1,3375-3393).
gcaagtctggagcatcaaa

SEQ ID NO: 146979 - DNA, 19 bp, Homo sapiens
  siRNA target sequence for ITSN2 (NM_006277.1,3376-3394).
caagtctggagcatcaaat

SEQ ID NO: 146980 - DNA, 19 bp, Homo sapiens
  siRNA target sequence for ITSN2 (NM_006277.1,3379-3397).
gtctggagcatcaaataaa

SEQ ID NO: 146981 - DNA, 19 bp, Homo sapiens
  siRNA target sequence for ITSN2 (NM_006277.1,3404-3422).
gagattgctcaggtaactt

SEQ ID NO: 146982 - DNA, 19 bp, Homo sapiens
  siRNA target sequence for ITSN2 (NM_006277.1,3415-3433).
ggtaacttcagcatatgtt

SEQ ID NO: 146983 - DNA, 19 bp, Homo sapiens
  siRNA target sequence for ITSN2 (NM_006277.1,3507-3525).
ggtggcaaggagagttaca

SEQ ID NO: 146984 - DNA, 19 bp, Homo sapiens
  siRNA target sequence for ITSN2 (NM_006277.1,3623-3641).
gtatgtcaggtgattgcta

SEQ ID NO: 146985 - DNA, 19 bp, Homo sapiens
  siRNA target sequence for ITSN2 (NM_006277.1,3649-3667).
ctatgcagcaaataatgaa

SEQ ID NO: 146986 - DNA, 19 bp, Homo sapiens
  siRNA target sequence for ITSN2 (NM_006277.1,3695-3713).
ctcattaatgttatgaaca

SEQ ID NO: 146987 - DNA, 19 bp, Homo sapiens
  siRNA target sequence for ITSN2 (NM_006277.1,3748-3766).
cggggtgactggtctcttt

SEQ ID NO: 146988 - DNA, 19 bp, Homo sapiens
  siRNA target sequence for ITSN2 (NM_006277.1,3752-3770).
gtgactggtctctttcctt

SEQ ID NO: 146989 - DNA, 19 bp, Homo sapiens
  siRNA target sequence for ITSN2 (NM_006277.1,3767-3785).
ccttcaaactacgttaaga

SEQ ID NO: 146990 - DNA, 19 bp, Homo sapiens
  siRNA target sequence for ITSN2 (NM_006277.1,3768-3786).
cttcaaactacgttaagat

SEQ ID NO: 146991 - DNA, 19 bp, Homo sapiens
  siRNA target sequence for ITSN2 (NM_006277.1,3852-3870).
caattgagaggaaaagaca

SEQ ID NO: 146992 - DNA, 19 bp, Homo sapiens
  siRNA target sequence for ITSN2 (NM_006277.1,3867-3885).
gacagggctatattcatga

SEQ ID NO: 146993 - DNA, 19 bp, Homo sapiens
  siRNA target sequence for ITSN2 (NM_006277.1,3925-3943).
gctcgtcgtcgaggttttt

SEQ ID NO: 146994 - DNA, 19 bp, Homo sapiens
  siRNA target sequence for ITSN2 (NM_006277.1,3929-3947).
gtcgtcgaggtttttcaga

SEQ ID NO: 146995 - DNA, 19 bp, Homo sapiens
  siRNA target sequence for ITSN2 (NM_006277.1,3931-3949).
cgtcgaggtttttcagaaa

SEQ ID NO: 146996 - DNA, 19 bp, Homo sapiens
  siRNA target sequence for ITSN2 (NM_006277.1,3956-3974).
gcagagtcaggctttctca

SEQ ID NO: 146997 - DNA, 19 bp, Homo sapiens
  siRNA target sequence for ITSN2 (NM_006277.1,3982-4000).
ggagatggccctgattttt

SEQ ID NO: 146998 - DNA, 19 bp, Homo sapiens
  siRNA target sequence for ITSN2 (NM_006277.1,3985-4003).
gatggccctgatttttgtt

SEQ ID NO: 146999 - DNA, 19 bp, Homo sapiens
  siRNA target sequence for ITSN2 (NM_006277.1,3989-4007).
gccctgatttttgttaact

SEQ ID NO: 147000 - DNA, 19 bp, Homo sapiens
  siRNA target sequence for ITSN2 (NM_006277.1,4310-4328).
ccactgctcatcagaagta

SEQ ID NO: 147001 - DNA, 19 bp, Homo sapiens
  siRNA target sequence for ITSN2 (NM_006277.1,4311-4329).
cactgctcatcagaagtat

SEQ ID NO: 147002 - DNA, 19 bp, Homo sapiens
  siRNA target sequence for ITSN2 (NM_006277.1,4399-4417).
gctgtgctctcaagtgaat

SEQ ID NO: 147003 - DNA, 19 bp, Homo sapiens
  siRNA target sequence for ITSN2 (NM_006277.1,4485-4503).
gcctcgcggagcaacttat

SEQ ID NO: 147004 - DNA, 19 bp, Homo sapiens
  siRNA target sequence for ITSN2 (NM_006277.1,4486-4504).
cctcgcggagcaacttatt

SEQ ID NO: 147005 - DNA, 19 bp, Homo sapiens
  siRNA target sequence for ITSN2 (NM_006277.1,4487-4505).
ctcgcggagcaacttattt

SEQ ID NO: 147006 - DNA, 19 bp, Homo sapiens
  siRNA target sequence for ITSN2 (NM_006277.1,4543-4561).
cttacacagtgggaaatta

SEQ ID NO: 147007 - DNA, 19 bp, Homo sapiens
  siRNA target sequence for ITSN2 (NM_006277.1,4588-4606).
gcacggattcctcttcaat

SEQ ID NO: 147008 - DNA, 19 bp, Homo sapiens
  siRNA target sequence for ITSN2 (NM_006277.1,4650-4668).
cctctggctctgagaaact

SEQ ID NO: 147009 - DNA, 19 bp, Homo sapiens
  siRNA target sequence for ITSN2 (NM_006277.1,4677-4695).
cgaagtccaatgctcaatt

SEQ ID NO: 147010 - DNA, 19 bp, Homo sapiens
  siRNA target sequence for ITSN2 (NM_006277.1,4688-4706).
gctcaattcaaaatgtata

SEQ ID NO: 147011 - DNA, 19 bp, Homo sapiens
  siRNA target sequence for ITSN2 (NM_006277.1,4808-4826).
ctccgaacagacaacatta

SEQ ID NO: 147012 - DNA, 19 bp, Homo sapiens
  siRNA target sequence for ITSN2 (NM_006277.1,4810-4828).
ccgaacagacaacattaat

SEQ ID NO: 147013 - DNA, 19 bp, Homo sapiens
  siRNA target sequence for ITSN2 (NM_006277.1,4913-4931).
caagcccgctcccaaaaga

SEQ ID NO: 147014 - DNA, 19 bp, Homo sapiens
  siRNA target sequence for ITSN2 (NM_006277.1,4916-4934).
gcccgctcccaaaagactt

SEQ ID NO: 147015 - DNA, 19 bp, Homo sapiens
  siRNA target sequence for ITSN2 (NM_006277.1,5179-5197).
cctgggtcgtactgaaatt

SEQ ID NO: 147016 - DNA, 19 bp, Homo sapiens
  siRNA target sequence for ITSN2 (NM_006277.1,5182-5200).
gggtcgtactgaaattcca

SEQ ID NO: 147017 - DNA, 19 bp, Homo sapiens
  siRNA target sequence for ITSN2 (NM_006277.1,5198-5216).
ccagtggcaaaaattcgaa

SEQ ID NO: 147018 - DNA, 19 bp, Homo sapiens
  siRNA target sequence for ITSN2 (NM_006277.1,5292-5310).
gttttgacctgcagctttt

SEQ ID NO: 147019 - DNA, 19 bp, Homo sapiens
  siRNA target sequence for JAG1 (NM_000214.1,623-641).
gtgtgacacatacttcaaa

SEQ ID NO: 147020 - DNA, 19 bp, Homo sapiens
  siRNA target sequence for JAG1 (NM_000214.1,770-788).
catcgtgctgcctttcagt

SEQ ID NO: 147021 - DNA, 19 bp, Homo sapiens
  siRNA target sequence for JAG1 (NM_000214.1,796-814).
ggccgaggtcctatacgtt

SEQ ID NO: 147022 - DNA, 19 bp, Homo sapiens
  siRNA target sequence for JAG1 (NM_000214.1,824-842).
ggcgtgggattccagtaat

SEQ ID NO: 147023 - DNA, 19 bp, Homo sapiens
  siRNA target sequence for JAG1 (NM_000214.1,847-865).
ccgttcaacctgacagtat

SEQ ID NO: 147024 - DNA, 19 bp, Homo sapiens
  siRNA target sequence for JAG1 (NM_000214.1,848-866).
cgttcaacctgacagtatt

SEQ ID NO: 147025 - DNA, 19 bp, Homo sapiens
  siRNA target sequence for JAG1 (NM_000214.1,849-867).
gttcaacctgacagtatta

SEQ ID NO: 147026 - DNA, 19 bp, Homo sapiens
  siRNA target sequence for JAG1 (NM_000214.1,856-874).
ctgacagtattattgaaaa

SEQ ID NO: 147027 - DNA, 19 bp, Homo sapiens
  siRNA target sequence for JAG1 (NM_000214.1,880-898).
ctcactcgggcatgatcaa

SEQ ID NO: 147028 - DNA, 19 bp, Homo sapiens
  siRNA target sequence for JAG1 (NM_000214.1,934-952).
cgggcgttgcccactttga

SEQ ID NO: 147029 - DNA, 19 bp, Homo sapiens
  siRNA target sequence for JAG1 (NM_000214.1,936-954).
ggcgttgcccactttgagt

SEQ ID NO: 147030 - DNA, 19 bp, Homo sapiens
  siRNA target sequence for JAG1 (NM_000214.1,937-955).
gcgttgcccactttgagta

SEQ ID NO: 147031 - DNA, 19 bp, Homo sapiens
  siRNA target sequence for JAG1 (NM_000214.1,938-956).
cgttgcccactttgagtat

SEQ ID NO: 147032 - DNA, 19 bp, Homo sapiens
  siRNA target sequence for JAG1 (NM_000214.1,942-960).
gcccactttgagtatcaga

SEQ ID NO: 147033 - DNA, 19 bp, Homo sapiens
  siRNA target sequence for JAG1 (NM_000214.1,1016-1034).
ccccagagatgacttcttt

SEQ ID NO: 147034 - DNA, 19 bp, Homo sapiens
  siRNA target sequence for JAG1 (NM_000214.1,1094-1112).
cgaatgtaacagagctatt

SEQ ID NO: 147035 - DNA, 19 bp, Homo sapiens
  siRNA target sequence for JAG1 (NM_000214.1,1185-1203).
caaggcctgtactgtgata

SEQ ID NO: 147036 - DNA, 19 bp, Homo sapiens
  siRNA target sequence for JAG1 (NM_000214.1,1188-1206).
ggcctgtactgtgataagt

SEQ ID NO: 147037 - DNA, 19 bp, Homo sapiens
  siRNA target sequence for JAG1 (NM_000214.1,1289-1307).
ctgtgacaaagatctcaat

SEQ ID NO: 147038 - DNA, 19 bp, Homo sapiens
  siRNA target sequence for JAG1 (NM_000214.1,1332-1350).
ctcaacgggggaacttgta

SEQ ID NO: 147039 - DNA, 19 bp, Homo sapiens
  siRNA target sequence for JAG1 (NM_000214.1,1359-1377).
ggccctgacaaatatcagt

SEQ ID NO: 147040 - DNA, 19 bp, Homo sapiens
  siRNA target sequence for JAG1 (NM_000214.1,1382-1400).
ctgccctgaggggtattca

SEQ ID NO: 147041 - DNA, 19 bp, Homo sapiens
  siRNA target sequence for JAG1 (NM_000214.1,1539-1557).
gatgactgttctcctaata

SEQ ID NO: 147042 - DNA, 19 bp, Homo sapiens
  siRNA target sequence for JAG1 (NM_000214.1,1542-1560).
gactgttctcctaataact

SEQ ID NO: 147043 - DNA, 19 bp, Homo sapiens
  siRNA target sequence for JAG1 (NM_000214.1,1587-1605).
ctggttaacggatttaagt

SEQ ID NO: 147044 - DNA, 19 bp, Homo sapiens
  siRNA target sequence for JAG1 (NM_000214.1,1589-1607).
ggttaacggatttaagtgt

SEQ ID NO: 147045 - DNA, 19 bp, Homo sapiens
  siRNA target sequence for JAG1 (NM_000214.1,1620-1638).
cagtggactgggaaaacgt

SEQ ID NO: 147046 - DNA, 19 bp, Homo sapiens
  siRNA target sequence for JAG1 (NM_000214.1,1630-1648).
ggaaaacgtgccagttaga

SEQ ID NO: 147047 - DNA, 19 bp, Homo sapiens
  siRNA target sequence for JAG1 (NM_000214.1,1631-1649).
gaaaacgtgccagttagat

SEQ ID NO: 147048 - DNA, 19 bp, Homo sapiens
  siRNA target sequence for JAG1 (NM_000214.1,1656-1674).
gaatgtgaggccaaacctt

SEQ ID NO: 147049 - DNA, 19 bp, Homo sapiens
  siRNA target sequence for JAG1 (NM_000214.1,1662-1680).
gaggccaaaccttgtgtaa

SEQ ID NO: 147050 - DNA, 19 bp, Homo sapiens
  siRNA target sequence for JAG1 (NM_000214.1,1682-1700).
cgccaaatcctgtaagaat

SEQ ID NO: 147051 - DNA, 19 bp, Homo sapiens
  siRNA target sequence for JAG1 (NM_000214.1,1701-1719).
ctcattgccagctactact

SEQ ID NO: 147052 - DNA, 19 bp, Homo sapiens
  siRNA target sequence for JAG1 (NM_000214.1,1733-1751).
cggctggatgggtcagaat

SEQ ID NO: 147053 - DNA, 19 bp, Homo sapiens
  siRNA target sequence for JAG1 (NM_000214.1,1734-1752).
ggctggatgggtcagaatt

SEQ ID NO: 147054 - DNA, 19 bp, Homo sapiens
  siRNA target sequence for JAG1 (NM_000214.1,1736-1754).
ctggatgggtcagaattgt

SEQ ID NO: 147055 - DNA, 19 bp, Homo sapiens
  siRNA target sequence for JAG1 (NM_000214.1,1738-1756).
ggatgggtcagaattgtga

SEQ ID NO: 147056 - DNA, 19 bp, Homo sapiens
  siRNA target sequence for JAG1 (NM_000214.1,1743-1761).
ggtcagaattgtgacataa

SEQ ID NO: 147057 - DNA, 19 bp, Homo sapiens
  siRNA target sequence for JAG1 (NM_000214.1,1744-1762).
gtcagaattgtgacataaa

SEQ ID NO: 147058 - DNA, 19 bp, Homo sapiens
  siRNA target sequence for JAG1 (NM_000214.1,1755-1773).
gacataaatattaatgact

SEQ ID NO: 147059 - DNA, 19 bp, Homo sapiens
  siRNA target sequence for JAG1 (NM_000214.1,1775-1793).
ccttggccagtgtcagaat

SEQ ID NO: 147060 - DNA, 19 bp, Homo sapiens
  siRNA target sequence for JAG1 (NM_000214.1,1801-1819).
cctgtcgggatttggttaa

SEQ ID NO: 147061 - DNA, 19 bp, Homo sapiens
  siRNA target sequence for JAG1 (NM_000214.1,1808-1826).
ggatttggttaatggttat

SEQ ID NO: 147062 - DNA, 19 bp, Homo sapiens
  siRNA target sequence for JAG1 (NM_000214.1,1887-1905).
gccagcaacccctgtttga

SEQ ID NO: 147063 - DNA, 19 bp, Homo sapiens
  siRNA target sequence for JAG1 (NM_000214.1,1909-1927).
ggggtcactgtcagaatga

SEQ ID NO: 147064 - DNA, 19 bp, Homo sapiens
  siRNA target sequence for JAG1 (NM_000214.1,1910-1928).
gggtcactgtcagaatgaa

SEQ ID NO: 147065 - DNA, 19 bp, Homo sapiens
  siRNA target sequence for JAG1 (NM_000214.1,1911-1929).
ggtcactgtcagaatgaaa

SEQ ID NO: 147066 - DNA, 19 bp, Homo sapiens
  siRNA target sequence for JAG1 (NM_000214.1,1978-1996).
gtcagctggacatcgatta

SEQ ID NO: 147067 - DNA, 19 bp, Homo sapiens
  siRNA target sequence for JAG1 (NM_000214.1,1980-1998).
cagctggacatcgattatt

SEQ ID NO: 147068 - DNA, 19 bp, Homo sapiens
  siRNA target sequence for JAG1 (NM_000214.1,2036-2054).
caaccgtgccagtgactat

SEQ ID NO: 147069 - DNA, 19 bp, Homo sapiens
  siRNA target sequence for JAG1 (NM_000214.1,2120-2138).
gaccccctgtgaagtgatt

SEQ ID NO: 147070 - DNA, 19 bp, Homo sapiens
  siRNA target sequence for JAG1 (NM_000214.1,2176-2194).
ctgaaggggtgcggtatat

SEQ ID NO: 147071 - DNA, 19 bp, Homo sapiens
  siRNA target sequence for JAG1 (NM_000214.1,2181-2199).
ggggtgcggtatatttcct

SEQ ID NO: 147072 - DNA, 19 bp, Homo sapiens
  siRNA target sequence for JAG1 (NM_000214.1,2233-2251).
gtcagtcgggaggcaaatt

SEQ ID NO: 147073 - DNA, 19 bp, Homo sapiens
  siRNA target sequence for JAG1 (NM_000214.1,2235-2253).
cagtcgggaggcaaattca

SEQ ID NO: 147074 - DNA, 19 bp, Homo sapiens
  siRNA target sequence for JAG1 (NM_000214.1,2271-2289).
ggcttcacgggaacatact

SEQ ID NO: 147075 - DNA, 19 bp, Homo sapiens
  siRNA target sequence for JAG1 (NM_000214.1,2281-2299).
gaacatactgccatgaaaa

SEQ ID NO: 147076 - DNA, 19 bp, Homo sapiens
  siRNA target sequence for JAG1 (NM_000214.1,2398-2416).
cctactgtgaaaccaatat

SEQ ID NO: 147077 - DNA, 19 bp, Homo sapiens
  siRNA target sequence for JAG1 (NM_000214.1,2580-2598).
gagggggatgcttttaagt

SEQ ID NO: 147078 - DNA, 19 bp, Homo sapiens
  siRNA target sequence for JAG1 (NM_000214.1,2694-2712).
gtcaacggcgagtccttta

SEQ ID NO: 147079 - DNA, 19 bp, Homo sapiens
  siRNA target sequence for JAG1 (NM_000214.1,2775-2793).
cctcatccctgttacaaca

SEQ ID NO: 147080 - DNA, 19 bp, Homo sapiens
  siRNA target sequence for JAG1 (NM_000214.1,2856-2874).
cccgactgcagaataaaca

SEQ ID NO: 147081 - DNA, 19 bp, Homo sapiens
  siRNA target sequence for JAG1 (NM_000214.1,2857-2875).
ccgactgcagaataaacat

SEQ ID NO: 147082 - DNA, 19 bp, Homo sapiens
  siRNA target sequence for JAG1 (NM_000214.1,2972-2990).
caagtgccaggaagtttca

SEQ ID NO: 147083 - DNA, 19 bp, Homo sapiens
  siRNA target sequence for JAG1 (NM_000214.1,3005-3023).
caccatggggagtgtgata

SEQ ID NO: 147084 - DNA, 19 bp, Homo sapiens
  siRNA target sequence for JAG1 (NM_000214.1,3031-3049).
gggccaaatgggatgatga

SEQ ID NO: 147085 - DNA, 19 bp, Homo sapiens
  siRNA target sequence for JAG1 (NM_000214.1,3234-3252).
ctccagccggtgaagacaa

SEQ ID NO: 147086 - DNA, 19 bp, Homo sapiens
  siRNA target sequence for JAG1 (NM_000214.1,3256-3274).
gcacctctgactcctatta

SEQ ID NO: 147087 - DNA, 19 bp, Homo sapiens
  siRNA target sequence for JAG1 (NM_000214.1,3269-3287).
ctattaccaggataactgt

SEQ ID NO: 147088 - DNA, 19 bp, Homo sapiens
  siRNA target sequence for JAG1 (NM_000214.1,3284-3302).
ctgtgcgaacatcacattt

SEQ ID NO: 147089 - DNA, 19 bp, Homo sapiens
  siRNA target sequence for JAG1 (NM_000214.1,3289-3307).
cgaacatcacatttacctt

SEQ ID NO: 147090 - DNA, 19 bp, Homo sapiens
  siRNA target sequence for JAG1 (NM_000214.1,3320-3338).
gatgtcaccaggtcttact

SEQ ID NO: 147091 - DNA, 19 bp, Homo sapiens
  siRNA target sequence for JAG1 (NM_000214.1,3333-3351).
cttactacggagcacattt

SEQ ID NO: 147092 - DNA, 19 bp, Homo sapiens
  siRNA target sequence for JAG1 (NM_000214.1,3352-3370).
gcagtgaattgaggaattt

SEQ ID NO: 147093 - DNA, 19 bp, Homo sapiens
  siRNA target sequence for JAG1 (NM_000214.1,3383-3401).
gaatgtttccgctgaatat

SEQ ID NO: 147094 - DNA, 19 bp, Homo sapiens
  siRNA target sequence for JAG1 (NM_000214.1,3387-3405).
gtttccgctgaatattcaa

SEQ ID NO: 147095 - DNA, 19 bp, Homo sapiens
  siRNA target sequence for JAG1 (NM_000214.1,3391-3409).
ccgctgaatattcaatcta

SEQ ID NO: 147096 - DNA, 19 bp, Homo sapiens
  siRNA target sequence for JAG1 (NM_000214.1,3393-3411).
gctgaatattcaatctaca

SEQ ID NO: 147097 - DNA, 19 bp, Homo sapiens
  siRNA target sequence for JAG1 (NM_000214.1,3394-3412).
ctgaatattcaatctacat

SEQ ID NO: 147098 - DNA, 19 bp, Homo sapiens
  siRNA target sequence for JAG1 (NM_000214.1,3429-3447).
ccttcagcgaacaatgaaa

SEQ ID NO: 147099 - DNA, 19 bp, Homo sapiens
  siRNA target sequence for JAG1 (NM_000214.1,3491-3509).
cccgatcaaggaaatcact

SEQ ID NO: 147100 - DNA, 19 bp, Homo sapiens
  siRNA target sequence for JAG1 (NM_000214.1,3506-3524).
cactgacaaaataatcgat

SEQ ID NO: 147101 - DNA, 19 bp, Homo sapiens
  siRNA target sequence for JAG1 (NM_000214.1,3521-3539).
cgatcttgttagtaaacgt

SEQ ID NO: 147102 - DNA, 19 bp, Homo sapiens
  siRNA target sequence for JAG1 (NM_000214.1,3561-3579).
gctgccgttgcagaagtaa

SEQ ID NO: 147103 - DNA, 19 bp, Homo sapiens
  siRNA target sequence for JAG1 (NM_000214.1,3565-3583).
ccgttgcagaagtaagagt

SEQ ID NO: 147104 - DNA, 19 bp, Homo sapiens
  siRNA target sequence for JAG1 (NM_000214.1,3566-3584).
cgttgcagaagtaagagtt

SEQ ID NO: 147105 - DNA, 19 bp, Homo sapiens
  siRNA target sequence for JAG1 (NM_000214.1,3765-3783).
cagctgaaccagatcaaaa

SEQ ID NO: 147106 - DNA, 19 bp, Homo sapiens
  siRNA target sequence for JAG1 (NM_000214.1,3811-3829).
cggtccccatcaaggatta

SEQ ID NO: 147107 - DNA, 19 bp, Homo sapiens
  siRNA target sequence for JAG1 (NM_000214.1,3863-3881).
gacacacaattctgaagta

SEQ ID NO: 147108 - DNA, 19 bp, Homo sapiens
  siRNA target sequence for JAG1 (NM_000214.1,3971-3989).
caacggcacgccgacaaaa

SEQ ID NO: 147109 - DNA, 19 bp, Homo sapiens
  siRNA target sequence for JAG1 (NM_000214.1,3990-4008).
cacccaaactggacaaaca

SEQ ID NO: 147110 - DNA, 19 bp, Homo sapiens
  siRNA target sequence for JAG1 (NM_000214.1,4029-4047).
gaaagtgcccagagcttaa

SEQ ID NO: 147111 - DNA, 19 bp, Homo sapiens
  siRNA target sequence for JAG1 (NM_000214.1,4050-4068).
cgaatggagtacatcgtat

SEQ ID NO: 147112 - DNA, 19 bp, Homo sapiens
  siRNA target sequence for JAG2 (NM_002226.3,904-922).
cgcatgccggcatgatcaa

SEQ ID NO: 147113 - DNA, 19 bp, Homo sapiens
  siRNA target sequence for JAG2 (NM_002226.3,993-1011).
cgctgcgacgagaactact

SEQ ID NO: 147114 - DNA, 19 bp, Homo sapiens
  siRNA target sequence for JAG2 (NM_002226.3,994-1012).
gctgcgacgagaactacta

SEQ ID NO: 147115 - DNA, 19 bp, Homo sapiens
  siRNA target sequence for JAG2 (NM_002226.3,1015-1033).
gcgccacttgcaacaagtt

SEQ ID NO: 147116 - DNA, 19 bp, Homo sapiens
  siRNA target sequence for JAG2 (NM_002226.3,1315-1333).
gtgacaaagacctgaacta

SEQ ID NO: 147117 - DNA, 19 bp, Homo sapiens
  siRNA target sequence for JAG2 (NM_002226.3,1497-1515).
gtgccgtccggcttcgaat

SEQ ID NO: 147118 - DNA, 19 bp, Homo sapiens
  siRNA target sequence for JAG2 (NM_002226.3,2047-2065).
gcgctcgctgctataacct

SEQ ID NO: 147119 - DNA, 19 bp, Homo sapiens
  siRNA target sequence for JAG2 (NM_002226.3,2064-2082).
ctggagggtgactattact

SEQ ID NO: 147120 - DNA, 19 bp, Homo sapiens
  siRNA target sequence for JAG2 (NM_002226.3,2083-2101).
gcgcctgccctgatgactt

SEQ ID NO: 147121 - DNA, 19 bp, Homo sapiens
  siRNA target sequence for JAG2 (NM_002226.3,2296-2314).
cctactgccatgagaacat

SEQ ID NO: 147122 - DNA, 19 bp, Homo sapiens
  siRNA target sequence for JAG2 (NM_002226.3,2470-2488).
gctacgacctggtcaatga

SEQ ID NO: 147123 - DNA, 19 bp, Homo sapiens
  siRNA target sequence for JAG2 (NM_002226.3,2754-2772).
cgtacttgcactcacaata

SEQ ID NO: 147124 - DNA, 19 bp, Homo sapiens
  siRNA target sequence for JAG2 (NM_002226.3,2868-2886).
cctgactgccgcatcaaca

SEQ ID NO: 147125 - DNA, 19 bp, Homo sapiens
  siRNA target sequence for JAG2 (NM_002226.3,2869-2887).
ctgactgccgcatcaacat

SEQ ID NO: 147126 - DNA, 19 bp, Homo sapiens
  siRNA target sequence for JAG2 (NM_002226.3,3292-3310).
ccggccacctggacaataa

SEQ ID NO: 147127 - DNA, 19 bp, Homo sapiens
  siRNA target sequence for JAG2 (NM_002226.3,3986-4004).
gaagttcctctcacacaaa

SEQ ID NO: 147128 - DNA, 19 bp, Homo sapiens
  siRNA target sequence for KCNIP1 (NM_014592.2,582-600).
cctcgaaagataagattga

SEQ ID NO: 147129 - DNA, 19 bp, Homo sapiens
  siRNA target sequence for KCNIP1 (NM_014592.2,583-601).
ctcgaaagataagattgaa

SEQ ID NO: 147130 - DNA, 19 bp, Homo sapiens
  siRNA target sequence for KCNIP1 (NM_014592.2,682-700).
ggagctgcaggtcctttat

SEQ ID NO: 147131 - DNA, 19 bp, Homo sapiens
  siRNA target sequence for KCNIP1 (NM_014592.2,685-703).
gctgcaggtcctttatcga

SEQ ID NO: 147132 - DNA, 19 bp, Homo sapiens
  siRNA target sequence for KCNIP1 (NM_014592.2,694-712).
cctttatcgaggcttcaaa

SEQ ID NO: 147133 - DNA, 19 bp, Homo sapiens
  siRNA target sequence for KCNIP1 (NM_014592.2,695-713).
ctttatcgaggcttcaaaa

SEQ ID NO: 147134 - DNA, 19 bp, Homo sapiens
  siRNA target sequence for KCNIP1 (NM_014592.2,734-752).
gtcaacgaagacacattca

SEQ ID NO: 147135 - DNA, 19 bp, Homo sapiens
  siRNA target sequence for KCNIP1 (NM_014592.2,745-763).
cacattcaagcagatctat

SEQ ID NO: 147136 - DNA, 19 bp, Homo sapiens
  siRNA target sequence for KCNIP1 (NM_014592.2,755-773).
cagatctatgctcagtttt

SEQ ID NO: 147137 - DNA, 19 bp, Homo sapiens
  siRNA target sequence for KCNIP1 (NM_014592.2,792-810).
gcacgtatgcccattacct

SEQ ID NO: 147138 - DNA, 19 bp, Homo sapiens
  siRNA target sequence for KCNIP1 (NM_014592.2,847-865).
gaagttcgaggactttgta

SEQ ID NO: 147139 - DNA, 19 bp, Homo sapiens
  siRNA target sequence for KCNIP1 (NM_014592.2,863-881).
gtaaccgctctgtcgattt

SEQ ID NO: 147140 - DNA, 19 bp, Homo sapiens
  siRNA target sequence for KCNIP1 (NM_014592.2,867-885).
ccgctctgtcgattttatt

SEQ ID NO: 147141 - DNA, 19 bp, Homo sapiens
  siRNA target sequence for KCNIP1 (NM_014592.2,869-887).
gctctgtcgattttattga

SEQ ID NO: 147142 - DNA, 19 bp, Homo sapiens
  siRNA target sequence for KCNIP1 (NM_014592.2,908-926).
ctaaggtggacatttaatt

SEQ ID NO: 147143 - DNA, 19 bp, Homo sapiens
  siRNA target sequence for KCNIP1 (NM_014592.2,943-961).
ggacggatacataaacaaa

SEQ ID NO: 147144 - DNA, 19 bp, Homo sapiens
  siRNA target sequence for KCNIP1 (NM_014592.2,976-994).
cattgtcaaagccatctat

SEQ ID NO: 147145 - DNA, 19 bp, Homo sapiens
  siRNA target sequence for KCNIP1 (NM_014592.2,1092-1110).
gcatcgtaactttagatga

SEQ ID NO: 147146 - DNA, 19 bp, Homo sapiens
  siRNA target sequence for KCNIP1 (NM_014592.2,1093-1111).
catcgtaactttagatgaa

SEQ ID NO: 147147 - DNA, 19 bp, Homo sapiens
  siRNA target sequence for KCNIP1 (NM_014592.2,1096-1114).
cgtaactttagatgaattt

SEQ ID NO: 147148 - DNA, 19 bp, Homo sapiens
  siRNA target sequence for KCNIP1 (NM_014592.2,1106-1124).
gatgaatttcttgaatcat

SEQ ID NO: 147149 - DNA, 19 bp, Homo sapiens
  siRNA target sequence for KCNIP1 (NM_014592.2,1149-1167).
ggtctctccagctgtttca

SEQ ID NO: 147150 - DNA, 19 bp, Homo sapiens
  siRNA target sequence for KCNIP1 (NM_014592.2,1150-1168).
gtctctccagctgtttcaa

SEQ ID NO: 147151 - DNA, 19 bp, Homo sapiens
  siRNA target sequence for KCNIP2 (NM_014591.3,409-427).
ccctccagggcccactaaa

SEQ ID NO: 147152 - DNA, 19 bp, Homo sapiens
  siRNA target sequence for KCNIP2 (NM_014591.3,410-428).
cctccagggcccactaaaa

SEQ ID NO: 147153 - DNA, 19 bp, Homo sapiens
  siRNA target sequence for KCNIP2 (NM_014591.3,482-500).
ctgccctcagtcagtgaaa

SEQ ID NO: 147154 - DNA, 19 bp, Homo sapiens
  siRNA target sequence for KCNIP2 (NM_014591.3,601-619).
cagcgtggacgatgaattt

SEQ ID NO: 147155 - DNA, 19 bp, Homo sapiens
  siRNA target sequence for KCNIP2 (NM_014591.3,603-621).
gcgtggacgatgaatttga

SEQ ID NO: 147156 - DNA, 19 bp, Homo sapiens
  siRNA target sequence for KCNIP2 (NM_014591.3,604-622).
cgtggacgatgaatttgaa

SEQ ID NO: 147157 - DNA, 19 bp, Homo sapiens
  siRNA target sequence for KCNIP2 (NM_014591.3,605-623).
gtggacgatgaatttgaat

SEQ ID NO: 147158 - DNA, 19 bp, Homo sapiens
  siRNA target sequence for KCNIP2 (NM_014591.3,876-894).
ctggtttgtccgtgattct

SEQ ID NO: 147159 - DNA, 19 bp, Homo sapiens
  siRNA target sequence for KCNIP2 (NM_014591.3,889-907).
gattcttcggggaactgta

SEQ ID NO: 147160 - DNA, 19 bp, Homo sapiens
  siRNA target sequence for KCNIP2 (NM_014591.3,905-923).
gtagatgacaggcttaatt

SEQ ID NO: 147161 - DNA, 19 bp, Homo sapiens
  siRNA target sequence for KCNIP2 (NM_014591.3,1108-1126).
gaccattgaggaattcatt

SEQ ID NO: 147162 - DNA, 19 bp, Homo sapiens
  siRNA target sequence for KCNIP2 (NM_173197.1,844-862).
gctccctgccctctacatt

SEQ ID NO: 147163 - DNA, 19 bp, Homo sapiens
  siRNA target sequence for KCNIP4 (NM_025221.4,204-222).
caccaagcgcagcattaaa

SEQ ID NO: 147164 - DNA, 19 bp, Homo sapiens
  siRNA target sequence for KCNIP4 (NM_025221.4,206-224).
ccaagcgcagcattaaaga

SEQ ID NO: 147165 - DNA, 19 bp, Homo sapiens
  siRNA target sequence for KCNIP4 (NM_025221.4,263-281).
cgtcgtctcctgctattca

SEQ ID NO: 147166 - DNA, 19 bp, Homo sapiens
  siRNA target sequence for KCNIP4 (NM_025221.4,264-282).
gtcgtctcctgctattcaa

SEQ ID NO: 147167 - DNA, 19 bp, Homo sapiens
  siRNA target sequence for KCNIP4 (NM_147183.2,29-47).
cagttctgatcgtcattgt

SEQ ID NO: 147168 - DNA, 19 bp, Homo sapiens
  siRNA target sequence for KIAA0494 (NM_014774.1,987-1005).
cgcaaagagctcaatgcat

SEQ ID NO: 147169 - DNA, 19 bp, Homo sapiens
  siRNA target sequence for KIAA0494 (NM_014774.1,988-1006).
gcaaagagctcaatgcatt

SEQ ID NO: 147170 - DNA, 19 bp, Homo sapiens
  siRNA target sequence for KIAA0494 (NM_014774.1,1160-1178).
caagggagactatttacga

SEQ ID NO: 147171 - DNA, 19 bp, Homo sapiens
  siRNA target sequence for KIAA0494 (NM_014774.1,1176-1194).
cgatgctgcaagatctgtt

SEQ ID NO: 147172 - DNA, 19 bp, Homo sapiens
  siRNA target sequence for KIAA0494 (NM_014774.1,1177-1195).
gatgctgcaagatctgtta

SEQ ID NO: 147173 - DNA, 19 bp, Homo sapiens
  siRNA target sequence for KIAA0494 (NM_014774.1,1197-1215).
ccgctctgtggttttgtca

SEQ ID NO: 147174 - DNA, 19 bp, Homo sapiens
  siRNA target sequence for KIAA0494 (NM_014774.1,1289-1307).
cctcaaggaaaaatttcga

SEQ ID NO: 147175 - DNA, 19 bp, Homo sapiens
  siRNA target sequence for KIAA0494 (NM_014774.1,1290-1308).
ctcaaggaaaaatttcgaa

SEQ ID NO: 147176 - DNA, 19 bp, Homo sapiens
  siRNA target sequence for KIAA0494 (NM_014774.1,1306-1324).
gaacaatggaatctaatca

SEQ ID NO: 147177 - DNA, 19 bp, Homo sapiens
  siRNA target sequence for KIAA0494 (NM_014774.1,1346-1364).
ccccaaacttaatgaagaa

SEQ ID NO: 147178 - DNA, 19 bp, Homo sapiens
  siRNA target sequence for KIAA0494 (NM_014774.1,1362-1380).
gaactactcagcaagcaaa

SEQ ID NO: 147179 - DNA, 19 bp, Homo sapiens
  siRNA target sequence for KIAA0494 (NM_014774.1,1485-1503).
cacctcaaagccaatgtta

SEQ ID NO: 147180 - DNA, 19 bp, Homo sapiens
  siRNA target sequence for KIAA0494 (NM_014774.1,1488-1506).
ctcaaagccaatgttaagt

SEQ ID NO: 147181 - DNA, 19 bp, Homo sapiens
  siRNA target sequence for KIAA0494 (NM_014774.1,1490-1508).
caaagccaatgttaagtca

SEQ ID NO: 147182 - DNA, 19 bp, Homo sapiens
  siRNA target sequence for KIAA0494 (NM_014774.1,1564-1582).
cttccattggcaatacttt

SEQ ID NO: 147183 - DNA, 19 bp, Homo sapiens
  siRNA target sequence for KIAA0494 (NM_014774.1,1600-1618).
ctgtggaagcactacagaa

SEQ ID NO: 147184 - DNA, 19 bp, Homo sapiens
  siRNA target sequence for KIAA0494 (NM_014774.1,1726-1744).
ccacatcagaacttgacaa

SEQ ID NO: 147185 - DNA, 19 bp, Homo sapiens
  siRNA target sequence for KIAA0494 (NM_014774.1,1781-1799).
gtaccttcacaactcttta

SEQ ID NO: 147186 - DNA, 19 bp, Homo sapiens
  siRNA target sequence for KIAA0494 (NM_014774.1,1834-1852).
gacagaatgatcttaaact

SEQ ID NO: 147187 - DNA, 19 bp, Homo sapiens
  siRNA target sequence for KIAA0494 (NM_014774.1,1862-1880).
gaacgagacagtcagtaat

SEQ ID NO: 147188 - DNA, 19 bp, Homo sapiens
  siRNA target sequence for KIAA0494 (NM_014774.1,1865-1883).
cgagacagtcagtaatctt

SEQ ID NO: 147189 - DNA, 19 bp, Homo sapiens
  siRNA target sequence for KIAA0494 (NM_014774.1,1866-1884).
gagacagtcagtaatctta

SEQ ID NO: 147190 - DNA, 19 bp, Homo sapiens
  siRNA target sequence for KIAA0494 (NM_014774.1,1889-1907).
gagagtcaacctgatagaa

SEQ ID NO: 147191 - DNA, 19 bp, Homo sapiens
  siRNA target sequence for KIAA0494 (NM_014774.1,1958-1976).
cagcatgatgggtgataga

SEQ ID NO: 147192 - DNA, 19 bp, Homo sapiens
  siRNA target sequence for KIAA0494 (NM_014774.1,1961-1979).
catgatgggtgatagatct

SEQ ID NO: 147193 - DNA, 19 bp, Homo sapiens
  siRNA target sequence for KIAA0494 (NM_014774.1,1993-2011).
gacagtctttggatcaagt

SEQ ID NO: 147194 - DNA, 19 bp, Homo sapiens
  siRNA target sequence for KIAA0494 (NM_014774.1,2045-2063).
cataaagaaagaagatagt

SEQ ID NO: 147195 - DNA, 19 bp, Homo sapiens
  siRNA target sequence for KIAA0494 (NM_014774.1,2102-2120).
gctgatcagtgctcttaca

SEQ ID NO: 147196 - DNA, 19 bp, Homo sapiens
  siRNA target sequence for KIAA0494 (NM_014774.1,2103-2121).
ctgatcagtgctcttacaa

SEQ ID NO: 147197 - DNA, 19 bp, Homo sapiens
  siRNA target sequence for KIAA0494 (NM_014774.1,2146-2164).
cagagaccgccgatgaaga

SEQ ID NO: 147198 - DNA, 19 bp, Homo sapiens
  siRNA target sequence for KIAA0494 (NM_014774.1,2169-2187).
gtagagagtttcacatcaa

SEQ ID NO: 147199 - DNA, 19 bp, Homo sapiens
  siRNA target sequence for KIAA0494 (NM_014774.1,2337-2355).
ctgacctaccaggaaatct

SEQ ID NO: 147200 - DNA, 19 bp, Homo sapiens
  siRNA target sequence for KIAA0494 (NM_014774.1,2390-2408).
gagcttgagagcatttgat

SEQ ID NO: 147201 - DNA, 19 bp, Homo sapiens
  siRNA target sequence for KIAA0494 (NM_014774.1,2412-2430).
gatggagatggaagatact

SEQ ID NO: 147202 - DNA, 19 bp, Homo sapiens
  siRNA target sequence for KIAA0494 (NM_014774.1,2438-2456).
ggagctaagggtagcttta

SEQ ID NO: 147203 - DNA, 19 bp, Homo sapiens
  siRNA target sequence for KIAA0494 (NM_014774.1,2441-2459).
gctaagggtagctttaggt

SEQ ID NO: 147204 - DNA, 19 bp, Homo sapiens
  siRNA target sequence for KIAA0494 (NM_014774.1,2442-2460).
ctaagggtagctttaggta

SEQ ID NO: 147205 - DNA, 19 bp, Homo sapiens
  siRNA target sequence for KIAA0676 (NM_198868.1,310-328).
ctgggaatggctggaaaat

SEQ ID NO: 147206 - DNA, 19 bp, Homo sapiens
  siRNA target sequence for KIAA0676 (NM_198868.1,379-397).
cttcgtcaagggcaagata

SEQ ID NO: 147207 - DNA, 19 bp, Homo sapiens
  siRNA target sequence for KIAA0676 (NM_198868.1,402-420).
gaatcatcgcagaagagaa

SEQ ID NO: 147208 - DNA, 19 bp, Homo sapiens
  siRNA target sequence for KIAA0676 (NM_198868.1,714-732).
gcgaccaggagctcttctt

SEQ ID NO: 147209 - DNA, 19 bp, Homo sapiens
  siRNA target sequence for KIAA0676 (NM_198868.1,854-872).
cggccacacaggaacatct

SEQ ID NO: 147210 - DNA, 19 bp, Homo sapiens
  siRNA target sequence for KIAA0676 (NM_198868.1,896-914).
gcccgagccaagaatgagt

SEQ ID NO: 147211 - DNA, 19 bp, Homo sapiens
  siRNA target sequence for KIAA0676 (NM_198868.1,1063-1081).
cgcttgccacctcatcata

SEQ ID NO: 147212 - DNA, 19 bp, Homo sapiens
  siRNA target sequence for KIAA0676 (NM_198868.1,1093-1111).
ggtgaccattgtcgaaaaa

SEQ ID NO: 147213 - DNA, 19 bp, Homo sapiens
  siRNA target sequence for KIAA0676 (NM_198868.1,1096-1114).
gaccattgtcgaaaaagct

SEQ ID NO: 147214 - DNA, 19 bp, Homo sapiens
  siRNA target sequence for KIAA0676 (NM_198868.1,1153-1171).
caccaaaagcaaaatgaca

SEQ ID NO: 147215 - DNA, 19 bp, Homo sapiens
  siRNA target sequence for KIAA0676 (NM_198868.1,1914-1932).
gcatgctgcccgactacta

SEQ ID NO: 147216 - DNA, 19 bp, Homo sapiens
  siRNA target sequence for KIAA0676 (NM_198868.1,2105-2123).
gtcatcgtcgactgctttt

SEQ ID NO: 147217 - DNA, 19 bp, Homo sapiens
  siRNA target sequence for KIAA0676 (NM_198868.1,2110-2128).
cgtcgactgctttttctat

SEQ ID NO: 147218 - DNA, 19 bp, Homo sapiens
  siRNA target sequence for KIAA0676 (NM_198868.1,2354-2372).
gtgtcctatgagaaattca

SEQ ID NO: 147219 - DNA, 19 bp, Homo sapiens
  siRNA target sequence for KIAA0676 (NM_198868.1,2399-2417).
cagatgcggtttaaacaga

SEQ ID NO: 147220 - DNA, 19 bp, Homo sapiens
  siRNA target sequence for KIAA0676 (NM_198868.1,2458-2476).
gagtgtggtccgagctata

SEQ ID NO: 147221 - DNA, 19 bp, Homo sapiens
  siRNA target sequence for KIAA0676 (NM_198868.1,2513-2531).
gacctttacatggtgttta

SEQ ID NO: 147222 - DNA, 19 bp, Homo sapiens
  siRNA target sequence for KIAA0676 (NM_198868.1,2611-2629).
ggagcagtaccggattgat

SEQ ID NO: 147223 - DNA, 19 bp, Homo sapiens
  siRNA target sequence for KIAA0676 (NM_198868.1,3081-3099).
ctcagaaggagacgattaa

SEQ ID NO: 147224 - DNA, 19 bp, Homo sapiens
  siRNA target sequence for KIAA0676 (NM_198868.1,3141-3159).
gcaagacgctttacaacat

SEQ ID NO: 147225 - DNA, 19 bp, Homo sapiens
  siRNA target sequence for KIAA0676 (NM_198868.1,3713-3731).
gacattggactcaagatca

SEQ ID NO: 147226 - DNA, 19 bp, Homo sapiens
  siRNA target sequence for KIAA0980 (NM_025176.3,36-54).
gaagagaaccactatgtct

SEQ ID NO: 147227 - DNA, 19 bp, Homo sapiens
  siRNA target sequence for KIAA0980 (NM_025176.3,55-73).
cgcagctcagggaagtcta

SEQ ID NO: 147228 - DNA, 19 bp, Homo sapiens
  siRNA target sequence for KIAA0980 (NM_025176.3,195-213).
catttcgccagggttaact

SEQ ID NO: 147229 - DNA, 19 bp, Homo sapiens
  siRNA target sequence for KIAA0980 (NM_025176.3,207-225).
gttaactttgaggaattta

SEQ ID NO: 147230 - DNA, 19 bp, Homo sapiens
  siRNA target sequence for KIAA0980 (NM_025176.3,218-236).
ggaatttaaggaaggtttt

SEQ ID NO: 147231 - DNA, 19 bp, Homo sapiens
  siRNA target sequence for KIAA0980 (NM_025176.3,237-255).
gtggctgtgttgtcttcaa

SEQ ID NO: 147232 - DNA, 19 bp, Homo sapiens
  siRNA target sequence for KIAA0980 (NM_025176.3,313-331).
gtgccatccctccaaagta

SEQ ID NO: 147233 - DNA, 19 bp, Homo sapiens
  siRNA target sequence for KIAA0980 (NM_025176.3,478-496).
gtcccaagtcagatgaaga

SEQ ID NO: 147234 - DNA, 19 bp, Homo sapiens
  siRNA target sequence for KIAA0980 (NM_025176.3,497-515).
ggccgagagcactaaagaa

SEQ ID NO: 147235 - DNA, 19 bp, Homo sapiens
  siRNA target sequence for KIAA0980 (NM_025176.3,842-860).
gtcttccactcgggttaaa

SEQ ID NO: 147236 - DNA, 19 bp, Homo sapiens
  siRNA target sequence for KIAA0980 (NM_025176.3,865-883).
gcaaggcttggtctcatta

SEQ ID NO: 147237 - DNA, 19 bp, Homo sapiens
  siRNA target sequence for KIAA0980 (NM_025176.3,1860-1878).
gctccagtgagtatagaaa

SEQ ID NO: 147238 - DNA, 19 bp, Homo sapiens
  siRNA target sequence for KIAA0980 (NM_025176.3,1935-1953).
gagaccaaggtaaattact

SEQ ID NO: 147239 - DNA, 19 bp, Homo sapiens
  siRNA target sequence for KIAA0980 (NM_025176.3,2413-2431).
cccagatgtgcgtatcgtt

SEQ ID NO: 147240 - DNA, 19 bp, Homo sapiens
  siRNA target sequence for KIAA0980 (NM_025176.3,3264-3282).
gacagactggagttccata

SEQ ID NO: 147241 - DNA, 19 bp, Homo sapiens
  siRNA target sequence for KIAA0980 (NM_025176.3,3268-3286).
gactggagttccatagact

SEQ ID NO: 147242 - DNA, 19 bp, Homo sapiens
  siRNA target sequence for KIAA0980 (NM_025176.3,3270-3288).
ctggagttccatagacttt

SEQ ID NO: 147243 - DNA, 19 bp, Homo sapiens
  siRNA target sequence for KIAA0980 (NM_025176.3,3272-3290).
ggagttccatagactttct

SEQ ID NO: 147244 - DNA, 19 bp, Homo sapiens
  siRNA target sequence for KIAA0980 (NM_025176.3,3275-3293).
gttccatagactttctgaa

SEQ ID NO: 147245 - DNA, 19 bp, Homo sapiens
  siRNA target sequence for KIAA0980 (NM_025176.3,3299-3317).
cactttgttgaaaaacgat

SEQ ID NO: 147246 - DNA, 19 bp, Homo sapiens
  siRNA target sequence for KIAA0980 (NM_025176.3,3439-3457).
gacagaatcagaactacaa

SEQ ID NO: 147247 - DNA, 19 bp, Homo sapiens
  siRNA target sequence for KIAA0980 (NM_025176.3,3476-3494).
caatgtcagggttcttcaa

SEQ ID NO: 147248 - DNA, 19 bp, Homo sapiens
  siRNA target sequence for KIAA0980 (NM_025176.3,3537-3555).
catcgtgtgaccattcaga

SEQ ID NO: 147249 - DNA, 19 bp, Homo sapiens
  siRNA target sequence for KIAA0980 (NM_025176.3,3545-3563).
gaccattcagatgttaaca

SEQ ID NO: 147250 - DNA, 19 bp, Homo sapiens
  siRNA target sequence for KIAA0980 (NM_025176.3,3547-3565).
ccattcagatgttaacaca

SEQ ID NO: 147251 - DNA, 19 bp, Homo sapiens
  siRNA target sequence for KIAA0980 (NM_025176.3,3608-3626).
ccaaatccaaaaacttaga

SEQ ID NO: 147252 - DNA, 19 bp, Homo sapiens
  siRNA target sequence for KIAA0980 (NM_025176.3,3621-3639).
cttagagttgaacttgaat

SEQ ID NO: 147253 - DNA, 19 bp, Homo sapiens
  siRNA target sequence for KIAA0980 (NM_025176.3,3856-3874).
cacagcgggaagaacatga

SEQ ID NO: 147254 - DNA, 19 bp, Homo sapiens
  siRNA target sequence for KIAA0980 (NM_025176.3,4093-4111).
gccgcctcttggaagaaaa

SEQ ID NO: 147255 - DNA, 19 bp, Homo sapiens
  siRNA target sequence for KIAA0980 (NM_025176.3,4127-4145).
caaactcgtcagtaggatt

SEQ ID NO: 147256 - DNA, 19 bp, Homo sapiens
  siRNA target sequence for KIP3 (NM_054113.1,45-63).
gtatcaggactgcacattt

SEQ ID NO: 147257 - DNA, 19 bp, Homo sapiens
  siRNA target sequence for KIP3 (NM_054113.1,51-69).
ggactgcacatttttcaca

SEQ ID NO: 147258 - DNA, 19 bp, Homo sapiens
  siRNA target sequence for KIP3 (NM_054113.1,121-139).
ctcgtgcccctcgactata

SEQ ID NO: 147259 - DNA, 19 bp, Homo sapiens
  siRNA target sequence for KIP3 (NM_054113.1,124-142).
gtgcccctcgactatacca

SEQ ID NO: 147260 - DNA, 19 bp, Homo sapiens
  siRNA target sequence for LALBA (NM_002289.1,78-96).
ctggccaagcaattcacaa

SEQ ID NO: 147261 - DNA, 19 bp, Homo sapiens
  siRNA target sequence for LALBA (NM_002289.1,81-99).
gccaagcaattcacaaaat

SEQ ID NO: 147262 - DNA, 19 bp, Homo sapiens
  siRNA target sequence for LALBA (NM_002289.1,113-131).
gctgctgaaagacatagat

SEQ ID NO: 147263 - DNA, 19 bp, Homo sapiens
  siRNA target sequence for LALBA (NM_002289.1,194-212).
cacacaagccatagttgaa

SEQ ID NO: 147264 - DNA, 19 bp, Homo sapiens
  siRNA target sequence for LALBA (NM_002289.1,196-214).
cacaagccatagttgaaaa

SEQ ID NO: 147265 - DNA, 19 bp, Homo sapiens
  siRNA target sequence for LALBA (NM_002289.1,237-255).
ctcttccagatcagtaata

SEQ ID NO: 147266 - DNA, 19 bp, Homo sapiens
  siRNA target sequence for LALBA (NM_002289.1,242-260).
ccagatcagtaataagctt

SEQ ID NO: 147267 - DNA, 19 bp, Homo sapiens
  siRNA target sequence for LALBA (NM_002289.1,243-261).
cagatcagtaataagcttt

SEQ ID NO: 147268 - DNA, 19 bp, Homo sapiens
  siRNA target sequence for LALBA (NM_002289.1,282-300).
cctcagtcaaggaacatct

SEQ ID NO: 147269 - DNA, 19 bp, Homo sapiens
  siRNA target sequence for LALBA (NM_002289.1,359-377).
caagaagatcctggatatt

SEQ ID NO: 147270 - DNA, 19 bp, Homo sapiens
  siRNA target sequence for LDLR (NM_000527.2,641-659).
gctgtaggggtctttacgt

SEQ ID NO: 147271 - DNA, 19 bp, Homo sapiens
  siRNA target sequence for LDLR (NM_000527.2,797-815).
cctgtcgccctgacgaatt

SEQ ID NO: 147272 - DNA, 19 bp, Homo sapiens
  siRNA target sequence for LDLR (NM_000527.2,800-818).
gtcgccctgacgaattcca

SEQ ID NO: 147273 - DNA, 19 bp, Homo sapiens
  siRNA target sequence for LDLR (NM_000527.2,895-913).
gttggctgcgttaatgtga

SEQ ID NO: 147274 - DNA, 19 bp, Homo sapiens
  siRNA target sequence for LDLR (NM_000527.2,920-938).
gcgagggacccaacaagtt

SEQ ID NO: 147275 - DNA, 19 bp, Homo sapiens
  siRNA target sequence for LDLR (NM_000527.2,1031-1049).
gcgggaccaacgaatgctt

SEQ ID NO: 147276 - DNA, 19 bp, Homo sapiens
  siRNA target sequence for LDLR (NM_000527.2,1075-1093).
gtctgcaatgaccttaaga

SEQ ID NO: 147277 - DNA, 19 bp, Homo sapiens
  siRNA target sequence for LDLR (NM_000527.2,1138-1156).
cagcgaagatgcgaagata

SEQ ID NO: 147278 - DNA, 19 bp, Homo sapiens
  siRNA target sequence for LDLR (NM_000527.2,1142-1160).
gaagatgcgaagatatcga

SEQ ID NO: 147279 - DNA, 19 bp, Homo sapiens
  siRNA target sequence for LDLR (NM_000527.2,1399-1417).
gtggccagcaatagaatct

SEQ ID NO: 147280 - DNA, 19 bp, Homo sapiens
  siRNA target sequence for LDLR (NM_000527.2,1424-1442).
ctgacctgtcccagagaat

SEQ ID NO: 147281 - DNA, 19 bp, Homo sapiens
  siRNA target sequence for LDLR (NM_000527.2,1470-1488).
ccacggcgtctcttcctat

SEQ ID NO: 147282 - DNA, 19 bp, Homo sapiens
  siRNA target sequence for LDLR (NM_000527.2,1474-1492).
ggcgtctcttcctatgaca

SEQ ID NO: 147283 - DNA, 19 bp, Homo sapiens
  siRNA target sequence for LDLR (NM_000527.2,1607-1625).
gcgtgaagaggaaaacgtt

SEQ ID NO: 147284 - DNA, 19 bp, Homo sapiens
  siRNA target sequence for LDLR (NM_000527.2,1608-1626).
cgtgaagaggaaaacgtta

SEQ ID NO: 147285 - DNA, 19 bp, Homo sapiens
  siRNA target sequence for LDLR (NM_000527.2,1609-1627).
gtgaagaggaaaacgttat

SEQ ID NO: 147286 - DNA, 19 bp, Homo sapiens
  siRNA target sequence for LDLR (NM_000527.2,1659-1677).
cgtggtggatcctgttcat

SEQ ID NO: 147287 - DNA, 19 bp, Homo sapiens
  siRNA target sequence for LDLR (NM_000527.2,1669-1687).
cctgttcatggcttcatgt

SEQ ID NO: 147288 - DNA, 19 bp, Homo sapiens
  siRNA target sequence for LDLR (NM_000527.2,1706-1724).
ctcccgccaagatcaagaa

SEQ ID NO: 147289 - DNA, 19 bp, Homo sapiens
  siRNA target sequence for LDLR (NM_000527.2,1754-1772).
cgctggtgactgaaaacat

SEQ ID NO: 147290 - DNA, 19 bp, Homo sapiens
  siRNA target sequence for LDLR (NM_000527.2,1823-1841).
gggttgactccaaacttca

SEQ ID NO: 147291 - DNA, 19 bp, Homo sapiens
  siRNA target sequence for LDLR (NM_000527.2,1945-1963).
gtattttggacagatatca

SEQ ID NO: 147292 - DNA, 19 bp, Homo sapiens
  siRNA target sequence for LDLR (NM_000527.2,2013-2031).
cttgttggctgaaaaccta

SEQ ID NO: 147293 - DNA, 19 bp, Homo sapiens
  siRNA target sequence for LDLR (NM_000527.2,2116-2134).
ggcggctgccagtatctgt

SEQ ID NO: 147294 - DNA, 19 bp, Homo sapiens
  siRNA target sequence for LDLR (NM_000527.2,2157-2175).
cccccactcgcccaagttt

SEQ ID NO: 147295 - DNA, 19 bp, Homo sapiens
  siRNA target sequence for LDLR (NM_000527.2,2158-2176).
ccccactcgcccaagttta

SEQ ID NO: 147296 - DNA, 19 bp, Homo sapiens
  siRNA target sequence for LDLR (NM_000527.2,2161-2179).
cactcgcccaagtttacct

SEQ ID NO: 147297 - DNA, 19 bp, Homo sapiens
  siRNA target sequence for LDLR (NM_000527.2,2267-2285).
ccaccgtcaggctaaaggt

SEQ ID NO: 147298 - DNA, 19 bp, Homo sapiens
  siRNA target sequence for LDLR (NM_000527.2,2375-2393).
cggtggagatagtgacaat

SEQ ID NO: 147299 - DNA, 19 bp, Homo sapiens
  siRNA target sequence for LDLR (NM_000527.2,2482-2500).
gtgctcctcgtcttccttt

SEQ ID NO: 147300 - DNA, 19 bp, Homo sapiens
  siRNA target sequence for LDLR (NM_000527.2,2531-2549).
ggcggcttaagaacatcaa

SEQ ID NO: 147301 - DNA, 19 bp, Homo sapiens
  siRNA target sequence for LDLR (NM_000527.2,2563-2581).
gacaaccccgtctatcaga

SEQ ID NO: 147302 - DNA, 19 bp, Homo sapiens
  siRNA target sequence for LETM1 (NM_012318.1,435-453).
ctgcctgaatgttccattt

SEQ ID NO: 147303 - DNA, 19 bp, Homo sapiens
  siRNA target sequence for LETM1 (NM_012318.1,529-547).
gagtgccttcgcatagtgt

SEQ ID NO: 147304 - DNA, 19 bp, Homo sapiens
  siRNA target sequence for LETM1 (NM_012318.1,641-659).
gcgatgactcggtagtaga

SEQ ID NO: 147305 - DNA, 19 bp, Homo sapiens
  siRNA target sequence for LETM1 (NM_012318.1,797-815).
gcttccgcctgctatggat

SEQ ID NO: 147306 - DNA, 19 bp, Homo sapiens
  siRNA target sequence for LETM1 (NM_012318.1,1207-1225).
gaaatcatgcgtttttcca

SEQ ID NO: 147307 - DNA, 19 bp, Homo sapiens
  siRNA target sequence for LETM1 (NM_012318.1,1212-1230).
catgcgtttttccaaatta

SEQ ID NO: 147308 - DNA, 19 bp, Homo sapiens
  siRNA target sequence for LETM1 (NM_012318.1,1667-1685).
gcgagcaggtggacaacaa

SEQ ID NO: 147309 - DNA, 19 bp, Homo sapiens
  siRNA target sequence for LETM1 (NM_012318.1,1823-1841).
ccgagccacagccagaaat

SEQ ID NO: 147310 - DNA, 19 bp, Homo sapiens
  siRNA target sequence for LETM1 (NM_012318.1,2107-2125).
gccagcaagagattgacaa

SEQ ID NO: 147311 - DNA, 19 bp, Homo sapiens
  siRNA target sequence for LETM1 (NM_012318.1,2149-2167).
cagatcgatggcttgatct

SEQ ID NO: 147312 - DNA, 19 bp, Homo sapiens
  siRNA target sequence for LETM1 (NM_012318.1,2311-2329).
gccgcagcactggatgaaa

SEQ ID NO: 147313 - DNA, 19 bp, Homo sapiens
  siRNA target sequence for LETM1 (NM_012318.1,2312-2330).
ccgcagcactggatgaaaa

SEQ ID NO: 147314 - DNA, 19 bp, Homo sapiens
  siRNA target sequence for LETM1 (NM_012318.1,2314-2332).
gcagcactggatgaaaaca

SEQ ID NO: 147315 - DNA, 19 bp, Homo sapiens
  siRNA target sequence for LOC286097 (NM_181723.1,413-431).
caaggagacggttgctatt

SEQ ID NO: 147316 - DNA, 19 bp, Homo sapiens
  siRNA target sequence for LOC286097 (NM_181723.1,474-492).
cgggagaggcgatttcgtt

SEQ ID NO: 147317 - DNA, 19 bp, Homo sapiens
  siRNA target sequence for LOC286097 (NM_181723.1,475-493).
gggagaggcgatttcgttt

SEQ ID NO: 147318 - DNA, 19 bp, Homo sapiens
  siRNA target sequence for LOC286097 (NM_181723.1,476-494).
ggagaggcgatttcgttta

SEQ ID NO: 147319 - DNA, 19 bp, Homo sapiens
  siRNA target sequence for LOC286097 (NM_181723.1,477-495).
gagaggcgatttcgtttat

SEQ ID NO: 147320 - DNA, 19 bp, Homo sapiens
  siRNA target sequence for LOC286097 (NM_181723.1,479-497).
gaggcgatttcgtttattt

SEQ ID NO: 147321 - DNA, 19 bp, Homo sapiens
  siRNA target sequence for LOC286097 (NM_181723.1,482-500).
gcgatttcgtttatttgct

SEQ ID NO: 147322 - DNA, 19 bp, Homo sapiens
  siRNA target sequence for LOC286097 (NM_181723.1,507-525).
gaatgtgaagggcagttat

SEQ ID NO: 147323 - DNA, 19 bp, Homo sapiens
  siRNA target sequence for LOC286097 (NM_181723.1,511-529).
gtgaagggcagttattcat

SEQ ID NO: 147324 - DNA, 19 bp, Homo sapiens
  siRNA target sequence for LOC286097 (NM_181723.1,513-531).
gaagggcagttattcatga

SEQ ID NO: 147325 - DNA, 19 bp, Homo sapiens
  siRNA target sequence for LOC286097 (NM_181723.1,530-548).
gactccgtatgattttatt

SEQ ID NO: 147326 - DNA, 19 bp, Homo sapiens
  siRNA target sequence for LOC286097 (NM_181723.1,569-587).
gcccaaagttgccaaaact

SEQ ID NO: 147327 - DNA, 19 bp, Homo sapiens
  siRNA target sequence for LOC286097 (NM_181723.1,653-671).
ctcatcgaagctatttcga

SEQ ID NO: 147328 - DNA, 19 bp, Homo sapiens
  siRNA target sequence for LOC286097 (NM_181723.1,655-673).
catcgaagctatttcgaaa

SEQ ID NO: 147329 - DNA, 19 bp, Homo sapiens
  siRNA target sequence for LOC286097 (NM_181723.1,658-676).
cgaagctatttcgaaatct

SEQ ID NO: 147330 - DNA, 19 bp, Homo sapiens
  siRNA target sequence for LOC286097 (NM_181723.1,659-677).
gaagctatttcgaaatctt

SEQ ID NO: 147331 - DNA, 19 bp, Homo sapiens
  siRNA target sequence for LOC286097 (NM_181723.1,662-680).
gctatttcgaaatcttaaa

SEQ ID NO: 147332 - DNA, 19 bp, Homo sapiens
  siRNA target sequence for LOC286097 (NM_181723.1,690-708).
gtgatttcttacacagaat

SEQ ID NO: 147333 - DNA, 19 bp, Homo sapiens
  siRNA target sequence for LOC286097 (NM_181723.1,744-762).
gcagggttcagaatagctt

SEQ ID NO: 147334 - DNA, 19 bp, Homo sapiens
  siRNA target sequence for LOC286097 (NM_181723.1,745-763).
cagggttcagaatagcttt

SEQ ID NO: 147335 - DNA, 19 bp, Homo sapiens
  siRNA target sequence for LOC286097 (NM_181723.1,887-905).
gctgcgtcttcaactttat

SEQ ID NO: 147336 - DNA, 19 bp, Homo sapiens
  siRNA target sequence for LOC286097 (NM_181723.1,891-909).
cgtcttcaactttatggat

SEQ ID NO: 147337 - DNA, 19 bp, Homo sapiens
  siRNA target sequence for LOC286097 (NM_181723.1,892-910).
gtcttcaactttatggata

SEQ ID NO: 147338 - DNA, 19 bp, Homo sapiens
  siRNA target sequence for LOC286097 (NM_181723.1,911-929).
ccattctcctactaatagt

SEQ ID NO: 147339 - DNA, 19 bp, Homo sapiens
  siRNA target sequence for LOC286097 (NM_181723.1,918-936).
cctactaatagtgtactta

SEQ ID NO: 147340 - DNA, 19 bp, Homo sapiens
  siRNA target sequence for LOC286097 (NM_181723.1,964-982).
gaagctattgggatacact

SEQ ID NO: 147341 - DNA, 19 bp, Homo sapiens
  siRNA target sequence for LOC286097 (NM_181723.1,1021-1039).
cagagcgtgctgatgacat

SEQ ID NO: 147342 - DNA, 19 bp, Homo sapiens
  siRNA target sequence for LOC286097 (NM_181723.1,1037-1055).
catcacaagtttagtaaca

SEQ ID NO: 147343 - DNA, 19 bp, Homo sapiens
  siRNA target sequence for LOC286097 (NM_181723.1,1040-1058).
cacaagtttagtaacagat

SEQ ID NO: 147344 - DNA, 19 bp, Homo sapiens
  siRNA target sequence for LOC286097 (NM_181723.1,1054-1072).
cagatactacacttcttgt

SEQ ID NO: 147345 - DNA, 19 bp, Homo sapiens
  siRNA target sequence for LOC286097 (NM_181723.1,1060-1078).
ctacacttcttgtacactt

SEQ ID NO: 147346 - DNA, 19 bp, Homo sapiens
  siRNA target sequence for LOC286097 (NM_181723.1,1068-1086).
cttgtacacttttttggaa

SEQ ID NO: 147347 - DNA, 19 bp, Homo sapiens
  siRNA target sequence for LOC286097 (NM_181723.1,1215-1233).
gctcatattcttttacgat

SEQ ID NO: 147348 - DNA, 19 bp, Homo sapiens
  siRNA target sequence for LOC286097 (NM_181723.1,1216-1234).
ctcatattcttttacgata

SEQ ID NO: 147349 - DNA, 19 bp, Homo sapiens
  siRNA target sequence for LOC286097 (NM_181723.1,1366-1384).
ccctgaatatgtataactt

SEQ ID NO: 147350 - DNA, 19 bp, Homo sapiens
  siRNA target sequence for LOC286097 (NM_181723.1,1382-1400).
ctttgcaagtcgttctata

SEQ ID NO: 147351 - DNA, 19 bp, Homo sapiens
  siRNA target sequence for LOC286097 (NM_181723.1,1393-1411).
gttctatagggcaagatga

SEQ ID NO: 147352 - DNA, 19 bp, Homo sapiens
  siRNA target sequence for LOC286097 (NM_181723.1,1396-1414).
ctatagggcaagatgaatt

SEQ ID NO: 147353 - DNA, 19 bp, Homo sapiens
  siRNA target sequence for LOC286097 (NM_181723.1,1496-1514).
caaagatgatcaattaagt

SEQ ID NO: 147354 - DNA, 19 bp, Homo sapiens
  siRNA target sequence for LOC286097 (NM_181723.1,1500-1518).
gatgatcaattaagttata

SEQ ID NO: 147355 - DNA, 19 bp, Homo sapiens
  siRNA target sequence for LOC286097 (NM_181723.1,1557-1575).
ggattccggggttataaaa

SEQ ID NO: 147356 - DNA, 19 bp, Homo sapiens
  siRNA target sequence for LOC63928 (NM_022097.1,609-627).
cccctgggagaccgaatta

SEQ ID NO: 147357 - DNA, 19 bp, Homo sapiens
  siRNA target sequence for LOC63928 (NM_022097.1,610-628).
ccctgggagaccgaattat

SEQ ID NO: 147358 - DNA, 19 bp, Homo sapiens
  siRNA target sequence for LOC63928 (NM_022097.1,614-632).
gggagaccgaattatagaa

SEQ ID NO: 147359 - DNA, 19 bp, Homo sapiens
  siRNA target sequence for LOC63928 (NM_022097.1,615-633).
ggagaccgaattatagaaa

SEQ ID NO: 147360 - DNA, 19 bp, Homo sapiens
  siRNA target sequence for LOC63928 (NM_022097.1,680-698).
cagggtcttggctcatttt

SEQ ID NO: 147361 - DNA, 19 bp, Homo sapiens
  siRNA target sequence for LPA (NM_005577.1,223-241).
cataataggaccacagaaa

SEQ ID NO: 147362 - DNA, 19 bp, Homo sapiens
  siRNA target sequence for LPA (NM_005577.1,10641-10659).
cttcgtccctccgaatgtt

SEQ ID NO: 147363 - DNA, 19 bp, Homo sapiens
  siRNA target sequence for LPA (NM_005577.1,10644-10662).
cgtccctccgaatgttatt

SEQ ID NO: 147364 - DNA, 19 bp, Homo sapiens
  siRNA target sequence for LPA (NM_005577.1,10723-10741).
caggactgctactaccatt

SEQ ID NO: 147365 - DNA, 19 bp, Homo sapiens
  siRNA target sequence for LPA (NM_005577.1,10725-10743).
ggactgctactaccattat

SEQ ID NO: 147366 - DNA, 19 bp, Homo sapiens
  siRNA target sequence for LPA (NM_005577.1,11170-11188).
cagaggacaacagaatatt

SEQ ID NO: 147367 - DNA, 19 bp, Homo sapiens
  siRNA target sequence for LPA (NM_005577.1,11177-11195).
caacagaatattatccaaa

SEQ ID NO: 147368 - DNA, 19 bp, Homo sapiens
  siRNA target sequence for LPA (NM_005577.1,11333-11351).
cgtccacggctgtttctga

SEQ ID NO: 147369 - DNA, 19 bp, Homo sapiens
  siRNA target sequence for LPA (NM_005577.1,11334-11352).
gtccacggctgtttctgaa

SEQ ID NO: 147370 - DNA, 19 bp, Homo sapiens
  siRNA target sequence for LPA (NM_005577.1,11827-11845).
catcggaggatcccattat

SEQ ID NO: 147371 - DNA, 19 bp, Homo sapiens
  siRNA target sequence for LPA (NM_005577.1,11830-11848).
cggaggatcccattatact

SEQ ID NO: 147372 - DNA, 19 bp, Homo sapiens
  siRNA target sequence for LPA (NM_005577.1,11831-11849).
ggaggatcccattatacta

SEQ ID NO: 147373 - DNA, 19 bp, Homo sapiens
  siRNA target sequence for LPA (NM_005577.1,12965-12983).
gtgcatcctcttcatttga

SEQ ID NO: 147374 - DNA, 19 bp, Homo sapiens
  siRNA target sequence for LPA (NM_005577.1,13215-13233).
gaacctcgaatctcatgtt

SEQ ID NO: 147375 - DNA, 19 bp, Homo sapiens
  siRNA target sequence for LPA (NM_005577.1,13363-13381).
gtcaccgccaggactgaat

SEQ ID NO: 147376 - DNA, 19 bp, Homo sapiens
  siRNA target sequence for LPA (NM_005577.1,13465-13483).
gaagtgtgcaatcactata

SEQ ID NO: 147377 - DNA, 19 bp, Homo sapiens
  siRNA target sequence for LPA (NM_005577.1,13470-13488).
gtgcaatcactataagtat

SEQ ID NO: 147378 - DNA, 19 bp, Homo sapiens
  siRNA target sequence for LRP1 (NM_002332.1,575-593).
caaataacctgtatctcaa

SEQ ID NO: 147379 - DNA, 19 bp, Homo sapiens
  siRNA target sequence for LRP1 (NM_002332.1,681-699).
gccagccaaacgagcataa

SEQ ID NO: 147380 - DNA, 19 bp, Homo sapiens
  siRNA target sequence for LRP1 (NM_002332.1,683-701).
cagccaaacgagcataact

SEQ ID NO: 147381 - DNA, 19 bp, Homo sapiens
  siRNA target sequence for LRP1 (NM_002332.1,964-982).
cacagacggctccttcata

SEQ ID NO: 147382 - DNA, 19 bp, Homo sapiens
  siRNA target sequence for LRP1 (NM_002332.1,1077-1095).
ccaactcccagaacatctt

SEQ ID NO: 147383 - DNA, 19 bp, Homo sapiens
  siRNA target sequence for LRP1 (NM_002332.1,1474-1492).
ggtgtttttcactgactat

SEQ ID NO: 147384 - DNA, 19 bp, Homo sapiens
  siRNA target sequence for LRP1 (NM_002332.1,1546-1564).
gctcgtcgacagcaagatt

SEQ ID NO: 147385 - DNA, 19 bp, Homo sapiens
  siRNA target sequence for LRP1 (NM_002332.1,1550-1568).
gtcgacagcaagattgtgt

SEQ ID NO: 147386 - DNA, 19 bp, Homo sapiens
  siRNA target sequence for LRP1 (NM_002332.1,1623-1641).
cctatctggactatattga

SEQ ID NO: 147387 - DNA, 19 bp, Homo sapiens
  siRNA target sequence for LRP1 (NM_002332.1,1624-1642).
ctatctggactatattgaa

SEQ ID NO: 147388 - DNA, 19 bp, Homo sapiens
  siRNA target sequence for LRP1 (NM_002332.1,1705-1723).
gtacggcctgactgtgttt

SEQ ID NO: 147389 - DNA, 19 bp, Homo sapiens
  siRNA target sequence for LRP1 (NM_002332.1,1787-1805).
cgtgtgaaccgctttaaca

SEQ ID NO: 147390 - DNA, 19 bp, Homo sapiens
  siRNA target sequence for LRP1 (NM_002332.1,2116-2134).
gcacatgatccccattgaa

SEQ ID NO: 147391 - DNA, 19 bp, Homo sapiens
  siRNA target sequence for LRP1 (NM_002332.1,2168-2186).
gctgagaccggcttcatct

SEQ ID NO: 147392 - DNA, 19 bp, Homo sapiens
  siRNA target sequence for LRP1 (NM_002332.1,2169-2187).
ctgagaccggcttcatcta

SEQ ID NO: 147393 - DNA, 19 bp, Homo sapiens
  siRNA target sequence for LRP1 (NM_002332.1,2293-2311).
ggactggatgggagacaat

SEQ ID NO: 147394 - DNA, 19 bp, Homo sapiens
  siRNA target sequence for LRP1 (NM_002332.1,2298-2316).
ggatgggagacaatctgta

SEQ ID NO: 147395 - DNA, 19 bp, Homo sapiens
  siRNA target sequence for LRP1 (NM_002332.1,2322-2340).
cggacgatgggcccaaaaa

SEQ ID NO: 147396 - DNA, 19 bp, Homo sapiens
  siRNA target sequence for LRP1 (NM_002332.1,2324-2342).
gacgatgggcccaaaaaga

SEQ ID NO: 147397 - DNA, 19 bp, Homo sapiens
  siRNA target sequence for LRP1 (NM_002332.1,2326-2344).
cgatgggcccaaaaagaca

SEQ ID NO: 147398 - DNA, 19 bp, Homo sapiens
  siRNA target sequence for LRP1 (NM_002332.1,2372-2390).
gctcagacccgcaagactt

SEQ ID NO: 147399 - DNA, 19 bp, Homo sapiens
  siRNA target sequence for LRP1 (NM_002332.1,2373-2391).
ctcagacccgcaagacttt

SEQ ID NO: 147400 - DNA, 19 bp, Homo sapiens
  siRNA target sequence for LRP1 (NM_002332.1,2375-2393).
cagacccgcaagactttaa

SEQ ID NO: 147401 - DNA, 19 bp, Homo sapiens
  siRNA target sequence for LRP1 (NM_002332.1,2379-2397).
cccgcaagactttaatcga

SEQ ID NO: 147402 - DNA, 19 bp, Homo sapiens
  siRNA target sequence for LRP1 (NM_002332.1,2388-2406).
ctttaatcgagggcaaaat

SEQ ID NO: 147403 - DNA, 19 bp, Homo sapiens
  siRNA target sequence for LRP1 (NM_002332.1,2438-2456).
ctcaatgggtggatgtact

SEQ ID NO: 147404 - DNA, 19 bp, Homo sapiens
  siRNA target sequence for LRP1 (NM_002332.1,2526-2544).
cacaccgagacatctttgt

SEQ ID NO: 147405 - DNA, 19 bp, Homo sapiens
  siRNA target sequence for LRP1 (NM_002332.1,2528-2546).
caccgagacatctttgtca

SEQ ID NO: 147406 - DNA, 19 bp, Homo sapiens
  siRNA target sequence for LRP1 (NM_002332.1,2655-2673).
gcacagaccggaagattgt

SEQ ID NO: 147407 - DNA, 19 bp, Homo sapiens
  siRNA target sequence for LRP1 (NM_002332.1,2658-2676).
cagaccggaagattgtgta

SEQ ID NO: 147408 - DNA, 19 bp, Homo sapiens
  siRNA target sequence for LRP1 (NM_002332.1,2833-2851).
ctttgagatccgaatgtat

SEQ ID NO: 147409 - DNA, 19 bp, Homo sapiens
  siRNA target sequence for LRP1 (NM_002332.1,2881-2899).
caaatgccgggtgaacaat

SEQ ID NO: 147410 - DNA, 19 bp, Homo sapiens
  siRNA target sequence for LRP1 (NM_002332.1,3150-3168).
gcccctcggaccgattcaa

SEQ ID NO: 147411 - DNA, 19 bp, Homo sapiens
  siRNA target sequence for LRP1 (NM_002332.1,3152-3170).
ccctcggaccgattcaagt

SEQ ID NO: 147412 - DNA, 19 bp, Homo sapiens
  siRNA target sequence for LRP1 (NM_002332.1,3162-3180).
gattcaagtgcgagaacaa

SEQ ID NO: 147413 - DNA, 19 bp, Homo sapiens
  siRNA target sequence for LRP1 (NM_002332.1,3242-3260).
gagtccaatgccacttgtt

SEQ ID NO: 147414 - DNA, 19 bp, Homo sapiens
  siRNA target sequence for LRP1 (NM_002332.1,3425-3443).
ggcagatgtatcaacatca

SEQ ID NO: 147415 - DNA, 19 bp, Homo sapiens
  siRNA target sequence for LRP1 (NM_002332.1,3447-3465).
ggagatgcgacaatgacaa

SEQ ID NO: 147416 - DNA, 19 bp, Homo sapiens
  siRNA target sequence for LRP1 (NM_002332.1,3448-3466).
gagatgcgacaatgacaat

SEQ ID NO: 147417 - DNA, 19 bp, Homo sapiens
  siRNA target sequence for LRP1 (NM_002332.1,3450-3468).
gatgcgacaatgacaatga

SEQ ID NO: 147418 - DNA, 19 bp, Homo sapiens
  siRNA target sequence for LRP1 (NM_002332.1,3510-3528).
gttctagcacccagttcaa

SEQ ID NO: 147419 - DNA, 19 bp, Homo sapiens
  siRNA target sequence for LRP1 (NM_002332.1,3777-3795).
gcgatcccagtgtcaagtt

SEQ ID NO: 147420 - DNA, 19 bp, Homo sapiens
  siRNA target sequence for LRP1 (NM_002332.1,3778-3796).
cgatcccagtgtcaagttt

SEQ ID NO: 147421 - DNA, 19 bp, Homo sapiens
  siRNA target sequence for LRP1 (NM_002332.1,4064-4082).
cctggcgaaggcattgtgt

SEQ ID NO: 147422 - DNA, 19 bp, Homo sapiens
  siRNA target sequence for LRP1 (NM_002332.1,4262-4280).
cccttcaagccgttcatca

SEQ ID NO: 147423 - DNA, 19 bp, Homo sapiens
  siRNA target sequence for LRP1 (NM_002332.1,4306-4324).
gcgcatcgatcttcacaaa

SEQ ID NO: 147424 - DNA, 19 bp, Homo sapiens
  siRNA target sequence for LRP1 (NM_002332.1,4467-4485).
gtttcgaggtggtgattca

SEQ ID NO: 147425 - DNA, 19 bp, Homo sapiens
  siRNA target sequence for LRP1 (NM_002332.1,4471-4489).
cgaggtggtgattcagtat

SEQ ID NO: 147426 - DNA, 19 bp, Homo sapiens
  siRNA target sequence for LRP1 (NM_002332.1,4655-4673).
cgggatgggatcctgtttt

SEQ ID NO: 147427 - DNA, 19 bp, Homo sapiens
  siRNA target sequence for LRP1 (NM_002332.1,4796-4814).
ctggagaagcgcatccttt

SEQ ID NO: 147428 - DNA, 19 bp, Homo sapiens
  siRNA target sequence for LRP1 (NM_002332.1,4801-4819).
gaagcgcatcctttggatt

SEQ ID NO: 147429 - DNA, 19 bp, Homo sapiens
  siRNA target sequence for LRP1 (NM_002332.1,4944-4962).
ggactgactggcgaacaaa

SEQ ID NO: 147430 - DNA, 19 bp, Homo sapiens
  siRNA target sequence for LRP1 (NM_002332.1,5115-5133).
cccacctgtgtctcatcaa

SEQ ID NO: 147431 - DNA, 19 bp, Homo sapiens
  siRNA target sequence for LRP1 (NM_002332.1,5117-5135).
cacctgtgtctcatcaact

SEQ ID NO: 147432 - DNA, 19 bp, Homo sapiens
  siRNA target sequence for LRP1 (NM_002332.1,5191-5209).
caccacctgctatgagttt

SEQ ID NO: 147433 - DNA, 19 bp, Homo sapiens
  siRNA target sequence for LRP1 (NM_002332.1,5193-5211).
ccacctgctatgagtttaa

SEQ ID NO: 147434 - DNA, 19 bp, Homo sapiens
  siRNA target sequence for LRP1 (NM_002332.1,5196-5214).
cctgctatgagtttaagaa

SEQ ID NO: 147435 - DNA, 19 bp, Homo sapiens
  siRNA target sequence for LRP1 (NM_002332.1,5265-5283).
ctccctactacaactacat

SEQ ID NO: 147436 - DNA, 19 bp, Homo sapiens
  siRNA target sequence for LRP1 (NM_002332.1,5531-5549).
ctggatggctccttcaaga

SEQ ID NO: 147437 - DNA, 19 bp, Homo sapiens
  siRNA target sequence for LRP1 (NM_002332.1,5619-5637).
ggaccgatggtgacaacat

SEQ ID NO: 147438 - DNA, 19 bp, Homo sapiens
  siRNA target sequence for LRP1 (NM_002332.1,5697-5715).
ccgtgggcctggctattga

SEQ ID NO: 147439 - DNA, 19 bp, Homo sapiens
  siRNA target sequence for LRP1 (NM_002332.1,6124-6142).
cgagggcgtaggttccttt

SEQ ID NO: 147440 - DNA, 19 bp, Homo sapiens
  siRNA target sequence for LRP1 (NM_002332.1,6247-6265).
cgacttccacgctgaaaat

SEQ ID NO: 147441 - DNA, 19 bp, Homo sapiens
  siRNA target sequence for LRP1 (NM_002332.1,6515-6533).
ccggagaaagggtacttgt

SEQ ID NO: 147442 - DNA, 19 bp, Homo sapiens
  siRNA target sequence for LRP1 (NM_002332.1,6538-6556).
gactgagtggggtcagtat

SEQ ID NO: 147443 - DNA, 19 bp, Homo sapiens
  siRNA target sequence for LRP1 (NM_002332.1,6549-6567).
gtcagtatccgcgtattga

SEQ ID NO: 147444 - DNA, 19 bp, Homo sapiens
  siRNA target sequence for LRP1 (NM_002332.1,6678-6696).
cacggacagacaagattga

SEQ ID NO: 147445 - DNA, 19 bp, Homo sapiens
  siRNA target sequence for LRP1 (NM_002332.1,6809-6827).
catgccaacggctctatca

SEQ ID NO: 147446 - DNA, 19 bp, Homo sapiens
  siRNA target sequence for LRP1 (NM_002332.1,6876-6894).
gcatcggcgtccagcttaa

SEQ ID NO: 147447 - DNA, 19 bp, Homo sapiens
  siRNA target sequence for LRP1 (NM_002332.1,6881-6899).
ggcgtccagcttaaagaca

SEQ ID NO: 147448 - DNA, 19 bp, Homo sapiens
  siRNA target sequence for LRP1 (NM_002332.1,6882-6900).
gcgtccagcttaaagacat

SEQ ID NO: 147449 - DNA, 19 bp, Homo sapiens
  siRNA target sequence for LRP1 (NM_002332.1,7077-7095).
cagagcgcaccattctcaa

SEQ ID NO: 147450 - DNA, 19 bp, Homo sapiens
  siRNA target sequence for LRP1 (NM_002332.1,7218-7236).
cccccaatcgcatcttctt

SEQ ID NO: 147451 - DNA, 19 bp, Homo sapiens
  siRNA target sequence for LRP1 (NM_002332.1,7343-7361).
ggctgggacactctctatt

SEQ ID NO: 147452 - DNA, 19 bp, Homo sapiens
  siRNA target sequence for LRP1 (NM_002332.1,7435-7453).
gaccgtcatcactatgtct

SEQ ID NO: 147453 - DNA, 19 bp, Homo sapiens
  siRNA target sequence for LRP1 (NM_002332.1,7688-7706).
ggctcccaccgctatgtga

SEQ ID NO: 147454 - DNA, 19 bp, Homo sapiens
  siRNA target sequence for LRP1 (NM_002332.1,7697-7715).
cgctatgtgatcctaaagt

SEQ ID NO: 147455 - DNA, 19 bp, Homo sapiens
  siRNA target sequence for LRP1 (NM_002332.1,7699-7717).
ctatgtgatcctaaagtca

SEQ ID NO: 147456 - DNA, 19 bp, Homo sapiens
  siRNA target sequence for LRP1 (NM_002332.1,7745-7763).
gtgtatggggagcacattt

SEQ ID NO: 147457 - DNA, 19 bp, Homo sapiens
  siRNA target sequence for LRP1 (NM_002332.1,7905-7923).
ctccatgccgaatcaacaa

SEQ ID NO: 147458 - DNA, 19 bp, Homo sapiens
  siRNA target sequence for LRP1 (NM_002332.1,8034-8052).
cttgccgagcacaagatga

SEQ ID NO: 147459 - DNA, 19 bp, Homo sapiens
  siRNA target sequence for LRP1 (NM_002332.1,8037-8055).
gccgagcacaagatgagtt

SEQ ID NO: 147460 - DNA, 19 bp, Homo sapiens
  siRNA target sequence for LRP1 (NM_002332.1,8038-8056).
ccgagcacaagatgagttt

SEQ ID NO: 147461 - DNA, 19 bp, Homo sapiens
  siRNA target sequence for LRP1 (NM_002332.1,8040-8058).
gagcacaagatgagtttga

SEQ ID NO: 147462 - DNA, 19 bp, Homo sapiens
  siRNA target sequence for LRP1 (NM_002332.1,8363-8381).
gcctcagatgagatgaact

SEQ ID NO: 147463 - DNA, 19 bp, Homo sapiens
  siRNA target sequence for LRP1 (NM_002332.1,8547-8565).
ccagatgccctctgaatta

SEQ ID NO: 147464 - DNA, 19 bp, Homo sapiens
  siRNA target sequence for LRP1 (NM_002332.1,8550-8568).
gatgccctctgaattactt

SEQ ID NO: 147465 - DNA, 19 bp, Homo sapiens
  siRNA target sequence for LRP1 (NM_002332.1,8645-8663).
gagacccactgcaacaagt

SEQ ID NO: 147466 - DNA, 19 bp, Homo sapiens
  siRNA target sequence for LRP1 (NM_002332.1,8921-8939).
gacgaccgtgagttcatgt

SEQ ID NO: 147467 - DNA, 19 bp, Homo sapiens
  siRNA target sequence for LRP1 (NM_002332.1,9276-9294).
gtggctgccacatcaatga

SEQ ID NO: 147468 - DNA, 19 bp, Homo sapiens
  siRNA target sequence for LRP1 (NM_002332.1,9278-9296).
ggctgccacatcaatgagt

SEQ ID NO: 147469 - DNA, 19 bp, Homo sapiens
  siRNA target sequence for LRP1 (NM_002332.1,9542-9560).
gacgaggaaccgtttctga

SEQ ID NO: 147470 - DNA, 19 bp, Homo sapiens
  siRNA target sequence for LRP1 (NM_002332.1,9596-9614).
ctggacgggtccaactaca

SEQ ID NO: 147471 - DNA, 19 bp, Homo sapiens
  siRNA target sequence for LRP1 (NM_002332.1,9604-9622).
gtccaactacacgttactt

SEQ ID NO: 147472 - DNA, 19 bp, Homo sapiens
  siRNA target sequence for LRP1 (NM_002332.1,9640-9658).
cgccgttgccttggatttt

SEQ ID NO: 147473 - DNA, 19 bp, Homo sapiens
  siRNA target sequence for LRP1 (NM_002332.1,9665-9683).
cgagagcagatgatctact

SEQ ID NO: 147474 - DNA, 19 bp, Homo sapiens
  siRNA target sequence for LRP1 (NM_002332.1,10046-10064).
ctgacgctggactatgtca

SEQ ID NO: 147475 - DNA, 19 bp, Homo sapiens
  siRNA target sequence for LRP1 (NM_002332.1,10091-10109).
cgcgaggactacattgaat

SEQ ID NO: 147476 - DNA, 19 bp, Homo sapiens
  siRNA target sequence for LRP1 (NM_002332.1,10203-10221).
ggaccgactgggaaacaaa

SEQ ID NO: 147477 - DNA, 19 bp, Homo sapiens
  siRNA target sequence for LRP1 (NM_002332.1,10243-10261).
gaccacgggcaccaacaaa

SEQ ID NO: 147478 - DNA, 19 bp, Homo sapiens
  siRNA target sequence for LRP1 (NM_002332.1,10342-10360).
cccctgcaaggtcaacaat

SEQ ID NO: 147479 - DNA, 19 bp, Homo sapiens
  siRNA target sequence for LRP1 (NM_002332.1,10467-10485).
gcacggctagccagtttgt

SEQ ID NO: 147480 - DNA, 19 bp, Homo sapiens
  siRNA target sequence for LRP1 (NM_002332.1,10468-10486).
cacggctagccagtttgta

SEQ ID NO: 147481 - DNA, 19 bp, Homo sapiens
  siRNA target sequence for LRP1 (NM_002332.1,10473-10491).
ctagccagtttgtatgcaa

SEQ ID NO: 147482 - DNA, 19 bp, Homo sapiens
  siRNA target sequence for LRP1 (NM_002332.1,10704-10722).
gcttgcccagtcagttcaa

SEQ ID NO: 147483 - DNA, 19 bp, Homo sapiens
  siRNA target sequence for LRP1 (NM_002332.1,10705-10723).
cttgcccagtcagttcaaa

SEQ ID NO: 147484 - DNA, 19 bp, Homo sapiens
  siRNA target sequence for LRP1 (NM_002332.1,10709-10727).
cccagtcagttcaaatgca

SEQ ID NO: 147485 - DNA, 19 bp, Homo sapiens
  siRNA target sequence for LRP1 (NM_002332.1,10729-10747).
caacaccaaccgctgtatt

SEQ ID NO: 147486 - DNA, 19 bp, Homo sapiens
  siRNA target sequence for LRP1 (NM_002332.1,10958-10976).
gagttccgctgcaaggatt

SEQ ID NO: 147487 - DNA, 19 bp, Homo sapiens
  siRNA target sequence for LRP1 (NM_002332.1,11084-11102).
cagttccgctgcaagaaca

SEQ ID NO: 147488 - DNA, 19 bp, Homo sapiens
  siRNA target sequence for LRP1 (NM_002332.1,11563-11581).
gcccttccgttgcaagaat

SEQ ID NO: 147489 - DNA, 19 bp, Homo sapiens
  siRNA target sequence for LRP1 (NM_002332.1,11565-11583).
ccttccgttgcaagaatga

SEQ ID NO: 147490 - DNA, 19 bp, Homo sapiens
  siRNA target sequence for LRP1 (NM_002332.1,12009-12027).
gctgcgctcggaacttcat

SEQ ID NO: 147491 - DNA, 19 bp, Homo sapiens
  siRNA target sequence for LRP1 (NM_002332.1,12012-12030).
gcgctcggaacttcatgaa

SEQ ID NO: 147492 - DNA, 19 bp, Homo sapiens
  siRNA target sequence for LRP1 (NM_002332.1,12157-12175).
cgagagtgtccgcattgat

SEQ ID NO: 147493 - DNA, 19 bp, Homo sapiens
  siRNA target sequence for LRP1 (NM_002332.1,12162-12180).
gtgtccgcattgatgctat

SEQ ID NO: 147494 - DNA, 19 bp, Homo sapiens
  siRNA target sequence for LRP1 (NM_002332.1,12177-12195).
ctatggatgtccatgtcaa

SEQ ID NO: 147495 - DNA, 19 bp, Homo sapiens
  siRNA target sequence for LRP1 (NM_002332.1,12193-12211).
caaggctggccgtgtctat

SEQ ID NO: 147496 - DNA, 19 bp, Homo sapiens
  siRNA target sequence for LRP1 (NM_002332.1,12283-12301).
ccgccaccggcgacagatt

SEQ ID NO: 147497 - DNA, 19 bp, Homo sapiens
  siRNA target sequence for LRP1 (NM_002332.1,12285-12303).
gccaccggcgacagattga

SEQ ID NO: 147498 - DNA, 19 bp, Homo sapiens
  siRNA target sequence for LRP1 (NM_002332.1,12309-12327).
gtgtcacccacctcaacat

SEQ ID NO: 147499 - DNA, 19 bp, Homo sapiens
  siRNA target sequence for LRP1 (NM_002332.1,12497-12515).
ctgagggggaccatgtact

SEQ ID NO: 147500 - DNA, 19 bp, Homo sapiens
  siRNA target sequence for LRP1 (NM_002332.1,12614-12632).
ctggccgtggattatcaca

SEQ ID NO: 147501 - DNA, 19 bp, Homo sapiens
  siRNA target sequence for LRP1 (NM_002332.1,12618-12636).
ccgtggattatcacaatga

SEQ ID NO: 147502 - DNA, 19 bp, Homo sapiens
  siRNA target sequence for LRP1 (NM_002332.1,12651-12669).
cagacgccaagctttcagt

SEQ ID NO: 147503 - DNA, 19 bp, Homo sapiens
  siRNA target sequence for LRP1 (NM_002332.1,12720-12738).
gcaaacgaggcctaagtca

SEQ ID NO: 147504 - DNA, 19 bp, Homo sapiens
  siRNA target sequence for LRP1 (NM_002332.1,12776-12794).
ggtgtcacctacatcaata

SEQ ID NO: 147505 - DNA, 19 bp, Homo sapiens
  siRNA target sequence for LRP1 (NM_002332.1,12797-12815).
cgtgtcttcaagatccata

SEQ ID NO: 147506 - DNA, 19 bp, Homo sapiens
  siRNA target sequence for LRP1 (NM_002332.1,12798-12816).
gtgtcttcaagatccataa

SEQ ID NO: 147507 - DNA, 19 bp, Homo sapiens
  siRNA target sequence for LRP1 (NM_002332.1,12864-12882).
cctctgacgtggtccttta

SEQ ID NO: 147508 - DNA, 19 bp, Homo sapiens
  siRNA target sequence for LRP1 (NM_002332.1,12867-12885).
ctgacgtggtcctttacca

SEQ ID NO: 147509 - DNA, 19 bp, Homo sapiens
  siRNA target sequence for LRP1 (NM_002332.1,13286-13304).
ggctactgtgccaacaaca

SEQ ID NO: 147510 - DNA, 19 bp, Homo sapiens
  siRNA target sequence for LRP1 (NM_002332.1,13450-13468).
ccgctgcactgcctacttt

SEQ ID NO: 147511 - DNA, 19 bp, Homo sapiens
  siRNA target sequence for LRP1 (NM_002332.1,13711-13729).
gcagcagccaggacatata

SEQ ID NO: 147512 - DNA, 19 bp, Homo sapiens
  siRNA target sequence for LRP1 (NM_002332.1,13724-13742).
catatagcctccatcctaa

SEQ ID NO: 147513 - DNA, 19 bp, Homo sapiens
  siRNA target sequence for LRP1 (NM_002332.1,13781-13799).
ggagtggtattctggtata

SEQ ID NO: 147514 - DNA, 19 bp, Homo sapiens
  siRNA target sequence for LRP1 (NM_002332.1,13899-13917).
gcggagagcctgatgatgt

SEQ ID NO: 147515 - DNA, 19 bp, Homo sapiens
  siRNA target sequence for LRP1 (NM_002332.1,13924-13942).
cctactggacgctgacttt

SEQ ID NO: 147516 - DNA, 19 bp, Homo sapiens
  siRNA target sequence for LRP2 (NM_004525.1,402-420).
cgtcaagattgctcacaaa

SEQ ID NO: 147517 - DNA, 19 bp, Homo sapiens
  siRNA target sequence for LRP2 (NM_004525.1,408-426).
gattgctcacaaagtacat

SEQ ID NO: 147518 - DNA, 19 bp, Homo sapiens
  siRNA target sequence for LRP2 (NM_004525.1,424-442).
catgctcaagtcatcagat

SEQ ID NO: 147519 - DNA, 19 bp, Homo sapiens
  siRNA target sequence for LRP2 (NM_004525.1,505-523).
ccgatggagctgatgagaa

SEQ ID NO: 147520 - DNA, 19 bp, Homo sapiens
  siRNA target sequence for LRP2 (NM_004525.1,548-566).
gcagcttacttgtgacaat

SEQ ID NO: 147521 - DNA, 19 bp, Homo sapiens
  siRNA target sequence for LRP2 (NM_004525.1,561-579).
gacaatggggcctgctata

SEQ ID NO: 147522 - DNA, 19 bp, Homo sapiens
  siRNA target sequence for LRP2 (NM_004525.1,586-604).
gtcagaagtgtgattggaa

SEQ ID NO: 147523 - DNA, 19 bp, Homo sapiens
  siRNA target sequence for LRP2 (NM_004525.1,590-608).
gaagtgtgattggaaagtt

SEQ ID NO: 147524 - DNA, 19 bp, Homo sapiens
  siRNA target sequence for LRP2 (NM_004525.1,616-634).
gggactcctcagatgaaat

SEQ ID NO: 147525 - DNA, 19 bp, Homo sapiens
  siRNA target sequence for LRP2 (NM_004525.1,653-671).
cttgcacaatgagttttca

SEQ ID NO: 147526 - DNA, 19 bp, Homo sapiens
  siRNA target sequence for LRP2 (NM_004525.1,656-674).
gcacaatgagttttcatgt

SEQ ID NO: 147527 - DNA, 19 bp, Homo sapiens
  siRNA target sequence for LRP2 (NM_004525.1,686-704).
gtgtatccctcgtgcttat

SEQ ID NO: 147528 - DNA, 19 bp, Homo sapiens
  siRNA target sequence for LRP2 (NM_004525.1,688-706).
gtatccctcgtgcttatgt

SEQ ID NO: 147529 - DNA, 19 bp, Homo sapiens
  siRNA target sequence for LRP2 (NM_004525.1,771-789).
ggtggttaccagttcactt

SEQ ID NO: 147530 - DNA, 19 bp, Homo sapiens
  siRNA target sequence for LRP2 (NM_004525.1,794-812).
cagtggccgatgcatttat

SEQ ID NO: 147531 - DNA, 19 bp, Homo sapiens
  siRNA target sequence for LRP2 (NM_004525.1,796-814).
gtggccgatgcatttatca

SEQ ID NO: 147532 - DNA, 19 bp, Homo sapiens
  siRNA target sequence for LRP2 (NM_004525.1,798-816).
ggccgatgcatttatcaaa

SEQ ID NO: 147533 - DNA, 19 bp, Homo sapiens
  siRNA target sequence for LRP2 (NM_004525.1,799-817).
gccgatgcatttatcaaaa

SEQ ID NO: 147534 - DNA, 19 bp, Homo sapiens
  siRNA target sequence for LRP2 (NM_004525.1,879-897).
ggtcctcatgatgttcata

SEQ ID NO: 147535 - DNA, 19 bp, Homo sapiens
  siRNA target sequence for LRP2 (NM_004525.1,880-898).
gtcctcatgatgttcataa

SEQ ID NO: 147536 - DNA, 19 bp, Homo sapiens
  siRNA target sequence for LRP2 (NM_004525.1,882-900).
cctcatgatgttcataaat

SEQ ID NO: 147537 - DNA, 19 bp, Homo sapiens
  siRNA target sequence for LRP2 (NM_004525.1,934-952).
gacgatgcatctccattta

SEQ ID NO: 147538 - DNA, 19 bp, Homo sapiens
  siRNA target sequence for LRP2 (NM_004525.1,936-954).
cgatgcatctccatttata

SEQ ID NO: 147539 - DNA, 19 bp, Homo sapiens
  siRNA target sequence for LRP2 (NM_004525.1,1012-1030).
ccggaaaatactgtagtat

SEQ ID NO: 147540 - DNA, 19 bp, Homo sapiens
  siRNA target sequence for LRP2 (NM_004525.1,1079-1097).
gtatggaggagcgtgtttt

SEQ ID NO: 147541 - DNA, 19 bp, Homo sapiens
  siRNA target sequence for LRP2 (NM_004525.1,1099-1117).
gtcccccaggttatatcat

SEQ ID NO: 147542 - DNA, 19 bp, Homo sapiens
  siRNA target sequence for LRP2 (NM_004525.1,1101-1119).
cccccaggttatatcatca

SEQ ID NO: 147543 - DNA, 19 bp, Homo sapiens
  siRNA target sequence for LRP2 (NM_004525.1,1102-1120).
ccccaggttatatcatcaa

SEQ ID NO: 147544 - DNA, 19 bp, Homo sapiens
  siRNA target sequence for LRP2 (NM_004525.1,1132-1150).
gccgtacctgtgttgagtt

SEQ ID NO: 147545 - DNA, 19 bp, Homo sapiens
  siRNA target sequence for LRP2 (NM_004525.1,1133-1151).
ccgtacctgtgttgagttt

SEQ ID NO: 147546 - DNA, 19 bp, Homo sapiens
  siRNA target sequence for LRP2 (NM_004525.1,1238-1256).
cttggagcgtggacagtat

SEQ ID NO: 147547 - DNA, 19 bp, Homo sapiens
  siRNA target sequence for LRP2 (NM_004525.1,1242-1260).
gagcgtggacagtattgca

SEQ ID NO: 147548 - DNA, 19 bp, Homo sapiens
  siRNA target sequence for LRP2 (NM_004525.1,1248-1266).
ggacagtattgcaaagcta

SEQ ID NO: 147549 - DNA, 19 bp, Homo sapiens
  siRNA target sequence for LRP2 (NM_004525.1,1249-1267).
gacagtattgcaaagctaa

SEQ ID NO: 147550 - DNA, 19 bp, Homo sapiens
  siRNA target sequence for LRP2 (NM_004525.1,1253-1271).
gtattgcaaagctaatgat

SEQ ID NO: 147551 - DNA, 19 bp, Homo sapiens
  siRNA target sequence for LRP2 (NM_004525.1,1259-1277).
caaagctaatgattccttt

SEQ ID NO: 147552 - DNA, 19 bp, Homo sapiens
  siRNA target sequence for LRP2 (NM_004525.1,1279-1297).
gcgaggcctccattatctt

SEQ ID NO: 147553 - DNA, 19 bp, Homo sapiens
  siRNA target sequence for LRP2 (NM_004525.1,1281-1299).
gaggcctccattatcttct

SEQ ID NO: 147554 - DNA, 19 bp, Homo sapiens
  siRNA target sequence for LRP2 (NM_004525.1,1300-1318).
ccaatggtcgggatttgtt

SEQ ID NO: 147555 - DNA, 19 bp, Homo sapiens
  siRNA target sequence for LRP2 (NM_004525.1,1301-1319).
caatggtcgggatttgtta

SEQ ID NO: 147556 - DNA, 19 bp, Homo sapiens
  siRNA target sequence for LRP2 (NM_004525.1,1387-1405).
gtgtggctttccactatca

SEQ ID NO: 147557 - DNA, 19 bp, Homo sapiens
  siRNA target sequence for LRP2 (NM_004525.1,1407-1425).
ctgcaaagagttttttgga

SEQ ID NO: 147558 - DNA, 19 bp, Homo sapiens
  siRNA target sequence for LRP2 (NM_004525.1,1423-1441).
ggacagacaccgtgcaaaa

SEQ ID NO: 147559 - DNA, 19 bp, Homo sapiens
  siRNA target sequence for LRP2 (NM_004525.1,1430-1448).
caccgtgcaaaataaggtt

SEQ ID NO: 147560 - DNA, 19 bp, Homo sapiens
  siRNA target sequence for LRP2 (NM_004525.1,1432-1450).
ccgtgcaaaataaggtttt

SEQ ID NO: 147561 - DNA, 19 bp, Homo sapiens
  siRNA target sequence for LRP2 (NM_004525.1,1524-1542).
gtggactgggttaataata

SEQ ID NO: 147562 - DNA, 19 bp, Homo sapiens
  siRNA target sequence for LRP2 (NM_004525.1,1568-1586).
caaccgcatagatatggta

SEQ ID NO: 147563 - DNA, 19 bp, Homo sapiens
  siRNA target sequence for LRP2 (NM_004525.1,1571-1589).
ccgcatagatatggtaaat

SEQ ID NO: 147564 - DNA, 19 bp, Homo sapiens
  siRNA target sequence for LRP2 (NM_004525.1,1572-1590).
cgcatagatatggtaaatt

SEQ ID NO: 147565 - DNA, 19 bp, Homo sapiens
  siRNA target sequence for LRP2 (NM_004525.1,1606-1624).
gggttacccttataactga

SEQ ID NO: 147566 - DNA, 19 bp, Homo sapiens
  siRNA target sequence for LRP2 (NM_004525.1,1607-1625).
ggttacccttataactgaa

SEQ ID NO: 147567 - DNA, 19 bp, Homo sapiens
  siRNA target sequence for LRP2 (NM_004525.1,1608-1626).
gttacccttataactgaaa

SEQ ID NO: 147568 - DNA, 19 bp, Homo sapiens
  siRNA target sequence for LRP2 (NM_004525.1,1612-1630).
cccttataactgaaaactt

SEQ ID NO: 147569 - DNA, 19 bp, Homo sapiens
  siRNA target sequence for LRP2 (NM_004525.1,1656-1674).
gacccaactgttggttatt

SEQ ID NO: 147570 - DNA, 19 bp, Homo sapiens
  siRNA target sequence for LRP2 (NM_004525.1,1660-1678).
caactgttggttatttatt

SEQ ID NO: 147571 - DNA, 19 bp, Homo sapiens
  siRNA target sequence for LRP2 (NM_004525.1,1696-1714).
gcctttctggggaacctaa

SEQ ID NO: 147572 - DNA, 19 bp, Homo sapiens
  siRNA target sequence for LRP2 (NM_004525.1,1792-1810).
ctctggatatgatatcgaa

SEQ ID NO: 147573 - DNA, 19 bp, Homo sapiens
  siRNA target sequence for LRP2 (NM_004525.1,1823-1841).
ggttgactctcggtttgat

SEQ ID NO: 147574 - DNA, 19 bp, Homo sapiens
  siRNA target sequence for LRP2 (NM_004525.1,1824-1842).
gttgactctcggtttgatt

SEQ ID NO: 147575 - DNA, 19 bp, Homo sapiens
  siRNA target sequence for LRP2 (NM_004525.1,1827-1845).
gactctcggtttgattaca

SEQ ID NO: 147576 - DNA, 19 bp, Homo sapiens
  siRNA target sequence for LRP2 (NM_004525.1,1835-1853).
gtttgattacattgaaact

SEQ ID NO: 147577 - DNA, 19 bp, Homo sapiens
  siRNA target sequence for LRP2 (NM_004525.1,1914-1932).
ccctttggagtaagcttat

SEQ ID NO: 147578 - DNA, 19 bp, Homo sapiens
  siRNA target sequence for LRP2 (NM_004525.1,1915-1933).
cctttggagtaagcttatt

SEQ ID NO: 147579 - DNA, 19 bp, Homo sapiens
  siRNA target sequence for LRP2 (NM_004525.1,1916-1934).
ctttggagtaagcttattt

SEQ ID NO: 147580 - DNA, 19 bp, Homo sapiens
  siRNA target sequence for LRP2 (NM_004525.1,1972-1990).
ccgtgctgaaggcaaacaa

SEQ ID NO: 147581 - DNA, 19 bp, Homo sapiens
  siRNA target sequence for LRP2 (NM_004525.1,2002-2020).
ccaacccacaagtgtacta

SEQ ID NO: 147582 - DNA, 19 bp, Homo sapiens
  siRNA target sequence for LRP2 (NM_004525.1,2038-2056).
cctatggagtgactgttta

SEQ ID NO: 147583 - DNA, 19 bp, Homo sapiens
  siRNA target sequence for LRP2 (NM_004525.1,2064-2082).
ctcagacagccctatgcta

SEQ ID NO: 147584 - DNA, 19 bp, Homo sapiens
  siRNA target sequence for LRP2 (NM_004525.1,2080-2098).
ctaccaatccgtgtaaaga

SEQ ID NO: 147585 - DNA, 19 bp, Homo sapiens
  siRNA target sequence for LRP2 (NM_004525.1,2083-2101).
ccaatccgtgtaaagataa

SEQ ID NO: 147586 - DNA, 19 bp, Homo sapiens
  siRNA target sequence for LRP2 (NM_004525.1,2132-2150).
cagccacagaacagataat

SEQ ID NO: 147587 - DNA, 19 bp, Homo sapiens
  siRNA target sequence for LRP2 (NM_004525.1,2186-2204).
cttccaactggatacagat

SEQ ID NO: 147588 - DNA, 19 bp, Homo sapiens
  siRNA target sequence for LRP2 (NM_004525.1,2307-2325).
ccagtttcggggaatcctt

SEQ ID NO: 147589 - DNA, 19 bp, Homo sapiens
  siRNA target sequence for LRP2 (NM_004525.1,2314-2332).
cggggaatccttctttctt

SEQ ID NO: 147590 - DNA, 19 bp, Homo sapiens
  siRNA target sequence for LRP2 (NM_004525.1,2315-2333).
ggggaatccttctttcttt

SEQ ID NO: 147591 - DNA, 19 bp, Homo sapiens
  siRNA target sequence for LRP2 (NM_004525.1,2317-2335).
ggaatccttctttctttgt

SEQ ID NO: 147592 - DNA, 19 bp, Homo sapiens
  siRNA target sequence for LRP2 (NM_004525.1,2330-2348).
ctttgtcgggattgatttt

SEQ ID NO: 147593 - DNA, 19 bp, Homo sapiens
  siRNA target sequence for LRP2 (NM_004525.1,2355-2373).
caggacagcactatctttt

SEQ ID NO: 147594 - DNA, 19 bp, Homo sapiens
  siRNA target sequence for LRP2 (NM_004525.1,2503-2521).
ggacagactctcattacaa

SEQ ID NO: 147595 - DNA, 19 bp, Homo sapiens
  siRNA target sequence for LRP2 (NM_004525.1,2508-2526).
gactctcattacaagagta

SEQ ID NO: 147596 - DNA, 19 bp, Homo sapiens
  siRNA target sequence for LRP2 (NM_004525.1,2534-2552).
catgaggctagctgataaa

SEQ ID NO: 147597 - DNA, 19 bp, Homo sapiens
  siRNA target sequence for LRP2 (NM_004525.1,2554-2572).
cgagacgcacagtagttca

SEQ ID NO: 147598 - DNA, 19 bp, Homo sapiens
  siRNA target sequence for LRP2 (NM_004525.1,2559-2577).
cgcacagtagttcagtatt

SEQ ID NO: 147599 - DNA, 19 bp, Homo sapiens
  siRNA target sequence for LRP2 (NM_004525.1,2560-2578).
gcacagtagttcagtattt

SEQ ID NO: 147600 - DNA, 19 bp, Homo sapiens
  siRNA target sequence for LRP2 (NM_004525.1,2565-2583).
gtagttcagtatttaaata

SEQ ID NO: 147601 - DNA, 19 bp, Homo sapiens
  siRNA target sequence for LRP2 (NM_004525.1,2587-2605).
cacggtcggtggtagttca

SEQ ID NO: 147602 - DNA, 19 bp, Homo sapiens
  siRNA target sequence for LRP2 (NM_004525.1,2593-2611).
cggtggtagttcatccttt

SEQ ID NO: 147603 - DNA, 19 bp, Homo sapiens
  siRNA target sequence for LRP2 (NM_004525.1,2594-2612).
ggtggtagttcatcctttt

SEQ ID NO: 147604 - DNA, 19 bp, Homo sapiens
  siRNA target sequence for LRP2 (NM_004525.1,2607-2625).
ccttttgccgggtatctat

SEQ ID NO: 147605 - DNA, 19 bp, Homo sapiens
  siRNA target sequence for LRP2 (NM_004525.1,2608-2626).
cttttgccgggtatctatt

SEQ ID NO: 147606 - DNA, 19 bp, Homo sapiens
  siRNA target sequence for LRP2 (NM_004525.1,2638-2656).
ggttccgtcctgctaaaat

SEQ ID NO: 147607 - DNA, 19 bp, Homo sapiens
  siRNA target sequence for LRP2 (NM_004525.1,2639-2657).
gttccgtcctgctaaaatt

SEQ ID NO: 147608 - DNA, 19 bp, Homo sapiens
  siRNA target sequence for LRP2 (NM_004525.1,2643-2661).
cgtcctgctaaaattatga

SEQ ID NO: 147609 - DNA, 19 bp, Homo sapiens
  siRNA target sequence for LRP2 (NM_004525.1,2680-2698).
ctcacctcttgcctgtaat

SEQ ID NO: 147610 - DNA, 19 bp, Homo sapiens
  siRNA target sequence for LRP2 (NM_004525.1,2682-2700).
cacctcttgcctgtaataa

SEQ ID NO: 147611 - DNA, 19 bp, Homo sapiens
  siRNA target sequence for LRP2 (NM_004525.1,2740-2758).
gggctgcttcacgattgta

SEQ ID NO: 147612 - DNA, 19 bp, Homo sapiens
  siRNA target sequence for LRP2 (NM_004525.1,2742-2760).
gctgcttcacgattgtact

SEQ ID NO: 147613 - DNA, 19 bp, Homo sapiens
  siRNA target sequence for LRP2 (NM_004525.1,2792-2810).
cagcacctttgatggttta

SEQ ID NO: 147614 - DNA, 19 bp, Homo sapiens
  siRNA target sequence for LRP2 (NM_004525.1,2818-2836).
gaagactgggccatataga

SEQ ID NO: 147615 - DNA, 19 bp, Homo sapiens
  siRNA target sequence for LRP2 (NM_004525.1,3013-3031).
gttctaacgcctgtaatca

SEQ ID NO: 147616 - DNA, 19 bp, Homo sapiens
  siRNA target sequence for LRP2 (NM_004525.1,3067-3085).
gcttcccggtgccaaattt

SEQ ID NO: 147617 - DNA, 19 bp, Homo sapiens
  siRNA target sequence for LRP2 (NM_004525.1,3095-3113).
gtgtgggtgcccttatgga

SEQ ID NO: 147618 - DNA, 19 bp, Homo sapiens
  siRNA target sequence for LRP2 (NM_004525.1,3097-3115).
gtgggtgcccttatggaat

SEQ ID NO: 147619 - DNA, 19 bp, Homo sapiens
  siRNA target sequence for LRP2 (NM_004525.1,3118-3136).
ggctggcttccaatcactt

SEQ ID NO: 147620 - DNA, 19 bp, Homo sapiens
  siRNA target sequence for LRP2 (NM_004525.1,3123-3141).
gcttccaatcacttgacat

SEQ ID NO: 147621 - DNA, 19 bp, Homo sapiens
  siRNA target sequence for LRP2 (NM_004525.1,3143-3161).
cgagggggacccaaccaat

SEQ ID NO: 147622 - DNA, 19 bp, Homo sapiens
  siRNA target sequence for LRP2 (NM_004525.1,3146-3164).
gggggacccaaccaatgaa

SEQ ID NO: 147623 - DNA, 19 bp, Homo sapiens
  siRNA target sequence for LRP2 (NM_004525.1,3217-3235).
gtgtgcccaattactatct

SEQ ID NO: 147624 - DNA, 19 bp, Homo sapiens
  siRNA target sequence for LRP2 (NM_004525.1,3246-3264).
gtcgatgattgtcatgata

SEQ ID NO: 147625 - DNA, 19 bp, Homo sapiens
  siRNA target sequence for LRP2 (NM_004525.1,3266-3284).
cagtgatgagcaactatgt

SEQ ID NO: 147626 - DNA, 19 bp, Homo sapiens
  siRNA target sequence for LRP2 (NM_004525.1,3276-3294).
caactatgtggcacactta

SEQ ID NO: 147627 - DNA, 19 bp, Homo sapiens
  siRNA target sequence for LRP2 (NM_004525.1,3279-3297).
ctatgtggcacacttaata

SEQ ID NO: 147628 - DNA, 19 bp, Homo sapiens
  siRNA target sequence for LRP2 (NM_004525.1,3451-3469).
gtgataatcaccagtgtat

SEQ ID NO: 147629 - DNA, 19 bp, Homo sapiens
  siRNA target sequence for LRP2 (NM_004525.1,3459-3477).
caccagtgtatctcaaaga

SEQ ID NO: 147630 - DNA, 19 bp, Homo sapiens
  siRNA target sequence for LRP2 (NM_004525.1,3550-3568).
gccaacctagtcagtttaa

SEQ ID NO: 147631 - DNA, 19 bp, Homo sapiens
  siRNA target sequence for LRP2 (NM_004525.1,3551-3569).
ccaacctagtcagtttaat

SEQ ID NO: 147632 - DNA, 19 bp, Homo sapiens
  siRNA target sequence for LRP2 (NM_004525.1,3552-3570).
caacctagtcagtttaatt

SEQ ID NO: 147633 - DNA, 19 bp, Homo sapiens
  siRNA target sequence for LRP2 (NM_004525.1,3563-3581).
gtttaattgccccaatcat

SEQ ID NO: 147634 - DNA, 19 bp, Homo sapiens
  siRNA target sequence for LRP2 (NM_004525.1,3571-3589).
gccccaatcatcgatgtat

SEQ ID NO: 147635 - DNA, 19 bp, Homo sapiens
  siRNA target sequence for LRP2 (NM_004525.1,3572-3590).
ccccaatcatcgatgtatt

SEQ ID NO: 147636 - DNA, 19 bp, Homo sapiens
  siRNA target sequence for LRP2 (NM_004525.1,3583-3601).
gatgtattgacctatcgtt

SEQ ID NO: 147637 - DNA, 19 bp, Homo sapiens
  siRNA target sequence for LRP2 (NM_004525.1,3648-3666).
ggttgtgtattaaactgta

SEQ ID NO: 147638 - DNA, 19 bp, Homo sapiens
  siRNA target sequence for LRP2 (NM_004525.1,3683-3701).
gtgtgccagtggggataaa

SEQ ID NO: 147639 - DNA, 19 bp, Homo sapiens
  siRNA target sequence for LRP2 (NM_004525.1,3710-3728).
cgtcacaaatcgttgtgat

SEQ ID NO: 147640 - DNA, 19 bp, Homo sapiens
  siRNA target sequence for LRP2 (NM_004525.1,3839-3857).
gaacttctgggaatgtgat

SEQ ID NO: 147641 - DNA, 19 bp, Homo sapiens
  siRNA target sequence for LRP2 (NM_004525.1,3908-3926).
caagacttgcccttcatca

SEQ ID NO: 147642 - DNA, 19 bp, Homo sapiens
  siRNA target sequence for LRP2 (NM_004525.1,3916-3934).
gcccttcatcatatttcca

SEQ ID NO: 147643 - DNA, 19 bp, Homo sapiens
  siRNA target sequence for LRP2 (NM_004525.1,4056-4074).
cagtgtcttggccataaca

SEQ ID NO: 147644 - DNA, 19 bp, Homo sapiens
  siRNA target sequence for LRP2 (NM_004525.1,4153-4171).
ggaacagctgctcagattt

SEQ ID NO: 147645 - DNA, 19 bp, Homo sapiens
  siRNA target sequence for LRP2 (NM_004525.1,4186-4204).
ctcacgagtgtgttcaaga

SEQ ID NO: 147646 - DNA, 19 bp, Homo sapiens
  siRNA target sequence for LRP2 (NM_004525.1,4245-4263).
cttgccaatgattctaaga

SEQ ID NO: 147647 - DNA, 19 bp, Homo sapiens
  siRNA target sequence for LRP2 (NM_004525.1,4287-4305).
gatattctaggctcttgta

SEQ ID NO: 147648 - DNA, 19 bp, Homo sapiens
  siRNA target sequence for LRP2 (NM_004525.1,4300-4318).
cttgtagccagcactgtta

SEQ ID NO: 147649 - DNA, 19 bp, Homo sapiens
  siRNA target sequence for LRP2 (NM_004525.1,4303-4321).
gtagccagcactgttacaa

SEQ ID NO: 147650 - DNA, 19 bp, Homo sapiens
  siRNA target sequence for LRP2 (NM_004525.1,4306-4324).
gccagcactgttacaatat

SEQ ID NO: 147651 - DNA, 19 bp, Homo sapiens
  siRNA target sequence for LRP2 (NM_004525.1,4308-4326).
cagcactgttacaatatga

SEQ ID NO: 147652 - DNA, 19 bp, Homo sapiens
  siRNA target sequence for LRP2 (NM_004525.1,4310-4328).
gcactgttacaatatgaga

SEQ ID NO: 147653 - DNA, 19 bp, Homo sapiens
  siRNA target sequence for LRP2 (NM_004525.1,4337-4355).
ccggtgctcgtgtgataca

SEQ ID NO: 147654 - DNA, 19 bp, Homo sapiens
  siRNA target sequence for LRP2 (NM_004525.1,4348-4366).
gtgatacaggctacatgtt

SEQ ID NO: 147655 - DNA, 19 bp, Homo sapiens
  siRNA target sequence for LRP2 (NM_004525.1,4377-4395).
gggaggacttgcaaagtta

SEQ ID NO: 147656 - DNA, 19 bp, Homo sapiens
  siRNA target sequence for LRP2 (NM_004525.1,4426-4444).
caagtcagaacaaaattat

SEQ ID NO: 147657 - DNA, 19 bp, Homo sapiens
  siRNA target sequence for LRP2 (NM_004525.1,4459-4477).
cctcccaggtccacaatat

SEQ ID NO: 147658 - DNA, 19 bp, Homo sapiens
  siRNA target sequence for LRP2 (NM_004525.1,4464-4482).
caggtccacaatatctatt

SEQ ID NO: 147659 - DNA, 19 bp, Homo sapiens
  siRNA target sequence for LRP2 (NM_004525.1,4488-4506).
gtcgagaatggttcttaca

SEQ ID NO: 147660 - DNA, 19 bp, Homo sapiens
  siRNA target sequence for LRP2 (NM_004525.1,4528-4546).
caattagtggtcgtatctt

SEQ ID NO: 147661 - DNA, 19 bp, Homo sapiens
  siRNA target sequence for LRP2 (NM_004525.1,4574-4592).
ctggagtgcgtttcaaaat

SEQ ID NO: 147662 - DNA, 19 bp, Homo sapiens
  siRNA target sequence for LRP2 (NM_004525.1,4577-4595).
gagtgcgtttcaaaatgga

SEQ ID NO: 147663 - DNA, 19 bp, Homo sapiens
  siRNA target sequence for LRP2 (NM_004525.1,4631-4649).
cttgactgaaactattgca

SEQ ID NO: 147664 - DNA, 19 bp, Homo sapiens
  siRNA target sequence for LRP2 (NM_004525.1,4634-4652).
gactgaaactattgcaata

SEQ ID NO: 147665 - DNA, 19 bp, Homo sapiens
  siRNA target sequence for LRP2 (NM_004525.1,4657-4675).
gggtaggtcgtaatcttta

SEQ ID NO: 147666 - DNA, 19 bp, Homo sapiens
  siRNA target sequence for LRP2 (NM_004525.1,4659-4677).
gtaggtcgtaatctttact

SEQ ID NO: 147667 - DNA, 19 bp, Homo sapiens
  siRNA target sequence for LRP2 (NM_004525.1,4728-4746).
cacaggactgtgctgatta

SEQ ID NO: 147668 - DNA, 19 bp, Homo sapiens
  siRNA target sequence for LRP2 (NM_004525.1,4732-4750).
ggactgtgctgattagtaa

SEQ ID NO: 147669 - DNA, 19 bp, Homo sapiens
  siRNA target sequence for LRP2 (NM_004525.1,4776-4794).
gcattagatcccagaatga

SEQ ID NO: 147670 - DNA, 19 bp, Homo sapiens
  siRNA target sequence for LRP2 (NM_004525.1,4777-4795).
cattagatcccagaatgaa

SEQ ID NO: 147671 - DNA, 19 bp, Homo sapiens
  siRNA target sequence for LRP2 (NM_004525.1,4898-4916).
ctggccctgcggcttaact

SEQ ID NO: 147672 - DNA, 19 bp, Homo sapiens
  siRNA target sequence for LRP2 (NM_004525.1,4900-4918).
ggccctgcggcttaactat

SEQ ID NO: 147673 - DNA, 19 bp, Homo sapiens
  siRNA target sequence for LRP2 (NM_004525.1,4901-4919).
gccctgcggcttaactatt

SEQ ID NO: 147674 - DNA, 19 bp, Homo sapiens
  siRNA target sequence for LRP2 (NM_004525.1,4906-4924).
gcggcttaactattgacta

SEQ ID NO: 147675 - DNA, 19 bp, Homo sapiens
  siRNA target sequence for LRP2 (NM_004525.1,4943-4961).
cttcatggactcctatctt

SEQ ID NO: 147676 - DNA, 19 bp, Homo sapiens
  siRNA target sequence for LRP2 (NM_004525.1,4946-4964).
catggactcctatcttgat

SEQ ID NO: 147677 - DNA, 19 bp, Homo sapiens
  siRNA target sequence for LRP2 (NM_004525.1,4950-4968).
gactcctatcttgattaca

SEQ ID NO: 147678 - DNA, 19 bp, Homo sapiens
  siRNA target sequence for LRP2 (NM_004525.1,5004-5022).
caggtgatagccagtgatt

SEQ ID NO: 147679 - DNA, 19 bp, Homo sapiens
  siRNA target sequence for LRP2 (NM_004525.1,5007-5025).
gtgatagccagtgatttga

SEQ ID NO: 147680 - DNA, 19 bp, Homo sapiens
  siRNA target sequence for LRP2 (NM_004525.1,5097-5115).
gttatgcgagccaacaagt

SEQ ID NO: 147681 - DNA, 19 bp, Homo sapiens
  siRNA target sequence for LRP2 (NM_004525.1,5125-5143).
ggaaccagtcagttgtaat

SEQ ID NO: 147682 - DNA, 19 bp, Homo sapiens
  siRNA target sequence for LRP2 (NM_004525.1,5177-5195).
ggttcatccttcgaaacaa

SEQ ID NO: 147683 - DNA, 19 bp, Homo sapiens
  siRNA target sequence for LRP2 (NM_004525.1,5251-5269).
cctcacaggggcctcattt

SEQ ID NO: 147684 - DNA, 19 bp, Homo sapiens
  siRNA target sequence for LRP2 (NM_004525.1,5329-5347).
gagatgatcaacctttctt

SEQ ID NO: 147685 - DNA, 19 bp, Homo sapiens
  siRNA target sequence for LRP2 (NM_004525.1,5331-5349).
gatgatcaacctttcttaa

SEQ ID NO: 147686 - DNA, 19 bp, Homo sapiens
  siRNA target sequence for LRP2 (NM_004525.1,5334-5352).
gatcaacctttcttaataa

SEQ ID NO: 147687 - DNA, 19 bp, Homo sapiens
  siRNA target sequence for LRP2 (NM_004525.1,5353-5371).
ctgtaaggcaacatataat

SEQ ID NO: 147688 - DNA, 19 bp, Homo sapiens
  siRNA target sequence for LRP2 (NM_004525.1,5360-5378).
gcaacatataatttttgga

SEQ ID NO: 147689 - DNA, 19 bp, Homo sapiens
  siRNA target sequence for LRP2 (NM_004525.1,5477-5495).
catctattgggttgaaaat

SEQ ID NO: 147690 - DNA, 19 bp, Homo sapiens
  siRNA target sequence for LRP2 (NM_004525.1,5480-5498).
ctattgggttgaaaatcca

SEQ ID NO: 147691 - DNA, 19 bp, Homo sapiens
  siRNA target sequence for LRP2 (NM_004525.1,5526-5544).
ggcaccaacaggacagtat

SEQ ID NO: 147692 - DNA, 19 bp, Homo sapiens
  siRNA target sequence for LRP2 (NM_004525.1,5527-5545).
gcaccaacaggacagtatt

SEQ ID NO: 147693 - DNA, 19 bp, Homo sapiens
  siRNA target sequence for LRP2 (NM_004525.1,5557-5575).
ctatggtggggccttctat

SEQ ID NO: 147694 - DNA, 19 bp, Homo sapiens
  siRNA target sequence for LRP2 (NM_004525.1,5579-5597).
cctggccttagattggatt

SEQ ID NO: 147695 - DNA, 19 bp, Homo sapiens
  siRNA target sequence for LRP2 (NM_004525.1,5580-5598).
ctggccttagattggattt

SEQ ID NO: 147696 - DNA, 19 bp, Homo sapiens
  siRNA target sequence for LRP2 (NM_004525.1,5607-5625).
ctttattctaccaatccta

SEQ ID NO: 147697 - DNA, 19 bp, Homo sapiens
  siRNA target sequence for LRP2 (NM_004525.1,5631-5649).
cagtcaatcgaggttttga

SEQ ID NO: 147698 - DNA, 19 bp, Homo sapiens
  siRNA target sequence for LRP2 (NM_004525.1,5633-5651).
gtcaatcgaggttttgaca

SEQ ID NO: 147699 - DNA, 19 bp, Homo sapiens
  siRNA target sequence for LRP2 (NM_004525.1,5652-5670).
ctccacggagatatcagat

SEQ ID NO: 147700 - DNA, 19 bp, Homo sapiens
  siRNA target sequence for LRP2 (NM_004525.1,5655-5673).
cacggagatatcagataca

SEQ ID NO: 147701 - DNA, 19 bp, Homo sapiens
  siRNA target sequence for LRP2 (NM_004525.1,5706-5724).
cttggagttggctttccaa

SEQ ID NO: 147702 - DNA, 19 bp, Homo sapiens
  siRNA target sequence for LRP2 (NM_004525.1,5717-5735).
ctttccaattggcataact

SEQ ID NO: 147703 - DNA, 19 bp, Homo sapiens
  siRNA target sequence for LRP2 (NM_004525.1,5824-5842).
gcacatctgtgaaaactct

SEQ ID NO: 147704 - DNA, 19 bp, Homo sapiens
  siRNA target sequence for LRP2 (NM_004525.1,5987-6005).
ccacccctggggaattgca

SEQ ID NO: 147705 - DNA, 19 bp, Homo sapiens
  siRNA target sequence for LRP2 (NM_004525.1,5997-6015).
ggaattgcagtccatgatt

SEQ ID NO: 147706 - DNA, 19 bp, Homo sapiens
  siRNA target sequence for LRP2 (NM_004525.1,6048-6066).
gtcattgaaagagttgata

SEQ ID NO: 147707 - DNA, 19 bp, Homo sapiens
  siRNA target sequence for LRP2 (NM_004525.1,6070-6088).
ccactggggccaacaaaat

SEQ ID NO: 147708 - DNA, 19 bp, Homo sapiens
  siRNA target sequence for LRP2 (NM_004525.1,6073-6091).
ctggggccaacaaaatagt

SEQ ID NO: 147709 - DNA, 19 bp, Homo sapiens
  siRNA target sequence for LRP2 (NM_004525.1,6075-6093).
ggggccaacaaaatagtct

SEQ ID NO: 147710 - DNA, 19 bp, Homo sapiens
  siRNA target sequence for LRP2 (NM_004525.1,6076-6094).
gggccaacaaaatagtctt

SEQ ID NO: 147711 - DNA, 19 bp, Homo sapiens
  siRNA target sequence for LRP2 (NM_004525.1,6099-6117).
gataatgttccaaatctga

SEQ ID NO: 147712 - DNA, 19 bp, Homo sapiens
  siRNA target sequence for LRP2 (NM_004525.1,6114-6132).
ctgaggggtcttcaagttt

SEQ ID NO: 147713 - DNA, 19 bp, Homo sapiens
  siRNA target sequence for LRP2 (NM_004525.1,6165-6183).
ggctgtagcaacaacatga

SEQ ID NO: 147714 - DNA, 19 bp, Homo sapiens
  siRNA target sequence for LRP2 (NM_004525.1,6210-6228).
gtaccaggaggattgtttt

SEQ ID NO: 147715 - DNA, 19 bp, Homo sapiens
  siRNA target sequence for LRP2 (NM_004525.1,6213-6231).
ccaggaggattgttttcct

SEQ ID NO: 147716 - DNA, 19 bp, Homo sapiens
  siRNA target sequence for LRP2 (NM_004525.1,6235-6253).
cctgtgccactggatttaa

SEQ ID NO: 147717 - DNA, 19 bp, Homo sapiens
  siRNA target sequence for LRP2 (NM_004525.1,6242-6260).
cactggatttaaactcaat

SEQ ID NO: 147718 - DNA, 19 bp, Homo sapiens
  siRNA target sequence for LRP2 (NM_004525.1,6270-6288).
cggtcctgctctccatata

SEQ ID NO: 147719 - DNA, 19 bp, Homo sapiens
  siRNA target sequence for LRP2 (NM_004525.1,6271-6289).
ggtcctgctctccatataa

SEQ ID NO: 147720 - DNA, 19 bp, Homo sapiens
  siRNA target sequence for LRP2 (NM_004525.1,6275-6293).
ctgctctccatataactct

SEQ ID NO: 147721 - DNA, 19 bp, Homo sapiens
  siRNA target sequence for LRP2 (NM_004525.1,6277-6295).
gctctccatataactcttt

SEQ ID NO: 147722 - DNA, 19 bp, Homo sapiens
  siRNA target sequence for LRP2 (NM_004525.1,6292-6310).
ctttcattgttgtttcaat

SEQ ID NO: 147723 - DNA, 19 bp, Homo sapiens
  siRNA target sequence for LRP2 (NM_004525.1,6319-6337).
caatcagaggctttagctt

SEQ ID NO: 147724 - DNA, 19 bp, Homo sapiens
  siRNA target sequence for LRP2 (NM_004525.1,6329-6347).
ctttagcttggaattgtca

SEQ ID NO: 147725 - DNA, 19 bp, Homo sapiens
  siRNA target sequence for LRP2 (NM_004525.1,6335-6353).
cttggaattgtcagatcat

SEQ ID NO: 147726 - DNA, 19 bp, Homo sapiens
  siRNA target sequence for LRP2 (NM_004525.1,6452-6470).
ctcagtggcatctgataat

SEQ ID NO: 147727 - DNA, 19 bp, Homo sapiens
  siRNA target sequence for LRP2 (NM_004525.1,6473-6491).
gatccgtagaattaaacca

SEQ ID NO: 147728 - DNA, 19 bp, Homo sapiens
  siRNA target sequence for LRP2 (NM_004525.1,6495-6513).
ggatcttctctgatgaaca

SEQ ID NO: 147729 - DNA, 19 bp, Homo sapiens
  siRNA target sequence for LRP2 (NM_004525.1,6496-6514).
gatcttctctgatgaacat

SEQ ID NO: 147730 - DNA, 19 bp, Homo sapiens
  siRNA target sequence for LRP2 (NM_004525.1,6618-6636).
gaagttctgcggatcaata

SEQ ID NO: 147731 - DNA, 19 bp, Homo sapiens
  siRNA target sequence for LRP2 (NM_004525.1,6621-6639).
gttctgcggatcaatacta

SEQ ID NO: 147732 - DNA, 19 bp, Homo sapiens
  siRNA target sequence for LRP2 (NM_004525.1,6624-6642).
ctgcggatcaatactactt

SEQ ID NO: 147733 - DNA, 19 bp, Homo sapiens
  siRNA target sequence for LRP2 (NM_004525.1,6671-6689).
ggacatgcctaggcatatt

SEQ ID NO: 147734 - DNA, 19 bp, Homo sapiens
  siRNA target sequence for LRP2 (NM_004525.1,6742-6760).
caaagattgagcgttcttt

SEQ ID NO: 147735 - DNA, 19 bp, Homo sapiens
  siRNA target sequence for LRP2 (NM_004525.1,6746-6764).
gattgagcgttctttcctt

SEQ ID NO: 147736 - DNA, 19 bp, Homo sapiens
  siRNA target sequence for LRP2 (NM_004525.1,6762-6780).
cttgactgtaccaatcgaa

SEQ ID NO: 147737 - DNA, 19 bp, Homo sapiens
  siRNA target sequence for LRP2 (NM_004525.1,6821-6839).
ggcagtggaccgaagtgat

SEQ ID NO: 147738 - DNA, 19 bp, Homo sapiens
  siRNA target sequence for LRP2 (NM_004525.1,6831-6849).
cgaagtgatggctacgttt

SEQ ID NO: 147739 - DNA, 19 bp, Homo sapiens
  siRNA target sequence for LRP2 (NM_004525.1,6832-6850).
gaagtgatggctacgttta

SEQ ID NO: 147740 - DNA, 19 bp, Homo sapiens
  siRNA target sequence for LRP2 (NM_004525.1,6905-6923).
ctctgaagtgattcgttat

SEQ ID NO: 147741 - DNA, 19 bp, Homo sapiens
  siRNA target sequence for LRP2 (NM_004525.1,6974-6992).
catatgggtagataggaat

SEQ ID NO: 147742 - DNA, 19 bp, Homo sapiens
  siRNA target sequence for LRP2 (NM_004525.1,6979-6997).
gggtagataggaatttgaa

SEQ ID NO: 147743 - DNA, 19 bp, Homo sapiens
  siRNA target sequence for LRP2 (NM_004525.1,7035-7053).
gagccacccacagtgataa

SEQ ID NO: 147744 - DNA, 19 bp, Homo sapiens
  siRNA target sequence for LRP2 (NM_004525.1,7037-7055).
gccacccacagtgataaga

SEQ ID NO: 147745 - DNA, 19 bp, Homo sapiens
  siRNA target sequence for LRP2 (NM_004525.1,7039-7057).
cacccacagtgataagaga

SEQ ID NO: 147746 - DNA, 19 bp, Homo sapiens
  siRNA target sequence for LRP2 (NM_004525.1,7043-7061).
cacagtgataagagacaat

SEQ ID NO: 147747 - DNA, 19 bp, Homo sapiens
  siRNA target sequence for LRP2 (NM_004525.1,7045-7063).
cagtgataagagacaatat

SEQ ID NO: 147748 - DNA, 19 bp, Homo sapiens
  siRNA target sequence for LRP2 (NM_004525.1,7047-7065).
gtgataagagacaatatca

SEQ ID NO: 147749 - DNA, 19 bp, Homo sapiens
  siRNA target sequence for LRP2 (NM_004525.1,7244-7262).
gaattgtgccatttcaaca

SEQ ID NO: 147750 - DNA, 19 bp, Homo sapiens
  siRNA target sequence for LRP2 (NM_004525.1,7272-7290).
ctcatctttgccttgtcta

SEQ ID NO: 147751 - DNA, 19 bp, Homo sapiens
  siRNA target sequence for LRP2 (NM_004525.1,7274-7292).
catctttgccttgtctaat

SEQ ID NO: 147752 - DNA, 19 bp, Homo sapiens
  siRNA target sequence for LRP2 (NM_004525.1,7332-7350).
ccacctttccaaacaataa

SEQ ID NO: 147753 - DNA, 19 bp, Homo sapiens
  siRNA target sequence for LRP2 (NM_004525.1,7363-7381).
ctgtcatgtctctagacta

SEQ ID NO: 147754 - DNA, 19 bp, Homo sapiens
  siRNA target sequence for LRP2 (NM_004525.1,7374-7392).
ctagactatgacagtgtaa

SEQ ID NO: 147755 - DNA, 19 bp, Homo sapiens
  siRNA target sequence for LRP2 (NM_004525.1,7389-7407).
gtaagtgatagaatctact

SEQ ID NO: 147756 - DNA, 19 bp, Homo sapiens
  siRNA target sequence for LRP2 (NM_004525.1,7403-7421).
ctacttcacacaaaattta

SEQ ID NO: 147757 - DNA, 19 bp, Homo sapiens
  siRNA target sequence for LRP2 (NM_004525.1,7595-7613).
gtctaaccgcactgtgata

SEQ ID NO: 147758 - DNA, 19 bp, Homo sapiens
  siRNA target sequence for LRP2 (NM_004525.1,7630-7648).
caagagcaattgtgttaga

SEQ ID NO: 147759 - DNA, 19 bp, Homo sapiens
  siRNA target sequence for LRP2 (NM_004525.1,7673-7691).
ggctgactgggatacacat

SEQ ID NO: 147760 - DNA, 19 bp, Homo sapiens
  siRNA target sequence for LRP2 (NM_004525.1,7681-7699).
gggatacacatgccaaaat

SEQ ID NO: 147761 - DNA, 19 bp, Homo sapiens
  siRNA target sequence for LRP2 (NM_004525.1,7708-7726).
ccacattgggaggaaactt

SEQ ID NO: 147762 - DNA, 19 bp, Homo sapiens
  siRNA target sequence for LRP2 (NM_004525.1,7768-7786).
ggctgactctggactatga

SEQ ID NO: 147763 - DNA, 19 bp, Homo sapiens
  siRNA target sequence for LRP2 (NM_004525.1,7769-7787).
gctgactctggactatgaa

SEQ ID NO: 147764 - DNA, 19 bp, Homo sapiens
  siRNA target sequence for LRP2 (NM_004525.1,7849-7867).
gcgtggatcgtgaagtcat

SEQ ID NO: 147765 - DNA, 19 bp, Homo sapiens
  siRNA target sequence for LRP2 (NM_004525.1,7900-7918).
ctctctatggccagtatat

SEQ ID NO: 147766 - DNA, 19 bp, Homo sapiens
  siRNA target sequence for LRP2 (NM_004525.1,7902-7920).
ctctatggccagtatattt

SEQ ID NO: 147767 - DNA, 19 bp, Homo sapiens
  siRNA target sequence for LRP2 (NM_004525.1,7945-7963).
gaatttaccgagctaacaa

SEQ ID NO: 147768 - DNA, 19 bp, Homo sapiens
  siRNA target sequence for LRP2 (NM_004525.1,7971-7989).
gggtcaggtcagattgcaa

SEQ ID NO: 147769 - DNA, 19 bp, Homo sapiens
  siRNA target sequence for LRP2 (NM_004525.1,8020-8038).
gaatcaacactgttgtgaa

SEQ ID NO: 147770 - DNA, 19 bp, Homo sapiens
  siRNA target sequence for LRP2 (NM_004525.1,8049-8067).
caacagtgtaacaatcctt

SEQ ID NO: 147771 - DNA, 19 bp, Homo sapiens
  siRNA target sequence for LRP2 (NM_004525.1,8060-8078).
caatccttgtgaacagttt

SEQ ID NO: 147772 - DNA, 19 bp, Homo sapiens
  siRNA target sequence for LRP2 (NM_004525.1,8082-8100).
gggggctgcagccatatct

SEQ ID NO: 147773 - DNA, 19 bp, Homo sapiens
  siRNA target sequence for LRP2 (NM_004525.1,8099-8117).
ctgtgcaccaggtccaaat

SEQ ID NO: 147774 - DNA, 19 bp, Homo sapiens
  siRNA target sequence for LRP2 (NM_004525.1,8254-8272).
ggaagtgtgataatgacaa

SEQ ID NO: 147775 - DNA, 19 bp, Homo sapiens
  siRNA target sequence for LRP2 (NM_004525.1,8290-8308).
gtgatgagatggaaagtgt

SEQ ID NO: 147776 - DNA, 19 bp, Homo sapiens
  siRNA target sequence for LRP2 (NM_004525.1,8355-8373).
gggcgatgtgtccaatact

SEQ ID NO: 147777 - DNA, 19 bp, Homo sapiens
  siRNA target sequence for LRP2 (NM_004525.1,8357-8375).
gcgatgtgtccaatactct

SEQ ID NO: 147778 - DNA, 19 bp, Homo sapiens
  siRNA target sequence for LRP2 (NM_004525.1,8358-8376).
cgatgtgtccaatactctt

SEQ ID NO: 147779 - DNA, 19 bp, Homo sapiens
  siRNA target sequence for LRP2 (NM_004525.1,8359-8377).
gatgtgtccaatactctta

SEQ ID NO: 147780 - DNA, 19 bp, Homo sapiens
  siRNA target sequence for LRP2 (NM_004525.1,8374-8392).
cttaccgctgtgattacta

SEQ ID NO: 147781 - DNA, 19 bp, Homo sapiens
  siRNA target sequence for LRP2 (NM_004525.1,8378-8396).
ccgctgtgattactacaat

SEQ ID NO: 147782 - DNA, 19 bp, Homo sapiens
  siRNA target sequence for LRP2 (NM_004525.1,8480-8498).
gtgcatacctcgtgagttt

SEQ ID NO: 147783 - DNA, 19 bp, Homo sapiens
  siRNA target sequence for LRP2 (NM_004525.1,8482-8500).
gcatacctcgtgagtttat

SEQ ID NO: 147784 - DNA, 19 bp, Homo sapiens
  siRNA target sequence for LRP2 (NM_004525.1,8511-8529).
gtagacaactgccatgata

SEQ ID NO: 147785 - DNA, 19 bp, Homo sapiens
  siRNA target sequence for LRP2 (NM_004525.1,8514-8532).
gacaactgccatgataata

SEQ ID NO: 147786 - DNA, 19 bp, Homo sapiens
  siRNA target sequence for LRP2 (NM_004525.1,8575-8593).
ctggatacacaaaatgtca

SEQ ID NO: 147787 - DNA, 19 bp, Homo sapiens
  siRNA target sequence for LRP2 (NM_004525.1,8608-8626).
gtattcctcgcgtttattt

SEQ ID NO: 147788 - DNA, 19 bp, Homo sapiens
  siRNA target sequence for LRP2 (NM_004525.1,8659-8677).
gtgatgaaaaccctactta

SEQ ID NO: 147789 - DNA, 19 bp, Homo sapiens
  siRNA target sequence for LRP2 (NM_004525.1,8661-8679).
gatgaaaaccctacttatt

SEQ ID NO: 147790 - DNA, 19 bp, Homo sapiens
  siRNA target sequence for LRP2 (NM_004525.1,8664-8682).
gaaaaccctacttattgca

SEQ ID NO: 147791 - DNA, 19 bp, Homo sapiens
  siRNA target sequence for LRP2 (NM_004525.1,8717-8735).
cgcatctgggcgctgtatt

SEQ ID NO: 147792 - DNA, 19 bp, Homo sapiens
  siRNA target sequence for LRP2 (NM_004525.1,8737-8755).
ctcaacattggtattgtga

SEQ ID NO: 147793 - DNA, 19 bp, Homo sapiens
  siRNA target sequence for LRP2 (NM_004525.1,8857-8875).
gcatcccaagcgaatggat

SEQ ID NO: 147794 - DNA, 19 bp, Homo sapiens
  siRNA target sequence for LRP2 (NM_004525.1,8873-8891).
gatctgtgacggtgataat

SEQ ID NO: 147795 - DNA, 19 bp, Homo sapiens
  siRNA target sequence for LRP2 (NM_004525.1,8924-8942).
gcaccagtgtcagaatcaa

SEQ ID NO: 147796 - DNA, 19 bp, Homo sapiens
  siRNA target sequence for LRP2 (NM_004525.1,8925-8943).
caccagtgtcagaatcaaa

SEQ ID NO: 147797 - DNA, 19 bp, Homo sapiens
  siRNA target sequence for LRP2 (NM_004525.1,8956-8974).
ccgagtttctctgtgtaaa

SEQ ID NO: 147798 - DNA, 19 bp, Homo sapiens
  siRNA target sequence for LRP2 (NM_004525.1,9021-9039).
gatggcgatgtggattgta

SEQ ID NO: 147799 - DNA, 19 bp, Homo sapiens
  siRNA target sequence for LRP2 (NM_004525.1,9040-9058).
ctgacggctacgatgagaa

SEQ ID NO: 147800 - DNA, 19 bp, Homo sapiens
  siRNA target sequence for LRP2 (NM_004525.1,9045-9063).
ggctacgatgagaatcaga

SEQ ID NO: 147801 - DNA, 19 bp, Homo sapiens
  siRNA target sequence for LRP2 (NM_004525.1,9103-9121).
gtggttacggactgtgtat

SEQ ID NO: 147802 - DNA, 19 bp, Homo sapiens
  siRNA target sequence for LRP2 (NM_004525.1,9112-9130).
gactgtgtatcccaaagat

SEQ ID NO: 147803 - DNA, 19 bp, Homo sapiens
  siRNA target sequence for LRP2 (NM_004525.1,9136-9154).
ggtgtgaccggcacaatga

SEQ ID NO: 147804 - DNA, 19 bp, Homo sapiens
  siRNA target sequence for LRP2 (NM_004525.1,9338-9356).
cgagttcaagtgtgacaat

SEQ ID NO: 147805 - DNA, 19 bp, Homo sapiens
  siRNA target sequence for LRP2 (NM_004525.1,9362-9380).
ctgcatcgagatgatgaaa

SEQ ID NO: 147806 - DNA, 19 bp, Homo sapiens
  siRNA target sequence for LRP2 (NM_004525.1,9511-9529).
cctgtcgtcctggttacaa

SEQ ID NO: 147807 - DNA, 19 bp, Homo sapiens
  siRNA target sequence for LRP2 (NM_004525.1,9542-9560).
caagcggacttgtgttgat

SEQ ID NO: 147808 - DNA, 19 bp, Homo sapiens
  siRNA target sequence for LRP2 (NM_004525.1,9545-9563).
gcggacttgtgttgatatt

SEQ ID NO: 147809 - DNA, 19 bp, Homo sapiens
  siRNA target sequence for LRP2 (NM_004525.1,9547-9565).
ggacttgtgttgatattga

SEQ ID NO: 147810 - DNA, 19 bp, Homo sapiens
  siRNA target sequence for LRP2 (NM_004525.1,9671-9689).
gacctgccggcaaaacagt

SEQ ID NO: 147811 - DNA, 19 bp, Homo sapiens
  siRNA target sequence for LRP2 (NM_004525.1,9673-9691).
cctgccggcaaaacagtaa

SEQ ID NO: 147812 - DNA, 19 bp, Homo sapiens
  siRNA target sequence for LRP2 (NM_004525.1,9676-9694).
gccggcaaaacagtaacat

SEQ ID NO: 147813 - DNA, 19 bp, Homo sapiens
  siRNA target sequence for LRP2 (NM_004525.1,9692-9710).
catcgaaccctatctcatt

SEQ ID NO: 147814 - DNA, 19 bp, Homo sapiens
  siRNA target sequence for LRP2 (NM_004525.1,9695-9713).
cgaaccctatctcattttt

SEQ ID NO: 147815 - DNA, 19 bp, Homo sapiens
  siRNA target sequence for LRP2 (NM_004525.1,9699-9717).
ccctatctcatttttagca

SEQ ID NO: 147816 - DNA, 19 bp, Homo sapiens
  siRNA target sequence for LRP2 (NM_004525.1,9716-9734).
caaccgttactatttgaga

SEQ ID NO: 147817 - DNA, 19 bp, Homo sapiens
  siRNA target sequence for LRP2 (NM_004525.1,9721-9739).
gttactatttgagaaattt

SEQ ID NO: 147818 - DNA, 19 bp, Homo sapiens
  siRNA target sequence for LRP2 (NM_004525.1,9785-9803).
caatgttgtggcattagat

SEQ ID NO: 147819 - DNA, 19 bp, Homo sapiens
  siRNA target sequence for LRP2 (NM_004525.1,9821-9839).
gagattgtattggattgat

SEQ ID NO: 147820 - DNA, 19 bp, Homo sapiens
  siRNA target sequence for LRP2 (NM_004525.1,9973-9991).
gcctggatggcctctttgt

SEQ ID NO: 147821 - DNA, 19 bp, Homo sapiens
  siRNA target sequence for LRP2 (NM_004525.1,10123-10141).
ggggtcaccgcgcatacat

SEQ ID NO: 147822 - DNA, 19 bp, Homo sapiens
  siRNA target sequence for LRP2 (NM_004525.1,10124-10142).
gggtcaccgcgcatacatt

SEQ ID NO: 147823 - DNA, 19 bp, Homo sapiens
  siRNA target sequence for LRP2 (NM_004525.1,10209-10227).
ggcatcaccattgattaca

SEQ ID NO: 147824 - DNA, 19 bp, Homo sapiens
  siRNA target sequence for LRP2 (NM_004525.1,10217-10235).
cattgattacaccaatgat

SEQ ID NO: 147825 - DNA, 19 bp, Homo sapiens
  siRNA target sequence for LRP2 (NM_004525.1,10257-10275).
cacctgggttacatagagt

SEQ ID NO: 147826 - DNA, 19 bp, Homo sapiens
  siRNA target sequence for LRP2 (NM_004525.1,10326-10344).
cctcaccctttcgctatta

SEQ ID NO: 147827 - DNA, 19 bp, Homo sapiens
  siRNA target sequence for LRP2 (NM_004525.1,10331-10349).
ccctttcgctattaccatt

SEQ ID NO: 147828 - DNA, 19 bp, Homo sapiens
  siRNA target sequence for LRP2 (NM_004525.1,10332-10350).
cctttcgctattaccattt

SEQ ID NO: 147829 - DNA, 19 bp, Homo sapiens
  siRNA target sequence for LRP2 (NM_004525.1,10333-10351).
ctttcgctattaccatttt

SEQ ID NO: 147830 - DNA, 19 bp, Homo sapiens
  siRNA target sequence for LRP2 (NM_004525.1,10339-10357).
ctattaccatttttgaaga

SEQ ID NO: 147831 - DNA, 19 bp, Homo sapiens
  siRNA target sequence for LRP2 (NM_004525.1,10406-10424).
caaatatgatggatcaaat

SEQ ID NO: 147832 - DNA, 19 bp, Homo sapiens
  siRNA target sequence for LRP2 (NM_004525.1,10456-10474).
catttgacatccatgtgta

SEQ ID NO: 147833 - DNA, 19 bp, Homo sapiens
  siRNA target sequence for LRP2 (NM_004525.1,10467-10485).
catgtgtaccatccatata

SEQ ID NO: 147834 - DNA, 19 bp, Homo sapiens
  siRNA target sequence for LRP2 (NM_004525.1,10534-10552).
ctcatctctgcctcatcaa

SEQ ID NO: 147835 - DNA, 19 bp, Homo sapiens
  siRNA target sequence for LRP2 (NM_004525.1,10652-10670).
gttcctgtgcgctaacaat

SEQ ID NO: 147836 - DNA, 19 bp, Homo sapiens
  siRNA target sequence for LRP2 (NM_004525.1,10655-10673).
cctgtgcgctaacaatgaa

SEQ ID NO: 147837 - DNA, 19 bp, Homo sapiens
  siRNA target sequence for LRP2 (NM_004525.1,10656-10674).
ctgtgcgctaacaatgaaa

SEQ ID NO: 147838 - DNA, 19 bp, Homo sapiens
  siRNA target sequence for LRP2 (NM_004525.1,10799-10817).
caccagcccgcagacttta

SEQ ID NO: 147839 - DNA, 19 bp, Homo sapiens
  siRNA target sequence for LRP2 (NM_004525.1,10805-10823).
cccgcagactttatgcaat

SEQ ID NO: 147840 - DNA, 19 bp, Homo sapiens
  siRNA target sequence for LRP2 (NM_004525.1,10859-10877).
ccgtcttctttgtgagaat

SEQ ID NO: 147841 - DNA, 19 bp, Homo sapiens
  siRNA target sequence for LRP2 (NM_004525.1,10902-10920).
cagtgcgccaacaaacgtt

SEQ ID NO: 147842 - DNA, 19 bp, Homo sapiens
  siRNA target sequence for LRP2 (NM_004525.1,11139-11157).
gacaacttcacagaattca

SEQ ID NO: 147843 - DNA, 19 bp, Homo sapiens
  siRNA target sequence for LRP2 (NM_004525.1,11270-11288).
gggggatttccgctgtaaa

SEQ ID NO: 147844 - DNA, 19 bp, Homo sapiens
  siRNA target sequence for LRP2 (NM_004525.1,11272-11290).
gggatttccgctgtaaaaa

SEQ ID NO: 147845 - DNA, 19 bp, Homo sapiens
  siRNA target sequence for LRP2 (NM_004525.1,11315-11333).
gcagtgtgatgggcaaaat

SEQ ID NO: 147846 - DNA, 19 bp, Homo sapiens
  siRNA target sequence for LRP2 (NM_004525.1,11390-11408).
cgagtttcgatgtgtcaat

SEQ ID NO: 147847 - DNA, 19 bp, Homo sapiens
  siRNA target sequence for LRP2 (NM_004525.1,11491-11509).
ggacctgccatcctgaata

SEQ ID NO: 147848 - DNA, 19 bp, Homo sapiens
  siRNA target sequence for LRP2 (NM_004525.1,11492-11510).
gacctgccatcctgaatat

SEQ ID NO: 147849 - DNA, 19 bp, Homo sapiens
  siRNA target sequence for LRP2 (NM_004525.1,11516-11534).
gtgtacaagtggacattgt

SEQ ID NO: 147850 - DNA, 19 bp, Homo sapiens
  siRNA target sequence for LRP2 (NM_004525.1,11518-11536).
gtacaagtggacattgtgt

SEQ ID NO: 147851 - DNA, 19 bp, Homo sapiens
  siRNA target sequence for LRP2 (NM_004525.1,11582-11600).
gtctgatgaagctgattgt

SEQ ID NO: 147852 - DNA, 19 bp, Homo sapiens
  siRNA target sequence for LRP2 (NM_004525.1,11623-11641).
catactgccaggctactat

SEQ ID NO: 147853 - DNA, 19 bp, Homo sapiens
  siRNA target sequence for LRP2 (NM_004525.1,11631-11649).
caggctactatgttcgaat

SEQ ID NO: 147854 - DNA, 19 bp, Homo sapiens
  siRNA target sequence for LRP2 (NM_004525.1,11642-11660).
gttcgaatgcaaaaaccat

SEQ ID NO: 147855 - DNA, 19 bp, Homo sapiens
  siRNA target sequence for LRP2 (NM_004525.1,11661-11679).
gtttgtatcccgccatatt

SEQ ID NO: 147856 - DNA, 19 bp, Homo sapiens
  siRNA target sequence for LRP2 (NM_004525.1,11665-11683).
gtatcccgccatattggaa

SEQ ID NO: 147857 - DNA, 19 bp, Homo sapiens
  siRNA target sequence for LRP2 (NM_004525.1,11669-11687).
cccgccatattggaaatgt

SEQ ID NO: 147858 - DNA, 19 bp, Homo sapiens
  siRNA target sequence for LRP2 (NM_004525.1,11671-11689).
cgccatattggaaatgtga

SEQ ID NO: 147859 - DNA, 19 bp, Homo sapiens
  siRNA target sequence for LRP2 (NM_004525.1,11767-11785).
gtttccggtgtgacaacaa

SEQ ID NO: 147860 - DNA, 19 bp, Homo sapiens
  siRNA target sequence for LRP2 (NM_004525.1,11884-11902).
cttgtacagaatatgaata

SEQ ID NO: 147861 - DNA, 19 bp, Homo sapiens
  siRNA target sequence for LRP2 (NM_004525.1,11923-11941).
gcattccacatgacaatgt

SEQ ID NO: 147862 - DNA, 19 bp, Homo sapiens
  siRNA target sequence for LRP2 (NM_004525.1,11965-11983).
gtgactggtccgatgaact

SEQ ID NO: 147863 - DNA, 19 bp, Homo sapiens
  siRNA target sequence for LRP2 (NM_004525.1,11975-11993).
cgatgaactgggttgcaat

SEQ ID NO: 147864 - DNA, 19 bp, Homo sapiens
  siRNA target sequence for LRP2 (NM_004525.1,12084-12102).
gggttcgaaaccaatgttt

SEQ ID NO: 147865 - DNA, 19 bp, Homo sapiens
  siRNA target sequence for LRP2 (NM_004525.1,12085-12103).
ggttcgaaaccaatgtttt

SEQ ID NO: 147866 - DNA, 19 bp, Homo sapiens
  siRNA target sequence for LRP2 (NM_004525.1,12107-12125).
cagaacctcctgtctagat

SEQ ID NO: 147867 - DNA, 19 bp, Homo sapiens
  siRNA target sequence for LRP2 (NM_004525.1,12109-12127).
gaacctcctgtctagatat

SEQ ID NO: 147868 - DNA, 19 bp, Homo sapiens
  siRNA target sequence for LRP2 (NM_004525.1,12112-12130).
cctcctgtctagatatcaa

SEQ ID NO: 147869 - DNA, 19 bp, Homo sapiens
  siRNA target sequence for LRP2 (NM_004525.1,12113-12131).
ctcctgtctagatatcaat

SEQ ID NO: 147870 - DNA, 19 bp, Homo sapiens
  siRNA target sequence for LRP2 (NM_004525.1,12204-12222).
gatggcttcacgtctatga

SEQ ID NO: 147871 - DNA, 19 bp, Homo sapiens
  siRNA target sequence for LRP2 (NM_004525.1,12225-12243).
gaccgccctggaaaacgat

SEQ ID NO: 147872 - DNA, 19 bp, Homo sapiens
  siRNA target sequence for LRP2 (NM_004525.1,12282-12300).
gacaatgtccgaattcgaa

SEQ ID NO: 147873 - DNA, 19 bp, Homo sapiens
  siRNA target sequence for LRP2 (NM_004525.1,12284-12302).
caatgtccgaattcgaaaa

SEQ ID NO: 147874 - DNA, 19 bp, Homo sapiens
  siRNA target sequence for LRP2 (NM_004525.1,12288-12306).
gtccgaattcgaaaatata

SEQ ID NO: 147875 - DNA, 19 bp, Homo sapiens
  siRNA target sequence for LRP2 (NM_004525.1,12290-12308).
ccgaattcgaaaatataat

SEQ ID NO: 147876 - DNA, 19 bp, Homo sapiens
  siRNA target sequence for LRP2 (NM_004525.1,12292-12310).
gaattcgaaaatataatct

SEQ ID NO: 147877 - DNA, 19 bp, Homo sapiens
  siRNA target sequence for LRP2 (NM_004525.1,12322-12340).
ggttctcagagtatcttca

SEQ ID NO: 147878 - DNA, 19 bp, Homo sapiens
  siRNA target sequence for LRP2 (NM_004525.1,12323-12341).
gttctcagagtatcttcaa

SEQ ID NO: 147879 - DNA, 19 bp, Homo sapiens
  siRNA target sequence for LRP2 (NM_004525.1,12357-12375).
caagctgttgattatgatt

SEQ ID NO: 147880 - DNA, 19 bp, Homo sapiens
  siRNA target sequence for LRP2 (NM_004525.1,12394-12412).
gcctcagtgttgtgtatta

SEQ ID NO: 147881 - DNA, 19 bp, Homo sapiens
  siRNA target sequence for LRP2 (NM_004525.1,12398-12416).
cagtgttgtgtattacact

SEQ ID NO: 147882 - DNA, 19 bp, Homo sapiens
  siRNA target sequence for LRP2 (NM_004525.1,12433-12451).
ctaggtttggtgctatcaa

SEQ ID NO: 147883 - DNA, 19 bp, Homo sapiens
  siRNA target sequence for LRP2 (NM_004525.1,12457-12475).
cctacatccccaactttga

SEQ ID NO: 147884 - DNA, 19 bp, Homo sapiens
  siRNA target sequence for LRP2 (NM_004525.1,12458-12476).
ctacatccccaactttgaa

SEQ ID NO: 147885 - DNA, 19 bp, Homo sapiens
  siRNA target sequence for LRP2 (NM_004525.1,12509-12527).
cctgaaactgaaatacgta

SEQ ID NO: 147886 - DNA, 19 bp, Homo sapiens
  siRNA target sequence for LRP2 (NM_004525.1,12530-12548).
gcagccagatggaatagca

SEQ ID NO: 147887 - DNA, 19 bp, Homo sapiens
  siRNA target sequence for LRP2 (NM_004525.1,12575-12593).
ctggtcagatgtcaagaat

SEQ ID NO: 147888 - DNA, 19 bp, Homo sapiens
  siRNA target sequence for LRP2 (NM_004525.1,12577-12595).
ggtcagatgtcaagaataa

SEQ ID NO: 147889 - DNA, 19 bp, Homo sapiens
  siRNA target sequence for LRP2 (NM_004525.1,12615-12633).
cttgatggaaggtacagaa

SEQ ID NO: 147890 - DNA, 19 bp, Homo sapiens
  siRNA target sequence for LRP2 (NM_004525.1,12656-12674).
ggaccaaccagctgctatt

SEQ ID NO: 147891 - DNA, 19 bp, Homo sapiens
  siRNA target sequence for LRP2 (NM_004525.1,12684-12702).
cccaaactagggcttatgt

SEQ ID NO: 147892 - DNA, 19 bp, Homo sapiens
  siRNA target sequence for LRP2 (NM_004525.1,12793-12811).
ggccaactggcctttctat

SEQ ID NO: 147893 - DNA, 19 bp, Homo sapiens
  siRNA target sequence for LRP2 (NM_004525.1,12799-12817).
ctggcctttctatcgatta

SEQ ID NO: 147894 - DNA, 19 bp, Homo sapiens
  siRNA target sequence for LRP2 (NM_004525.1,12801-12819).
ggcctttctatcgattatt

SEQ ID NO: 147895 - DNA, 19 bp, Homo sapiens
  siRNA target sequence for LRP2 (NM_004525.1,12802-12820).
gcctttctatcgattattt

SEQ ID NO: 147896 - DNA, 19 bp, Homo sapiens
  siRNA target sequence for LRP2 (NM_004525.1,12804-12822).
ctttctatcgattatttga

SEQ ID NO: 147897 - DNA, 19 bp, Homo sapiens
  siRNA target sequence for LRP2 (NM_004525.1,12808-12826).
ctatcgattatttgaacaa

SEQ ID NO: 147898 - DNA, 19 bp, Homo sapiens
  siRNA target sequence for LRP2 (NM_004525.1,12848-12866).
cttcaaggaggacgttatt

SEQ ID NO: 147899 - DNA, 19 bp, Homo sapiens
  siRNA target sequence for LRP2 (NM_004525.1,12851-12869).
caaggaggacgttattgaa

SEQ ID NO: 147900 - DNA, 19 bp, Homo sapiens
  siRNA target sequence for LRP2 (NM_004525.1,12857-12875).
ggacgttattgaaaccata

SEQ ID NO: 147901 - DNA, 19 bp, Homo sapiens
  siRNA target sequence for LRP2 (NM_004525.1,12860-12878).
cgttattgaaaccataaaa

SEQ ID NO: 147902 - DNA, 19 bp, Homo sapiens
  siRNA target sequence for LRP2 (NM_004525.1,12887-12905).
gactgataggagagtcatt

SEQ ID NO: 147903 - DNA, 19 bp, Homo sapiens
  siRNA target sequence for LRP2 (NM_004525.1,12948-12966).
gaccagttatactggatat

SEQ ID NO: 147904 - DNA, 19 bp, Homo sapiens
  siRNA target sequence for LRP2 (NM_004525.1,12950-12968).
ccagttatactggatatct

SEQ ID NO: 147905 - DNA, 19 bp, Homo sapiens
  siRNA target sequence for LRP2 (NM_004525.1,12951-12969).
cagttatactggatatcta

SEQ ID NO: 147906 - DNA, 19 bp, Homo sapiens
  siRNA target sequence for LRP2 (NM_004525.1,13071-13089).
caactcagatacaataagt

SEQ ID NO: 147907 - DNA, 19 bp, Homo sapiens
  siRNA target sequence for LRP2 (NM_004525.1,13096-13114).
ccaacctttgcaaacagat

SEQ ID NO: 147908 - DNA, 19 bp, Homo sapiens
  siRNA target sequence for LRP2 (NM_004525.1,13166-13184).
ccaaggctccagctttata

SEQ ID NO: 147909 - DNA, 19 bp, Homo sapiens
  siRNA target sequence for LRP2 (NM_004525.1,13213-13231).
ccatcgaactgcctatcaa

SEQ ID NO: 147910 - DNA, 19 bp, Homo sapiens
  siRNA target sequence for LRP2 (NM_004525.1,13256-13274).
gcacggaggaaattgctat

SEQ ID NO: 147911 - DNA, 19 bp, Homo sapiens
  siRNA target sequence for LRP2 (NM_004525.1,13259-13277).
cggaggaaattgctatttt

SEQ ID NO: 147912 - DNA, 19 bp, Homo sapiens
  siRNA target sequence for LRP2 (NM_004525.1,13312-13330).
gcggctacaccggaaaata

SEQ ID NO: 147913 - DNA, 19 bp, Homo sapiens
  siRNA target sequence for LRP2 (NM_004525.1,13313-13331).
cggctacaccggaaaatat

SEQ ID NO: 147914 - DNA, 19 bp, Homo sapiens
  siRNA target sequence for LRP2 (NM_004525.1,13314-13332).
ggctacaccggaaaatatt

SEQ ID NO: 147915 - DNA, 19 bp, Homo sapiens
  siRNA target sequence for LRP2 (NM_004525.1,13316-13334).
ctacaccggaaaatattgt

SEQ ID NO: 147916 - DNA, 19 bp, Homo sapiens
  siRNA target sequence for LRP2 (NM_004525.1,13319-13337).
caccggaaaatattgtgaa

SEQ ID NO: 147917 - DNA, 19 bp, Homo sapiens
  siRNA target sequence for LRP2 (NM_004525.1,13377-13395).
gtagctgtgctgttgacaa

SEQ ID NO: 147918 - DNA, 19 bp, Homo sapiens
  siRNA target sequence for LRP2 (NM_004525.1,13397-13415).
cctcttgatcgtcgtaatt

SEQ ID NO: 147919 - DNA, 19 bp, Homo sapiens
  siRNA target sequence for LRP2 (NM_004525.1,13400-13418).
cttgatcgtcgtaattgga

SEQ ID NO: 147920 - DNA, 19 bp, Homo sapiens
  siRNA target sequence for LRP2 (NM_004525.1,13431-13449).
gcaggattcttccactata

SEQ ID NO: 147921 - DNA, 19 bp, Homo sapiens
  siRNA target sequence for LRP2 (NM_004525.1,13543-13561).
gatcaggggcagatcttaa

SEQ ID NO: 147922 - DNA, 19 bp, Homo sapiens
  siRNA target sequence for LRP2 (NM_004525.1,13546-13564).
caggggcagatcttaacat

SEQ ID NO: 147923 - DNA, 19 bp, Homo sapiens
  siRNA target sequence for LRP2 (NM_004525.1,13551-13569).
gcagatcttaacatggata

SEQ ID NO: 147924 - DNA, 19 bp, Homo sapiens
  siRNA target sequence for LRP2 (NM_004525.1,13607-13625).
caggtcaatggcaatgagt

SEQ ID NO: 147925 - DNA, 19 bp, Homo sapiens
  siRNA target sequence for LRP2 (NM_004525.1,13616-13634).
ggcaatgagtgaagacttt

SEQ ID NO: 147926 - DNA, 19 bp, Homo sapiens
  siRNA target sequence for LRP2 (NM_004525.1,13653-13671).
cagcccataatatttgaaa

SEQ ID NO: 147927 - DNA, 19 bp, Homo sapiens
  siRNA target sequence for LRP2 (NM_004525.1,13716-13734).
ccaatccaggtgactgtat

SEQ ID NO: 147928 - DNA, 19 bp, Homo sapiens
  siRNA target sequence for LRP2 (NM_004525.1,13745-13763).
ggataataagaattatgga

SEQ ID NO: 147929 - DNA, 19 bp, Homo sapiens
  siRNA target sequence for LRP2 (NM_004525.1,13769-13787).
cataaacccttctgagata

SEQ ID NO: 147930 - DNA, 19 bp, Homo sapiens
  siRNA target sequence for LRP2 (NM_004525.1,13843-13861).
ggaatctcttcaaacgaaa

SEQ ID NO: 147931 - DNA, 19 bp, Homo sapiens
  siRNA target sequence for LRP2 (NM_004525.1,13844-13862).
gaatctcttcaaacgaaaa

SEQ ID NO: 147932 - DNA, 19 bp, Homo sapiens
  siRNA target sequence for LRP2 (NM_004525.1,13848-13866).
ctcttcaaacgaaaatcta

SEQ ID NO: 147933 - DNA, 19 bp, Homo sapiens
  siRNA target sequence for LRP2 (NM_004525.1,13913-13931).
cgagcaaaaggaaagtgtt

SEQ ID NO: 147934 - DNA, 19 bp, Homo sapiens
  siRNA target sequence for LRP2 (NM_004525.1,13992-14010).
gacccaactccaacctatt

SEQ ID NO: 147935 - DNA, 19 bp, Homo sapiens
  siRNA target sequence for LRP2 (NM_004525.1,14034-14052).
gacaccgcaaatcttgtta

SEQ ID NO: 147936 - DNA, 19 bp, Homo sapiens
  siRNA target sequence for LRP2 (NM_004525.1,14036-14054).
caccgcaaatcttgttaaa

SEQ ID NO: 147937 - DNA, 19 bp, Homo sapiens
  siRNA target sequence for LRP8 (NM_004631.2,471-489).
gacgactgccccaagaaga

SEQ ID NO: 147938 - DNA, 19 bp, Homo sapiens
  siRNA target sequence for LRP8 (NM_004631.2,1080-1098).
gaccgcgactgcaaagaca

SEQ ID NO: 147939 - DNA, 19 bp, Homo sapiens
  siRNA target sequence for LRP8 (NM_004631.2,1162-1180).
ggacatgtgtccttgcaat

SEQ ID NO: 147940 - DNA, 19 bp, Homo sapiens
  siRNA target sequence for LRP8 (NM_004631.2,1250-1268).
cgagtgtctgcacaacaat

SEQ ID NO: 147941 - DNA, 19 bp, Homo sapiens
  siRNA target sequence for LRP8 (NM_004631.2,1296-1314).
ctcaagattggctttgaat

SEQ ID NO: 147942 - DNA, 19 bp, Homo sapiens
  siRNA target sequence for LRP8 (NM_004631.2,1352-1370).
gacctgtggcgacattgat

SEQ ID NO: 147943 - DNA, 19 bp, Homo sapiens
  siRNA target sequence for LRP8 (NM_004631.2,1409-1427).
caattacaagggctatttt

SEQ ID NO: 147944 - DNA, 19 bp, Homo sapiens
  siRNA target sequence for LRP8 (NM_004631.2,1544-1562).
cctggtgaagcggaactat

SEQ ID NO: 147945 - DNA, 19 bp, Homo sapiens
  siRNA target sequence for LRP8 (NM_004631.2,1545-1563).
ctggtgaagcggaactatt

SEQ ID NO: 147946 - DNA, 19 bp, Homo sapiens
  siRNA target sequence for LRP8 (NM_004631.2,1547-1565).
ggtgaagcggaactattca

SEQ ID NO: 147947 - DNA, 19 bp, Homo sapiens
  siRNA target sequence for LRP8 (NM_004631.2,1586-1604).
gaatgtcgtggcactagat

SEQ ID NO: 147948 - DNA, 19 bp, Homo sapiens
  siRNA target sequence for LRP8 (NM_004631.2,1641-1659).
ctctcctaccgtaagatct

SEQ ID NO: 147949 - DNA, 19 bp, Homo sapiens
  siRNA target sequence for LRP8 (NM_004631.2,1643-1661).
ctcctaccgtaagatctat

SEQ ID NO: 147950 - DNA, 19 bp, Homo sapiens
  siRNA target sequence for LRP8 (NM_004631.2,1753-1771).
gggtccacaagcacatcta

SEQ ID NO: 147951 - DNA, 19 bp, Homo sapiens
  siRNA target sequence for LRP8 (NM_004631.2,1774-1792).
ggactgactcgggcaataa

SEQ ID NO: 147952 - DNA, 19 bp, Homo sapiens
  siRNA target sequence for LRP8 (NM_004631.2,1881-1899).
cccctgcgagggttcatgt

SEQ ID NO: 147953 - DNA, 19 bp, Homo sapiens
  siRNA target sequence for LRP8 (NM_004631.2,1882-1900).
ccctgcgagggttcatgta

SEQ ID NO: 147954 - DNA, 19 bp, Homo sapiens
  siRNA target sequence for LRP8 (NM_004631.2,1883-1901).
cctgcgagggttcatgtat

SEQ ID NO: 147955 - DNA, 19 bp, Homo sapiens
  siRNA target sequence for LRP8 (NM_004631.2,1884-1902).
ctgcgagggttcatgtatt

SEQ ID NO: 147956 - DNA, 19 bp, Homo sapiens
  siRNA target sequence for LRP8 (NM_004631.2,1887-1905).
cgagggttcatgtattggt

SEQ ID NO: 147957 - DNA, 19 bp, Homo sapiens
  siRNA target sequence for LRP8 (NM_004631.2,2312-2330).
gagtgtccagcctaatgga

SEQ ID NO: 147958 - DNA, 19 bp, Homo sapiens
  siRNA target sequence for LRP8 (NM_004631.2,2322-2340).
cctaatggaggctgtgaat

SEQ ID NO: 147959 - DNA, 19 bp, Homo sapiens
  siRNA target sequence for LRP8 (NM_004631.2,2392-2410).
gtgcctgtcctgacacaat

SEQ ID NO: 147960 - DNA, 19 bp, Homo sapiens
  siRNA target sequence for LRP8 (NM_004631.2,2413-2431).
ggctgggtccagacatgaa

SEQ ID NO: 147961 - DNA, 19 bp, Homo sapiens
  siRNA target sequence for LRP8 (NM_004631.2,2438-2456).
ctaccgagcacctcaatct

SEQ ID NO: 147962 - DNA, 19 bp, Homo sapiens
  siRNA target sequence for LRP8 (NM_004631.2,2658-2676).
cactcccagcactatgcaa

SEQ ID NO: 147963 - DNA, 19 bp, Homo sapiens
  siRNA target sequence for LRP8 (NM_004631.2,2801-2819).
caccaaaagcatgaatttt

SEQ ID NO: 147964 - DNA, 19 bp, Homo sapiens
  siRNA target sequence for LRP8 (NM_004631.2,2992-3010).
ccctcaaggagctttttgt

SEQ ID NO: 147965 - DNA, 19 bp, Homo sapiens
  siRNA target sequence for LRP8 (NM_004631.2,3066-3084).
gagctgcctgtcgtcaaat

SEQ ID NO: 147966 - DNA, 19 bp, Homo sapiens
  siRNA target sequence for LRP8 (NM_004631.2,3069-3087).
ctgcctgtcgtcaaatcca

SEQ ID NO: 147967 - DNA, 19 bp, Homo sapiens
  siRNA target sequence for LRP8 (NM_017522.2,2047-2065).
ggtgctaccgagatgcaaa

SEQ ID NO: 147968 - DNA, 19 bp, Homo sapiens
  siRNA target sequence for LRP8 (NM_017522.2,2048-2066).
gtgctaccgagatgcaaat

SEQ ID NO: 147969 - DNA, 19 bp, Homo sapiens
  siRNA target sequence for LRP8 (NM_017522.2,2051-2069).
ctaccgagatgcaaatgaa

SEQ ID NO: 147970 - DNA, 19 bp, Homo sapiens
  siRNA target sequence for LRP8 (NM_017522.2,2295-2313).
cctgcacgagtggcattaa

SEQ ID NO: 147971 - DNA, 19 bp, Homo sapiens
  siRNA target sequence for LTBP3 (NM_021070.2,339-357).
ccctctcccctgcatgaat

SEQ ID NO: 147972 - DNA, 19 bp, Homo sapiens
  siRNA target sequence for LTBP3 (NM_021070.2,721-739).
caggtgcaccgcattgaga

SEQ ID NO: 147973 - DNA, 19 bp, Homo sapiens
  siRNA target sequence for LTBP3 (NM_021070.2,1417-1435).
cagggcgagagtgactttt

SEQ ID NO: 147974 - DNA, 19 bp, Homo sapiens
  siRNA target sequence for LTBP3 (NM_021070.2,1682-1700).
cccgcagcgccgtagagat

SEQ ID NO: 147975 - DNA, 19 bp, Homo sapiens
  siRNA target sequence for LTBP3 (NM_021070.2,1733-1751).
gccgactgaaccagaacat

SEQ ID NO: 147976 - DNA, 19 bp, Homo sapiens
  siRNA target sequence for LTBP3 (NM_021070.2,2402-2420).
gcaacacgccaggatcttt

SEQ ID NO: 147977 - DNA, 19 bp, Homo sapiens
  siRNA target sequence for LTBP3 (NM_021070.2,2465-2483).
gccactgcgaggacattga

SEQ ID NO: 147978 - DNA, 19 bp, Homo sapiens
  siRNA target sequence for LTBP3 (NM_021070.2,2466-2484).
ccactgcgaggacattgat

SEQ ID NO: 147979 - DNA, 19 bp, Homo sapiens
  siRNA target sequence for LTBP3 (NM_021070.2,2851-2869).
ggcgaccactgcgaaatct

SEQ ID NO: 147980 - DNA, 19 bp, Homo sapiens
  siRNA target sequence for LTBP3 (NM_021070.2,2852-2870).
gcgaccactgcgaaatcta

SEQ ID NO: 147981 - DNA, 19 bp, Homo sapiens
  siRNA target sequence for MAN1B1 (NM_007230.1,121-139).
cgcctcatcgggacttcat

SEQ ID NO: 147982 - DNA, 19 bp, Homo sapiens
  siRNA target sequence for MAN1B1 (NM_007230.1,123-141).
cctcatcgggacttcatct

SEQ ID NO: 147983 - DNA, 19 bp, Homo sapiens
  siRNA target sequence for MAN1B1 (NM_007230.1,226-244).
cgagattgcagcggaatat

SEQ ID NO: 147984 - DNA, 19 bp, Homo sapiens
  siRNA target sequence for MAN1B1 (NM_007230.1,229-247).
gattgcagcggaatatgat

SEQ ID NO: 147985 - DNA, 19 bp, Homo sapiens
  siRNA target sequence for MAN1B1 (NM_007230.1,277-295).
gtggactcctcttctacat

SEQ ID NO: 147986 - DNA, 19 bp, Homo sapiens
  siRNA target sequence for MAN1B1 (NM_007230.1,419-437).
caccgaccctgagaactta

SEQ ID NO: 147987 - DNA, 19 bp, Homo sapiens
  siRNA target sequence for MAN1B1 (NM_007230.1,429-447).
gagaacttacctgagattt

SEQ ID NO: 147988 - DNA, 19 bp, Homo sapiens
  siRNA target sequence for MAN1B1 (NM_007230.1,736-754).
gccagaagggcgtgattga

SEQ ID NO: 147989 - DNA, 19 bp, Homo sapiens
  siRNA target sequence for MAN1B1 (NM_007230.1,777-795).
ggataccgcaagtttgcat

SEQ ID NO: 147990 - DNA, 19 bp, Homo sapiens
  siRNA target sequence for MAN1B1 (NM_007230.1,926-944).
gtgggtgtcgaagaagtta

SEQ ID NO: 147991 - DNA, 19 bp, Homo sapiens
  siRNA target sequence for MAN1B1 (NM_007230.1,928-946).
gggtgtcgaagaagttaca

SEQ ID NO: 147992 - DNA, 19 bp, Homo sapiens
  siRNA target sequence for MAN1B1 (NM_007230.1,930-948).
gtgtcgaagaagttacact

SEQ ID NO: 147993 - DNA, 19 bp, Homo sapiens
  siRNA target sequence for MAN1B1 (NM_007230.1,1074-1092).
ctaatgcctgccttcagaa

SEQ ID NO: 147994 - DNA, 19 bp, Homo sapiens
  siRNA target sequence for MAN1B1 (NM_007230.1,1218-1236).
cgtctcacaggggataaga

SEQ ID NO: 147995 - DNA, 19 bp, Homo sapiens
  siRNA target sequence for MAN1B1 (NM_007230.1,1219-1237).
gtctcacaggggataagaa

SEQ ID NO: 147996 - DNA, 19 bp, Homo sapiens
  siRNA target sequence for MAN1B1 (NM_007230.1,1225-1243).
caggggataagaagtttca

SEQ ID NO: 147997 - DNA, 19 bp, Homo sapiens
  siRNA target sequence for MAN1B1 (NM_007230.1,1372-1390).
gggccgacagctactatga

SEQ ID NO: 147998 - DNA, 19 bp, Homo sapiens
  siRNA target sequence for MAN1B1 (NM_007230.1,1822-1840).
caggggaccgcaaatacca

SEQ ID NO: 147999 - DNA, 19 bp, Homo sapiens
  siRNA target sequence for MAN1B1 (NM_007230.1,1889-1907).
cccctcgggtggctattct

SEQ ID NO: 148000 - DNA, 19 bp, Homo sapiens
  siRNA target sequence for MAN1B1 (NM_007230.1,1890-1908).
ccctcgggtggctattctt

SEQ ID NO: 148001 - DNA, 19 bp, Homo sapiens
  siRNA target sequence for MAN1B1 (NM_007230.1,1899-1917).
ggctattcttccatcaaca

SEQ ID NO: 148002 - DNA, 19 bp, Homo sapiens
  siRNA target sequence for MAN1B1 (NM_007230.1,1939-1957).
ccgagcctagggacaagat

SEQ ID NO: 148003 - DNA, 19 bp, Homo sapiens
  siRNA target sequence for MAN1B1 (NM_007230.1,1973-1991).
gggggagacgctcaagtat

SEQ ID NO: 148004 - DNA, 19 bp, Homo sapiens
  siRNA target sequence for MAN1B1 (NM_007230.1,1981-1999).
cgctcaagtatctgttctt

SEQ ID NO: 148005 - DNA, 19 bp, Homo sapiens
  siRNA target sequence for MAN1B1 (NM_016219.1,145-163).
ccaccactgtagtcatgta

SEQ ID NO: 148006 - DNA, 19 bp, Homo sapiens
  siRNA target sequence for MAN1C1 (NM_020379.1,745-763).
gtccctttccgctttgact

SEQ ID NO: 148007 - DNA, 19 bp, Homo sapiens
  siRNA target sequence for MAN1C1 (NM_020379.1,893-911).
gctataagcgttatgcaat

SEQ ID NO: 148008 - DNA, 19 bp, Homo sapiens
  siRNA target sequence for MAN1C1 (NM_020379.1,921-939).
cgaactccgtccactaaca

SEQ ID NO: 148009 - DNA, 19 bp, Homo sapiens
  siRNA target sequence for MAN1C1 (NM_020379.1,922-940).
gaactccgtccactaacaa

SEQ ID NO: 148010 - DNA, 19 bp, Homo sapiens
  siRNA target sequence for MAN1C1 (NM_020379.1,927-945).
ccgtccactaacaaaagat

SEQ ID NO: 148011 - DNA, 19 bp, Homo sapiens
  siRNA target sequence for MAN1C1 (NM_020379.1,946-964).
ggctacgagggtaacatgt

SEQ ID NO: 148012 - DNA, 19 bp, Homo sapiens
  siRNA target sequence for MAN1C1 (NM_020379.1,947-965).
gctacgagggtaacatgtt

SEQ ID NO: 148013 - DNA, 19 bp, Homo sapiens
  siRNA target sequence for MAN1C1 (NM_020379.1,1086-1104).
cggagaagcatccttgttt

SEQ ID NO: 148014 - DNA, 19 bp, Homo sapiens
  siRNA target sequence for MAN1C1 (NM_020379.1,1313-1331).
gatccctgcacttggaatt

SEQ ID NO: 148015 - DNA, 19 bp, Homo sapiens
  siRNA target sequence for MAN1C1 (NM_020379.1,1396-1414).
gtcctcaggaagatcgaaa

SEQ ID NO: 148016 - DNA, 19 bp, Homo sapiens
  siRNA target sequence for MAN1C1 (NM_020379.1,1489-1507).
ggactcggggacagttttt

SEQ ID NO: 148017 - DNA, 19 bp, Homo sapiens
  siRNA target sequence for MAN1C1 (NM_020379.1,1490-1508).
gactcggggacagttttta

SEQ ID NO: 148018 - DNA, 19 bp, Homo sapiens
  siRNA target sequence for MAN1C1 (NM_020379.1,1510-1528).
gaatatttgatcaaatcct

SEQ ID NO: 148019 - DNA, 19 bp, Homo sapiens
  siRNA target sequence for MAN1C1 (NM_020379.1,1800-1818).
ccgctcagacaccaaactt

SEQ ID NO: 148020 - DNA, 19 bp, Homo sapiens
  siRNA target sequence for MAN1C1 (NM_020379.1,1980-1998).
ggccttggagaaatactgt

SEQ ID NO: 148021 - DNA, 19 bp, Homo sapiens
  siRNA target sequence for MAN1C1 (NM_020379.1,2086-2104).
gagacactaaagtatctct

SEQ ID NO: 148022 - DNA, 19 bp, Homo sapiens
  siRNA target sequence for MASP1 (NM_001879.3,55-73).
ggtggctgcttctctatta

SEQ ID NO: 148023 - DNA, 19 bp, Homo sapiens
  siRNA target sequence for MASP1 (NM_001879.3,56-74).
gtggctgcttctctattat

SEQ ID NO: 148024 - DNA, 19 bp, Homo sapiens
  siRNA target sequence for MASP1 (NM_001879.3,59-77).
gctgcttctctattatgct

SEQ ID NO: 148025 - DNA, 19 bp, Homo sapiens
  siRNA target sequence for MASP1 (NM_001879.3,108-126).
cacaccgtggagctaaaca

SEQ ID NO: 148026 - DNA, 19 bp, Homo sapiens
  siRNA target sequence for MASP1 (NM_001879.3,110-128).
caccgtggagctaaacaat

SEQ ID NO: 148027 - DNA, 19 bp, Homo sapiens
  siRNA target sequence for MASP1 (NM_001879.3,112-130).
ccgtggagctaaacaatat

SEQ ID NO: 148028 - DNA, 19 bp, Homo sapiens
  siRNA target sequence for MASP1 (NM_001879.3,114-132).
gtggagctaaacaatatgt

SEQ ID NO: 148029 - DNA, 19 bp, Homo sapiens
  siRNA target sequence for MASP1 (NM_001879.3,140-158).
gatccagtcgcctggttat

SEQ ID NO: 148030 - DNA, 19 bp, Homo sapiens
  siRNA target sequence for MASP1 (NM_001879.3,143-161).
ccagtcgcctggttatcca

SEQ ID NO: 148031 - DNA, 19 bp, Homo sapiens
  siRNA target sequence for MASP1 (NM_001879.3,181-199).
cagaggtgacttggaatat

SEQ ID NO: 148032 - DNA, 19 bp, Homo sapiens
  siRNA target sequence for MASP1 (NM_001879.3,185-203).
ggtgacttggaatatcact

SEQ ID NO: 148033 - DNA, 19 bp, Homo sapiens
  siRNA target sequence for MASP1 (NM_001879.3,219-237).
cggatcaagctttacttca

SEQ ID NO: 148034 - DNA, 19 bp, Homo sapiens
  siRNA target sequence for MASP1 (NM_001879.3,259-277).
cctacctttgtgaatatga

SEQ ID NO: 148035 - DNA, 19 bp, Homo sapiens
  siRNA target sequence for MASP1 (NM_001879.3,419-437).
caatgaggagcgtttcaca

SEQ ID NO: 148036 - DNA, 19 bp, Homo sapiens
  siRNA target sequence for MASP1 (NM_001879.3,428-446).
gcgtttcacaggctttgat

SEQ ID NO: 148037 - DNA, 19 bp, Homo sapiens
  siRNA target sequence for MASP1 (NM_001879.3,515-533).
ctactgccacaactacatt

SEQ ID NO: 148038 - DNA, 19 bp, Homo sapiens
  siRNA target sequence for MASP1 (NM_001879.3,785-803).
ctacatcaagatcaaagtt

SEQ ID NO: 148039 - DNA, 19 bp, Homo sapiens
  siRNA target sequence for MASP1 (NM_001879.3,797-815).
caaagttggtccaaaagtt

SEQ ID NO: 148040 - DNA, 19 bp, Homo sapiens
  siRNA target sequence for MASP1 (NM_001879.3,873-891).
gtcctgatcctgttccata

SEQ ID NO: 148041 - DNA, 19 bp, Homo sapiens
  siRNA target sequence for MASP1 (NM_001879.3,1036-1054).
gtgacacaggctacaaagt

SEQ ID NO: 148042 - DNA, 19 bp, Homo sapiens
  siRNA target sequence for MASP1 (NM_001879.3,1107-1125).
gggacgtggagtaacaaga

SEQ ID NO: 148043 - DNA, 19 bp, Homo sapiens
  siRNA target sequence for MASP1 (NM_001879.3,1108-1126).
ggacgtggagtaacaagat

SEQ ID NO: 148044 - DNA, 19 bp, Homo sapiens
  siRNA target sequence for MASP1 (NM_001879.3,1109-1127).
gacgtggagtaacaagatt

SEQ ID NO: 148045 - DNA, 19 bp, Homo sapiens
  siRNA target sequence for MASP1 (NM_001879.3,1121-1139).
caagattcccacctgtaaa

SEQ ID NO: 148046 - DNA, 19 bp, Homo sapiens
  siRNA target sequence for MASP1 (NM_001879.3,1179-1197).
ctgatcaccttctctacaa

SEQ ID NO: 148047 - DNA, 19 bp, Homo sapiens
  siRNA target sequence for MASP1 (NM_001879.3,1265-1283).
caacaataacacaggtata

SEQ ID NO: 148048 - DNA, 19 bp, Homo sapiens
  siRNA target sequence for MASP1 (NM_001879.3,1383-1401).
ctgatggccaggatcttca

SEQ ID NO: 148049 - DNA, 19 bp, Homo sapiens
  siRNA target sequence for MASP1 (NM_001879.3,1385-1403).
gatggccaggatcttcaat

SEQ ID NO: 148050 - DNA, 19 bp, Homo sapiens
  siRNA target sequence for MASP1 (NM_001879.3,1552-1570).
cgaccctacgtgattcaga

SEQ ID NO: 148051 - DNA, 19 bp, Homo sapiens
  siRNA target sequence for MASP1 (NM_001879.3,1644-1662).
catctcggcgtcaaacaca

SEQ ID NO: 148052 - DNA, 19 bp, Homo sapiens
  siRNA target sequence for MASP1 (NM_001879.3,1666-1684).
ctctccacccccagtatga

SEQ ID NO: 148053 - DNA, 19 bp, Homo sapiens
  siRNA target sequence for MASP1 (NM_001879.3,1687-1705).
ccaacacattcgagaatga

SEQ ID NO: 148054 - DNA, 19 bp, Homo sapiens
  siRNA target sequence for MASP1 (NM_001879.3,1859-1877).
gattgaaatcccgattgtt

SEQ ID NO: 148055 - DNA, 19 bp, Homo sapiens
  siRNA target sequence for MASP1 (NM_001879.3,1923-1941).
gtgaccagggacatgatct

SEQ ID NO: 148056 - DNA, 19 bp, Homo sapiens
  siRNA target sequence for MASP1 (NM_001879.3,1995-2013).
cccatggtgaccctgaata

SEQ ID NO: 148057 - DNA, 19 bp, Homo sapiens
  siRNA target sequence for MASP1 (NM_001879.3,1997-2015).
catggtgaccctgaataga

SEQ ID NO: 148058 - DNA, 19 bp, Homo sapiens
  siRNA target sequence for MASP1 (NM_001879.3,2000-2018).
ggtgaccctgaatagagaa

SEQ ID NO: 148059 - DNA, 19 bp, Homo sapiens
  siRNA target sequence for MASP1 (NM_001879.3,2076-2094).
gaccgctacggagtatact

SEQ ID NO: 148060 - DNA, 19 bp, Homo sapiens
  siRNA target sequence for MASP1 (NM_001879.3,2078-2096).
ccgctacggagtatactct

SEQ ID NO: 148061 - DNA, 19 bp, Homo sapiens
  siRNA target sequence for MASP1 (NM_001879.3,2079-2097).
cgctacggagtatactctt

SEQ ID NO: 148062 - DNA, 19 bp, Homo sapiens
  siRNA target sequence for MASP1 (NM_001879.3,2080-2098).
gctacggagtatactctta

SEQ ID NO: 148063 - DNA, 19 bp, Homo sapiens
  siRNA target sequence for MASP1 (NM_001879.3,2095-2113).
cttacatccaccacaacaa

SEQ ID NO: 148064 - DNA, 19 bp, Homo sapiens
  siRNA target sequence for MASP1 (NM_139125.1,1616-1634).
gcatgatgtgcgagacaaa

SEQ ID NO: 148065 - DNA, 19 bp, Homo sapiens
  siRNA target sequence for MASP1 (NM_139125.1,1617-1635).
catgatgtgcgagacaaat

SEQ ID NO: 148066 - DNA, 19 bp, Homo sapiens
  siRNA target sequence for MASP1 (NM_139125.1,1677-1695).
ccagacttcaacatccaaa

SEQ ID NO: 148067 - DNA, 19 bp, Homo sapiens
  siRNA target sequence for MASP1 (NM_139125.1,1680-1698).
gacttcaacatccaaaact

SEQ ID NO: 148068 - DNA, 19 bp, Homo sapiens
  siRNA target sequence for MASP1 (NM_139125.1,1697-1715).
ctacaaccacgatatagct

SEQ ID NO: 148069 - DNA, 19 bp, Homo sapiens
  siRNA target sequence for MASP1 (NM_139125.1,1741-1759).
ccctgggaccccacgttat

SEQ ID NO: 148070 - DNA, 19 bp, Homo sapiens
  siRNA target sequence for MASP1 (NM_139125.1,1898-1916).
cctgcagtatgtcaagtta

SEQ ID NO: 148071 - DNA, 19 bp, Homo sapiens
  siRNA target sequence for MASP1 (NM_139125.1,1975-1993).
gcgtcacggagaacatgtt

SEQ ID NO: 148072 - DNA, 19 bp, Homo sapiens
  siRNA target sequence for MASP1 (NM_139125.1,2041-2059).
gcggtggggcctttgtcat

SEQ ID NO: 148073 - DNA, 19 bp, Homo sapiens
  siRNA target sequence for MASP1 (NM_139125.1,2048-2066).
ggcctttgtcatctttgat

SEQ ID NO: 148074 - DNA, 19 bp, Homo sapiens
  siRNA target sequence for MASP1 (NM_139125.1,2139-2157).
gtctatggagtctacacaa

SEQ ID NO: 148075 - DNA, 19 bp, Homo sapiens
  siRNA target sequence for MASP1 (NM_139125.1,2155-2173).
caaaggtctccaattacgt

SEQ ID NO: 148076 - DNA, 19 bp, Homo sapiens
  siRNA target sequence for MASP1 (NM_139125.1,2192-2210).
gatgggcttaccacaaagt

SEQ ID NO: 148077 - DNA, 19 bp, Homo sapiens
  siRNA target sequence for MASP1 (NM_139125.1,2195-2213).
gggcttaccacaaagtgtt

SEQ ID NO: 148078 - DNA, 19 bp, Homo sapiens
  siRNA target sequence for MASP2 (NM_006610.2,322-340).
cctggcaaggacactttct

SEQ ID NO: 148079 - DNA, 19 bp, Homo sapiens
  siRNA target sequence for MASP2 (NM_006610.2,323-341).
ctggcaaggacactttcta

SEQ ID NO: 148080 - DNA, 19 bp, Homo sapiens
  siRNA target sequence for MASP2 (NM_006610.2,405-423).
ggggttcgaggccttctat

SEQ ID NO: 148081 - DNA, 19 bp, Homo sapiens
  siRNA target sequence for MASP2 (NM_006610.2,496-514).
cacctgggcggtttctact

SEQ ID NO: 148082 - DNA, 19 bp, Homo sapiens
  siRNA target sequence for MASP2 (NM_006610.2,628-646).
cggccgtatcccaaactct

SEQ ID NO: 148083 - DNA, 19 bp, Homo sapiens
  siRNA target sequence for MASP2 (NM_006610.2,743-761).
gtccctacgactttctcaa

SEQ ID NO: 148084 - DNA, 19 bp, Homo sapiens
  siRNA target sequence for MASP2 (NM_006610.2,849-867).
cacctttgtcacagatgaa

SEQ ID NO: 148085 - DNA, 19 bp, Homo sapiens
  siRNA target sequence for MASP2 (NM_006610.2,852-870).
ctttgtcacagatgaatca

SEQ ID NO: 148086 - DNA, 19 bp, Homo sapiens
  siRNA target sequence for MASP2 (NM_006610.2,956-974).
cacctgtgcaagccaaata

SEQ ID NO: 148087 - DNA, 19 bp, Homo sapiens
  siRNA target sequence for MASP2 (NM_006610.2,1030-1048).
ggtcacttgcccctgaaat

SEQ ID NO: 148088 - DNA, 19 bp, Homo sapiens
  siRNA target sequence for MASP2 (NM_006610.2,1035-1053).
cttgcccctgaaatccttt

SEQ ID NO: 148089 - DNA, 19 bp, Homo sapiens
  siRNA target sequence for MASP2 (NM_006610.2,1038-1056).
gcccctgaaatcctttact

SEQ ID NO: 148090 - DNA, 19 bp, Homo sapiens
  siRNA target sequence for MASP2 (NM_006610.2,1142-1160).
gtggccgagtggagtacat

SEQ ID NO: 148091 - DNA, 19 bp, Homo sapiens
  siRNA target sequence for MASP2 (NM_006610.2,1213-1231).
gagaccttctacacaatga

SEQ ID NO: 148092 - DNA, 19 bp, Homo sapiens
  siRNA target sequence for MASP2 (NM_006610.2,1215-1233).
gaccttctacacaatgaaa

SEQ ID NO: 148093 - DNA, 19 bp, Homo sapiens
  siRNA target sequence for MASP2 (NM_006610.2,1221-1239).
ctacacaatgaaagtgaat

SEQ ID NO: 148094 - DNA, 19 bp, Homo sapiens
  siRNA target sequence for MASP2 (NM_006610.2,1277-1295).
cgagctccaaaggagaaaa

SEQ ID NO: 148095 - DNA, 19 bp, Homo sapiens
  siRNA target sequence for MASP2 (NM_006610.2,1340-1358).
caacaggagggcgtatata

SEQ ID NO: 148096 - DNA, 19 bp, Homo sapiens
  siRNA target sequence for MASP2 (NM_006610.2,1390-1408).
ccttggcaagtcctgatat

SEQ ID NO: 148097 - DNA, 19 bp, Homo sapiens
  siRNA target sequence for MASP2 (NM_006610.2,1395-1413).
gcaagtcctgatattaggt

SEQ ID NO: 148098 - DNA, 19 bp, Homo sapiens
  siRNA target sequence for MASP2 (NM_006610.2,1463-1481).
ctgctcatgccgtctatga

SEQ ID NO: 148099 - DNA, 19 bp, Homo sapiens
  siRNA target sequence for MASP2 (NM_006610.2,1472-1490).
ccgtctatgagcaaaaaca

SEQ ID NO: 148100 - DNA, 19 bp, Homo sapiens
  siRNA target sequence for MASP2 (NM_006610.2,1499-1517).
ccgccctggacattcgaat

SEQ ID NO: 148101 - DNA, 19 bp, Homo sapiens
  siRNA target sequence for MASP2 (NM_006610.2,1518-1536).
gggcaccctgaaaagacta

SEQ ID NO: 148102 - DNA, 19 bp, Homo sapiens
  siRNA target sequence for MASP2 (NM_006610.2,1519-1537).
ggcaccctgaaaagactat

SEQ ID NO: 148103 - DNA, 19 bp, Homo sapiens
  siRNA target sequence for MASP2 (NM_006610.2,1600-1618).
gctggctttgacaatgaca

SEQ ID NO: 148104 - DNA, 19 bp, Homo sapiens
  siRNA target sequence for MASP2 (NM_006610.2,1611-1629).
caatgacatagcactgatt

SEQ ID NO: 148105 - DNA, 19 bp, Homo sapiens
  siRNA target sequence for MASP2 (NM_006610.2,1615-1633).
gacatagcactgattaaat

SEQ ID NO: 148106 - DNA, 19 bp, Homo sapiens
  siRNA target sequence for MASP2 (NM_006610.2,1659-1677).
caacatcacgcctatttgt

SEQ ID NO: 148107 - DNA, 19 bp, Homo sapiens
  siRNA target sequence for MASP2 (NM_006610.2,1729-1747).
gcatctggatggggattaa

SEQ ID NO: 148108 - DNA, 19 bp, Homo sapiens
  siRNA target sequence for MASP2 (NM_006610.2,1755-1773).
gggttttcttgctagaaat

SEQ ID NO: 148109 - DNA, 19 bp, Homo sapiens
  siRNA target sequence for MASP2 (NM_006610.2,1792-1810).
ccgattgttgaccatcaaa

SEQ ID NO: 148110 - DNA, 19 bp, Homo sapiens
  siRNA target sequence for MASP2 (NM_006610.2,1793-1811).
cgattgttgaccatcaaaa

SEQ ID NO: 148111 - DNA, 19 bp, Homo sapiens
  siRNA target sequence for MASP2 (NM_006610.2,1798-1816).
gttgaccatcaaaaatgta

SEQ ID NO: 148112 - DNA, 19 bp, Homo sapiens
  siRNA target sequence for MASP2 (NM_006610.2,1814-1832).
gtactgctgcatatgaaaa

SEQ ID NO: 148113 - DNA, 19 bp, Homo sapiens
  siRNA target sequence for MASP2 (NM_006610.2,1828-1846).
gaaaagccaccctatccaa

SEQ ID NO: 148114 - DNA, 19 bp, Homo sapiens
  siRNA target sequence for MASP2 (NM_006610.2,1850-1868).
gaagtgtaactgctaacat

SEQ ID NO: 148115 - DNA, 19 bp, Homo sapiens
  siRNA target sequence for MASP2 (NM_006610.2,1932-1950).
ggtgtttctagatagtgaa

SEQ ID NO: 148116 - DNA, 19 bp, Homo sapiens
  siRNA target sequence for MASP2 (NM_006610.2,1961-1979).
ggtttgtgggaggaatagt

SEQ ID NO: 148117 - DNA, 19 bp, Homo sapiens
  siRNA target sequence for MASP2 (NM_006610.2,2014-2032).
cagtatggagtctacacaa

SEQ ID NO: 148118 - DNA, 19 bp, Homo sapiens
  siRNA target sequence for MASP2 (NM_006610.2,2021-2039).
gagtctacacaaaagttat

SEQ ID NO: 148119 - DNA, 19 bp, Homo sapiens
  siRNA target sequence for MASP2 (NM_006610.2,2028-2046).
cacaaaagttattaactat

SEQ ID NO: 148120 - DNA, 19 bp, Homo sapiens
  siRNA target sequence for MASP2 (NM_006610.2,2050-2068).
ccctggatcgagaacataa

SEQ ID NO: 148121 - DNA, 19 bp, Homo sapiens
  siRNA target sequence for MASP2 (NM_006610.2,2055-2073).
gatcgagaacataattagt

SEQ ID NO: 148122 - DNA, 19 bp, Homo sapiens
  siRNA target sequence for MASP2 (NM_006610.2,2058-2076).
cgagaacataattagtgat

SEQ ID NO: 148123 - DNA, 19 bp, Homo sapiens
  siRNA target sequence for MASP2 (NM_006610.2,2059-2077).
gagaacataattagtgatt

SEQ ID NO: 148124 - DNA, 19 bp, Homo sapiens
  siRNA target sequence for MATN2 (NM_002380.2,288-306).
cgggcagacctggttttca

SEQ ID NO: 148125 - DNA, 19 bp, Homo sapiens
  siRNA target sequence for MATN2 (NM_002380.2,291-309).
gcagacctggttttcatca

SEQ ID NO: 148126 - DNA, 19 bp, Homo sapiens
  siRNA target sequence for MATN2 (NM_002380.2,292-310).
cagacctggttttcatcat

SEQ ID NO: 148127 - DNA, 19 bp, Homo sapiens
  siRNA target sequence for MATN2 (NM_002380.2,325-343).
gtgtcaacacccatgacta

SEQ ID NO: 148128 - DNA, 19 bp, Homo sapiens
  siRNA target sequence for MATN2 (NM_002380.2,433-451).
gcactgtcaagaatgagtt

SEQ ID NO: 148129 - DNA, 19 bp, Homo sapiens
  siRNA target sequence for MATN2 (NM_002380.2,678-696).
cgggacacgggcatcctaa

SEQ ID NO: 148130 - DNA, 19 bp, Homo sapiens
  siRNA target sequence for MATN2 (NM_002380.2,679-697).
gggacacgggcatcctaat

SEQ ID NO: 148131 - DNA, 19 bp, Homo sapiens
  siRNA target sequence for MATN2 (NM_002380.2,681-699).
gacacgggcatcctaatct

SEQ ID NO: 148132 - DNA, 19 bp, Homo sapiens
  siRNA target sequence for MATN2 (NM_002380.2,683-701).
cacgggcatcctaatcttt

SEQ ID NO: 148133 - DNA, 19 bp, Homo sapiens
  siRNA target sequence for MATN2 (NM_002380.2,709-727).
gtgtgggccaggtagactt

SEQ ID NO: 148134 - DNA, 19 bp, Homo sapiens
  siRNA target sequence for MATN2 (NM_002380.2,723-741).
gacttcaacaccttgaagt

SEQ ID NO: 148135 - DNA, 19 bp, Homo sapiens
  siRNA target sequence for MATN2 (NM_002380.2,854-872).
caccctggagcataactgt

SEQ ID NO: 148136 - DNA, 19 bp, Homo sapiens
  siRNA target sequence for MATN2 (NM_002380.2,1198-1216).
cgtgcacaaagatagacta

SEQ ID NO: 148137 - DNA, 19 bp, Homo sapiens
  siRNA target sequence for MATN2 (NM_002380.2,1212-1230).
gactactgtgcctcatcta

SEQ ID NO: 148138 - DNA, 19 bp, Homo sapiens
  siRNA target sequence for MATN2 (NM_002380.2,1250-1268).
gtgtgttaacacagatgat

SEQ ID NO: 148139 - DNA, 19 bp, Homo sapiens
  siRNA target sequence for MATN2 (NM_002380.2,1321-1339).
cctgcagaaggatcaacta

SEQ ID NO: 148140 - DNA, 19 bp, Homo sapiens
  siRNA target sequence for MATN2 (NM_002380.2,1567-1585).
cctgctcccgggtggatta

SEQ ID NO: 148141 - DNA, 19 bp, Homo sapiens
  siRNA target sequence for MATN2 (NM_002380.2,1597-1615).
gtgaccatggttgtgaata

SEQ ID NO: 148142 - DNA, 19 bp, Homo sapiens
  siRNA target sequence for MATN2 (NM_002380.2,1599-1617).
gaccatggttgtgaatact

SEQ ID NO: 148143 - DNA, 19 bp, Homo sapiens
  siRNA target sequence for MATN2 (NM_002380.2,1625-1643).
caacatggacagatccttt

SEQ ID NO: 148144 - DNA, 19 bp, Homo sapiens
  siRNA target sequence for MATN2 (NM_002380.2,1721-1739).
ggaccacggttgtgaacat

SEQ ID NO: 148145 - DNA, 19 bp, Homo sapiens
  siRNA target sequence for MATN2 (NM_002380.2,1722-1740).
gaccacggttgtgaacatt

SEQ ID NO: 148146 - DNA, 19 bp, Homo sapiens
  siRNA target sequence for MATN2 (NM_002380.2,1777-1795).
gctttgaaggttatatact

SEQ ID NO: 148147 - DNA, 19 bp, Homo sapiens
  siRNA target sequence for MATN2 (NM_002380.2,2051-2069).
cggaagacggtgcaagaaa

SEQ ID NO: 148148 - DNA, 19 bp, Homo sapiens
  siRNA target sequence for MATN2 (NM_002380.2,2083-2101).
caattgacctggtctttgt

SEQ ID NO: 148149 - DNA, 19 bp, Homo sapiens
  siRNA target sequence for MATN2 (NM_002380.2,2157-2175).
gtcactggaattatagatt

SEQ ID NO: 148150 - DNA, 19 bp, Homo sapiens
  siRNA target sequence for MATN2 (NM_002380.2,2208-2226).
gggctgctccagtattcca

SEQ ID NO: 148151 - DNA, 19 bp, Homo sapiens
  siRNA target sequence for MATN2 (NM_002380.2,2286-2304).
gccgtggcccacatgaaat

SEQ ID NO: 148152 - DNA, 19 bp, Homo sapiens
  siRNA target sequence for MATN2 (NM_002380.2,2337-2355).
ctgaaacacatgtttgaga

SEQ ID NO: 148153 - DNA, 19 bp, Homo sapiens
  siRNA target sequence for MATN2 (NM_002380.2,2404-2422).
ccagagcagccattgtgtt

SEQ ID NO: 148154 - DNA, 19 bp, Homo sapiens
  siRNA target sequence for MATN2 (NM_002380.2,2585-2603).
cagcacaatggatgagata

SEQ ID NO: 148155 - DNA, 19 bp, Homo sapiens
  siRNA target sequence for MATN2 (NM_002380.2,2590-2608).
caatggatgagataagtga

SEQ ID NO: 148156 - DNA, 19 bp, Homo sapiens
  siRNA target sequence for MATN2 (NM_002380.2,2624-2642).
catctgtgaagctctagaa

SEQ ID NO: 148157 - DNA, 19 bp, Homo sapiens
  siRNA target sequence for MATN2 (NM_002380.2,2691-2709).
gtccaacagccaacagaat

SEQ ID NO: 148158 - DNA, 19 bp, Homo sapiens
  siRNA target sequence for MATN2 (NM_002380.2,2712-2730).
gagccagtcaccataaata

SEQ ID NO: 148159 - DNA, 19 bp, Homo sapiens
  siRNA target sequence for MATN2 (NM_002380.2,2736-2754).
gacctactttcctgttcta

SEQ ID NO: 148160 - DNA, 19 bp, Homo sapiens
  siRNA target sequence for MATN4 (NM_003833.2,226-244).
gttggcgtgatccagtatt

SEQ ID NO: 148161 - DNA, 19 bp, Homo sapiens
  siRNA target sequence for MATN4 (NM_003833.2,229-247).
ggcgtgatccagtattcga

SEQ ID NO: 148162 - DNA, 19 bp, Homo sapiens
  siRNA target sequence for MATN4 (NM_003833.2,688-706).
gagcaccactgcgtcaatt

SEQ ID NO: 148163 - DNA, 19 bp, Homo sapiens
  siRNA target sequence for MATN4 (NM_003833.2,731-749).
gccaagttggctttgtact

SEQ ID NO: 148164 - DNA, 19 bp, Homo sapiens
  siRNA target sequence for MATN4 (NM_003833.2,767-785).
gctgcagggccattgacta

SEQ ID NO: 148165 - DNA, 19 bp, Homo sapiens
  siRNA target sequence for MATN4 (NM_003833.2,1034-1052).
gccacgtggaccttgttct

SEQ ID NO: 148166 - DNA, 19 bp, Homo sapiens
  siRNA target sequence for MATN4 (NM_003833.2,1073-1091).
gcgtgcgtccacaaaactt

SEQ ID NO: 148167 - DNA, 19 bp, Homo sapiens
  siRNA target sequence for MATN4 (NM_003833.2,1106-1124).
gcttcgtgaaccagattgt

SEQ ID NO: 148168 - DNA, 19 bp, Homo sapiens
  siRNA target sequence for MCFD2 (NM_139279.2,199-217).
gcagcatgggcctggataa

SEQ ID NO: 148169 - DNA, 19 bp, Homo sapiens
  siRNA target sequence for MCFD2 (NM_139279.2,228-246).
cacgaccaagagcatatca

SEQ ID NO: 148170 - DNA, 19 bp, Homo sapiens
  siRNA target sequence for MCFD2 (NM_139279.2,330-348).
gattatgatggcaataatt

SEQ ID NO: 148171 - DNA, 19 bp, Homo sapiens
  siRNA target sequence for MCFD2 (NM_139279.2,408-426).
gaacaggcaccactaatga

SEQ ID NO: 148172 - DNA, 19 bp, Homo sapiens
  siRNA target sequence for MCFD2 (NM_139279.2,432-450).
gatgaactgattaacataa

SEQ ID NO: 148173 - DNA, 19 bp, Homo sapiens
  siRNA target sequence for MCSC (NM_052901.1,105-123).
gaccgagttccagtacttt

SEQ ID NO: 148174 - DNA, 19 bp, Homo sapiens
  siRNA target sequence for MCSC (NM_052901.1,107-125).
ccgagttccagtactttga

SEQ ID NO: 148175 - DNA, 19 bp, Homo sapiens
  siRNA target sequence for MCSC (NM_052901.1,142-160).
gccgagctgaagtccattt

SEQ ID NO: 148176 - DNA, 19 bp, Homo sapiens
  siRNA target sequence for MCSC (NM_052901.1,143-161).
ccgagctgaagtccatttt

SEQ ID NO: 148177 - DNA, 19 bp, Homo sapiens
  siRNA target sequence for MCSC (NM_052901.1,255-273).
gcagctagactttgaagaa

SEQ ID NO: 148178 - DNA, 19 bp, Homo sapiens
  siRNA target sequence for MCSC (NM_052901.1,385-403).
gacttgggagtcaagatat

SEQ ID NO: 148179 - DNA, 19 bp, Homo sapiens
  siRNA target sequence for MCSC (NM_052901.1,390-408).
gggagtcaagatatctgaa

SEQ ID NO: 148180 - DNA, 19 bp, Homo sapiens
  siRNA target sequence for MCSC (NM_052901.1,537-555).
gcattccacgatctttgat

SEQ ID NO: 148181 - DNA, 19 bp, Homo sapiens
  siRNA target sequence for MCSC (NM_052901.1,713-731).
cctcccgcagcaacaacat

SEQ ID NO: 148182 - DNA, 19 bp, Homo sapiens
  siRNA target sequence for MCSC (NM_052901.1,824-842).
ccgaatcagccatcaaatt

SEQ ID NO: 148183 - DNA, 19 bp, Homo sapiens
  siRNA target sequence for MCSC (NM_052901.1,826-844).
gaatcagccatcaaattca

SEQ ID NO: 148184 - DNA, 19 bp, Homo sapiens
  siRNA target sequence for MCSC (NM_052901.1,1275-1293).
gcaggcgcaagcctctatt

SEQ ID NO: 148185 - DNA, 19 bp, Homo sapiens
  siRNA target sequence for MGC11256 (NM_024324.2,392-410).
gcagctgaagagcgaatat

SEQ ID NO: 148186 - DNA, 19 bp, Homo sapiens
  siRNA target sequence for MGC11256 (NM_024324.2,395-413).
gctgaagagcgaatatcct

SEQ ID NO: 148187 - DNA, 19 bp, Homo sapiens
  siRNA target sequence for MGC11256 (NM_024324.2,403-421).
gcgaatatcctgacttatt

SEQ ID NO: 148188 - DNA, 19 bp, Homo sapiens
  siRNA target sequence for MGC11256 (NM_024324.2,416-434).
cttattcgagtggttttgt

SEQ ID NO: 148189 - DNA, 19 bp, Homo sapiens
  siRNA target sequence for MGC11256 (NM_024324.2,799-817).
gcgctgcgcagttctgtaa

SEQ ID NO: 148190 - DNA, 19 bp, Homo sapiens
  siRNA target sequence for MGC11256 (NM_024324.2,801-819).
gctgcgcagttctgtaaga

SEQ ID NO: 148191 - DNA, 19 bp, Homo sapiens
  siRNA target sequence for MGC11256 (NM_024324.2,802-820).
ctgcgcagttctgtaagaa

SEQ ID NO: 148192 - DNA, 19 bp, Homo sapiens
  siRNA target sequence for MGC11256 (NM_024324.2,893-911).
ctgtaaagagtgtatctct

SEQ ID NO: 148193 - DNA, 19 bp, Homo sapiens
  siRNA target sequence for MGC11256 (NM_024324.2,976-994).
gtgtgaggaaaaacgaaaa

SEQ ID NO: 148194 - DNA, 19 bp, Homo sapiens
  siRNA target sequence for MGC11256 (NM_024324.2,978-996).
gtgaggaaaaacgaaaact

SEQ ID NO: 148195 - DNA, 19 bp, Homo sapiens
  siRNA target sequence for MGC11256 (NM_024324.2,989-1007).
cgaaaactgctacaatact

SEQ ID NO: 148196 - DNA, 19 bp, Homo sapiens
  siRNA target sequence for MGC12458 (NM_032328.1,108-126).
gaccatgagtcgaataata

SEQ ID NO: 148197 - DNA, 19 bp, Homo sapiens
  siRNA target sequence for MGC12458 (NM_032328.1,110-128).
ccatgagtcgaataataca

SEQ ID NO: 148198 - DNA, 19 bp, Homo sapiens
  siRNA target sequence for MGC12458 (NM_032328.1,139-157).
gagagattggaacaattat

SEQ ID NO: 148199 - DNA, 19 bp, Homo sapiens
  siRNA target sequence for MGC12458 (NM_032328.1,141-159).
gagattggaacaattatca

SEQ ID NO: 148200 - DNA, 19 bp, Homo sapiens
  siRNA target sequence for MGC12458 (NM_032328.1,234-252).
ggatacattcgattcgaaa

SEQ ID NO: 148201 - DNA, 19 bp, Homo sapiens
  siRNA target sequence for MGC12458 (NM_032328.1,235-253).
gatacattcgattcgaaaa

SEQ ID NO: 148202 - DNA, 19 bp, Homo sapiens
  siRNA target sequence for MGC12458 (NM_032328.1,239-257).
cattcgattcgaaaaattt

SEQ ID NO: 148203 - DNA, 19 bp, Homo sapiens
  siRNA target sequence for MGC12458 (NM_032328.1,262-280).
cggtgatgacagaaatact

SEQ ID NO: 148204 - DNA, 19 bp, Homo sapiens
  siRNA target sequence for MGC12458 (NM_032328.1,263-281).
ggtgatgacagaaatacta

SEQ ID NO: 148205 - DNA, 19 bp, Homo sapiens
  siRNA target sequence for MGC12458 (NM_032328.1,348-366).
gctaaacgtgggtttctta

SEQ ID NO: 148206 - DNA, 19 bp, Homo sapiens
  siRNA target sequence for MGC12458 (NM_032328.1,375-393).
gagctgatcaagtatatga

SEQ ID NO: 148207 - DNA, 19 bp, Homo sapiens
  siRNA target sequence for MGC12458 (NM_032328.1,377-395).
gctgatcaagtatatgact

SEQ ID NO: 148208 - DNA, 19 bp, Homo sapiens
  siRNA target sequence for MGC12458 (NM_032328.1,437-455).
gttgtctgctgcaattgat

SEQ ID NO: 148209 - DNA, 19 bp, Homo sapiens
  siRNA target sequence for MGC12458 (NM_032328.1,447-465).
gcaattgatccagaatcaa

SEQ ID NO: 148210 - DNA, 19 bp, Homo sapiens
  siRNA target sequence for MGC12458 (NM_032328.1,493-511).
caatgatggtgatagatga

SEQ ID NO: 148211 - DNA, 19 bp, Homo sapiens
  siRNA target sequence for MGC2615 (NM_024103.1,363-381).
gcgtctgctgctcatgttt

SEQ ID NO: 148212 - DNA, 19 bp, Homo sapiens
  siRNA target sequence for MGC2615 (NM_024103.1,552-570).
gttgcattcgctggaaaat

SEQ ID NO: 148213 - DNA, 19 bp, Homo sapiens
  siRNA target sequence for MGC2615 (NM_024103.1,620-638).
ggttctctgcctggataaa

SEQ ID NO: 148214 - DNA, 19 bp, Homo sapiens
  siRNA target sequence for MGC2615 (NM_024103.1,621-639).
gttctctgcctggataaaa

SEQ ID NO: 148215 - DNA, 19 bp, Homo sapiens
  siRNA target sequence for MGC2615 (NM_024103.1,624-642).
ctctgcctggataaaagat

SEQ ID NO: 148216 - DNA, 19 bp, Homo sapiens
  siRNA target sequence for MGC2615 (NM_024103.1,655-673).
cagaatcgttcaaaaacca

SEQ ID NO: 148217 - DNA, 19 bp, Homo sapiens
  siRNA target sequence for MGC2615 (NM_024103.1,775-793).
gtgccggacgagttctcaa

SEQ ID NO: 148218 - DNA, 19 bp, Homo sapiens
  siRNA target sequence for MGC2615 (NM_024103.1,780-798).
ggacgagttctcaaagcaa

SEQ ID NO: 148219 - DNA, 19 bp, Homo sapiens
  siRNA target sequence for MGC2615 (NM_024103.1,993-1011).
cggcaatggtattaatgta

SEQ ID NO: 148220 - DNA, 19 bp, Homo sapiens
  siRNA target sequence for MGC2615 (NM_024103.1,1001-1019).
gtattaatgtactcaagat

SEQ ID NO: 148221 - DNA, 19 bp, Homo sapiens
  siRNA target sequence for MGC2615 (NM_024103.1,1024-1042).
cccgagtcagctatcaagt

SEQ ID NO: 148222 - DNA, 19 bp, Homo sapiens
  siRNA target sequence for MGC2615 (NM_024103.1,1025-1043).
ccgagtcagctatcaagtt

SEQ ID NO: 148223 - DNA, 19 bp, Homo sapiens
  siRNA target sequence for MGC2615 (NM_024103.1,1137-1155).
cacagcccaaaccatcatt

SEQ ID NO: 148224 - DNA, 19 bp, Homo sapiens
  siRNA target sequence for MGC2615 (NM_024103.1,1401-1419).
cctggcctgcggtaccata

SEQ ID NO: 148225 - DNA, 19 bp, Homo sapiens
  siRNA target sequence for MGC2615 (NM_024103.1,1402-1420).
ctggcctgcggtaccatat

SEQ ID NO: 148226 - DNA, 19 bp, Homo sapiens
  siRNA target sequence for MGC2615 (NM_024103.1,1405-1423).
gcctgcggtaccatatcca

SEQ ID NO: 148227 - DNA, 19 bp, Homo sapiens
  siRNA target sequence for MGC26610 (NM_144647.2,162-180).
ggcgatccaggccaagaaa

SEQ ID NO: 148228 - DNA, 19 bp, Homo sapiens
  siRNA target sequence for MGC26610 (NM_144647.2,164-182).
cgatccaggccaagaaaaa

SEQ ID NO: 148229 - DNA, 19 bp, Homo sapiens
  siRNA target sequence for MGC26610 (NM_144647.2,259-277).
cttggcagagtgtttagaa

SEQ ID NO: 148230 - DNA, 19 bp, Homo sapiens
  siRNA target sequence for MGC26610 (NM_144647.2,266-284).
gagtgtttagaattatgga

SEQ ID NO: 148231 - DNA, 19 bp, Homo sapiens
  siRNA target sequence for MGC26610 (NM_144647.2,275-293).
gaattatggatgacgataa

SEQ ID NO: 148232 - DNA, 19 bp, Homo sapiens
  siRNA target sequence for MGC26610 (NM_144647.2,282-300).
ggatgacgataataatcga

SEQ ID NO: 148233 - DNA, 19 bp, Homo sapiens
  siRNA target sequence for MGC26610 (NM_144647.2,283-301).
gatgacgataataatcgaa

SEQ ID NO: 148234 - DNA, 19 bp, Homo sapiens
  siRNA target sequence for MGC26610 (NM_144647.2,376-394).
cttttccggaggtttgata

SEQ ID NO: 148235 - DNA, 19 bp, Homo sapiens
  siRNA target sequence for MGC26610 (NM_144647.2,381-399).
ccggaggtttgataaagat

SEQ ID NO: 148236 - DNA, 19 bp, Homo sapiens
  siRNA target sequence for MGC26610 (NM_144647.2,407-425).
gaacaatagacttcaatga

SEQ ID NO: 148237 - DNA, 19 bp, Homo sapiens
  siRNA target sequence for MGC26610 (NM_144647.2,472-490).
gtaatcatgcaagctttta

SEQ ID NO: 148238 - DNA, 19 bp, Homo sapiens
  siRNA target sequence for MGC26610 (NM_144647.2,504-522).
gactggagatggtgttata

SEQ ID NO: 148239 - DNA, 19 bp, Homo sapiens
  siRNA target sequence for MGC26610 (NM_144647.2,528-546).
cgaagaccttcgtgaagta

SEQ ID NO: 148240 - DNA, 19 bp, Homo sapiens
  siRNA target sequence for MGC26610 (NM_144647.2,534-552).
ccttcgtgaagtatataat

SEQ ID NO: 148241 - DNA, 19 bp, Homo sapiens
  siRNA target sequence for MGC26610 (NM_144647.2,538-556).
cgtgaagtatataatgcaa

SEQ ID NO: 148242 - DNA, 19 bp, Homo sapiens
  siRNA target sequence for MGC26610 (NM_144647.2,554-572).
caaaacaccacccaaagta

SEQ ID NO: 148243 - DNA, 19 bp, Homo sapiens
  siRNA target sequence for MGC26610 (NM_144647.2,635-653).
cctatgacaaagatggatt

SEQ ID NO: 148244 - DNA, 19 bp, Homo sapiens
  siRNA target sequence for MGC26610 (NM_144647.2,691-709).
gtgagcgcatccattgaca

SEQ ID NO: 148245 - DNA, 19 bp, Homo sapiens
  siRNA target sequence for MGC39650 (NM_152465.1,205-223).
ggacgacgctcacaattga

SEQ ID NO: 148246 - DNA, 19 bp, Homo sapiens
  siRNA target sequence for MGC39650 (NM_152465.1,206-224).
gacgacgctcacaattgaa

SEQ ID NO: 148247 - DNA, 19 bp, Homo sapiens
  siRNA target sequence for MGC39650 (NM_152465.1,469-487).
caacctgctcccatgtcat

SEQ ID NO: 148248 - DNA, 19 bp, Homo sapiens
  siRNA target sequence for MGC39650 (NM_152465.1,485-503).
catcgagtccccttgcttt

SEQ ID NO: 148249 - DNA, 19 bp, Homo sapiens
  siRNA target sequence for MGC39650 (NM_152465.1,610-628).
gtggggcagatgatctaaa

SEQ ID NO: 148250 - DNA, 19 bp, Homo sapiens
  siRNA target sequence for MGC39650 (NM_152465.1,894-912).
ggccagttgactaagaaga

SEQ ID NO: 148251 - DNA, 19 bp, Homo sapiens
  siRNA target sequence for MGC39650 (NM_152465.1,895-913).
gccagttgactaagaagaa

SEQ ID NO: 148252 - DNA, 19 bp, Homo sapiens
  siRNA target sequence for MGC39650 (NM_152465.1,943-961).
cagacgtgagccgatcatt

SEQ ID NO: 148253 - DNA, 19 bp, Homo sapiens
  siRNA target sequence for MGC39650 (NM_152465.1,1020-1038).
gagagcgaggacagttaca

SEQ ID NO: 148254 - DNA, 19 bp, Homo sapiens
  siRNA target sequence for MGC39650 (NM_152465.1,1022-1040).
gagcgaggacagttacaat

SEQ ID NO: 148255 - DNA, 19 bp, Homo sapiens
  siRNA target sequence for MGC39650 (NM_152465.1,1070-1088).
ggatattgtggaatcatca

SEQ ID NO: 148256 - DNA, 19 bp, Homo sapiens
  siRNA target sequence for MGC39650 (NM_152465.1,1071-1089).
gatattgtggaatcatcat

SEQ ID NO: 148257 - DNA, 19 bp, Homo sapiens
  siRNA target sequence for MGC39650 (NM_152465.1,1146-1164).
caagccaggaaggtaaaca

SEQ ID NO: 148258 - DNA, 19 bp, Homo sapiens
  siRNA target sequence for MGC39821 (NM_182576.1,629-647).
gcgatgatgaccgtaatga

SEQ ID NO: 148259 - DNA, 19 bp, Homo sapiens
  siRNA target sequence for MGC39821 (NM_182576.1,630-648).
cgatgatgaccgtaatgaa

SEQ ID NO: 148260 - DNA, 19 bp, Homo sapiens
  siRNA target sequence for MGC39821 (NM_182576.1,631-649).
gatgatgaccgtaatgaaa

SEQ ID NO: 148261 - DNA, 19 bp, Homo sapiens
  siRNA target sequence for MGC4170 (NM_024312.3,195-213).
ctgcagagacagacctata

SEQ ID NO: 148262 - DNA, 19 bp, Homo sapiens
  siRNA target sequence for MGC4170 (NM_024312.3,198-216).
cagagacagacctatacct

SEQ ID NO: 148263 - DNA, 19 bp, Homo sapiens
  siRNA target sequence for MGC4170 (NM_024312.3,305-323).
ggaatggagccgagatcaa

SEQ ID NO: 148264 - DNA, 19 bp, Homo sapiens
  siRNA target sequence for MGC4170 (NM_024312.3,315-333).
cgagatcaataccatgttt

SEQ ID NO: 148265 - DNA, 19 bp, Homo sapiens
  siRNA target sequence for MGC4170 (NM_024312.3,316-334).
gagatcaataccatgtttt

SEQ ID NO: 148266 - DNA, 19 bp, Homo sapiens
  siRNA target sequence for MGC4170 (NM_024312.3,318-336).
gatcaataccatgttttgt

SEQ ID NO: 148267 - DNA, 19 bp, Homo sapiens
  siRNA target sequence for MGC4170 (NM_024312.3,399-417).
ccgattgacgttgtttaca

SEQ ID NO: 148268 - DNA, 19 bp, Homo sapiens
  siRNA target sequence for MGC4170 (NM_024312.3,430-448).
gcacagatcttgaactact

SEQ ID NO: 148269 - DNA, 19 bp, Homo sapiens
  siRNA target sequence for MGC4170 (NM_024312.3,523-541).
caacggaacctactaagaa

SEQ ID NO: 148270 - DNA, 19 bp, Homo sapiens
  siRNA target sequence for MGC4170 (NM_024312.3,552-570).
cagttagagtgtttgctaa

SEQ ID NO: 148271 - DNA, 19 bp, Homo sapiens
  siRNA target sequence for MGC4170 (NM_024312.3,578-596).
cattaaggtgccaatgctt

SEQ ID NO: 148272 - DNA, 19 bp, Homo sapiens
  siRNA target sequence for MGC4170 (NM_024312.3,632-650).
gaaggacctgccatctctt

SEQ ID NO: 148273 - DNA, 19 bp, Homo sapiens
  siRNA target sequence for MGC4170 (NM_024312.3,663-681).
cattctgccagtgacattt

SEQ ID NO: 148274 - DNA, 19 bp, Homo sapiens
  siRNA target sequence for MGC4170 (NM_024312.3,712-730).
ccaatgtctcagttgttgt

SEQ ID NO: 148275 - DNA, 19 bp, Homo sapiens
  siRNA target sequence for MGC4170 (NM_024312.3,737-755).
cagtactaaggatgttgaa

SEQ ID NO: 148276 - DNA, 19 bp, Homo sapiens
  siRNA target sequence for MGC4170 (NM_024312.3,760-778).
cccactctggactgcttaa

SEQ ID NO: 148277 - DNA, 19 bp, Homo sapiens
  siRNA target sequence for MGC4170 (NM_024312.3,766-784).
ctggactgcttaaaggaaa

SEQ ID NO: 148278 - DNA, 19 bp, Homo sapiens
  siRNA target sequence for MGC4170 (NM_024312.3,798-816).
gtatggaggggctacttga

SEQ ID NO: 148279 - DNA, 19 bp, Homo sapiens
  siRNA target sequence for MGC4170 (NM_024312.3,806-824).
gggctacttgacaacagat

SEQ ID NO: 148280 - DNA, 19 bp, Homo sapiens
  siRNA target sequence for MGC4170 (NM_024312.3,807-825).
ggctacttgacaacagata

SEQ ID NO: 148281 - DNA, 19 bp, Homo sapiens
  siRNA target sequence for MGC4170 (NM_024312.3,808-826).
gctacttgacaacagataa

SEQ ID NO: 148282 - DNA, 19 bp, Homo sapiens
  siRNA target sequence for MGC4170 (NM_024312.3,835-853).
ctggattagtgctaatgca

SEQ ID NO: 148283 - DNA, 19 bp, Homo sapiens
  siRNA target sequence for MGC4170 (NM_024312.3,860-878).
ggctttcctgagtggattt

SEQ ID NO: 148284 - DNA, 19 bp, Homo sapiens
  siRNA target sequence for MGC4170 (NM_024312.3,871-889).
gtggatttccaccaacatt

SEQ ID NO: 148285 - DNA, 19 bp, Homo sapiens
  siRNA target sequence for MGC4170 (NM_024312.3,873-891).
ggatttccaccaacattca

SEQ ID NO: 148286 - DNA, 19 bp, Homo sapiens
  siRNA target sequence for MGC4170 (NM_024312.3,934-952).
cctctaaagtcaaactgtt

SEQ ID NO: 148287 - DNA, 19 bp, Homo sapiens
  siRNA target sequence for MGC4170 (NM_024312.3,970-988).
ccagtgtagcgcttctaaa

SEQ ID NO: 148288 - DNA, 19 bp, Homo sapiens
  siRNA target sequence for MGC4170 (NM_024312.3,973-991).
gtgtagcgcttctaaaact

SEQ ID NO: 148289 - DNA, 19 bp, Homo sapiens
  siRNA target sequence for MGC4170 (NM_024312.3,979-997).
cgcttctaaaactgaataa

SEQ ID NO: 148290 - DNA, 19 bp, Homo sapiens
  siRNA target sequence for MGC4170 (NM_024312.3,992-1010).
gaataaccccaaggatttt

SEQ ID NO: 148291 - DNA, 19 bp, Homo sapiens
  siRNA target sequence for MGC4170 (NM_024312.3,1064-1082).
gaccataagtcctgcatat

SEQ ID NO: 148292 - DNA, 19 bp, Homo sapiens
  siRNA target sequence for MGC4170 (NM_024312.3,1066-1084).
ccataagtcctgcatattt

SEQ ID NO: 148293 - DNA, 19 bp, Homo sapiens
  siRNA target sequence for MGC4170 (NM_024312.3,1067-1085).
cataagtcctgcatattta

SEQ ID NO: 148294 - DNA, 19 bp, Homo sapiens
  siRNA target sequence for MGC4170 (NM_024312.3,1099-1117).
gcgccatcagccagtctaa

SEQ ID NO: 148295 - DNA, 19 bp, Homo sapiens
  siRNA target sequence for MGC4170 (NM_024312.3,1130-1148).
catctctgccagtcgtttt

SEQ ID NO: 148296 - DNA, 19 bp, Homo sapiens
  siRNA target sequence for MGC4170 (NM_024312.3,1137-1155).
gccagtcgttttgaagata

SEQ ID NO: 148297 - DNA, 19 bp, Homo sapiens
  siRNA target sequence for MGC4170 (NM_024312.3,1141-1159).
gtcgttttgaagataacga

SEQ ID NO: 148298 - DNA, 19 bp, Homo sapiens
  siRNA target sequence for MGC4170 (NM_024312.3,1168-1186).
ggtactcattgcgatctat

SEQ ID NO: 148299 - DNA, 19 bp, Homo sapiens
  siRNA target sequence for MGC4170 (NM_024312.3,1198-1216).
caccatgggttcggaatat

SEQ ID NO: 148300 - DNA, 19 bp, Homo sapiens
  siRNA target sequence for MGC4170 (NM_024312.3,1200-1218).
ccatgggttcggaatattt

SEQ ID NO: 148301 - DNA, 19 bp, Homo sapiens
  siRNA target sequence for MGC4170 (NM_024312.3,1201-1219).
catgggttcggaatatttt

SEQ ID NO: 148302 - DNA, 19 bp, Homo sapiens
  siRNA target sequence for MGC4170 (NM_024312.3,1247-1265).
ctggctgaaccttgacaat

SEQ ID NO: 148303 - DNA, 19 bp, Homo sapiens
  siRNA target sequence for MGC4170 (NM_024312.3,1262-1280).
caatcctcgagtgacaata

SEQ ID NO: 148304 - DNA, 19 bp, Homo sapiens
  siRNA target sequence for MGC4170 (NM_024312.3,1266-1284).
cctcgagtgacaatagtaa

SEQ ID NO: 148305 - DNA, 19 bp, Homo sapiens
  siRNA target sequence for MGC4170 (NM_024312.3,1313-1331).
ccacttgcctacctttagt

SEQ ID NO: 148306 - DNA, 19 bp, Homo sapiens
  siRNA target sequence for MGC4170 (NM_024312.3,1314-1332).
cacttgcctacctttagtt

SEQ ID NO: 148307 - DNA, 19 bp, Homo sapiens
  siRNA target sequence for MGC4170 (NM_024312.3,1316-1334).
cttgcctacctttagttca

SEQ ID NO: 148308 - DNA, 19 bp, Homo sapiens
  siRNA target sequence for MGC4170 (NM_024312.3,1339-1357).
ctattgaaagtcacattca

SEQ ID NO: 148309 - DNA, 19 bp, Homo sapiens
  siRNA target sequence for MGC4170 (NM_024312.3,1368-1386).
gggctgtcccagaagttta

SEQ ID NO: 148310 - DNA, 19 bp, Homo sapiens
  siRNA target sequence for MGC4170 (NM_024312.3,1369-1387).
ggctgtcccagaagtttat

SEQ ID NO: 148311 - DNA, 19 bp, Homo sapiens
  siRNA target sequence for MGC4170 (NM_024312.3,1371-1389).
ctgtcccagaagtttattt

SEQ ID NO: 148312 - DNA, 19 bp, Homo sapiens
  siRNA target sequence for MGC4170 (NM_024312.3,1377-1395).
cagaagtttatttacctaa

SEQ ID NO: 148313 - DNA, 19 bp, Homo sapiens
  siRNA target sequence for MGC4170 (NM_024312.3,1418-1436).
ggatgtctggccagatgat

SEQ ID NO: 148314 - DNA, 19 bp, Homo sapiens
  siRNA target sequence for MGC4170 (NM_024312.3,1427-1445).
gccagatgatttttacagt

SEQ ID NO: 148315 - DNA, 19 bp, Homo sapiens
  siRNA target sequence for MGC4170 (NM_024312.3,1455-1473).
ggccagaaggtttatttga

SEQ ID NO: 148316 - DNA, 19 bp, Homo sapiens
  siRNA target sequence for MGC4170 (NM_024312.3,1517-1535).
gattaaggatggctattgt

SEQ ID NO: 148317 - DNA, 19 bp, Homo sapiens
  siRNA target sequence for MGC4170 (NM_024312.3,1534-1552).
gtgacaaggcttgtaataa

SEQ ID NO: 148318 - DNA, 19 bp, Homo sapiens
  siRNA target sequence for MGC4170 (NM_024312.3,1594-1612).
gtggagggagtcgctatat

SEQ ID NO: 148319 - DNA, 19 bp, Homo sapiens
  siRNA target sequence for MGC4170 (NM_024312.3,1658-1676).
gcagtttggtggaggaata

SEQ ID NO: 148320 - DNA, 19 bp, Homo sapiens
  siRNA target sequence for MGC4170 (NM_024312.3,1698-1716).
cagggatgtgcgaattcct

SEQ ID NO: 148321 - DNA, 19 bp, Homo sapiens
  siRNA target sequence for MGC4170 (NM_024312.3,1714-1732).
cctggctcgctgataagtt

SEQ ID NO: 148322 - DNA, 19 bp, Homo sapiens
  siRNA target sequence for MGC4170 (NM_024312.3,1754-1772).
cttgtcctgtgggtttgat

SEQ ID NO: 148323 - DNA, 19 bp, Homo sapiens
  siRNA target sequence for MGC4170 (NM_024312.3,1777-1795).
gcgactgtgggcaagatca

SEQ ID NO: 148324 - DNA, 19 bp, Homo sapiens
  siRNA target sequence for MGC4170 (NM_024312.3,1778-1796).
cgactgtgggcaagatcat

SEQ ID NO: 148325 - DNA, 19 bp, Homo sapiens
  siRNA target sequence for MGC4170 (NM_024312.3,1786-1804).
ggcaagatcattttcatga

SEQ ID NO: 148326 - DNA, 19 bp, Homo sapiens
  siRNA target sequence for MGC4170 (NM_024312.3,1835-1853).
gactcactatattattcca

SEQ ID NO: 148327 - DNA, 19 bp, Homo sapiens
  siRNA target sequence for MGC4170 (NM_024312.3,1837-1855).
ctcactatattattccaaa

SEQ ID NO: 148328 - DNA, 19 bp, Homo sapiens
  siRNA target sequence for MGC4170 (NM_024312.3,1915-1933).
cctatagtgacaatccaat

SEQ ID NO: 148329 - DNA, 19 bp, Homo sapiens
  siRNA target sequence for MGC4170 (NM_024312.3,1916-1934).
ctatagtgacaatccaata

SEQ ID NO: 148330 - DNA, 19 bp, Homo sapiens
  siRNA target sequence for MGC4170 (NM_024312.3,1944-1962).
gcttctattgccaacaagt

SEQ ID NO: 148331 - DNA, 19 bp, Homo sapiens
  siRNA target sequence for MGC4170 (NM_024312.3,2086-2104).
gggagggaccaaaactgaa

SEQ ID NO: 148332 - DNA, 19 bp, Homo sapiens
  siRNA target sequence for MGC4170 (NM_024312.3,2091-2109).
ggaccaaaactgaattcta

SEQ ID NO: 148333 - DNA, 19 bp, Homo sapiens
  siRNA target sequence for MGC4170 (NM_024312.3,2114-2132).
ccagaagggttacgaaaat

SEQ ID NO: 148334 - DNA, 19 bp, Homo sapiens
  siRNA target sequence for MGC4170 (NM_024312.3,2120-2138).
gggttacgaaaatttagtt

SEQ ID NO: 148335 - DNA, 19 bp, Homo sapiens
  siRNA target sequence for MGC4170 (NM_024312.3,2157-2175).
ccagaggcggaaatccttt

SEQ ID NO: 148336 - DNA, 19 bp, Homo sapiens
  siRNA target sequence for MGC4170 (NM_024312.3,2158-2176).
cagaggcggaaatcctttt

SEQ ID NO: 148337 - DNA, 19 bp, Homo sapiens
  siRNA target sequence for MGC4170 (NM_024312.3,2199-2217).
cgcttcccgaagtttaaga

SEQ ID NO: 148338 - DNA, 19 bp, Homo sapiens
  siRNA target sequence for MGC4170 (NM_024312.3,2201-2219).
cttcccgaagtttaagaga

SEQ ID NO: 148339 - DNA, 19 bp, Homo sapiens
  siRNA target sequence for MGC4170 (NM_024312.3,2266-2284).
ccctggtaaatatttcact

SEQ ID NO: 148340 - DNA, 19 bp, Homo sapiens
  siRNA target sequence for MGC4170 (NM_024312.3,2308-2326).
gtctcaataccttggattt

SEQ ID NO: 148341 - DNA, 19 bp, Homo sapiens
  siRNA target sequence for MGC4170 (NM_024312.3,2312-2330).
caataccttggatttgcaa

SEQ ID NO: 148342 - DNA, 19 bp, Homo sapiens
  siRNA target sequence for MGC4170 (NM_024312.3,2348-2366).
cactttgaaaggatacaat

SEQ ID NO: 148343 - DNA, 19 bp, Homo sapiens
  siRNA target sequence for MGC4170 (NM_024312.3,2530-2548).
gattgcagaggttgacttt

SEQ ID NO: 148344 - DNA, 19 bp, Homo sapiens
  siRNA target sequence for MGC4170 (NM_024312.3,2551-2569).
ctgcagtgagtgtaaaagt

SEQ ID NO: 148345 - DNA, 19 bp, Homo sapiens
  siRNA target sequence for MGC4170 (NM_024312.3,2609-2627).
ggagaccacagcaagattt

SEQ ID NO: 148346 - DNA, 19 bp, Homo sapiens
  siRNA target sequence for MGC4170 (NM_024312.3,2638-2656).
ctcacacccaaaaaaccat

SEQ ID NO: 148347 - DNA, 19 bp, Homo sapiens
  siRNA target sequence for MGC4170 (NM_024312.3,2823-2841).
cagcattacacagatagtt

SEQ ID NO: 148348 - DNA, 19 bp, Homo sapiens
  siRNA target sequence for MGC4170 (NM_024312.3,2974-2992).
cagattccctcagatatgt

SEQ ID NO: 148349 - DNA, 19 bp, Homo sapiens
  siRNA target sequence for MGC4170 (NM_024312.3,3003-3021).
ctaaatagcaagtttggat

SEQ ID NO: 148350 - DNA, 19 bp, Homo sapiens
  siRNA target sequence for MGC4170 (NM_024312.3,3056-3074).
catgattgaccggattgtt

SEQ ID NO: 148351 - DNA, 19 bp, Homo sapiens
  siRNA target sequence for MGC4170 (NM_024312.3,3113-3131).
caagacgtcatttcacaaa

SEQ ID NO: 148352 - DNA, 19 bp, Homo sapiens
  siRNA target sequence for MGC4170 (NM_024312.3,3136-3154).
gccattctgaggatatgca

SEQ ID NO: 148353 - DNA, 19 bp, Homo sapiens
  siRNA target sequence for MGC4170 (NM_024312.3,3152-3170).
gcagtttgccttctcttat

SEQ ID NO: 148354 - DNA, 19 bp, Homo sapiens
  siRNA target sequence for MGC4170 (NM_024312.3,3153-3171).
cagtttgccttctcttatt

SEQ ID NO: 148355 - DNA, 19 bp, Homo sapiens
  siRNA target sequence for MGC4170 (NM_024312.3,3190-3208).
cagtgcagccactgaatat

SEQ ID NO: 148356 - DNA, 19 bp, Homo sapiens
  siRNA target sequence for MGC4170 (NM_024312.3,3194-3212).
gcagccactgaatatatct

SEQ ID NO: 148357 - DNA, 19 bp, Homo sapiens
  siRNA target sequence for MGC4170 (NM_024312.3,3291-3309).
cacgaactgccgttaagtt

SEQ ID NO: 148358 - DNA, 19 bp, Homo sapiens
  siRNA target sequence for MGC4170 (NM_024312.3,3301-3319).
cgttaagtttgcaggattt

SEQ ID NO: 148359 - DNA, 19 bp, Homo sapiens
  siRNA target sequence for MGC4170 (NM_024312.3,3338-3356).
gctaataaattgctcaaaa

SEQ ID NO: 148360 - DNA, 19 bp, Homo sapiens
  siRNA target sequence for MGC4170 (NM_024312.3,3367-3385).
ctgatatcacgcagctaaa

SEQ ID NO: 148361 - DNA, 19 bp, Homo sapiens
  siRNA target sequence for MGC4170 (NM_024312.3,3369-3387).
gatatcacgcagctaaata

SEQ ID NO: 148362 - DNA, 19 bp, Homo sapiens
  siRNA target sequence for MGC4170 (NM_024312.3,3374-3392).
cacgcagctaaataatatt

SEQ ID NO: 148363 - DNA, 19 bp, Homo sapiens
  siRNA target sequence for MGC4170 (NM_024312.3,3394-3412).
caccaactcaggaatccta

SEQ ID NO: 148364 - DNA, 19 bp, Homo sapiens
  siRNA target sequence for MGC4170 (NM_024312.3,3426-3444).
ctgccaccggtcactaaaa

SEQ ID NO: 148365 - DNA, 19 bp, Homo sapiens
  siRNA target sequence for MGC4170 (NM_024312.3,3428-3446).
gccaccggtcactaaaagt

SEQ ID NO: 148366 - DNA, 19 bp, Homo sapiens
  siRNA target sequence for MGC4170 (NM_024312.3,3430-3448).
caccggtcactaaaagtct

SEQ ID NO: 148367 - DNA, 19 bp, Homo sapiens
  siRNA target sequence for MGC4170 (NM_024312.3,3434-3452).
ggtcactaaaagtctagta

SEQ ID NO: 148368 - DNA, 19 bp, Homo sapiens
  siRNA target sequence for MGC4170 (NM_024312.3,3435-3453).
gtcactaaaagtctagtaa

SEQ ID NO: 148369 - DNA, 19 bp, Homo sapiens
  siRNA target sequence for MGC4170 (NM_024312.3,3445-3463).
gtctagtaacaaactgtaa

SEQ ID NO: 148370 - DNA, 19 bp, Homo sapiens
  siRNA target sequence for MGC4170 (NM_024312.3,3500-3518).
caaaaacaaatataggttt

SEQ ID NO: 148371 - DNA, 19 bp, Homo sapiens
  siRNA target sequence for MGC4170 (NM_024312.3,3625-3643).
gcctgaatgacaacattga

SEQ ID NO: 148372 - DNA, 19 bp, Homo sapiens
  siRNA target sequence for MGC4170 (NM_024312.3,3638-3656).
cattgaccacaatcataaa

SEQ ID NO: 148373 - DNA, 19 bp, Homo sapiens
  siRNA target sequence for MGC4170 (NM_024312.3,3681-3699).
ctcagggacttctatgaat

SEQ ID NO: 148374 - DNA, 19 bp, Homo sapiens
  siRNA target sequence for MGC4170 (NM_024312.3,3740-3758).
gtatcgaaaccgtttcctt

SEQ ID NO: 148375 - DNA, 19 bp, Homo sapiens
  siRNA target sequence for MGC4170 (NM_024312.3,3744-3762).
cgaaaccgtttccttcata

SEQ ID NO: 148376 - DNA, 19 bp, Homo sapiens
  siRNA target sequence for MGC4170 (NM_024312.3,3749-3767).
ccgtttccttcatatgcat

SEQ ID NO: 148377 - DNA, 19 bp, Homo sapiens
  siRNA target sequence for MGC4170 (NM_024312.3,3782-3800).
gagggcttatcgagacaaa

SEQ ID NO: 148378 - DNA, 19 bp, Homo sapiens
  siRNA target sequence for MGC4170 (NM_024312.3,3784-3802).
gggcttatcgagacaaatt

SEQ ID NO: 148379 - DNA, 19 bp, Homo sapiens
  siRNA target sequence for MGC4170 (NM_024312.3,3820-3838).
gtgtactagcaacattgat

SEQ ID NO: 148380 - DNA, 19 bp, Homo sapiens
  siRNA target sequence for MGC4170 (NM_024312.3,3822-3840).
gtactagcaacattgatta

SEQ ID NO: 148381 - DNA, 19 bp, Homo sapiens
  siRNA target sequence for MGC4170 (NM_024312.3,3828-3846).
gcaacattgattatgttta

SEQ ID NO: 148382 - DNA, 19 bp, Homo sapiens
  siRNA target sequence for MGC4170 (NM_024312.3,3921-3939).
gaagctagtcccaatcgaa

SEQ ID NO: 148383 - DNA, 19 bp, Homo sapiens
  siRNA target sequence for MGC4170 (NM_024312.3,3930-3948).
cccaatcgaatcagagtat

SEQ ID NO: 148384 - DNA, 19 bp, Homo sapiens
  siRNA target sequence for MGC4266 (NM_032680.2,791-809).
gagttcactactggattta

SEQ ID NO: 148385 - DNA, 19 bp, Homo sapiens
  siRNA target sequence for MGC4266 (NM_032680.2,793-811).
gttcactactggatttagt

SEQ ID NO: 148386 - DNA, 19 bp, Homo sapiens
  siRNA target sequence for MGC4266 (NM_032680.2,801-819).
ctggatttagtcacttctt

SEQ ID NO: 148387 - DNA, 19 bp, Homo sapiens
  siRNA target sequence for MGC4266 (NM_032680.2,803-821).
ggatttagtcacttcttct

SEQ ID NO: 148388 - DNA, 19 bp, Homo sapiens
  siRNA target sequence for MGC4266 (NM_032680.2,918-936).
gcgacatgggcgaagatga

SEQ ID NO: 148389 - DNA, 19 bp, Homo sapiens
  siRNA target sequence for MGC4266 (NM_032680.2,966-984).
gacttggagcccaaaaggt

SEQ ID NO: 148390 - DNA, 19 bp, Homo sapiens
  siRNA target sequence for MGC4266 (NM_032680.2,1030-1048).
gaaggaggaacctcattta

SEQ ID NO: 148391 - DNA, 19 bp, Homo sapiens
  siRNA target sequence for MGC4266 (NM_032680.2,1121-1139).
ctggagtgtgccctaaaaa

SEQ ID NO: 148392 - DNA, 19 bp, Homo sapiens
  siRNA target sequence for MGC4266 (NM_032680.2,1126-1144).
gtgtgccctaaaaaggaaa

SEQ ID NO: 148393 - DNA, 19 bp, Homo sapiens
  siRNA target sequence for MGC4266 (NM_032680.2,1186-1204).
gatggaacaacaaatcaaa

SEQ ID NO: 148394 - DNA, 19 bp, Homo sapiens
  siRNA target sequence for MGC4266 (NM_032680.2,1231-1249).
ggacacagagaggtttcaa

SEQ ID NO: 148395 - DNA, 19 bp, Homo sapiens
  siRNA target sequence for MGC4266 (NM_032680.2,1367-1385).
gagaccaaggctgagaata

SEQ ID NO: 148396 - DNA, 19 bp, Homo sapiens
  siRNA target sequence for MGC4266 (NM_032680.2,1491-1509).
gcaaactccaccaagagaa

SEQ ID NO: 148397 - DNA, 19 bp, Homo sapiens
  siRNA target sequence for MGC4342 (NM_024329.3,328-346).
gatgttcaagcagtatgat

SEQ ID NO: 148398 - DNA, 19 bp, Homo sapiens
  siRNA target sequence for MGC4342 (NM_024329.3,734-752).
ctgcagtccacctttaagt

SEQ ID NO: 148399 - DNA, 19 bp, Homo sapiens
  siRNA target sequence for MGC45840 (NM_173584.1,325-343).
ctttcgaggatgttctgat

SEQ ID NO: 148400 - DNA, 19 bp, Homo sapiens
  siRNA target sequence for MGC50831 (NM_175924.2,194-212).
cacacagaacgctatgtca

SEQ ID NO: 148401 - DNA, 19 bp, Homo sapiens
  siRNA target sequence for MGC50831 (NM_175924.2,221-239).
gcctctatcatcctcaaat

SEQ ID NO: 148402 - DNA, 19 bp, Homo sapiens
  siRNA target sequence for MGC50831 (NM_175924.2,223-241).
ctctatcatcctcaaatgt

SEQ ID NO: 148403 - DNA, 19 bp, Homo sapiens
  siRNA target sequence for MGC50831 (NM_175924.2,225-243).
ctatcatcctcaaatgtga

SEQ ID NO: 148404 - DNA, 19 bp, Homo sapiens
  siRNA target sequence for MGC50831 (NM_175924.2,278-296).
gtgacatggcgcttcaagt

SEQ ID NO: 148405 - DNA, 19 bp, Homo sapiens
  siRNA target sequence for MGC50831 (NM_175924.2,311-329).
cctatctttgactactact

SEQ ID NO: 148406 - DNA, 19 bp, Homo sapiens
  siRNA target sequence for MGC50831 (NM_175924.2,334-352).
gtcataccaggcagcttta

SEQ ID NO: 148407 - DNA, 19 bp, Homo sapiens
  siRNA target sequence for MGC50831 (NM_175924.2,437-455).
cccgtgctgggggtagatt

SEQ ID NO: 148408 - DNA, 19 bp, Homo sapiens
  siRNA target sequence for MGC50831 (NM_175924.2,485-503).
cgagcagatctcgtgataa

SEQ ID NO: 148409 - DNA, 19 bp, Homo sapiens
  siRNA target sequence for MGC50831 (NM_175924.2,486-504).
gagcagatctcgtgataaa

SEQ ID NO: 148410 - DNA, 19 bp, Homo sapiens
  siRNA target sequence for MGC50831 (NM_175924.2,489-507).
cagatctcgtgataaatga

SEQ ID NO: 148411 - DNA, 19 bp, Homo sapiens
  siRNA target sequence for MGC50831 (NM_175924.2,517-535).
gtgggaccatggagtgtat

SEQ ID NO: 148412 - DNA, 19 bp, Homo sapiens
  siRNA target sequence for MGC50831 (NM_175924.2,521-539).
gaccatggagtgtattact

SEQ ID NO: 148413 - DNA, 19 bp, Homo sapiens
  siRNA target sequence for MGC50831 (NM_175924.2,572-590).
gaccccgataaggaagtaa

SEQ ID NO: 148414 - DNA, 19 bp, Homo sapiens
  siRNA target sequence for MGC50831 (NM_175924.2,738-756).
gctgtcctgaggaagattt

SEQ ID NO: 148415 - DNA, 19 bp, Homo sapiens
  siRNA target sequence for MGC50831 (NM_175924.2,944-962).
gtcgtggaacgcagaatca

SEQ ID NO: 148416 - DNA, 19 bp, Homo sapiens
  siRNA target sequence for MGC50831 (NM_175924.2,1576-1594).
gaaagacagctctcatagt

SEQ ID NO: 148417 - DNA, 19 bp, Homo sapiens
  siRNA target sequence for MGP (NM_000900.1,79-97).
cgccttagcggtagtaact

SEQ ID NO: 148418 - DNA, 19 bp, Homo sapiens
  siRNA target sequence for MGP (NM_000900.1,87-105).
cggtagtaactttgtgtta

SEQ ID NO: 148419 - DNA, 19 bp, Homo sapiens
  siRNA target sequence for MGP (NM_000900.1,88-106).
ggtagtaactttgtgttat

SEQ ID NO: 148420 - DNA, 19 bp, Homo sapiens
  siRNA target sequence for MGP (NM_000900.1,96-114).
ctttgtgttatgaatcaca

SEQ ID NO: 148421 - DNA, 19 bp, Homo sapiens
  siRNA target sequence for MGP (NM_000900.1,100-118).
gtgttatgaatcacatgaa

SEQ ID NO: 148422 - DNA, 19 bp, Homo sapiens
  siRNA target sequence for MGP (NM_000900.1,137-155).
cttaatcccttcattaaca

SEQ ID NO: 148423 - DNA, 19 bp, Homo sapiens
  siRNA target sequence for MGP (NM_000900.1,236-254).
cctgtccacgagctcaata

SEQ ID NO: 148424 - DNA, 19 bp, Homo sapiens
  siRNA target sequence for MGP (NM_000900.1,255-273).
gggaagcctgtgatgacta

SEQ ID NO: 148425 - DNA, 19 bp, Homo sapiens
  siRNA target sequence for MGP (NM_000900.1,284-302).
gaacgctacgccatggttt

SEQ ID NO: 148426 - DNA, 19 bp, Homo sapiens
  siRNA target sequence for MGP (NM_000900.1,289-307).
ctacgccatggtttatgga

SEQ ID NO: 148427 - DNA, 19 bp, Homo sapiens
  siRNA target sequence for MGP (NM_000900.1,294-312).
ccatggtttatggatacaa

SEQ ID NO: 148428 - DNA, 19 bp, Homo sapiens
  siRNA target sequence for MGP (NM_000900.1,295-313).
catggtttatggatacaat

SEQ ID NO: 148429 - DNA, 19 bp, Homo sapiens
  siRNA target sequence for MLC1SA (NM_002475.2,216-234).
gtggtgatcgagtttaaca

SEQ ID NO: 148430 - DNA, 19 bp, Homo sapiens
  siRNA target sequence for MLC1SA (NM_002475.2,492-510).
gggtttcgtgtgtttgaca

SEQ ID NO: 148431 - DNA, 19 bp, Homo sapiens
  siRNA target sequence for MMP1 (NM_002421.2,133-151).
cagcgactctagaaacaca

SEQ ID NO: 148432 - DNA, 19 bp, Homo sapiens
  siRNA target sequence for MMP1 (NM_002421.2,266-284).
gcaaatgcaggaattcttt

SEQ ID NO: 148433 - DNA, 19 bp, Homo sapiens
  siRNA target sequence for MMP1 (NM_002421.2,391-409).
ctcgctgggagcaaacaca

SEQ ID NO: 148434 - DNA, 19 bp, Homo sapiens
  siRNA target sequence for MMP1 (NM_002421.2,411-429).
ctgacctacaggattgaaa

SEQ ID NO: 148435 - DNA, 19 bp, Homo sapiens
  siRNA target sequence for MMP1 (NM_002421.2,413-431).
gacctacaggattgaaaat

SEQ ID NO: 148436 - DNA, 19 bp, Homo sapiens
  siRNA target sequence for MMP1 (NM_002421.2,482-500).
cttccaactctggagtaat

SEQ ID NO: 148437 - DNA, 19 bp, Homo sapiens
  siRNA target sequence for MMP1 (NM_002421.2,501-519).
gtcacacctctgacattca

SEQ ID NO: 148438 - DNA, 19 bp, Homo sapiens
  siRNA target sequence for MMP1 (NM_002421.2,650-668).
ggatgctcattttgatgaa

SEQ ID NO: 148439 - DNA, 19 bp, Homo sapiens
  siRNA target sequence for MMP1 (NM_002421.2,672-690).
gaaaggtggaccaacaatt

SEQ ID NO: 148440 - DNA, 19 bp, Homo sapiens
  siRNA target sequence for MMP1 (NM_002421.2,692-710).
cagagagtacaacttacat

SEQ ID NO: 148441 - DNA, 19 bp, Homo sapiens
  siRNA target sequence for MMP1 (NM_002421.2,741-759).
cttggactctcccattcta

SEQ ID NO: 148442 - DNA, 19 bp, Homo sapiens
  siRNA target sequence for MMP1 (NM_002421.2,747-765).
ctctcccattctactgata

SEQ ID NO: 148443 - DNA, 19 bp, Homo sapiens
  siRNA target sequence for MMP1 (NM_002421.2,762-780).
gatatcggggctttgatgt

SEQ ID NO: 148444 - DNA, 19 bp, Homo sapiens
  siRNA target sequence for MMP1 (NM_002421.2,793-811).
ccttcagtggtgatgttca

SEQ ID NO: 148445 - DNA, 19 bp, Homo sapiens
  siRNA target sequence for MMP1 (NM_002421.2,895-913).
caaaagcgtgtgacagtaa

SEQ ID NO: 148446 - DNA, 19 bp, Homo sapiens
  siRNA target sequence for MMP1 (NM_002421.2,900-918).
gcgtgtgacagtaagctaa

SEQ ID NO: 148447 - DNA, 19 bp, Homo sapiens
  siRNA target sequence for MMP1 (NM_002421.2,904-922).
gtgacagtaagctaacctt

SEQ ID NO: 148448 - DNA, 19 bp, Homo sapiens
  siRNA target sequence for MMP1 (NM_002421.2,908-926).
cagtaagctaacctttgat

SEQ ID NO: 148449 - DNA, 19 bp, Homo sapiens
  siRNA target sequence for MMP1 (NM_002421.2,914-932).
gctaacctttgatgctata

SEQ ID NO: 148450 - DNA, 19 bp, Homo sapiens
  siRNA target sequence for MMP1 (NM_002421.2,937-955).
cgattcggggagaagtgat

SEQ ID NO: 148451 - DNA, 19 bp, Homo sapiens
  siRNA target sequence for MMP1 (NM_002421.2,991-1009).
ccttctacccggaagttga

SEQ ID NO: 148452 - DNA, 19 bp, Homo sapiens
  siRNA target sequence for MMP1 (NM_002421.2,999-1017).
ccggaagttgagctcaatt

SEQ ID NO: 148453 - DNA, 19 bp, Homo sapiens
  siRNA target sequence for MMP1 (NM_002421.2,1000-1018).
cggaagttgagctcaattt

SEQ ID NO: 148454 - DNA, 19 bp, Homo sapiens
  siRNA target sequence for MMP1 (NM_002421.2,1052-1070).
gcttgaagctgcttacgaa

SEQ ID NO: 148455 - DNA, 19 bp, Homo sapiens
  siRNA target sequence for MMP1 (NM_002421.2,1207-1225).
ctgctctttctgaggaaaa

SEQ ID NO: 148456 - DNA, 19 bp, Homo sapiens
  siRNA target sequence for MMP1 (NM_002421.2,1262-1280).
ctggaggtatgatgaatat

SEQ ID NO: 148457 - DNA, 19 bp, Homo sapiens
  siRNA target sequence for MMP1 (NM_002421.2,1268-1286).
gtatgatgaatataaacga

SEQ ID NO: 148458 - DNA, 19 bp, Homo sapiens
  siRNA target sequence for MMP1 (NM_002421.2,1333-1351).
gaattggccacaaagttga

SEQ ID NO: 148459 - DNA, 19 bp, Homo sapiens
  siRNA target sequence for MMP1 (NM_002421.2,1449-1467).
gctaatagctggttcaact

SEQ ID NO: 148460 - DNA, 19 bp, Homo sapiens
  siRNA target sequence for MMP11 (NM_005940.2,265-283).
cgtgcccgacccatctgat

SEQ ID NO: 148461 - DNA, 19 bp, Homo sapiens
  siRNA target sequence for MMP11 (NM_005940.2,517-535).
ggacgacctgccgtttgat

SEQ ID NO: 148462 - DNA, 19 bp, Homo sapiens
  siRNA target sequence for MMP11 (NM_005940.2,716-734).
ctgatgtccgccttctaca

SEQ ID NO: 148463 - DNA, 19 bp, Homo sapiens
  siRNA target sequence for MMP11 (NM_005940.2,774-792).
ggggcgttcaacacctata

SEQ ID NO: 148464 - DNA, 19 bp, Homo sapiens
  siRNA target sequence for MMP11 (NM_005940.2,775-793).
gggcgttcaacacctatat

SEQ ID NO: 148465 - DNA, 19 bp, Homo sapiens
  siRNA target sequence for MMP11 (NM_005940.2,839-857).
ccccaggctgggatagaca

SEQ ID NO: 148466 - DNA, 19 bp, Homo sapiens
  siRNA target sequence for MMP11 (NM_005940.2,848-866).
gggatagacaccaatgaga

SEQ ID NO: 148467 - DNA, 19 bp, Homo sapiens
  siRNA target sequence for MMP11 (NM_005940.2,850-868).
gatagacaccaatgagatt

SEQ ID NO: 148468 - DNA, 19 bp, Homo sapiens
  siRNA target sequence for MMP11 (NM_005940.2,935-953).
cgaggcgagctctttttct

SEQ ID NO: 148469 - DNA, 19 bp, Homo sapiens
  siRNA target sequence for MMP11 (NM_005940.2,936-954).
gaggcgagctctttttctt

SEQ ID NO: 148470 - DNA, 19 bp, Homo sapiens
  siRNA target sequence for MMP11 (NM_005940.2,938-956).
ggcgagctctttttcttca

SEQ ID NO: 148471 - DNA, 19 bp, Homo sapiens
  siRNA target sequence for MMP11 (NM_005940.2,939-957).
gcgagctctttttcttcaa

SEQ ID NO: 148472 - DNA, 19 bp, Homo sapiens
  siRNA target sequence for MMP11 (NM_005940.2,1110-1128).
gggtgtacgacggtgaaaa

SEQ ID NO: 148473 - DNA, 19 bp, Homo sapiens
  siRNA target sequence for MMP11 (NM_005940.2,1205-1223).
cccgagaagaacaagatct

SEQ ID NO: 148474 - DNA, 19 bp, Homo sapiens
  siRNA target sequence for MMP11 (NM_005940.2,1380-1398).
gcctctactggaagtttga

SEQ ID NO: 148475 - DNA, 19 bp, Homo sapiens
  siRNA target sequence for MMP11 (NM_005940.2,1438-1456).
cgtgggtcctgacttcttt

SEQ ID NO: 148476 - DNA, 19 bp, Homo sapiens
  siRNA target sequence for MMP12 (NM_002426.1,64-82).
cccctgaacagctctacaa

SEQ ID NO: 148477 - DNA, 19 bp, Homo sapiens
  siRNA target sequence for MMP12 (NM_002426.1,74-92).
gctctacaagcctggaaaa

SEQ ID NO: 148478 - DNA, 19 bp, Homo sapiens
  siRNA target sequence for MMP12 (NM_002426.1,103-121).
ctatttggtgagagatact

SEQ ID NO: 148479 - DNA, 19 bp, Homo sapiens
  siRNA target sequence for MMP12 (NM_002426.1,109-127).
ggtgagagatacttagaaa

SEQ ID NO: 148480 - DNA, 19 bp, Homo sapiens
  siRNA target sequence for MMP12 (NM_002426.1,110-128).
gtgagagatacttagaaaa

SEQ ID NO: 148481 - DNA, 19 bp, Homo sapiens
  siRNA target sequence for MMP12 (NM_002426.1,137-155).
gccttgagataaacaaact

SEQ ID NO: 148482 - DNA, 19 bp, Homo sapiens
  siRNA target sequence for MMP12 (NM_002426.1,331-349).
cccgtatggaggaaacatt

SEQ ID NO: 148483 - DNA, 19 bp, Homo sapiens
  siRNA target sequence for MMP12 (NM_002426.1,332-350).
ccgtatggaggaaacatta

SEQ ID NO: 148484 - DNA, 19 bp, Homo sapiens
  siRNA target sequence for MMP12 (NM_002426.1,333-351).
cgtatggaggaaacattat

SEQ ID NO: 148485 - DNA, 19 bp, Homo sapiens
  siRNA target sequence for MMP12 (NM_002426.1,334-352).
gtatggaggaaacattata

SEQ ID NO: 148486 - DNA, 19 bp, Homo sapiens
  siRNA target sequence for MMP12 (NM_002426.1,360-378).
cagaatcaataattacaca

SEQ ID NO: 148487 - DNA, 19 bp, Homo sapiens
  siRNA target sequence for MMP12 (NM_002426.1,415-433).
cggaaagctttccaagtat

SEQ ID NO: 148488 - DNA, 19 bp, Homo sapiens
  siRNA target sequence for MMP12 (NM_002426.1,442-460).
gttacccccttgaaattca

SEQ ID NO: 148489 - DNA, 19 bp, Homo sapiens
  siRNA target sequence for MMP12 (NM_002426.1,518-536).
gagacttccatgcttttga

SEQ ID NO: 148490 - DNA, 19 bp, Homo sapiens
  siRNA target sequence for MMP12 (NM_002426.1,612-630).
cgaattctggactacacat

SEQ ID NO: 148491 - DNA, 19 bp, Homo sapiens
  siRNA target sequence for MMP12 (NM_002426.1,613-631).
gaattctggactacacatt

SEQ ID NO: 148492 - DNA, 19 bp, Homo sapiens
  siRNA target sequence for MMP12 (NM_002426.1,666-684).
cgagattggccattcctta

SEQ ID NO: 148493 - DNA, 19 bp, Homo sapiens
  siRNA target sequence for MMP12 (NM_002426.1,851-869).
ctctctgtgaccccaattt

SEQ ID NO: 148494 - DNA, 19 bp, Homo sapiens
  siRNA target sequence for MMP12 (NM_002426.1,883-901).
gtcactaccgtgggaaata

SEQ ID NO: 148495 - DNA, 19 bp, Homo sapiens
  siRNA target sequence for MMP12 (NM_002426.1,887-905).
ctaccgtgggaaataagat

SEQ ID NO: 148496 - DNA, 19 bp, Homo sapiens
  siRNA target sequence for MMP12 (NM_002426.1,950-968).
gaccaaagaccagtgttaa

SEQ ID NO: 148497 - DNA, 19 bp, Homo sapiens
  siRNA target sequence for MMP12 (NM_002426.1,952-970).
ccaaagaccagtgttaatt

SEQ ID NO: 148498 - DNA, 19 bp, Homo sapiens
  siRNA target sequence for MMP12 (NM_002426.1,1068-1086).
ctggttaattagcaattta

SEQ ID NO: 148499 - DNA, 19 bp, Homo sapiens
  siRNA target sequence for MMP12 (NM_002426.1,1105-1123).
cccaagagcatacattctt

SEQ ID NO: 148500 - DNA, 19 bp, Homo sapiens
  siRNA target sequence for MMP12 (NM_002426.1,1106-1124).
ccaagagcatacattcttt

SEQ ID NO: 148501 - DNA, 19 bp, Homo sapiens
  siRNA target sequence for MMP12 (NM_002426.1,1184-1202).
ggacctacttctttgtaga

SEQ ID NO: 148502 - DNA, 19 bp, Homo sapiens
  siRNA target sequence for MMP12 (NM_002426.1,1185-1203).
gacctacttctttgtagat

SEQ ID NO: 148503 - DNA, 19 bp, Homo sapiens
  siRNA target sequence for MMP12 (NM_002426.1,1249-1267).
ggttatcccaaactgatta

SEQ ID NO: 148504 - DNA, 19 bp, Homo sapiens
  siRNA target sequence for MMP12 (NM_002426.1,1279-1297).
caaggaatcgggcctaaaa

SEQ ID NO: 148505 - DNA, 19 bp, Homo sapiens
  siRNA target sequence for MMP12 (NM_002426.1,1283-1301).
gaatcgggcctaaaattga

SEQ ID NO: 148506 - DNA, 19 bp, Homo sapiens
  siRNA target sequence for MMP12 (NM_002426.1,1338-1356).
cttccaaggatctaaccaa

SEQ ID NO: 148507 - DNA, 19 bp, Homo sapiens
  siRNA target sequence for MMP12 (NM_002426.1,1377-1395).
ccaacgtatcaccaaaaca

SEQ ID NO: 148508 - DNA, 19 bp, Homo sapiens
  siRNA target sequence for MMP13 (NM_002427.2,146-164).
gagcgctacctgagatcat

SEQ ID NO: 148509 - DNA, 19 bp, Homo sapiens
  siRNA target sequence for MMP13 (NM_002427.2,149-167).
cgctacctgagatcatact

SEQ ID NO: 148510 - DNA, 19 bp, Homo sapiens
  siRNA target sequence for MMP13 (NM_002427.2,162-180).
catactaccatcctacaaa

SEQ ID NO: 148511 - DNA, 19 bp, Homo sapiens
  siRNA target sequence for MMP13 (NM_002427.2,269-287).
ggcaaacttgacgataaca

SEQ ID NO: 148512 - DNA, 19 bp, Homo sapiens
  siRNA target sequence for MMP13 (NM_002427.2,350-368).
cctcgaactcttaaatggt

SEQ ID NO: 148513 - DNA, 19 bp, Homo sapiens
  siRNA target sequence for MMP13 (NM_002427.2,406-424).
ccctgatatgactcattct

SEQ ID NO: 148514 - DNA, 19 bp, Homo sapiens
  siRNA target sequence for MMP13 (NM_002427.2,408-426).
ctgatatgactcattctga

SEQ ID NO: 148515 - DNA, 19 bp, Homo sapiens
  siRNA target sequence for MMP13 (NM_002427.2,417-435).
ctcattctgaagtcgaaaa

SEQ ID NO: 148516 - DNA, 19 bp, Homo sapiens
  siRNA target sequence for MMP13 (NM_002427.2,442-460).
caaaaaagccttcaaagtt

SEQ ID NO: 148517 - DNA, 19 bp, Homo sapiens
  siRNA target sequence for MMP13 (NM_002427.2,466-484).
cgatgtaactcctctgaat

SEQ ID NO: 148518 - DNA, 19 bp, Homo sapiens
  siRNA target sequence for MMP13 (NM_002427.2,517-535).
catgatctcttttggaatt

SEQ ID NO: 148519 - DNA, 19 bp, Homo sapiens
  siRNA target sequence for MMP13 (NM_002427.2,638-656).
gatgaaacctggacaagta

SEQ ID NO: 148520 - DNA, 19 bp, Homo sapiens
  siRNA target sequence for MMP13 (NM_002427.2,657-675).
gttccaaaggctacaactt

SEQ ID NO: 148521 - DNA, 19 bp, Homo sapiens
  siRNA target sequence for MMP13 (NM_002427.2,660-678).
ccaaaggctacaacttgtt

SEQ ID NO: 148522 - DNA, 19 bp, Homo sapiens
  siRNA target sequence for MMP13 (NM_002427.2,737-755).
ggagcactcatgtttccta

SEQ ID NO: 148523 - DNA, 19 bp, Homo sapiens
  siRNA target sequence for MMP13 (NM_002427.2,738-756).
gagcactcatgtttcctat

SEQ ID NO: 148524 - DNA, 19 bp, Homo sapiens
  siRNA target sequence for MMP13 (NM_002427.2,741-759).
cactcatgtttcctatcta

SEQ ID NO: 148525 - DNA, 19 bp, Homo sapiens
  siRNA target sequence for MMP13 (NM_002427.2,846-864).
ccaaccctaaacatccaaa

SEQ ID NO: 148526 - DNA, 19 bp, Homo sapiens
  siRNA target sequence for MMP13 (NM_002427.2,860-878).
ccaaaaacgccagacaaat

SEQ ID NO: 148527 - DNA, 19 bp, Homo sapiens
  siRNA target sequence for MMP13 (NM_002427.2,917-935).
cgaggagaaacaatgatct

SEQ ID NO: 148528 - DNA, 19 bp, Homo sapiens
  siRNA target sequence for MMP13 (NM_002427.2,920-938).
ggagaaacaatgatcttta

SEQ ID NO: 148529 - DNA, 19 bp, Homo sapiens
  siRNA target sequence for MMP13 (NM_002427.2,980-998).
gcggagctgtttttaacga

SEQ ID NO: 148530 - DNA, 19 bp, Homo sapiens
  siRNA target sequence for MMP13 (NM_002427.2,981-999).
cggagctgtttttaacgaa

SEQ ID NO: 148531 - DNA, 19 bp, Homo sapiens
  siRNA target sequence for MMP13 (NM_002427.2,1083-1101).
gaaaattttgggctcttaa

SEQ ID NO: 148532 - DNA, 19 bp, Homo sapiens
  siRNA target sequence for MMP13 (NM_002427.2,1092-1110).
gggctcttaatggttatga

SEQ ID NO: 148533 - DNA, 19 bp, Homo sapiens
  siRNA target sequence for MMP13 (NM_002427.2,1117-1135).
ggaaggttatcccaaaaaa

SEQ ID NO: 148534 - DNA, 19 bp, Homo sapiens
  siRNA target sequence for MMP13 (NM_002427.2,1140-1158).
ctgaactgggtcttccaaa

SEQ ID NO: 148535 - DNA, 19 bp, Homo sapiens
  siRNA target sequence for MMP13 (NM_002427.2,1232-1250).
gtctggagatatgatgata

SEQ ID NO: 148536 - DNA, 19 bp, Homo sapiens
  siRNA target sequence for MMP13 (NM_002427.2,1234-1252).
ctggagatatgatgatact

SEQ ID NO: 148537 - DNA, 19 bp, Homo sapiens
  siRNA target sequence for MMP13 (NM_002427.2,1236-1254).
ggagatatgatgatactaa

SEQ ID NO: 148538 - DNA, 19 bp, Homo sapiens
  siRNA target sequence for MMP13 (NM_002427.2,1244-1262).
gatgatactaaccatatta

SEQ ID NO: 148539 - DNA, 19 bp, Homo sapiens
  siRNA target sequence for MMP13 (NM_002427.2,1273-1291).
ctatccgagactaatagaa

SEQ ID NO: 148540 - DNA, 19 bp, Homo sapiens
  siRNA target sequence for MMP13 (NM_002427.2,1278-1296).
cgagactaatagaagaaga

SEQ ID NO: 148541 - DNA, 19 bp, Homo sapiens
  siRNA target sequence for MMP13 (NM_002427.2,1281-1299).
gactaatagaagaagactt

SEQ ID NO: 148542 - DNA, 19 bp, Homo sapiens
  siRNA target sequence for MMP13 (NM_002427.2,1360-1378).
caacggacccatacagttt

SEQ ID NO: 148543 - DNA, 19 bp, Homo sapiens
  siRNA target sequence for MMP13 (NM_002427.2,1363-1381).
cggacccatacagtttgaa

SEQ ID NO: 148544 - DNA, 19 bp, Homo sapiens
  siRNA target sequence for MMP13 (NM_002427.2,1367-1385).
cccatacagtttgaataca

SEQ ID NO: 148545 - DNA, 19 bp, Homo sapiens
  siRNA target sequence for MMP13 (NM_002427.2,1390-1408).
ctggagtaaccgtattgtt

SEQ ID NO: 148546 - DNA, 19 bp, Homo sapiens
  siRNA target sequence for MMP13 (NM_002427.2,1409-1427).
cgcgtcatgccagcaaatt

SEQ ID NO: 148547 - DNA, 19 bp, Homo sapiens
  siRNA target sequence for MMP13 (NM_002427.2,1414-1432).
catgccagcaaattccatt

SEQ ID NO: 148548 - DNA, 19 bp, Homo sapiens
  siRNA target sequence for MMP2 (NM_004530.1,380-398).
ccgtcgcccatcatcaagt

SEQ ID NO: 148549 - DNA, 19 bp, Homo sapiens
  siRNA target sequence for MMP2 (NM_004530.1,381-399).
cgtcgcccatcatcaagtt

SEQ ID NO: 148550 - DNA, 19 bp, Homo sapiens
  siRNA target sequence for MMP2 (NM_004530.1,416-434).
cccaaaacggacaaagagt

SEQ ID NO: 148551 - DNA, 19 bp, Homo sapiens
  siRNA target sequence for MMP2 (NM_004530.1,494-512).
gtgctgaaggacacactaa

SEQ ID NO: 148552 - DNA, 19 bp, Homo sapiens
  siRNA target sequence for MMP2 (NM_004530.1,540-558).
cccagacaggtgatcttga

SEQ ID NO: 148553 - DNA, 19 bp, Homo sapiens
  siRNA target sequence for MMP2 (NM_004530.1,548-566).
ggtgatcttgaccagaata

SEQ ID NO: 148554 - DNA, 19 bp, Homo sapiens
  siRNA target sequence for MMP2 (NM_004530.1,551-569).
gatcttgaccagaatacca

SEQ ID NO: 148555 - DNA, 19 bp, Homo sapiens
  siRNA target sequence for MMP2 (NM_004530.1,605-623).
gatgtggccaactacaact

SEQ ID NO: 148556 - DNA, 19 bp, Homo sapiens
  siRNA target sequence for MMP2 (NM_004530.1,608-626).
gtggccaactacaacttct

SEQ ID NO: 148557 - DNA, 19 bp, Homo sapiens
  siRNA target sequence for MMP2 (NM_004530.1,751-769).
gaccccactgcggttttct

SEQ ID NO: 148558 - DNA, 19 bp, Homo sapiens
  siRNA target sequence for MMP2 (NM_004530.1,760-778).
gcggttttctcgaatccat

SEQ ID NO: 148559 - DNA, 19 bp, Homo sapiens
  siRNA target sequence for MMP2 (NM_004530.1,987-1005).
gcaagttccccttcttgtt

SEQ ID NO: 148560 - DNA, 19 bp, Homo sapiens
  siRNA target sequence for MMP2 (NM_004530.1,1068-1086).
ccaccacctacaactttga

SEQ ID NO: 148561 - DNA, 19 bp, Homo sapiens
  siRNA target sequence for MMP2 (NM_004530.1,1177-1195).
cttccagggcacatcctat

SEQ ID NO: 148562 - DNA, 19 bp, Homo sapiens
  siRNA target sequence for MMP2 (NM_004530.1,1181-1199).
cagggcacatcctatgaca

SEQ ID NO: 148563 - DNA, 19 bp, Homo sapiens
  siRNA target sequence for MMP2 (NM_004530.1,1545-1563).
ccctgatggcacccattta

SEQ ID NO: 148564 - DNA, 19 bp, Homo sapiens
  siRNA target sequence for MMP2 (NM_004530.1,1695-1713).
gcaaacaggacattgtatt

SEQ ID NO: 148565 - DNA, 19 bp, Homo sapiens
  siRNA target sequence for MMP2 (NM_004530.1,1696-1714).
caaacaggacattgtattt

SEQ ID NO: 148566 - DNA, 19 bp, Homo sapiens
  siRNA target sequence for MMP2 (NM_004530.1,1834-1852).
gctcccggaaaagattgat

SEQ ID NO: 148567 - DNA, 19 bp, Homo sapiens
  siRNA target sequence for MMP2 (NM_004530.1,1989-2007).
gagtggatgccgcctttaa

SEQ ID NO: 148568 - DNA, 19 bp, Homo sapiens
  siRNA target sequence for MMP2 (NM_004530.1,2220-2238).
gtctgaagagcgtgaagtt

SEQ ID NO: 148569 - DNA, 19 bp, Homo sapiens
  siRNA target sequence for MMP3 (NM_002422.2,66-84).
gaagagtcttccaatccta

SEQ ID NO: 148570 - DNA, 19 bp, Homo sapiens
  siRNA target sequence for MMP3 (NM_002422.2,108-126).
ctcagcctatccattggat

SEQ ID NO: 148571 - DNA, 19 bp, Homo sapiens
  siRNA target sequence for MMP3 (NM_002422.2,152-170).
gcatgaaccttgttcagaa

SEQ ID NO: 148572 - DNA, 19 bp, Homo sapiens
  siRNA target sequence for MMP3 (NM_002422.2,186-204).
ctacgacctcaaaaaagat

SEQ ID NO: 148573 - DNA, 19 bp, Homo sapiens
  siRNA target sequence for MMP3 (NM_002422.2,349-367).
gatgttggtcacttcagaa

SEQ ID NO: 148574 - DNA, 19 bp, Homo sapiens
  siRNA target sequence for MMP3 (NM_002422.2,679-697).
gatacaacagggaccaatt

SEQ ID NO: 148575 - DNA, 19 bp, Homo sapiens
  siRNA target sequence for MMP3 (NM_002422.2,811-829).
cgcctgtctcaagatgata

SEQ ID NO: 148576 - DNA, 19 bp, Homo sapiens
  siRNA target sequence for MMP3 (NM_002422.2,971-989).
ggggagaaatcctgatctt

SEQ ID NO: 148577 - DNA, 19 bp, Homo sapiens
  siRNA target sequence for MMP3 (NM_002422.2,1026-1044).
gcttgaacctgaattgcat

SEQ ID NO: 148578 - DNA, 19 bp, Homo sapiens
  siRNA target sequence for MMP3 (NM_002422.2,1036-1054).
gaattgcatttgatctctt

SEQ ID NO: 148579 - DNA, 19 bp, Homo sapiens
  siRNA target sequence for MMP3 (NM_002422.2,1079-1097).
gcgtggatgccgcatatga

SEQ ID NO: 148580 - DNA, 19 bp, Homo sapiens
  siRNA target sequence for MMP3 (NM_002422.2,1080-1098).
cgtggatgccgcatatgaa

SEQ ID NO: 148581 - DNA, 19 bp, Homo sapiens
  siRNA target sequence for MMP3 (NM_002422.2,1087-1105).
gccgcatatgaagttacta

SEQ ID NO: 148582 - DNA, 19 bp, Homo sapiens
  siRNA target sequence for MMP3 (NM_002422.2,1103-1121).
ctagcaaggacctcgtttt

SEQ ID NO: 148583 - DNA, 19 bp, Homo sapiens
  siRNA target sequence for MMP3 (NM_002422.2,1211-1229).
caaccgtgaggaaaatcga

SEQ ID NO: 148584 - DNA, 19 bp, Homo sapiens
  siRNA target sequence for MMP3 (NM_002422.2,1227-1245).
cgatgcagccatttctgat

SEQ ID NO: 148585 - DNA, 19 bp, Homo sapiens
  siRNA target sequence for MMP3 (NM_002422.2,1228-1246).
gatgcagccatttctgata

SEQ ID NO: 148586 - DNA, 19 bp, Homo sapiens
  siRNA target sequence for MMP3 (NM_002422.2,1232-1250).
cagccatttctgataagga

SEQ ID NO: 148587 - DNA, 19 bp, Homo sapiens
  siRNA target sequence for MMP3 (NM_002422.2,1335-1353).
gcaaatagctgaagacttt

SEQ ID NO: 148588 - DNA, 19 bp, Homo sapiens
  siRNA target sequence for MMP3 (NM_002422.2,1348-1366).
gactttccagggattgact

SEQ ID NO: 148589 - DNA, 19 bp, Homo sapiens
  siRNA target sequence for MMP3 (NM_002422.2,1354-1372).
ccagggattgactcaaaga

SEQ ID NO: 148590 - DNA, 19 bp, Homo sapiens
  siRNA target sequence for MMP3 (NM_002422.2,1358-1376).
ggattgactcaaagattga

SEQ ID NO: 148591 - DNA, 19 bp, Homo sapiens
  siRNA target sequence for MMP3 (NM_002422.2,1359-1377).
gattgactcaaagattgat

SEQ ID NO: 148592 - DNA, 19 bp, Homo sapiens
  siRNA target sequence for MMP7 (NM_002423.2,147-165).
caggctcaggactatctca

SEQ ID NO: 148593 - DNA, 19 bp, Homo sapiens
  siRNA target sequence for MMP7 (NM_002423.2,222-240).
ctcaaggagatgcaaaaat

SEQ ID NO: 148594 - DNA, 19 bp, Homo sapiens
  siRNA target sequence for MMP7 (NM_002423.2,242-260).
ctttggcctacctataact

SEQ ID NO: 148595 - DNA, 19 bp, Homo sapiens
  siRNA target sequence for MMP7 (NM_002423.2,252-270).
cctataactggaatgttaa

SEQ ID NO: 148596 - DNA, 19 bp, Homo sapiens
  siRNA target sequence for MMP7 (NM_002423.2,272-290).
ctcccgcgtcatagaaata

SEQ ID NO: 148597 - DNA, 19 bp, Homo sapiens
  siRNA target sequence for MMP7 (NM_002423.2,274-292).
cccgcgtcatagaaataat

SEQ ID NO: 148598 - DNA, 19 bp, Homo sapiens
  siRNA target sequence for MMP7 (NM_002423.2,315-333).
ccagatgttgcagaatact

SEQ ID NO: 148599 - DNA, 19 bp, Homo sapiens
  siRNA target sequence for MMP7 (NM_002423.2,372-390).
gtcacctacaggatcgtat

SEQ ID NO: 148600 - DNA, 19 bp, Homo sapiens
  siRNA target sequence for MMP7 (NM_002423.2,377-395).
ctacaggatcgtatcatat

SEQ ID NO: 148601 - DNA, 19 bp, Homo sapiens
  siRNA target sequence for MMP7 (NM_002423.2,380-398).
caggatcgtatcatatact

SEQ ID NO: 148602 - DNA, 19 bp, Homo sapiens
  siRNA target sequence for MMP7 (NM_002423.2,399-417).
cgagacttaccgcatatta

SEQ ID NO: 148603 - DNA, 19 bp, Homo sapiens
  siRNA target sequence for MMP7 (NM_002423.2,470-488).
cctgcatttcaggaaagtt

SEQ ID NO: 148604 - DNA, 19 bp, Homo sapiens
  siRNA target sequence for MMP7 (NM_002423.2,493-511).
ggggaactgctgacatcat

SEQ ID NO: 148605 - DNA, 19 bp, Homo sapiens
  siRNA target sequence for MMP7 (NM_002423.2,674-692).
gtatgctgcaactcatgaa

SEQ ID NO: 148606 - DNA, 19 bp, Homo sapiens
  siRNA target sequence for MMP7 (NM_002423.2,743-761).
gtatccaacctatggaaat

SEQ ID NO: 148607 - DNA, 19 bp, Homo sapiens
  siRNA target sequence for MMP7 (NM_002423.2,762-780).
ggagatccccaaaatttta

SEQ ID NO: 148608 - DNA, 19 bp, Homo sapiens
  siRNA target sequence for MMP7 (NM_002423.2,763-781).
gagatccccaaaattttaa

SEQ ID NO: 148609 - DNA, 19 bp, Homo sapiens
  siRNA target sequence for MMP8 (NM_002424.1,201-219).
ccaagcaaccagtatcagt

SEQ ID NO: 148610 - DNA, 19 bp, Homo sapiens
  siRNA target sequence for MMP8 (NM_002424.1,226-244).
ggaagaatggcactaatgt

SEQ ID NO: 148611 - DNA, 19 bp, Homo sapiens
  siRNA target sequence for MMP8 (NM_002424.1,238-256).
ctaatgtgatcgttgaaaa

SEQ ID NO: 148612 - DNA, 19 bp, Homo sapiens
  siRNA target sequence for MMP8 (NM_002424.1,243-261).
gtgatcgttgaaaagctta

SEQ ID NO: 148613 - DNA, 19 bp, Homo sapiens
  siRNA target sequence for MMP8 (NM_002424.1,245-263).
gatcgttgaaaagcttaaa

SEQ ID NO: 148614 - DNA, 19 bp, Homo sapiens
  siRNA target sequence for MMP8 (NM_002424.1,272-290).
gcgattttttgggttgaat

SEQ ID NO: 148615 - DNA, 19 bp, Homo sapiens
  siRNA target sequence for MMP8 (NM_002424.1,412-430).
cctacaggattcgaaacta

SEQ ID NO: 148616 - DNA, 19 bp, Homo sapiens
  siRNA target sequence for MMP8 (NM_002424.1,413-431).
ctacaggattcgaaactat

SEQ ID NO: 148617 - DNA, 19 bp, Homo sapiens
  siRNA target sequence for MMP8 (NM_002424.1,526-544).
cacagggagaggcagatat

SEQ ID NO: 148618 - DNA, 19 bp, Homo sapiens
  siRNA target sequence for MMP8 (NM_002424.1,532-550).
gagaggcagatatcaacat

SEQ ID NO: 148619 - DNA, 19 bp, Homo sapiens
  siRNA target sequence for MMP8 (NM_002424.1,572-590).
cggtgacaattctccattt

SEQ ID NO: 148620 - DNA, 19 bp, Homo sapiens
  siRNA target sequence for MMP8 (NM_002424.1,654-672).
cattttgatgccgaagaaa

SEQ ID NO: 148621 - DNA, 19 bp, Homo sapiens
  siRNA target sequence for MMP8 (NM_002424.1,685-703).
cctccgcaaattacaactt

SEQ ID NO: 148622 - DNA, 19 bp, Homo sapiens
  siRNA target sequence for MMP8 (NM_002424.1,688-706).
ccgcaaattacaacttgtt

SEQ ID NO: 148623 - DNA, 19 bp, Homo sapiens
  siRNA target sequence for MMP8 (NM_002424.1,761-779).
ccctggtgccttgatgtat

SEQ ID NO: 148624 - DNA, 19 bp, Homo sapiens
  siRNA target sequence for MMP8 (NM_002424.1,770-788).
cttgatgtatcccaactat

SEQ ID NO: 148625 - DNA, 19 bp, Homo sapiens
  siRNA target sequence for MMP8 (NM_002424.1,809-827).
ctactcactccctcaagat

SEQ ID NO: 148626 - DNA, 19 bp, Homo sapiens
  siRNA target sequence for MMP8 (NM_002424.1,937-955).
ccacactccgtggagaaat

SEQ ID NO: 148627 - DNA, 19 bp, Homo sapiens
  siRNA target sequence for MMP8 (NM_002424.1,942-960).
ctccgtggagaaatacttt

SEQ ID NO: 148628 - DNA, 19 bp, Homo sapiens
  siRNA target sequence for MMP8 (NM_002424.1,999-1017).
ctacaaagagtcgaaatga

SEQ ID NO: 148629 - DNA, 19 bp, Homo sapiens
  siRNA target sequence for MMP8 (NM_002424.1,1121-1139).
ggctctgagtggctatgat

SEQ ID NO: 148630 - DNA, 19 bp, Homo sapiens
  siRNA target sequence for MMP8 (NM_002424.1,1155-1173).
cccaaggatatatcaaact

SEQ ID NO: 148631 - DNA, 19 bp, Homo sapiens
  siRNA target sequence for MMP8 (NM_002424.1,1186-1204).
gcagcgtccaagcaattga

SEQ ID NO: 148632 - DNA, 19 bp, Homo sapiens
  siRNA target sequence for MMP8 (NM_002424.1,1231-1249).
catacttctttgtaaatga

SEQ ID NO: 148633 - DNA, 19 bp, Homo sapiens
  siRNA target sequence for MMP8 (NM_002424.1,1256-1274).
ctggagatatgataaccaa

SEQ ID NO: 148634 - DNA, 19 bp, Homo sapiens
  siRNA target sequence for MMP8 (NM_002424.1,1261-1279).
gatatgataaccaaagaca

SEQ ID NO: 148635 - DNA, 19 bp, Homo sapiens
  siRNA target sequence for MMP8 (NM_002424.1,1393-1411).
gatattacgcatttgatct

SEQ ID NO: 148636 - DNA, 19 bp, Homo sapiens
  siRNA target sequence for MMP8 (NM_002424.1,1400-1418).
cgcatttgatcttattgct

SEQ ID NO: 148637 - DNA, 19 bp, Homo sapiens
  siRNA target sequence for MMP8 (NM_002424.1,1410-1428).
cttattgctcagagagtta

SEQ ID NO: 148638 - DNA, 19 bp, Homo sapiens
  siRNA target sequence for MRC1 (NM_002438.1,161-179).
ctggacaccaggcaatttt

SEQ ID NO: 148639 - DNA, 19 bp, Homo sapiens
  siRNA target sequence for MRC1 (NM_002438.1,168-186).
ccaggcaatttttaatcta

SEQ ID NO: 148640 - DNA, 19 bp, Homo sapiens
  siRNA target sequence for MRC1 (NM_002438.1,279-297).
gatgggtgtccgaatctca

SEQ ID NO: 148641 - DNA, 19 bp, Homo sapiens
  siRNA target sequence for MRC1 (NM_002438.1,283-301).
ggtgtccgaatctcagatt

SEQ ID NO: 148642 - DNA, 19 bp, Homo sapiens
  siRNA target sequence for MRC1 (NM_002438.1,284-302).
gtgtccgaatctcagatta

SEQ ID NO: 148643 - DNA, 19 bp, Homo sapiens
  siRNA target sequence for MRC1 (NM_002438.1,289-307).
cgaatctcagattatgagt

SEQ ID NO: 148644 - DNA, 19 bp, Homo sapiens
  siRNA target sequence for MRC1 (NM_002438.1,326-344).
ctgggagtgccatcaaaaa

SEQ ID NO: 148645 - DNA, 19 bp, Homo sapiens
  siRNA target sequence for MRC1 (NM_002438.1,328-346).
gggagtgccatcaaaaaca

SEQ ID NO: 148646 - DNA, 19 bp, Homo sapiens
  siRNA target sequence for MRC1 (NM_002438.1,352-370).
ggttgctatcactctctat

SEQ ID NO: 148647 - DNA, 19 bp, Homo sapiens
  siRNA target sequence for MRC1 (NM_002438.1,430-448).
gatcaaaggagaagattta

SEQ ID NO: 148648 - DNA, 19 bp, Homo sapiens
  siRNA target sequence for MRC1 (NM_002438.1,530-548).
ggaaccacagacaatctgt

SEQ ID NO: 148649 - DNA, 19 bp, Homo sapiens
  siRNA target sequence for MRC1 (NM_002438.1,547-565).
gtgctccagaggttatgaa

SEQ ID NO: 148650 - DNA, 19 bp, Homo sapiens
  siRNA target sequence for MRC1 (NM_002438.1,606-624).
gtgcattcccgttcaagtt

SEQ ID NO: 148651 - DNA, 19 bp, Homo sapiens
  siRNA target sequence for MRC1 (NM_002438.1,609-627).
cattcccgttcaagtttga

SEQ ID NO: 148652 - DNA, 19 bp, Homo sapiens
  siRNA target sequence for MRC1 (NM_002438.1,685-703).
cggaaccactactgactat

SEQ ID NO: 148653 - DNA, 19 bp, Homo sapiens
  siRNA target sequence for MRC1 (NM_002438.1,687-705).
gaaccactactgactatga

SEQ ID NO: 148654 - DNA, 19 bp, Homo sapiens
  siRNA target sequence for MRC1 (NM_002438.1,710-728).
gacaagctatttggatatt

SEQ ID NO: 148655 - DNA, 19 bp, Homo sapiens
  siRNA target sequence for MRC1 (NM_002438.1,930-948).
gactctggattggacttaa

SEQ ID NO: 148656 - DNA, 19 bp, Homo sapiens
  siRNA target sequence for MRC1 (NM_002438.1,932-950).
ctctggattggacttaaca

SEQ ID NO: 148657 - DNA, 19 bp, Homo sapiens
  siRNA target sequence for MRC1 (NM_002438.1,986-1004).
cgcagtcctttccgatatt

SEQ ID NO: 148658 - DNA, 19 bp, Homo sapiens
  siRNA target sequence for MRC1 (NM_002438.1,987-1005).
gcagtcctttccgatattt

SEQ ID NO: 148659 - DNA, 19 bp, Homo sapiens
  siRNA target sequence for MRC1 (NM_002438.1,990-1008).
gtcctttccgatatttgaa

SEQ ID NO: 148660 - DNA, 19 bp, Homo sapiens
  siRNA target sequence for MRC1 (NM_002438.1,1129-1147).
gggcaacaccactttaaat

SEQ ID NO: 148661 - DNA, 19 bp, Homo sapiens
  siRNA target sequence for MRC1 (NM_002438.1,1135-1153).
caccactttaaattctttt

SEQ ID NO: 148662 - DNA, 19 bp, Homo sapiens
  siRNA target sequence for MRC1 (NM_002438.1,1206-1224).
cgtatgccggtcactgtta

SEQ ID NO: 148663 - DNA, 19 bp, Homo sapiens
  siRNA target sequence for MRC1 (NM_002438.1,1212-1230).
ccggtcactgttacaagat

SEQ ID NO: 148664 - DNA, 19 bp, Homo sapiens
  siRNA target sequence for MRC1 (NM_002438.1,1213-1231).
cggtcactgttacaagatt

SEQ ID NO: 148665 - DNA, 19 bp, Homo sapiens
  siRNA target sequence for MRC1 (NM_002438.1,1286-1304).
ggcggtgacctcacaagta

SEQ ID NO: 148666 - DNA, 19 bp, Homo sapiens
  siRNA target sequence for MRC1 (NM_002438.1,1287-1305).
gcggtgacctcacaagtat

SEQ ID NO: 148667 - DNA, 19 bp, Homo sapiens
  siRNA target sequence for MRC1 (NM_002438.1,1315-1333).
cgaggaattggactttatt

SEQ ID NO: 148668 - DNA, 19 bp, Homo sapiens
  siRNA target sequence for MRC1 (NM_002438.1,1352-1370).
gagccaaatgacgaattgt

SEQ ID NO: 148669 - DNA, 19 bp, Homo sapiens
  siRNA target sequence for MRC1 (NM_002438.1,1372-1390).
gatcggcttaaatgacatt

SEQ ID NO: 148670 - DNA, 19 bp, Homo sapiens
  siRNA target sequence for MRC1 (NM_002438.1,1377-1395).
gcttaaatgacattaagat

SEQ ID NO: 148671 - DNA, 19 bp, Homo sapiens
  siRNA target sequence for MRC1 (NM_002438.1,1385-1403).
gacattaagattcaaatgt

SEQ ID NO: 148672 - DNA, 19 bp, Homo sapiens
  siRNA target sequence for MRC1 (NM_002438.1,1421-1439).
gggacccctgtaacgttta

SEQ ID NO: 148673 - DNA, 19 bp, Homo sapiens
  siRNA target sequence for MRC1 (NM_002438.1,1425-1443).
cccctgtaacgtttaccaa

SEQ ID NO: 148674 - DNA, 19 bp, Homo sapiens
  siRNA target sequence for MRC1 (NM_002438.1,1426-1444).
ccctgtaacgtttaccaaa

SEQ ID NO: 148675 - DNA, 19 bp, Homo sapiens
  siRNA target sequence for MRC1 (NM_002438.1,1637-1655).
cacttttactgctatatga

SEQ ID NO: 148676 - DNA, 19 bp, Homo sapiens
  siRNA target sequence for MRC1 (NM_002438.1,1658-1676).
ggacatacgctttcaacat

SEQ ID NO: 148677 - DNA, 19 bp, Homo sapiens
  siRNA target sequence for MRC1 (NM_002438.1,1659-1677).
gacatacgctttcaacatt

SEQ ID NO: 148678 - DNA, 19 bp, Homo sapiens
  siRNA target sequence for MRC1 (NM_002438.1,1685-1703).
gcaaaccaaacctgtaata

SEQ ID NO: 148679 - DNA, 19 bp, Homo sapiens
  siRNA target sequence for MRC1 (NM_002438.1,1698-1716).
gtaataatgagaatgctta

SEQ ID NO: 148680 - DNA, 19 bp, Homo sapiens
  siRNA target sequence for MRC1 (NM_002438.1,1745-1763).
caagccttcctgactagtt

SEQ ID NO: 148681 - DNA, 19 bp, Homo sapiens
  siRNA target sequence for MRC1 (NM_002438.1,1794-1812).
ggacaggactttcagatat

SEQ ID NO: 148682 - DNA, 19 bp, Homo sapiens
  siRNA target sequence for MRC1 (NM_002438.1,1861-1879).
cacccactggaattcagat

SEQ ID NO: 148683 - DNA, 19 bp, Homo sapiens
  siRNA target sequence for MRC1 (NM_002438.1,1898-1916).
gggtgtgttgccatgagaa

SEQ ID NO: 148684 - DNA, 19 bp, Homo sapiens
  siRNA target sequence for MRC1 (NM_002438.1,1928-1946).
gggggcttatgggatgttt

SEQ ID NO: 148685 - DNA, 19 bp, Homo sapiens
  siRNA target sequence for MRC1 (NM_002438.1,1929-1947).
ggggcttatgggatgtttt

SEQ ID NO: 148686 - DNA, 19 bp, Homo sapiens
  siRNA target sequence for MRC1 (NM_002438.1,1933-1951).
cttatgggatgttttgaaa

SEQ ID NO: 148687 - DNA, 19 bp, Homo sapiens
  siRNA target sequence for MRC1 (NM_002438.1,2023-2041).
gactcccgaacccaaatgt

SEQ ID NO: 148688 - DNA, 19 bp, Homo sapiens
  siRNA target sequence for MRC1 (NM_002438.1,2079-2097).
gtttcaagctgtatgcaaa

SEQ ID NO: 148689 - DNA, 19 bp, Homo sapiens
  siRNA target sequence for MRC1 (NM_002438.1,2121-2139).
ggtttgaatctcgagattt

SEQ ID NO: 148690 - DNA, 19 bp, Homo sapiens
  siRNA target sequence for MRC1 (NM_002438.1,2122-2140).
gtttgaatctcgagatttt

SEQ ID NO: 148691 - DNA, 19 bp, Homo sapiens
  siRNA target sequence for MRC1 (NM_002438.1,2150-2168).
ctgggtggagacttagcta

SEQ ID NO: 148692 - DNA, 19 bp, Homo sapiens
  siRNA target sequence for MRC1 (NM_002438.1,2159-2177).
gacttagctagcatcaata

SEQ ID NO: 148693 - DNA, 19 bp, Homo sapiens
  siRNA target sequence for MRC1 (NM_002438.1,2192-2210).
caaacaatatggcgattaa

SEQ ID NO: 148694 - DNA, 19 bp, Homo sapiens
  siRNA target sequence for MRC1 (NM_002438.1,2220-2238).
gtggaagctaccacaaact

SEQ ID NO: 148695 - DNA, 19 bp, Homo sapiens
  siRNA target sequence for MRC1 (NM_002438.1,2222-2240).
ggaagctaccacaaactgt

SEQ ID NO: 148696 - DNA, 19 bp, Homo sapiens
  siRNA target sequence for MRC1 (NM_002438.1,2298-2316).
ctcctgtttcatatgaaaa

SEQ ID NO: 148697 - DNA, 19 bp, Homo sapiens
  siRNA target sequence for MRC1 (NM_002438.1,2321-2339).
gcttatggagaacctaata

SEQ ID NO: 148698 - DNA, 19 bp, Homo sapiens
  siRNA target sequence for MRC1 (NM_002438.1,2330-2348).
gaacctaataattatcaaa

SEQ ID NO: 148699 - DNA, 19 bp, Homo sapiens
  siRNA target sequence for MRC1 (NM_002438.1,2375-2393).
ggtgaccctactatgtctt

SEQ ID NO: 148700 - DNA, 19 bp, Homo sapiens
  siRNA target sequence for MRC1 (NM_002438.1,2592-2610).
ggaattttggtgatcttgt

SEQ ID NO: 148701 - DNA, 19 bp, Homo sapiens
  siRNA target sequence for MRC1 (NM_002438.1,2593-2611).
gaattttggtgatcttgtt

SEQ ID NO: 148702 - DNA, 19 bp, Homo sapiens
  siRNA target sequence for MRC1 (NM_002438.1,2601-2619).
gtgatcttgtttctattca

SEQ ID NO: 148703 - DNA, 19 bp, Homo sapiens
  siRNA target sequence for MRC1 (NM_002438.1,2603-2621).
gatcttgtttctattcaaa

SEQ ID NO: 148704 - DNA, 19 bp, Homo sapiens
  siRNA target sequence for MRC1 (NM_002438.1,2733-2751).
gaagcaaagtggattacgt

SEQ ID NO: 148705 - DNA, 19 bp, Homo sapiens
  siRNA target sequence for MRC1 (NM_002438.1,2761-2779).
cacaggtgaacccaatttt

SEQ ID NO: 148706 - DNA, 19 bp, Homo sapiens
  siRNA target sequence for MRC1 (NM_002438.1,2765-2783).
ggtgaacccaattttgcaa

SEQ ID NO: 148707 - DNA, 19 bp, Homo sapiens
  siRNA target sequence for MRC1 (NM_002438.1,2873-2891).
cgacataacagtagtatca

SEQ ID NO: 148708 - DNA, 19 bp, Homo sapiens
  siRNA target sequence for MRC1 (NM_002438.1,2935-2953).
gtgcaaggaaggttggaat

SEQ ID NO: 148709 - DNA, 19 bp, Homo sapiens
  siRNA target sequence for MRC1 (NM_002438.1,2937-2955).
gcaaggaaggttggaattt

SEQ ID NO: 148710 - DNA, 19 bp, Homo sapiens
  siRNA target sequence for MRC1 (NM_002438.1,3014-3032).
caagaggcacgaaaagctt

SEQ ID NO: 148711 - DNA, 19 bp, Homo sapiens
  siRNA target sequence for MRC1 (NM_002438.1,3019-3037).
ggcacgaaaagcttgtata

SEQ ID NO: 148712 - DNA, 19 bp, Homo sapiens
  siRNA target sequence for MRC1 (NM_002438.1,3049-3067).
gaatctggtctccatacaa

SEQ ID NO: 148713 - DNA, 19 bp, Homo sapiens
  siRNA target sequence for MRC1 (NM_002438.1,3103-3121).
gaaggactccactttcagt

SEQ ID NO: 148714 - DNA, 19 bp, Homo sapiens
  siRNA target sequence for MRC1 (NM_002438.1,3133-3151).
gctgaatgatgtcaattca

SEQ ID NO: 148715 - DNA, 19 bp, Homo sapiens
  siRNA target sequence for MRC1 (NM_002438.1,3176-3194).
ggacgaggagtccattaca

SEQ ID NO: 148716 - DNA, 19 bp, Homo sapiens
  siRNA target sequence for MRC1 (NM_002438.1,3179-3197).
cgaggagtccattacacaa

SEQ ID NO: 148717 - DNA, 19 bp, Homo sapiens
  siRNA target sequence for MRC1 (NM_002438.1,3182-3200).
ggagtccattacacaaact

SEQ ID NO: 148718 - DNA, 19 bp, Homo sapiens
  siRNA target sequence for MRC1 (NM_002438.1,3248-3266).
gatgctgactgtgttgtta

SEQ ID NO: 148719 - DNA, 19 bp, Homo sapiens
  siRNA target sequence for MRC1 (NM_002438.1,3251-3269).
gctgactgtgttgttatta

SEQ ID NO: 148720 - DNA, 19 bp, Homo sapiens
  siRNA target sequence for MRC1 (NM_002438.1,3319-3337).
cagtaaacgaggctacata

SEQ ID NO: 148721 - DNA, 19 bp, Homo sapiens
  siRNA target sequence for MRC1 (NM_002438.1,3375-3393).
cagcaacgattcaaacaga

SEQ ID NO: 148722 - DNA, 19 bp, Homo sapiens
  siRNA target sequence for MRC1 (NM_002438.1,3390-3408).
cagatggctttgttaaata

SEQ ID NO: 148723 - DNA, 19 bp, Homo sapiens
  siRNA target sequence for MRC1 (NM_002438.1,3475-3493).
gcttcacaattcccttata

SEQ ID NO: 148724 - DNA, 19 bp, Homo sapiens
  siRNA target sequence for MRC1 (NM_002438.1,3505-3523).
ggatccctacagtaatgca

SEQ ID NO: 148725 - DNA, 19 bp, Homo sapiens
  siRNA target sequence for MRC1 (NM_002438.1,3527-3545).
gcgtggctgcagatggaaa

SEQ ID NO: 148726 - DNA, 19 bp, Homo sapiens
  siRNA target sequence for MRC1 (NM_002438.1,3586-3604).
gactgataatcaatacact

SEQ ID NO: 148727 - DNA, 19 bp, Homo sapiens
  siRNA target sequence for MRC1 (NM_002438.1,3618-3636).
ggagggtgaggtacactaa

SEQ ID NO: 148728 - DNA, 19 bp, Homo sapiens
  siRNA target sequence for MRC1 (NM_002438.1,3642-3660).
ctgctgatgagcccaaatt

SEQ ID NO: 148729 - DNA, 19 bp, Homo sapiens
  siRNA target sequence for MRC1 (NM_002438.1,3645-3663).
ctgatgagcccaaattgaa

SEQ ID NO: 148730 - DNA, 19 bp, Homo sapiens
  siRNA target sequence for MRC1 (NM_002438.1,3647-3665).
gatgagcccaaattgaaat

SEQ ID NO: 148731 - DNA, 19 bp, Homo sapiens
  siRNA target sequence for MRC1 (NM_002438.1,3707-3725).
gcacattgcaatgaaagtt

SEQ ID NO: 148732 - DNA, 19 bp, Homo sapiens
  siRNA target sequence for MRC1 (NM_002438.1,3822-3840).
ctttccatggtcactgtta

SEQ ID NO: 148733 - DNA, 19 bp, Homo sapiens
  siRNA target sequence for MRC1 (NM_002438.1,3831-3849).
gtcactgttactatattga

SEQ ID NO: 148734 - DNA, 19 bp, Homo sapiens
  siRNA target sequence for MRC1 (NM_002438.1,3930-3948).
ctgcagaatccagttttct

SEQ ID NO: 148735 - DNA, 19 bp, Homo sapiens
  siRNA target sequence for MRC1 (NM_002438.1,3932-3950).
gcagaatccagttttctgt

SEQ ID NO: 148736 - DNA, 19 bp, Homo sapiens
  siRNA target sequence for MRC1 (NM_002438.1,3956-3974).
cgggttgagccacttaaaa

SEQ ID NO: 148737 - DNA, 19 bp, Homo sapiens
  siRNA target sequence for MRC1 (NM_002438.1,3959-3977).
gttgagccacttaaaagta

SEQ ID NO: 148738 - DNA, 19 bp, Homo sapiens
  siRNA target sequence for MRC1 (NM_002438.1,3975-3993).
gtaaaaccaatttttggat

SEQ ID NO: 148739 - DNA, 19 bp, Homo sapiens
  siRNA target sequence for MRC1 (NM_002438.1,4018-4036).
gacgtggctgtggataaat

SEQ ID NO: 148740 - DNA, 19 bp, Homo sapiens
  siRNA target sequence for MRC1 (NM_002438.1,4078-4096).
ctctggtgaacggaatgat

SEQ ID NO: 148741 - DNA, 19 bp, Homo sapiens
  siRNA target sequence for MRC1 (NM_002438.1,4090-4108).
gaatgattgtgtagcttta

SEQ ID NO: 148742 - DNA, 19 bp, Homo sapiens
  siRNA target sequence for MRC1 (NM_002438.1,4112-4130).
gcgtcttctgggttttgga

SEQ ID NO: 148743 - DNA, 19 bp, Homo sapiens
  siRNA target sequence for MRC1 (NM_002438.1,4150-4168).
ctacaaaggatatatttgt

SEQ ID NO: 148744 - DNA, 19 bp, Homo sapiens
  siRNA target sequence for MRC1 (NM_002438.1,4196-4214).
cctactcatgaattactta

SEQ ID NO: 148745 - DNA, 19 bp, Homo sapiens
  siRNA target sequence for MRC1 (NM_002438.1,4267-4285).
ggccggagtagtcatcatt

SEQ ID NO: 148746 - DNA, 19 bp, Homo sapiens
  siRNA target sequence for MRC1 (NM_002438.1,4269-4287).
ccggagtagtcatcattgt

SEQ ID NO: 148747 - DNA, 19 bp, Homo sapiens
  siRNA target sequence for MRC1 (NM_002438.1,4271-4289).
ggagtagtcatcattgtga

SEQ ID NO: 148748 - DNA, 19 bp, Homo sapiens
  siRNA target sequence for MRC1 (NM_002438.1,4313-4331).
ggccttgccgcctatttct

SEQ ID NO: 148749 - DNA, 19 bp, Homo sapiens
  siRNA target sequence for MRC1 (NM_002438.1,4314-4332).
gccttgccgcctatttctt

SEQ ID NO: 148750 - DNA, 19 bp, Homo sapiens
  siRNA target sequence for MRC1 (NM_002438.1,4315-4333).
ccttgccgcctatttcttt

SEQ ID NO: 148751 - DNA, 19 bp, Homo sapiens
  siRNA target sequence for MRC1 (NM_002438.1,4319-4337).
gccgcctatttcttttata

SEQ ID NO: 148752 - DNA, 19 bp, Homo sapiens
  siRNA target sequence for MRC1 (NM_002438.1,4402-4420).
gtcaagcccaggaactagt

SEQ ID NO: 148753 - DNA, 19 bp, Homo sapiens
  siRNA target sequence for MRC1 (NM_002438.1,4407-4425).
gcccaggaactagtgatat

SEQ ID NO: 148754 - DNA, 19 bp, Homo sapiens
  siRNA target sequence for MRC1 (NM_002438.1,4409-4427).
ccaggaactagtgatatga

SEQ ID NO: 148755 - DNA, 19 bp, Homo sapiens
  siRNA target sequence for MRC1 (NM_002438.1,4410-4428).
caggaactagtgatatgaa

SEQ ID NO: 148756 - DNA, 19 bp, Homo sapiens
  siRNA target sequence for MRC1 (NM_002438.1,4413-4431).
gaactagtgatatgaaaga

SEQ ID NO: 148757 - DNA, 19 bp, Homo sapiens
  siRNA target sequence for MRC1 (NM_002438.1,4438-4456).
gggcaatattgaacagaat

SEQ ID NO: 148758 - DNA, 19 bp, Homo sapiens
  siRNA target sequence for MRC1 (NM_002438.1,4441-4459).
caatattgaacagaatgaa

SEQ ID NO: 148759 - DNA, 19 bp, Homo sapiens
  siRNA target sequence for MUCDHL (NM_017717.3,685-703).
cccgaattcccctttaaga

SEQ ID NO: 148760 - DNA, 19 bp, Homo sapiens
  siRNA target sequence for MUCDHL (NM_017717.3,782-800).
gcgacaaggacgacattct

SEQ ID NO: 148761 - DNA, 19 bp, Homo sapiens
  siRNA target sequence for MUCDHL (NM_017717.3,1202-1220).
gaaacgtgaatggtacatt

SEQ ID NO: 148762 - DNA, 19 bp, Homo sapiens
  siRNA target sequence for MUCDHL (NM_017717.3,1511-1529).
cggccatcacatatcgaat

SEQ ID NO: 148763 - DNA, 19 bp, Homo sapiens
  siRNA target sequence for MUCDHL (NM_017717.3,1512-1530).
ggccatcacatatcgaatt

SEQ ID NO: 148764 - DNA, 19 bp, Homo sapiens
  siRNA target sequence for MUCDHL (NM_017717.3,1513-1531).
gccatcacatatcgaatta

SEQ ID NO: 148765 - DNA, 19 bp, Homo sapiens
  siRNA target sequence for MUCDHL (NM_017717.3,1670-1688).
ccgaccctacacagagatt

SEQ ID NO: 148766 - DNA, 19 bp, Homo sapiens
  siRNA target sequence for MUCDHL (NM_017717.3,1699-1717).
gctgaggagccgatgcaaa

SEQ ID NO: 148767 - DNA, 19 bp, Homo sapiens
  siRNA target sequence for MUCDHL (NM_021924.2,1644-1662).
caccgcaaccacagtcatt

SEQ ID NO: 148768 - DNA, 19 bp, Homo sapiens
  siRNA target sequence for MUCDHL (NM_021924.2,1648-1666).
gcaaccacagtcattgaga

SEQ ID NO: 148769 - DNA, 19 bp, Homo sapiens
  siRNA target sequence for MUCDHL (NM_021924.2,1649-1667).
caaccacagtcattgagat

SEQ ID NO: 148770 - DNA, 19 bp, Homo sapiens
  siRNA target sequence for MUCDHL (NM_021924.2,2262-2280).
caagagcaccccatcttca

SEQ ID NO: 148771 - DNA, 19 bp, Homo sapiens
  siRNA target sequence for MUCDHL (NM_021924.2,2306-2324).
gcttctcggtggtggatat

SEQ ID NO: 148772 - DNA, 19 bp, Homo sapiens
  siRNA target sequence for MUCDHL (NM_021924.2,2723-2741).
cagacgtggtcgttctcaa

SEQ ID NO: 148773 - DNA, 19 bp, Homo sapiens
  siRNA target sequence for MUCDHL (NM_021924.2,2839-2857).
ggtgatgactcctacatct

SEQ ID NO: 148774 - DNA, 19 bp, Homo sapiens
  siRNA target sequence for MYL2 (NM_000432.1,99-117).
gacccaaatccaggaattt

SEQ ID NO: 148775 - DNA, 19 bp, Homo sapiens
  siRNA target sequence for MYL2 (NM_000432.1,199-217).
gggcgagtgaacgtgaaaa

SEQ ID NO: 148776 - DNA, 19 bp, Homo sapiens
  siRNA target sequence for MYL2 (NM_000432.1,201-219).
gcgagtgaacgtgaaaaat

SEQ ID NO: 148777 - DNA, 19 bp, Homo sapiens
  siRNA target sequence for MYL2 (NM_000432.1,243-261).
ggaggctccgggtccaatt

SEQ ID NO: 148778 - DNA, 19 bp, Homo sapiens
  siRNA target sequence for MYL2 (NM_000432.1,247-265).
gctccgggtccaattaact

SEQ ID NO: 148779 - DNA, 19 bp, Homo sapiens
  siRNA target sequence for MYL2 (NM_000432.1,248-266).
ctccgggtccaattaactt

SEQ ID NO: 148780 - DNA, 19 bp, Homo sapiens
  siRNA target sequence for MYL2 (NM_000432.1,250-268).
ccgggtccaattaacttta

SEQ ID NO: 148781 - DNA, 19 bp, Homo sapiens
  siRNA target sequence for MYL2 (NM_000432.1,252-270).
gggtccaattaactttact

SEQ ID NO: 148782 - DNA, 19 bp, Homo sapiens
  siRNA target sequence for MYL2 (NM_000432.1,254-272).
gtccaattaactttactgt

SEQ ID NO: 148783 - DNA, 19 bp, Homo sapiens
  siRNA target sequence for MYL2 (NM_000432.1,313-331).
cctgaggaaaccattctca

SEQ ID NO: 148784 - DNA, 19 bp, Homo sapiens
  siRNA target sequence for MYL2 (NM_000432.1,330-348).
caacgcattcaaagtgttt

SEQ ID NO: 148785 - DNA, 19 bp, Homo sapiens
  siRNA target sequence for MYL2 (NM_000432.1,369-387).
gctgaaggctgattacgtt

SEQ ID NO: 148786 - DNA, 19 bp, Homo sapiens
  siRNA target sequence for MYL2 (NM_000432.1,461-479).
ctgacgtgactggaaactt

SEQ ID NO: 148787 - DNA, 19 bp, Homo sapiens
  siRNA target sequence for MYL3 (NM_000258.1,244-262).
ccaagtgtgagatgaagat

SEQ ID NO: 148788 - DNA, 19 bp, Homo sapiens
  siRNA target sequence for MYL4 (NM_002476.2,219-237).
cactgccgaccagattgaa

SEQ ID NO: 148789 - DNA, 19 bp, Homo sapiens
  siRNA target sequence for MYL4 (NM_002476.2,272-290).
ccccgactggagagatgaa

SEQ ID NO: 148790 - DNA, 19 bp, Homo sapiens
  siRNA target sequence for MYL6 (NM_021019.2,434-452).
catgaggacagcaatggtt

SEQ ID NO: 148791 - DNA, 19 bp, Homo sapiens
  siRNA target sequence for MYL7 (NM_021223.1,73-91).
ggttcttccaacgtctttt

SEQ ID NO: 148792 - DNA, 19 bp, Homo sapiens
  siRNA target sequence for MYLC2PL (NM_138403.3,499-517).
gacactgaagggaaaggtt

SEQ ID NO: 148793 - DNA, 19 bp, Homo sapiens
  siRNA target sequence for MYLC2PL (NM_138403.3,526-544).
gccgatgtcatcaaagaaa

SEQ ID NO: 148794 - DNA, 19 bp, Homo sapiens
  siRNA target sequence for MYLC2PL (NM_138403.3,527-545).
ccgatgtcatcaaagaaaa

SEQ ID NO: 148795 - DNA, 19 bp, Homo sapiens
  siRNA target sequence for NELL1 (NM_006157.1,107-125).
cgatggatttgattttagt

SEQ ID NO: 148796 - DNA, 19 bp, Homo sapiens
  siRNA target sequence for NELL1 (NM_006157.1,108-126).
gatggatttgattttagtt

SEQ ID NO: 148797 - DNA, 19 bp, Homo sapiens
  siRNA target sequence for NELL1 (NM_006157.1,314-332).
ctcatgtgagtgagaaatt

SEQ ID NO: 148798 - DNA, 19 bp, Homo sapiens
  siRNA target sequence for NELL1 (NM_006157.1,316-334).
catgtgagtgagaaattaa

SEQ ID NO: 148799 - DNA, 19 bp, Homo sapiens
  siRNA target sequence for NELL1 (NM_006157.1,429-447).
ggagcacagctattttgaa

SEQ ID NO: 148800 - DNA, 19 bp, Homo sapiens
  siRNA target sequence for NELL1 (NM_006157.1,469-487).
gatgagattcggtatcact

SEQ ID NO: 148801 - DNA, 19 bp, Homo sapiens
  siRNA target sequence for NELL1 (NM_006157.1,474-492).
gattcggtatcactacata

SEQ ID NO: 148802 - DNA, 19 bp, Homo sapiens
  siRNA target sequence for NELL1 (NM_006157.1,478-496).
cggtatcactacatacaca

SEQ ID NO: 148803 - DNA, 19 bp, Homo sapiens
  siRNA target sequence for NELL1 (NM_006157.1,509-527).
ggacagaggcacttcctta

SEQ ID NO: 148804 - DNA, 19 bp, Homo sapiens
  siRNA target sequence for NELL1 (NM_006157.1,589-607).
ctccatgtcgactgtaaca

SEQ ID NO: 148805 - DNA, 19 bp, Homo sapiens
  siRNA target sequence for NELL1 (NM_006157.1,597-615).
cgactgtaacaggatttat

SEQ ID NO: 148806 - DNA, 19 bp, Homo sapiens
  siRNA target sequence for NELL1 (NM_006157.1,609-627).
gatttatgagcgtgtgata

SEQ ID NO: 148807 - DNA, 19 bp, Homo sapiens
  siRNA target sequence for NELL1 (NM_006157.1,732-750).
ctttatgccgaatggatat

SEQ ID NO: 148808 - DNA, 19 bp, Homo sapiens
  siRNA target sequence for NELL1 (NM_006157.1,738-756).
gccgaatggatatataaca

SEQ ID NO: 148809 - DNA, 19 bp, Homo sapiens
  siRNA target sequence for NELL1 (NM_006157.1,740-758).
cgaatggatatataacaca

SEQ ID NO: 148810 - DNA, 19 bp, Homo sapiens
  siRNA target sequence for NELL1 (NM_006157.1,784-802).
ccaacctgcagtgatttct

SEQ ID NO: 148811 - DNA, 19 bp, Homo sapiens
  siRNA target sequence for NELL1 (NM_006157.1,810-828).
ggtgcaaggaataatggat

SEQ ID NO: 148812 - DNA, 19 bp, Homo sapiens
  siRNA target sequence for NELL1 (NM_006157.1,813-831).
gcaaggaataatggattta

SEQ ID NO: 148813 - DNA, 19 bp, Homo sapiens
  siRNA target sequence for NELL1 (NM_006157.1,843-861).
ggccaagatgactgcaaaa

SEQ ID NO: 148814 - DNA, 19 bp, Homo sapiens
  siRNA target sequence for NELL1 (NM_006157.1,846-864).
caagatgactgcaaaacta

SEQ ID NO: 148815 - DNA, 19 bp, Homo sapiens
  siRNA target sequence for NELL1 (NM_006157.1,849-867).
gatgactgcaaaactaaat

SEQ ID NO: 148816 - DNA, 19 bp, Homo sapiens
  siRNA target sequence for NELL1 (NM_006157.1,852-870).
gactgcaaaactaaattat

SEQ ID NO: 148817 - DNA, 19 bp, Homo sapiens
  siRNA target sequence for NELL1 (NM_006157.1,872-890).
cagagacaagacttagtca

SEQ ID NO: 148818 - DNA, 19 bp, Homo sapiens
  siRNA target sequence for NELL1 (NM_006157.1,878-896).
caagacttagtcaattgga

SEQ ID NO: 148819 - DNA, 19 bp, Homo sapiens
  siRNA target sequence for NELL1 (NM_006157.1,881-899).
gacttagtcaattggaaaa

SEQ ID NO: 148820 - DNA, 19 bp, Homo sapiens
  siRNA target sequence for NELL1 (NM_006157.1,883-901).
cttagtcaattggaaaact

SEQ ID NO: 148821 - DNA, 19 bp, Homo sapiens
  siRNA target sequence for NELL1 (NM_006157.1,1089-1107).
ggtctgccgaccaaaatgt

SEQ ID NO: 148822 - DNA, 19 bp, Homo sapiens
  siRNA target sequence for NELL1 (NM_006157.1,1090-1108).
gtctgccgaccaaaatgta

SEQ ID NO: 148823 - DNA, 19 bp, Homo sapiens
  siRNA target sequence for NELL1 (NM_006157.1,1094-1112).
gccgaccaaaatgtatcta

SEQ ID NO: 148824 - DNA, 19 bp, Homo sapiens
  siRNA target sequence for NELL1 (NM_006157.1,1130-1148).
cagaaggccagcggatttt

SEQ ID NO: 148825 - DNA, 19 bp, Homo sapiens
  siRNA target sequence for NELL1 (NM_006157.1,1132-1150).
gaaggccagcggattttaa

SEQ ID NO: 148826 - DNA, 19 bp, Homo sapiens
  siRNA target sequence for NELL1 (NM_006157.1,1135-1153).
ggccagcggattttaacca

SEQ ID NO: 148827 - DNA, 19 bp, Homo sapiens
  siRNA target sequence for NELL1 (NM_006157.1,1169-1187).
gccgaggtggagttttagt

SEQ ID NO: 148828 - DNA, 19 bp, Homo sapiens
  siRNA target sequence for NELL1 (NM_006157.1,1170-1188).
ccgaggtggagttttagta

SEQ ID NO: 148829 - DNA, 19 bp, Homo sapiens
  siRNA target sequence for NELL1 (NM_006157.1,1171-1189).
cgaggtggagttttagtaa

SEQ ID NO: 148830 - DNA, 19 bp, Homo sapiens
  siRNA target sequence for NELL1 (NM_006157.1,1174-1192).
ggtggagttttagtaaaaa

SEQ ID NO: 148831 - DNA, 19 bp, Homo sapiens
  siRNA target sequence for NELL1 (NM_006157.1,1262-1280).
gtgtctgtagaggtcataa

SEQ ID NO: 148832 - DNA, 19 bp, Homo sapiens
  siRNA target sequence for NELL1 (NM_006157.1,1264-1282).
gtctgtagaggtcataact

SEQ ID NO: 148833 - DNA, 19 bp, Homo sapiens
  siRNA target sequence for NELL1 (NM_006157.1,1332-1350).
gaatacaaaagctacttgt

SEQ ID NO: 148834 - DNA, 19 bp, Homo sapiens
  siRNA target sequence for NELL1 (NM_006157.1,1415-1433).
gtgcagctaagatgcatta

SEQ ID NO: 148835 - DNA, 19 bp, Homo sapiens
  siRNA target sequence for NELL1 (NM_006157.1,1417-1435).
gcagctaagatgcattact

SEQ ID NO: 148836 - DNA, 19 bp, Homo sapiens
  siRNA target sequence for NELL1 (NM_006157.1,1458-1476).
caaccttcctgggttatat

SEQ ID NO: 148837 - DNA, 19 bp, Homo sapiens
  siRNA target sequence for NELL1 (NM_006157.1,1504-1522).
cgtgtggatgacttctctt

SEQ ID NO: 148838 - DNA, 19 bp, Homo sapiens
  siRNA target sequence for NELL1 (NM_006157.1,1507-1525).
gtggatgacttctcttgta

SEQ ID NO: 148839 - DNA, 19 bp, Homo sapiens
  siRNA target sequence for NELL1 (NM_006157.1,1686-1704).
gtgtgtggctcccaacaaa

SEQ ID NO: 148840 - DNA, 19 bp, Homo sapiens
  siRNA target sequence for NELL1 (NM_006157.1,1734-1752).
ccactgcgagaaagatatt

SEQ ID NO: 148841 - DNA, 19 bp, Homo sapiens
  siRNA target sequence for NELL1 (NM_006157.1,1740-1758).
cgagaaagatattgatgaa

SEQ ID NO: 148842 - DNA, 19 bp, Homo sapiens
  siRNA target sequence for NELL1 (NM_006157.1,1760-1778).
gttcagagggaatcattga

SEQ ID NO: 148843 - DNA, 19 bp, Homo sapiens
  siRNA target sequence for NELL1 (NM_006157.1,1869-1887).
gtccggggagtcctgtatt

SEQ ID NO: 148844 - DNA, 19 bp, Homo sapiens
  siRNA target sequence for NELL1 (NM_006157.1,1871-1889).
ccggggagtcctgtattga

SEQ ID NO: 148845 - DNA, 19 bp, Homo sapiens
  siRNA target sequence for NELL1 (NM_006157.1,1873-1891).
ggggagtcctgtattgaca

SEQ ID NO: 148846 - DNA, 19 bp, Homo sapiens
  siRNA target sequence for NELL1 (NM_006157.1,1915-1933).
cacacctgttggaacgatt

SEQ ID NO: 148847 - DNA, 19 bp, Homo sapiens
  siRNA target sequence for NELL1 (NM_006157.1,2034-2052).
ccaggtgtggaccttgaaa

SEQ ID NO: 148848 - DNA, 19 bp, Homo sapiens
  siRNA target sequence for NELL1 (NM_006157.1,2100-2118).
ccgacggacagcttgtgat

SEQ ID NO: 148849 - DNA, 19 bp, Homo sapiens
  siRNA target sequence for NELL1 (NM_006157.1,2101-2119).
cgacggacagcttgtgatt

SEQ ID NO: 148850 - DNA, 19 bp, Homo sapiens
  siRNA target sequence for NELL1 (NM_006157.1,2128-2146).
ccaagtgctgacctattct

SEQ ID NO: 148851 - DNA, 19 bp, Homo sapiens
  siRNA target sequence for NELL1 (NM_006157.1,2168-2186).
gagtcacaagtcaatgttt

SEQ ID NO: 148852 - DNA, 19 bp, Homo sapiens
  siRNA target sequence for NELL1 (NM_006157.1,2177-2195).
gtcaatgtttagaccaaaa

SEQ ID NO: 148853 - DNA, 19 bp, Homo sapiens
  siRNA target sequence for NELL1 (NM_006157.1,2197-2215).
ggtcacaagctgtatcgaa

SEQ ID NO: 148854 - DNA, 19 bp, Homo sapiens
  siRNA target sequence for NELL1 (NM_006157.1,2208-2226).
gtatcgaagtggagacaat

SEQ ID NO: 148855 - DNA, 19 bp, Homo sapiens
  siRNA target sequence for NELL1 (NM_006157.1,2212-2230).
cgaagtggagacaattgga

SEQ ID NO: 148856 - DNA, 19 bp, Homo sapiens
  siRNA target sequence for NELL1 (NM_006157.1,2257-2275).
ctggaaggagaggtagatt

SEQ ID NO: 148857 - DNA, 19 bp, Homo sapiens
  siRNA target sequence for NELL1 (NM_006157.1,2284-2302).
ctcacttgccccaacttga

SEQ ID NO: 148858 - DNA, 19 bp, Homo sapiens
  siRNA target sequence for NELL1 (NM_006157.1,2306-2324).
gtgagtatacagctatctt

SEQ ID NO: 148859 - DNA, 19 bp, Homo sapiens
  siRNA target sequence for NELL1 (NM_006157.1,2310-2328).
gtatacagctatcttagaa

SEQ ID NO: 148860 - DNA, 19 bp, Homo sapiens
  siRNA target sequence for NELL1 (NM_006157.1,2359-2377).
ccctgcctagctgataaca

SEQ ID NO: 148861 - DNA, 19 bp, Homo sapiens
  siRNA target sequence for NELL1 (NM_006157.1,2360-2378).
cctgcctagctgataacat

SEQ ID NO: 148862 - DNA, 19 bp, Homo sapiens
  siRNA target sequence for NELL1 (NM_006157.1,2508-2526).
ggattttgagtgtcttcaa

SEQ ID NO: 148863 - DNA, 19 bp, Homo sapiens
  siRNA target sequence for NELL2 (NM_006159.1,100-118).
gagtctcgggtcttactga

SEQ ID NO: 148864 - DNA, 19 bp, Homo sapiens
  siRNA target sequence for NELL2 (NM_006159.1,106-124).
cgggtcttactgagaacat

SEQ ID NO: 148865 - DNA, 19 bp, Homo sapiens
  siRNA target sequence for NELL2 (NM_006159.1,107-125).
gggtcttactgagaacatt

SEQ ID NO: 148866 - DNA, 19 bp, Homo sapiens
  siRNA target sequence for NELL2 (NM_006159.1,109-127).
gtcttactgagaacattct

SEQ ID NO: 148867 - DNA, 19 bp, Homo sapiens
  siRNA target sequence for NELL2 (NM_006159.1,168-186).
ggacccttccctacagatt

SEQ ID NO: 148868 - DNA, 19 bp, Homo sapiens
  siRNA target sequence for NELL2 (NM_006159.1,178-196).
ctacagattgacgtcttaa

SEQ ID NO: 148869 - DNA, 19 bp, Homo sapiens
  siRNA target sequence for NELL2 (NM_006159.1,189-207).
cgtcttaacagagttagaa

SEQ ID NO: 148870 - DNA, 19 bp, Homo sapiens
  siRNA target sequence for NELL2 (NM_006159.1,258-276).
gacgaaagcctttctcttt

SEQ ID NO: 148871 - DNA, 19 bp, Homo sapiens
  siRNA target sequence for NELL2 (NM_006159.1,265-283).
gcctttctctttcaagata

SEQ ID NO: 148872 - DNA, 19 bp, Homo sapiens
  siRNA target sequence for NELL2 (NM_006159.1,310-328).
gctacagctgaacagtttt

SEQ ID NO: 148873 - DNA, 19 bp, Homo sapiens
  siRNA target sequence for NELL2 (NM_006159.1,337-355).
ctgagaaataaacatgaat

SEQ ID NO: 148874 - DNA, 19 bp, Homo sapiens
  siRNA target sequence for NELL2 (NM_006159.1,452-470).
gtggccatcggaatgaagt

SEQ ID NO: 148875 - DNA, 19 bp, Homo sapiens
  siRNA target sequence for NELL2 (NM_006159.1,665-683).
ggctaggacagagaaataa

SEQ ID NO: 148876 - DNA, 19 bp, Homo sapiens
  siRNA target sequence for NELL2 (NM_006159.1,666-684).
gctaggacagagaaataat

SEQ ID NO: 148877 - DNA, 19 bp, Homo sapiens
  siRNA target sequence for NELL2 (NM_006159.1,677-695).
gaaataatgcgcatggata

SEQ ID NO: 148878 - DNA, 19 bp, Homo sapiens
  siRNA target sequence for NELL2 (NM_006159.1,751-769).
gctcagtgcccagatctta

SEQ ID NO: 148879 - DNA, 19 bp, Homo sapiens
  siRNA target sequence for NELL2 (NM_006159.1,752-770).
ctcagtgcccagatcttaa

SEQ ID NO: 148880 - DNA, 19 bp, Homo sapiens
  siRNA target sequence for NELL2 (NM_006159.1,831-849).
ggatattttagccaaaaca

SEQ ID NO: 148881 - DNA, 19 bp, Homo sapiens
  siRNA target sequence for NELL2 (NM_006159.1,866-884).
gagctgaacagcgaatgaa

SEQ ID NO: 148882 - DNA, 19 bp, Homo sapiens
  siRNA target sequence for NELL2 (NM_006159.1,868-886).
gctgaacagcgaatgaata

SEQ ID NO: 148883 - DNA, 19 bp, Homo sapiens
  siRNA target sequence for NELL2 (NM_006159.1,871-889).
gaacagcgaatgaatagat

SEQ ID NO: 148884 - DNA, 19 bp, Homo sapiens
  siRNA target sequence for NELL2 (NM_006159.1,876-894).
gcgaatgaatagattggat

SEQ ID NO: 148885 - DNA, 19 bp, Homo sapiens
  siRNA target sequence for NELL2 (NM_006159.1,996-1014).
catccagtgtgaaactcta

SEQ ID NO: 148886 - DNA, 19 bp, Homo sapiens
  siRNA target sequence for NELL2 (NM_006159.1,1027-1045).
cctgactgcccacttaagt

SEQ ID NO: 148887 - DNA, 19 bp, Homo sapiens
  siRNA target sequence for NELL2 (NM_006159.1,1076-1094).
gtaaggaatgcaaatcgat

SEQ ID NO: 148888 - DNA, 19 bp, Homo sapiens
  siRNA target sequence for NELL2 (NM_006159.1,1086-1104).
caaatcgatatgccaattt

SEQ ID NO: 148889 - DNA, 19 bp, Homo sapiens
  siRNA target sequence for NELL2 (NM_006159.1,1154-1172).
ctggagtatgtgttctcta

SEQ ID NO: 148890 - DNA, 19 bp, Homo sapiens
  siRNA target sequence for NELL2 (NM_006159.1,1257-1275).
gtctcacagctgttgcaaa

SEQ ID NO: 148891 - DNA, 19 bp, Homo sapiens
  siRNA target sequence for NELL2 (NM_006159.1,1265-1283).
gctgttgcaaagtttgtaa

SEQ ID NO: 148892 - DNA, 19 bp, Homo sapiens
  siRNA target sequence for NELL2 (NM_006159.1,1276-1294).
gtttgtaaaggttatgact

SEQ ID NO: 148893 - DNA, 19 bp, Homo sapiens
  siRNA target sequence for NELL2 (NM_006159.1,1382-1400).
gggctcttcgagaggataa

SEQ ID NO: 148894 - DNA, 19 bp, Homo sapiens
  siRNA target sequence for NELL2 (NM_006159.1,1383-1401).
ggctcttcgagaggataat

SEQ ID NO: 148895 - DNA, 19 bp, Homo sapiens
  siRNA target sequence for NELL2 (NM_006159.1,1439-1457).
gccattactgtcgtgaaaa

SEQ ID NO: 148896 - DNA, 19 bp, Homo sapiens
  siRNA target sequence for NELL2 (NM_006159.1,1508-1526).
gatacatcagaattgatga

SEQ ID NO: 148897 - DNA, 19 bp, Homo sapiens
  siRNA target sequence for NELL2 (NM_006159.1,1606-1624).
ggaggacacaactgtgttt

SEQ ID NO: 148898 - DNA, 19 bp, Homo sapiens
  siRNA target sequence for NELL2 (NM_006159.1,1697-1715).
cctgtattgccgctaatgt

SEQ ID NO: 148899 - DNA, 19 bp, Homo sapiens
  siRNA target sequence for NELL2 (NM_006159.1,1795-1813).
gacagtcgtgctaattgca

SEQ ID NO: 148900 - DNA, 19 bp, Homo sapiens
  siRNA target sequence for NELL2 (NM_006159.1,1799-1817).
gtcgtgctaattgcattaa

SEQ ID NO: 148901 - DNA, 19 bp, Homo sapiens
  siRNA target sequence for NELL2 (NM_006159.1,1802-1820).
gtgctaattgcattaacct

SEQ ID NO: 148902 - DNA, 19 bp, Homo sapiens
  siRNA target sequence for NELL2 (NM_006159.1,1858-1876).
catgacaatgggatgtttt

SEQ ID NO: 148903 - DNA, 19 bp, Homo sapiens
  siRNA target sequence for NELL2 (NM_006159.1,1926-1944).
gcacagctgtgccaatgat

SEQ ID NO: 148904 - DNA, 19 bp, Homo sapiens
  siRNA target sequence for NELL2 (NM_006159.1,1962-1980).
ggatggcggatatgattgt

SEQ ID NO: 148905 - DNA, 19 bp, Homo sapiens
  siRNA target sequence for NELL2 (NM_006159.1,2016-2034).
catccatgatggaaaagtt

SEQ ID NO: 148906 - DNA, 19 bp, Homo sapiens
  siRNA target sequence for NELL2 (NM_006159.1,2090-2108).
gtcagaatggattcgttat

SEQ ID NO: 148907 - DNA, 19 bp, Homo sapiens
  siRNA target sequence for NELL2 (NM_006159.1,2092-2110).
cagaatggattcgttatgt

SEQ ID NO: 148908 - DNA, 19 bp, Homo sapiens
  siRNA target sequence for NELL2 (NM_006159.1,2094-2112).
gaatggattcgttatgtgt

SEQ ID NO: 148909 - DNA, 19 bp, Homo sapiens
  siRNA target sequence for NELL2 (NM_006159.1,2136-2154).
gaatcccacagttgatctt

SEQ ID NO: 148910 - DNA, 19 bp, Homo sapiens
  siRNA target sequence for NELL2 (NM_006159.1,2209-2227).
ggggaaactttgtataaca

SEQ ID NO: 148911 - DNA, 19 bp, Homo sapiens
  siRNA target sequence for NELL2 (NM_006159.1,2211-2229).
ggaaactttgtataacagt

SEQ ID NO: 148912 - DNA, 19 bp, Homo sapiens
  siRNA target sequence for NELL2 (NM_006159.1,2268-2286).
cttgcaaggggaagttgat

SEQ ID NO: 148913 - DNA, 19 bp, Homo sapiens
  siRNA target sequence for NELL2 (NM_006159.1,2411-2429).
cttgcctggacgaaatgaa

SEQ ID NO: 148914 - DNA, 19 bp, Homo sapiens
  siRNA target sequence for NELL2 (NM_006159.1,2447-2465).
ggtcctcttggatcaaaca

SEQ ID NO: 148915 - DNA, 19 bp, Homo sapiens
  siRNA target sequence for NID (NM_002508.1,318-336).
caccacaaatggcatcatt

SEQ ID NO: 148916 - DNA, 19 bp, Homo sapiens
  siRNA target sequence for NID (NM_002508.1,437-455).
gcctggggaaggtttatta

SEQ ID NO: 148917 - DNA, 19 bp, Homo sapiens
  siRNA target sequence for NID (NM_002508.1,441-459).
ggggaaggtttattatcga

SEQ ID NO: 148918 - DNA, 19 bp, Homo sapiens
  siRNA target sequence for NID (NM_002508.1,511-529).
gggttcccggagatctctt

SEQ ID NO: 148919 - DNA, 19 bp, Homo sapiens
  siRNA target sequence for NID (NM_002508.1,621-639).
cacgttccaggctgttcta

SEQ ID NO: 148920 - DNA, 19 bp, Homo sapiens
  siRNA target sequence for NID (NM_002508.1,659-677).
cctatgccattttccttta

SEQ ID NO: 148921 - DNA, 19 bp, Homo sapiens
  siRNA target sequence for NID (NM_002508.1,660-678).
ctatgccattttcctttat

SEQ ID NO: 148922 - DNA, 19 bp, Homo sapiens
  siRNA target sequence for NID (NM_002508.1,685-703).
gatggtctgcagttccata

SEQ ID NO: 148923 - DNA, 19 bp, Homo sapiens
  siRNA target sequence for NID (NM_002508.1,696-714).
gttccatacgacattctca

SEQ ID NO: 148924 - DNA, 19 bp, Homo sapiens
  siRNA target sequence for NID (NM_002508.1,700-718).
catacgacattctcaaaga

SEQ ID NO: 148925 - DNA, 19 bp, Homo sapiens
  siRNA target sequence for NID (NM_002508.1,760-778).
ggttcagtgggattcttat

SEQ ID NO: 148926 - DNA, 19 bp, Homo sapiens
  siRNA target sequence for NID (NM_002508.1,764-782).
cagtgggattcttatggaa

SEQ ID NO: 148927 - DNA, 19 bp, Homo sapiens
  siRNA target sequence for NID (NM_002508.1,780-798).
gaagagcaacggagcttat

SEQ ID NO: 148928 - DNA, 19 bp, Homo sapiens
  siRNA target sequence for NID (NM_002508.1,785-803).
gcaacggagcttataacat

SEQ ID NO: 148929 - DNA, 19 bp, Homo sapiens
  siRNA target sequence for NID (NM_002508.1,786-804).
caacggagcttataacata

SEQ ID NO: 148930 - DNA, 19 bp, Homo sapiens
  siRNA target sequence for NID (NM_002508.1,837-855).
ggccaagagtagtaactct

SEQ ID NO: 148931 - DNA, 19 bp, Homo sapiens
  siRNA target sequence for NID (NM_002508.1,924-942).
cgtgatcctcggaactgaa

SEQ ID NO: 148932 - DNA, 19 bp, Homo sapiens
  siRNA target sequence for NID (NM_002508.1,927-945).
gatcctcggaactgaagat

SEQ ID NO: 148933 - DNA, 19 bp, Homo sapiens
  siRNA target sequence for NID (NM_002508.1,1152-1170).
gttggcagtggagactttt

SEQ ID NO: 148934 - DNA, 19 bp, Homo sapiens
  siRNA target sequence for NID (NM_002508.1,1220-1238).
gagttgttttcagctataa

SEQ ID NO: 148935 - DNA, 19 bp, Homo sapiens
  siRNA target sequence for NID (NM_002508.1,1252-1270).
cagacgtgtgctaacaaca

SEQ ID NO: 148936 - DNA, 19 bp, Homo sapiens
  siRNA target sequence for NID (NM_002508.1,1349-1367).
gcaatggcaggcaatgtgt

SEQ ID NO: 148937 - DNA, 19 bp, Homo sapiens
  siRNA target sequence for NID (NM_002508.1,1430-1448).
gccaggtccccattgtctt

SEQ ID NO: 148938 - DNA, 19 bp, Homo sapiens
  siRNA target sequence for NID (NM_002508.1,1431-1449).
ccaggtccccattgtcttt

SEQ ID NO: 148939 - DNA, 19 bp, Homo sapiens
  siRNA target sequence for NID (NM_002508.1,1462-1480).
ctccactcttacgtagtaa

SEQ ID NO: 148940 - DNA, 19 bp, Homo sapiens
  siRNA target sequence for NID (NM_002508.1,1465-1483).
cactcttacgtagtaatga

SEQ ID NO: 148941 - DNA, 19 bp, Homo sapiens
  siRNA target sequence for NID (NM_002508.1,1519-1537).
cccgagaccgttggatatt

SEQ ID NO: 148942 - DNA, 19 bp, Homo sapiens
  siRNA target sequence for NID (NM_002508.1,1521-1539).
cgagaccgttggatattct

SEQ ID NO: 148943 - DNA, 19 bp, Homo sapiens
  siRNA target sequence for NID (NM_002508.1,1591-1609).
gagcaggacggattcaaga

SEQ ID NO: 148944 - DNA, 19 bp, Homo sapiens
  siRNA target sequence for NID (NM_002508.1,1593-1611).
gcaggacggattcaagaat

SEQ ID NO: 148945 - DNA, 19 bp, Homo sapiens
  siRNA target sequence for NID (NM_002508.1,1775-1793).
gctcctccgtgcacattga

SEQ ID NO: 148946 - DNA, 19 bp, Homo sapiens
  siRNA target sequence for NID (NM_002508.1,1891-1909).
ccttcacgcatctacactt

SEQ ID NO: 148947 - DNA, 19 bp, Homo sapiens
  siRNA target sequence for NID (NM_002508.1,1892-1910).
cttcacgcatctacactta

SEQ ID NO: 148948 - DNA, 19 bp, Homo sapiens
  siRNA target sequence for NID (NM_002508.1,2000-2018).
gcgtgttcgtcctgtacaa

SEQ ID NO: 148949 - DNA, 19 bp, Homo sapiens
  siRNA target sequence for NID (NM_002508.1,2202-2220).
cgggcgaacctgctatgat

SEQ ID NO: 148950 - DNA, 19 bp, Homo sapiens
  siRNA target sequence for NID (NM_002508.1,2203-2221).
gggcgaacctgctatgata

SEQ ID NO: 148951 - DNA, 19 bp, Homo sapiens
  siRNA target sequence for NID (NM_002508.1,2204-2222).
ggcgaacctgctatgatat

SEQ ID NO: 148952 - DNA, 19 bp, Homo sapiens
  siRNA target sequence for NID (NM_002508.1,2205-2223).
gcgaacctgctatgatatt

SEQ ID NO: 148953 - DNA, 19 bp, Homo sapiens
  siRNA target sequence for NID (NM_002508.1,2259-2277).
ccacacaatctgcaataat

SEQ ID NO: 148954 - DNA, 19 bp, Homo sapiens
  siRNA target sequence for NID (NM_002508.1,2305-2323).
gtggagggctaccagtttt

SEQ ID NO: 148955 - DNA, 19 bp, Homo sapiens
  siRNA target sequence for NID (NM_002508.1,2307-2325).
ggagggctaccagttttca

SEQ ID NO: 148956 - DNA, 19 bp, Homo sapiens
  siRNA target sequence for NID (NM_002508.1,2310-2328).
gggctaccagttttcagat

SEQ ID NO: 148957 - DNA, 19 bp, Homo sapiens
  siRNA target sequence for NID (NM_002508.1,2375-2393).
gtgaaactggccttcataa

SEQ ID NO: 148958 - DNA, 19 bp, Homo sapiens
  siRNA target sequence for NID (NM_002508.1,2481-2499).
ccaagcctgccaagatgta

SEQ ID NO: 148959 - DNA, 19 bp, Homo sapiens
  siRNA target sequence for NID (NM_002508.1,2640-2658).
gcacgagcgagaacacatt

SEQ ID NO: 148960 - DNA, 19 bp, Homo sapiens
  siRNA target sequence for NID (NM_002508.1,2996-3014).
caaaggcgttccttcatgt

SEQ ID NO: 148961 - DNA, 19 bp, Homo sapiens
  siRNA target sequence for NID (NM_002508.1,3010-3028).
catgtcccggctaaagtca

SEQ ID NO: 148962 - DNA, 19 bp, Homo sapiens
  siRNA target sequence for NID (NM_002508.1,3015-3033).
cccggctaaagtcatcatt

SEQ ID NO: 148963 - DNA, 19 bp, Homo sapiens
  siRNA target sequence for NID (NM_002508.1,3050-3068).
gcgtggacaagatggttta

SEQ ID NO: 148964 - DNA, 19 bp, Homo sapiens
  siRNA target sequence for NID (NM_002508.1,3052-3070).
gtggacaagatggtttact

SEQ ID NO: 148965 - DNA, 19 bp, Homo sapiens
  siRNA target sequence for NID (NM_002508.1,3093-3111).
cattgggagagctagtcta

SEQ ID NO: 148966 - DNA, 19 bp, Homo sapiens
  siRNA target sequence for NID (NM_002508.1,3121-3139).
gagccaaccaccatcatta

SEQ ID NO: 148967 - DNA, 19 bp, Homo sapiens
  siRNA target sequence for NID (NM_002508.1,3123-3141).
gccaaccaccatcattaga

SEQ ID NO: 148968 - DNA, 19 bp, Homo sapiens
  siRNA target sequence for NID (NM_002508.1,3129-3147).
caccatcattagacaagat

SEQ ID NO: 148969 - DNA, 19 bp, Homo sapiens
  siRNA target sequence for NID (NM_002508.1,3131-3149).
ccatcattagacaagatct

SEQ ID NO: 148970 - DNA, 19 bp, Homo sapiens
  siRNA target sequence for NID (NM_002508.1,3181-3199).
cttggccgcaacatcttct

SEQ ID NO: 148971 - DNA, 19 bp, Homo sapiens
  siRNA target sequence for NID (NM_002508.1,3207-3225).
ctctaacctggatcgaata

SEQ ID NO: 148972 - DNA, 19 bp, Homo sapiens
  siRNA target sequence for NID (NM_002508.1,3209-3227).
ctaacctggatcgaataga

SEQ ID NO: 148973 - DNA, 19 bp, Homo sapiens
  siRNA target sequence for NID (NM_002508.1,3282-3300).
gaatcccagaggcattgta

SEQ ID NO: 148974 - DNA, 19 bp, Homo sapiens
  siRNA target sequence for NID (NM_002508.1,3308-3326).
ccgtgagagggaaccttta

SEQ ID NO: 148975 - DNA, 19 bp, Homo sapiens
  siRNA target sequence for NID (NM_002508.1,3342-3360).
cagagataaccccaagatt

SEQ ID NO: 148976 - DNA, 19 bp, Homo sapiens
  siRNA target sequence for NID (NM_002508.1,3344-3362).
gagataaccccaagattga

SEQ ID NO: 148977 - DNA, 19 bp, Homo sapiens
  siRNA target sequence for NID (NM_002508.1,3560-3578).
cgagctacgggaagaatct

SEQ ID NO: 148978 - DNA, 19 bp, Homo sapiens
  siRNA target sequence for NID (NM_002508.1,3563-3581).
gctacgggaagaatctgta

SEQ ID NO: 148979 - DNA, 19 bp, Homo sapiens
  siRNA target sequence for NID (NM_002508.1,3564-3582).
ctacgggaagaatctgtat

SEQ ID NO: 148980 - DNA, 19 bp, Homo sapiens
  siRNA target sequence for NID (NM_002508.1,3613-3631).
gctctcgatcttgcaattt

SEQ ID NO: 148981 - DNA, 19 bp, Homo sapiens
  siRNA target sequence for NID (NM_002508.1,3636-3654).
ggagacggatgctttccaa

SEQ ID NO: 148982 - DNA, 19 bp, Homo sapiens
  siRNA target sequence for NID (NM_002508.1,3704-3722).
gtccgcaaggccataacta

SEQ ID NO: 148983 - DNA, 19 bp, Homo sapiens
  siRNA target sequence for NID (NM_002508.1,3706-3724).
ccgcaaggccataactact

SEQ ID NO: 148984 - DNA, 19 bp, Homo sapiens
  siRNA target sequence for NID (NM_002508.1,3720-3738).
ctactgctcagtgaacaat

SEQ ID NO: 148985 - DNA, 19 bp, Homo sapiens
  siRNA target sequence for NID (NM_002508.1,3803-3821).
ccttgggagttgactgtat

SEQ ID NO: 148986 - DNA, 19 bp, Homo sapiens
  siRNA target sequence for NID (NM_002508.1,3807-3825).
gggagttgactgtatcgaa

SEQ ID NO: 148987 - DNA, 19 bp, Homo sapiens
  siRNA target sequence for NIN (NM_016350.3,348-366).
ccgtcccaagggtgtatgt

SEQ ID NO: 148988 - DNA, 19 bp, Homo sapiens
  siRNA target sequence for NIN (NM_016350.3,391-409).
ggcgaaggcatcttcagat

SEQ ID NO: 148989 - DNA, 19 bp, Homo sapiens
  siRNA target sequence for NIN (NM_016350.3,432-450).
ggaaaatccagcacgttaa

SEQ ID NO: 148990 - DNA, 19 bp, Homo sapiens
  siRNA target sequence for NIN (NM_016350.3,433-451).
gaaaatccagcacgttaaa

SEQ ID NO: 148991 - DNA, 19 bp, Homo sapiens
  siRNA target sequence for NIN (NM_016350.3,524-542).
ctcttgggcagggtacatt

SEQ ID NO: 148992 - DNA, 19 bp, Homo sapiens
  siRNA target sequence for NIN (NM_016350.3,534-552).
gggtacattttgaccaatt

SEQ ID NO: 148993 - DNA, 19 bp, Homo sapiens
  siRNA target sequence for NIN (NM_016350.3,547-565).
ccaatttaaagaagcatta

SEQ ID NO: 148994 - DNA, 19 bp, Homo sapiens
  siRNA target sequence for NIN (NM_016350.3,560-578).
gcattaatactcatcttgt

SEQ ID NO: 148995 - DNA, 19 bp, Homo sapiens
  siRNA target sequence for NIN (NM_016350.3,579-597).
ccagaactctgtcaaatga

SEQ ID NO: 148996 - DNA, 19 bp, Homo sapiens
  siRNA target sequence for NIN (NM_016350.3,632-650).
gctcagcccaaatatgtta

SEQ ID NO: 148997 - DNA, 19 bp, Homo sapiens
  siRNA target sequence for NIN (NM_016350.3,848-866).
ccagatgacttgaatgctt

SEQ ID NO: 148998 - DNA, 19 bp, Homo sapiens
  siRNA target sequence for NIN (NM_016350.3,984-1002).
gtgagcagtatggtttaca

SEQ ID NO: 148999 - DNA, 19 bp, Homo sapiens
  siRNA target sequence for NIN (NM_016350.3,1016-1034).
gagatgctcgaggaagtat

SEQ ID NO: 149000 - DNA, 19 bp, Homo sapiens
  siRNA target sequence for NIN (NM_016350.3,1021-1039).
gctcgaggaagtattccat

SEQ ID NO: 149001 - DNA, 19 bp, Homo sapiens
  siRNA target sequence for NIN (NM_016350.3,1022-1040).
ctcgaggaagtattccata

SEQ ID NO: 149002 - DNA, 19 bp, Homo sapiens
  siRNA target sequence for NIN (NM_016350.3,1024-1042).
cgaggaagtattccataat

SEQ ID NO: 149003 - DNA, 19 bp, Homo sapiens
  siRNA target sequence for NIN (NM_016350.3,1046-1064).
gatcctgacggtacaatga

SEQ ID NO: 149004 - DNA, 19 bp, Homo sapiens
  siRNA target sequence for NIN (NM_016350.3,1054-1072).
cggtacaatgagtgtagaa

SEQ ID NO: 149005 - DNA, 19 bp, Homo sapiens
  siRNA target sequence for NIN (NM_016350.3,1056-1074).
gtacaatgagtgtagaaga

SEQ ID NO: 149006 - DNA, 19 bp, Homo sapiens
  siRNA target sequence for NIN (NM_016350.3,1128-1146).
ctccatatagacaactaaa

SEQ ID NO: 149007 - DNA, 19 bp, Homo sapiens
  siRNA target sequence for NIN (NM_016350.3,1130-1148).
ccatatagacaactaaaaa

SEQ ID NO: 149008 - DNA, 19 bp, Homo sapiens
  siRNA target sequence for NIN (NM_016350.3,1348-1366).
cctcgatggaaacatcaat

SEQ ID NO: 149009 - DNA, 19 bp, Homo sapiens
  siRNA target sequence for NIN (NM_016350.3,1349-1367).
ctcgatggaaacatcaatt

SEQ ID NO: 149010 - DNA, 19 bp, Homo sapiens
  siRNA target sequence for NIN (NM_016350.3,1352-1370).
gatggaaacatcaatttga

SEQ ID NO: 149011 - DNA, 19 bp, Homo sapiens
  siRNA target sequence for NIN (NM_016350.3,1440-1458).
ccagctttaaggctgaaat

SEQ ID NO: 149012 - DNA, 19 bp, Homo sapiens
  siRNA target sequence for NIN (NM_016350.3,1529-1547).
gccgagaagctcaagtctt

SEQ ID NO: 149013 - DNA, 19 bp, Homo sapiens
  siRNA target sequence for NIN (NM_016350.3,1531-1549).
cgagaagctcaagtcttta

SEQ ID NO: 149014 - DNA, 19 bp, Homo sapiens
  siRNA target sequence for NIN (NM_016350.3,1532-1550).
gagaagctcaagtctttaa

SEQ ID NO: 149015 - DNA, 19 bp, Homo sapiens
  siRNA target sequence for NIN (NM_016350.3,1554-1572).
cctcggaggtggatgatca

SEQ ID NO: 149016 - DNA, 19 bp, Homo sapiens
  siRNA target sequence for NIN (NM_016350.3,1627-1645).
gtacaaggagcgaatagca

SEQ ID NO: 149017 - DNA, 19 bp, Homo sapiens
  siRNA target sequence for NIN (NM_016350.3,1637-1655).
cgaatagcagccttaaaaa

SEQ ID NO: 149018 - DNA, 19 bp, Homo sapiens
  siRNA target sequence for NIN (NM_016350.3,1698-1716).
gcaagcagcgtttagaact

SEQ ID NO: 149019 - DNA, 19 bp, Homo sapiens
  siRNA target sequence for NIN (NM_016350.3,1699-1717).
caagcagcgtttagaactt

SEQ ID NO: 149020 - DNA, 19 bp, Homo sapiens
  siRNA target sequence for NIN (NM_016350.3,1702-1720).
gcagcgtttagaacttgaa

SEQ ID NO: 149021 - DNA, 19 bp, Homo sapiens
  siRNA target sequence for NIN (NM_016350.3,1914-1932).
ctagcagtgctgagttctt

SEQ ID NO: 149022 - DNA, 19 bp, Homo sapiens
  siRNA target sequence for NIN (NM_016350.3,2076-2094).
caccgtcagaagaagttga

SEQ ID NO: 149023 - DNA, 19 bp, Homo sapiens
  siRNA target sequence for NIN (NM_016350.3,2125-2143).
cgggctcggttctgaagaa

SEQ ID NO: 149024 - DNA, 19 bp, Homo sapiens
  siRNA target sequence for NIN (NM_016350.3,2126-2144).
gggctcggttctgaagaat

SEQ ID NO: 149025 - DNA, 19 bp, Homo sapiens
  siRNA target sequence for NIN (NM_016350.3,2141-2159).
gaatgcaatccattgaata

SEQ ID NO: 149026 - DNA, 19 bp, Homo sapiens
  siRNA target sequence for NIN (NM_016350.3,2172-2190).
cagagctggtcattgaaca

SEQ ID NO: 149027 - DNA, 19 bp, Homo sapiens
  siRNA target sequence for NIN (NM_016350.3,2332-2350).
cgaaacgcacaccttagaa

SEQ ID NO: 149028 - DNA, 19 bp, Homo sapiens
  siRNA target sequence for NIN (NM_016350.3,2333-2351).
gaaacgcacaccttagaaa

SEQ ID NO: 149029 - DNA, 19 bp, Homo sapiens
  siRNA target sequence for NIN (NM_016350.3,2407-2425).
gctcaaggaggcacatcat

SEQ ID NO: 149030 - DNA, 19 bp, Homo sapiens
  siRNA target sequence for NIN (NM_016350.3,2798-2816).
gcccagtttcagtctgatt

SEQ ID NO: 149031 - DNA, 19 bp, Homo sapiens
  siRNA target sequence for NIN (NM_016350.3,3106-3124).
cctggaagacctaagaaat

SEQ ID NO: 149032 - DNA, 19 bp, Homo sapiens
  siRNA target sequence for NIN (NM_016350.3,3110-3128).
gaagacctaagaaatgtat

SEQ ID NO: 149033 - DNA, 19 bp, Homo sapiens
  siRNA target sequence for NIN (NM_016350.3,3169-3187).
gctgaagagcagtcacaaa

SEQ ID NO: 149034 - DNA, 19 bp, Homo sapiens
  siRNA target sequence for NIN (NM_016350.3,3254-3272).
cggctggaaagactagaaa

SEQ ID NO: 149035 - DNA, 19 bp, Homo sapiens
  siRNA target sequence for NIN (NM_016350.3,3255-3273).
ggctggaaagactagaaat

SEQ ID NO: 149036 - DNA, 19 bp, Homo sapiens
  siRNA target sequence for NIN (NM_016350.3,3368-3386).
gccgagatgagcacagaaa

SEQ ID NO: 149037 - DNA, 19 bp, Homo sapiens
  siRNA target sequence for NIN (NM_016350.3,3390-3408).
ccagacttcagagtaaaat

SEQ ID NO: 149038 - DNA, 19 bp, Homo sapiens
  siRNA target sequence for NIN (NM_016350.3,3649-3667).
gccagggttagtaatgtct

SEQ ID NO: 149039 - DNA, 19 bp, Homo sapiens
  siRNA target sequence for NIN (NM_016350.3,3650-3668).
ccagggttagtaatgtctt

SEQ ID NO: 149040 - DNA, 19 bp, Homo sapiens
  siRNA target sequence for NIN (NM_016350.3,3682-3700).
gccagctactgagtttttt

SEQ ID NO: 149041 - DNA, 19 bp, Homo sapiens
  siRNA target sequence for NIN (NM_016350.3,3686-3704).
gctactgagttttttggaa

SEQ ID NO: 149042 - DNA, 19 bp, Homo sapiens
  siRNA target sequence for NIN (NM_016350.3,3742-3760).
ccgaacgaagcaagtagaa

SEQ ID NO: 149043 - DNA, 19 bp, Homo sapiens
  siRNA target sequence for NIN (NM_016350.3,3771-3789).
ggcggcatgtcctaagtga

SEQ ID NO: 149044 - DNA, 19 bp, Homo sapiens
  siRNA target sequence for NIN (NM_016350.3,3808-3826).
ccgggacctgggaagtaca

SEQ ID NO: 149045 - DNA, 19 bp, Homo sapiens
  siRNA target sequence for NIN (NM_016350.3,3879-3897).
cagtagagggtttttctga

SEQ ID NO: 149046 - DNA, 19 bp, Homo sapiens
  siRNA target sequence for NIN (NM_016350.3,3888-3906).
gtttttctgagcttgaaaa

SEQ ID NO: 149047 - DNA, 19 bp, Homo sapiens
  siRNA target sequence for NIN (NM_016350.3,4018-4036).
ggacctactttttgatgtt

SEQ ID NO: 149048 - DNA, 19 bp, Homo sapiens
  siRNA target sequence for NIN (NM_016350.3,4079-4097).
gaggcttctcccaaatata

SEQ ID NO: 149049 - DNA, 19 bp, Homo sapiens
  siRNA target sequence for NIN (NM_016350.3,4083-4101).
cttctcccaaatataagct

SEQ ID NO: 149050 - DNA, 19 bp, Homo sapiens
  siRNA target sequence for NIN (NM_016350.3,4089-4107).
ccaaatataagctgttgta

SEQ ID NO: 149051 - DNA, 19 bp, Homo sapiens
  siRNA target sequence for NIN (NM_016350.3,4090-4108).
caaatataagctgttgtat

SEQ ID NO: 149052 - DNA, 19 bp, Homo sapiens
  siRNA target sequence for NIN (NM_016350.3,4115-4133).
gtgagccgagaaaatgact

SEQ ID NO: 149053 - DNA, 19 bp, Homo sapiens
  siRNA target sequence for NIN (NM_016350.3,4168-4186).
ctacgatgaggcactagaa

SEQ ID NO: 149054 - DNA, 19 bp, Homo sapiens
  siRNA target sequence for NIN (NM_016350.3,4171-4189).
cgatgaggcactagaaaat

SEQ ID NO: 149055 - DNA, 19 bp, Homo sapiens
  siRNA target sequence for NIN (NM_016350.3,4281-4299).
gttacgatgaggtcaaaat

SEQ ID NO: 149056 - DNA, 19 bp, Homo sapiens
  siRNA target sequence for NIN (NM_016350.3,4285-4303).
cgatgaggtcaaaatagaa

SEQ ID NO: 149057 - DNA, 19 bp, Homo sapiens
  siRNA target sequence for NIN (NM_016350.3,4423-4441).
cgaacctgatggaaatata

SEQ ID NO: 149058 - DNA, 19 bp, Homo sapiens
  siRNA target sequence for NIN (NM_016350.3,4477-4495).
cagggttaggagtgtacat

SEQ ID NO: 149059 - DNA, 19 bp, Homo sapiens
  siRNA target sequence for NIN (NM_016350.3,4479-4497).
gggttaggagtgtacatca

SEQ ID NO: 149060 - DNA, 19 bp, Homo sapiens
  siRNA target sequence for NIN (NM_016350.3,4480-4498).
ggttaggagtgtacatcat

SEQ ID NO: 149061 - DNA, 19 bp, Homo sapiens
  siRNA target sequence for NIN (NM_016350.3,4496-4514).
catgtcatagaggaatgta

SEQ ID NO: 149062 - DNA, 19 bp, Homo sapiens
  siRNA target sequence for NIN (NM_016350.3,4582-4600).
ctggttacatggaacaatt

SEQ ID NO: 149063 - DNA, 19 bp, Homo sapiens
  siRNA target sequence for NIN (NM_016350.3,4617-4635).
ggccaagagtacagaatca

SEQ ID NO: 149064 - DNA, 19 bp, Homo sapiens
  siRNA target sequence for NIN (NM_016350.3,4623-4641).
gagtacagaatcaagttat

SEQ ID NO: 149065 - DNA, 19 bp, Homo sapiens
  siRNA target sequence for NIN (NM_016350.3,4659-4677).
ctctcctaggctttcaaga

SEQ ID NO: 149066 - DNA, 19 bp, Homo sapiens
  siRNA target sequence for NIN (NM_016350.3,4696-4714).
ggccaccatagcagagtta

SEQ ID NO: 149067 - DNA, 19 bp, Homo sapiens
  siRNA target sequence for NIN (NM_016350.3,4698-4716).
ccaccatagcagagttaga

SEQ ID NO: 149068 - DNA, 19 bp, Homo sapiens
  siRNA target sequence for NIN (NM_016350.3,4699-4717).
caccatagcagagttagaa

SEQ ID NO: 149069 - DNA, 19 bp, Homo sapiens
  siRNA target sequence for NIN (NM_016350.3,4701-4719).
ccatagcagagttagaact

SEQ ID NO: 149070 - DNA, 19 bp, Homo sapiens
  siRNA target sequence for NIN (NM_016350.3,4711-4729).
gttagaactggagaaaaca

SEQ ID NO: 149071 - DNA, 19 bp, Homo sapiens
  siRNA target sequence for NIN (NM_016350.3,4756-4774).
gaaggagagagtcactatt

SEQ ID NO: 149072 - DNA, 19 bp, Homo sapiens
  siRNA target sequence for NIN (NM_016350.3,4759-4777).
ggagagagtcactatttta

SEQ ID NO: 149073 - DNA, 19 bp, Homo sapiens
  siRNA target sequence for NIN (NM_016350.3,4770-4788).
ctattttagttaagcaaaa

SEQ ID NO: 149074 - DNA, 19 bp, Homo sapiens
  siRNA target sequence for NIN (NM_016350.3,4890-4908).
gatatgaatctgaaaagct

SEQ ID NO: 149075 - DNA, 19 bp, Homo sapiens
  siRNA target sequence for NIN (NM_016350.3,4913-4931).
caggaaaattctattttga

SEQ ID NO: 149076 - DNA, 19 bp, Homo sapiens
  siRNA target sequence for NIN (NM_016350.3,4965-4983).
gcatttctaacctgaaatt

SEQ ID NO: 149077 - DNA, 19 bp, Homo sapiens
  siRNA target sequence for NIN (NM_016350.3,5017-5035).
gcaaaaaacggaaactgta

SEQ ID NO: 149078 - DNA, 19 bp, Homo sapiens
  siRNA target sequence for NIN (NM_016350.3,5025-5043).
cggaaactgtaaaacaaga

SEQ ID NO: 149079 - DNA, 19 bp, Homo sapiens
  siRNA target sequence for NIN (NM_016350.3,5110-5128).
ccaacaattggatttggaa

SEQ ID NO: 149080 - DNA, 19 bp, Homo sapiens
  siRNA target sequence for NIN (NM_016350.3,5189-5207).
cgtctaacagaaatgctat

SEQ ID NO: 149081 - DNA, 19 bp, Homo sapiens
  siRNA target sequence for NIN (NM_016350.3,5249-5267).
cgggaacaagagaagttta

SEQ ID NO: 149082 - DNA, 19 bp, Homo sapiens
  siRNA target sequence for NIN (NM_016350.3,5300-5318).
cagtcctccactttagtgt

SEQ ID NO: 149083 - DNA, 19 bp, Homo sapiens
  siRNA target sequence for NIN (NM_016350.3,5331-5349).
cggagctctctgaagttaa

SEQ ID NO: 149084 - DNA, 19 bp, Homo sapiens
  siRNA target sequence for NIN (NM_016350.3,5465-5483).
gttctaagctacaacgaaa

SEQ ID NO: 149085 - DNA, 19 bp, Homo sapiens
  siRNA target sequence for NIN (NM_016350.3,5531-5549).
gtcgataagttggcaaaat

SEQ ID NO: 149086 - DNA, 19 bp, Homo sapiens
  siRNA target sequence for NIN (NM_016350.3,5533-5551).
cgataagttggcaaaatca

SEQ ID NO: 149087 - DNA, 19 bp, Homo sapiens
  siRNA target sequence for NIN (NM_016350.3,5534-5552).
gataagttggcaaaatcaa

SEQ ID NO: 149088 - DNA, 19 bp, Homo sapiens
  siRNA target sequence for NIN (NM_016350.3,5606-5624).
catcagagtgcgagcttaa

SEQ ID NO: 149089 - DNA, 19 bp, Homo sapiens
  siRNA target sequence for NIN (NM_016350.3,5609-5627).
cagagtgcgagcttaaagt

SEQ ID NO: 149090 - DNA, 19 bp, Homo sapiens
  siRNA target sequence for NIN (NM_016350.3,5611-5629).
gagtgcgagcttaaagtca

SEQ ID NO: 149091 - DNA, 19 bp, Homo sapiens
  siRNA target sequence for NIN (NM_016350.3,5673-5691).
ccgtgcagaatgtaaacct

SEQ ID NO: 149092 - DNA, 19 bp, Homo sapiens
  siRNA target sequence for NIN (NM_016350.3,5692-5710).
gcaaatgtcccggatgaaa

SEQ ID NO: 149093 - DNA, 19 bp, Homo sapiens
  siRNA target sequence for NIN (NM_016350.3,5721-5739).
gagtgactcagcaggaaaa

SEQ ID NO: 149094 - DNA, 19 bp, Homo sapiens
  siRNA target sequence for NIN (NM_016350.3,5761-5779).
gatgtctttacataagcaa

SEQ ID NO: 149095 - DNA, 19 bp, Homo sapiens
  siRNA target sequence for NIN (NM_016350.3,5829-5847).
catcagggctccataacca

SEQ ID NO: 149096 - DNA, 19 bp, Homo sapiens
  siRNA target sequence for NIN (NM_016350.3,5865-5883).
gggacaagttggatcatct

SEQ ID NO: 149097 - DNA, 19 bp, Homo sapiens
  siRNA target sequence for NIN (NM_016350.3,5872-5890).
gttggatcatctgatgaat

SEQ ID NO: 149098 - DNA, 19 bp, Homo sapiens
  siRNA target sequence for NIN (NM_016350.3,6031-6049).
cccatcaggtaccatgaat

SEQ ID NO: 149099 - DNA, 19 bp, Homo sapiens
  siRNA target sequence for NIN (NM_016350.3,6270-6288).
ctcatgcttgggatttgca

SEQ ID NO: 149100 - DNA, 19 bp, Homo sapiens
  siRNA target sequence for NIN (NM_016350.3,6453-6471).
ctgtcatggaggaacgaat

SEQ ID NO: 149101 - DNA, 19 bp, Homo sapiens
  siRNA target sequence for NIN (NM_016350.3,6457-6475).
catggaggaacgaatgata

SEQ ID NO: 149102 - DNA, 19 bp, Homo sapiens
  siRNA target sequence for NIN (NM_016350.3,6460-6478).
ggaggaacgaatgatagaa

SEQ ID NO: 149103 - DNA, 19 bp, Homo sapiens
  siRNA target sequence for NIN (NM_016350.3,6487-6505).
gaaactgaaactagtgaaa

SEQ ID NO: 149104 - DNA, 19 bp, Homo sapiens
  siRNA target sequence for NIN (NM_016350.3,6586-6604).
cagctttaactccagtttt

SEQ ID NO: 149105 - DNA, 19 bp, Homo sapiens
  siRNA target sequence for NIN (NM_020921.2,6467-6485).
gattgccagcctcagtaat

SEQ ID NO: 149106 - DNA, 19 bp, Homo sapiens
  siRNA target sequence for NIN (NM_182944.1,6241-6259).
cagtgcacgcagattccta

SEQ ID NO: 149107 - DNA, 19 bp, Homo sapiens
  siRNA target sequence for NKD1 (NM_033119.3,809-827).
gaggagcgtccttgtcaat

SEQ ID NO: 149108 - DNA, 19 bp, Homo sapiens
  siRNA target sequence for NKD1 (NM_033119.3,811-829).
ggagcgtccttgtcaatca

SEQ ID NO: 149109 - DNA, 19 bp, Homo sapiens
  siRNA target sequence for NKD1 (NM_033119.3,986-1004).
gaggagaaaccactactta

SEQ ID NO: 149110 - DNA, 19 bp, Homo sapiens
  siRNA target sequence for NKD1 (NM_033119.3,991-1009).
gaaaccactacttagatct

SEQ ID NO: 149111 - DNA, 19 bp, Homo sapiens
  siRNA target sequence for NKD1 (NM_033119.3,1245-1263).
gggagcaagcactttgtga

SEQ ID NO: 149112 - DNA, 19 bp, Homo sapiens
  siRNA target sequence for NOTCH1 (NM_017617.2,237-255).
cagaggcgtggcagactat

SEQ ID NO: 149113 - DNA, 19 bp, Homo sapiens
  siRNA target sequence for NOTCH1 (NM_017617.2,394-412).
ggctggtcagggaaatcgt

SEQ ID NO: 149114 - DNA, 19 bp, Homo sapiens
  siRNA target sequence for NOTCH1 (NM_017617.2,521-539).
cctgccggcaggatgtcaa

SEQ ID NO: 149115 - DNA, 19 bp, Homo sapiens
  siRNA target sequence for NOTCH1 (NM_017617.2,1630-1648).
ctggacggacccaacactt

SEQ ID NO: 149116 - DNA, 19 bp, Homo sapiens
  siRNA target sequence for NOTCH1 (NM_017617.2,1633-1651).
gacggacccaacacttaca

SEQ ID NO: 149117 - DNA, 19 bp, Homo sapiens
  siRNA target sequence for NOTCH1 (NM_017617.2,1904-1922).
gacccaactgcgagatcaa

SEQ ID NO: 149118 - DNA, 19 bp, Homo sapiens
  siRNA target sequence for NOTCH1 (NM_017617.2,2014-2032).
gggagcatgtgtaacatca

SEQ ID NO: 149119 - DNA, 19 bp, Homo sapiens
  siRNA target sequence for NOTCH1 (NM_017617.2,2018-2036).
gcatgtgtaacatcaacat

SEQ ID NO: 149120 - DNA, 19 bp, Homo sapiens
  siRNA target sequence for NOTCH1 (NM_017617.2,2140-2158).
ctgtctgaggtcaatgagt

SEQ ID NO: 149121 - DNA, 19 bp, Homo sapiens
  siRNA target sequence for NOTCH1 (NM_017617.2,2403-2421).
gaaccagggcacgtgtatt

SEQ ID NO: 149122 - DNA, 19 bp, Homo sapiens
  siRNA target sequence for NOTCH1 (NM_017617.2,2425-2443).
gacgttgccgggtacaagt

SEQ ID NO: 149123 - DNA, 19 bp, Homo sapiens
  siRNA target sequence for NOTCH1 (NM_017617.2,2597-2615).
cctgtgaggtcgacatcaa

SEQ ID NO: 149124 - DNA, 19 bp, Homo sapiens
  siRNA target sequence for NOTCH1 (NM_017617.2,3054-3072).
ctgccagcacgatgtcaat

SEQ ID NO: 149125 - DNA, 19 bp, Homo sapiens
  siRNA target sequence for NOTCH1 (NM_017617.2,3056-3074).
gccagcacgatgtcaatga

SEQ ID NO: 149126 - DNA, 19 bp, Homo sapiens
  siRNA target sequence for NOTCH1 (NM_017617.2,3058-3076).
cagcacgatgtcaatgagt

SEQ ID NO: 149127 - DNA, 19 bp, Homo sapiens
  siRNA target sequence for NOTCH1 (NM_017617.2,3265-3283).
ggctggaccggcctttact

SEQ ID NO: 149128 - DNA, 19 bp, Homo sapiens
  siRNA target sequence for NOTCH1 (NM_017617.2,3703-3721).
cggagccccaagtgcttta

SEQ ID NO: 149129 - DNA, 19 bp, Homo sapiens
  siRNA target sequence for NOTCH1 (NM_017617.2,3854-3872).
gcgtgcagcgcgtcaatga

SEQ ID NO: 149130 - DNA, 19 bp, Homo sapiens
  siRNA target sequence for NOTCH1 (NM_017617.2,3856-3874).
gtgcagcgcgtcaatgact

SEQ ID NO: 149131 - DNA, 19 bp, Homo sapiens
  siRNA target sequence for NOTCH1 (NM_017617.2,3912-3930).
ctgcgagtccgtcatcaat

SEQ ID NO: 149132 - DNA, 19 bp, Homo sapiens
  siRNA target sequence for NOTCH1 (NM_017617.2,4433-4451).
gtgactgctccctcaactt

SEQ ID NO: 149133 - DNA, 19 bp, Homo sapiens
  siRNA target sequence for NOTCH1 (NM_017617.2,4832-4850).
cacacggccagcagatgat

SEQ ID NO: 149134 - DNA, 19 bp, Homo sapiens
  siRNA target sequence for NOTCH1 (NM_017617.2,5422-5440).
gacgacaaccagaatgagt

SEQ ID NO: 149135 - DNA, 19 bp, Homo sapiens
  siRNA target sequence for NOTCH1 (NM_017617.2,5728-5746).
gtcatctccgacttcatct

SEQ ID NO: 149136 - DNA, 19 bp, Homo sapiens
  siRNA target sequence for NOTCH1 (NM_017617.2,6147-6165).
gaagaacggggctaacaaa

SEQ ID NO: 149137 - DNA, 19 bp, Homo sapiens
  siRNA target sequence for NOTCH1 (NM_017617.2,6150-6168).
gaacggggctaacaaagat

SEQ ID NO: 149138 - DNA, 19 bp, Homo sapiens
  siRNA target sequence for NOTCH1 (NM_017617.2,6155-6173).
gggctaacaaagatatgca

SEQ ID NO: 149139 - DNA, 19 bp, Homo sapiens
  siRNA target sequence for NOTCH1 (NM_017617.2,6900-6918).
cgggtccaccagtttgaat

SEQ ID NO: 149140 - DNA, 19 bp, Homo sapiens
  siRNA target sequence for NOTCH1 (NM_017617.2,6952-6970).
ggcatggtgccgaaccaat

SEQ ID NO: 149141 - DNA, 19 bp, Homo sapiens
  siRNA target sequence for NOTCH1 (NM_017617.2,6953-6971).
gcatggtgccgaaccaata

SEQ ID NO: 149142 - DNA, 19 bp, Homo sapiens
  siRNA target sequence for NOTCH1 (NM_017617.2,7352-7370).
gcctggcggtgcacactat

SEQ ID NO: 149143 - DNA, 19 bp, Homo sapiens
  siRNA target sequence for NOTCH1 (NM_017617.2,7353-7371).
cctggcggtgcacactatt

SEQ ID NO: 149144 - DNA, 19 bp, Homo sapiens
  siRNA target sequence for NOTCH1 (NM_017617.2,7568-7586).
gctcgtccccgcattccaa

SEQ ID NO: 149145 - DNA, 19 bp, Homo sapiens
  siRNA target sequence for NOTCH2 (NM_024408.2,1023-1041).
cctgtgagaggaatattga

SEQ ID NO: 149146 - DNA, 19 bp, Homo sapiens
  siRNA target sequence for NOTCH2 (NM_024408.2,1026-1044).
gtgagaggaatattgatga

SEQ ID NO: 149147 - DNA, 19 bp, Homo sapiens
  siRNA target sequence for NOTCH2 (NM_024408.2,1085-1103).
gatggggtcaacacttaca

SEQ ID NO: 149148 - DNA, 19 bp, Homo sapiens
  siRNA target sequence for NOTCH2 (NM_024408.2,1435-1453).
ccccctaaatgggcaatat

SEQ ID NO: 149149 - DNA, 19 bp, Homo sapiens
  siRNA target sequence for NOTCH2 (NM_024408.2,1439-1457).
ctaaatgggcaatatattt

SEQ ID NO: 149150 - DNA, 19 bp, Homo sapiens
  siRNA target sequence for NOTCH2 (NM_024408.2,1585-1603).
gtgtctgaagggttatgca

SEQ ID NO: 149151 - DNA, 19 bp, Homo sapiens
  siRNA target sequence for NOTCH2 (NM_024408.2,1661-1679).
gctacctgtctggataaga

SEQ ID NO: 149152 - DNA, 19 bp, Homo sapiens
  siRNA target sequence for NOTCH2 (NM_024408.2,1662-1680).
ctacctgtctggataagat

SEQ ID NO: 149153 - DNA, 19 bp, Homo sapiens
  siRNA target sequence for NOTCH2 (NM_024408.2,1714-1732).
caaaggtgtgcattgtgaa

SEQ ID NO: 149154 - DNA, 19 bp, Homo sapiens
  siRNA target sequence for NOTCH2 (NM_024408.2,1755-1773).
gcaacccttgtgtgaacaa

SEQ ID NO: 149155 - DNA, 19 bp, Homo sapiens
  siRNA target sequence for NOTCH2 (NM_024408.2,1756-1774).
caacccttgtgtgaacaat

SEQ ID NO: 149156 - DNA, 19 bp, Homo sapiens
  siRNA target sequence for NOTCH2 (NM_024408.2,1867-1885).
cagtactccgtgtctgaat

SEQ ID NO: 149157 - DNA, 19 bp, Homo sapiens
  siRNA target sequence for NOTCH2 (NM_024408.2,1904-1922).
cacccgaatggctatgaat

SEQ ID NO: 149158 - DNA, 19 bp, Homo sapiens
  siRNA target sequence for NOTCH2 (NM_024408.2,2001-2019).
gtcagtgtcaggatggtat

SEQ ID NO: 149159 - DNA, 19 bp, Homo sapiens
  siRNA target sequence for NOTCH2 (NM_024408.2,2067-2085).
gcagtgaccagattgatga

SEQ ID NO: 149160 - DNA, 19 bp, Homo sapiens
  siRNA target sequence for NOTCH2 (NM_024408.2,2162-2180).
ggcacgtcaggggttaatt

SEQ ID NO: 149161 - DNA, 19 bp, Homo sapiens
  siRNA target sequence for NOTCH2 (NM_024408.2,2164-2182).
cacgtcaggggttaattgt

SEQ ID NO: 149162 - DNA, 19 bp, Homo sapiens
  siRNA target sequence for NOTCH2 (NM_024408.2,2166-2184).
cgtcaggggttaattgtga

SEQ ID NO: 149163 - DNA, 19 bp, Homo sapiens
  siRNA target sequence for NOTCH2 (NM_024408.2,2167-2185).
gtcaggggttaattgtgaa

SEQ ID NO: 149164 - DNA, 19 bp, Homo sapiens
  siRNA target sequence for NOTCH2 (NM_024408.2,2359-2377).
gaatggtttccgctgtata

SEQ ID NO: 149165 - DNA, 19 bp, Homo sapiens
  siRNA target sequence for NOTCH2 (NM_024408.2,2465-2483).
ggtctcagtggatataagt

SEQ ID NO: 149166 - DNA, 19 bp, Homo sapiens
  siRNA target sequence for NOTCH2 (NM_024408.2,2498-2516).
ggctgggttggcatcaact

SEQ ID NO: 149167 - DNA, 19 bp, Homo sapiens
  siRNA target sequence for NOTCH2 (NM_024408.2,2534-2552).
gaatgcctttcgaatccat

SEQ ID NO: 149168 - DNA, 19 bp, Homo sapiens
  siRNA target sequence for NOTCH2 (NM_024408.2,2573-2591).
gacaatctggtgaatggat

SEQ ID NO: 149169 - DNA, 19 bp, Homo sapiens
  siRNA target sequence for NOTCH2 (NM_024408.2,2612-2630).
ggctttaaaggctataact

SEQ ID NO: 149170 - DNA, 19 bp, Homo sapiens
  siRNA target sequence for NOTCH2 (NM_024408.2,2629-2647).
ctgccaggtgaatattgat

SEQ ID NO: 149171 - DNA, 19 bp, Homo sapiens
  siRNA target sequence for NOTCH2 (NM_024408.2,2693-2711).
gacataagtggctacactt

SEQ ID NO: 149172 - DNA, 19 bp, Homo sapiens
  siRNA target sequence for NOTCH2 (NM_024408.2,2726-2744).
ccatacacaggcaagaatt

SEQ ID NO: 149173 - DNA, 19 bp, Homo sapiens
  siRNA target sequence for NOTCH2 (NM_024408.2,2770-2788).
cccaaacccttgtgagaat

SEQ ID NO: 149174 - DNA, 19 bp, Homo sapiens
  siRNA target sequence for NOTCH2 (NM_024408.2,2799-2817).
gcaaagagtcaccaaattt

SEQ ID NO: 149175 - DNA, 19 bp, Homo sapiens
  siRNA target sequence for NOTCH2 (NM_024408.2,2804-2822).
gagtcaccaaattttgaga

SEQ ID NO: 149176 - DNA, 19 bp, Homo sapiens
  siRNA target sequence for NOTCH2 (NM_024408.2,2860-2878).
gcggtgtaccattgacatt

SEQ ID NO: 149177 - DNA, 19 bp, Homo sapiens
  siRNA target sequence for NOTCH2 (NM_024408.2,2873-2891).
gacattgacgagtgtatct

SEQ ID NO: 149178 - DNA, 19 bp, Homo sapiens
  siRNA target sequence for NOTCH2 (NM_024408.2,2996-3014).
gactgccttgccaatcctt

SEQ ID NO: 149179 - DNA, 19 bp, Homo sapiens
  siRNA target sequence for NOTCH2 (NM_024408.2,3074-3092).
ggtttcactggggataagt

SEQ ID NO: 149180 - DNA, 19 bp, Homo sapiens
  siRNA target sequence for NOTCH2 (NM_024408.2,3116-3134).
ctgagtgaaccctgtaaga

SEQ ID NO: 149181 - DNA, 19 bp, Homo sapiens
  siRNA target sequence for NOTCH2 (NM_024408.2,3118-3136).
gagtgaaccctgtaagaat

SEQ ID NO: 149182 - DNA, 19 bp, Homo sapiens
  siRNA target sequence for NOTCH2 (NM_024408.2,3150-3168).
ctgactacgtcaacagtta

SEQ ID NO: 149183 - DNA, 19 bp, Homo sapiens
  siRNA target sequence for NOTCH2 (NM_024408.2,3152-3170).
gactacgtcaacagttaca

SEQ ID NO: 149184 - DNA, 19 bp, Homo sapiens
  siRNA target sequence for NOTCH2 (NM_024408.2,3198-3216).
gagtccattgtgagaacaa

SEQ ID NO: 149185 - DNA, 19 bp, Homo sapiens
  siRNA target sequence for NOTCH2 (NM_024408.2,3456-3474).
gcagtcggtctccatgtaa

SEQ ID NO: 149186 - DNA, 19 bp, Homo sapiens
  siRNA target sequence for NOTCH2 (NM_024408.2,3457-3475).
cagtcggtctccatgtaaa

SEQ ID NO: 149187 - DNA, 19 bp, Homo sapiens
  siRNA target sequence for NOTCH2 (NM_024408.2,3482-3500).
ggtacttgcgttcagaaaa

SEQ ID NO: 149188 - DNA, 19 bp, Homo sapiens
  siRNA target sequence for NOTCH2 (NM_024408.2,3483-3501).
gtacttgcgttcagaaaaa

SEQ ID NO: 149189 - DNA, 19 bp, Homo sapiens
  siRNA target sequence for NOTCH2 (NM_024408.2,3622-3640).
ctcaggtgtctgcatcaat

SEQ ID NO: 149190 - DNA, 19 bp, Homo sapiens
  siRNA target sequence for NOTCH2 (NM_024408.2,3641-3659).
gctggcaacacgcattact

SEQ ID NO: 149191 - DNA, 19 bp, Homo sapiens
  siRNA target sequence for NOTCH2 (NM_024408.2,3754-3772).
cttcattggtggatacaga

SEQ ID NO: 149192 - DNA, 19 bp, Homo sapiens
  siRNA target sequence for NOTCH2 (NM_024408.2,3949-3967).
gggtccccattgccttaat

SEQ ID NO: 149193 - DNA, 19 bp, Homo sapiens
  siRNA target sequence for NOTCH2 (NM_024408.2,3968-3986).
ggtggtcagtgcatggata

SEQ ID NO: 149194 - DNA, 19 bp, Homo sapiens
  siRNA target sequence for NOTCH2 (NM_024408.2,3972-3990).
gtcagtgcatggataggat

SEQ ID NO: 149195 - DNA, 19 bp, Homo sapiens
  siRNA target sequence for NOTCH2 (NM_024408.2,4086-4104).
gcagcctggactgtataca

SEQ ID NO: 149196 - DNA, 19 bp, Homo sapiens
  siRNA target sequence for NOTCH2 (NM_024408.2,4430-4448).
cagcgccagcctccttatt

SEQ ID NO: 149197 - DNA, 19 bp, Homo sapiens
  siRNA target sequence for NOTCH2 (NM_024408.2,4433-4451).
cgccagcctccttattact

SEQ ID NO: 149198 - DNA, 19 bp, Homo sapiens
  siRNA target sequence for NOTCH2 (NM_024408.2,4667-4685).
ccctgctgggattatatca

SEQ ID NO: 149199 - DNA, 19 bp, Homo sapiens
  siRNA target sequence for NOTCH2 (NM_024408.2,4668-4686).
cctgctgggattatatcaa

SEQ ID NO: 149200 - DNA, 19 bp, Homo sapiens
  siRNA target sequence for NOTCH2 (NM_024408.2,4713-4731).
cggtcgagtgcctgtttga

SEQ ID NO: 149201 - DNA, 19 bp, Homo sapiens
  siRNA target sequence for NOTCH2 (NM_024408.2,4715-4733).
gtcgagtgcctgtttgaca

SEQ ID NO: 149202 - DNA, 19 bp, Homo sapiens
  siRNA target sequence for NOTCH2 (NM_024408.2,4720-4738).
gtgcctgtttgacaacttt

SEQ ID NO: 149203 - DNA, 19 bp, Homo sapiens
  siRNA target sequence for NOTCH2 (NM_024408.2,4759-4777).
gacatgcaagtatgacaaa

SEQ ID NO: 149204 - DNA, 19 bp, Homo sapiens
  siRNA target sequence for NOTCH2 (NM_024408.2,4761-4779).
catgcaagtatgacaaata

SEQ ID NO: 149205 - DNA, 19 bp, Homo sapiens
  siRNA target sequence for NOTCH2 (NM_024408.2,4780-4798).
ctgtgcagaccacttcaaa

SEQ ID NO: 149206 - DNA, 19 bp, Homo sapiens
  siRNA target sequence for NOTCH2 (NM_024408.2,4785-4803).
cagaccacttcaaagacaa

SEQ ID NO: 149207 - DNA, 19 bp, Homo sapiens
  siRNA target sequence for NOTCH2 (NM_024408.2,4884-4902).
cagaaggtaccctggttat

SEQ ID NO: 149208 - DNA, 19 bp, Homo sapiens
  siRNA target sequence for NOTCH2 (NM_024408.2,5020-5038).
ggtgtacccctattatggt

SEQ ID NO: 149209 - DNA, 19 bp, Homo sapiens
  siRNA target sequence for NOTCH2 (NM_024408.2,5110-5128).
ggctggctctaaagtcttt

SEQ ID NO: 149210 - DNA, 19 bp, Homo sapiens
  siRNA target sequence for NOTCH2 (NM_024408.2,5246-5264).
gtgtctgtcgtcagtgaat

SEQ ID NO: 149211 - DNA, 19 bp, Homo sapiens
  siRNA target sequence for NOTCH2 (NM_024408.2,5280-5298).
gcactcagctcctctatct

SEQ ID NO: 149212 - DNA, 19 bp, Homo sapiens
  siRNA target sequence for NOTCH2 (NM_024408.2,5344-5362).
ggtaatcatggcaaaacga

SEQ ID NO: 149213 - DNA, 19 bp, Homo sapiens
  siRNA target sequence for NOTCH2 (NM_024408.2,5411-5429).
cgagatgcaagcaatcaca

SEQ ID NO: 149214 - DNA, 19 bp, Homo sapiens
  siRNA target sequence for NOTCH2 (NM_024408.2,5486-5504).
gtctcagaagctaacctaa

SEQ ID NO: 149215 - DNA, 19 bp, Homo sapiens
  siRNA target sequence for NOTCH2 (NM_024408.2,5492-5510).
gaagctaacctaattggta

SEQ ID NO: 149216 - DNA, 19 bp, Homo sapiens
  siRNA target sequence for NOTCH2 (NM_024408.2,5578-5596).
ggccttactctcagaagaa

SEQ ID NO: 149217 - DNA, 19 bp, Homo sapiens
  siRNA target sequence for NOTCH2 (NM_024408.2,5738-5756).
ggctgcaccccattgatgt

SEQ ID NO: 149218 - DNA, 19 bp, Homo sapiens
  siRNA target sequence for NOTCH2 (NM_024408.2,6043-6061).
gattcgcaaccgagtaact

SEQ ID NO: 149219 - DNA, 19 bp, Homo sapiens
  siRNA target sequence for NOTCH2 (NM_024408.2,6049-6067).
caaccgagtaactgatcta

SEQ ID NO: 149220 - DNA, 19 bp, Homo sapiens
  siRNA target sequence for NOTCH2 (NM_024408.2,6052-6070).
ccgagtaactgatctagat

SEQ ID NO: 149221 - DNA, 19 bp, Homo sapiens
  siRNA target sequence for NOTCH2 (NM_024408.2,6129-6147).
gaatggtggcagaactgat

SEQ ID NO: 149222 - DNA, 19 bp, Homo sapiens
  siRNA target sequence for NOTCH2 (NM_024408.2,6175-6193).
ggatgaccatggaaaatct

SEQ ID NO: 149223 - DNA, 19 bp, Homo sapiens
  siRNA target sequence for NOTCH2 (NM_024408.2,6264-6282).
gagacatgcaggacaacaa

SEQ ID NO: 149224 - DNA, 19 bp, Homo sapiens
  siRNA target sequence for NOTCH2 (NM_024408.2,6363-6381).
gagacatcacagaccatat

SEQ ID NO: 149225 - DNA, 19 bp, Homo sapiens
  siRNA target sequence for NOTCH2 (NM_024408.2,6367-6385).
catcacagaccatatggat

SEQ ID NO: 149226 - DNA, 19 bp, Homo sapiens
  siRNA target sequence for NOTCH2 (NM_024408.2,6414-6432).
gcatgcaccatgacattgt

SEQ ID NO: 149227 - DNA, 19 bp, Homo sapiens
  siRNA target sequence for NOTCH2 (NM_024408.2,6470-6488).
ccaggcaccgtgttgactt

SEQ ID NO: 149228 - DNA, 19 bp, Homo sapiens
  siRNA target sequence for NOTCH2 (NM_024408.2,6548-6566).
ccaatgggcaagaagtcta

SEQ ID NO: 149229 - DNA, 19 bp, Homo sapiens
  siRNA target sequence for NOTCH2 (NM_024408.2,6681-6699).
ctgagagttcagtaacttt

SEQ ID NO: 149230 - DNA, 19 bp, Homo sapiens
  siRNA target sequence for NOTCH2 (NM_024408.2,6768-6786).
catcccctgggatcttaca

SEQ ID NO: 149231 - DNA, 19 bp, Homo sapiens
  siRNA target sequence for NOTCH2 (NM_024408.2,6789-6807).
cctcacccaaccctatgtt

SEQ ID NO: 149232 - DNA, 19 bp, Homo sapiens
  siRNA target sequence for NOTCH2 (NM_024408.2,6839-6857).
gcccagcatgcactatctt

SEQ ID NO: 149233 - DNA, 19 bp, Homo sapiens
  siRNA target sequence for NOTCH2 (NM_024408.2,6840-6858).
cccagcatgcactatcttt

SEQ ID NO: 149234 - DNA, 19 bp, Homo sapiens
  siRNA target sequence for NOTCH2 (NM_024408.2,6841-6859).
ccagcatgcactatctttt

SEQ ID NO: 149235 - DNA, 19 bp, Homo sapiens
  siRNA target sequence for NOTCH2 (NM_024408.2,6999-7017).
cagtcccagcagattggat

SEQ ID NO: 149236 - DNA, 19 bp, Homo sapiens
  siRNA target sequence for NOTCH2 (NM_024408.2,7124-7142).
gaagggaagcacataacca

SEQ ID NO: 149237 - DNA, 19 bp, Homo sapiens
  siRNA target sequence for NOTCH2 (NM_024408.2,7183-7201).
catccctaaaggcagtatt

SEQ ID NO: 149238 - DNA, 19 bp, Homo sapiens
  siRNA target sequence for NOTCH2 (NM_024408.2,7413-7431).
ccccttcacagcacagtta

SEQ ID NO: 149239 - DNA, 19 bp, Homo sapiens
  siRNA target sequence for NOTCH2 (NM_024408.2,7414-7432).
cccttcacagcacagttat

SEQ ID NO: 149240 - DNA, 19 bp, Homo sapiens
  siRNA target sequence for NOTCH2 (NM_024408.2,7426-7444).
cagttatgcttcctcaaat

SEQ ID NO: 149241 - DNA, 19 bp, Homo sapiens
  siRNA target sequence for NOTCH2 (NM_024408.2,7635-7653).
ctgagccaccacacaacaa

SEQ ID NO: 149242 - DNA, 19 bp, Homo sapiens
  siRNA target sequence for NOTCH2 (NM_024408.2,7637-7655).
gagccaccacacaacaaca

SEQ ID NO: 149243 - DNA, 19 bp, Homo sapiens
  siRNA target sequence for NOTCH3 (NM_000435.1,213-231).
cggaagcccgtgtgcaaat

SEQ ID NO: 149244 - DNA, 19 bp, Homo sapiens
  siRNA target sequence for NOTCH3 (NM_000435.1,642-660).
ctacacagggccactatgt

SEQ ID NO: 149245 - DNA, 19 bp, Homo sapiens
  siRNA target sequence for NOTCH3 (NM_000435.1,757-775).
gggtttgagggtcagaatt

SEQ ID NO: 149246 - DNA, 19 bp, Homo sapiens
  siRNA target sequence for NOTCH3 (NM_000435.1,835-853).
gatggcgtcaacacctata

SEQ ID NO: 149247 - DNA, 19 bp, Homo sapiens
  siRNA target sequence for NOTCH3 (NM_000435.1,1007-1025).
gctgcagtcagaatatcga

SEQ ID NO: 149248 - DNA, 19 bp, Homo sapiens
  siRNA target sequence for NOTCH3 (NM_000435.1,1008-1026).
ctgcagtcagaatatcgat

SEQ ID NO: 149249 - DNA, 19 bp, Homo sapiens
  siRNA target sequence for NOTCH3 (NM_000435.1,1069-1087).
gaccgcgtggcttctttct

SEQ ID NO: 149250 - DNA, 19 bp, Homo sapiens
  siRNA target sequence for NOTCH3 (NM_000435.1,1158-1176).
ccacgaggatgctatctgt

SEQ ID NO: 149251 - DNA, 19 bp, Homo sapiens
  siRNA target sequence for NOTCH3 (NM_000435.1,1431-1449).
ccagttcacctgtatctgt

SEQ ID NO: 149252 - DNA, 19 bp, Homo sapiens
  siRNA target sequence for NOTCH3 (NM_000435.1,1432-1450).
cagttcacctgtatctgta

SEQ ID NO: 149253 - DNA, 19 bp, Homo sapiens
  siRNA target sequence for NOTCH3 (NM_000435.1,1527-1545).
ctgcaaggaccgagtcaat

SEQ ID NO: 149254 - DNA, 19 bp, Homo sapiens
  siRNA target sequence for NOTCH3 (NM_000435.1,3090-3108).
cagccgccagccttgtcaa

SEQ ID NO: 149255 - DNA, 19 bp, Homo sapiens
  siRNA target sequence for NOTCH3 (NM_000435.1,3368-3386).
ggacctgccgtggctatat

SEQ ID NO: 149256 - DNA, 19 bp, Homo sapiens
  siRNA target sequence for NOTCH3 (NM_000435.1,3538-3556).
ggggtgctctgcgagatta

SEQ ID NO: 149257 - DNA, 19 bp, Homo sapiens
  siRNA target sequence for NOTCH3 (NM_000435.1,3539-3557).
gggtgctctgcgagattaa

SEQ ID NO: 149258 - DNA, 19 bp, Homo sapiens
  siRNA target sequence for NOTCH3 (NM_000435.1,3540-3558).
ggtgctctgcgagattaat

SEQ ID NO: 149259 - DNA, 19 bp, Homo sapiens
  siRNA target sequence for NOTCH3 (NM_000435.1,3680-3698).
gctgcgaggcagacatcaa

SEQ ID NO: 149260 - DNA, 19 bp, Homo sapiens
  siRNA target sequence for NOTCH3 (NM_000435.1,4483-4501).
ccggtgtacgagaagtact

SEQ ID NO: 149261 - DNA, 19 bp, Homo sapiens
  siRNA target sequence for NOTCH3 (NM_000435.1,4807-4825).
gtgatcggctcggtagtaa

SEQ ID NO: 149262 - DNA, 19 bp, Homo sapiens
  siRNA target sequence for NOTCH3 (NM_000435.1,5176-5194).
gacgcgctgggcatgaaga

SEQ ID NO: 149263 - DNA, 19 bp, Homo sapiens
  siRNA target sequence for NOTCH3 (NM_000435.1,5262-5280).
ggccaagcggctaaaggta

SEQ ID NO: 149264 - DNA, 19 bp, Homo sapiens
  siRNA target sequence for NOTCH3 (NM_000435.1,5946-5964).
ggccctgctcaaaaatgga

SEQ ID NO: 149265 - DNA, 19 bp, Homo sapiens
  siRNA target sequence for NOTCH4 (NM_004557.2,506-524).
ccctccttctgttccaaaa

SEQ ID NO: 149266 - DNA, 19 bp, Homo sapiens
  siRNA target sequence for NOTCH4 (NM_004557.2,599-617).
cagcttcgggacttctgtt

SEQ ID NO: 149267 - DNA, 19 bp, Homo sapiens
  siRNA target sequence for NOTCH4 (NM_004557.2,758-776).
ggcacctcctgccataaca

SEQ ID NO: 149268 - DNA, 19 bp, Homo sapiens
  siRNA target sequence for NOTCH4 (NM_004557.2,975-993).
gtgtcagccaccaatgtca

SEQ ID NO: 149269 - DNA, 19 bp, Homo sapiens
  siRNA target sequence for NOTCH4 (NM_004557.2,1198-1216).
gaacctggatgactgtatt

SEQ ID NO: 149270 - DNA, 19 bp, Homo sapiens
  siRNA target sequence for NOTCH4 (NM_004557.2,1553-1571).
gaggctgatcacaatgagt

SEQ ID NO: 149271 - DNA, 19 bp, Homo sapiens
  siRNA target sequence for NOTCH4 (NM_004557.2,1773-1791).
cccgatgtgaggaggatat

SEQ ID NO: 149272 - DNA, 19 bp, Homo sapiens
  siRNA target sequence for NOTCH4 (NM_004557.2,1776-1794).
gatgtgaggaggatatcga

SEQ ID NO: 149273 - DNA, 19 bp, Homo sapiens
  siRNA target sequence for NOTCH4 (NM_004557.2,1880-1898).
gaagggccacgctgtcaaa

SEQ ID NO: 149274 - DNA, 19 bp, Homo sapiens
  siRNA target sequence for NOTCH4 (NM_004557.2,1884-1902).
ggccacgctgtcaaacaga

SEQ ID NO: 149275 - DNA, 19 bp, Homo sapiens
  siRNA target sequence for NOTCH4 (NM_004557.2,2039-2057).
cagcccaagcagatatgta

SEQ ID NO: 149276 - DNA, 19 bp, Homo sapiens
  siRNA target sequence for NOTCH4 (NM_004557.2,2452-2470).
gtctgccccgtgcttcaat

SEQ ID NO: 149277 - DNA, 19 bp, Homo sapiens
  siRNA target sequence for NOTCH4 (NM_004557.2,3289-3307).
cagccaaccctgctttcat

SEQ ID NO: 149278 - DNA, 19 bp, Homo sapiens
  siRNA target sequence for NOTCH4 (NM_004557.2,3333-3351).
gatcacccctgggtttcat

SEQ ID NO: 149279 - DNA, 19 bp, Homo sapiens
  siRNA target sequence for NOTCH4 (NM_004557.2,3514-3532).
gaccccaccagctcctaaa

SEQ ID NO: 149280 - DNA, 19 bp, Homo sapiens
  siRNA target sequence for NOTCH4 (NM_004557.2,3928-3946).
caacgggcactgtgagaaa

SEQ ID NO: 149281 - DNA, 19 bp, Homo sapiens
  siRNA target sequence for NOTCH4 (NM_004557.2,5194-5212).
gctccgtagcagacaaact

SEQ ID NO: 149282 - DNA, 19 bp, Homo sapiens
  siRNA target sequence for NOTCH4 (NM_004557.2,5281-5299).
cctggttgaagaactgatt

SEQ ID NO: 149283 - DNA, 19 bp, Homo sapiens
  siRNA target sequence for NOTCH4 (NM_004557.2,5663-5681).
gcacggacggtgtcagtaa

SEQ ID NO: 149284 - DNA, 19 bp, Homo sapiens
  siRNA target sequence for NOTCH4 (NM_004557.2,5775-5793).
ggacttggtccgtagactt

SEQ ID NO: 149285 - DNA, 19 bp, Homo sapiens
  siRNA target sequence for NOTCH4 (NM_004557.2,5907-5925).
ggcccaaccctgcgataat

SEQ ID NO: 149286 - DNA, 19 bp, Homo sapiens
  siRNA target sequence for NOTCH4 (NM_004557.2,5919-5937).
cgataatgcgaggaagata

SEQ ID NO: 149287 - DNA, 19 bp, Homo sapiens
  siRNA target sequence for NOTCH4 (NM_004557.2,6067-6085).
gcggggatcacctcaactt

SEQ ID NO: 149288 - DNA, 19 bp, Homo sapiens
  siRNA target sequence for NOX5 (NM_024505.2,338-356).
gtgactcagcagtttaaga

SEQ ID NO: 149289 - DNA, 19 bp, Homo sapiens
  siRNA target sequence for NOX5 (NM_024505.2,382-400).
cagcctgcaagaattcaaa

SEQ ID NO: 149290 - DNA, 19 bp, Homo sapiens
  siRNA target sequence for NOX5 (NM_024505.2,404-422).
gctctgcatgtgaaagagt

SEQ ID NO: 149291 - DNA, 19 bp, Homo sapiens
  siRNA target sequence for NOX5 (NM_024505.2,449-467).
ctatttgactccgatagaa

SEQ ID NO: 149292 - DNA, 19 bp, Homo sapiens
  siRNA target sequence for NOX5 (NM_024505.2,528-546).
ccatggacaaactcaaatt

SEQ ID NO: 149293 - DNA, 19 bp, Homo sapiens
  siRNA target sequence for NOX5 (NM_024505.2,1520-1538).
gtgcctggaatcttgtttt

SEQ ID NO: 149294 - DNA, 19 bp, Homo sapiens
  siRNA target sequence for NOX5 (NM_024505.2,1662-1680).
gacctggtgactacttgta

SEQ ID NO: 149295 - DNA, 19 bp, Homo sapiens
  siRNA target sequence for NOX5 (NM_024505.2,1665-1683).
ctggtgactacttgtatct

SEQ ID NO: 149296 - DNA, 19 bp, Homo sapiens
  siRNA target sequence for NOX5 (NM_024505.2,1667-1685).
ggtgactacttgtatctga

SEQ ID NO: 149297 - DNA, 19 bp, Homo sapiens
  siRNA target sequence for NOX5 (NM_024505.2,1668-1686).
gtgactacttgtatctgaa

SEQ ID NO: 149298 - DNA, 19 bp, Homo sapiens
  siRNA target sequence for NOX5 (NM_024505.2,1829-1847).
ctgggccgtggttctaaga

SEQ ID NO: 149299 - DNA, 19 bp, Homo sapiens
  siRNA target sequence for NOX5 (NM_024505.2,1891-1909).
caagggctctgagatactt

SEQ ID NO: 149300 - DNA, 19 bp, Homo sapiens
  siRNA target sequence for NOX5 (NM_024505.2,2045-2063).
ctgcagagtatcatgtaca

SEQ ID NO: 149301 - DNA, 19 bp, Homo sapiens
  siRNA target sequence for NOX5 (NM_024505.2,2117-2135).
ggtgtccaagacaacatga

SEQ ID NO: 149302 - DNA, 19 bp, Homo sapiens
  siRNA target sequence for NOX5 (NM_024505.2,2138-2156).
ctccataaggtggacttta

SEQ ID NO: 149303 - DNA, 19 bp, Homo sapiens
  siRNA target sequence for NOX5 (NM_024505.2,2280-2298).
ctgcactgggcaagaatga

SEQ ID NO: 149304 - DNA, 19 bp, Homo sapiens
  siRNA target sequence for NOX5 (NM_024505.2,2507-2525).
gagaagttcggcttcagat

SEQ ID NO: 149305 - DNA, 19 bp, Homo sapiens
  siRNA target sequence for NOX5 (NM_024505.2,2515-2533).
cggcttcagatttttccaa

SEQ ID NO: 149306 - DNA, 19 bp, Homo sapiens
  siRNA target sequence for OAZ2 (NM_002537.1,216-234).
cacccaggacagtagtatt

SEQ ID NO: 149307 - DNA, 19 bp, Homo sapiens
  siRNA target sequence for OAZ2 (NM_002537.1,264-282).
gtgctgcaggcacattgtt

SEQ ID NO: 149308 - DNA, 19 bp, Homo sapiens
  siRNA target sequence for OAZ2 (NM_002537.1,369-387).
cagctctaatatataagga

SEQ ID NO: 149309 - DNA, 19 bp, Homo sapiens
  siRNA target sequence for OAZ2 (NM_002537.1,409-427).
ggacctccctgtgaatgat

SEQ ID NO: 149310 - DNA, 19 bp, Homo sapiens
  siRNA target sequence for OAZ2 (NM_002537.1,506-524).
cagagcctgtttgtagaaa

SEQ ID NO: 149311 - DNA, 19 bp, Homo sapiens
  siRNA target sequence for OAZ2 (NM_002537.1,550-568).
gagcaaagaaggattgtta

SEQ ID NO: 149312 - DNA, 19 bp, Homo sapiens
  siRNA target sequence for OAZ2 (NM_002537.1,714-732).
cctctcggccagatgtgat

SEQ ID NO: 149313 - DNA, 19 bp, Homo sapiens
  siRNA target sequence for OAZ2 (NM_002537.1,717-735).
ctcggccagatgtgatgtt

SEQ ID NO: 149314 - DNA, 19 bp, Homo sapiens
  siRNA target sequence for OAZ2 (NM_002537.1,719-737).
cggccagatgtgatgttca

SEQ ID NO: 149315 - DNA, 19 bp, Homo sapiens
  siRNA target sequence for OAZ2 (NM_002537.1,746-764).
cccctggaccagaacttgt

SEQ ID NO: 149316 - DNA, 19 bp, Homo sapiens
  siRNA target sequence for PADI1 (NM_013358.1,245-263).
caaccgcacacgtgtgaaa

SEQ ID NO: 149317 - DNA, 19 bp, Homo sapiens
  siRNA target sequence for PADI1 (NM_013358.1,304-322).
cagacatggtcgtatctgt

SEQ ID NO: 149318 - DNA, 19 bp, Homo sapiens
  siRNA target sequence for PADI1 (NM_013358.1,324-342).
ggcacagccagtaaggaat

SEQ ID NO: 149319 - DNA, 19 bp, Homo sapiens
  siRNA target sequence for PADI1 (NM_013358.1,325-343).
gcacagccagtaaggaatt

SEQ ID NO: 149320 - DNA, 19 bp, Homo sapiens
  siRNA target sequence for PADI1 (NM_013358.1,326-344).
cacagccagtaaggaatta

SEQ ID NO: 149321 - DNA, 19 bp, Homo sapiens
  siRNA target sequence for PADI1 (NM_013358.1,416-434).
cctcactggcgtcgatatt

SEQ ID NO: 149322 - DNA, 19 bp, Homo sapiens
  siRNA target sequence for PADI1 (NM_013358.1,480-498).
caaggggacaagaaaacct

SEQ ID NO: 149323 - DNA, 19 bp, Homo sapiens
  siRNA target sequence for PADI1 (NM_013358.1,686-704).
gaacgtgcccttttctgat

SEQ ID NO: 149324 - DNA, 19 bp, Homo sapiens
  siRNA target sequence for PADI1 (NM_013358.1,692-710).
gcccttttctgattccaaa

SEQ ID NO: 149325 - DNA, 19 bp, Homo sapiens
  siRNA target sequence for PADI1 (NM_013358.1,815-833).
gcaggagatcaagttctat

SEQ ID NO: 149326 - DNA, 19 bp, Homo sapiens
  siRNA target sequence for PADI1 (NM_013358.1,851-869).
ccccgatgccgatttccta

SEQ ID NO: 149327 - DNA, 19 bp, Homo sapiens
  siRNA target sequence for PADI1 (NM_013358.1,1244-1262).
gggtcctgactttggatat

SEQ ID NO: 149328 - DNA, 19 bp, Homo sapiens
  siRNA target sequence for PADI1 (NM_013358.1,1246-1264).
gtcctgactttggatatgt

SEQ ID NO: 149329 - DNA, 19 bp, Homo sapiens
  siRNA target sequence for PADI1 (NM_013358.1,1248-1266).
cctgactttggatatgtta

SEQ ID NO: 149330 - DNA, 19 bp, Homo sapiens
  siRNA target sequence for PADI1 (NM_013358.1,1624-1642).
cccagtttgatgggttaaa

SEQ ID NO: 149331 - DNA, 19 bp, Homo sapiens
  siRNA target sequence for PADI1 (NM_013358.1,1649-1667).
ggcaaaaagaagcattaat

SEQ ID NO: 149332 - DNA, 19 bp, Homo sapiens
  siRNA target sequence for PADI1 (NM_013358.1,1688-1706).
cctccagagagacaatctt

SEQ ID NO: 149333 - DNA, 19 bp, Homo sapiens
  siRNA target sequence for PADI1 (NM_013358.1,1691-1709).
ccagagagacaatcttcat

SEQ ID NO: 149334 - DNA, 19 bp, Homo sapiens
  siRNA target sequence for PADI1 (NM_013358.1,1700-1718).
caatcttcatgcacagaaa

SEQ ID NO: 149335 - DNA, 19 bp, Homo sapiens
  siRNA target sequence for PADI1 (NM_013358.1,1791-1809).
cagctcttcttcctgaaaa

SEQ ID NO: 149336 - DNA, 19 bp, Homo sapiens
  siRNA target sequence for PADI2 (NM_007365.1,340-358).
ggtcaccgtcaactactat

SEQ ID NO: 149337 - DNA, 19 bp, Homo sapiens
  siRNA target sequence for PADI2 (NM_007365.1,651-669).
ccggatacgagatagttct

SEQ ID NO: 149338 - DNA, 19 bp, Homo sapiens
  siRNA target sequence for PADI2 (NM_007365.1,679-697).
catgtcagactcagacaaa

SEQ ID NO: 149339 - DNA, 19 bp, Homo sapiens
  siRNA target sequence for PADI2 (NM_007365.1,978-996).
ctcccgtgtcggtgtttgt

SEQ ID NO: 149340 - DNA, 19 bp, Homo sapiens
  siRNA target sequence for PADI2 (NM_007365.1,1073-1091).
gtctgcttccagtacctaa

SEQ ID NO: 149341 - DNA, 19 bp, Homo sapiens
  siRNA target sequence for PADI2 (NM_007365.1,1178-1196).
ccccgagatggaaacctaa

SEQ ID NO: 149342 - DNA, 19 bp, Homo sapiens
  siRNA target sequence for PADI2 (NM_007365.1,1179-1197).
cccgagatggaaacctaaa

SEQ ID NO: 149343 - DNA, 19 bp, Homo sapiens
  siRNA target sequence for PADI2 (NM_007365.1,1769-1787).
ctgcccgctctgttcaaga

SEQ ID NO: 149344 - DNA, 19 bp, Homo sapiens
  siRNA target sequence for PADI3 (NM_016233.1,113-131).
gaccctcgtggacatttat

SEQ ID NO: 149345 - DNA, 19 bp, Homo sapiens
  siRNA target sequence for PADI3 (NM_016233.1,175-193).
cgcctggcgtggacatcta

SEQ ID NO: 149346 - DNA, 19 bp, Homo sapiens
  siRNA target sequence for PADI3 (NM_016233.1,310-328).
gccatgttcagatttccta

SEQ ID NO: 149347 - DNA, 19 bp, Homo sapiens
  siRNA target sequence for PADI3 (NM_016233.1,620-638).
ctttgatgaccacaaactt

SEQ ID NO: 149348 - DNA, 19 bp, Homo sapiens
  siRNA target sequence for PADI3 (NM_016233.1,952-970).
cacccctagaggtgtatgt

SEQ ID NO: 149349 - DNA, 19 bp, Homo sapiens
  siRNA target sequence for PADI3 (NM_016233.1,982-1000).
ggaacaacacgtgttttgt

SEQ ID NO: 149350 - DNA, 19 bp, Homo sapiens
  siRNA target sequence for PADI3 (NM_016233.1,1189-1207).
gaatcctgggtccagattt

SEQ ID NO: 149351 - DNA, 19 bp, Homo sapiens
  siRNA target sequence for PADI3 (NM_016233.1,1580-1598).
gttccagggggttgttgat

SEQ ID NO: 149352 - DNA, 19 bp, Homo sapiens
  siRNA target sequence for PADI3 (NM_016233.1,1583-1601).
ccagggggttgttgatgat

SEQ ID NO: 149353 - DNA, 19 bp, Homo sapiens
  siRNA target sequence for PADI3 (NM_016233.1,1647-1665).
gacctcatcaactacaata

SEQ ID NO: 149354 - DNA, 19 bp, Homo sapiens
  siRNA target sequence for PADI3 (NM_016233.1,1652-1670).
catcaactacaataagttt

SEQ ID NO: 149355 - DNA, 19 bp, Homo sapiens
  siRNA target sequence for PADI4 (NM_012387.1,163-181).
caggggtggtcgtggatat

SEQ ID NO: 149356 - DNA, 19 bp, Homo sapiens
  siRNA target sequence for PADI4 (NM_012387.1,251-269).
ggtgaccctgacgatgaaa

SEQ ID NO: 149357 - DNA, 19 bp, Homo sapiens
  siRNA target sequence for PADI4 (NM_012387.1,334-352).
cagtcaaagctctactcta

SEQ ID NO: 149358 - DNA, 19 bp, Homo sapiens
  siRNA target sequence for PADI4 (NM_012387.1,391-409).
cccgcaccggcaaagtgaa

SEQ ID NO: 149359 - DNA, 19 bp, Homo sapiens
  siRNA target sequence for PADI4 (NM_012387.1,415-433).
ccagagctgtgaaagatca

SEQ ID NO: 149360 - DNA, 19 bp, Homo sapiens
  siRNA target sequence for PADI4 (NM_012387.1,600-618).
gacttcttcacaaaccata

SEQ ID NO: 149361 - DNA, 19 bp, Homo sapiens
  siRNA target sequence for PADI4 (NM_012387.1,694-712).
ccaagtgcagcgtagtctt

SEQ ID NO: 149362 - DNA, 19 bp, Homo sapiens
  siRNA target sequence for PADI4 (NM_012387.1,748-766).
ccggtggaaagcacaacat

SEQ ID NO: 149363 - DNA, 19 bp, Homo sapiens
  siRNA target sequence for PADI4 (NM_012387.1,947-965).
ggtgtacgcgtgcagtatt

SEQ ID NO: 149364 - DNA, 19 bp, Homo sapiens
  siRNA target sequence for PADI4 (NM_012387.1,948-966).
gtgtacgcgtgcagtattt

SEQ ID NO: 149365 - DNA, 19 bp, Homo sapiens
  siRNA target sequence for PADI4 (NM_012387.1,950-968).
gtacgcgtgcagtattttt

SEQ ID NO: 149366 - DNA, 19 bp, Homo sapiens
  siRNA target sequence for PADI4 (NM_012387.1,953-971).
cgcgtgcagtatttttgaa

SEQ ID NO: 149367 - DNA, 19 bp, Homo sapiens
  siRNA target sequence for PADI4 (NM_012387.1,955-973).
cgtgcagtatttttgaaaa

SEQ ID NO: 149368 - DNA, 19 bp, Homo sapiens
  siRNA target sequence for PADI4 (NM_012387.1,995-1013).
gactactctggccatgaaa

SEQ ID NO: 149369 - DNA, 19 bp, Homo sapiens
  siRNA target sequence for PADI4 (NM_012387.1,1214-1232).
ccaaacagggggtatcagt

SEQ ID NO: 149370 - DNA, 19 bp, Homo sapiens
  siRNA target sequence for PADI4 (NM_012387.1,1276-1294).
cagtcaggggcaaggaata

SEQ ID NO: 149371 - DNA, 19 bp, Homo sapiens
  siRNA target sequence for PADI4 (NM_012387.1,1313-1331).
cttcggggacagctgttat

SEQ ID NO: 149372 - DNA, 19 bp, Homo sapiens
  siRNA target sequence for PADI4 (NM_012387.1,1398-1416).
gcccctgtgaagctctatt

SEQ ID NO: 149373 - DNA, 19 bp, Homo sapiens
  siRNA target sequence for PADI4 (NM_012387.1,1402-1420).
ctgtgaagctctattctga

SEQ ID NO: 149374 - DNA, 19 bp, Homo sapiens
  siRNA target sequence for PADI4 (NM_012387.1,1566-1584).
ctgttcgaagggatcaaga

SEQ ID NO: 149375 - DNA, 19 bp, Homo sapiens
  siRNA target sequence for PADI4 (NM_012387.1,1754-1772).
ctctaaggcggaagctttt

SEQ ID NO: 149376 - DNA, 19 bp, Homo sapiens
  siRNA target sequence for PATE (NM_138294.1,59-77).
ggcattatctggatcactt

SEQ ID NO: 149377 - DNA, 19 bp, Homo sapiens
  siRNA target sequence for PATE (NM_138294.1,70-88).
gatcactttcaatgagaaa

SEQ ID NO: 149378 - DNA, 19 bp, Homo sapiens
  siRNA target sequence for PATE (NM_138294.1,83-101).
gagaaatgatgcagtcaat

SEQ ID NO: 149379 - DNA, 19 bp, Homo sapiens
  siRNA target sequence for PATE (NM_138294.1,248-266).
gttcaaaagggatggtaat

SEQ ID NO: 149380 - DNA, 19 bp, Homo sapiens
  siRNA target sequence for PATE (NM_138294.1,258-276).
gatggtaatccctggttaa

SEQ ID NO: 149381 - DNA, 19 bp, Homo sapiens
  siRNA target sequence for PATE (NM_138294.1,261-279).
ggtaatccctggttaacct

SEQ ID NO: 149382 - DNA, 19 bp, Homo sapiens
  siRNA target sequence for PATE (NM_138294.1,262-280).
gtaatccctggttaacctt

SEQ ID NO: 149383 - DNA, 19 bp, Homo sapiens
  siRNA target sequence for PATE (NM_138294.1,306-324).
gatgtgaaaggcataaggt

SEQ ID NO: 149384 - DNA, 19 bp, Homo sapiens
  siRNA target sequence for PATE (NM_138294.1,317-335).
cataaggtggagtgtctat

SEQ ID NO: 149385 - DNA, 19 bp, Homo sapiens
  siRNA target sequence for PATE (NM_138294.1,322-340).
ggtggagtgtctatttggt

SEQ ID NO: 149386 - DNA, 19 bp, Homo sapiens
  siRNA target sequence for PATE (NM_138294.1,330-348).
gtctatttggtgaacttca

SEQ ID NO: 149387 - DNA, 19 bp, Homo sapiens
  siRNA target sequence for PC-LKC (NM_017675.2,227-245).
cgctgtcactccgaaaact

SEQ ID NO: 149388 - DNA, 19 bp, Homo sapiens
  siRNA target sequence for PC-LKC (NM_017675.2,281-299).
gacactctacacattcaaa

SEQ ID NO: 149389 - DNA, 19 bp, Homo sapiens
  siRNA target sequence for PC-LKC (NM_017675.2,283-301).
cactctacacattcaaagt

SEQ ID NO: 149390 - DNA, 19 bp, Homo sapiens
  siRNA target sequence for PC-LKC (NM_017675.2,451-469).
ccgtgctggccgtggataa

SEQ ID NO: 149391 - DNA, 19 bp, Homo sapiens
  siRNA target sequence for PC-LKC (NM_017675.2,456-474).
ctggccgtggataaagaca

SEQ ID NO: 149392 - DNA, 19 bp, Homo sapiens
  siRNA target sequence for PC-LKC (NM_017675.2,726-744).
cttgacccccagtttgtca

SEQ ID NO: 149393 - DNA, 19 bp, Homo sapiens
  siRNA target sequence for PC-LKC (NM_017675.2,984-1002).
gagacacacctcaacatct

SEQ ID NO: 149394 - DNA, 19 bp, Homo sapiens
  siRNA target sequence for PC-LKC (NM_017675.2,1059-1077).
gaccacaaacctgagtttt

SEQ ID NO: 149395 - DNA, 19 bp, Homo sapiens
  siRNA target sequence for PC-LKC (NM_017675.2,1062-1080).
cacaaacctgagttttaca

SEQ ID NO: 149396 - DNA, 19 bp, Homo sapiens
  siRNA target sequence for PC-LKC (NM_017675.2,1552-1570).
cgtggggccaaattaccta

SEQ ID NO: 149397 - DNA, 19 bp, Homo sapiens
  siRNA target sequence for PC-LKC (NM_017675.2,1571-1589).
cagcctgctcccaggaaat

SEQ ID NO: 149398 - DNA, 19 bp, Homo sapiens
  siRNA target sequence for PC-LKC (NM_017675.2,1773-1791).
gttagcggctcctacaaca

SEQ ID NO: 149399 - DNA, 19 bp, Homo sapiens
  siRNA target sequence for PC-LKC (NM_017675.2,1777-1795).
gcggctcctacaacatctt

SEQ ID NO: 149400 - DNA, 19 bp, Homo sapiens
  siRNA target sequence for PC-LKC (NM_017675.2,2037-2055).
gtcctcggcaccaaagtca

SEQ ID NO: 149401 - DNA, 19 bp, Homo sapiens
  siRNA target sequence for PC-LKC (NM_017675.2,2039-2057).
cctcggcaccaaagtcaat

SEQ ID NO: 149402 - DNA, 19 bp, Homo sapiens
  siRNA target sequence for PC-LKC (NM_017675.2,2224-2242).
ggagtggtgccaactactt

SEQ ID NO: 149403 - DNA, 19 bp, Homo sapiens
  siRNA target sequence for PC-LKC (NM_017675.2,2227-2245).
gtggtgccaactacttcat

SEQ ID NO: 149404 - DNA, 19 bp, Homo sapiens
  siRNA target sequence for PC-LKC (NM_017675.2,2302-2320).
cggacgtgagcctggatta

SEQ ID NO: 149405 - DNA, 19 bp, Homo sapiens
  siRNA target sequence for PC-LKC (NM_017675.2,2326-2344).
cacagcccgtcttcaactt

SEQ ID NO: 149406 - DNA, 19 bp, Homo sapiens
  siRNA target sequence for PC-LKC (NM_017675.2,2375-2393).
ggggggtgagaccatagta

SEQ ID NO: 149407 - DNA, 19 bp, Homo sapiens
  siRNA target sequence for PC-LKC (NM_017675.2,2377-2395).
ggggtgagaccatagtaga

SEQ ID NO: 149408 - DNA, 19 bp, Homo sapiens
  siRNA target sequence for PC-LKC (NM_017675.2,2394-2412).
gacgtctgcgtgaatgtga

SEQ ID NO: 149409 - DNA, 19 bp, Homo sapiens
  siRNA target sequence for PC-LKC (NM_017675.2,2396-2414).
cgtctgcgtgaatgtgaaa

SEQ ID NO: 149410 - DNA, 19 bp, Homo sapiens
  siRNA target sequence for PC-LKC (NM_017675.2,2462-2480).
catccgtgtggctgagaat

SEQ ID NO: 149411 - DNA, 19 bp, Homo sapiens
  siRNA target sequence for PC-LKC (NM_017675.2,2533-2551).
gtgcccagctggagataca

SEQ ID NO: 149412 - DNA, 19 bp, Homo sapiens
  siRNA target sequence for PC-LKC (NM_017675.2,2626-2644).
ccaacggctctgtgtacat

SEQ ID NO: 149413 - DNA, 19 bp, Homo sapiens
  siRNA target sequence for PC-LKC (NM_017675.2,2736-2754).
gcctacagcaacaatggaa

SEQ ID NO: 149414 - DNA, 19 bp, Homo sapiens
  siRNA target sequence for PC-LKC (NM_017675.2,2873-2891).
ggccagagacgatgattca

SEQ ID NO: 149415 - DNA, 19 bp, Homo sapiens
  siRNA target sequence for PC-LKC (NM_017675.2,2882-2900).
cgatgattcagggaacaat

SEQ ID NO: 149416 - DNA, 19 bp, Homo sapiens
  siRNA target sequence for PC-LKC (NM_017675.2,2970-2988).
ggtgtcttctcgatcttca

SEQ ID NO: 149417 - DNA, 19 bp, Homo sapiens
  siRNA target sequence for PC-LKC (NM_017675.2,3202-3220).
ccaacagacaggcgattaa

SEQ ID NO: 149418 - DNA, 19 bp, Homo sapiens
  siRNA target sequence for PC-LKC (NM_017675.2,3203-3221).
caacagacaggcgattaat

SEQ ID NO: 149419 - DNA, 19 bp, Homo sapiens
  siRNA target sequence for PC-LKC (NM_017675.2,3237-3255).
gcaaccaggactacagtat

SEQ ID NO: 149420 - DNA, 19 bp, Homo sapiens
  siRNA target sequence for PC-LKC (NM_017675.2,3238-3256).
caaccaggactacagtata

SEQ ID NO: 149421 - DNA, 19 bp, Homo sapiens
  siRNA target sequence for PC-LKC (NM_017675.2,3308-3326).
ctacctcgatgcctacttt

SEQ ID NO: 149422 - DNA, 19 bp, Homo sapiens
  siRNA target sequence for PC-LKC (NM_017675.2,3312-3330).
ctcgatgcctactttgtct

SEQ ID NO: 149423 - DNA, 19 bp, Homo sapiens
  siRNA target sequence for PC-LKC (NM_017675.2,3643-3661).
cagggactaacatgtacaa

SEQ ID NO: 149424 - DNA, 19 bp, Homo sapiens
  siRNA target sequence for PC-LKC (NM_017675.2,3645-3663).
gggactaacatgtacaaca

SEQ ID NO: 149425 - DNA, 19 bp, Homo sapiens
  siRNA target sequence for PCDH10 (NM_020815.1,859-877).
gatggtggaaggagtcttt

SEQ ID NO: 149426 - DNA, 19 bp, Homo sapiens
  siRNA target sequence for PCDH10 (NM_020815.1,930-948).
ggaatatcgctgaagatct

SEQ ID NO: 149427 - DNA, 19 bp, Homo sapiens
  siRNA target sequence for PCDH10 (NM_020815.1,944-962).
gatctgggtctggacatta

SEQ ID NO: 149428 - DNA, 19 bp, Homo sapiens
  siRNA target sequence for PCDH10 (NM_020815.1,947-965).
ctgggtctggacattacaa

SEQ ID NO: 149429 - DNA, 19 bp, Homo sapiens
  siRNA target sequence for PCDH10 (NM_020815.1,949-967).
gggtctggacattacaaaa

SEQ ID NO: 149430 - DNA, 19 bp, Homo sapiens
  siRNA target sequence for PCDH10 (NM_020815.1,1000-1018).
ctcaaggaccccttactta

SEQ ID NO: 149431 - DNA, 19 bp, Homo sapiens
  siRNA target sequence for PCDH10 (NM_020815.1,1002-1020).
caaggaccccttacttaga

SEQ ID NO: 149432 - DNA, 19 bp, Homo sapiens
  siRNA target sequence for PCDH10 (NM_020815.1,1045-1063).
gtacgtgaacgagaaaata

SEQ ID NO: 149433 - DNA, 19 bp, Homo sapiens
  siRNA target sequence for PCDH10 (NM_020815.1,1764-1782).
gcggcgagttggactatga

SEQ ID NO: 149434 - DNA, 19 bp, Homo sapiens
  siRNA target sequence for PCDH10 (NM_020815.1,1765-1783).
cggcgagttggactatgaa

SEQ ID NO: 149435 - DNA, 19 bp, Homo sapiens
  siRNA target sequence for PCDH10 (NM_020815.1,1767-1785).
gcgagttggactatgaaga

SEQ ID NO: 149436 - DNA, 19 bp, Homo sapiens
  siRNA target sequence for PCDH10 (NM_020815.1,1864-1882).
gcgagtactggatgctaat

SEQ ID NO: 149437 - DNA, 19 bp, Homo sapiens
  siRNA target sequence for PCDH10 (NM_020815.1,2150-2168).
gcgctctccaccagtaagt

SEQ ID NO: 149438 - DNA, 19 bp, Homo sapiens
  siRNA target sequence for PCDH10 (NM_020815.1,2223-2241).
cggtctacgacgtgtatgt

SEQ ID NO: 149439 - DNA, 19 bp, Homo sapiens
  siRNA target sequence for PCDH10 (NM_020815.1,2313-2331).
cccagcttgcctactctat

SEQ ID NO: 149440 - DNA, 19 bp, Homo sapiens
  siRNA target sequence for PCDH10 (NM_020815.1,2385-2403).
ctgagaacggctacttgta

SEQ ID NO: 149441 - DNA, 19 bp, Homo sapiens
  siRNA target sequence for PCDH10 (NM_020815.1,2493-2511).
gtaacgccactgtcaacat

SEQ ID NO: 149442 - DNA, 19 bp, Homo sapiens
  siRNA target sequence for PCDH10 (NM_020815.1,2502-2520).
ctgtcaacatcctcatagt

SEQ ID NO: 149443 - DNA, 19 bp, Homo sapiens
  siRNA target sequence for PCDH10 (NM_020815.1,2512-2530).
cctcatagtggatcaaaat

SEQ ID NO: 149444 - DNA, 19 bp, Homo sapiens
  siRNA target sequence for PCDH10 (NM_020815.1,2687-2705).
gtgcgtggcaacgaaatga

SEQ ID NO: 149445 - DNA, 19 bp, Homo sapiens
  siRNA target sequence for PCDH10 (NM_020815.1,2993-3011).
ggctcggtgtccttcatct

SEQ ID NO: 149446 - DNA, 19 bp, Homo sapiens
  siRNA target sequence for PCDH10 (NM_020815.1,3034-3052).
ggccgtgcgttgccaaaaa

SEQ ID NO: 149447 - DNA, 19 bp, Homo sapiens
  siRNA target sequence for PCDH10 (NM_020815.1,3038-3056).
gtgcgttgccaaaaagaga

SEQ ID NO: 149448 - DNA, 19 bp, Homo sapiens
  siRNA target sequence for PCDH10 (NM_020815.1,3061-3079).
gctcaacatctatacttgt

SEQ ID NO: 149449 - DNA, 19 bp, Homo sapiens
  siRNA target sequence for PCDH10 (NM_020815.1,3266-3284).
caccacaaccagaattact

SEQ ID NO: 149450 - DNA, 19 bp, Homo sapiens
  siRNA target sequence for PCDH10 (NM_020815.1,3315-3333).
ccaagaccgacctgatgtt

SEQ ID NO: 149451 - DNA, 19 bp, Homo sapiens
  siRNA target sequence for PCDH10 (NM_020815.1,3321-3339).
ccgacctgatgtttcttaa

SEQ ID NO: 149452 - DNA, 19 bp, Homo sapiens
  siRNA target sequence for PCDH10 (NM_020815.1,3413-3431).
cagcagcctgatatcatct

SEQ ID NO: 149453 - DNA, 19 bp, Homo sapiens
  siRNA target sequence for PCDH10 (NM_032961.1,3500-3518).
cctcgccgagttaacagtt

SEQ ID NO: 149454 - DNA, 19 bp, Homo sapiens
  siRNA target sequence for PCDH10 (NM_032961.1,3526-3544).
ccaggaagccgacatagta

SEQ ID NO: 149455 - DNA, 19 bp, Homo sapiens
  siRNA target sequence for PCDH10 (NM_032961.1,3527-3545).
caggaagccgacatagtaa

SEQ ID NO: 149456 - DNA, 19 bp, Homo sapiens
  siRNA target sequence for PCDH10 (NM_032961.1,3573-3591).
gtgaacagggagatagtga

SEQ ID NO: 149457 - DNA, 19 bp, Homo sapiens
  siRNA target sequence for PCDH10 (NM_032961.1,3613-3631).
ccagtcagctggtatggat

SEQ ID NO: 149458 - DNA, 19 bp, Homo sapiens
  siRNA target sequence for PCDH10 (NM_032961.1,3618-3636).
cagctggtatggatctctt

SEQ ID NO: 149459 - DNA, 19 bp, Homo sapiens
  siRNA target sequence for PCDH10 (NM_032961.1,3629-3647).
gatctcttctccaattgca

SEQ ID NO: 149460 - DNA, 19 bp, Homo sapiens
  siRNA target sequence for PCDH10 (NM_032961.1,3714-3732).
gacgccaggctgctgatta

SEQ ID NO: 149461 - DNA, 19 bp, Homo sapiens
  siRNA target sequence for PCDH10 (NM_032961.1,3809-3827).
ggggcagagcggtcctttt

SEQ ID NO: 149462 - DNA, 19 bp, Homo sapiens
  siRNA target sequence for PCDH10 (NM_032961.1,3812-3830).
gcagagcggtccttttcca

SEQ ID NO: 149463 - DNA, 19 bp, Homo sapiens
  siRNA target sequence for PCDH10 (NM_032961.1,3881-3899).
gatggactgctgactaata

SEQ ID NO: 149464 - DNA, 19 bp, Homo sapiens
  siRNA target sequence for PCDH10 (NM_032961.1,3907-3925).
gccttacaaaccaccatat

SEQ ID NO: 149465 - DNA, 19 bp, Homo sapiens
  siRNA target sequence for PCDH10 (NM_032961.1,3909-3927).
cttacaaaccaccatattt

SEQ ID NO: 149466 - DNA, 19 bp, Homo sapiens
  siRNA target sequence for PCDH11X (NM_014522.1,3879-3897).
gtaggtatccaagtttcta

SEQ ID NO: 149467 - DNA, 19 bp, Homo sapiens
  siRNA target sequence for PCDH11X (NM_032968.2,3901-3919).
cttgcacccccatgaaaga

SEQ ID NO: 149468 - DNA, 19 bp, Homo sapiens
  siRNA target sequence for PCDH11X (NM_032968.2,3950-3968).
ccaaccacagcggaaatct

SEQ ID NO: 149469 - DNA, 19 bp, Homo sapiens
  siRNA target sequence for PCDH12 (NM_016580.2,1247-1265).
ggggccaggtggctactta

SEQ ID NO: 149470 - DNA, 19 bp, Homo sapiens
  siRNA target sequence for PCDH12 (NM_016580.2,1248-1266).
gggccaggtggctacttat

SEQ ID NO: 149471 - DNA, 19 bp, Homo sapiens
  siRNA target sequence for PCDH12 (NM_016580.2,1249-1267).
ggccaggtggctacttatt

SEQ ID NO: 149472 - DNA, 19 bp, Homo sapiens
  siRNA target sequence for PCDH12 (NM_016580.2,1250-1268).
gccaggtggctacttattt

SEQ ID NO: 149473 - DNA, 19 bp, Homo sapiens
  siRNA target sequence for PCDH12 (NM_016580.2,1252-1270).
caggtggctacttatttct

SEQ ID NO: 149474 - DNA, 19 bp, Homo sapiens
  siRNA target sequence for PCDH12 (NM_016580.2,1297-1315).
ctctcacggtgaaatacca

SEQ ID NO: 149475 - DNA, 19 bp, Homo sapiens
  siRNA target sequence for PCDH12 (NM_016580.2,1748-1766).
ctttgccttggatgtcatt

SEQ ID NO: 149476 - DNA, 19 bp, Homo sapiens
  siRNA target sequence for PCDH12 (NM_016580.2,1772-1790).
ccctgatgagaccaaacat

SEQ ID NO: 149477 - DNA, 19 bp, Homo sapiens
  siRNA target sequence for PCDH12 (NM_016580.2,1814-1832).
gctggacagggaaatccat

SEQ ID NO: 149478 - DNA, 19 bp, Homo sapiens
  siRNA target sequence for PCDH12 (NM_016580.2,1848-1866).
gtgttaactgcctatgaca

SEQ ID NO: 149479 - DNA, 19 bp, Homo sapiens
  siRNA target sequence for PCDH12 (NM_016580.2,1850-1868).
gttaactgcctatgacaat

SEQ ID NO: 149480 - DNA, 19 bp, Homo sapiens
  siRNA target sequence for PCDH12 (NM_016580.2,1951-1969).
gttcactggcactggaaat

SEQ ID NO: 149481 - DNA, 19 bp, Homo sapiens
  siRNA target sequence for PCDH12 (NM_016580.2,1984-2002).
cacctggtacgcttctcat

SEQ ID NO: 149482 - DNA, 19 bp, Homo sapiens
  siRNA target sequence for PCDH12 (NM_016580.2,1986-2004).
cctggtacgcttctcataa

SEQ ID NO: 149483 - DNA, 19 bp, Homo sapiens
  siRNA target sequence for PCDH12 (NM_016580.2,1987-2005).
ctggtacgcttctcataaa

SEQ ID NO: 149484 - DNA, 19 bp, Homo sapiens
  siRNA target sequence for PCDH12 (NM_016580.2,1990-2008).
gtacgcttctcataaaact

SEQ ID NO: 149485 - DNA, 19 bp, Homo sapiens
  siRNA target sequence for PCDH12 (NM_016580.2,2129-2147).
gcgtcgacctctagactat

SEQ ID NO: 149486 - DNA, 19 bp, Homo sapiens
  siRNA target sequence for PCDH12 (NM_016580.2,2161-2179).
cctacgaggtggatgttca

SEQ ID NO: 149487 - DNA, 19 bp, Homo sapiens
  siRNA target sequence for PCDH12 (NM_016580.2,2403-2421).
ggccacttcaggctgaaaa

SEQ ID NO: 149488 - DNA, 19 bp, Homo sapiens
  siRNA target sequence for PCDH12 (NM_016580.2,2411-2429).
caggctgaaaagaactaat

SEQ ID NO: 149489 - DNA, 19 bp, Homo sapiens
  siRNA target sequence for PCDH12 (NM_016580.2,2422-2440).
gaactaatggcaacacata

SEQ ID NO: 149490 - DNA, 19 bp, Homo sapiens
  siRNA target sequence for PCDH12 (NM_016580.2,2425-2443).
ctaatggcaacacatacat

SEQ ID NO: 149491 - DNA, 19 bp, Homo sapiens
  siRNA target sequence for PCDH12 (NM_016580.2,2437-2455).
catacatgttgctaaccaa

SEQ ID NO: 149492 - DNA, 19 bp, Homo sapiens
  siRNA target sequence for PCDH12 (NM_016580.2,2525-2543).
gcccttatcagccaagaaa

SEQ ID NO: 149493 - DNA, 19 bp, Homo sapiens
  siRNA target sequence for PCDH12 (NM_016580.2,2614-2632).
ccacgcgggaaaacaactt

SEQ ID NO: 149494 - DNA, 19 bp, Homo sapiens
  siRNA target sequence for PCDH12 (NM_016580.2,2615-2633).
cacgcgggaaaacaactta

SEQ ID NO: 149495 - DNA, 19 bp, Homo sapiens
  siRNA target sequence for PCDH12 (NM_016580.2,2634-2652).
ccctctcttcacctcatta

SEQ ID NO: 149496 - DNA, 19 bp, Homo sapiens
  siRNA target sequence for PCDH12 (NM_016580.2,2673-2691).
gacttgggcattaatggaa

SEQ ID NO: 149497 - DNA, 19 bp, Homo sapiens
  siRNA target sequence for PCDH12 (NM_016580.2,2716-2734).
ccccagttgctcacttagt

SEQ ID NO: 149498 - DNA, 19 bp, Homo sapiens
  siRNA target sequence for PCDH12 (NM_016580.2,2717-2735).
cccagttgctcacttagta

SEQ ID NO: 149499 - DNA, 19 bp, Homo sapiens
  siRNA target sequence for PCDH12 (NM_016580.2,2727-2745).
cacttagtagctattgact

SEQ ID NO: 149500 - DNA, 19 bp, Homo sapiens
  siRNA target sequence for PCDH12 (NM_016580.2,2773-2791).
ggtcactgaactatgaaga

SEQ ID NO: 149501 - DNA, 19 bp, Homo sapiens
  siRNA target sequence for PCDH12 (NM_016580.2,2938-2956).
gcctctccgtgcttgtgaa

SEQ ID NO: 149502 - DNA, 19 bp, Homo sapiens
  siRNA target sequence for PCDH12 (NM_016580.2,3172-3190).
ggcagctgttcgtcaatgt

SEQ ID NO: 149503 - DNA, 19 bp, Homo sapiens
  siRNA target sequence for PCDH12 (NM_016580.2,3174-3192).
cagctgttcgtcaatgtca

SEQ ID NO: 149504 - DNA, 19 bp, Homo sapiens
  siRNA target sequence for PCDH12 (NM_016580.2,3447-3465).
gacaacagggcctacaact

SEQ ID NO: 149505 - DNA, 19 bp, Homo sapiens
  siRNA target sequence for PCDH12 (NM_016580.2,3503-3521).
gaggccccagaaacacatt

SEQ ID NO: 149506 - DNA, 19 bp, Homo sapiens
  siRNA target sequence for PCDH12 (NM_016580.2,3584-3602).
cgggcagtcccacaaagat

SEQ ID NO: 149507 - DNA, 19 bp, Homo sapiens
  siRNA target sequence for PCDH12 (NM_016580.2,3586-3604).
ggcagtcccacaaagatgt

SEQ ID NO: 149508 - DNA, 19 bp, Homo sapiens
  siRNA target sequence for PCDH12 (NM_016580.2,3680-3698).
caggacgctgcgtaatcaa

SEQ ID NO: 149509 - DNA, 19 bp, Homo sapiens
  siRNA target sequence for PCDH12 (NM_016580.2,3954-3972).
catctcaatggcaaagtgt

SEQ ID NO: 149510 - DNA, 19 bp, Homo sapiens
  siRNA target sequence for PCDH12 (NM_016580.2,3971-3989).
gtcccctgagaaagaatca

SEQ ID NO: 149511 - DNA, 19 bp, Homo sapiens
  siRNA target sequence for PCDH12 (NM_016580.2,4143-4161).
ccaaaccaccgaggaaata

SEQ ID NO: 149512 - DNA, 19 bp, Homo sapiens
  siRNA target sequence for PCDH12 (NM_016580.2,4144-4162).
caaaccaccgaggaaataa

SEQ ID NO: 149513 - DNA, 19 bp, Homo sapiens
  siRNA target sequence for PCDH12 (NM_016580.2,4149-4167).
caccgaggaaataagtact

SEQ ID NO: 149514 - DNA, 19 bp, Homo sapiens
  siRNA target sequence for PCDH12 (NM_016580.2,4292-4310).
gaagcaactgctagaagaa

SEQ ID NO: 149515 - DNA, 19 bp, Homo sapiens
  siRNA target sequence for PCDH12 (NM_016580.2,4409-4427).
caccaactaccgtgacaat

SEQ ID NO: 149516 - DNA, 19 bp, Homo sapiens
  siRNA target sequence for PCDH12 (NM_016580.2,4411-4429).
ccaactaccgtgacaatgt

SEQ ID NO: 149517 - DNA, 19 bp, Homo sapiens
  siRNA target sequence for PCDH12 (NM_016580.2,4636-4654).
gcgggaggaccctcagttt

SEQ ID NO: 149518 - DNA, 19 bp, Homo sapiens
  siRNA target sequence for PCDH15 (NM_033056.2,466-484).
gcttgggccagtatgatga

SEQ ID NO: 149519 - DNA, 19 bp, Homo sapiens
  siRNA target sequence for PCDH15 (NM_033056.2,514-532).
cagctaccatagttgctat

SEQ ID NO: 149520 - DNA, 19 bp, Homo sapiens
  siRNA target sequence for PCDH15 (NM_033056.2,517-535).
ctaccatagttgctattga

SEQ ID NO: 149521 - DNA, 19 bp, Homo sapiens
  siRNA target sequence for PCDH15 (NM_033056.2,520-538).
ccatagttgctattgatga

SEQ ID NO: 149522 - DNA, 19 bp, Homo sapiens
  siRNA target sequence for PCDH15 (NM_033056.2,521-539).
catagttgctattgatgaa

SEQ ID NO: 149523 - DNA, 19 bp, Homo sapiens
  siRNA target sequence for PCDH15 (NM_033056.2,537-555).
gaagaaagtcggaatggta

SEQ ID NO: 149524 - DNA, 19 bp, Homo sapiens
  siRNA target sequence for PCDH15 (NM_033056.2,544-562).
gtcggaatggtacaattct

SEQ ID NO: 149525 - DNA, 19 bp, Homo sapiens
  siRNA target sequence for PCDH15 (NM_033056.2,556-574).
caattctggtggacaacat

SEQ ID NO: 149526 - DNA, 19 bp, Homo sapiens
  siRNA target sequence for PCDH15 (NM_033056.2,603-621).
gaccccaccatagaacttt

SEQ ID NO: 149527 - DNA, 19 bp, Homo sapiens
  siRNA target sequence for PCDH15 (NM_033056.2,610-628).
ccatagaactttctttaaa

SEQ ID NO: 149528 - DNA, 19 bp, Homo sapiens
  siRNA target sequence for PCDH15 (NM_033056.2,653-671).
gatggatcctgttaagcaa

SEQ ID NO: 149529 - DNA, 19 bp, Homo sapiens
  siRNA target sequence for PCDH15 (NM_033056.2,714-732).
ccaccgatgaacatacact

SEQ ID NO: 149530 - DNA, 19 bp, Homo sapiens
  siRNA target sequence for PCDH15 (NM_033056.2,744-762).
caggtccagtgcatcaaca

SEQ ID NO: 149531 - DNA, 19 bp, Homo sapiens
  siRNA target sequence for PCDH15 (NM_033056.2,832-850).
ctttcaagcatgaaagcta

SEQ ID NO: 149532 - DNA, 19 bp, Homo sapiens
  siRNA target sequence for PCDH15 (NM_033056.2,876-894).
ccagttggtaccacaatat

SEQ ID NO: 149533 - DNA, 19 bp, Homo sapiens
  siRNA target sequence for PCDH15 (NM_033056.2,914-932).
caatggagctacagatata

SEQ ID NO: 149534 - DNA, 19 bp, Homo sapiens
  siRNA target sequence for PCDH15 (NM_033056.2,948-966).
ggacagatagagtatgtta

SEQ ID NO: 149535 - DNA, 19 bp, Homo sapiens
  siRNA target sequence for PCDH15 (NM_033056.2,949-967).
gacagatagagtatgttat

SEQ ID NO: 149536 - DNA, 19 bp, Homo sapiens
  siRNA target sequence for PCDH15 (NM_033056.2,957-975).
gagtatgttattcagtata

SEQ ID NO: 149537 - DNA, 19 bp, Homo sapiens
  siRNA target sequence for PCDH15 (NM_033056.2,984-1002).
gatccgacatccaatgaca

SEQ ID NO: 149538 - DNA, 19 bp, Homo sapiens
  siRNA target sequence for PCDH15 (NM_033056.2,1017-1035).
ctaatgttgactggaaata

SEQ ID NO: 149539 - DNA, 19 bp, Homo sapiens
  siRNA target sequence for PCDH15 (NM_033056.2,1025-1043).
gactggaaatatagtgtta

SEQ ID NO: 149540 - DNA, 19 bp, Homo sapiens
  siRNA target sequence for PCDH15 (NM_033056.2,1046-1064).
gaagaggctcaactatgaa

SEQ ID NO: 149541 - DNA, 19 bp, Homo sapiens
  siRNA target sequence for PCDH15 (NM_033056.2,1055-1073).
caactatgaagataagact

SEQ ID NO: 149542 - DNA, 19 bp, Homo sapiens
  siRNA target sequence for PCDH15 (NM_033056.2,1070-1088).
gactcgctactttgtcata

SEQ ID NO: 149543 - DNA, 19 bp, Homo sapiens
  siRNA target sequence for PCDH15 (NM_033056.2,1072-1090).
ctcgctactttgtcataat

SEQ ID NO: 149544 - DNA, 19 bp, Homo sapiens
  siRNA target sequence for PCDH15 (NM_033056.2,1075-1093).
gctactttgtcataatcca

SEQ ID NO: 149545 - DNA, 19 bp, Homo sapiens
  siRNA target sequence for PCDH15 (NM_033056.2,1101-1119).
gaccgtgcccaaaatctga

SEQ ID NO: 149546 - DNA, 19 bp, Homo sapiens
  siRNA target sequence for PCDH15 (NM_033056.2,1103-1121).
ccgtgcccaaaatctgaat

SEQ ID NO: 149547 - DNA, 19 bp, Homo sapiens
  siRNA target sequence for PCDH15 (NM_033056.2,1105-1123).
gtgcccaaaatctgaatga

SEQ ID NO: 149548 - DNA, 19 bp, Homo sapiens
  siRNA target sequence for PCDH15 (NM_033056.2,1226-1244).
ccgtccactcacttatcaa

SEQ ID NO: 149549 - DNA, 19 bp, Homo sapiens
  siRNA target sequence for PCDH15 (NM_033056.2,1278-1296).
ctgaaccccattattgtta

SEQ ID NO: 149550 - DNA, 19 bp, Homo sapiens
  siRNA target sequence for PCDH15 (NM_033056.2,1354-1372).
caggaatcctctattccat

SEQ ID NO: 149551 - DNA, 19 bp, Homo sapiens
  siRNA target sequence for PCDH15 (NM_033056.2,1389-1407).
gaggattacccacgatttt

SEQ ID NO: 149552 - DNA, 19 bp, Homo sapiens
  siRNA target sequence for PCDH15 (NM_033056.2,1399-1417).
cacgatttttccatatgca

SEQ ID NO: 149553 - DNA, 19 bp, Homo sapiens
  siRNA target sequence for PCDH15 (NM_033056.2,1423-1441).
ggacagcagaacttagtct

SEQ ID NO: 149554 - DNA, 19 bp, Homo sapiens
  siRNA target sequence for PCDH15 (NM_033056.2,1448-1466).
gccagtaaacagagacttt

SEQ ID NO: 149555 - DNA, 19 bp, Homo sapiens
  siRNA target sequence for PCDH15 (NM_033056.2,1530-1548).
gccggtctacacattgaaa

SEQ ID NO: 149556 - DNA, 19 bp, Homo sapiens
  siRNA target sequence for PCDH15 (NM_033056.2,1531-1549).
ccggtctacacattgaaat

SEQ ID NO: 149557 - DNA, 19 bp, Homo sapiens
  siRNA target sequence for PCDH15 (NM_033056.2,1532-1550).
cggtctacacattgaaata

SEQ ID NO: 149558 - DNA, 19 bp, Homo sapiens
  siRNA target sequence for PCDH15 (NM_033056.2,1553-1571).
ggatgaaaacaatcaaagt

SEQ ID NO: 149559 - DNA, 19 bp, Homo sapiens
  siRNA target sequence for PCDH15 (NM_033056.2,1562-1580).
caatcaaagtccatatttt

SEQ ID NO: 149560 - DNA, 19 bp, Homo sapiens
  siRNA target sequence for PCDH15 (NM_033056.2,1588-1606).
ccagttatcaaggctatat

SEQ ID NO: 149561 - DNA, 19 bp, Homo sapiens
  siRNA target sequence for PCDH15 (NM_033056.2,1591-1609).
gttatcaaggctatatcct

SEQ ID NO: 149562 - DNA, 19 bp, Homo sapiens
  siRNA target sequence for PCDH15 (NM_033056.2,1620-1638).
ccagtgggagcaaccattt

SEQ ID NO: 149563 - DNA, 19 bp, Homo sapiens
  siRNA target sequence for PCDH15 (NM_033056.2,1640-1658).
ggacagtctcaatttgact

SEQ ID NO: 149564 - DNA, 19 bp, Homo sapiens
  siRNA target sequence for PCDH15 (NM_033056.2,1641-1659).
gacagtctcaatttgactt

SEQ ID NO: 149565 - DNA, 19 bp, Homo sapiens
  siRNA target sequence for PCDH15 (NM_033056.2,1655-1673).
gacttcacctttaagaata

SEQ ID NO: 149566 - DNA, 19 bp, Homo sapiens
  siRNA target sequence for PCDH15 (NM_033056.2,1657-1675).
cttcacctttaagaatagt

SEQ ID NO: 149567 - DNA, 19 bp, Homo sapiens
  siRNA target sequence for PCDH15 (NM_033056.2,1683-1701).
gacaaggacatagaagata

SEQ ID NO: 149568 - DNA, 19 bp, Homo sapiens
  siRNA target sequence for PCDH15 (NM_033056.2,1715-1733).
gcttcacctttttctgaat

SEQ ID NO: 149569 - DNA, 19 bp, Homo sapiens
  siRNA target sequence for PCDH15 (NM_033056.2,1777-1795).
gctacctcaccttacttca

SEQ ID NO: 149570 - DNA, 19 bp, Homo sapiens
  siRNA target sequence for PCDH15 (NM_033056.2,1778-1796).
ctacctcaccttacttcaa

SEQ ID NO: 149571 - DNA, 19 bp, Homo sapiens
  siRNA target sequence for PCDH15 (NM_033056.2,1843-1861).
catttgatggtgtacaaga

SEQ ID NO: 149572 - DNA, 19 bp, Homo sapiens
  siRNA target sequence for PCDH15 (NM_033056.2,1866-1884).
gagccagtcatcgtcaata

SEQ ID NO: 149573 - DNA, 19 bp, Homo sapiens
  siRNA target sequence for PCDH15 (NM_033056.2,1912-1930).
cgccaaccttccctgaaat

SEQ ID NO: 149574 - DNA, 19 bp, Homo sapiens
  siRNA target sequence for PCDH15 (NM_033056.2,1924-1942).
ctgaaatatcctatgatgt

SEQ ID NO: 149575 - DNA, 19 bp, Homo sapiens
  siRNA target sequence for PCDH15 (NM_033056.2,2000-2018).
cgcagacgaagggtcaaat

SEQ ID NO: 149576 - DNA, 19 bp, Homo sapiens
  siRNA target sequence for PCDH15 (NM_033056.2,2101-2119).
caggggtggaaatgatagt

SEQ ID NO: 149577 - DNA, 19 bp, Homo sapiens
  siRNA target sequence for PCDH15 (NM_033056.2,2141-2159).
ggtccaagcagcggataat

SEQ ID NO: 149578 - DNA, 19 bp, Homo sapiens
  siRNA target sequence for PCDH15 (NM_033056.2,2210-2228).
gcttccaccaaataatcaa

SEQ ID NO: 149579 - DNA, 19 bp, Homo sapiens
  siRNA target sequence for PCDH15 (NM_033056.2,2211-2229).
cttccaccaaataatcaaa

SEQ ID NO: 149580 - DNA, 19 bp, Homo sapiens
  siRNA target sequence for PCDH15 (NM_033056.2,2255-2273).
gtatagccttgaaattagt

SEQ ID NO: 149581 - DNA, 19 bp, Homo sapiens
  siRNA target sequence for PCDH15 (NM_033056.2,2285-2303).
ggttggtgctgttttatta

SEQ ID NO: 149582 - DNA, 19 bp, Homo sapiens
  siRNA target sequence for PCDH15 (NM_033056.2,2322-2340).
cgagagggagactcaataa

SEQ ID NO: 149583 - DNA, 19 bp, Homo sapiens
  siRNA target sequence for PCDH15 (NM_033056.2,2392-2410).
ccacggggattctaacctt

SEQ ID NO: 149584 - DNA, 19 bp, Homo sapiens
  siRNA target sequence for PCDH15 (NM_033056.2,2393-2411).
cacggggattctaacctta

SEQ ID NO: 149585 - DNA, 19 bp, Homo sapiens
  siRNA target sequence for PCDH15 (NM_033056.2,2539-2557).
cagtgtttgatccttatct

SEQ ID NO: 149586 - DNA, 19 bp, Homo sapiens
  siRNA target sequence for PCDH15 (NM_033056.2,2595-2613).
gcctttgtgggtcaagtaa

SEQ ID NO: 149587 - DNA, 19 bp, Homo sapiens
  siRNA target sequence for PCDH15 (NM_033056.2,2596-2614).
cctttgtgggtcaagtaaa

SEQ ID NO: 149588 - DNA, 19 bp, Homo sapiens
  siRNA target sequence for PCDH15 (NM_033056.2,2597-2615).
ctttgtgggtcaagtaaaa

SEQ ID NO: 149589 - DNA, 19 bp, Homo sapiens
  siRNA target sequence for PCDH15 (NM_033056.2,2601-2619).
gtgggtcaagtaaaagcaa

SEQ ID NO: 149590 - DNA, 19 bp, Homo sapiens
  siRNA target sequence for PCDH15 (NM_033056.2,2643-2661).
ggtcaagtgcactacagtt

SEQ ID NO: 149591 - DNA, 19 bp, Homo sapiens
  siRNA target sequence for PCDH15 (NM_033056.2,2654-2672).
ctacagtttgggtaacttt

SEQ ID NO: 149592 - DNA, 19 bp, Homo sapiens
  siRNA target sequence for PCDH15 (NM_033056.2,2659-2677).
gtttgggtaactttaataa

SEQ ID NO: 149593 - DNA, 19 bp, Homo sapiens
  siRNA target sequence for PCDH15 (NM_033056.2,2664-2682).
ggtaactttaataatcttt

SEQ ID NO: 149594 - DNA, 19 bp, Homo sapiens
  siRNA target sequence for PCDH15 (NM_033056.2,2740-2758).
gggactactatgaacttgt

SEQ ID NO: 149595 - DNA, 19 bp, Homo sapiens
  siRNA target sequence for PCDH15 (NM_033056.2,2781-2799).
gtacaccctcgtcattcaa

SEQ ID NO: 149596 - DNA, 19 bp, Homo sapiens
  siRNA target sequence for PCDH15 (NM_033056.2,2786-2804).
ccctcgtcattcaactcta

SEQ ID NO: 149597 - DNA, 19 bp, Homo sapiens
  siRNA target sequence for PCDH15 (NM_033056.2,2852-2870).
caccaattcaacatacact

SEQ ID NO: 149598 - DNA, 19 bp, Homo sapiens
  siRNA target sequence for PCDH15 (NM_033056.2,2863-2881).
catacactgtccttgttga

SEQ ID NO: 149599 - DNA, 19 bp, Homo sapiens
  siRNA target sequence for PCDH15 (NM_033056.2,2898-2916).
gggactaccatccttcaaa

SEQ ID NO: 149600 - DNA, 19 bp, Homo sapiens
  siRNA target sequence for PCDH15 (NM_033056.2,2900-2918).
gactaccatccttcaaata

SEQ ID NO: 149601 - DNA, 19 bp, Homo sapiens
  siRNA target sequence for PCDH15 (NM_033056.2,2949-2967).
gtgtcttaccggataagaa

SEQ ID NO: 149602 - DNA, 19 bp, Homo sapiens
  siRNA target sequence for PCDH15 (NM_033056.2,3012-3030).
gaactatcgcttttaagga

SEQ ID NO: 149603 - DNA, 19 bp, Homo sapiens
  siRNA target sequence for PCDH15 (NM_033056.2,3020-3038).
gcttttaaggagtttagat

SEQ ID NO: 149604 - DNA, 19 bp, Homo sapiens
  siRNA target sequence for PCDH15 (NM_033056.2,3081-3099).
gtagaggcctttgatattt

SEQ ID NO: 149605 - DNA, 19 bp, Homo sapiens
  siRNA target sequence for PCDH15 (NM_033056.2,3086-3104).
ggcctttgatatttatgga

SEQ ID NO: 149606 - DNA, 19 bp, Homo sapiens
  siRNA target sequence for PCDH15 (NM_033056.2,3131-3149).
cacagtgattgtaaaggat

SEQ ID NO: 149607 - DNA, 19 bp, Homo sapiens
  siRNA target sequence for PCDH15 (NM_033056.2,3133-3151).
cagtgattgtaaaggatat

SEQ ID NO: 149608 - DNA, 19 bp, Homo sapiens
  siRNA target sequence for PCDH15 (NM_033056.2,3165-3183).
cctgtctttagtaaacgaa

SEQ ID NO: 149609 - DNA, 19 bp, Homo sapiens
  siRNA target sequence for PCDH15 (NM_033056.2,3215-3233).
caagggtacacctatcaca

SEQ ID NO: 149610 - DNA, 19 bp, Homo sapiens
  siRNA target sequence for PCDH15 (NM_033056.2,3223-3241).
cacctatcacaacagttta

SEQ ID NO: 149611 - DNA, 19 bp, Homo sapiens
  siRNA target sequence for PCDH15 (NM_033056.2,3273-3291).
gcaagtcgtgtgaggtata

SEQ ID NO: 149612 - DNA, 19 bp, Homo sapiens
  siRNA target sequence for PCDH15 (NM_033056.2,3277-3295).
gtcgtgtgaggtatagagt

SEQ ID NO: 149613 - DNA, 19 bp, Homo sapiens
  siRNA target sequence for PCDH15 (NM_033056.2,3284-3302).
gaggtatagagtagatgat

SEQ ID NO: 149614 - DNA, 19 bp, Homo sapiens
  siRNA target sequence for PCDH15 (NM_033056.2,3286-3304).
ggtatagagtagatgatgt

SEQ ID NO: 149615 - DNA, 19 bp, Homo sapiens
  siRNA target sequence for PCDH15 (NM_033056.2,3364-3382).
cacgagtcaatcttaatga

SEQ ID NO: 149616 - DNA, 19 bp, Homo sapiens
  siRNA target sequence for PCDH15 (NM_033056.2,3410-3428).
ggtggttgcttttgatgat

SEQ ID NO: 149617 - DNA, 19 bp, Homo sapiens
  siRNA target sequence for PCDH15 (NM_033056.2,3500-3518).
cacacaggaggaatataga

SEQ ID NO: 149618 - DNA, 19 bp, Homo sapiens
  siRNA target sequence for PCDH15 (NM_033056.2,3550-3568).
ggaccatggttggtgtaat

SEQ ID NO: 149619 - DNA, 19 bp, Homo sapiens
  siRNA target sequence for PCDH15 (NM_033056.2,3551-3569).
gaccatggttggtgtaatt

SEQ ID NO: 149620 - DNA, 19 bp, Homo sapiens
  siRNA target sequence for PCDH15 (NM_033056.2,3554-3572).
catggttggtgtaatttct

SEQ ID NO: 149621 - DNA, 19 bp, Homo sapiens
  siRNA target sequence for PCDH15 (NM_033056.2,3576-3594).
gctgccattaatcaaagta

SEQ ID NO: 149622 - DNA, 19 bp, Homo sapiens
  siRNA target sequence for PCDH15 (NM_033056.2,3577-3595).
ctgccattaatcaaagtat

SEQ ID NO: 149623 - DNA, 19 bp, Homo sapiens
  siRNA target sequence for PCDH15 (NM_033056.2,3580-3598).
ccattaatcaaagtattgt

SEQ ID NO: 149624 - DNA, 19 bp, Homo sapiens
  siRNA target sequence for PCDH15 (NM_033056.2,3647-3665).
catcacaggtgttatctat

SEQ ID NO: 149625 - DNA, 19 bp, Homo sapiens
  siRNA target sequence for PCDH15 (NM_033056.2,3668-3686).
gaatggacctctggattat

SEQ ID NO: 149626 - DNA, 19 bp, Homo sapiens
  siRNA target sequence for PCDH15 (NM_033056.2,3689-3707).
gaccaggacaagctatgta

SEQ ID NO: 149627 - DNA, 19 bp, Homo sapiens
  siRNA target sequence for PCDH15 (NM_033056.2,3691-3709).
ccaggacaagctatgtact

SEQ ID NO: 149628 - DNA, 19 bp, Homo sapiens
  siRNA target sequence for PCDH15 (NM_033056.2,3750-3768).
ctccgagttccttcaaaaa

SEQ ID NO: 149629 - DNA, 19 bp, Homo sapiens
  siRNA target sequence for PCDH15 (NM_033056.2,3769-3787).
gcaatacagctaaagtata

SEQ ID NO: 149630 - DNA, 19 bp, Homo sapiens
  siRNA target sequence for PCDH15 (NM_033056.2,3778-3796).
ctaaagtatacattgagat

SEQ ID NO: 149631 - DNA, 19 bp, Homo sapiens
  siRNA target sequence for PCDH15 (NM_033056.2,3839-3857).
ctacatcggaggtgtatct

SEQ ID NO: 149632 - DNA, 19 bp, Homo sapiens
  siRNA target sequence for PCDH15 (NM_033056.2,3842-3860).
catcggaggtgtatctgaa

SEQ ID NO: 149633 - DNA, 19 bp, Homo sapiens
  siRNA target sequence for PCDH15 (NM_033056.2,3845-3863).
cggaggtgtatctgaagat

SEQ ID NO: 149634 - DNA, 19 bp, Homo sapiens
  siRNA target sequence for PCDH15 (NM_033056.2,3887-3905).
cagagtgaaggctactgat

SEQ ID NO: 149635 - DNA, 19 bp, Homo sapiens
  siRNA target sequence for PCDH15 (NM_033056.2,3889-3907).
gagtgaaggctactgataa

SEQ ID NO: 149636 - DNA, 19 bp, Homo sapiens
  siRNA target sequence for PCDH15 (NM_033056.2,3991-4009).
catatacagggcttatcaa

SEQ ID NO: 149637 - DNA, 19 bp, Homo sapiens
  siRNA target sequence for PCDH15 (NM_033056.2,4012-4030).
ctgctatgctcttccataa

SEQ ID NO: 149638 - DNA, 19 bp, Homo sapiens
  siRNA target sequence for PCDH15 (NM_033056.2,4043-4061).
ctacttcaagtttcaagtt

SEQ ID NO: 149639 - DNA, 19 bp, Homo sapiens
  siRNA target sequence for PCDH15 (NM_033056.2,4093-4111).
gcggcaaagccgatgtact

SEQ ID NO: 149640 - DNA, 19 bp, Homo sapiens
  siRNA target sequence for PCDH15 (NM_033056.2,4133-4151).
ggatatgcaagtcattgtt

SEQ ID NO: 149641 - DNA, 19 bp, Homo sapiens
  siRNA target sequence for PCDH15 (NM_033056.2,4134-4152).
gatatgcaagtcattgttt

SEQ ID NO: 149642 - DNA, 19 bp, Homo sapiens
  siRNA target sequence for PCDH15 (NM_033056.2,4213-4231).
gctatgttcaggaacaaat

SEQ ID NO: 149643 - DNA, 19 bp, Homo sapiens
  siRNA target sequence for PCDH15 (NM_033056.2,4214-4232).
ctatgttcaggaacaaatt

SEQ ID NO: 149644 - DNA, 19 bp, Homo sapiens
  siRNA target sequence for PCDH15 (NM_033056.2,4284-4302).
gccttttccctagaagatt

SEQ ID NO: 149645 - DNA, 19 bp, Homo sapiens
  siRNA target sequence for PCDH15 (NM_033056.2,4293-4311).
ctagaagattacaccaaat

SEQ ID NO: 149646 - DNA, 19 bp, Homo sapiens
  siRNA target sequence for PCDH15 (NM_033056.2,4349-4367).
cagagccatcgatagaaat

SEQ ID NO: 149647 - DNA, 19 bp, Homo sapiens
  siRNA target sequence for PCDH15 (NM_033056.2,4351-4369).
gagccatcgatagaaatga

SEQ ID NO: 149648 - DNA, 19 bp, Homo sapiens
  siRNA target sequence for PCDH15 (NM_033056.2,4473-4491).
gtgaccagcattaaaaaga

SEQ ID NO: 149649 - DNA, 19 bp, Homo sapiens
  siRNA target sequence for PCDH15 (NM_033056.2,4624-4642).
caaagactgcacgaattca

SEQ ID NO: 149650 - DNA, 19 bp, Homo sapiens
  siRNA target sequence for PCDH15 (NM_033056.2,4720-4738).
cgccaggtgcgcatctcta

SEQ ID NO: 149651 - DNA, 19 bp, Homo sapiens
  siRNA target sequence for PCDH15 (NM_033056.2,4726-4744).
gtgcgcatctctatgaaga

SEQ ID NO: 149652 - DNA, 19 bp, Homo sapiens
  siRNA target sequence for PCDH15 (NM_033056.2,4749-4767).
ggagacagctcaagtcttt

SEQ ID NO: 149653 - DNA, 19 bp, Homo sapiens
  siRNA target sequence for PCDH15 (NM_033056.2,4750-4768).
gagacagctcaagtctttt

SEQ ID NO: 149654 - DNA, 19 bp, Homo sapiens
  siRNA target sequence for PCDH15 (NM_033056.2,4769-4787).
ccttctctaccattttcaa

SEQ ID NO: 149655 - DNA, 19 bp, Homo sapiens
  siRNA target sequence for PCDH15 (NM_033056.2,4887-4905).
gtagacggatcacttaaga

SEQ ID NO: 149656 - DNA, 19 bp, Homo sapiens
  siRNA target sequence for PCDH15 (NM_033056.2,4897-4915).
cacttaagagcaacaaact

SEQ ID NO: 149657 - DNA, 19 bp, Homo sapiens
  siRNA target sequence for PCDH15 (NM_033056.2,4899-4917).
cttaagagcaacaaactga

SEQ ID NO: 149658 - DNA, 19 bp, Homo sapiens
  siRNA target sequence for PCDH15 (NM_033056.2,4965-4983).
gcccataatcccctttata

SEQ ID NO: 149659 - DNA, 19 bp, Homo sapiens
  siRNA target sequence for PCDH15 (NM_033056.2,4966-4984).
cccataatcccctttataa

SEQ ID NO: 149660 - DNA, 19 bp, Homo sapiens
  siRNA target sequence for PCDH15 (NM_033056.2,4985-5003).
ggaaaacataagtcaagta

SEQ ID NO: 149661 - DNA, 19 bp, Homo sapiens
  siRNA target sequence for PCDH15 (NM_033056.2,4986-5004).
gaaaacataagtcaagtat

SEQ ID NO: 149662 - DNA, 19 bp, Homo sapiens
  siRNA target sequence for PCDH15 (NM_033056.2,5008-5026).
caaattcagacatttcaca

SEQ ID NO: 149663 - DNA, 19 bp, Homo sapiens
  siRNA target sequence for PCDH15 (NM_033056.2,5023-5041).
cacagagaacagattttgt

SEQ ID NO: 149664 - DNA, 19 bp, Homo sapiens
  siRNA target sequence for PCDH15 (NM_033056.2,5150-5168).
gaggaaagttccaaataga

SEQ ID NO: 149665 - DNA, 19 bp, Homo sapiens
  siRNA target sequence for PCDH15 (NM_033056.2,5287-5305).
caaatttgacagagaaaga

SEQ ID NO: 149666 - DNA, 19 bp, Homo sapiens
  siRNA target sequence for PCDH15 (NM_033056.2,5389-5407).
ccaggcctcacttctcatt

SEQ ID NO: 149667 - DNA, 19 bp, Homo sapiens
  siRNA target sequence for PCDH15 (NM_033056.2,5451-5469).
gaacctaatgtcatcagtt

SEQ ID NO: 149668 - DNA, 19 bp, Homo sapiens
  siRNA target sequence for PCDH15 (NM_033056.2,5478-5496).
gagtgttccttggaacttt

SEQ ID NO: 149669 - DNA, 19 bp, Homo sapiens
  siRNA target sequence for PCDH15 (NM_033056.2,5480-5498).
gtgttccttggaactttct

SEQ ID NO: 149670 - DNA, 19 bp, Homo sapiens
  siRNA target sequence for PCDH15 (NM_033056.2,5507-5525).
gccttgtgttttacattct

SEQ ID NO: 149671 - DNA, 19 bp, Homo sapiens
  siRNA target sequence for PCDH15 (NM_033056.2,5537-5555).
gagagagacacctatttgt

SEQ ID NO: 149672 - DNA, 19 bp, Homo sapiens
  siRNA target sequence for PCDH15 (NM_033056.2,5543-5561).
gacacctatttgtatgtta

SEQ ID NO: 149673 - DNA, 19 bp, Homo sapiens
  siRNA target sequence for PCDH15 (NM_033056.2,5598-5616).
gcccatccaccaaacatct

SEQ ID NO: 149674 - DNA, 19 bp, Homo sapiens
  siRNA target sequence for PCDH15 (NM_033056.2,5992-6010).
caacaacgacagtgtgtaa

SEQ ID NO: 149675 - DNA, 19 bp, Homo sapiens
  siRNA target sequence for PCDH15 (NM_033056.2,6037-6055).
gcatcctcagacacgttaa

SEQ ID NO: 149676 - DNA, 19 bp, Homo sapiens
  siRNA target sequence for PCDH15 (NM_033056.2,6038-6056).
catcctcagacacgttaaa

SEQ ID NO: 149677 - DNA, 19 bp, Homo sapiens
  siRNA target sequence for PCDH15 (NM_033056.2,6044-6062).
cagacacgttaaaaactta

SEQ ID NO: 149678 - DNA, 19 bp, Homo sapiens
  siRNA target sequence for PCDH15 (NM_033056.2,6154-6172).
cttcagaagtaacaaatat

SEQ ID NO: 149679 - DNA, 19 bp, Homo sapiens
  siRNA target sequence for PCDH15 (NM_033056.2,6194-6212).
caaggggagtttgaacaat

SEQ ID NO: 149680 - DNA, 19 bp, Homo sapiens
  siRNA target sequence for PCDH15 (NM_033056.2,6197-6215).
ggggagtttgaacaatatt

SEQ ID NO: 149681 - DNA, 19 bp, Homo sapiens
  siRNA target sequence for PCDH15 (NM_033056.2,6199-6217).
ggagtttgaacaatattgt

SEQ ID NO: 149682 - DNA, 19 bp, Homo sapiens
  siRNA target sequence for PCDH15 (NM_033056.2,6234-6252).
caatctcacagtcaatcta

SEQ ID NO: 149683 - DNA, 19 bp, Homo sapiens
  siRNA target sequence for PCDH16 (NM_003737.1,347-365).
gccagcgggtacactgatt

SEQ ID NO: 149684 - DNA, 19 bp, Homo sapiens
  siRNA target sequence for PCDH16 (NM_003737.1,397-415).
cggcagctcctctcatgta

SEQ ID NO: 149685 - DNA, 19 bp, Homo sapiens
  siRNA target sequence for PCDH16 (NM_003737.1,402-420).
gctcctctcatgtacttca

SEQ ID NO: 149686 - DNA, 19 bp, Homo sapiens
  siRNA target sequence for PCDH16 (NM_003737.1,403-421).
ctcctctcatgtacttcat

SEQ ID NO: 149687 - DNA, 19 bp, Homo sapiens
  siRNA target sequence for PCDH16 (NM_003737.1,405-423).
cctctcatgtacttcatct

SEQ ID NO: 149688 - DNA, 19 bp, Homo sapiens
  siRNA target sequence for PCDH16 (NM_003737.1,552-570).
ggtgccaccgtagaagtta

SEQ ID NO: 149689 - DNA, 19 bp, Homo sapiens
  siRNA target sequence for PCDH16 (NM_003737.1,792-810).
gtacctgagctggtagtta

SEQ ID NO: 149690 - DNA, 19 bp, Homo sapiens
  siRNA target sequence for PCDH16 (NM_003737.1,833-851).
ccgctcacactatatgcta

SEQ ID NO: 149691 - DNA, 19 bp, Homo sapiens
  siRNA target sequence for PCDH16 (NM_003737.1,1048-1066).
ctgtgacttacgagatcaa

SEQ ID NO: 149692 - DNA, 19 bp, Homo sapiens
  siRNA target sequence for PCDH16 (NM_003737.1,1430-1448).
ccaagacagcgtcatctat

SEQ ID NO: 149693 - DNA, 19 bp, Homo sapiens
  siRNA target sequence for PCDH16 (NM_003737.1,1482-1500).
gagagggatgcctataact

SEQ ID NO: 149694 - DNA, 19 bp, Homo sapiens
  siRNA target sequence for PCDH16 (NM_003737.1,1757-1775).
cacctcaggcattatcact

SEQ ID NO: 149695 - DNA, 19 bp, Homo sapiens
  siRNA target sequence for PCDH16 (NM_003737.1,1782-1800).
gcctcactggactatgagt

SEQ ID NO: 149696 - DNA, 19 bp, Homo sapiens
  siRNA target sequence for PCDH16 (NM_003737.1,1783-1801).
cctcactggactatgagtt

SEQ ID NO: 149697 - DNA, 19 bp, Homo sapiens
  siRNA target sequence for PCDH16 (NM_003737.1,1857-1875).
gcctcctctgccacagtta

SEQ ID NO: 149698 - DNA, 19 bp, Homo sapiens
  siRNA target sequence for PCDH16 (NM_003737.1,1876-1894).
gcgtggccctgcaagatgt

SEQ ID NO: 149699 - DNA, 19 bp, Homo sapiens
  siRNA target sequence for PCDH16 (NM_003737.1,1916-1934).
ccagaggactttctacaat

SEQ ID NO: 149700 - DNA, 19 bp, Homo sapiens
  siRNA target sequence for PCDH16 (NM_003737.1,2220-2238).
gacaaccctcctcagtttt

SEQ ID NO: 149701 - DNA, 19 bp, Homo sapiens
  siRNA target sequence for PCDH16 (NM_003737.1,2246-2264).
ggagtatgctgccagtata

SEQ ID NO: 149702 - DNA, 19 bp, Homo sapiens
  siRNA target sequence for PCDH16 (NM_003737.1,2247-2265).
gagtatgctgccagtataa

SEQ ID NO: 149703 - DNA, 19 bp, Homo sapiens
  siRNA target sequence for PCDH16 (NM_003737.1,2249-2267).
gtatgctgccagtataagt

SEQ ID NO: 149704 - DNA, 19 bp, Homo sapiens
  siRNA target sequence for PCDH16 (NM_003737.1,2334-2352).
gggcgactctcctaccata

SEQ ID NO: 149705 - DNA, 19 bp, Homo sapiens
  siRNA target sequence for PCDH16 (NM_003737.1,2335-2353).
ggcgactctcctaccatat

SEQ ID NO: 149706 - DNA, 19 bp, Homo sapiens
  siRNA target sequence for PCDH16 (NM_003737.1,2338-2356).
gactctcctaccatatcct

SEQ ID NO: 149707 - DNA, 19 bp, Homo sapiens
  siRNA target sequence for PCDH16 (NM_003737.1,2426-2444).
ggccagacgggccaattct

SEQ ID NO: 149708 - DNA, 19 bp, Homo sapiens
  siRNA target sequence for PCDH16 (NM_003737.1,2428-2446).
ccagacgggccaattctgt

SEQ ID NO: 149709 - DNA, 19 bp, Homo sapiens
  siRNA target sequence for PCDH16 (NM_003737.1,2545-2563).
ccatatttgagcaactaca

SEQ ID NO: 149710 - DNA, 19 bp, Homo sapiens
  siRNA target sequence for PCDH16 (NM_003737.1,2553-2571).
gagcaactacagtatgttt

SEQ ID NO: 149711 - DNA, 19 bp, Homo sapiens
  siRNA target sequence for PCDH16 (NM_003737.1,2555-2573).
gcaactacagtatgttttt

SEQ ID NO: 149712 - DNA, 19 bp, Homo sapiens
  siRNA target sequence for PCDH16 (NM_003737.1,2706-2724).
gtatcaggactgttgcaaa

SEQ ID NO: 149713 - DNA, 19 bp, Homo sapiens
  siRNA target sequence for PCDH16 (NM_003737.1,2906-2924).
cccagggactcccatctat

SEQ ID NO: 149714 - DNA, 19 bp, Homo sapiens
  siRNA target sequence for PCDH16 (NM_003737.1,2907-2925).
ccagggactcccatctata

SEQ ID NO: 149715 - DNA, 19 bp, Homo sapiens
  siRNA target sequence for PCDH16 (NM_003737.1,2911-2929).
ggactcccatctatacact

SEQ ID NO: 149716 - DNA, 19 bp, Homo sapiens
  siRNA target sequence for PCDH16 (NM_003737.1,2945-2963).
cgactcaggtgttaacagt

SEQ ID NO: 149717 - DNA, 19 bp, Homo sapiens
  siRNA target sequence for PCDH16 (NM_003737.1,3024-3042).
ggccatgtacggcttatga

SEQ ID NO: 149718 - DNA, 19 bp, Homo sapiens
  siRNA target sequence for PCDH16 (NM_003737.1,3166-3184).
ggctggctccccgattcaa

SEQ ID NO: 149719 - DNA, 19 bp, Homo sapiens
  siRNA target sequence for PCDH16 (NM_003737.1,3168-3186).
ctggctccccgattcaaca

SEQ ID NO: 149720 - DNA, 19 bp, Homo sapiens
  siRNA target sequence for PCDH16 (NM_003737.1,4537-4555).
gcgcagcgctgtacacttt

SEQ ID NO: 149721 - DNA, 19 bp, Homo sapiens
  siRNA target sequence for PCDH16 (NM_003737.1,4784-4802).
cttcgtcacggatgagaat

SEQ ID NO: 149722 - DNA, 19 bp, Homo sapiens
  siRNA target sequence for PCDH16 (NM_003737.1,5222-5240).
caacgggcaagtgacttat

SEQ ID NO: 149723 - DNA, 19 bp, Homo sapiens
  siRNA target sequence for PCDH16 (NM_003737.1,5245-5263).
gcgtctctagcgaaagctt

SEQ ID NO: 149724 - DNA, 19 bp, Homo sapiens
  siRNA target sequence for PCDH16 (NM_003737.1,5246-5264).
cgtctctagcgaaagcttt

SEQ ID NO: 149725 - DNA, 19 bp, Homo sapiens
  siRNA target sequence for PCDH16 (NM_003737.1,5247-5265).
gtctctagcgaaagctttt

SEQ ID NO: 149726 - DNA, 19 bp, Homo sapiens
  siRNA target sequence for PCDH16 (NM_003737.1,5249-5267).
ctctagcgaaagcttttct

SEQ ID NO: 149727 - DNA, 19 bp, Homo sapiens
  siRNA target sequence for PCDH16 (NM_003737.1,6026-6044).
cacggtgcgcgatgtcaat

SEQ ID NO: 149728 - DNA, 19 bp, Homo sapiens
  siRNA target sequence for PCDH16 (NM_003737.1,6028-6046).
cggtgcgcgatgtcaatga

SEQ ID NO: 149729 - DNA, 19 bp, Homo sapiens
  siRNA target sequence for PCDH16 (NM_003737.1,6165-6183).
gccaatgcttccattctgt

SEQ ID NO: 149730 - DNA, 19 bp, Homo sapiens
  siRNA target sequence for PCDH16 (NM_003737.1,6166-6184).
ccaatgcttccattctgta

SEQ ID NO: 149731 - DNA, 19 bp, Homo sapiens
  siRNA target sequence for PCDH16 (NM_003737.1,6277-6295).
gagatcgtgtcctcttcat

SEQ ID NO: 149732 - DNA, 19 bp, Homo sapiens
  siRNA target sequence for PCDH16 (NM_003737.1,6331-6349).
ccactggtgtgatcattgt

SEQ ID NO: 149733 - DNA, 19 bp, Homo sapiens
  siRNA target sequence for PCDH16 (NM_003737.1,6404-6422).
ggctacgattcgtgagaat

SEQ ID NO: 149734 - DNA, 19 bp, Homo sapiens
  siRNA target sequence for PCDH16 (NM_003737.1,7028-7046).
gctccgagtgtcagaagat

SEQ ID NO: 149735 - DNA, 19 bp, Homo sapiens
  siRNA target sequence for PCDH16 (NM_003737.1,7398-7416).
ggtgccaacggtcacattt

SEQ ID NO: 149736 - DNA, 19 bp, Homo sapiens
  siRNA target sequence for PCDH16 (NM_003737.1,7873-7891).
gcctgacacagtacaatct

SEQ ID NO: 149737 - DNA, 19 bp, Homo sapiens
  siRNA target sequence for PCDH16 (NM_003737.1,7874-7892).
cctgacacagtacaatcta

SEQ ID NO: 149738 - DNA, 19 bp, Homo sapiens
  siRNA target sequence for PCDH16 (NM_003737.1,7875-7893).
ctgacacagtacaatctaa

SEQ ID NO: 149739 - DNA, 19 bp, Homo sapiens
  siRNA target sequence for PCDH16 (NM_003737.1,7946-7964).
cactgtcactgtactagat

SEQ ID NO: 149740 - DNA, 19 bp, Homo sapiens
  siRNA target sequence for PCDH16 (NM_003737.1,7948-7966).
ctgtcactgtactagatgt

SEQ ID NO: 149741 - DNA, 19 bp, Homo sapiens
  siRNA target sequence for PCDH16 (NM_003737.1,8194-8212).
ctcgacatcagcttgtagt

SEQ ID NO: 149742 - DNA, 19 bp, Homo sapiens
  siRNA target sequence for PCDH16 (NM_003737.1,8197-8215).
gacatcagcttgtagtaca

SEQ ID NO: 149743 - DNA, 19 bp, Homo sapiens
  siRNA target sequence for PCDH16 (NM_003737.1,8229-8247).
gctggtgcacactttgctt

SEQ ID NO: 149744 - DNA, 19 bp, Homo sapiens
  siRNA target sequence for PCDH16 (NM_003737.1,8293-8311).
cagccttcccactgaactt

SEQ ID NO: 149745 - DNA, 19 bp, Homo sapiens
  siRNA target sequence for PCDH16 (NM_003737.1,8296-8314).
ccttcccactgaacttact

SEQ ID NO: 149746 - DNA, 19 bp, Homo sapiens
  siRNA target sequence for PCDH16 (NM_003737.1,8441-8459).
gggccgtgaggcatttgca

SEQ ID NO: 149747 - DNA, 19 bp, Homo sapiens
  siRNA target sequence for PCDH16 (NM_003737.1,8487-8505).
gcgcgagtgccctttgact

SEQ ID NO: 149748 - DNA, 19 bp, Homo sapiens
  siRNA target sequence for PCDH16 (NM_003737.1,8489-8507).
gcgagtgccctttgactat

SEQ ID NO: 149749 - DNA, 19 bp, Homo sapiens
  siRNA target sequence for PCDH16 (NM_003737.1,8713-8731).
ccgatggcctggttctgta

SEQ ID NO: 149750 - DNA, 19 bp, Homo sapiens
  siRNA target sequence for PCDH16 (NM_003737.1,8714-8732).
cgatggcctggttctgtat

SEQ ID NO: 149751 - DNA, 19 bp, Homo sapiens
  siRNA target sequence for PCDH16 (NM_003737.1,8715-8733).
gatggcctggttctgtatt

SEQ ID NO: 149752 - DNA, 19 bp, Homo sapiens
  siRNA target sequence for PCDH16 (NM_003737.1,8746-8764).
cttccccctattttggtat

SEQ ID NO: 149753 - DNA, 19 bp, Homo sapiens
  siRNA target sequence for PCDH16 (NM_003737.1,8974-8992).
ctgacctcaacctgctatt

SEQ ID NO: 149754 - DNA, 19 bp, Homo sapiens
  siRNA target sequence for PCDH16 (NM_003737.1,8978-8996).
cctcaacctgctattagta

SEQ ID NO: 149755 - DNA, 19 bp, Homo sapiens
  siRNA target sequence for PCDH16 (NM_003737.1,9047-9065).
cctggtcctaggacttgtt

SEQ ID NO: 149756 - DNA, 19 bp, Homo sapiens
  siRNA target sequence for PCDH16 (NM_003737.1,9254-9272).
cttggacccttcacattca

SEQ ID NO: 149757 - DNA, 19 bp, Homo sapiens
  siRNA target sequence for PCDH16 (NM_003737.1,9257-9275).
ggacccttcacattcaagt

SEQ ID NO: 149758 - DNA, 19 bp, Homo sapiens
  siRNA target sequence for PCDH16 (NM_003737.1,9435-9453).
gcccctgacacctggtata

SEQ ID NO: 149759 - DNA, 19 bp, Homo sapiens
  siRNA target sequence for PCDH16 (NM_003737.1,9436-9454).
cccctgacacctggtataa

SEQ ID NO: 149760 - DNA, 19 bp, Homo sapiens
  siRNA target sequence for PCDH16 (NM_003737.1,9648-9666).
gagctccgtggcagctata

SEQ ID NO: 149761 - DNA, 19 bp, Homo sapiens
  siRNA target sequence for PCDH16 (NM_003737.1,9651-9669).
ctccgtggcagctataact

SEQ ID NO: 149762 - DNA, 19 bp, Homo sapiens
  siRNA target sequence for PCDH17 (NM_014459.2,778-796).
ctgccctcactctcaagaa

SEQ ID NO: 149763 - DNA, 19 bp, Homo sapiens
  siRNA target sequence for PCDH17 (NM_014459.2,1084-1102).
gcatgatcaaggtagagat

SEQ ID NO: 149764 - DNA, 19 bp, Homo sapiens
  siRNA target sequence for PCDH17 (NM_014459.2,1138-1156).
cggaccagatcgaaatgga

SEQ ID NO: 149765 - DNA, 19 bp, Homo sapiens
  siRNA target sequence for PCDH17 (NM_014459.2,1405-1423).
gttccgccaccgtacagat

SEQ ID NO: 149766 - DNA, 19 bp, Homo sapiens
  siRNA target sequence for PCDH17 (NM_014459.2,1408-1426).
ccgccaccgtacagatcaa

SEQ ID NO: 149767 - DNA, 19 bp, Homo sapiens
  siRNA target sequence for PCDH17 (NM_014459.2,1563-1581).
ggtgaagtgctctactctt

SEQ ID NO: 149768 - DNA, 19 bp, Homo sapiens
  siRNA target sequence for PCDH17 (NM_014459.2,2105-2123).
gtcgttcgcgatcaagatt

SEQ ID NO: 149769 - DNA, 19 bp, Homo sapiens
  siRNA target sequence for PCDH17 (NM_014459.2,2107-2125).
cgttcgcgatcaagattct

SEQ ID NO: 149770 - DNA, 19 bp, Homo sapiens
  siRNA target sequence for PCDH17 (NM_014459.2,2108-2126).
gttcgcgatcaagattcta

SEQ ID NO: 149771 - DNA, 19 bp, Homo sapiens
  siRNA target sequence for PCDH17 (NM_014459.2,2250-2268).
ggcaccgtatcctactcta

SEQ ID NO: 149772 - DNA, 19 bp, Homo sapiens
  siRNA target sequence for PCDH17 (NM_014459.2,2251-2269).
gcaccgtatcctactctat

SEQ ID NO: 149773 - DNA, 19 bp, Homo sapiens
  siRNA target sequence for PCDH17 (NM_014459.2,2286-2304).
ggcgacgtgtctatctaca

SEQ ID NO: 149774 - DNA, 19 bp, Homo sapiens
  siRNA target sequence for PCDH17 (NM_014459.2,2344-2362).
ccctgcgctcctttaactt

SEQ ID NO: 149775 - DNA, 19 bp, Homo sapiens
  siRNA target sequence for PCDH17 (NM_014459.2,2892-2910).
ctcctagcggccatgatca

SEQ ID NO: 149776 - DNA, 19 bp, Homo sapiens
  siRNA target sequence for PCDH17 (NM_014459.2,3166-3184).
ggtcggaggtgatgtatct

SEQ ID NO: 149777 - DNA, 19 bp, Homo sapiens
  siRNA target sequence for PCDH17 (NM_014459.2,3169-3187).
cggaggtgatgtatctcaa

SEQ ID NO: 149778 - DNA, 19 bp, Homo sapiens
  siRNA target sequence for PCDH17 (NM_014459.2,3248-3266).
cggacaagggactaatgca

SEQ ID NO: 149779 - DNA, 19 bp, Homo sapiens
  siRNA target sequence for PCDH17 (NM_014459.2,3279-3297).
gccactcggatgtccataa

SEQ ID NO: 149780 - DNA, 19 bp, Homo sapiens
  siRNA target sequence for PCDH17 (NM_014459.2,3280-3298).
ccactcggatgtccataat

SEQ ID NO: 149781 - DNA, 19 bp, Homo sapiens
  siRNA target sequence for PCDH17 (NM_014459.2,3281-3299).
cactcggatgtccataatt

SEQ ID NO: 149782 - DNA, 19 bp, Homo sapiens
  siRNA target sequence for PCDH17 (NM_014459.2,3283-3301).
ctcggatgtccataattca

SEQ ID NO: 149783 - DNA, 19 bp, Homo sapiens
  siRNA target sequence for PCDH17 (NM_014459.2,3285-3303).
cggatgtccataattcaga

SEQ ID NO: 149784 - DNA, 19 bp, Homo sapiens
  siRNA target sequence for PCDH17 (NM_014459.2,3315-3333).
cccgcagagcccaattaca

SEQ ID NO: 149785 - DNA, 19 bp, Homo sapiens
  siRNA target sequence for PCDH17 (NM_014459.2,3369-3387).
gtagctccacgtttaagga

SEQ ID NO: 149786 - DNA, 19 bp, Homo sapiens
  siRNA target sequence for PCDH18 (NM_019035.2,403-421).
gctaaaatgcactttaggt

SEQ ID NO: 149787 - DNA, 19 bp, Homo sapiens
  siRNA target sequence for PCDH18 (NM_019035.2,430-448).
gcacttctgatagtatctt

SEQ ID NO: 149788 - DNA, 19 bp, Homo sapiens
  siRNA target sequence for PCDH18 (NM_019035.2,433-451).
cttctgatagtatctttca

SEQ ID NO: 149789 - DNA, 19 bp, Homo sapiens
  siRNA target sequence for PCDH18 (NM_019035.2,446-464).
ctttcaaccacgatgtact

SEQ ID NO: 149790 - DNA, 19 bp, Homo sapiens
  siRNA target sequence for PCDH18 (NM_019035.2,456-474).
cgatgtactgggcaagaat

SEQ ID NO: 149791 - DNA, 19 bp, Homo sapiens
  siRNA target sequence for PCDH18 (NM_019035.2,457-475).
gatgtactgggcaagaatt

SEQ ID NO: 149792 - DNA, 19 bp, Homo sapiens
  siRNA target sequence for PCDH18 (NM_019035.2,460-478).
gtactgggcaagaatttga

SEQ ID NO: 149793 - DNA, 19 bp, Homo sapiens
  siRNA target sequence for PCDH18 (NM_019035.2,499-517).
cagagggttggatcagtaa

SEQ ID NO: 149794 - DNA, 19 bp, Homo sapiens
  siRNA target sequence for PCDH18 (NM_019035.2,501-519).
gagggttggatcagtaatt

SEQ ID NO: 149795 - DNA, 19 bp, Homo sapiens
  siRNA target sequence for PCDH18 (NM_019035.2,504-522).
ggttggatcagtaattgca

SEQ ID NO: 149796 - DNA, 19 bp, Homo sapiens
  siRNA target sequence for PCDH18 (NM_019035.2,505-523).
gttggatcagtaattgcaa

SEQ ID NO: 149797 - DNA, 19 bp, Homo sapiens
  siRNA target sequence for PCDH18 (NM_019035.2,1067-1085).
ctggctcatccatactaaa

SEQ ID NO: 149798 - DNA, 19 bp, Homo sapiens
  siRNA target sequence for PCDH18 (NM_019035.2,1069-1087).
ggctcatccatactaaaaa

SEQ ID NO: 149799 - DNA, 19 bp, Homo sapiens
  siRNA target sequence for PCDH18 (NM_019035.2,1076-1094).
ccatactaaaaataagcat

SEQ ID NO: 149800 - DNA, 19 bp, Homo sapiens
  siRNA target sequence for PCDH18 (NM_019035.2,1126-1144).
gagcagcaatcttatataa

SEQ ID NO: 149801 - DNA, 19 bp, Homo sapiens
  siRNA target sequence for PCDH18 (NM_019035.2,1128-1146).
gcagcaatcttatataata

SEQ ID NO: 149802 - DNA, 19 bp, Homo sapiens
  siRNA target sequence for PCDH18 (NM_019035.2,1172-1190).
gcactttgctcttagatct

SEQ ID NO: 149803 - DNA, 19 bp, Homo sapiens
  siRNA target sequence for PCDH18 (NM_019035.2,1212-1230).
gggcgctaatgggaaaatt

SEQ ID NO: 149804 - DNA, 19 bp, Homo sapiens
  siRNA target sequence for PCDH18 (NM_019035.2,1214-1232).
gcgctaatgggaaaattgt

SEQ ID NO: 149805 - DNA, 19 bp, Homo sapiens
  siRNA target sequence for PCDH18 (NM_019035.2,1215-1233).
cgctaatgggaaaattgta

SEQ ID NO: 149806 - DNA, 19 bp, Homo sapiens
  siRNA target sequence for PCDH18 (NM_019035.2,1216-1234).
gctaatgggaaaattgtat

SEQ ID NO: 149807 - DNA, 19 bp, Homo sapiens
  siRNA target sequence for PCDH18 (NM_019035.2,1217-1235).
ctaatgggaaaattgtata

SEQ ID NO: 149808 - DNA, 19 bp, Homo sapiens
  siRNA target sequence for PCDH18 (NM_019035.2,1247-1265).
gtcatgtgtctcccaaaat

SEQ ID NO: 149809 - DNA, 19 bp, Homo sapiens
  siRNA target sequence for PCDH18 (NM_019035.2,1343-1361).
cctatgagattgatgttca

SEQ ID NO: 149810 - DNA, 19 bp, Homo sapiens
  siRNA target sequence for PCDH18 (NM_019035.2,1556-1574).
ggctgaatggagaaatagt

SEQ ID NO: 149811 - DNA, 19 bp, Homo sapiens
  siRNA target sequence for PCDH18 (NM_019035.2,1557-1575).
gctgaatggagaaatagtt

SEQ ID NO: 149812 - DNA, 19 bp, Homo sapiens
  siRNA target sequence for PCDH18 (NM_019035.2,1589-1607).
gacatggtcactttaaact

SEQ ID NO: 149813 - DNA, 19 bp, Homo sapiens
  siRNA target sequence for PCDH18 (NM_019035.2,1675-1693).
gagtatagtttgactgtaa

SEQ ID NO: 149814 - DNA, 19 bp, Homo sapiens
  siRNA target sequence for PCDH18 (NM_019035.2,1718-1736).
gtctctctacagtgaaaca

SEQ ID NO: 149815 - DNA, 19 bp, Homo sapiens
  siRNA target sequence for PCDH18 (NM_019035.2,1720-1738).
ctctctacagtgaaacatt

SEQ ID NO: 149816 - DNA, 19 bp, Homo sapiens
  siRNA target sequence for PCDH18 (NM_019035.2,1783-1801).
cagagaagccgatatgaat

SEQ ID NO: 149817 - DNA, 19 bp, Homo sapiens
  siRNA target sequence for PCDH18 (NM_019035.2,1790-1808).
gccgatatgaatttgtaat

SEQ ID NO: 149818 - DNA, 19 bp, Homo sapiens
  siRNA target sequence for PCDH18 (NM_019035.2,1831-1849).
gcatatatcaccactgtta

SEQ ID NO: 149819 - DNA, 19 bp, Homo sapiens
  siRNA target sequence for PCDH18 (NM_019035.2,1915-1933).
ctaggaagttccataacta

SEQ ID NO: 149820 - DNA, 19 bp, Homo sapiens
  siRNA target sequence for PCDH18 (NM_019035.2,1918-1936).
ggaagttccataactacat

SEQ ID NO: 149821 - DNA, 19 bp, Homo sapiens
  siRNA target sequence for PCDH18 (NM_019035.2,1919-1937).
gaagttccataactacata

SEQ ID NO: 149822 - DNA, 19 bp, Homo sapiens
  siRNA target sequence for PCDH18 (NM_019035.2,1922-1940).
gttccataactacatatgt

SEQ ID NO: 149823 - DNA, 19 bp, Homo sapiens
  siRNA target sequence for PCDH18 (NM_019035.2,2045-2063).
cgaagcaactggtaagcaa

SEQ ID NO: 149824 - DNA, 19 bp, Homo sapiens
  siRNA target sequence for PCDH18 (NM_019035.2,2046-2064).
gaagcaactggtaagcaat

SEQ ID NO: 149825 - DNA, 19 bp, Homo sapiens
  siRNA target sequence for PCDH18 (NM_019035.2,2100-2118).
caacgttcctgtggttata

SEQ ID NO: 149826 - DNA, 19 bp, Homo sapiens
  siRNA target sequence for PCDH18 (NM_019035.2,2119-2137).
gggcctgcattgcgtaata

SEQ ID NO: 149827 - DNA, 19 bp, Homo sapiens
  siRNA target sequence for PCDH18 (NM_019035.2,2241-2259).
cgccatagtagcaggtaat

SEQ ID NO: 149828 - DNA, 19 bp, Homo sapiens
  siRNA target sequence for PCDH18 (NM_019035.2,2243-2261).
ccatagtagcaggtaatga

SEQ ID NO: 149829 - DNA, 19 bp, Homo sapiens
  siRNA target sequence for PCDH18 (NM_019035.2,2255-2273).
gtaatgaggagaatatctt

SEQ ID NO: 149830 - DNA, 19 bp, Homo sapiens
  siRNA target sequence for PCDH18 (NM_019035.2,2287-2305).
cgatcatgtgacatccata

SEQ ID NO: 149831 - DNA, 19 bp, Homo sapiens
  siRNA target sequence for PCDH18 (NM_019035.2,2291-2309).
catgtgacatccataccaa

SEQ ID NO: 149832 - DNA, 19 bp, Homo sapiens
  siRNA target sequence for PCDH18 (NM_019035.2,2310-2328).
cgttagcatggattctgtt

SEQ ID NO: 149833 - DNA, 19 bp, Homo sapiens
  siRNA target sequence for PCDH18 (NM_019035.2,2398-2416).
cttctgaagtgcatgatct

SEQ ID NO: 149834 - DNA, 19 bp, Homo sapiens
  siRNA target sequence for PCDH18 (NM_019035.2,2425-2443).
gcagagtcggtgacaagta

SEQ ID NO: 149835 - DNA, 19 bp, Homo sapiens
  siRNA target sequence for PCDH18 (NM_019035.2,2555-2573).
ggtgtaaccgcgagaagaa

SEQ ID NO: 149836 - DNA, 19 bp, Homo sapiens
  siRNA target sequence for PCDH18 (NM_019035.2,2556-2574).
gtgtaaccgcgagaagaaa

SEQ ID NO: 149837 - DNA, 19 bp, Homo sapiens
  siRNA target sequence for PCDH18 (NM_019035.2,2575-2593).
gacactagatcctataact

SEQ ID NO: 149838 - DNA, 19 bp, Homo sapiens
  siRNA target sequence for PCDH18 (NM_019035.2,2595-2613).
cagggtggccgaatcaact

SEQ ID NO: 149839 - DNA, 19 bp, Homo sapiens
  siRNA target sequence for PCDH18 (NM_019035.2,2597-2615).
gggtggccgaatcaactta

SEQ ID NO: 149840 - DNA, 19 bp, Homo sapiens
  siRNA target sequence for PCDH18 (NM_019035.2,2635-2653).
ccatcccggcagattcaca

SEQ ID NO: 149841 - DNA, 19 bp, Homo sapiens
  siRNA target sequence for PCDH18 (NM_019035.2,2636-2654).
catcccggcagattcacaa

SEQ ID NO: 149842 - DNA, 19 bp, Homo sapiens
  siRNA target sequence for PCDH18 (NM_019035.2,2650-2668).
cacaaaggggacatcacat

SEQ ID NO: 149843 - DNA, 19 bp, Homo sapiens
  siRNA target sequence for PCDH18 (NM_019035.2,2664-2682).
cacattggtgcctaccata

SEQ ID NO: 149844 - DNA, 19 bp, Homo sapiens
  siRNA target sequence for PCDH18 (NM_019035.2,2666-2684).
cattggtgcctaccataaa

SEQ ID NO: 149845 - DNA, 19 bp, Homo sapiens
  siRNA target sequence for PCDH18 (NM_019035.2,2712-2730).
cagatcgtctccatcttca

SEQ ID NO: 149846 - DNA, 19 bp, Homo sapiens
  siRNA target sequence for PCDH18 (NM_019035.2,2782-2800).
caccagtcactcaacagtt

SEQ ID NO: 149847 - DNA, 19 bp, Homo sapiens
  siRNA target sequence for PCDH18 (NM_019035.2,2821-2839).
cacgtgccagagaatttct

SEQ ID NO: 149848 - DNA, 19 bp, Homo sapiens
  siRNA target sequence for PCDH18 (NM_019035.2,2828-2846).
cagagaatttctcattaga

SEQ ID NO: 149849 - DNA, 19 bp, Homo sapiens
  siRNA target sequence for PCDH18 (NM_019035.2,2877-2895).
ggtctctcagcttctttca

SEQ ID NO: 149850 - DNA, 19 bp, Homo sapiens
  siRNA target sequence for PCDH18 (NM_019035.2,2898-2916).
gcttcaccaggggcaatat

SEQ ID NO: 149851 - DNA, 19 bp, Homo sapiens
  siRNA target sequence for PCDH18 (NM_019035.2,2919-2937).
gccaagaccaagttttcga

SEQ ID NO: 149852 - DNA, 19 bp, Homo sapiens
  siRNA target sequence for PCDH18 (NM_019035.2,2971-2989).
cttcaagacatggacaaat

SEQ ID NO: 149853 - DNA, 19 bp, Homo sapiens
  siRNA target sequence for PCDH18 (NM_019035.2,3050-3068).
ggcgagattctccaataga

SEQ ID NO: 149854 - DNA, 19 bp, Homo sapiens
  siRNA target sequence for PCDH18 (NM_019035.2,3051-3069).
gcgagattctccaatagat

SEQ ID NO: 149855 - DNA, 19 bp, Homo sapiens
  siRNA target sequence for PCDH18 (NM_019035.2,3105-3123).
cacagatggaagaattcca

SEQ ID NO: 149856 - DNA, 19 bp, Homo sapiens
  siRNA target sequence for PCDH18 (NM_019035.2,3196-3214).
ccctcaccgtcttctgatt

SEQ ID NO: 149857 - DNA, 19 bp, Homo sapiens
  siRNA target sequence for PCDH18 (NM_019035.2,3197-3215).
cctcaccgtcttctgatta

SEQ ID NO: 149858 - DNA, 19 bp, Homo sapiens
  siRNA target sequence for PCDH18 (NM_019035.2,3202-3220).
ccgtcttctgattatagga

SEQ ID NO: 149859 - DNA, 19 bp, Homo sapiens
  siRNA target sequence for PCDH18 (NM_019035.2,3378-3396).
ggataccagcacatcatct

SEQ ID NO: 149860 - DNA, 19 bp, Homo sapiens
  siRNA target sequence for PCDH18 (NM_019035.2,3439-3457).
ccttccctggacacctatt

SEQ ID NO: 149861 - DNA, 19 bp, Homo sapiens
  siRNA target sequence for PCDH18 (NM_019035.2,3509-3527).
ccttgccagccaaaactgt

SEQ ID NO: 149862 - DNA, 19 bp, Homo sapiens
  siRNA target sequence for PCDH18 (NM_019035.2,3555-3573).
ggcagccagtacgcatttt

SEQ ID NO: 149863 - DNA, 19 bp, Homo sapiens
  siRNA target sequence for PCDH18 (NM_019035.2,3561-3579).
cagtacgcattttcaaaat

SEQ ID NO: 149864 - DNA, 19 bp, Homo sapiens
  siRNA target sequence for PCDH18 (NM_019035.2,3657-3675).
ggagatccctgaaaattat

SEQ ID NO: 149865 - DNA, 19 bp, Homo sapiens
  siRNA target sequence for PCDH20 (NM_022843.2,112-130).
ggaacctgccgcatctgtt

SEQ ID NO: 149866 - DNA, 19 bp, Homo sapiens
  siRNA target sequence for PCDH20 (NM_022843.2,113-131).
gaacctgccgcatctgttt

SEQ ID NO: 149867 - DNA, 19 bp, Homo sapiens
  siRNA target sequence for PCDH20 (NM_022843.2,119-137).
gccgcatctgtttctgttt

SEQ ID NO: 149868 - DNA, 19 bp, Homo sapiens
  siRNA target sequence for PCDH20 (NM_022843.2,475-493).
ggagcggcagcgtttccat

SEQ ID NO: 149869 - DNA, 19 bp, Homo sapiens
  siRNA target sequence for PCDH20 (NM_022843.2,581-599).
cgccatcagagacatcaat

SEQ ID NO: 149870 - DNA, 19 bp, Homo sapiens
  siRNA target sequence for PCDH20 (NM_022843.2,635-653).
ggtgtgggtcccggaaaat

SEQ ID NO: 149871 - DNA, 19 bp, Homo sapiens
  siRNA target sequence for PCDH20 (NM_022843.2,638-656).
gtgggtcccggaaaatgca

SEQ ID NO: 149872 - DNA, 19 bp, Homo sapiens
  siRNA target sequence for PCDH20 (NM_022843.2,791-809).
gcgcaccccctacctaatt

SEQ ID NO: 149873 - DNA, 19 bp, Homo sapiens
  siRNA target sequence for PCDH20 (NM_022843.2,874-892).
gtgggtctccaccactttt

SEQ ID NO: 149874 - DNA, 19 bp, Homo sapiens
  siRNA target sequence for PCDH20 (NM_022843.2,1042-1060).
ccaatgctcaaattactta

SEQ ID NO: 149875 - DNA, 19 bp, Homo sapiens
  siRNA target sequence for PCDH20 (NM_022843.2,1043-1061).
caatgctcaaattacttat

SEQ ID NO: 149876 - DNA, 19 bp, Homo sapiens
  siRNA target sequence for PCDH20 (NM_022843.2,1047-1065).
gctcaaattacttattctt

SEQ ID NO: 149877 - DNA, 19 bp, Homo sapiens
  siRNA target sequence for PCDH20 (NM_022843.2,1048-1066).
ctcaaattacttattctta

SEQ ID NO: 149878 - DNA, 19 bp, Homo sapiens
  siRNA target sequence for PCDH20 (NM_022843.2,1118-1136).
cactggagtcattaaactt

SEQ ID NO: 149879 - DNA, 19 bp, Homo sapiens
  siRNA target sequence for PCDH20 (NM_022843.2,1122-1140).
ggagtcattaaacttttca

SEQ ID NO: 149880 - DNA, 19 bp, Homo sapiens
  siRNA target sequence for PCDH20 (NM_022843.2,1225-1243).
ctcttgtgtccattattaa

SEQ ID NO: 149881 - DNA, 19 bp, Homo sapiens
  siRNA target sequence for PCDH20 (NM_022843.2,1280-1298).
catagcaaacgagatagat

SEQ ID NO: 149882 - DNA, 19 bp, Homo sapiens
  siRNA target sequence for PCDH20 (NM_022843.2,1362-1380).
gatccagaaggtaaataca

SEQ ID NO: 149883 - DNA, 19 bp, Homo sapiens
  siRNA target sequence for PCDH20 (NM_022843.2,1401-1419).
ggtgaagggccgtttaggt

SEQ ID NO: 149884 - DNA, 19 bp, Homo sapiens
  siRNA target sequence for PCDH20 (NM_022843.2,1402-1420).
gtgaagggccgtttaggtt

SEQ ID NO: 149885 - DNA, 19 bp, Homo sapiens
  siRNA target sequence for PCDH20 (NM_022843.2,1404-1422).
gaagggccgtttaggttat

SEQ ID NO: 149886 - DNA, 19 bp, Homo sapiens
  siRNA target sequence for PCDH20 (NM_022843.2,1423-1441).
caccttacaaaccatacaa

SEQ ID NO: 149887 - DNA, 19 bp, Homo sapiens
  siRNA target sequence for PCDH20 (NM_022843.2,1425-1443).
ccttacaaaccatacaata

SEQ ID NO: 149888 - DNA, 19 bp, Homo sapiens
  siRNA target sequence for PCDH20 (NM_022843.2,1426-1444).
cttacaaaccatacaataa

SEQ ID NO: 149889 - DNA, 19 bp, Homo sapiens
  siRNA target sequence for PCDH20 (NM_022843.2,1455-1473).
ctagagaccacaaaaccta

SEQ ID NO: 149890 - DNA, 19 bp, Homo sapiens
  siRNA target sequence for PCDH20 (NM_022843.2,1527-1545).
gagggatttcatgtcaaaa

SEQ ID NO: 149891 - DNA, 19 bp, Homo sapiens
  siRNA target sequence for PCDH20 (NM_022843.2,1548-1566).
gtcattaaagtgcaacttt

SEQ ID NO: 149892 - DNA, 19 bp, Homo sapiens
  siRNA target sequence for PCDH20 (NM_022843.2,1688-1706).
gagaggccaagtttcatat

SEQ ID NO: 149893 - DNA, 19 bp, Homo sapiens
  siRNA target sequence for PCDH20 (NM_022843.2,1690-1708).
gaggccaagtttcatattt

SEQ ID NO: 149894 - DNA, 19 bp, Homo sapiens
  siRNA target sequence for PCDH20 (NM_022843.2,1867-1885).
ccctcacagtgttggataa

SEQ ID NO: 149895 - DNA, 19 bp, Homo sapiens
  siRNA target sequence for PCDH20 (NM_022843.2,1868-1886).
cctcacagtgttggataaa

SEQ ID NO: 149896 - DNA, 19 bp, Homo sapiens
  siRNA target sequence for PCDH20 (NM_022843.2,1897-1915).
gtcctcggtttatcaacaa

SEQ ID NO: 149897 - DNA, 19 bp, Homo sapiens
  siRNA target sequence for PCDH20 (NM_022843.2,1989-2007).
gacgctggacgaaatggat

SEQ ID NO: 149898 - DNA, 19 bp, Homo sapiens
  siRNA target sequence for PCDH20 (NM_022843.2,2022-2040).
gtggtgaaccagagtgata

SEQ ID NO: 149899 - DNA, 19 bp, Homo sapiens
  siRNA target sequence for PCDH20 (NM_022843.2,2025-2043).
gtgaaccagagtgatattt

SEQ ID NO: 149900 - DNA, 19 bp, Homo sapiens
  siRNA target sequence for PCDH20 (NM_022843.2,2097-2115).
gagcagcaaagctcctata

SEQ ID NO: 149901 - DNA, 19 bp, Homo sapiens
  siRNA target sequence for PCDH20 (NM_022843.2,2099-2117).
gcagcaaagctcctatact

SEQ ID NO: 149902 - DNA, 19 bp, Homo sapiens
  siRNA target sequence for PCDH20 (NM_022843.2,2100-2118).
cagcaaagctcctatactt

SEQ ID NO: 149903 - DNA, 19 bp, Homo sapiens
  siRNA target sequence for PCDH20 (NM_022843.2,2174-2192).
cacaattctccttctagat

SEQ ID NO: 149904 - DNA, 19 bp, Homo sapiens
  siRNA target sequence for PCDH20 (NM_022843.2,2275-2293).
ccccggttacagaagtcta

SEQ ID NO: 149905 - DNA, 19 bp, Homo sapiens
  siRNA target sequence for PCDH20 (NM_022843.2,2276-2294).
cccggttacagaagtctat

SEQ ID NO: 149906 - DNA, 19 bp, Homo sapiens
  siRNA target sequence for PCDH20 (NM_022843.2,2327-2345).
catagcttacagcatcata

SEQ ID NO: 149907 - DNA, 19 bp, Homo sapiens
  siRNA target sequence for PCDH20 (NM_022843.2,2375-2393).
caggattgaccctaaaact

SEQ ID NO: 149908 - DNA, 19 bp, Homo sapiens
  siRNA target sequence for PCDH20 (NM_022843.2,2385-2403).
cctaaaactggcaacatta

SEQ ID NO: 149909 - DNA, 19 bp, Homo sapiens
  siRNA target sequence for PCDH20 (NM_022843.2,2445-2463).
cgcttactggtgaaagtga

SEQ ID NO: 149910 - DNA, 19 bp, Homo sapiens
  siRNA target sequence for PCDH20 (NM_022843.2,2497-2515).
cagtcatggtgaacctatt

SEQ ID NO: 149911 - DNA, 19 bp, Homo sapiens
  siRNA target sequence for PCDH20 (NM_022843.2,2527-2545).
ctgtcagtaatgagagtta

SEQ ID NO: 149912 - DNA, 19 bp, Homo sapiens
  siRNA target sequence for PCDH20 (NM_022843.2,2529-2547).
gtcagtaatgagagttaca

SEQ ID NO: 149913 - DNA, 19 bp, Homo sapiens
  siRNA target sequence for PCDH20 (NM_022843.2,2531-2549).
cagtaatgagagttacatt

SEQ ID NO: 149914 - DNA, 19 bp, Homo sapiens
  siRNA target sequence for PCDH20 (NM_022843.2,2533-2551).
gtaatgagagttacattga

SEQ ID NO: 149915 - DNA, 19 bp, Homo sapiens
  siRNA target sequence for PCDH20 (NM_022843.2,2546-2564).
cattgagagtcttttaaga

SEQ ID NO: 149916 - DNA, 19 bp, Homo sapiens
  siRNA target sequence for PCDH20 (NM_022843.2,2790-2808).
ggaaaaattgacttgcata

SEQ ID NO: 149917 - DNA, 19 bp, Homo sapiens
  siRNA target sequence for PCDH7 (NM_002589.2,1187-1205).
gatcgggtgaggtgacttt

SEQ ID NO: 149918 - DNA, 19 bp, Homo sapiens
  siRNA target sequence for PCDH7 (NM_002589.2,1220-1238).
gttccgagtacctgaagat

SEQ ID NO: 149919 - DNA, 19 bp, Homo sapiens
  siRNA target sequence for PCDH7 (NM_002589.2,1478-1496).
cggtgggcacactttacct

SEQ ID NO: 149920 - DNA, 19 bp, Homo sapiens
  siRNA target sequence for PCDH7 (NM_002589.2,2023-2041).
gtcaacgggcagatcgaat

SEQ ID NO: 149921 - DNA, 19 bp, Homo sapiens
  siRNA target sequence for PCDH7 (NM_002589.2,2203-2221).
gccaccgtggtccttaaca

SEQ ID NO: 149922 - DNA, 19 bp, Homo sapiens
  siRNA target sequence for PCDH7 (NM_002589.2,2208-2226).
cgtggtccttaacatcaaa

SEQ ID NO: 149923 - DNA, 19 bp, Homo sapiens
  siRNA target sequence for PCDH7 (NM_002589.2,2238-2256).
caacgtgccgtccattgaa

SEQ ID NO: 149924 - DNA, 19 bp, Homo sapiens
  siRNA target sequence for PCDH7 (NM_002589.2,2773-2791).
ggggacatcctggtcaata

SEQ ID NO: 149925 - DNA, 19 bp, Homo sapiens
  siRNA target sequence for PCDH7 (NM_002589.2,2809-2827).
cagactgacaggtatgagt

SEQ ID NO: 149926 - DNA, 19 bp, Homo sapiens
  siRNA target sequence for PCDH7 (NM_002589.2,2811-2829).
gactgacaggtatgagttt

SEQ ID NO: 149927 - DNA, 19 bp, Homo sapiens
  siRNA target sequence for PCDH7 (NM_002589.2,2817-2835).
caggtatgagtttaaagtt

SEQ ID NO: 149928 - DNA, 19 bp, Homo sapiens
  siRNA target sequence for PCDH7 (NM_002589.2,2929-2947).
caggacgtcttcacctttt

SEQ ID NO: 149929 - DNA, 19 bp, Homo sapiens
  siRNA target sequence for PCDH7 (NM_002589.2,2931-2949).
ggacgtcttcaccttttat

SEQ ID NO: 149930 - DNA, 19 bp, Homo sapiens
  siRNA target sequence for PCDH7 (NM_002589.2,3076-3094).
gacacggggaccatttact

SEQ ID NO: 149931 - DNA, 19 bp, Homo sapiens
  siRNA target sequence for PCDH7 (NM_002589.2,3104-3122).
cttttgaccgggaacatca

SEQ ID NO: 149932 - DNA, 19 bp, Homo sapiens
  siRNA target sequence for PCDH7 (NM_002589.2,3121-3139).
cagaccacatacactttca

SEQ ID NO: 149933 - DNA, 19 bp, Homo sapiens
  siRNA target sequence for PCDH7 (NM_002589.2,3123-3141).
gaccacatacactttcaga

SEQ ID NO: 149934 - DNA, 19 bp, Homo sapiens
  siRNA target sequence for PCDH7 (NM_002589.2,3188-3206).
cagtctcgctttttgtgat

SEQ ID NO: 149935 - DNA, 19 bp, Homo sapiens
  siRNA target sequence for PCDH7 (NM_002589.2,3217-3235).
gacaatgctcccacagtta

SEQ ID NO: 149936 - DNA, 19 bp, Homo sapiens
  siRNA target sequence for PCDH7 (NM_002589.2,3232-3250).
gttacccttcccaaaaaca

SEQ ID NO: 149937 - DNA, 19 bp, Homo sapiens
  siRNA target sequence for PCDH7 (NM_002589.2,3268-3286).
ccaccttcgagtaatgtca

SEQ ID NO: 149938 - DNA, 19 bp, Homo sapiens
  siRNA target sequence for PCDH7 (NM_002589.2,3309-3327).
ggcaacagacagtgatgat

SEQ ID NO: 149939 - DNA, 19 bp, Homo sapiens
  siRNA target sequence for PCDH7 (NM_002589.2,3398-3416).
ctagtggtgtggtttcctt

SEQ ID NO: 149940 - DNA, 19 bp, Homo sapiens
  siRNA target sequence for PCDH7 (NM_002589.2,3506-3524).
ctctggtgcacgtgtttgt

SEQ ID NO: 149941 - DNA, 19 bp, Homo sapiens
  siRNA target sequence for PCDH7 (NM_002589.2,3508-3526).
ctggtgcacgtgtttgtca

SEQ ID NO: 149942 - DNA, 19 bp, Homo sapiens
  siRNA target sequence for PCDH7 (NM_002589.2,3510-3528).
ggtgcacgtgtttgtcaat

SEQ ID NO: 149943 - DNA, 19 bp, Homo sapiens
  siRNA target sequence for PCDH7 (NM_002589.2,3513-3531).
gcacgtgtttgtcaatgaa

SEQ ID NO: 149944 - DNA, 19 bp, Homo sapiens
  siRNA target sequence for PCDH7 (NM_002589.2,3514-3532).
cacgtgtttgtcaatgaaa

SEQ ID NO: 149945 - DNA, 19 bp, Homo sapiens
  siRNA target sequence for PCDH7 (NM_002589.2,3560-3578).
cccagatagctagaagttt

SEQ ID NO: 149946 - DNA, 19 bp, Homo sapiens
  siRNA target sequence for PCDH7 (NM_002589.2,3656-3674).
gcgtggttgctggcattat

SEQ ID NO: 149947 - DNA, 19 bp, Homo sapiens
  siRNA target sequence for PCDH7 (NM_002589.2,3658-3676).
gtggttgctggcattatga

SEQ ID NO: 149948 - DNA, 19 bp, Homo sapiens
  siRNA target sequence for PCDH7 (NM_002589.2,3681-3699).
gattctaatcatcttaatt

SEQ ID NO: 149949 - DNA, 19 bp, Homo sapiens
  siRNA target sequence for PCDH7 (NM_002589.2,3713-3731).
ggtactgcaggtccaaaaa

SEQ ID NO: 149950 - DNA, 19 bp, Homo sapiens
  siRNA target sequence for PCDH7 (NM_002589.2,3714-3732).
gtactgcaggtccaaaaat

SEQ ID NO: 149951 - DNA, 19 bp, Homo sapiens
  siRNA target sequence for PCDH7 (NM_002589.2,3741-3759).
ctatgaagccggcaaaaaa

SEQ ID NO: 149952 - DNA, 19 bp, Homo sapiens
  siRNA target sequence for PCDH7 (NM_002589.2,3760-3778).
gatcacgaagactttttta

SEQ ID NO: 149953 - DNA, 19 bp, Homo sapiens
  siRNA target sequence for PCDH7 (NM_002589.2,3784-3802).
caacagcatgacaaatcta

SEQ ID NO: 149954 - DNA, 19 bp, Homo sapiens
  siRNA target sequence for PCDH7 (NM_002589.2,3890-3908).
gacagaggtatgatagtgt

SEQ ID NO: 149955 - DNA, 19 bp, Homo sapiens
  siRNA target sequence for PCDH7 (NM_002589.2,3894-3912).
gaggtatgatagtgtcaat

SEQ ID NO: 149956 - DNA, 19 bp, Homo sapiens
  siRNA target sequence for PCDH7 (NM_002589.2,3896-3914).
ggtatgatagtgtcaatga

SEQ ID NO: 149957 - DNA, 19 bp, Homo sapiens
  siRNA target sequence for PCDH7 (NM_002589.2,3942-3960).
gcgatacaggtccgttaat

SEQ ID NO: 149958 - DNA, 19 bp, Homo sapiens
  siRNA target sequence for PCDH7 (NM_002589.2,3979-3997).
gacctggcaaggcattaca

SEQ ID NO: 149959 - DNA, 19 bp, Homo sapiens
  siRNA target sequence for PCDH7 (NM_002589.2,4062-4080).
ccaggccgtacaagatcta

SEQ ID NO: 149960 - DNA, 19 bp, Homo sapiens
  siRNA target sequence for PCDH7 (NM_002589.2,4116-4134).
catttcaattggatcagat

SEQ ID NO: 149961 - DNA, 19 bp, Homo sapiens
  siRNA target sequence for PCDH7 (NM_002589.2,4146-4164).
gtacagctgtcaaaccaat

SEQ ID NO: 149962 - DNA, 19 bp, Homo sapiens
  siRNA target sequence for PCDH7 (NM_002589.2,4151-4169).
gctgtcaaaccaataacaa

SEQ ID NO: 149963 - DNA, 19 bp, Homo sapiens
  siRNA target sequence for PCDH7 (NM_002589.2,4154-4172).
gtcaaaccaataacaagta

SEQ ID NO: 149964 - DNA, 19 bp, Homo sapiens
  siRNA target sequence for PCDH7 (NM_002589.2,4156-4174).
caaaccaataacaagtaca

SEQ ID NO: 149965 - DNA, 19 bp, Homo sapiens
  siRNA target sequence for PCDH7 (NM_002589.2,4176-4194).
caaacagatgcgtctacat

SEQ ID NO: 149966 - DNA, 19 bp, Homo sapiens
  siRNA target sequence for PCDH7 (NM_002589.2,4185-4203).
gcgtctacatccatacatt

SEQ ID NO: 149967 - DNA, 19 bp, Homo sapiens
  siRNA target sequence for PCDH7 (NM_002589.2,4186-4204).
cgtctacatccatacatta

SEQ ID NO: 149968 - DNA, 19 bp, Homo sapiens
  siRNA target sequence for PCDH7 (NM_032457.1,4222-4240).
gatggcagtgttgattcaa

SEQ ID NO: 149969 - DNA, 19 bp, Homo sapiens
  siRNA target sequence for PCDH7 (NM_032457.1,4531-4549).
gaggatattccccttacaa

SEQ ID NO: 149970 - DNA, 19 bp, Homo sapiens
  siRNA target sequence for PCDH7 (NM_032457.1,4533-4551).
ggatattccccttacaaaa

SEQ ID NO: 149971 - DNA, 19 bp, Homo sapiens
  siRNA target sequence for PCDH7 (NM_032457.1,4576-4594).
gtcaatactctcactagaa

SEQ ID NO: 149972 - DNA, 19 bp, Homo sapiens
  siRNA target sequence for PCDH8 (NM_002590.2,351-369).
gccgaggacctgcatatga

SEQ ID NO: 149973 - DNA, 19 bp, Homo sapiens
  siRNA target sequence for PCDH8 (NM_002590.2,352-370).
ccgaggacctgcatatgaa

SEQ ID NO: 149974 - DNA, 19 bp, Homo sapiens
  siRNA target sequence for PCDH8 (NM_002590.2,353-371).
cgaggacctgcatatgaaa

SEQ ID NO: 149975 - DNA, 19 bp, Homo sapiens
  siRNA target sequence for PCDH8 (NM_002590.2,356-374).
ggacctgcatatgaaagta

SEQ ID NO: 149976 - DNA, 19 bp, Homo sapiens
  siRNA target sequence for PCDH8 (NM_002590.2,1842-1860).
gccgtgtccacttatgtct

SEQ ID NO: 149977 - DNA, 19 bp, Homo sapiens
  siRNA target sequence for PCDH8 (NM_002590.2,1896-1914).
cgcagcttcgactatgaga

SEQ ID NO: 149978 - DNA, 19 bp, Homo sapiens
  siRNA target sequence for PCDH8 (NM_002590.2,2047-2065).
ccaatggctccctagaagt

SEQ ID NO: 149979 - DNA, 19 bp, Homo sapiens
  siRNA target sequence for PCDH8 (NM_002590.2,3001-3019).
gggacgctctgaaaaagga

SEQ ID NO: 149980 - DNA, 19 bp, Homo sapiens
  siRNA target sequence for PCDH8 (NM_002590.2,3052-3070).
cgtgcaccgctgagtgtaa

SEQ ID NO: 149981 - DNA, 19 bp, Homo sapiens
  siRNA target sequence for PCDH8 (NM_002590.2,3055-3073).
gcaccgctgagtgtaagat

SEQ ID NO: 149982 - DNA, 19 bp, Homo sapiens
  siRNA target sequence for PCDH8 (NM_002590.2,3141-3159).
ccaccagcccagatgtcaa

SEQ ID NO: 149983 - DNA, 19 bp, Homo sapiens
  siRNA target sequence for PCDH8 (NM_002590.2,3192-3210).
cctctgcgcagggacaatt

SEQ ID NO: 149984 - DNA, 19 bp, Homo sapiens
  siRNA target sequence for PCDH8 (NM_002590.2,3193-3211).
ctctgcgcagggacaatta

SEQ ID NO: 149985 - DNA, 19 bp, Homo sapiens
  siRNA target sequence for PCDH8 (NM_002590.2,3195-3213).
ctgcgcagggacaattact

SEQ ID NO: 149986 - DNA, 19 bp, Homo sapiens
  siRNA target sequence for PCDH8 (NM_002590.2,3250-3268).
gcgtctatgagaaagtact

SEQ ID NO: 149987 - DNA, 19 bp, Homo sapiens
  siRNA target sequence for PCDH9 (NM_020403.2,169-187).
gctggattccgcaatagct

SEQ ID NO: 149988 - DNA, 19 bp, Homo sapiens
  siRNA target sequence for PCDH9 (NM_020403.2,179-197).
gcaatagctcaagaactta

SEQ ID NO: 149989 - DNA, 19 bp, Homo sapiens
  siRNA target sequence for PCDH9 (NM_020403.2,180-198).
caatagctcaagaacttat

SEQ ID NO: 149990 - DNA, 19 bp, Homo sapiens
  siRNA target sequence for PCDH9 (NM_020403.2,185-203).
gctcaagaacttatttaca

SEQ ID NO: 149991 - DNA, 19 bp, Homo sapiens
  siRNA target sequence for PCDH9 (NM_020403.2,291-309).
ccagcgccagccttgtcta

SEQ ID NO: 149992 - DNA, 19 bp, Homo sapiens
  siRNA target sequence for PCDH9 (NM_020403.2,361-379).
cactggggaaattttcaca

SEQ ID NO: 149993 - DNA, 19 bp, Homo sapiens
  siRNA target sequence for PCDH9 (NM_020403.2,378-396).
caacctccaacagaataga

SEQ ID NO: 149994 - DNA, 19 bp, Homo sapiens
  siRNA target sequence for PCDH9 (NM_020403.2,409-427).
ctgtgctggcgcctcatat

SEQ ID NO: 149995 - DNA, 19 bp, Homo sapiens
  siRNA target sequence for PCDH9 (NM_020403.2,464-482).
gtgatcctccccaatgatt

SEQ ID NO: 149996 - DNA, 19 bp, Homo sapiens
  siRNA target sequence for PCDH9 (NM_020403.2,552-570).
ctgtcatcaatatttccat

SEQ ID NO: 149997 - DNA, 19 bp, Homo sapiens
  siRNA target sequence for PCDH9 (NM_020403.2,589-607).
caacagccgctttccaatt

SEQ ID NO: 149998 - DNA, 19 bp, Homo sapiens
  siRNA target sequence for PCDH9 (NM_020403.2,641-659).
ggtgtacagcattatgaat

SEQ ID NO: 149999 - DNA, 19 bp, Homo sapiens
  siRNA target sequence for PCDH9 (NM_020403.2,644-662).
gtacagcattatgaattgt

SEQ ID NO: 150000 - DNA, 19 bp, Homo sapiens
  siRNA target sequence for PCDH9 (NM_020403.2,739-757).
gcaaaacttggatagagaa

SEQ ID NO: 150001 - DNA, 19 bp, Homo sapiens
  siRNA target sequence for PCDH9 (NM_020403.2,832-850).
gcaggtcacagtaagtgat

SEQ ID NO: 150002 - DNA, 19 bp, Homo sapiens
  siRNA target sequence for PCDH9 (NM_020403.2,835-853).
ggtcacagtaagtgatgta

SEQ ID NO: 150003 - DNA, 19 bp, Homo sapiens
  siRNA target sequence for PCDH9 (NM_020403.2,882-900).
gtcaagtggaggtgcatat

SEQ ID NO: 150004 - DNA, 19 bp, Homo sapiens
  siRNA target sequence for PCDH9 (NM_020403.2,914-932).
cccgtaggtacctctgtaa

SEQ ID NO: 150005 - DNA, 19 bp, Homo sapiens
  siRNA target sequence for PCDH9 (NM_020403.2,915-933).
ccgtaggtacctctgtaat

SEQ ID NO: 150006 - DNA, 19 bp, Homo sapiens
  siRNA target sequence for PCDH9 (NM_020403.2,916-934).
cgtaggtacctctgtaatt

SEQ ID NO: 150007 - DNA, 19 bp, Homo sapiens
  siRNA target sequence for PCDH9 (NM_020403.2,1001-1019).
gtcgcccctgcaaccaaaa

SEQ ID NO: 150008 - DNA, 19 bp, Homo sapiens
  siRNA target sequence for PCDH9 (NM_020403.2,1137-1155).
ctcgagcaacggttaccat

SEQ ID NO: 150009 - DNA, 19 bp, Homo sapiens
  siRNA target sequence for PCDH9 (NM_020403.2,1143-1161).
caacggttaccatcaatgt

SEQ ID NO: 150010 - DNA, 19 bp, Homo sapiens
  siRNA target sequence for PCDH9 (NM_020403.2,1156-1174).
caatgtcaccgatgtaaat

SEQ ID NO: 150011 - DNA, 19 bp, Homo sapiens
  siRNA target sequence for PCDH9 (NM_020403.2,1264-1282).
gattgccctaattacagtt

SEQ ID NO: 150012 - DNA, 19 bp, Homo sapiens
  siRNA target sequence for PCDH9 (NM_020403.2,1271-1289).
ctaattacagtttcagata

SEQ ID NO: 150013 - DNA, 19 bp, Homo sapiens
  siRNA target sequence for PCDH9 (NM_020403.2,1308-1326).
gcaaagtgatctgttttat

SEQ ID NO: 150014 - DNA, 19 bp, Homo sapiens
  siRNA target sequence for PCDH9 (NM_020403.2,1355-1373).
gcggtatatgacaaccaat

SEQ ID NO: 150015 - DNA, 19 bp, Homo sapiens
  siRNA target sequence for PCDH9 (NM_020403.2,1356-1374).
cggtatatgacaaccaata

SEQ ID NO: 150016 - DNA, 19 bp, Homo sapiens
  siRNA target sequence for PCDH9 (NM_020403.2,1357-1375).
ggtatatgacaaccaatat

SEQ ID NO: 150017 - DNA, 19 bp, Homo sapiens
  siRNA target sequence for PCDH9 (NM_020403.2,1358-1376).
gtatatgacaaccaatatt

SEQ ID NO: 150018 - DNA, 19 bp, Homo sapiens
  siRNA target sequence for PCDH9 (NM_020403.2,1449-1467).
ctgggaagcccagtttaaa

SEQ ID NO: 150019 - DNA, 19 bp, Homo sapiens
  siRNA target sequence for PCDH9 (NM_020403.2,1452-1470).
ggaagcccagtttaaatca

SEQ ID NO: 150020 - DNA, 19 bp, Homo sapiens
  siRNA target sequence for PCDH9 (NM_020403.2,1476-1494).
ccctggtaagggttaagct

SEQ ID NO: 150021 - DNA, 19 bp, Homo sapiens
  siRNA target sequence for PCDH9 (NM_020403.2,1477-1495).
cctggtaagggttaagctt

SEQ ID NO: 150022 - DNA, 19 bp, Homo sapiens
  siRNA target sequence for PCDH9 (NM_020403.2,1544-1562).
ctgtcagtttctgaaaaca

SEQ ID NO: 150023 - DNA, 19 bp, Homo sapiens
  siRNA target sequence for PCDH9 (NM_020403.2,1564-1582).
ccgacgtgggttatactta

SEQ ID NO: 150024 - DNA, 19 bp, Homo sapiens
  siRNA target sequence for PCDH9 (NM_020403.2,1565-1583).
cgacgtgggttatacttaa

SEQ ID NO: 150025 - DNA, 19 bp, Homo sapiens
  siRNA target sequence for PCDH9 (NM_020403.2,1568-1586).
cgtgggttatacttaacaa

SEQ ID NO: 150026 - DNA, 19 bp, Homo sapiens
  siRNA target sequence for PCDH9 (NM_020403.2,1572-1590).
ggttatacttaacaactat

SEQ ID NO: 150027 - DNA, 19 bp, Homo sapiens
  siRNA target sequence for PCDH9 (NM_020403.2,1694-1712).
gcctccagagtatttgaca

SEQ ID NO: 150028 - DNA, 19 bp, Homo sapiens
  siRNA target sequence for PCDH9 (NM_020403.2,1718-1736).
gaacaagaacgattcattt

SEQ ID NO: 150029 - DNA, 19 bp, Homo sapiens
  siRNA target sequence for PCDH9 (NM_020403.2,1721-1739).
caagaacgattcattttta

SEQ ID NO: 150030 - DNA, 19 bp, Homo sapiens
  siRNA target sequence for PCDH9 (NM_020403.2,1727-1745).
cgattcatttttacagtaa

SEQ ID NO: 150031 - DNA, 19 bp, Homo sapiens
  siRNA target sequence for PCDH9 (NM_020403.2,1785-1803).
cggctgtgattgttactgt

SEQ ID NO: 150032 - DNA, 19 bp, Homo sapiens
  siRNA target sequence for PCDH9 (NM_020403.2,1817-1835).
gacaatagccccaagttta

SEQ ID NO: 150033 - DNA, 19 bp, Homo sapiens
  siRNA target sequence for PCDH9 (NM_020403.2,1819-1837).
caatagccccaagtttact

SEQ ID NO: 150034 - DNA, 19 bp, Homo sapiens
  siRNA target sequence for PCDH9 (NM_020403.2,1824-1842).
gccccaagtttactcataa

SEQ ID NO: 150035 - DNA, 19 bp, Homo sapiens
  siRNA target sequence for PCDH9 (NM_020403.2,1825-1843).
ccccaagtttactcataat

SEQ ID NO: 150036 - DNA, 19 bp, Homo sapiens
  siRNA target sequence for PCDH9 (NM_020403.2,1827-1845).
ccaagtttactcataatca

SEQ ID NO: 150037 - DNA, 19 bp, Homo sapiens
  siRNA target sequence for PCDH9 (NM_020403.2,1828-1846).
caagtttactcataatcat

SEQ ID NO: 150038 - DNA, 19 bp, Homo sapiens
  siRNA target sequence for PCDH9 (NM_020403.2,1867-1885).
gaatctgccaaagtatagt

SEQ ID NO: 150039 - DNA, 19 bp, Homo sapiens
  siRNA target sequence for PCDH9 (NM_020403.2,1947-1965).
ccattctaaatgacaatga

SEQ ID NO: 150040 - DNA, 19 bp, Homo sapiens
  siRNA target sequence for PCDH9 (NM_020403.2,1948-1966).
cattctaaatgacaatgat

SEQ ID NO: 150041 - DNA, 19 bp, Homo sapiens
  siRNA target sequence for PCDH9 (NM_020403.2,1952-1970).
ctaaatgacaatgataatt

SEQ ID NO: 150042 - DNA, 19 bp, Homo sapiens
  siRNA target sequence for PCDH9 (NM_020403.2,1983-2001).
cctattctggagtcataaa

SEQ ID NO: 150043 - DNA, 19 bp, Homo sapiens
  siRNA target sequence for PCDH9 (NM_020403.2,1994-2012).
gtcataaagtcaaatgtct

SEQ ID NO: 150044 - DNA, 19 bp, Homo sapiens
  siRNA target sequence for PCDH9 (NM_020403.2,2027-2045).
cagcagagttcctacactt

SEQ ID NO: 150045 - DNA, 19 bp, Homo sapiens
  siRNA target sequence for PCDH9 (NM_020403.2,2029-2047).
gcagagttcctacactttt

SEQ ID NO: 150046 - DNA, 19 bp, Homo sapiens
  siRNA target sequence for PCDH9 (NM_020403.2,2034-2052).
gttcctacacttttgatgt

SEQ ID NO: 150047 - DNA, 19 bp, Homo sapiens
  siRNA target sequence for PCDH9 (NM_020403.2,2128-2146).
caacagcccagttgtcatt

SEQ ID NO: 150048 - DNA, 19 bp, Homo sapiens
  siRNA target sequence for PCDH9 (NM_020403.2,2154-2172).
cgtctaatacttcctttaa

SEQ ID NO: 150049 - DNA, 19 bp, Homo sapiens
  siRNA target sequence for PCDH9 (NM_020403.2,2157-2175).
ctaatacttcctttaagtt

SEQ ID NO: 150050 - DNA, 19 bp, Homo sapiens
  siRNA target sequence for PCDH9 (NM_020403.2,2200-2218).
ctccgtggtagcagaagtt

SEQ ID NO: 150051 - DNA, 19 bp, Homo sapiens
  siRNA target sequence for PCDH9 (NM_020403.2,2206-2224).
ggtagcagaagtttttgca

SEQ ID NO: 150052 - DNA, 19 bp, Homo sapiens
  siRNA target sequence for PCDH9 (NM_020403.2,2240-2258).
ggaatgaacgctgaactaa

SEQ ID NO: 150053 - DNA, 19 bp, Homo sapiens
  siRNA target sequence for PCDH9 (NM_020403.2,2241-2259).
gaatgaacgctgaactaaa

SEQ ID NO: 150054 - DNA, 19 bp, Homo sapiens
  siRNA target sequence for PCDH9 (NM_020403.2,2245-2263).
gaacgctgaactaaagtat

SEQ ID NO: 150055 - DNA, 19 bp, Homo sapiens
  siRNA target sequence for PCDH9 (NM_020403.2,2250-2268).
ctgaactaaagtatactat

SEQ ID NO: 150056 - DNA, 19 bp, Homo sapiens
  siRNA target sequence for PCDH9 (NM_020403.2,2255-2273).
ctaaagtatactatagtga

SEQ ID NO: 150057 - DNA, 19 bp, Homo sapiens
  siRNA target sequence for PCDH9 (NM_020403.2,2265-2283).
ctatagtgagtggaaacaa

SEQ ID NO: 150058 - DNA, 19 bp, Homo sapiens
  siRNA target sequence for PCDH9 (NM_020403.2,2296-2314).
ccggattgatccagtaaca

SEQ ID NO: 150059 - DNA, 19 bp, Homo sapiens
  siRNA target sequence for PCDH9 (NM_020403.2,2320-2338).
cattactctggaagaaaaa

SEQ ID NO: 150060 - DNA, 19 bp, Homo sapiens
  siRNA target sequence for PCDH9 (NM_020403.2,2366-2384).
cgtttggtggtcaacataa

SEQ ID NO: 150061 - DNA, 19 bp, Homo sapiens
  siRNA target sequence for PCDH9 (NM_020403.2,2389-2407).
cctggggtaccctaagtct

SEQ ID NO: 150062 - DNA, 19 bp, Homo sapiens
  siRNA target sequence for PCDH9 (NM_020403.2,2390-2408).
ctggggtaccctaagtctt

SEQ ID NO: 150063 - DNA, 19 bp, Homo sapiens
  siRNA target sequence for PCDH9 (NM_020403.2,2411-2429).
cacacgcttgtgcttgtat

SEQ ID NO: 150064 - DNA, 19 bp, Homo sapiens
  siRNA target sequence for PCDH9 (NM_020403.2,2450-2468).
gctggaaatgcctcctata

SEQ ID NO: 150065 - DNA, 19 bp, Homo sapiens
  siRNA target sequence for PCDH9 (NM_020403.2,2454-2472).
gaaatgcctcctatatcta

SEQ ID NO: 150066 - DNA, 19 bp, Homo sapiens
  siRNA target sequence for PCDH9 (NM_020403.2,2459-2477).
gcctcctatatctatgact

SEQ ID NO: 150067 - DNA, 19 bp, Homo sapiens
  siRNA target sequence for PCDH9 (NM_020403.2,2500-2518).
cccgttggacaggaacata

SEQ ID NO: 150068 - DNA, 19 bp, Homo sapiens
  siRNA target sequence for PCDH9 (NM_020403.2,2526-2544).
gtagccaaccctatcaaaa

SEQ ID NO: 150069 - DNA, 19 bp, Homo sapiens
  siRNA target sequence for PCDH9 (NM_020403.2,2549-2567).
gactatctaaccatcatga

SEQ ID NO: 150070 - DNA, 19 bp, Homo sapiens
  siRNA target sequence for PCDH9 (NM_020403.2,2764-2782).
gaactttgttactatcgaa

SEQ ID NO: 150071 - DNA, 19 bp, Homo sapiens
  siRNA target sequence for PCDH9 (NM_020403.2,2848-2866).
ggaggagcaaagtatagga

SEQ ID NO: 150072 - DNA, 19 bp, Homo sapiens
  siRNA target sequence for PCDH9 (NM_020403.2,2849-2867).
gaggagcaaagtataggaa

SEQ ID NO: 150073 - DNA, 19 bp, Homo sapiens
  siRNA target sequence for PCDH9 (NM_020403.2,2854-2872).
gcaaagtataggaagattt

SEQ ID NO: 150074 - DNA, 19 bp, Homo sapiens
  siRNA target sequence for PCDH9 (NM_020403.2,2885-2903).
gcacctccaacaacattca

SEQ ID NO: 150075 - DNA, 19 bp, Homo sapiens
  siRNA target sequence for PCDH9 (NM_020403.2,2920-2938).
cctggccaagcactacaaa

SEQ ID NO: 150076 - DNA, 19 bp, Homo sapiens
  siRNA target sequence for PCDH9 (NM_020403.2,2921-2939).
ctggccaagcactacaaat

SEQ ID NO: 150077 - DNA, 19 bp, Homo sapiens
  siRNA target sequence for PCDH9 (NM_020403.2,2953-2971).
gcctgcttttcatctcaaa

SEQ ID NO: 150078 - DNA, 19 bp, Homo sapiens
  siRNA target sequence for PCDH9 (NM_020403.2,2979-2997).
ctccagtttccgtgaaaaa

SEQ ID NO: 150079 - DNA, 19 bp, Homo sapiens
  siRNA target sequence for PCDH9 (NM_020403.2,3045-3063).
gttgtgacaccctttctaa

SEQ ID NO: 150080 - DNA, 19 bp, Homo sapiens
  siRNA target sequence for PCDH9 (NM_020403.2,3067-3085).
ctcttccactagttcagat

SEQ ID NO: 150081 - DNA, 19 bp, Homo sapiens
  siRNA target sequence for PCDH9 (NM_020403.2,3072-3090).
ccactagttcagatcactt

SEQ ID NO: 150082 - DNA, 19 bp, Homo sapiens
  siRNA target sequence for PCDH9 (NM_020403.2,3156-3174).
cgcagcgccgtgttacgtt

SEQ ID NO: 150083 - DNA, 19 bp, Homo sapiens
  siRNA target sequence for PCDH9 (NM_020403.2,3157-3175).
gcagcgccgtgttacgttt

SEQ ID NO: 150084 - DNA, 19 bp, Homo sapiens
  siRNA target sequence for PCDH9 (NM_020403.2,3160-3178).
gcgccgtgttacgtttcat

SEQ ID NO: 150085 - DNA, 19 bp, Homo sapiens
  siRNA target sequence for PCDH9 (NM_020403.2,3162-3180).
gccgtgttacgtttcatct

SEQ ID NO: 150086 - DNA, 19 bp, Homo sapiens
  siRNA target sequence for PCDH9 (NM_020403.2,3280-3298).
gccacaggacgaattctat

SEQ ID NO: 150087 - DNA, 19 bp, Homo sapiens
  siRNA target sequence for PCDH9 (NM_020403.2,3282-3300).
cacaggacgaattctatga

SEQ ID NO: 150088 - DNA, 19 bp, Homo sapiens
  siRNA target sequence for PCDH9 (NM_020403.2,3405-3423).
ctcaagagtgcttggtttt

SEQ ID NO: 150089 - DNA, 19 bp, Homo sapiens
  siRNA target sequence for PCDH9 (NM_020403.2,3419-3437).
gttttgggtcactctgata

SEQ ID NO: 150090 - DNA, 19 bp, Homo sapiens
  siRNA target sequence for PCDH9 (NM_020403.2,3425-3443).
ggtcactctgataattgct

SEQ ID NO: 150091 - DNA, 19 bp, Homo sapiens
  siRNA target sequence for PCDH9 (NM_020403.2,3456-3474).
gcttgggtccatatcaaca

SEQ ID NO: 150092 - DNA, 19 bp, Homo sapiens
  siRNA target sequence for PCDHA5 (NM_018908.2,465-483).
cgcgtcggatttggatatt

SEQ ID NO: 150093 - DNA, 19 bp, Homo sapiens
  siRNA target sequence for PCDHA5 (NM_018908.2,484-502).
ggagcaaatgcacaattga

SEQ ID NO: 150094 - DNA, 19 bp, Homo sapiens
  siRNA target sequence for PCDHA5 (NM_018908.2,487-505).
gcaaatgcacaattgagat

SEQ ID NO: 150095 - DNA, 19 bp, Homo sapiens
  siRNA target sequence for PCDHA5 (NM_018908.2,488-506).
caaatgcacaattgagata

SEQ ID NO: 150096 - DNA, 19 bp, Homo sapiens
  siRNA target sequence for PCDHA5 (NM_018908.2,496-514).
caattgagatacaggttaa

SEQ ID NO: 150097 - DNA, 19 bp, Homo sapiens
  siRNA target sequence for PCDHA5 (NM_018908.2,507-525).
caggttaaatccaaacgaa

SEQ ID NO: 150098 - DNA, 19 bp, Homo sapiens
  siRNA target sequence for PCDHA5 (NM_018908.2,510-528).
gttaaatccaaacgaatat

SEQ ID NO: 150099 - DNA, 19 bp, Homo sapiens
  siRNA target sequence for PCDHA5 (NM_018908.2,522-540).
cgaatattttgacttagat

SEQ ID NO: 150100 - DNA, 19 bp, Homo sapiens
  siRNA target sequence for PCDHA5 (NM_018908.2,585-603).
gaggaaatccttagataga

SEQ ID NO: 150101 - DNA, 19 bp, Homo sapiens
  siRNA target sequence for PCDHA5 (NM_018908.2,657-675).
cgaactaacaggtacagtt

SEQ ID NO: 150102 - DNA, 19 bp, Homo sapiens
  siRNA target sequence for PCDHA5 (NM_018908.2,687-705).
caatgtattggatgctaat

SEQ ID NO: 150103 - DNA, 19 bp, Homo sapiens
  siRNA target sequence for PCDHA5 (NM_018908.2,767-785).
gtgggacattagttattaa

SEQ ID NO: 150104 - DNA, 19 bp, Homo sapiens
  siRNA target sequence for PCDHA5 (NM_018908.2,770-788).
ggacattagttattaaact

SEQ ID NO: 150105 - DNA, 19 bp, Homo sapiens
  siRNA target sequence for PCDHA5 (NM_018908.2,802-820).
gcagatgagggcatcaata

SEQ ID NO: 150106 - DNA, 19 bp, Homo sapiens
  siRNA target sequence for PCDHA5 (NM_018908.2,803-821).
cagatgagggcatcaataa

SEQ ID NO: 150107 - DNA, 19 bp, Homo sapiens
  siRNA target sequence for PCDHA5 (NM_018908.2,808-826).
gagggcatcaataaggaaa

SEQ ID NO: 150108 - DNA, 19 bp, Homo sapiens
  siRNA target sequence for PCDHA5 (NM_018908.2,816-834).
caataaggaaatagtgtat

SEQ ID NO: 150109 - DNA, 19 bp, Homo sapiens
  siRNA target sequence for PCDHA5 (NM_018908.2,837-855).
ctttagtaatcttgttctt

SEQ ID NO: 150110 - DNA, 19 bp, Homo sapiens
  siRNA target sequence for PCDHA5 (NM_018908.2,858-876).
cgatgtaaagtccaaattt

SEQ ID NO: 150111 - DNA, 19 bp, Homo sapiens
  siRNA target sequence for PCDHA5 (NM_018908.2,912-930).
cggggaactggattatgaa

SEQ ID NO: 150112 - DNA, 19 bp, Homo sapiens
  siRNA target sequence for PCDHA5 (NM_018908.2,922-940).
gattatgaagactataact

SEQ ID NO: 150113 - DNA, 19 bp, Homo sapiens
  siRNA target sequence for PCDHA5 (NM_018908.2,958-976).
gatgccatggataaaagta

SEQ ID NO: 150114 - DNA, 19 bp, Homo sapiens
  siRNA target sequence for PCDHA5 (NM_018908.2,961-979).
gccatggataaaagtacat

SEQ ID NO: 150115 - DNA, 19 bp, Homo sapiens
  siRNA target sequence for PCDHA5 (NM_018908.2,992-1010).
gacactgtaaagtagtagt

SEQ ID NO: 150116 - DNA, 19 bp, Homo sapiens
  siRNA target sequence for PCDHA5 (NM_018908.2,998-1016).
gtaaagtagtagtgaaact

SEQ ID NO: 150117 - DNA, 19 bp, Homo sapiens
  siRNA target sequence for PCDHA5 (NM_018908.2,2280-2298).
ggaagctccacccaaaaca

SEQ ID NO: 150118 - DNA, 19 bp, Homo sapiens
  siRNA target sequence for PCDHA5 (NM_031501.1,2347-2365).
gacaacgtgagttttctaa

SEQ ID NO: 150119 - DNA, 19 bp, Homo sapiens
  siRNA target sequence for PCDHA5 (NM_031501.1,2349-2367).
caacgtgagttttctaata

SEQ ID NO: 150120 - DNA, 19 bp, Homo sapiens
  siRNA target sequence for PCDHB1 (NM_013340.2,80-98).
ggcgggtacgcgcagaaaa

SEQ ID NO: 150121 - DNA, 19 bp, Homo sapiens
  siRNA target sequence for PCDHB1 (NM_013340.2,81-99).
gcgggtacgcgcagaaaat

SEQ ID NO: 150122 - DNA, 19 bp, Homo sapiens
  siRNA target sequence for PCDHB1 (NM_013340.2,83-101).
gggtacgcgcagaaaatct

SEQ ID NO: 150123 - DNA, 19 bp, Homo sapiens
  siRNA target sequence for PCDHB1 (NM_013340.2,84-102).
ggtacgcgcagaaaatctt

SEQ ID NO: 150124 - DNA, 19 bp, Homo sapiens
  siRNA target sequence for PCDHB1 (NM_013340.2,85-103).
gtacgcgcagaaaatcttt

SEQ ID NO: 150125 - DNA, 19 bp, Homo sapiens
  siRNA target sequence for PCDHB1 (NM_013340.2,89-107).
gcgcagaaaatctttgcaa

SEQ ID NO: 150126 - DNA, 19 bp, Homo sapiens
  siRNA target sequence for PCDHB1 (NM_013340.2,90-108).
cgcagaaaatctttgcaaa

SEQ ID NO: 150127 - DNA, 19 bp, Homo sapiens
  siRNA target sequence for PCDHB1 (NM_013340.2,110-128).
caggcaagtgggatctctt

SEQ ID NO: 150128 - DNA, 19 bp, Homo sapiens
  siRNA target sequence for PCDHB1 (NM_013340.2,150-168).
gtgggggatgcgacaacta

SEQ ID NO: 150129 - DNA, 19 bp, Homo sapiens
  siRNA target sequence for PCDHB1 (NM_013340.2,161-179).
gacaactatccgctattca

SEQ ID NO: 150130 - DNA, 19 bp, Homo sapiens
  siRNA target sequence for PCDHB1 (NM_013340.2,163-181).
caactatccgctattcagt

SEQ ID NO: 150131 - DNA, 19 bp, Homo sapiens
  siRNA target sequence for PCDHB1 (NM_013340.2,275-293).
ggtttccgagggcaacaaa

SEQ ID NO: 150132 - DNA, 19 bp, Homo sapiens
  siRNA target sequence for PCDHB1 (NM_013340.2,276-294).
gtttccgagggcaacaaaa

SEQ ID NO: 150133 - DNA, 19 bp, Homo sapiens
  siRNA target sequence for PCDHB1 (NM_013340.2,280-298).
ccgagggcaacaaaatgca

SEQ ID NO: 150134 - DNA, 19 bp, Homo sapiens
  siRNA target sequence for PCDHB1 (NM_013340.2,281-299).
cgagggcaacaaaatgcat

SEQ ID NO: 150135 - DNA, 19 bp, Homo sapiens
  siRNA target sequence for PCDHB1 (NM_013340.2,312-330).
cgcaagacgggagatttgt

SEQ ID NO: 150136 - DNA, 19 bp, Homo sapiens
  siRNA target sequence for PCDHB1 (NM_013340.2,313-331).
gcaagacgggagatttgtt

SEQ ID NO: 150137 - DNA, 19 bp, Homo sapiens
  siRNA target sequence for PCDHB1 (NM_013340.2,319-337).
cgggagatttgtttgtgaa

SEQ ID NO: 150138 - DNA, 19 bp, Homo sapiens
  siRNA target sequence for PCDHB1 (NM_013340.2,438-456).
gtcagggtatttgatatca

SEQ ID NO: 150139 - DNA, 19 bp, Homo sapiens
  siRNA target sequence for PCDHB1 (NM_013340.2,440-458).
cagggtatttgatatcaat

SEQ ID NO: 150140 - DNA, 19 bp, Homo sapiens
  siRNA target sequence for PCDHB1 (NM_013340.2,442-460).
gggtatttgatatcaatga

SEQ ID NO: 150141 - DNA, 19 bp, Homo sapiens
  siRNA target sequence for PCDHB1 (NM_013340.2,515-533).
ccctttgggttcacgtttt

SEQ ID NO: 150142 - DNA, 19 bp, Homo sapiens
  siRNA target sequence for PCDHB1 (NM_013340.2,631-649).
gcagccacgggcctaaata

SEQ ID NO: 150143 - DNA, 19 bp, Homo sapiens
  siRNA target sequence for PCDHB1 (NM_013340.2,632-650).
cagccacgggcctaaatat

SEQ ID NO: 150144 - DNA, 19 bp, Homo sapiens
  siRNA target sequence for PCDHB1 (NM_013340.2,635-653).
ccacgggcctaaatatgct

SEQ ID NO: 150145 - DNA, 19 bp, Homo sapiens
  siRNA target sequence for PCDHB1 (NM_013340.2,696-714).
gaagtcaacttgacaatta

SEQ ID NO: 150146 - DNA, 19 bp, Homo sapiens
  siRNA target sequence for PCDHB1 (NM_013340.2,893-911).
caccaacaaagcgataact

SEQ ID NO: 150147 - DNA, 19 bp, Homo sapiens
  siRNA target sequence for PCDHB1 (NM_013340.2,895-913).
ccaacaaagcgataactta

SEQ ID NO: 150148 - DNA, 19 bp, Homo sapiens
  siRNA target sequence for PCDHB1 (NM_013340.2,899-917).
caaagcgataacttactct

SEQ ID NO: 150149 - DNA, 19 bp, Homo sapiens
  siRNA target sequence for PCDHB1 (NM_013340.2,910-928).
cttactctttagctcaaaa

SEQ ID NO: 150150 - DNA, 19 bp, Homo sapiens
  siRNA target sequence for PCDHB1 (NM_013340.2,1018-1036).
catacgacattgacattca

SEQ ID NO: 150151 - DNA, 19 bp, Homo sapiens
  siRNA target sequence for PCDHB1 (NM_013340.2,1170-1188).
gtagtagcccttttcacta

SEQ ID NO: 150152 - DNA, 19 bp, Homo sapiens
  siRNA target sequence for PCDHB1 (NM_013340.2,1173-1191).
gtagcccttttcactatca

SEQ ID NO: 150153 - DNA, 19 bp, Homo sapiens
  siRNA target sequence for PCDHB1 (NM_013340.2,1248-1266).
ccctttgtaatcaaaccta

SEQ ID NO: 150154 - DNA, 19 bp, Homo sapiens
  siRNA target sequence for PCDHB1 (NM_013340.2,1316-1334).
ggaggtctcaggctataat

SEQ ID NO: 150155 - DNA, 19 bp, Homo sapiens
  siRNA target sequence for PCDHB1 (NM_013340.2,1317-1335).
gaggtctcaggctataata

SEQ ID NO: 150156 - DNA, 19 bp, Homo sapiens
  siRNA target sequence for PCDHB1 (NM_013340.2,1369-1387).
gcttgtctgccgagactat

SEQ ID NO: 150157 - DNA, 19 bp, Homo sapiens
  siRNA target sequence for PCDHB1 (NM_013340.2,1384-1402).
ctatgatagaggtgctaat

SEQ ID NO: 150158 - DNA, 19 bp, Homo sapiens
  siRNA target sequence for PCDHB1 (NM_013340.2,1397-1415).
gctaatatccgacgttaat

SEQ ID NO: 150159 - DNA, 19 bp, Homo sapiens
  siRNA target sequence for PCDHB1 (NM_013340.2,1425-1443).
ccaatatttcgggaagatt

SEQ ID NO: 150160 - DNA, 19 bp, Homo sapiens
  siRNA target sequence for PCDHB1 (NM_013340.2,1434-1452).
cgggaagattcctatatct

SEQ ID NO: 150161 - DNA, 19 bp, Homo sapiens
  siRNA target sequence for PCDHB1 (NM_013340.2,1435-1453).
gggaagattcctatatctt

SEQ ID NO: 150162 - DNA, 19 bp, Homo sapiens
  siRNA target sequence for PCDHB1 (NM_013340.2,1437-1455).
gaagattcctatatcttga

SEQ ID NO: 150163 - DNA, 19 bp, Homo sapiens
  siRNA target sequence for PCDHB1 (NM_013340.2,1469-1487).
caacagtcctgcggttttt

SEQ ID NO: 150164 - DNA, 19 bp, Homo sapiens
  siRNA target sequence for PCDHB1 (NM_013340.2,1520-1538).
gggtgagaatgcccaaata

SEQ ID NO: 150165 - DNA, 19 bp, Homo sapiens
  siRNA target sequence for PCDHB1 (NM_013340.2,1521-1539).
ggtgagaatgcccaaataa

SEQ ID NO: 150166 - DNA, 19 bp, Homo sapiens
  siRNA target sequence for PCDHB1 (NM_013340.2,1526-1544).
gaatgcccaaataacatat

SEQ ID NO: 150167 - DNA, 19 bp, Homo sapiens
  siRNA target sequence for PCDHB1 (NM_013340.2,1578-1596).
gtctttgcttacatatcca

SEQ ID NO: 150168 - DNA, 19 bp, Homo sapiens
  siRNA target sequence for PCDHB1 (NM_013340.2,1624-1642).
cgctgagaaccatggatta

SEQ ID NO: 150169 - DNA, 19 bp, Homo sapiens
  siRNA target sequence for PCDHB1 (NM_013340.2,1625-1643).
gctgagaaccatggattat

SEQ ID NO: 150170 - DNA, 19 bp, Homo sapiens
  siRNA target sequence for PCDHB1 (NM_013340.2,1723-1741).
gagtggttgtcctagatga

SEQ ID NO: 150171 - DNA, 19 bp, Homo sapiens
  siRNA target sequence for PCDHB1 (NM_013340.2,1727-1745).
ggttgtcctagatgacaat

SEQ ID NO: 150172 - DNA, 19 bp, Homo sapiens
  siRNA target sequence for PCDHB1 (NM_013340.2,1746-1764).
gacaatcgtccaatgatct

SEQ ID NO: 150173 - DNA, 19 bp, Homo sapiens
  siRNA target sequence for PCDHB1 (NM_013340.2,1748-1766).
caatcgtccaatgatctta

SEQ ID NO: 150174 - DNA, 19 bp, Homo sapiens
  siRNA target sequence for PCDHB1 (NM_013340.2,1860-1878).
ggtgactcaggtcagaatt

SEQ ID NO: 150175 - DNA, 19 bp, Homo sapiens
  siRNA target sequence for PCDHB1 (NM_013340.2,1906-1924).
ccactgaccttgggttatt

SEQ ID NO: 150176 - DNA, 19 bp, Homo sapiens
  siRNA target sequence for PCDHB1 (NM_013340.2,1907-1925).
cactgaccttgggttattt

SEQ ID NO: 150177 - DNA, 19 bp, Homo sapiens
  siRNA target sequence for PCDHB1 (NM_013340.2,1938-1956).
caaaatggagaaatccata

SEQ ID NO: 150178 - DNA, 19 bp, Homo sapiens
  siRNA target sequence for PCDHB1 (NM_013340.2,1957-1975).
cattaaggcagatatctga

SEQ ID NO: 150179 - DNA, 19 bp, Homo sapiens
  siRNA target sequence for PCDHB1 (NM_013340.2,2126-2144).
ggtaaatccatccactaaa

SEQ ID NO: 150180 - DNA, 19 bp, Homo sapiens
  siRNA target sequence for PCDHB1 (NM_013340.2,2193-2211).
gtcatagtgatcttcatta

SEQ ID NO: 150181 - DNA, 19 bp, Homo sapiens
  siRNA target sequence for PCDHB1 (NM_013340.2,2195-2213).
catagtgatcttcattata

SEQ ID NO: 150182 - DNA, 19 bp, Homo sapiens
  siRNA target sequence for PCDHB1 (NM_013340.2,2219-2237).
ctaccaaaagattaaatat

SEQ ID NO: 150183 - DNA, 19 bp, Homo sapiens
  siRNA target sequence for PCDHB1 (NM_013340.2,2301-2319).
caaggacaaggcaatggat

SEQ ID NO: 150184 - DNA, 19 bp, Homo sapiens
  siRNA target sequence for PCDHB1 (NM_013340.2,2326-2344).
ctcggccttgtccatatga

SEQ ID NO: 150185 - DNA, 19 bp, Homo sapiens
  siRNA target sequence for PCDHB1 (NM_013340.2,2355-2373).
gccactggcactggtaata

SEQ ID NO: 150186 - DNA, 19 bp, Homo sapiens
  siRNA target sequence for PCDHB1 (NM_013340.2,2357-2375).
cactggcactggtaatagt

SEQ ID NO: 150187 - DNA, 19 bp, Homo sapiens
  siRNA target sequence for PCDHB1 (NM_013340.2,2359-2377).
ctggcactggtaatagtga

SEQ ID NO: 150188 - DNA, 19 bp, Homo sapiens
  siRNA target sequence for PCDHB1 (NM_013340.2,2363-2381).
cactggtaatagtgagttt

SEQ ID NO: 150189 - DNA, 19 bp, Homo sapiens
  siRNA target sequence for PCDHB1 (NM_013340.2,2374-2392).
gtgagtttcgctttcttaa

SEQ ID NO: 150190 - DNA, 19 bp, Homo sapiens
  siRNA target sequence for PCDHB1 (NM_013340.2,2458-2476).
gtttgcccccaaattctga

SEQ ID NO: 150191 - DNA, 19 bp, Homo sapiens
  siRNA target sequence for PCDHB1 (NM_013340.2,2479-2497).
ggaataagtctcagagatt

SEQ ID NO: 150192 - DNA, 19 bp, Homo sapiens
  siRNA target sequence for PCDHB1 (NM_013340.2,2504-2522).
ccatgaccaggtatctgat

SEQ ID NO: 150193 - DNA, 19 bp, Homo sapiens
  siRNA target sequence for PCDHB1 (NM_013340.2,2510-2528).
ccaggtatctgatgactat

SEQ ID NO: 150194 - DNA, 19 bp, Homo sapiens
  siRNA target sequence for PCDHB1 (NM_013340.2,2514-2532).
gtatctgatgactatatgt

SEQ ID NO: 150195 - DNA, 19 bp, Homo sapiens
  siRNA target sequence for PCDHB10 (NM_018930.2,15-33).
gttgtgcttcccaagacaa

SEQ ID NO: 150196 - DNA, 19 bp, Homo sapiens
  siRNA target sequence for PCDHB10 (NM_018930.2,488-506).
gacttaacggtatccaaaa

SEQ ID NO: 150197 - DNA, 19 bp, Homo sapiens
  siRNA target sequence for PCDHB10 (NM_018930.2,680-698).
ctgtacgcatcgttgtctt

SEQ ID NO: 150198 - DNA, 19 bp, Homo sapiens
  siRNA target sequence for PCDHB10 (NM_018930.2,764-782).
gccccattgggttccttat

SEQ ID NO: 150199 - DNA, 19 bp, Homo sapiens
  siRNA target sequence for PCDHB10 (NM_018930.2,765-783).
ccccattgggttccttatt

SEQ ID NO: 150200 - DNA, 19 bp, Homo sapiens
  siRNA target sequence for PCDHB10 (NM_018930.2,767-785).
ccattgggttccttattgt

SEQ ID NO: 150201 - DNA, 19 bp, Homo sapiens
  siRNA target sequence for PCDHB10 (NM_018930.2,768-786).
cattgggttccttattgtt

SEQ ID NO: 150202 - DNA, 19 bp, Homo sapiens
  siRNA target sequence for PCDHB10 (NM_018930.2,774-792).
gttccttattgttaaggta

SEQ ID NO: 150203 - DNA, 19 bp, Homo sapiens
  siRNA target sequence for PCDHB10 (NM_018930.2,865-883).
cgaacaacctttcaaatca

SEQ ID NO: 150204 - DNA, 19 bp, Homo sapiens
  siRNA target sequence for PCDHB10 (NM_018930.2,995-1013).
gggttttagtggaagtatt

SEQ ID NO: 150205 - DNA, 19 bp, Homo sapiens
  siRNA target sequence for PCDHB10 (NM_018930.2,1086-1104).
gacgccgctggctgttttt

SEQ ID NO: 150206 - DNA, 19 bp, Homo sapiens
  siRNA target sequence for PCDHB10 (NM_018930.2,1088-1106).
cgccgctggctgtttttaa

SEQ ID NO: 150207 - DNA, 19 bp, Homo sapiens
  siRNA target sequence for PCDHB10 (NM_018930.2,1148-1166).
gctacattcaagagaatct

SEQ ID NO: 150208 - DNA, 19 bp, Homo sapiens
  siRNA target sequence for PCDHB10 (NM_018930.2,1168-1186).
ccattcctactaaaacctt

SEQ ID NO: 150209 - DNA, 19 bp, Homo sapiens
  siRNA target sequence for PCDHB10 (NM_018930.2,2301-2319).
gttcttgaaaccagttatt

SEQ ID NO: 150210 - DNA, 19 bp, Homo sapiens
  siRNA target sequence for PCDHB11 (NM_018931.2,302-320).
cttgcgtgctacatttgca

SEQ ID NO: 150211 - DNA, 19 bp, Homo sapiens
  siRNA target sequence for PCDHB11 (NM_018931.2,392-410).
ccatcttctcggaaaaaca

SEQ ID NO: 150212 - DNA, 19 bp, Homo sapiens
  siRNA target sequence for PCDHB11 (NM_018931.2,773-791).
gctcgctgattttgattgt

SEQ ID NO: 150213 - DNA, 19 bp, Homo sapiens
  siRNA target sequence for PCDHB11 (NM_018931.2,818-836).
caaatggtgaaatatgcta

SEQ ID NO: 150214 - DNA, 19 bp, Homo sapiens
  siRNA target sequence for PCDHB11 (NM_018931.2,1089-1107).
cgtggttatggtttttagt

SEQ ID NO: 150215 - DNA, 19 bp, Homo sapiens
  siRNA target sequence for PCDHB11 (NM_018931.2,1099-1117).
gtttttagtatccaagata

SEQ ID NO: 150216 - DNA, 19 bp, Homo sapiens
  siRNA target sequence for PCDHB11 (NM_018931.2,1127-1145).
gggacaacggaagaattgt

SEQ ID NO: 150217 - DNA, 19 bp, Homo sapiens
  siRNA target sequence for PCDHB11 (NM_018931.2,1128-1146).
ggacaacggaagaattgtt

SEQ ID NO: 150218 - DNA, 19 bp, Homo sapiens
  siRNA target sequence for PCDHB11 (NM_018931.2,2306-2324).
cggttatccctaatatcca

SEQ ID NO: 150219 - DNA, 19 bp, Homo sapiens
  siRNA target sequence for PCDHB12 (NM_018932.2,124-142).
gggagctttgtaggaaatt

SEQ ID NO: 150220 - DNA, 19 bp, Homo sapiens
  siRNA target sequence for PCDHB12 (NM_018932.2,392-410).
ccgtcttcttggaaaaaga

SEQ ID NO: 150221 - DNA, 19 bp, Homo sapiens
  siRNA target sequence for PCDHB12 (NM_018932.2,459-477).
gcttgaaagtgcaaaggat

SEQ ID NO: 150222 - DNA, 19 bp, Homo sapiens
  siRNA target sequence for PCDHB12 (NM_018932.2,818-836).
caaacagtgaactatccta

SEQ ID NO: 150223 - DNA, 19 bp, Homo sapiens
  siRNA target sequence for PCDHB12 (NM_018932.2,1176-1194).
gctaaaatcttcggtaaat

SEQ ID NO: 150224 - DNA, 19 bp, Homo sapiens
  siRNA target sequence for PCDHB12 (NM_018932.2,1184-1202).
cttcggtaaataattacta

SEQ ID NO: 150225 - DNA, 19 bp, Homo sapiens
  siRNA target sequence for PCDHB12 (NM_018932.2,2276-2294).
ccaggtcaaataagttcaa

SEQ ID NO: 150226 - DNA, 19 bp, Homo sapiens
  siRNA target sequence for PCDHB12 (NM_018932.2,2277-2295).
caggtcaaataagttcaaa

SEQ ID NO: 150227 - DNA, 19 bp, Homo sapiens
  siRNA target sequence for PCDHB12 (NM_018932.2,2338-2356).
ggtagtgaagtcgaagaaa

SEQ ID NO: 150228 - DNA, 19 bp, Homo sapiens
  siRNA target sequence for PCDHB13 (NM_018933.2,1055-1073).
ggcaaaacctttaagatca

SEQ ID NO: 150229 - DNA, 19 bp, Homo sapiens
  siRNA target sequence for PCDHB13 (NM_018933.2,1077-1095).
ccttgacaggagaaattga

SEQ ID NO: 150230 - DNA, 19 bp, Homo sapiens
  siRNA target sequence for PCDHB13 (NM_018933.2,1367-1385).
ctgaaatccgcggaaaact

SEQ ID NO: 150231 - DNA, 19 bp, Homo sapiens
  siRNA target sequence for PCDHB13 (NM_018933.2,1466-1484).
gggacccctatgctgataa

SEQ ID NO: 150232 - DNA, 19 bp, Homo sapiens
  siRNA target sequence for PCDHB13 (NM_018933.2,1468-1486).
gacccctatgctgataaca

SEQ ID NO: 150233 - DNA, 19 bp, Homo sapiens
  siRNA target sequence for PCDHB13 (NM_018933.2,1504-1522).
gctgatcgccgatgtcaat

SEQ ID NO: 150234 - DNA, 19 bp, Homo sapiens
  siRNA target sequence for PCDHB13 (NM_018933.2,2547-2565).
ctaccttccccaataactt

SEQ ID NO: 150235 - DNA, 19 bp, Homo sapiens
  siRNA target sequence for PCDHB14 (NM_018934.2,16-34).
gcactcgatctgcgaaaaa

SEQ ID NO: 150236 - DNA, 19 bp, Homo sapiens
  siRNA target sequence for PCDHB14 (NM_018934.2,28-46).
cgaaaaaggcaagttctaa

SEQ ID NO: 150237 - DNA, 19 bp, Homo sapiens
  siRNA target sequence for PCDHB14 (NM_018934.2,35-53).
ggcaagttctaatattcct

SEQ ID NO: 150238 - DNA, 19 bp, Homo sapiens
  siRNA target sequence for PCDHB14 (NM_018934.2,69-87).
gtctcgggcaggtactgaa

SEQ ID NO: 150239 - DNA, 19 bp, Homo sapiens
  siRNA target sequence for PCDHB14 (NM_018934.2,195-213).
ggtagtgtctgatgataat

SEQ ID NO: 150240 - DNA, 19 bp, Homo sapiens
  siRNA target sequence for PCDHB14 (NM_018934.2,358-376).
gagctgtgtgtcaaagaca

SEQ ID NO: 150241 - DNA, 19 bp, Homo sapiens
  siRNA target sequence for PCDHB14 (NM_018934.2,360-378).
gctgtgtgtcaaagacata

SEQ ID NO: 150242 - DNA, 19 bp, Homo sapiens
  siRNA target sequence for PCDHB14 (NM_018934.2,361-379).
ctgtgtgtcaaagacataa

SEQ ID NO: 150243 - DNA, 19 bp, Homo sapiens
  siRNA target sequence for PCDHB14 (NM_018934.2,363-381).
gtgtgtcaaagacataaat

SEQ ID NO: 150244 - DNA, 19 bp, Homo sapiens
  siRNA target sequence for PCDHB14 (NM_018934.2,438-456).
cactgttggagctaccttt

SEQ ID NO: 150245 - DNA, 19 bp, Homo sapiens
  siRNA target sequence for PCDHB14 (NM_018934.2,442-460).
gttggagctacctttctaa

SEQ ID NO: 150246 - DNA, 19 bp, Homo sapiens
  siRNA target sequence for PCDHB14 (NM_018934.2,446-464).
gagctacctttctaatgga

SEQ ID NO: 150247 - DNA, 19 bp, Homo sapiens
  siRNA target sequence for PCDHB14 (NM_018934.2,521-539).
ccaattctcacttctacat

SEQ ID NO: 150248 - DNA, 19 bp, Homo sapiens
  siRNA target sequence for PCDHB14 (NM_018934.2,554-572).
gtagtgacagaaagatata

SEQ ID NO: 150249 - DNA, 19 bp, Homo sapiens
  siRNA target sequence for PCDHB14 (NM_018934.2,574-592).
ccagagctggtcctagata

SEQ ID NO: 150250 - DNA, 19 bp, Homo sapiens
  siRNA target sequence for PCDHB14 (NM_018934.2,582-600).
ggtcctagatagagcttta

SEQ ID NO: 150251 - DNA, 19 bp, Homo sapiens
  siRNA target sequence for PCDHB14 (NM_018934.2,585-603).
cctagatagagctttagat

SEQ ID NO: 150252 - DNA, 19 bp, Homo sapiens
  siRNA target sequence for PCDHB14 (NM_018934.2,666-684).
gtctgggacaactttggtt

SEQ ID NO: 150253 - DNA, 19 bp, Homo sapiens
  siRNA target sequence for PCDHB14 (NM_018934.2,786-804).
caccatctcagctaaggat

SEQ ID NO: 150254 - DNA, 19 bp, Homo sapiens
  siRNA target sequence for PCDHB14 (NM_018934.2,909-927).
gagatcacccctggatttt

SEQ ID NO: 150255 - DNA, 19 bp, Homo sapiens
  siRNA target sequence for PCDHB14 (NM_018934.2,916-934).
cccctggattttgaagtaa

SEQ ID NO: 150256 - DNA, 19 bp, Homo sapiens
  siRNA target sequence for PCDHB14 (NM_018934.2,917-935).
ccctggattttgaagtaat

SEQ ID NO: 150257 - DNA, 19 bp, Homo sapiens
  siRNA target sequence for PCDHB14 (NM_018934.2,931-949).
gtaatacagtcctacacta

SEQ ID NO: 150258 - DNA, 19 bp, Homo sapiens
  siRNA target sequence for PCDHB14 (NM_018934.2,937-955).
cagtcctacactataaata

SEQ ID NO: 150259 - DNA, 19 bp, Homo sapiens
  siRNA target sequence for PCDHB14 (NM_018934.2,941-959).
cctacactataaatattca

SEQ ID NO: 150260 - DNA, 19 bp, Homo sapiens
  siRNA target sequence for PCDHB14 (NM_018934.2,986-1004).
gaaaatgcacccttctagt

SEQ ID NO: 150261 - DNA, 19 bp, Homo sapiens
  siRNA target sequence for PCDHB14 (NM_018934.2,992-1010).
gcacccttctagttaaagt

SEQ ID NO: 150262 - DNA, 19 bp, Homo sapiens
  siRNA target sequence for PCDHB14 (NM_018934.2,1000-1018).
ctagttaaagttatggata

SEQ ID NO: 150263 - DNA, 19 bp, Homo sapiens
  siRNA target sequence for PCDHB14 (NM_018934.2,1030-1048).
ccaccagaagtgaccatat

SEQ ID NO: 150264 - DNA, 19 bp, Homo sapiens
  siRNA target sequence for PCDHB14 (NM_018934.2,1039-1057).
gtgaccatatcgtcgatta

SEQ ID NO: 150265 - DNA, 19 bp, Homo sapiens
  siRNA target sequence for PCDHB14 (NM_018934.2,1041-1059).
gaccatatcgtcgattaca

SEQ ID NO: 150266 - DNA, 19 bp, Homo sapiens
  siRNA target sequence for PCDHB14 (NM_018934.2,1043-1061).
ccatatcgtcgattacaaa

SEQ ID NO: 150267 - DNA, 19 bp, Homo sapiens
  siRNA target sequence for PCDHB14 (NM_018934.2,1049-1067).
cgtcgattacaaagagaat

SEQ ID NO: 150268 - DNA, 19 bp, Homo sapiens
  siRNA target sequence for PCDHB14 (NM_018934.2,1050-1068).
gtcgattacaaagagaatt

SEQ ID NO: 150269 - DNA, 19 bp, Homo sapiens
  siRNA target sequence for PCDHB14 (NM_018934.2,1089-1107).
cctagtagctctttttagt

SEQ ID NO: 150270 - DNA, 19 bp, Homo sapiens
  siRNA target sequence for PCDHB14 (NM_018934.2,1090-1108).
ctagtagctctttttagta

SEQ ID NO: 150271 - DNA, 19 bp, Homo sapiens
  siRNA target sequence for PCDHB14 (NM_018934.2,1177-1195).
ctgaaaccgaccttcaaga

SEQ ID NO: 150272 - DNA, 19 bp, Homo sapiens
  siRNA target sequence for PCDHB14 (NM_018934.2,1184-1202).
cgaccttcaagaacttttt

SEQ ID NO: 150273 - DNA, 19 bp, Homo sapiens
  siRNA target sequence for PCDHB14 (NM_018934.2,2313-2331).
ccccaattttcaagttcat

SEQ ID NO: 150274 - DNA, 19 bp, Homo sapiens
  siRNA target sequence for PCDHB14 (NM_018934.2,2315-2333).
ccaattttcaagttcatga

SEQ ID NO: 150275 - DNA, 19 bp, Homo sapiens
  siRNA target sequence for PCDHB14 (NM_018934.2,2342-2360).
ggaatatgggggaaatcga

SEQ ID NO: 150276 - DNA, 19 bp, Homo sapiens
  siRNA target sequence for PCDHB15 (NM_018935.2,16-34).
gagcgctttcccgaacaaa

SEQ ID NO: 150277 - DNA, 19 bp, Homo sapiens
  siRNA target sequence for PCDHB15 (NM_018935.2,84-102).
ggaaccccgtcgctattct

SEQ ID NO: 150278 - DNA, 19 bp, Homo sapiens
  siRNA target sequence for PCDHB15 (NM_018935.2,237-255).
gcagaccgggcagttgata

SEQ ID NO: 150279 - DNA, 19 bp, Homo sapiens
  siRNA target sequence for PCDHB15 (NM_018935.2,238-256).
cagaccgggcagttgatat

SEQ ID NO: 150280 - DNA, 19 bp, Homo sapiens
  siRNA target sequence for PCDHB15 (NM_018935.2,240-258).
gaccgggcagttgatatta

SEQ ID NO: 150281 - DNA, 19 bp, Homo sapiens
  siRNA target sequence for PCDHB15 (NM_018935.2,242-260).
ccgggcagttgatattaaa

SEQ ID NO: 150282 - DNA, 19 bp, Homo sapiens
  siRNA target sequence for PCDHB15 (NM_018935.2,247-265).
cagttgatattaaatgaga

SEQ ID NO: 150283 - DNA, 19 bp, Homo sapiens
  siRNA target sequence for PCDHB15 (NM_018935.2,291-309).
ccctactgagccctgtata

SEQ ID NO: 150284 - DNA, 19 bp, Homo sapiens
  siRNA target sequence for PCDHB15 (NM_018935.2,292-310).
cctactgagccctgtataa

SEQ ID NO: 150285 - DNA, 19 bp, Homo sapiens
  siRNA target sequence for PCDHB15 (NM_018935.2,293-311).
ctactgagccctgtataat

SEQ ID NO: 150286 - DNA, 19 bp, Homo sapiens
  siRNA target sequence for PCDHB15 (NM_018935.2,296-314).
ctgagccctgtataatgca

SEQ ID NO: 150287 - DNA, 19 bp, Homo sapiens
  siRNA target sequence for PCDHB15 (NM_018935.2,392-410).
ctgagtttcctgaaagaga

SEQ ID NO: 150288 - DNA, 19 bp, Homo sapiens
  siRNA target sequence for PCDHB15 (NM_018935.2,612-630).
gcaggccgagctcagatta

SEQ ID NO: 150289 - DNA, 19 bp, Homo sapiens
  siRNA target sequence for PCDHB15 (NM_018935.2,616-634).
gccgagctcagattaacct

SEQ ID NO: 150290 - DNA, 19 bp, Homo sapiens
  siRNA target sequence for PCDHB15 (NM_018935.2,617-635).
ccgagctcagattaacctt

SEQ ID NO: 150291 - DNA, 19 bp, Homo sapiens
  siRNA target sequence for PCDHB15 (NM_018935.2,828-846).
gatatcatactccctttat

SEQ ID NO: 150292 - DNA, 19 bp, Homo sapiens
  siRNA target sequence for PCDHB15 (NM_018935.2,856-874).
caggagatagacaaacctt

SEQ ID NO: 150293 - DNA, 19 bp, Homo sapiens
  siRNA target sequence for PCDHB15 (NM_018935.2,888-906).
cctttcaggagaaattcga

SEQ ID NO: 150294 - DNA, 19 bp, Homo sapiens
  siRNA target sequence for PCDHB15 (NM_018935.2,919-937).
ctagattttgagacaatgt

SEQ ID NO: 150295 - DNA, 19 bp, Homo sapiens
  siRNA target sequence for PCDHB15 (NM_018935.2,932-950).
caatgtcttcgtatgatct

SEQ ID NO: 150296 - DNA, 19 bp, Homo sapiens
  siRNA target sequence for PCDHB15 (NM_018935.2,936-954).
gtcttcgtatgatctagat

SEQ ID NO: 150297 - DNA, 19 bp, Homo sapiens
  siRNA target sequence for PCDHB15 (NM_018935.2,938-956).
cttcgtatgatctagatat

SEQ ID NO: 150298 - DNA, 19 bp, Homo sapiens
  siRNA target sequence for PCDHB15 (NM_018935.2,941-959).
cgtatgatctagatataga

SEQ ID NO: 150299 - DNA, 19 bp, Homo sapiens
  siRNA target sequence for PCDHB15 (NM_018935.2,1003-1021).
gttaaggtgctggatgtta

SEQ ID NO: 150300 - DNA, 19 bp, Homo sapiens
  siRNA target sequence for PCDHB15 (NM_018935.2,1024-1042).
gataacttcccggaactaa

SEQ ID NO: 150301 - DNA, 19 bp, Homo sapiens
  siRNA target sequence for PCDHB15 (NM_018935.2,1032-1050).
cccggaactaagtatttca

SEQ ID NO: 150302 - DNA, 19 bp, Homo sapiens
  siRNA target sequence for PCDHB15 (NM_018935.2,1035-1053).
ggaactaagtatttcatca

SEQ ID NO: 150303 - DNA, 19 bp, Homo sapiens
  siRNA target sequence for PCDHB15 (NM_018935.2,1062-1080).
ccctattcccgagaattct

SEQ ID NO: 150304 - DNA, 19 bp, Homo sapiens
  siRNA target sequence for PCDHB15 (NM_018935.2,1090-1108).
gaagtggccctgtttagga

SEQ ID NO: 150305 - DNA, 19 bp, Homo sapiens
  siRNA target sequence for PCDHB15 (NM_018935.2,1095-1113).
ggccctgtttaggattaga

SEQ ID NO: 150306 - DNA, 19 bp, Homo sapiens
  siRNA target sequence for PCDHB15 (NM_018935.2,1097-1115).
ccctgtttaggattagaga

SEQ ID NO: 150307 - DNA, 19 bp, Homo sapiens
  siRNA target sequence for PCDHB15 (NM_018935.2,1156-1174).
caggatgatgttcctttta

SEQ ID NO: 150308 - DNA, 19 bp, Homo sapiens
  siRNA target sequence for PCDHB15 (NM_018935.2,2267-2285).
cgggaggctctgaaagtaa

SEQ ID NO: 150309 - DNA, 19 bp, Homo sapiens
  siRNA target sequence for PCDHB15 (NM_018935.2,2268-2286).
gggaggctctgaaagtaat

SEQ ID NO: 150310 - DNA, 19 bp, Homo sapiens
  siRNA target sequence for PCDHB15 (NM_018935.2,2272-2290).
ggctctgaaagtaatgatt

SEQ ID NO: 150311 - DNA, 19 bp, Homo sapiens
  siRNA target sequence for PCDHB15 (NM_018935.2,2306-2324).
ctatattcccaaatattgt

SEQ ID NO: 150312 - DNA, 19 bp, Homo sapiens
  siRNA target sequence for PCDHB16 (NM_020957.1,1237-1255).
gccgagttggggtcctatt

SEQ ID NO: 150313 - DNA, 19 bp, Homo sapiens
  siRNA target sequence for PCDHB16 (NM_020957.1,1338-1356).
ccgcaaggccaggatcatt

SEQ ID NO: 150314 - DNA, 19 bp, Homo sapiens
  siRNA target sequence for PCDHB16 (NM_020957.1,1339-1357).
cgcaaggccaggatcattt

SEQ ID NO: 150315 - DNA, 19 bp, Homo sapiens
  siRNA target sequence for PCDHB16 (NM_020957.1,1391-1409).
ctcaaactggggatttgct

SEQ ID NO: 150316 - DNA, 19 bp, Homo sapiens
  siRNA target sequence for PCDHB16 (NM_020957.1,1682-1700).
ctcatttccgggttctaat

SEQ ID NO: 150317 - DNA, 19 bp, Homo sapiens
  siRNA target sequence for PCDHB16 (NM_020957.1,1690-1708).
cgggttctaatccatgaat

SEQ ID NO: 150318 - DNA, 19 bp, Homo sapiens
  siRNA target sequence for PCDHB16 (NM_020957.1,1761-1779).
ggaggaggagcctcaacta

SEQ ID NO: 150319 - DNA, 19 bp, Homo sapiens
  siRNA target sequence for PCDHB16 (NM_020957.1,1762-1780).
gaggaggagcctcaactaa

SEQ ID NO: 150320 - DNA, 19 bp, Homo sapiens
  siRNA target sequence for PCDHB16 (NM_020957.1,1764-1782).
ggaggagcctcaactaaga

SEQ ID NO: 150321 - DNA, 19 bp, Homo sapiens
  siRNA target sequence for PCDHB16 (NM_020957.1,1765-1783).
gaggagcctcaactaagat

SEQ ID NO: 150322 - DNA, 19 bp, Homo sapiens
  siRNA target sequence for PCDHB16 (NM_020957.1,1767-1785).
ggagcctcaactaagatta

SEQ ID NO: 150323 - DNA, 19 bp, Homo sapiens
  siRNA target sequence for PCDHB16 (NM_020957.1,1768-1786).
gagcctcaactaagattaa

SEQ ID NO: 150324 - DNA, 19 bp, Homo sapiens
  siRNA target sequence for PCDHB16 (NM_020957.1,1829-1847).
ctgctcaggtccgtattga

SEQ ID NO: 150325 - DNA, 19 bp, Homo sapiens
  siRNA target sequence for PCDHB16 (NM_020957.1,1832-1850).
ctcaggtccgtattgaagt

SEQ ID NO: 150326 - DNA, 19 bp, Homo sapiens
  siRNA target sequence for PCDHB16 (NM_020957.1,1963-1981).
gacggcggagccaatggaa

SEQ ID NO: 150327 - DNA, 19 bp, Homo sapiens
  siRNA target sequence for PCDHB16 (NM_020957.1,2004-2022).
gccttcggaggatattagt

SEQ ID NO: 150328 - DNA, 19 bp, Homo sapiens
  siRNA target sequence for PCDHB16 (NM_020957.1,2005-2023).
ccttcggaggatattagta

SEQ ID NO: 150329 - DNA, 19 bp, Homo sapiens
  siRNA target sequence for PCDHB16 (NM_020957.1,2006-2024).
cttcggaggatattagtaa

SEQ ID NO: 150330 - DNA, 19 bp, Homo sapiens
  siRNA target sequence for PCDHB16 (NM_020957.1,2010-2028).
ggaggatattagtaaaact

SEQ ID NO: 150331 - DNA, 19 bp, Homo sapiens
  siRNA target sequence for PCDHB16 (NM_020957.1,2031-2049).
ggaggtaaatcctatgaca

SEQ ID NO: 150332 - DNA, 19 bp, Homo sapiens
  siRNA target sequence for PCDHB16 (NM_020957.1,2074-2092).
gtagatttcgaaatggtta

SEQ ID NO: 150333 - DNA, 19 bp, Homo sapiens
  siRNA target sequence for PCDHB16 (NM_020957.1,2082-2100).
cgaaatggttacgtcttat

SEQ ID NO: 150334 - DNA, 19 bp, Homo sapiens
  siRNA target sequence for PCDHB16 (NM_020957.1,2232-2250).
ctcgcctgagatagtagtt

SEQ ID NO: 150335 - DNA, 19 bp, Homo sapiens
  siRNA target sequence for PCDHB16 (NM_020957.1,2393-2411).
caagagctgaatataatat

SEQ ID NO: 150336 - DNA, 19 bp, Homo sapiens
  siRNA target sequence for PCDHB16 (NM_020957.1,2472-2490).
gcagatatcagatgtcaat

SEQ ID NO: 150337 - DNA, 19 bp, Homo sapiens
  siRNA target sequence for PCDHB2 (NM_018936.2,159-177).
ggagcgcgttccgaaacaa

SEQ ID NO: 150338 - DNA, 19 bp, Homo sapiens
  siRNA target sequence for PCDHB2 (NM_018936.2,160-178).
gagcgcgttccgaaacaaa

SEQ ID NO: 150339 - DNA, 19 bp, Homo sapiens
  siRNA target sequence for PCDHB2 (NM_018936.2,228-246).
ccagcctaggcactattca

SEQ ID NO: 150340 - DNA, 19 bp, Homo sapiens
  siRNA target sequence for PCDHB2 (NM_018936.2,303-321).
gctggagataggagaactt

SEQ ID NO: 150341 - DNA, 19 bp, Homo sapiens
  siRNA target sequence for PCDHB2 (NM_018936.2,333-351).
ggccagggtcgtttccaaa

SEQ ID NO: 150342 - DNA, 19 bp, Homo sapiens
  siRNA target sequence for PCDHB2 (NM_018936.2,380-398).
ggcagaccggggatttgtt

SEQ ID NO: 150343 - DNA, 19 bp, Homo sapiens
  siRNA target sequence for PCDHB2 (NM_018936.2,382-400).
cagaccggggatttgttgt

SEQ ID NO: 150344 - DNA, 19 bp, Homo sapiens
  siRNA target sequence for PCDHB2 (NM_018936.2,509-527).
ggattagggacgtaaatga

SEQ ID NO: 150345 - DNA, 19 bp, Homo sapiens
  siRNA target sequence for PCDHB2 (NM_018936.2,510-528).
gattagggacgtaaatgat

SEQ ID NO: 150346 - DNA, 19 bp, Homo sapiens
  siRNA target sequence for PCDHB2 (NM_018936.2,656-674).
caatcagtcccaatttcca

SEQ ID NO: 150347 - DNA, 19 bp, Homo sapiens
  siRNA target sequence for PCDHB2 (NM_018936.2,665-683).
ccaatttccactttcatct

SEQ ID NO: 150348 - DNA, 19 bp, Homo sapiens
  siRNA target sequence for PCDHB2 (NM_018936.2,696-714).
cagtctcgatggcataata

SEQ ID NO: 150349 - DNA, 19 bp, Homo sapiens
  siRNA target sequence for PCDHB2 (NM_018936.2,698-716).
gtctcgatggcataatatt

SEQ ID NO: 150350 - DNA, 19 bp, Homo sapiens
  siRNA target sequence for PCDHB2 (NM_018936.2,702-720).
cgatggcataatattacca

SEQ ID NO: 150351 - DNA, 19 bp, Homo sapiens
  siRNA target sequence for PCDHB2 (NM_018936.2,819-837).
ggccctggtacggattgaa

SEQ ID NO: 150352 - DNA, 19 bp, Homo sapiens
  siRNA target sequence for PCDHB2 (NM_018936.2,821-839).
ccctggtacggattgaagt

SEQ ID NO: 150353 - DNA, 19 bp, Homo sapiens
  siRNA target sequence for PCDHB2 (NM_018936.2,1017-1035).
gtttcgattaagtgcaaaa

SEQ ID NO: 150354 - DNA, 19 bp, Homo sapiens
  siRNA target sequence for PCDHB2 (NM_018936.2,1130-1148).
gaacttgtgtggtatttgt

SEQ ID NO: 150355 - DNA, 19 bp, Homo sapiens
  siRNA target sequence for PCDHB2 (NM_018936.2,1170-1188).
caatcctccggaactaact

SEQ ID NO: 150356 - DNA, 19 bp, Homo sapiens
  siRNA target sequence for PCDHB2 (NM_018936.2,1174-1192).
cctccggaactaactatgt

SEQ ID NO: 150357 - DNA, 19 bp, Homo sapiens
  siRNA target sequence for PCDHB2 (NM_018936.2,1183-1201).
ctaactatgtcgacactta

SEQ ID NO: 150358 - DNA, 19 bp, Homo sapiens
  siRNA target sequence for PCDHB2 (NM_018936.2,1187-1205).
ctatgtcgacacttatcaa

SEQ ID NO: 150359 - DNA, 19 bp, Homo sapiens
  siRNA target sequence for PCDHB3 (NM_018937.2,14-32).
gagagcgatttcttagaca

SEQ ID NO: 150360 - DNA, 19 bp, Homo sapiens
  siRNA target sequence for PCDHB3 (NM_018937.2,16-34).
gagcgatttcttagacaaa

SEQ ID NO: 150361 - DNA, 19 bp, Homo sapiens
  siRNA target sequence for PCDHB3 (NM_018937.2,84-102).
cgagtcaagacgctattct

SEQ ID NO: 150362 - DNA, 19 bp, Homo sapiens
  siRNA target sequence for PCDHB3 (NM_018937.2,245-263).
gtgatttgctcctgaatga

SEQ ID NO: 150363 - DNA, 19 bp, Homo sapiens
  siRNA target sequence for PCDHB3 (NM_018937.2,353-371).
caaacgagctccgtatcat

SEQ ID NO: 150364 - DNA, 19 bp, Homo sapiens
  siRNA target sequence for PCDHB3 (NM_018937.2,357-375).
cgagctccgtatcatagat

SEQ ID NO: 150365 - DNA, 19 bp, Homo sapiens
  siRNA target sequence for PCDHB3 (NM_018937.2,360-378).
gctccgtatcatagatgta

SEQ ID NO: 150366 - DNA, 19 bp, Homo sapiens
  siRNA target sequence for PCDHB3 (NM_018937.2,382-400).
gaccattctccggtattct

SEQ ID NO: 150367 - DNA, 19 bp, Homo sapiens
  siRNA target sequence for PCDHB3 (NM_018937.2,384-402).
ccattctccggtattcttt

SEQ ID NO: 150368 - DNA, 19 bp, Homo sapiens
  siRNA target sequence for PCDHB3 (NM_018937.2,441-459).
gccaggaacagtaattcct

SEQ ID NO: 150369 - DNA, 19 bp, Homo sapiens
  siRNA target sequence for PCDHB3 (NM_018937.2,442-460).
ccaggaacagtaattcctt

SEQ ID NO: 150370 - DNA, 19 bp, Homo sapiens
  siRNA target sequence for PCDHB3 (NM_018937.2,443-461).
caggaacagtaattccttt

SEQ ID NO: 150371 - DNA, 19 bp, Homo sapiens
  siRNA target sequence for PCDHB3 (NM_018937.2,501-519).
ccaaaactacactatcact

SEQ ID NO: 150372 - DNA, 19 bp, Homo sapiens
  siRNA target sequence for PCDHB3 (NM_018937.2,566-584).
ggaagtacccggaactagt

SEQ ID NO: 150373 - DNA, 19 bp, Homo sapiens
  siRNA target sequence for PCDHB3 (NM_018937.2,567-585).
gaagtacccggaactagta

SEQ ID NO: 150374 - DNA, 19 bp, Homo sapiens
  siRNA target sequence for PCDHB3 (NM_018937.2,575-593).
cggaactagtactggataa

SEQ ID NO: 150375 - DNA, 19 bp, Homo sapiens
  siRNA target sequence for PCDHB3 (NM_018937.2,576-594).
ggaactagtactggataaa

SEQ ID NO: 150376 - DNA, 19 bp, Homo sapiens
  siRNA target sequence for PCDHB3 (NM_018937.2,687-705).
catccaggtcttagatata

SEQ ID NO: 150377 - DNA, 19 bp, Homo sapiens
  siRNA target sequence for PCDHB3 (NM_018937.2,738-756).
ctatgaggttgcagttcta

SEQ ID NO: 150378 - DNA, 19 bp, Homo sapiens
  siRNA target sequence for PCDHB3 (NM_018937.2,745-763).
gttgcagttctagagaata

SEQ ID NO: 150379 - DNA, 19 bp, Homo sapiens
  siRNA target sequence for PCDHB3 (NM_018937.2,757-775).
gagaatacccccgttaact

SEQ ID NO: 150380 - DNA, 19 bp, Homo sapiens
  siRNA target sequence for PCDHB3 (NM_018937.2,759-777).
gaatacccccgttaactct

SEQ ID NO: 150381 - DNA, 19 bp, Homo sapiens
  siRNA target sequence for PCDHB3 (NM_018937.2,765-783).
ccccgttaactctgtcatt

SEQ ID NO: 150382 - DNA, 19 bp, Homo sapiens
  siRNA target sequence for PCDHB3 (NM_018937.2,767-785).
ccgttaactctgtcattgt

SEQ ID NO: 150383 - DNA, 19 bp, Homo sapiens
  siRNA target sequence for PCDHB3 (NM_018937.2,792-810).
ctcggcttctgacttagat

SEQ ID NO: 150384 - DNA, 19 bp, Homo sapiens
  siRNA target sequence for PCDHB3 (NM_018937.2,866-884).
gcaaaacttttcagctaaa

SEQ ID NO: 150385 - DNA, 19 bp, Homo sapiens
  siRNA target sequence for PCDHB3 (NM_018937.2,887-905).
caattactggtgatatgca

SEQ ID NO: 150386 - DNA, 19 bp, Homo sapiens
  siRNA target sequence for PCDHB3 (NM_018937.2,932-950).
cgattaatagttatgaagt

SEQ ID NO: 150387 - DNA, 19 bp, Homo sapiens
  siRNA target sequence for PCDHB3 (NM_018937.2,976-994).
ggcctatccggaaagtcta

SEQ ID NO: 150388 - DNA, 19 bp, Homo sapiens
  siRNA target sequence for PCDHB4 (NM_018938.2,6-24).
gaagctagggagaattcat

SEQ ID NO: 150389 - DNA, 19 bp, Homo sapiens
  siRNA target sequence for PCDHB4 (NM_018938.2,33-51).
gcaagtgttggcctttatt

SEQ ID NO: 150390 - DNA, 19 bp, Homo sapiens
  siRNA target sequence for PCDHB4 (NM_018938.2,76-94).
cgcctcgagcctattcgtt

SEQ ID NO: 150391 - DNA, 19 bp, Homo sapiens
  siRNA target sequence for PCDHB4 (NM_018938.2,77-95).
gcctcgagcctattcgtta

SEQ ID NO: 150392 - DNA, 19 bp, Homo sapiens
  siRNA target sequence for PCDHB4 (NM_018938.2,78-96).
cctcgagcctattcgttat

SEQ ID NO: 150393 - DNA, 19 bp, Homo sapiens
  siRNA target sequence for PCDHB4 (NM_018938.2,79-97).
ctcgagcctattcgttatt

SEQ ID NO: 150394 - DNA, 19 bp, Homo sapiens
  siRNA target sequence for PCDHB4 (NM_018938.2,81-99).
cgagcctattcgttattct

SEQ ID NO: 150395 - DNA, 19 bp, Homo sapiens
  siRNA target sequence for PCDHB4 (NM_018938.2,233-251).
gtcagactggagatttgct

SEQ ID NO: 150396 - DNA, 19 bp, Homo sapiens
  siRNA target sequence for PCDHB4 (NM_018938.2,279-297).
gctctgtggtcctattgaa

SEQ ID NO: 150397 - DNA, 19 bp, Homo sapiens
  siRNA target sequence for PCDHB4 (NM_018938.2,333-351).
gccggtgcaattttttcaa

SEQ ID NO: 150398 - DNA, 19 bp, Homo sapiens
  siRNA target sequence for PCDHB4 (NM_018938.2,434-452).
gccagccgggtactctatt

SEQ ID NO: 150399 - DNA, 19 bp, Homo sapiens
  siRNA target sequence for PCDHB4 (NM_018938.2,435-453).
ccagccgggtactctattt

SEQ ID NO: 150400 - DNA, 19 bp, Homo sapiens
  siRNA target sequence for PCDHB4 (NM_018938.2,446-464).
ctctatttccgttgctaat

SEQ ID NO: 150401 - DNA, 19 bp, Homo sapiens
  siRNA target sequence for PCDHB4 (NM_018938.2,534-552).
cattctcactcgaaatcat

SEQ ID NO: 150402 - DNA, 19 bp, Homo sapiens
  siRNA target sequence for PCDHB4 (NM_018938.2,668-686).
gcacggtcatggttcgaat

SEQ ID NO: 150403 - DNA, 19 bp, Homo sapiens
  siRNA target sequence for PCDHB4 (NM_018938.2,687-705).
cctgatcatggacatcaat

SEQ ID NO: 150404 - DNA, 19 bp, Homo sapiens
  siRNA target sequence for PCDHB4 (NM_018938.2,762-780).
ccccctagactctccaatt

SEQ ID NO: 150405 - DNA, 19 bp, Homo sapiens
  siRNA target sequence for PCDHB4 (NM_018938.2,811-829).
ggaaacttcgggagtgttt

SEQ ID NO: 150406 - DNA, 19 bp, Homo sapiens
  siRNA target sequence for PCDHB4 (NM_018938.2,816-834).
cttcgggagtgtttcttat

SEQ ID NO: 150407 - DNA, 19 bp, Homo sapiens
  siRNA target sequence for PCDHB4 (NM_018938.2,890-908).
cgggagaaatactgttgaa

SEQ ID NO: 150408 - DNA, 19 bp, Homo sapiens
  siRNA target sequence for PCDHB4 (NM_018938.2,1027-1045).
cccccagaacttatcatat

SEQ ID NO: 150409 - DNA, 19 bp, Homo sapiens
  siRNA target sequence for PCDHB4 (NM_018938.2,1030-1048).
ccagaacttatcatatctt

SEQ ID NO: 150410 - DNA, 19 bp, Homo sapiens
  siRNA target sequence for PCDHB4 (NM_018938.2,1059-1077).
ctccatcccagaaaatgct

SEQ ID NO: 150411 - DNA, 19 bp, Homo sapiens
  siRNA target sequence for PCDHB4 (NM_018938.2,1079-1097).
ctgagacggtagtctctat

SEQ ID NO: 150412 - DNA, 19 bp, Homo sapiens
  siRNA target sequence for PCDHB4 (NM_018938.2,1081-1099).
gagacggtagtctctatct

SEQ ID NO: 150413 - DNA, 19 bp, Homo sapiens
  siRNA target sequence for PCDHB4 (NM_018938.2,1098-1116).
cttccgaattcgagataga

SEQ ID NO: 150414 - DNA, 19 bp, Homo sapiens
  siRNA target sequence for PCDHB4 (NM_018938.2,1101-1119).
ccgaattcgagatagagat

SEQ ID NO: 150415 - DNA, 19 bp, Homo sapiens
  siRNA target sequence for PCDHB4 (NM_018938.2,1102-1120).
cgaattcgagatagagatt

SEQ ID NO: 150416 - DNA, 19 bp, Homo sapiens
  siRNA target sequence for PCDHB4 (NM_018938.2,2329-2347).
gacaccgggagggaagtta

SEQ ID NO: 150417 - DNA, 19 bp, Homo sapiens
  siRNA target sequence for PCDHB4 (NM_018938.2,2333-2351).
ccgggagggaagttaagga

SEQ ID NO: 150418 - DNA, 19 bp, Homo sapiens
  siRNA target sequence for PCDHB4 (NM_018938.2,2335-2353).
gggagggaagttaaggaaa

SEQ ID NO: 150419 - DNA, 19 bp, Homo sapiens
  siRNA target sequence for PCDHB4 (NM_018938.2,2357-2375).
ccaagttcagaaatagctt

SEQ ID NO: 150420 - DNA, 19 bp, Homo sapiens
  siRNA target sequence for PCDHB5 (NM_015669.2,220-238).
ggagactgcgctagcaaaa

SEQ ID NO: 150421 - DNA, 19 bp, Homo sapiens
  siRNA target sequence for PCDHB5 (NM_015669.2,221-239).
gagactgcgctagcaaaaa

SEQ ID NO: 150422 - DNA, 19 bp, Homo sapiens
  siRNA target sequence for PCDHB5 (NM_015669.2,245-263).
cagaaaaggcaagttatgt

SEQ ID NO: 150423 - DNA, 19 bp, Homo sapiens
  siRNA target sequence for PCDHB5 (NM_015669.2,298-316).
ctctgaggcagttaggtat

SEQ ID NO: 150424 - DNA, 19 bp, Homo sapiens
  siRNA target sequence for PCDHB5 (NM_015669.2,304-322).
ggcagttaggtattccata

SEQ ID NO: 150425 - DNA, 19 bp, Homo sapiens
  siRNA target sequence for PCDHB5 (NM_015669.2,436-454).
gctcttgcagcttgatata

SEQ ID NO: 150426 - DNA, 19 bp, Homo sapiens
  siRNA target sequence for PCDHB5 (NM_015669.2,437-455).
ctcttgcagcttgatataa

SEQ ID NO: 150427 - DNA, 19 bp, Homo sapiens
  siRNA target sequence for PCDHB5 (NM_015669.2,459-477).
ccggcaatttgcttctata

SEQ ID NO: 150428 - DNA, 19 bp, Homo sapiens
  siRNA target sequence for PCDHB5 (NM_015669.2,460-478).
cggcaatttgcttctatat

SEQ ID NO: 150429 - DNA, 19 bp, Homo sapiens
  siRNA target sequence for PCDHB5 (NM_015669.2,469-487).
gcttctatatgaaaaacta

SEQ ID NO: 150430 - DNA, 19 bp, Homo sapiens
  siRNA target sequence for PCDHB5 (NM_015669.2,578-596).
ctgcagctcacagatataa

SEQ ID NO: 150431 - DNA, 19 bp, Homo sapiens
  siRNA target sequence for PCDHB5 (NM_015669.2,580-598).
gcagctcacagatataaat

SEQ ID NO: 150432 - DNA, 19 bp, Homo sapiens
  siRNA target sequence for PCDHB5 (NM_015669.2,733-751).
cagcccaaattcacacttt

SEQ ID NO: 150433 - DNA, 19 bp, Homo sapiens
  siRNA target sequence for PCDHB5 (NM_015669.2,735-753).
gcccaaattcacactttca

SEQ ID NO: 150434 - DNA, 19 bp, Homo sapiens
  siRNA target sequence for PCDHB5 (NM_015669.2,770-788).
cgcggagatggcagaaaat

SEQ ID NO: 150435 - DNA, 19 bp, Homo sapiens
  siRNA target sequence for PCDHB5 (NM_015669.2,883-901).
gtccgggaccaccacaatt

SEQ ID NO: 150436 - DNA, 19 bp, Homo sapiens
  siRNA target sequence for PCDHB5 (NM_015669.2,903-921).
gcattgtcgtcttggataa

SEQ ID NO: 150437 - DNA, 19 bp, Homo sapiens
  siRNA target sequence for PCDHB5 (NM_015669.2,904-922).
cattgtcgtcttggataat

SEQ ID NO: 150438 - DNA, 19 bp, Homo sapiens
  siRNA target sequence for PCDHB5 (NM_015669.2,935-953).
cccgaatttttacaatcat

SEQ ID NO: 150439 - DNA, 19 bp, Homo sapiens
  siRNA target sequence for PCDHB5 (NM_015669.2,974-992).
gagaacagcccccttaact

SEQ ID NO: 150440 - DNA, 19 bp, Homo sapiens
  siRNA target sequence for PCDHB5 (NM_015669.2,982-1000).
cccccttaactccttagtt

SEQ ID NO: 150441 - DNA, 19 bp, Homo sapiens
  siRNA target sequence for PCDHB5 (NM_015669.2,984-1002).
cccttaactccttagttgt

SEQ ID NO: 150442 - DNA, 19 bp, Homo sapiens
  siRNA target sequence for PCDHB5 (NM_015669.2,1009-1027).
ctccgctcgagatttagat

SEQ ID NO: 150443 - DNA, 19 bp, Homo sapiens
  siRNA target sequence for PCDHB5 (NM_015669.2,1044-1062).
gtgtagcctatgctctatt

SEQ ID NO: 150444 - DNA, 19 bp, Homo sapiens
  siRNA target sequence for PCDHB5 (NM_015669.2,1141-1159).
cgaggcaactccatattat

SEQ ID NO: 150445 - DNA, 19 bp, Homo sapiens
  siRNA target sequence for PCDHB5 (NM_015669.2,1142-1160).
gaggcaactccatattata

SEQ ID NO: 150446 - DNA, 19 bp, Homo sapiens
  siRNA target sequence for PCDHB5 (NM_015669.2,1146-1164).
caactccatattataacgt

SEQ ID NO: 150447 - DNA, 19 bp, Homo sapiens
  siRNA target sequence for PCDHB5 (NM_015669.2,1342-1360).
ggacaacggtaggatgatt

SEQ ID NO: 150448 - DNA, 19 bp, Homo sapiens
  siRNA target sequence for PCDHB5 (NM_015669.2,2518-2536).
gccgattattcctaacctt

SEQ ID NO: 150449 - DNA, 19 bp, Homo sapiens
  siRNA target sequence for PCDHB5 (NM_015669.2,2543-2561).
cagggcgctggtgaagaaa

SEQ ID NO: 150450 - DNA, 19 bp, Homo sapiens
  siRNA target sequence for PCDHB5 (NM_015669.2,2545-2563).
gggcgctggtgaagaaata

SEQ ID NO: 150451 - DNA, 19 bp, Homo sapiens
  siRNA target sequence for PCDHB5 (NM_015669.2,2574-2592).
ctgccttccggaatagctt

SEQ ID NO: 150452 - DNA, 19 bp, Homo sapiens
  siRNA target sequence for PCDHB6 (NM_018939.2,11-29).
ctaaagtacagaacaagaa

SEQ ID NO: 150453 - DNA, 19 bp, Homo sapiens
  siRNA target sequence for PCDHB6 (NM_018939.2,66-84).
gggagaggtgggttctgaa

SEQ ID NO: 150454 - DNA, 19 bp, Homo sapiens
  siRNA target sequence for PCDHB6 (NM_018939.2,72-90).
ggtgggttctgaatcgatt

SEQ ID NO: 150455 - DNA, 19 bp, Homo sapiens
  siRNA target sequence for PCDHB6 (NM_018939.2,76-94).
ggttctgaatcgattcagt

SEQ ID NO: 150456 - DNA, 19 bp, Homo sapiens
  siRNA target sequence for PCDHB6 (NM_018939.2,77-95).
gttctgaatcgattcagta

SEQ ID NO: 150457 - DNA, 19 bp, Homo sapiens
  siRNA target sequence for PCDHB6 (NM_018939.2,185-203).
gcgctcgggttgttttcaa

SEQ ID NO: 150458 - DNA, 19 bp, Homo sapiens
  siRNA target sequence for PCDHB6 (NM_018939.2,186-204).
cgctcgggttgttttcaaa

SEQ ID NO: 150459 - DNA, 19 bp, Homo sapiens
  siRNA target sequence for PCDHB6 (NM_018939.2,233-251).
cacagacccatgatttact

SEQ ID NO: 150460 - DNA, 19 bp, Homo sapiens
  siRNA target sequence for PCDHB6 (NM_018939.2,357-375).
cttgcgagtcagagatata

SEQ ID NO: 150461 - DNA, 19 bp, Homo sapiens
  siRNA target sequence for PCDHB6 (NM_018939.2,438-456).
gccaggaaagatatttcct

SEQ ID NO: 150462 - DNA, 19 bp, Homo sapiens
  siRNA target sequence for PCDHB6 (NM_018939.2,459-477).
gaaaatggcacacgattta

SEQ ID NO: 150463 - DNA, 19 bp, Homo sapiens
  siRNA target sequence for PCDHB6 (NM_018939.2,493-511).
ggccttcagaggtacacaa

SEQ ID NO: 150464 - DNA, 19 bp, Homo sapiens
  siRNA target sequence for PCDHB6 (NM_018939.2,665-683).
cagggacctccgagattca

SEQ ID NO: 150465 - DNA, 19 bp, Homo sapiens
  siRNA target sequence for PCDHB6 (NM_018939.2,667-685).
gggacctccgagattcaga

SEQ ID NO: 150466 - DNA, 19 bp, Homo sapiens
  siRNA target sequence for PCDHB6 (NM_018939.2,764-782).
ccctcggctctctggttat

SEQ ID NO: 150467 - DNA, 19 bp, Homo sapiens
  siRNA target sequence for PCDHB6 (NM_018939.2,765-783).
cctcggctctctggttatt

SEQ ID NO: 150468 - DNA, 19 bp, Homo sapiens
  siRNA target sequence for PCDHB6 (NM_018939.2,766-784).
ctcggctctctggttatta

SEQ ID NO: 150469 - DNA, 19 bp, Homo sapiens
  siRNA target sequence for PCDHB6 (NM_018939.2,811-829).
ggatcgtttgggaaggtat

SEQ ID NO: 150470 - DNA, 19 bp, Homo sapiens
  siRNA target sequence for PCDHB6 (NM_018939.2,815-833).
cgtttgggaaggtatctta

SEQ ID NO: 150471 - DNA, 19 bp, Homo sapiens
  siRNA target sequence for PCDHB6 (NM_018939.2,858-876).
caaccaacccttcgaaata

SEQ ID NO: 150472 - DNA, 19 bp, Homo sapiens
  siRNA target sequence for PCDHB6 (NM_018939.2,935-953).
cttatgacgtggatgttga

SEQ ID NO: 150473 - DNA, 19 bp, Homo sapiens
  siRNA target sequence for PCDHB6 (NM_018939.2,1121-1139).
gacataaccaacaggttat

SEQ ID NO: 150474 - DNA, 19 bp, Homo sapiens
  siRNA target sequence for PCDHB6 (NM_018939.2,1129-1147).
caacaggttatttgttcaa

SEQ ID NO: 150475 - DNA, 19 bp, Homo sapiens
  siRNA target sequence for PCDHB6 (NM_018939.2,1135-1153).
gttatttgttcaatagaga

SEQ ID NO: 150476 - DNA, 19 bp, Homo sapiens
  siRNA target sequence for PCDHB6 (NM_018939.2,2353-2371).
cccacctctcggaatagct

SEQ ID NO: 150477 - DNA, 19 bp, Homo sapiens
  siRNA target sequence for PCDHB7 (NM_018940.2,257-275).
ccgaaccgcttcggtattt

SEQ ID NO: 150478 - DNA, 19 bp, Homo sapiens
  siRNA target sequence for PCDHB7 (NM_018940.2,258-276).
cgaaccgcttcggtatttt

SEQ ID NO: 150479 - DNA, 19 bp, Homo sapiens
  siRNA target sequence for PCDHB7 (NM_018940.2,296-314).
gaggcacctttcttaccaa

SEQ ID NO: 150480 - DNA, 19 bp, Homo sapiens
  siRNA target sequence for PCDHB7 (NM_018940.2,411-429).
gcttactggtgatctactt

SEQ ID NO: 150481 - DNA, 19 bp, Homo sapiens
  siRNA target sequence for PCDHB7 (NM_018940.2,416-434).
ctggtgatctacttctaaa

SEQ ID NO: 150482 - DNA, 19 bp, Homo sapiens
  siRNA target sequence for PCDHB7 (NM_018940.2,421-439).
gatctacttctaaatgaga

SEQ ID NO: 150483 - DNA, 19 bp, Homo sapiens
  siRNA target sequence for PCDHB7 (NM_018940.2,495-513).
gttgttattggaaaaacct

SEQ ID NO: 150484 - DNA, 19 bp, Homo sapiens
  siRNA target sequence for PCDHB7 (NM_018940.2,504-522).
ggaaaaaccttttcagatt

SEQ ID NO: 150485 - DNA, 19 bp, Homo sapiens
  siRNA target sequence for PCDHB7 (NM_018940.2,519-537).
gattttccgtgctgaacta

SEQ ID NO: 150486 - DNA, 19 bp, Homo sapiens
  siRNA target sequence for PCDHB7 (NM_018940.2,639-657).
gagtgcacaggattcagat

SEQ ID NO: 150487 - DNA, 19 bp, Homo sapiens
  siRNA target sequence for PCDHB7 (NM_018940.2,662-680).
gaaccaacagcctgagtaa

SEQ ID NO: 150488 - DNA, 19 bp, Homo sapiens
  siRNA target sequence for PCDHB7 (NM_018940.2,665-683).
ccaacagcctgagtaacta

SEQ ID NO: 150489 - DNA, 19 bp, Homo sapiens
  siRNA target sequence for PCDHB7 (NM_018940.2,709-727).
catattaatgtccatgata

SEQ ID NO: 150490 - DNA, 19 bp, Homo sapiens
  siRNA target sequence for PCDHB7 (NM_018940.2,728-746).
gcggggaggggaatatcta

SEQ ID NO: 150491 - DNA, 19 bp, Homo sapiens
  siRNA target sequence for PCDHB7 (NM_018940.2,729-747).
cggggaggggaatatctat

SEQ ID NO: 150492 - DNA, 19 bp, Homo sapiens
  siRNA target sequence for PCDHB7 (NM_018940.2,750-768).
cgaattggtgctgaatcaa

SEQ ID NO: 150493 - DNA, 19 bp, Homo sapiens
  siRNA target sequence for PCDHB7 (NM_018940.2,825-843).
cggctctcctccaagatca

SEQ ID NO: 150494 - DNA, 19 bp, Homo sapiens
  siRNA target sequence for PCDHB7 (NM_018940.2,918-936).
ggtgcaggtgcccgaaaat

SEQ ID NO: 150495 - DNA, 19 bp, Homo sapiens
  siRNA target sequence for PCDHB7 (NM_018940.2,987-1005).
cggaagtaatggggaaata

SEQ ID NO: 150496 - DNA, 19 bp, Homo sapiens
  siRNA target sequence for PCDHB7 (NM_018940.2,998-1016).
gggaaatagcctatgcatt

SEQ ID NO: 150497 - DNA, 19 bp, Homo sapiens
  siRNA target sequence for PCDHB7 (NM_018940.2,999-1017).
ggaaatagcctatgcattt

SEQ ID NO: 150498 - DNA, 19 bp, Homo sapiens
  siRNA target sequence for PCDHB7 (NM_018940.2,1019-1037).
cttacgccactgaaagaat

SEQ ID NO: 150499 - DNA, 19 bp, Homo sapiens
  siRNA target sequence for PCDHB7 (NM_018940.2,1067-1085).
ctggcagtcttcatcttaa

SEQ ID NO: 150500 - DNA, 19 bp, Homo sapiens
  siRNA target sequence for PCDHB7 (NM_018940.2,1098-1116).
ctatgaggcaattcaaact

SEQ ID NO: 150501 - DNA, 19 bp, Homo sapiens
  siRNA target sequence for PCDHB7 (NM_018940.2,1102-1120).
gaggcaattcaaacttaca

SEQ ID NO: 150502 - DNA, 19 bp, Homo sapiens
  siRNA target sequence for PCDHB7 (NM_018940.2,1104-1122).
ggcaattcaaacttacaca

SEQ ID NO: 150503 - DNA, 19 bp, Homo sapiens
  siRNA target sequence for PCDHB7 (NM_018940.2,1105-1123).
gcaattcaaacttacacat

SEQ ID NO: 150504 - DNA, 19 bp, Homo sapiens
  siRNA target sequence for PCDHB7 (NM_018940.2,1166-1184).
gcactgtagtggttgatgt

SEQ ID NO: 150505 - DNA, 19 bp, Homo sapiens
  siRNA target sequence for PCDHB7 (NM_018940.2,1216-1234).
ctcctgtcttcacttacta

SEQ ID NO: 150506 - DNA, 19 bp, Homo sapiens
  siRNA target sequence for PCDHB7 (NM_018940.2,1232-1250).
ctagcccaattgcagaaaa

SEQ ID NO: 150507 - DNA, 19 bp, Homo sapiens
  siRNA target sequence for PCDHB7 (NM_018940.2,1260-1278).
gacagtcgtggctgttttt

SEQ ID NO: 150508 - DNA, 19 bp, Homo sapiens
  siRNA target sequence for PCDHB7 (NM_018940.2,1357-1375).
ccatctgtcgaaaacttct

SEQ ID NO: 150509 - DNA, 19 bp, Homo sapiens
  siRNA target sequence for PCDHB7 (NM_018940.2,1358-1376).
catctgtcgaaaacttcta

SEQ ID NO: 150510 - DNA, 19 bp, Homo sapiens
  siRNA target sequence for PCDHB8 (NM_019120.2,946-964).
gaggacagtccaataagct

SEQ ID NO: 150511 - DNA, 19 bp, Homo sapiens
  siRNA target sequence for PCDHB8 (NM_019120.2,1061-1079).
cttttaaggtcgatttctt

SEQ ID NO: 150512 - DNA, 19 bp, Homo sapiens
  siRNA target sequence for PCDHB8 (NM_019120.2,2418-2436).
gagcctgtctcagaactat

SEQ ID NO: 150513 - DNA, 19 bp, Homo sapiens
  siRNA target sequence for PCDHB8 (NM_019120.2,2495-2513).
cagtattacctaatattca

SEQ ID NO: 150514 - DNA, 19 bp, Homo sapiens
  siRNA target sequence for PCDHB8 (NM_019120.2,2533-2551).
gaaatggaacaaaactcta

SEQ ID NO: 150515 - DNA, 19 bp, Homo sapiens
  siRNA target sequence for PCDHB8 (NM_019120.2,2542-2560).
caaaactctaactttagga

SEQ ID NO: 150516 - DNA, 19 bp, Homo sapiens
  siRNA target sequence for PCDHB9 (NM_019119.3,394-412).
gtgtttcggcacaaagaga

SEQ ID NO: 150517 - DNA, 19 bp, Homo sapiens
  siRNA target sequence for PCDHB9 (NM_019119.3,411-429).
gatggtcttaaaaatatca

SEQ ID NO: 150518 - DNA, 19 bp, Homo sapiens
  siRNA target sequence for PCDHB9 (NM_019119.3,488-506).
gtcataacagtatccaaaa

SEQ ID NO: 150519 - DNA, 19 bp, Homo sapiens
  siRNA target sequence for PCDHB9 (NM_019119.3,767-785).
cagtagggtcccttattgt

SEQ ID NO: 150520 - DNA, 19 bp, Homo sapiens
  siRNA target sequence for PCDHB9 (NM_019119.3,769-787).
gtagggtcccttattgtta

SEQ ID NO: 150521 - DNA, 19 bp, Homo sapiens
  siRNA target sequence for PCDHB9 (NM_019119.3,1140-1158).
gacaatttgctatgttcaa

SEQ ID NO: 150522 - DNA, 19 bp, Homo sapiens
  siRNA target sequence for PCDHB9 (NM_019119.3,2360-2378).
ctactctccccaatagctt

SEQ ID NO: 150523 - DNA, 19 bp, Homo sapiens
  siRNA target sequence for PCDHGC3 (NM_002588.2,159-177).
gggtagtgggagttttgct

SEQ ID NO: 150524 - DNA, 19 bp, Homo sapiens
  siRNA target sequence for PCDHGC3 (NM_002588.2,200-218).
gcttccacggtcattcact

SEQ ID NO: 150525 - DNA, 19 bp, Homo sapiens
  siRNA target sequence for PCDHGC3 (NM_002588.2,201-219).
cttccacggtcattcacta

SEQ ID NO: 150526 - DNA, 19 bp, Homo sapiens
  siRNA target sequence for PCDHGC3 (NM_002588.2,207-225).
cggtcattcactatgagat

SEQ ID NO: 150527 - DNA, 19 bp, Homo sapiens
  siRNA target sequence for PCDHGC3 (NM_002588.2,268-286).
cgcgaaccttggtttggat

SEQ ID NO: 150528 - DNA, 19 bp, Homo sapiens
  siRNA target sequence for PCDHGC3 (NM_002588.2,324-342).
ctggagctagccgaagatt

SEQ ID NO: 150529 - DNA, 19 bp, Homo sapiens
  siRNA target sequence for PCDHGC3 (NM_002588.2,326-344).
ggagctagccgaagattct

SEQ ID NO: 150530 - DNA, 19 bp, Homo sapiens
  siRNA target sequence for PCDHGC3 (NM_002588.2,330-348).
ctagccgaagattctttga

SEQ ID NO: 150531 - DNA, 19 bp, Homo sapiens
  siRNA target sequence for PCDHGC3 (NM_002588.2,516-534).
ctttccctacccaggaaat

SEQ ID NO: 150532 - DNA, 19 bp, Homo sapiens
  siRNA target sequence for PCDHGC3 (NM_002588.2,612-630).
gcaactctttacaaaccta

SEQ ID NO: 150533 - DNA, 19 bp, Homo sapiens
  siRNA target sequence for PCDHGC3 (NM_002588.2,792-810).
ccagcctgcctattcacat

SEQ ID NO: 150534 - DNA, 19 bp, Homo sapiens
  siRNA target sequence for PCDHGC3 (NM_002588.2,795-813).
gcctgcctattcacatcaa

SEQ ID NO: 150535 - DNA, 19 bp, Homo sapiens
  siRNA target sequence for PCDHGC3 (NM_002588.2,894-912).
gcacgcgcgtggtacaagt

SEQ ID NO: 150536 - DNA, 19 bp, Homo sapiens
  siRNA target sequence for PCDHGC3 (NM_002588.2,936-954).
gccccaacggtgaaattat

SEQ ID NO: 150537 - DNA, 19 bp, Homo sapiens
  siRNA target sequence for PCDHGC3 (NM_002588.2,938-956).
cccaacggtgaaattattt

SEQ ID NO: 150538 - DNA, 19 bp, Homo sapiens
  siRNA target sequence for PCDHGC3 (NM_002588.2,939-957).
ccaacggtgaaattattta

SEQ ID NO: 150539 - DNA, 19 bp, Homo sapiens
  siRNA target sequence for PCDHGC3 (NM_002588.2,1107-1125).
ccgaaggagcacattgcaa

SEQ ID NO: 150540 - DNA, 19 bp, Homo sapiens
  siRNA target sequence for PCDHGC3 (NM_002588.2,1108-1126).
cgaaggagcacattgcaaa

SEQ ID NO: 150541 - DNA, 19 bp, Homo sapiens
  siRNA target sequence for PCDHGC3 (NM_002588.2,1301-1319).
cctttcagccttacttctt

SEQ ID NO: 150542 - DNA, 19 bp, Homo sapiens
  siRNA target sequence for PCDHGC3 (NM_002588.2,1317-1335).
cttccctcaagaattactt

SEQ ID NO: 150543 - DNA, 19 bp, Homo sapiens
  siRNA target sequence for PCDHGC3 (NM_002588.2,1365-1383).
gggagactgtgccagaata

SEQ ID NO: 150544 - DNA, 19 bp, Homo sapiens
  siRNA target sequence for PCDHGC3 (NM_002588.2,1423-1441).
cctctcagcccttacaata

SEQ ID NO: 150545 - DNA, 19 bp, Homo sapiens
  siRNA target sequence for PCDHGC3 (NM_002588.2,1437-1455).
caatagtgcgtgttcaagt

SEQ ID NO: 150546 - DNA, 19 bp, Homo sapiens
  siRNA target sequence for PCDHGC3 (NM_002588.2,1494-1512).
cttcctacgacgtttacat

SEQ ID NO: 150547 - DNA, 19 bp, Homo sapiens
  siRNA target sequence for PCDHGC3 (NM_002588.2,1497-1515).
cctacgacgtttacattga

SEQ ID NO: 150548 - DNA, 19 bp, Homo sapiens
  siRNA target sequence for PCDHGC3 (NM_002588.2,1498-1516).
ctacgacgtttacattgaa

SEQ ID NO: 150549 - DNA, 19 bp, Homo sapiens
  siRNA target sequence for PCDHGC3 (NM_002588.2,1533-1551).
gggctccaatactaaacct

SEQ ID NO: 150550 - DNA, 19 bp, Homo sapiens
  siRNA target sequence for PCDHGC3 (NM_002588.2,1534-1552).
ggctccaatactaaaccta

SEQ ID NO: 150551 - DNA, 19 bp, Homo sapiens
  siRNA target sequence for PCDHGC3 (NM_002588.2,1535-1553).
gctccaatactaaacctaa

SEQ ID NO: 150552 - DNA, 19 bp, Homo sapiens
  siRNA target sequence for PCDHGC3 (NM_002588.2,1626-1644).
ggctagtgggtcgctattt

SEQ ID NO: 150553 - DNA, 19 bp, Homo sapiens
  siRNA target sequence for PCDHGC3 (NM_002588.2,1628-1646).
ctagtgggtcgctatttca

SEQ ID NO: 150554 - DNA, 19 bp, Homo sapiens
  siRNA target sequence for PCDHGC3 (NM_002588.2,1631-1649).
gtgggtcgctatttcacaa

SEQ ID NO: 150555 - DNA, 19 bp, Homo sapiens
  siRNA target sequence for PCDHGC3 (NM_002588.2,1633-1651).
gggtcgctatttcacaata

SEQ ID NO: 150556 - DNA, 19 bp, Homo sapiens
  siRNA target sequence for PCDHGC3 (NM_002588.2,1634-1652).
ggtcgctatttcacaataa

SEQ ID NO: 150557 - DNA, 19 bp, Homo sapiens
  siRNA target sequence for PCDHGC3 (NM_002588.2,1639-1657).
ctatttcacaataaatcgt

SEQ ID NO: 150558 - DNA, 19 bp, Homo sapiens
  siRNA target sequence for PCDHGC3 (NM_002588.2,1645-1663).
cacaataaatcgtgacaat

SEQ ID NO: 150559 - DNA, 19 bp, Homo sapiens
  siRNA target sequence for PCDHGC3 (NM_002588.2,1677-1695).
ccttagtgcccctagacta

SEQ ID NO: 150560 - DNA, 19 bp, Homo sapiens
  siRNA target sequence for PCDHGC3 (NM_002588.2,1678-1696).
cttagtgcccctagactat

SEQ ID NO: 150561 - DNA, 19 bp, Homo sapiens
  siRNA target sequence for PCDHGC3 (NM_002588.2,1751-1769).
gtcctagccaccaacatca

SEQ ID NO: 150562 - DNA, 19 bp, Homo sapiens
  siRNA target sequence for PCDHGC3 (NM_002588.2,1784-1802).
gtcactgatcgcaatgaca

SEQ ID NO: 150563 - DNA, 19 bp, Homo sapiens
  siRNA target sequence for PCDHGC3 (NM_002588.2,1786-1804).
cactgatcgcaatgacaat

SEQ ID NO: 150564 - DNA, 19 bp, Homo sapiens
  siRNA target sequence for PCDHGC3 (NM_002588.2,1980-1998).
ggctgcacactggtcaaat

SEQ ID NO: 150565 - DNA, 19 bp, Homo sapiens
  siRNA target sequence for PCDHGC3 (NM_002588.2,1984-2002).
gcacactggtcaaatcagt

SEQ ID NO: 150566 - DNA, 19 bp, Homo sapiens
  siRNA target sequence for PCDHGC3 (NM_002588.2,1985-2003).
cacactggtcaaatcagta

SEQ ID NO: 150567 - DNA, 19 bp, Homo sapiens
  siRNA target sequence for PCDHGC3 (NM_002588.2,2043-2061).
ctctcacggtcttgatcaa

SEQ ID NO: 150568 - DNA, 19 bp, Homo sapiens
  siRNA target sequence for PCDHGC3 (NM_002588.2,2049-2067).
cggtcttgatcaaagacaa

SEQ ID NO: 150569 - DNA, 19 bp, Homo sapiens
  siRNA target sequence for PCDHGC3 (NM_002588.2,2050-2068).
ggtcttgatcaaagacaat

SEQ ID NO: 150570 - DNA, 19 bp, Homo sapiens
  siRNA target sequence for PCDHGC3 (NM_002588.2,2238-2256).
cagtgttcggagtaatcat

SEQ ID NO: 150571 - DNA, 19 bp, Homo sapiens
  siRNA target sequence for PCDHGC3 (NM_002588.2,2240-2258).
gtgttcggagtaatcatat

SEQ ID NO: 150572 - DNA, 19 bp, Homo sapiens
  siRNA target sequence for PCDHGC3 (NM_002588.2,2371-2389).
gtcgccgcacctttaccat

SEQ ID NO: 150573 - DNA, 19 bp, Homo sapiens
  siRNA target sequence for PCDHGC3 (NM_002588.2,2422-2440).
cgacccgctgctgaagaaa

SEQ ID NO: 150574 - DNA, 19 bp, Homo sapiens
  siRNA target sequence for PCDHGC3 (NM_002588.2,2487-2505).
gctgtgatccggtgttcta

SEQ ID NO: 150575 - DNA, 19 bp, Homo sapiens
  siRNA target sequence for PCDHGC3 (NM_002588.2,2488-2506).
ctgtgatccggtgttctat

SEQ ID NO: 150576 - DNA, 19 bp, Homo sapiens
  siRNA target sequence for PCDHGC3 (NM_002588.2,2560-2578).
cacggactggcgtttctct

SEQ ID NO: 150577 - DNA, 19 bp, Homo sapiens
  siRNA target sequence for PCDHGC3 (NM_002588.2,2789-2807).
gactaccgccagaatgtct

SEQ ID NO: 150578 - DNA, 19 bp, Homo sapiens
  siRNA target sequence for PCDHGC3 (NM_032402.1,2535-2553).
ctcccggacaggtaaggtt

SEQ ID NO: 150579 - DNA, 19 bp, Homo sapiens
  siRNA target sequence for PCDHGC3 (NM_032402.1,2537-2555).
cccggacaggtaaggttta

SEQ ID NO: 150580 - DNA, 19 bp, Homo sapiens
  siRNA target sequence for PCDHGC3 (NM_032402.1,2540-2558).
ggacaggtaaggtttagca

SEQ ID NO: 150581 - DNA, 19 bp, Homo sapiens
  siRNA target sequence for PCDHGC3 (NM_032402.1,2541-2559).
gacaggtaaggtttagcaa

SEQ ID NO: 150582 - DNA, 19 bp, Homo sapiens
  siRNA target sequence for PCDHGC3 (NM_032402.1,2562-2580).
catgcttgaccctgttagt

SEQ ID NO: 150583 - DNA, 19 bp, Homo sapiens
  siRNA target sequence for PCDHGC3 (NM_032402.1,2569-2587).
gaccctgttagtgcttttt

SEQ ID NO: 150584 - DNA, 19 bp, Homo sapiens
  siRNA target sequence for PCDHGC3 (NM_032402.1,2642-2660).
gttttcctggtgatgcatt

SEQ ID NO: 150585 - DNA, 19 bp, Homo sapiens
  siRNA target sequence for PCDHGC3 (NM_032402.1,2672-2690).
ctggcccttcctagatcaa

SEQ ID NO: 150586 - DNA, 19 bp, Homo sapiens
  siRNA target sequence for PCDHGC3 (NM_032402.1,2675-2693).
gcccttcctagatcaaagt

SEQ ID NO: 150587 - DNA, 19 bp, Homo sapiens
  siRNA target sequence for PDCD6 (NM_013232.2,295-313).
gtcgatcatatccatgttt

SEQ ID NO: 150588 - DNA, 19 bp, Homo sapiens
  siRNA target sequence for PDCD6 (NM_013232.2,297-315).
cgatcatatccatgtttga

SEQ ID NO: 150589 - DNA, 19 bp, Homo sapiens
  siRNA target sequence for PDCD6 (NM_013232.2,354-372).
cgggtgtgtggaagtacat

SEQ ID NO: 150590 - DNA, 19 bp, Homo sapiens
  siRNA target sequence for PDCD6 (NM_013232.2,356-374).
ggtgtgtggaagtacatca

SEQ ID NO: 150591 - DNA, 19 bp, Homo sapiens
  siRNA target sequence for PDCD6 (NM_013232.2,488-506).
cacgacatcctcattcgaa

SEQ ID NO: 150592 - DNA, 19 bp, Homo sapiens
  siRNA target sequence for PDCD6 (NM_013232.2,571-589).
gcagaggttgacggatata

SEQ ID NO: 150593 - DNA, 19 bp, Homo sapiens
  siRNA target sequence for PDCD6 (NM_013232.2,572-590).
cagaggttgacggatatat

SEQ ID NO: 150594 - DNA, 19 bp, Homo sapiens
  siRNA target sequence for PDCD6 (NM_013232.2,577-595).
gttgacggatatattcaga

SEQ ID NO: 150595 - DNA, 19 bp, Homo sapiens
  siRNA target sequence for PDCD6 (NM_013232.2,647-665).
ctgtccatggtcttcagta

SEQ ID NO: 150596 - DNA, 19 bp, Homo sapiens
  siRNA target sequence for PDCD6 (NM_013232.2,652-670).
catggtcttcagtatcgta

SEQ ID NO: 150597 - DNA, 19 bp, Homo sapiens
  siRNA target sequence for PEF (NM_012392.1,90-108).
ccctggaccccccaatagt

SEQ ID NO: 150598 - DNA, 19 bp, Homo sapiens
  siRNA target sequence for PEF (NM_012392.1,397-415).
gatcacagtggctatatct

SEQ ID NO: 150599 - DNA, 19 bp, Homo sapiens
  siRNA target sequence for PEF (NM_012392.1,436-454).
gccctggtcaactgcaatt

SEQ ID NO: 150600 - DNA, 19 bp, Homo sapiens
  siRNA target sequence for PEF (NM_012392.1,439-457).
ctggtcaactgcaattggt

SEQ ID NO: 150601 - DNA, 19 bp, Homo sapiens
  siRNA target sequence for PEF (NM_012392.1,449-467).
gcaattggtcttcattcaa

SEQ ID NO: 150602 - DNA, 19 bp, Homo sapiens
  siRNA target sequence for PEF (NM_012392.1,472-490).
gagacctgcctcatgatga

SEQ ID NO: 150603 - DNA, 19 bp, Homo sapiens
  siRNA target sequence for PEF (NM_012392.1,476-494).
cctgcctcatgatgataaa

SEQ ID NO: 150604 - DNA, 19 bp, Homo sapiens
  siRNA target sequence for PEF (NM_012392.1,481-499).
ctcatgatgataaacatgt

SEQ ID NO: 150605 - DNA, 19 bp, Homo sapiens
  siRNA target sequence for PEF (NM_012392.1,515-533).
caggccgcatcgatgtcta

SEQ ID NO: 150606 - DNA, 19 bp, Homo sapiens
  siRNA target sequence for PEF (NM_012392.1,598-616).
gaccgctcgggctccatta

SEQ ID NO: 150607 - DNA, 19 bp, Homo sapiens
  siRNA target sequence for PEF (NM_012392.1,601-619).
cgctcgggctccattagct

SEQ ID NO: 150608 - DNA, 19 bp, Homo sapiens
  siRNA target sequence for PEF (NM_012392.1,602-620).
gctcgggctccattagcta

SEQ ID NO: 150609 - DNA, 19 bp, Homo sapiens
  siRNA target sequence for PH-4 (NM_017732.2,793-811).
cggcttcctgactgatgaa

SEQ ID NO: 150610 - DNA, 19 bp, Homo sapiens
  siRNA target sequence for PH-4 (NM_017732.2,871-889).
gcctactgaagagtatgaa

SEQ ID NO: 150611 - DNA, 19 bp, Homo sapiens
  siRNA target sequence for PH-4 (NM_017732.2,1287-1305).
cgctgcaggttgttcgata

SEQ ID NO: 150612 - DNA, 19 bp, Homo sapiens
  siRNA target sequence for PH-4 (NM_017732.2,1362-1380).
ccatctgctcccataccaa

SEQ ID NO: 150613 - DNA, 19 bp, Homo sapiens
  siRNA target sequence for PH-4 (NM_017732.2,1414-1432).
ctcctgccggcaagtatct

SEQ ID NO: 150614 - DNA, 19 bp, Homo sapiens
  siRNA target sequence for PH-4 (NM_017732.2,1536-1554).
gggttatcccggttagtga

SEQ ID NO: 150615 - DNA, 19 bp, Homo sapiens
  siRNA target sequence for PH-4 (NM_017732.2,1537-1555).
ggttatcccggttagtgat

SEQ ID NO: 150616 - DNA, 19 bp, Homo sapiens
  siRNA target sequence for PH-4 (NM_017732.2,1563-1581).
cctctccccacaagttgtt

SEQ ID NO: 150617 - DNA, 19 bp, Homo sapiens
  siRNA target sequence for PH-4 (NM_177938.1,1265-1283).
catgacagtgctgttttat

SEQ ID NO: 150618 - DNA, 19 bp, Homo sapiens
  siRNA target sequence for PH-4 (NM_177938.1,1319-1337).
ccctgtagcagataacaga

SEQ ID NO: 150619 - DNA, 19 bp, Homo sapiens
  siRNA target sequence for PH-4 (NM_177938.1,1343-1361).
cgatgaaatgagtctgatt

SEQ ID NO: 150620 - DNA, 19 bp, Homo sapiens
  siRNA target sequence for PH-4 (NM_177938.1,1440-1458).
gcagtcttctggtacaact

SEQ ID NO: 150621 - DNA, 19 bp, Homo sapiens
  siRNA target sequence for PH-4 (NM_177938.1,1441-1459).
cagtcttctggtacaacta

SEQ ID NO: 150622 - DNA, 19 bp, Homo sapiens
  siRNA target sequence for PITPNM2 (NM_020845.1,131-149).
gcatcgcccagctgtacat

SEQ ID NO: 150623 - DNA, 19 bp, Homo sapiens
  siRNA target sequence for PITPNM2 (NM_020845.1,162-180).
gagccgtaacgagacatat

SEQ ID NO: 150624 - DNA, 19 bp, Homo sapiens
  siRNA target sequence for PITPNM2 (NM_020845.1,405-423).
cgacattgaaaccttttat

SEQ ID NO: 150625 - DNA, 19 bp, Homo sapiens
  siRNA target sequence for PITPNM2 (NM_020845.1,495-513).
cttcatcgacattgtcaaa

SEQ ID NO: 150626 - DNA, 19 bp, Homo sapiens
  siRNA target sequence for PITPNM2 (NM_020845.1,520-538).
gtgccccacaacgagtata

SEQ ID NO: 150627 - DNA, 19 bp, Homo sapiens
  siRNA target sequence for PITPNM2 (NM_020845.1,523-541).
ccccacaacgagtataaga

SEQ ID NO: 150628 - DNA, 19 bp, Homo sapiens
  siRNA target sequence for PITPNM2 (NM_020845.1,525-543).
ccacaacgagtataagaca

SEQ ID NO: 150629 - DNA, 19 bp, Homo sapiens
  siRNA target sequence for PITPNM2 (NM_020845.1,605-623).
ggatcgaggagtacaagaa

SEQ ID NO: 150630 - DNA, 19 bp, Homo sapiens
  siRNA target sequence for PITPNM2 (NM_020845.1,635-653).
ccatcatgtgcgcatacaa

SEQ ID NO: 150631 - DNA, 19 bp, Homo sapiens
  siRNA target sequence for PITPNM2 (NM_020845.1,1409-1427).
ccaagaagggcgatgctaa

SEQ ID NO: 150632 - DNA, 19 bp, Homo sapiens
  siRNA target sequence for PITPNM2 (NM_020845.1,1767-1785).
gggcatcctggcatttgat

SEQ ID NO: 150633 - DNA, 19 bp, Homo sapiens
  siRNA target sequence for PITPNM2 (NM_020845.1,1783-1801).
gatgccctgtgctacagta

SEQ ID NO: 150634 - DNA, 19 bp, Homo sapiens
  siRNA target sequence for PITPNM2 (NM_020845.1,2087-2105).
cctacgagctggataccat

SEQ ID NO: 150635 - DNA, 19 bp, Homo sapiens
  siRNA target sequence for PITPNM2 (NM_020845.1,2210-2228).
ccctgggcaggtttgactt

SEQ ID NO: 150636 - DNA, 19 bp, Homo sapiens
  siRNA target sequence for PITPNM2 (NM_020845.1,2211-2229).
cctgggcaggtttgacttt

SEQ ID NO: 150637 - DNA, 19 bp, Homo sapiens
  siRNA target sequence for PITPNM2 (NM_020845.1,3084-3102).
ggccaaccaccggatcaat

SEQ ID NO: 150638 - DNA, 19 bp, Homo sapiens
  siRNA target sequence for PITPNM2 (NM_020845.1,3087-3105).
caaccaccggatcaatgat

SEQ ID NO: 150639 - DNA, 19 bp, Homo sapiens
  siRNA target sequence for PITPNM2 (NM_020845.1,3136-3154).
ctgacgggcaggttcatgt

SEQ ID NO: 150640 - DNA, 19 bp, Homo sapiens
  siRNA target sequence for PITPNM2 (NM_020845.1,3138-3156).
gacgggcaggttcatgtat

SEQ ID NO: 150641 - DNA, 19 bp, Homo sapiens
  siRNA target sequence for PITPNM2 (NM_020845.1,3314-3332).
gtgtctaccctatcaagat

SEQ ID NO: 150642 - DNA, 19 bp, Homo sapiens
  siRNA target sequence for PITPNM3 (NM_031220.1,198-216).
cctggcaccttcgaaatgt

SEQ ID NO: 150643 - DNA, 19 bp, Homo sapiens
  siRNA target sequence for PITPNM3 (NM_031220.1,1240-1258).
ctccagcgtgctaaaggat

SEQ ID NO: 150644 - DNA, 19 bp, Homo sapiens
  siRNA target sequence for PITPNM3 (NM_031220.1,1919-1937).
caggtaatgcgctatgaga

SEQ ID NO: 150645 - DNA, 19 bp, Homo sapiens
  siRNA target sequence for PITPNM3 (NM_031220.1,1929-1947).
gctatgagagcgtgaacat

SEQ ID NO: 150646 - DNA, 19 bp, Homo sapiens
  siRNA target sequence for PITPNM3 (NM_031220.1,1998-2016).
gggagaagtggcttcgtaa

SEQ ID NO: 150647 - DNA, 19 bp, Homo sapiens
  siRNA target sequence for PITPNM3 (NM_031220.1,2037-2055).
ggaatgtcacggctaatca

SEQ ID NO: 150648 - DNA, 19 bp, Homo sapiens
  siRNA target sequence for PITPNM3 (NM_031220.1,2229-2247).
gtggtcgcatcacatacaa

SEQ ID NO: 150649 - DNA, 19 bp, Homo sapiens
  siRNA target sequence for PITPNM3 (NM_031220.1,2232-2250).
gtcgcatcacatacaatgt

SEQ ID NO: 150650 - DNA, 19 bp, Homo sapiens
  siRNA target sequence for PITPNM3 (NM_031220.1,2472-2490).
gctacatgatcctttacat

SEQ ID NO: 150651 - DNA, 19 bp, Homo sapiens
  siRNA target sequence for PITPNM3 (NM_031220.1,2552-2570).
ccacagggcatgatcttct

SEQ ID NO: 150652 - DNA, 19 bp, Homo sapiens
  siRNA target sequence for PITPNM3 (NM_031220.1,2632-2650).
gcaggagtgcttcatcaaa

SEQ ID NO: 150653 - DNA, 19 bp, Homo sapiens
  siRNA target sequence for PITPNM3 (NM_031220.1,2636-2654).
gagtgcttcatcaaaatca

SEQ ID NO: 150654 - DNA, 19 bp, Homo sapiens
  siRNA target sequence for PITPNM3 (NM_031220.1,2825-2843).
cgcccaaagaagaacaact

SEQ ID NO: 150655 - DNA, 19 bp, Homo sapiens
  siRNA target sequence for PKD1-like (NM_024874.3,240-258).
gggagtcaagccaaatcct

SEQ ID NO: 150656 - DNA, 19 bp, Homo sapiens
  siRNA target sequence for PKD1-like (NM_024874.3,311-329).
gaagcctgtacctgtttta

SEQ ID NO: 150657 - DNA, 19 bp, Homo sapiens
  siRNA target sequence for PKD1-like (NM_024874.3,315-333).
cctgtacctgttttatact

SEQ ID NO: 150658 - DNA, 19 bp, Homo sapiens
  siRNA target sequence for PKD1-like (NM_024874.3,316-334).
ctgtacctgttttatactt

SEQ ID NO: 150659 - DNA, 19 bp, Homo sapiens
  siRNA target sequence for PKD1-like (NM_024874.3,390-408).
gcaggggaagacacaattt

SEQ ID NO: 150660 - DNA, 19 bp, Homo sapiens
  siRNA target sequence for PKD1-like (NM_024874.3,505-523).
gcctgccatgtcttttggt

SEQ ID NO: 150661 - DNA, 19 bp, Homo sapiens
  siRNA target sequence for PKD1-like (NM_024874.3,808-826).
gtagttacacctatagtga

SEQ ID NO: 150662 - DNA, 19 bp, Homo sapiens
  siRNA target sequence for PKD1-like (NM_024874.3,832-850).
cattctaaagtgaatgact

SEQ ID NO: 150663 - DNA, 19 bp, Homo sapiens
  siRNA target sequence for PKD1-like (NM_024874.3,841-859).
gtgaatgactccaacgaat

SEQ ID NO: 150664 - DNA, 19 bp, Homo sapiens
  siRNA target sequence for PKD1-like (NM_024874.3,843-861).
gaatgactccaacgaatta

SEQ ID NO: 150665 - DNA, 19 bp, Homo sapiens
  siRNA target sequence for PKD1-like (NM_024874.3,891-909).
ggtccacaaggcgattaca

SEQ ID NO: 150666 - DNA, 19 bp, Homo sapiens
  siRNA target sequence for PKD1-like (NM_024874.3,892-910).
gtccacaaggcgattacaa

SEQ ID NO: 150667 - DNA, 19 bp, Homo sapiens
  siRNA target sequence for PKD1-like (NM_024874.3,894-912).
ccacaaggcgattacaatt

SEQ ID NO: 150668 - DNA, 19 bp, Homo sapiens
  siRNA target sequence for PKD1-like (NM_024874.3,948-966).
gtctggtgggccaaagaat

SEQ ID NO: 150669 - DNA, 19 bp, Homo sapiens
  siRNA target sequence for PKD1-like (NM_024874.3,950-968).
ctggtgggccaaagaatgt

SEQ ID NO: 150670 - DNA, 19 bp, Homo sapiens
  siRNA target sequence for PKD1-like (NM_024874.3,952-970).
ggtgggccaaagaatgtat

SEQ ID NO: 150671 - DNA, 19 bp, Homo sapiens
  siRNA target sequence for PKD1-like (NM_024874.3,1009-1027).
cccagcactcaacaagtaa

SEQ ID NO: 150672 - DNA, 19 bp, Homo sapiens
  siRNA target sequence for PKD1-like (NM_024874.3,1010-1028).
ccagcactcaacaagtaaa
